United States Patent Application Publication US 2021/0199660 A1 - sequence listing, part 18

SEQ ID NO: 247241 - DNA, 120 bp, Artificial Sequence
  ENSG00000122692_45 (sequence is synthesized)
aaacaaaaaaaccaaacttggaatagcaagggctgcccattatttaaccttccacggcaattttaacagtggtattctgttccaagtggttaatattaaatccatgtgtcagtgttggtg

SEQ ID NO: 247242 - DNA, 120 bp, Artificial Sequence
  ENSG00000122692_46 (sequence is synthesized)
gctttcaaccttggctgcgcataatcattttgatgcttaggctacacccagccgagttatacagaatccctggagggtgggacctgatgagtgttttaatgtttcccgggtaattccaat

SEQ ID NO: 247243 - DNA, 120 bp, Artificial Sequence
  ENSG00000122692_47 (sequence is synthesized)
ggtagccaaggttaagaaccagtaccgtacgtacaaaaaagttgagaagctaatttcacgtacagaaaatttgccactgttccaagagcactctcaagcgacataattggcctctactcc

SEQ ID NO: 247244 - DNA, 120 bp, Artificial Sequence
  ENSG00000122692_48 (sequence is synthesized)
tattccctacaagtatgaatgggcaggagaagcatcacagagaaagcagagttagtgctggaacttgtatttttgtggatgatgaccttggttaatgttttttcataggctctgtttcat

SEQ ID NO: 247245 - DNA, 120 bp, Artificial Sequence
  ENSG00000122692_49 (sequence is synthesized)
aggctttgttttttcataggctctccctcattacattgttctgagaattaaatatggctgcttacatagtaatgaagggttcaacagaggctgttagtggtagtaataatacaagctgaa

SEQ ID NO: 247246 - DNA, 120 bp, Artificial Sequence
  ENSG00000122692_50 (sequence is synthesized)
cagaggctgttagtggtagtaataatacaagctgaaaaactacacagacaaacctatcagtttctgcctcttcaggatataactattaggttagtgcaaaagtaattgcggtttttgcca

SEQ ID NO: 247247 - DNA, 120 bp, Artificial Sequence
  ENSG00000122692_51 (sequence is synthesized)
cctaatatgactttcttttagtgttcttaggatttttaattgtaaaacatgtaacaaattttcctaaacaattgtgcaattcagtggcattatttacgatgttacgcaaccactattgta

SEQ ID NO: 247248 - DNA, 120 bp, Artificial Sequence
  ENSG00000122692_52 (sequence is synthesized)
tttccaaaatgtcatcaccctaaacagaagccctgtaacattgtcaattaacttctccttcccttcccctcagcctttggtactgtttctgcctcaatgcatttgtctaagtttagttca

SEQ ID NO: 247249 - DNA, 120 bp, Artificial Sequence
  ENSG00000122692_53 (sequence is synthesized)
tataagtgaaattatacaatacttgtccttttttatctggcttatttcatttagcatgttttaaaggttcatccatgtatcaaacagtaaagtgcttcatatttgggggaagtataaaaa

SEQ ID NO: 247250 - DNA, 120 bp, Artificial Sequence
  ENSG00000122694_0 (sequence is synthesized)
gcagtgcagcgcagccgcggggagcgaggagcgcgcggagccggccatgggcaagtcagcttccaaacagtttcataatgaggtcctgaaggcccacaatgagtaccggcagaagcacgg

SEQ ID NO: 247251 - DNA, 120 bp, Artificial Sequence
  ENSG00000122694_1 (sequence is synthesized)
cgtccccccactgaagctctgcaagaacctcaaccgggaggctcaacagtattctgaggccctggccagcacgaggatcctcaagcacagcccggagtccagccgtggccagtgtgggga

SEQ ID NO: 247252 - DNA, 120 bp, Artificial Sequence
  ENSG00000122694_2 (sequence is synthesized)
gaaccttgcatgggcatcctatgatcagacaggaaaggaggtggctgatagatggtacagtgaaatcaagaactataacttccagcagcctggcttcacctcggggactggacacttcac

SEQ ID NO: 247253 - DNA, 120 bp, Artificial Sequence
  ENSG00000122694_3 (sequence is synthesized)
ggccatggtatggaagaacaccaagaagatgggcgtggggaaggcgtccgcaagtgacgggtcctcctttgtggtggccagatacttcccagcggggaatgttgtcaatgagggcttctt

SEQ ID NO: 247254 - DNA, 120 bp, Artificial Sequence
  ENSG00000122694_4 (sequence is synthesized)
cgaagaaaacgtcctgccgccgaagaagtaacttgttaaatgtaatgggaaggtggcagacttaagaacgtggatatgaagtgcctagaaccaccacaacctggctgtgcgtctgtccct

SEQ ID NO: 247255 - DNA, 120 bp, Artificial Sequence
  ENSG00000122694_5 (sequence is synthesized)
gtgggtgtatgtgcttgtgtgtgtgatgcatgtgagcgtctctggcacacacacttggacatacagttctgtgtgcgctcattcttattacaggagtgagcaaaggaagcatttaccccg

SEQ ID NO: 247256 - DNA, 120 bp, Artificial Sequence
  ENSG00000122694_6 (sequence is synthesized)
atggttacctagaccacgattatttggattggggggaggggggatccgttttttttttttaattttttgttatttctaagcaaacctcttttgtacttttcttacttctaatatccatcc

SEQ ID NO: 247257 - DNA, 120 bp, Artificial Sequence
  ENSG00000122694_7 (sequence is synthesized)
aagattattaaaccctcatttaaatgtgacataaaatacagctttaagcacataaatacaaagcagcttccatcaggaacatggagcaggcagggactccattttacagaattactgaga

SEQ ID NO: 247258 - DNA, 120 bp, Artificial Sequence
  ENSG00000122694_8 (sequence is synthesized)
tttctcagttgtaaaacatgatgtcatcctgcatgcctcctggaattctccaatggggtcgccaaacaacaaatggagaaaaaaagttttacttccttgcattcttctacctttaaatag

SEQ ID NO: 247259 - DNA, 120 bp, Artificial Sequence
  ENSG00000122694_9 (sequence is synthesized)
caaagtaccactaccaccaccacctcttgcccccttccctcttttcttaaacttctggcatttcagagctcagcaggctacccctggtttctggagagttgggctaggcctgaagctccc

SEQ ID NO: 247260 - DNA, 120 bp, Artificial Sequence
  ENSG00000122694_10 (sequence is synthesized)
cctcccccacctctgctaggcagcccaggcctggtctgggagacagcccctcaccctgcctgggctcttggccaagcggccttggatggatgaagtcagagaggtggggtgagggtgagc

SEQ ID NO: 247261 - DNA, 120 bp, Artificial Sequence
  ENSG00000122694_11 (sequence is synthesized)
ttactcagggcccccagaggaagccctcagcctctgccctccccccacacagggcgggagcccaggcctgttcctggcagctgtggctgcagctgtgctcctgctccctcctggaatgtg

SEQ ID NO: 247262 - DNA, 120 bp, Artificial Sequence
  ENSG00000122694_12 (sequence is synthesized)
cgacaagcccaaatgttccggggaggcggccggggcagggggcttagaagtgctaatatggttctgtgttttgcctgaaacgataccaggttcccctgaatagcaactttacaaggtcca

SEQ ID NO: 247263 - DNA, 120 bp, Artificial Sequence
  ENSG00000122694_13 (sequence is synthesized)
tgtgggagggaccaacccagatgccctgctgagtgtccctgaaaccatggcagctccatctgtcaagatggcaggggccggagtgagggggctgctggcttaacagcaggcatctgggca

SEQ ID NO: 247264 - DNA, 120 bp, Artificial Sequence
  ENSG00000122694_14 (sequence is synthesized)
ggccagtcctcaaagcagctcctgaaggtctgtgttgcactgtcaccagtctcaagctatgcctctaatttcaccagggatattgactaagaagacaataaaatctttttctttgtgtaa

SEQ ID NO: 247265 - DNA, 120 bp, Artificial Sequence
  ENSG00000122694_15 (sequence is synthesized)
ctttttgtttatcatggtaaaaatgcatagcataaaatgtattatcttaaccatttttaagtgtacagttctgtagtgttaagtatatttacattgctatgcaacagagctccacaactt

SEQ ID NO: 247266 - DNA, 120 bp, Artificial Sequence
  ENSG00000122694_16 (sequence is synthesized)
tttcatgttgcaaaactgaaactctatacatgttaaacaacacctctgccttttctcctctccactgtagacctgaaatctttgtttttcctattgacaagggcttggtccgtctgttgg

SEQ ID NO: 247267 - DNA, 120 bp, Artificial Sequence
  ENSG00000122694_17 (sequence is synthesized)
ccaggaagtcccgatacttcaggttgtagctccgccctctgccttaatgcctgtccccatgatcagtttccacctccatgtctccccacctctgcctgtcaaccaaaacctcacaaatcc

SEQ ID NO: 247268 - DNA, 120 bp, Artificial Sequence
  ENSG00000122694_18 (sequence is synthesized)
tggggttcagagcccccatatccctgccctgcccacattactctgactggacctcactggacagcctcactgagcccaagttctagagcttgcgccgcgtactctttgtctaagcgtcta

SEQ ID NO: 247269 - DNA, 120 bp, Artificial Sequence
  ENSG00000122694_19 (sequence is synthesized)
cttcctccttctcagaaggcccacggacagctccaccatgcaggtgtgacctgcagttaccttcaccttctgggtctgtagctcccgggtctgcagcccccaaaccccgcaaaggcaagc

SEQ ID NO: 247270 - DNA, 120 bp, Artificial Sequence
  ENSG00000122694_20 (sequence is synthesized)
cctgggtcttctttccctcacgtctcctcagaaattccatgggatttgacttggcccaggagacatgggagatctggctatgagaaaagggactaggactccctgttgcatcatctcctc

SEQ ID NO: 247271 - DNA, 120 bp, Artificial Sequence
  ENSG00000122694_21 (sequence is synthesized)
agtctcgggtgaaaggcagcagagtagaagaaaggcaccagtgaagtttatttggctcacggttctggaggctgggaagtccaagagcatggcattggcatctggcgaggccctcatgct

SEQ ID NO: 247272 - DNA, 120 bp, Artificial Sequence
  ENSG00000122694_22 (sequence is synthesized)
cggccgcatccggggagccctcggcagtcgcggagctgcttcccaggggtgagctctccgggaggcccacggggtggccccgggcgcctccgccctcagctgtcgctccttataaggcgg

SEQ ID NO: 247273 - DNA, 120 bp, Artificial Sequence
  ENSG00000122696_0 (sequence is synthesized)
agtctgcgcctgcgcgggccccggctcgctagccgtcctgcgggacgccggcgctgatgggaaatccagttatcaaaattgactcaagaagagagaacctaacagaacaataacaatgga

SEQ ID NO: 247274 - DNA, 120 bp, Artificial Sequence
  ENSG00000122696_1 (sequence is synthesized)
agaaattgggaacattatcacaaagctatcatcctgccaaactccaggctcagatgtcacaggttaaaaaaagtccttcatgaaaaagaaagatcttaagcagcatgatggattcagaag

SEQ ID NO: 247275 - DNA, 120 bp, Artificial Sequence
  ENSG00000122696_2 (sequence is synthesized)
ctcatgaaaagaggccaccaatactaacatcttcaaaacaagatatatcacctcatattacaaatgttggtgagatgaagcattacttgtgtggctgctgtgcagccttcaacaatgtcg

SEQ ID NO: 247276 - DNA, 120 bp, Artificial Sequence
  ENSG00000122696_3 (sequence is synthesized)
caatcacatttcccattcagaaggtcctctttcgacaacagctgtatggcatcaaaacccgggatgcaatacttcagttgagaagggatggatttcgaaatttgtatcgtggaatccttc

SEQ ID NO: 247277 - DNA, 120 bp, Artificial Sequence
  ENSG00000122696_4 (sequence is synthesized)
agagtttgcaaccagtggcgtggcggcagtgcttgcagggacaacagaagcaattttcactccactggaaagagttcagacattgcttcaagaccacaagcatcatgacaaatttaccaa

SEQ ID NO: 247278 - DNA, 120 bp, Artificial Sequence
  ENSG00000122696_5 (sequence is synthesized)
cacttaccaggctttcaaggcactgaaatgtcatggaattggagagtattatcgaggcttggtgcccattcttttccggaatggactcagcaatgtcttgtttttcggccttcgaggtcc

SEQ ID NO: 247279 - DNA, 120 bp, Artificial Sequence
  ENSG00000122696_6 (sequence is synthesized)
cattaaggagcatctgcctaccgcaacgactcacagtgctcatctggtcaatgattttatctgtggaggtctattgggtgccatgttgggattcttgttttttccaattaatgttgtaaa

SEQ ID NO: 247280 - DNA, 120 bp, Artificial Sequence
  ENSG00000122696_7 (sequence is synthesized)
aactcgcatacagtctcagattggtggggaatttcagtctttccccaaggttttccaaaaaatctggctggaacgggacagaaaactgataaatcttttcagaggtgcccatctgaatta

SEQ ID NO: 247281 - DNA, 120 bp, Artificial Sequence
  ENSG00000122696_8 (sequence is synthesized)
ccatcggtccctcatctcttggggcataatcaatgcaacttatgagttcttgttaaaggttatatgaaaaaaccatcagttaagtgccatttatcaactgaatagaccttctaagaagaa

SEQ ID NO: 247282 - DNA, 120 bp, Artificial Sequence
  ENSG00000122696_9 (sequence is synthesized)
gccccggctcgctagccgtcctgcgggacgccggcgctgatgggtgagtgtgggacgagcgtggggaagcaccgggctttcttcgcatgaggttggagggaggggaaacgcgctgaaggg

SEQ ID NO: 247283 - DNA, 120 bp, Artificial Sequence
  ENSG00000122696_10 (sequence is synthesized)
ctggggcaggctgccgccctgggggcccatccctgtcttctgcgcgctccggctgccctggcccggtccctgcgggccccacccaggcggcgcgggcggaatcagttctgagcctcctcg

SEQ ID NO: 247284 - DNA, 120 bp, Artificial Sequence
  ENSG00000122696_11 (sequence is synthesized)
ctcggctccgggctcccccgcctgccgcgggtgtttgtccggctgctgggcgacctttcccgcgaaggcgctgtcccttcattcgggcgcgccctgggctggggaggcacctccctggtg

SEQ ID NO: 247285 - DNA, 120 bp, Artificial Sequence
  ENSG00000122696_12 (sequence is synthesized)
cacaggaaccgcaggggcggggaggagccgggagctgcctgcgcccgggggacagcggggatggcaccgcgcaagggcctctgcgtcccgggagactgggatttcggcctcacctcggga

SEQ ID NO: 247286 - DNA, 120 bp, Artificial Sequence
  ENSG00000122696_13 (sequence is synthesized)
cccctgactgtgaagtgtcagaaacggaagaggacttagtgatcttgtccaaccccctccccgcctttcacaggttggggaaatggacgcctggagaacggaaatccagttatcaaaatt

SEQ ID NO: 247287 - DNA, 120 bp, Artificial Sequence
  ENSG00000122696_14 (sequence is synthesized)
atcaagggtgaagcatggtggctagcggagcccgcatcctgacaggtgtgctggcgtggccctctacctgccccgccgcggcggcctgcggccaggagaagtaggctggcgacatctggc

SEQ ID NO: 247288 - DNA, 120 bp, Artificial Sequence
  ENSG00000122696_15 (sequence is synthesized)
ttatcacaaagctatcatcctgccaaactccaggctcagatgtcacagggtttctattgcctgggctggagtgtagtggcatgatcatggctcactatagccttgacttcctgggctcaa

SEQ ID NO: 247289 - DNA, 85 bp, Artificial Sequence
  ENSG00000122696_16 (sequence is synthesized)
atgatcatggctcactatagccttgacttcctgggctcaagcgatccttacggggtttcgctcttgtgaccaggctggaatgcaa

SEQ ID NO: 247290 - DNA, 81 bp, Artificial Sequence
  ENSG00000122696_17 (sequence is synthesized)
ctgccttaaatctatttatctgacgttcccaactaggaaattttttgtccaaatgagtatatgtgattttaaagtagaaat

SEQ ID NO: 247291 - DNA, 120 bp, Artificial Sequence
  ENSG00000122696_18 (sequence is synthesized)
aaaataggatttatctcagttcctatctcccttcaatctattcttcatattgtcaataatttttttttttttttttgagacgtggtctctgtcgccaggctggagtgcagtggtgaaatc

SEQ ID NO: 247292 - DNA, 88 bp, Artificial Sequence
  ENSG00000122696_19 (sequence is synthesized)
gcaggcatccgccatcacacccggctaaatttcgtattttttcagtagagacagttttgcgccaggctggtctcaaactcctgacctt

SEQ ID NO: 247293 - DNA, 77 bp, Artificial Sequence
  ENSG00000122696_20 (sequence is synthesized)
tcagtaattttttaaaatgtcacttcaataaatgcttttcctctgccataaagaccaaacatcttgctgtggcctac

SEQ ID NO: 247294 - DNA, 120 bp, Artificial Sequence
  ENSG00000122696_21 (sequence is synthesized)
ttcctctgccataaagaccaaacatcttgctgtggcctacaggagacaggatgatccagcccttgcctcccttactctcatctctagctaaaactgcgctgctgtctctgcactccagcc

SEQ ID NO: 247295 - DNA, 120 bp, Artificial Sequence
  ENSG00000122696_22 (sequence is synthesized)
actggcacttcctgattacttggggcacgctgtactcatcttgctcccagcctctgcccatgcaggtgccctctgccctcagcactgcctttctctacttcatttatagactgctgtcct

SEQ ID NO: 247296 - DNA, 120 bp, Artificial Sequence
  ENSG00000122696_23 (sequence is synthesized)
tcagatctcggttgaagtgtcacttccttggggaagctggcttacactctcaggactcggttaggttcccccgtcaggctcttctatgtcaccatgtttctatttttcacagcacttaac

SEQ ID NO: 247297 - DNA, 120 bp, Artificial Sequence
  ENSG00000122696_24 (sequence is synthesized)
ctgttttaattacgttgcaaatagtttttgtttgggtctagagaagcatgtattcactagtacattttatttgtgttctctaattattttttctgcagctaaattagaaatttgtagttt

SEQ ID NO: 247298 - DNA, 120 bp, Artificial Sequence
  ENSG00000122696_25 (sequence is synthesized)
tccccctaaaaatgcaatgatgttttctctgattttcttgtcacctttcttccaaaaaatccatgtgttcaaagtgcttgcttgcagtttgccccataataaatggttgtttaatccaaa

SEQ ID NO: 247299 - DNA, 120 bp, Artificial Sequence
  ENSG00000122705_0 (sequence is synthesized)
cctcctggcgcttgtcctcctctcccagtcggcaccacagcggtggctgccgggcgtggtgtcggtgggtcggttggtttttgtctcaccgttggtgtccgtgccgttcagttgcccgcc

SEQ ID NO: 247300 - DNA, 120 bp, Artificial Sequence
  ENSG00000122705_1 (sequence is synthesized)
atggctgagctggatccgttcggcgcccctgccggcgcccctggcggtcccgcgctggggaacggagtggccggcgccggcgaagaagacccggctgcggccttcttggcgcagcaagag

SEQ ID NO: 247301 - DNA, 120 bp, Artificial Sequence
  ENSG00000122705_2 (sequence is synthesized)
agcgagattgcgggcatcgagaacgacgaggccttcgccatcctggacggcggcgcccccgggccccagccgcacggcgagccgccggggggtccggatgctgttgatggagtaatgaat

SEQ ID NO: 247302 - DNA, 120 bp, Artificial Sequence
  ENSG00000122705_3 (sequence is synthesized)
ggtgaatactaccaggaaagtaatggtccaacagacagttatgcagctatttcacaagtggatcgattgcagtcagagcctgaaagtatccgtaaatggagagaagaacaaatggaacgc

SEQ ID NO: 247303 - DNA, 120 bp, Artificial Sequence
  ENSG00000122705_4 (sequence is synthesized)
gaatggtatgcaagacaggacgagcagctacagaaaacaaaagcaaacaacagggtggcagatgaagctttctacaaacaacccttcgctgacgtgattggttatgtcacaaacataaac

SEQ ID NO: 247304 - DNA, 120 bp, Artificial Sequence
  ENSG00000122705_5 (sequence is synthesized)
catccttgctacagcctagaacaggcagcagaagaagcctttgtaaatgacattgacgagtcgtccccaggcactgagtgggaacgggtggcccggctgtgtgactttaaccccaagtct

SEQ ID NO: 247305 - DNA, 120 bp, Artificial Sequence
  ENSG00000122705_6 (sequence is synthesized)
agcaagcaggccaaagatgtctcccgcatgcgctcagtcctcatctccctcaagcaggccccgctggtgcactgaagagccaccctgtggaaacactacatctgcaatatcttaatccta

SEQ ID NO: 247306 - DNA, 120 bp, Artificial Sequence
  ENSG00000122705_7 (sequence is synthesized)
ctcagtgaagctcttcacagtcattggattaattatgttgagttcttttggaccaaacctttttgtctttagagttgttcattgtttgtgattgcatgtttccttccttcaactgtgttc

SEQ ID NO: 247307 - DNA, 120 bp, Artificial Sequence
  ENSG00000122705_8 (sequence is synthesized)
tccctggcattcagagaggagggagaggaggaagaggaaggggagggaagcttcccaagagtagcctcaacctgtgcttctgtgcattattctgagaataaatttctgtttcaaactgta

SEQ ID NO: 247308 - DNA, 64 bp, Artificial Sequence
  ENSG00000122705_9 (sequence is synthesized)
atggtatgcaagacaggacgagcagctacagaaaacaaaagcaaacaacagggtttcactcttg

SEQ ID NO: 247309 - DNA, 120 bp, Artificial Sequence
  ENSG00000122705_10 (sequence is synthesized)
acaagaggtggaataaactgagcaattcatcaccatattaagctggatattcctgtttagtaaatatctttccctagctggatgtggtctaggaggaagccttggaattttctcactctg

SEQ ID NO: 247310 - DNA, 120 bp, Artificial Sequence
  ENSG00000122705_11 (sequence is synthesized)
gattgtggaaccacaaagtcagcctggagctgcctacatctggacacctaggctcctgtcagagccagtttattatttccagtcactcattactgggattctcctctccctggggcgtta

SEQ ID NO: 247311 - DNA, 78 bp, Artificial Sequence
  ENSG00000122705_12 (sequence is synthesized)
agtcactcattactgggattctcctctccctggggcgttatgaaggaattaaaagaaatatttgggaggccaaggcag

SEQ ID NO: 247312 - DNA, 65 bp, Artificial Sequence
  ENSG00000122705_13 (sequence is synthesized)
cagttgtatgtaagaaaacccaattctccctgagaaagaaaaaaagctgaagtcctttaaaaatt

SEQ ID NO: 247313 - DNA, 120 bp, Artificial Sequence
  ENSG00000122705_14 (sequence is synthesized)
ctgtttctctagctgtgtagctgcaaggtcactaggcagataatctcaagtcgtaaaacatgttgttccttggaaagtaagaaatgatgtaatgcatgtcttaattaaataactgtcttt

SEQ ID NO: 247314 - DNA, 77 bp, Artificial Sequence
  ENSG00000122705_15 (sequence is synthesized)
accgccccacaaaatgcttaaaaggtagcttgactctttgttcatggctcagtcctttggatgttaatccgactggg

SEQ ID NO: 247315 - DNA, 120 bp, Artificial Sequence
  ENSG00000122707_0 (sequence is synthesized)
gagcggcggcggtagcggcggcagcggctgcggccaagctgggtccgagcatcccgcggctctggagccgcccggcccggacatggcgaccgtccgggcctctctgcgaggtgcgctgct

SEQ ID NO: 247316 - DNA, 120 bp, Artificial Sequence
  ENSG00000122707_1 (sequence is synthesized)
tgctccttctgctggccgtggcgggggtcgcggaggtggcagggggcctggctccgggcagtgcgggtgcattgtgttgtaatcattcaaaggataaccaaatgtgccgtgatgtatgtg

SEQ ID NO: 247317 - DNA, 120 bp, Artificial Sequence
  ENSG00000122707_2 (sequence is synthesized)
aacagattttctcctcaaaaagtgaatcccgactaaaacatctgttgcagcgagccccagattattgcccagagacaatggttgaaatttggaattgtatgaattcatctttgccaggtg

SEQ ID NO: 247318 - DNA, 120 bp, Artificial Sequence
  ENSG00000122707_3 (sequence is synthesized)
tgtttaagaagtctgatggctgggttggcttaggctgctgtgaactggctattgccttggagtgtcgacaggcatgcaagcaggcatcttcaaagaatgatatttccaaagtttgcagaa

SEQ ID NO: 247319 - DNA, 120 bp, Artificial Sequence
  ENSG00000122707_4 (sequence is synthesized)
aagaatatgagaatgctcttttcagttgcattagcagaaatgaaatgggctcggtttgttgcagttatgcaggtcatcacacaaactgccgagaatactgtcaagccatttttcgaacag

SEQ ID NO: 247320 - DNA, 120 bp, Artificial Sequence
  ENSG00000122707_5 (sequence is synthesized)
actcttctcctggtccatctcagataaaagcagtggaaaattattgcgcctctattagtccacaattaatacattgtgtgaacaattatactcaatcttatccaatgaggaacccaacgg

SEQ ID NO: 247321 - DNA, 120 bp, Artificial Sequence
  ENSG00000122707_6 (sequence is synthesized)
atagtttatattgctgtgacagagctgaagaccatgcttgccaaaatgcctgcaagagaatcctgatgtccaagaaaacggaaatggagattgttgatggtctcatcgagggttgtaaga

SEQ ID NO: 247322 - DNA, 120 bp, Artificial Sequence
  ENSG00000122707_7 (sequence is synthesized)
cccagcccttgcctcaagatcctctttggcaatgttttcttgaaagctcacaatctgttcaccctggagtcactgtacaccctcctccctctacaggcctcgatggggctaaattgcatt

SEQ ID NO: 247323 - DNA, 120 bp, Artificial Sequence
  ENSG00000122707_8 (sequence is synthesized)
gttgttctaaagcaaacacttcaacatgtagggaactctgcactaaactttacagcatgagctggggcaatacacagagttggcaagagtttgatcgcttttgtgaatataatccagtgg

SEQ ID NO: 247324 - DNA, 120 bp, Artificial Sequence
  ENSG00000122707_9 (sequence is synthesized)
aagtgtccatgttgacctgtttagcggatgtccgggaaccttgccagttgggctgtagaaaccttacttactgtactaattttaacaacaggccaacagaacttttcaggagttgtaatg

SEQ ID NO: 247325 - DNA, 120 bp, Artificial Sequence
  ENSG00000122707_10 (sequence is synthesized)
cacagtcagatcaaggagccatgaatgacatgaagttgtgggagaaaggaagcataaagatgccatttatcaatatacctgttcttgatattaaaaagtgccagccagagatgtggaaag

SEQ ID NO: 247326 - DNA, 120 bp, Artificial Sequence
  ENSG00000122707_11 (sequence is synthesized)
caatagcttgttcactgcagattaaaccttgtcatagtaaatctcggggaagtattatttgcaaatcagattgtgtggagattcttaaaaaatgtggagaccagaacaaattccctgaag

SEQ ID NO: 247327 - DNA, 120 bp, Artificial Sequence
  ENSG00000122707_12 (sequence is synthesized)
accacacagctgaaagtatttgtgagcttctgtcacctacagatgatctgaagaattgtatacctttggatacatacctcaggccaagtactttaggtaacattgtagaagaagtgactc

SEQ ID NO: 247328 - DNA, 120 bp, Artificial Sequence
  ENSG00000122707_13 (sequence is synthesized)
atccctgtaacccaaatccttgccctgccaatgagctctgtgaagtaaaccgaaaaggatgtccatctggagatccctgtcttccatacttttgtgttcaaggttgcaaactgggagaag

SEQ ID NO: 247329 - DNA, 120 bp, Artificial Sequence
  ENSG00000122707_14 (sequence is synthesized)
cttctgatttcattgtccgtcaagggacactaatccaggtgccatcatctgcaggggaagttggttgttataaaatctgttcatgtggacaaagtggactcttagaaaactgtatggaaa

SEQ ID NO: 247330 - DNA, 120 bp, Artificial Sequence
  ENSG00000122707_15 (sequence is synthesized)
tgcactgtatagacctccagaagtcttgtattgttggaggaaaaagaaaaagtcatggaacatcctttagtattgactgcaatgtctgttcttgttttgctggcaatttggtgtgctcta

SEQ ID NO: 247331 - DNA, 120 bp, Artificial Sequence
  ENSG00000122707_16 (sequence is synthesized)
cccgcctttgcctcagtgagcacagttcagaagatgaccgtcgtaccttcacaggtctgccctgtaactgtgcagatcagtttgtccctgtatgtgggcagaatgggcgcacttacccca

SEQ ID NO: 247332 - DNA, 120 bp, Artificial Sequence
  ENSG00000122707_17 (sequence is synthesized)
gtgcctgcattgctcgctgtgtgggcctccaagaccatcagtttgagtttggatcatgcatgtcaaaggatccatgtaatcctaatccctgccaaaaaaaccaaaggtgcatacccaaac

SEQ ID NO: 247333 - DNA, 120 bp, Artificial Sequence
  ENSG00000122707_18 (sequence is synthesized)
gtttgtgacacagaccacatggagcacaacaatctctgcactttataccaaagaggaaaaagcctctcttacaaaggtccctgccagcccttttgcagagcaaccgagcccgtatgtggg

SEQ ID NO: 247334 - DNA, 120 bp, Artificial Sequence
  ENSG00000122707_19 (sequence is synthesized)
cacaatggtgagacctacagcagtgtgtgtgctgcctactcggatcgcgtggcagtcgattactatggggactgccaggccgtcggagtcctctcagagcacagctccgtcgccgagtgt

SEQ ID NO: 247335 - DNA, 120 bp, Artificial Sequence
  ENSG00000122707_20 (sequence is synthesized)
gcttctgtcaagtgtccttcgctcttggcagctggatgcaaacccatcatcccaccgggtgcttgttgcccattatgtgctgggatgttaagagttttatttgacaaagaaaaactggat

SEQ ID NO: 247336 - DNA, 120 bp, Artificial Sequence
  ENSG00000122707_21 (sequence is synthesized)
actattgctaaggtaacaaataaaaagccaataacagttctggaaatacttcagaaaatccgcatgcacgtgtctgtcccacagtgtgatgtgtttggatacttcagcattgaatcagaa

SEQ ID NO: 247337 - DNA, 120 bp, Artificial Sequence
  ENSG00000122707_22 (sequence is synthesized)
attgtgatcctgatcattcccgtcgatcactatccaaaagctctgcagattgaagcctgcaataaagaagcagagaagattgagtcccttatcaactctgacagcccgactttggcgtcc

SEQ ID NO: 247338 - DNA, 120 bp, Artificial Sequence
  ENSG00000122707_23 (sequence is synthesized)
catgtccctctctctgccctcatcatttcccaggtacaggtctccagcagtgtgccatcggccggtgtcagggccaggccttcttgccactccctcctccttcccctcagcttgggcctt

SEQ ID NO: 247339 - DNA, 120 bp, Artificial Sequence
  ENSG00000122707_24 (sequence is synthesized)
gccttgcacttgctctggacatataactgactgcccacggaaagtgcagaatgctcctccacctcactctcctgccttgaaaaagacattcaggactgctggtttgtagttgaatattgg

SEQ ID NO: 247340 - DNA, 120 bp, Artificial Sequence
  ENSG00000122707_25 (sequence is synthesized)
ccaaggaaaggcacatgtcacctctattcgccacacagtatttttttttttaatccgccaatattagtaggatttttgttttgtttttacaaatgttaaaatgtgttgttccaaatacta

SEQ ID NO: 247341 - DNA, 120 bp, Artificial Sequence
  ENSG00000122707_26 (sequence is synthesized)
atgaaaacagaatgtctcttcctggtagaccactgccatatgatttacatttcctcaccataagggtcccccactctaaagcaaatttatcgctgggaaatgagatgaccactttttaga

SEQ ID NO: 247342 - DNA, 120 bp, Artificial Sequence
  ENSG00000122707_27 (sequence is synthesized)
aagataattcactgtactatcaggttcacaaacttcatttcagagttctttttgaagtatttaaggttcccgttgcatttgttttgtttacagataattacctactctggctagaagcta

SEQ ID NO: 247343 - DNA, 120 bp, Artificial Sequence
  ENSG00000122707_28 (sequence is synthesized)
ggggtcccagtgaagagccactgccattaaagaatatgaaacatagataaaacatctttgaaattatgtaaattatgtaaattatcaggcaaatttgcattaaattacagaaatttaatt

SEQ ID NO: 247344 - DNA, 120 bp, Artificial Sequence
  ENSG00000122707_29 (sequence is synthesized)
cagaaccccaactactgtgttatgcaaaagcaagctgattaaatgacactcatataattatatgttgtaagcaacaggctcactggtcacggatttgtgtctgtgacttttgtgaaaggg

SEQ ID NO: 247345 - DNA, 120 bp, Artificial Sequence
  ENSG00000122707_30 (sequence is synthesized)
agaagtgacattgcatcaaagcatcttgcattatgcaatttttatattaaccagatatatattcatcggtattcatccaagttaaatgtagagtttttaaacatcaatctttaaaccaat

SEQ ID NO: 247346 - DNA, 120 bp, Artificial Sequence
  ENSG00000122707_31 (sequence is synthesized)
tgctgctacttatataattgccaaaaagtgaaataatgtgtagttcatgtaaataatacattatatttctattttattatgaagaaggtgaatagccatatttgtaaaatgacaatcatg

SEQ ID NO: 247347 - DNA, 120 bp, Artificial Sequence
  ENSG00000122707_32 (sequence is synthesized)
tgtgttaacccagtgctttccattcgtgaaaacacatttgctttttgtgatatgcacaatgtagataagtgttctgtctgactttcttttttgatatagaagtataaagaattgtggttt

SEQ ID NO: 247348 - DNA, 120 bp, Artificial Sequence
  ENSG00000122707_33 (sequence is synthesized)
atatatttaaaagtgtcaagctgagtattaaaatgtatgcatgttgtctaagaaattgaatactttgaatgtgtttcacagtttgaaataagctatttgatgtaatacttcttgtgtgta

SEQ ID NO: 247349 - DNA, 120 bp, Artificial Sequence
  ENSG00000122707_34 (sequence is synthesized)
tgcacatgaacttagattttacatgaagtattttttcagtattatatgtaccctctgaaatacatagggatatgcgtattataccaaaatgttgctgaaaaatgggcacttaaagctttc

SEQ ID NO: 247350 - DNA, 120 bp, Artificial Sequence
  ENSG00000122707_35 (sequence is synthesized)
agaatatgtcagtgctgatgtagcatgcttgttgcaattgccttttttctgtataaatgtctttaatgcaatatactggaaagcttttctattttaataaaaataatttttatatgatca

SEQ ID NO: 247351 - DNA, 120 bp, Artificial Sequence
  ENSG00000122707_36 (sequence is synthesized)
tgctggagctaaggagatggcagctcaataaaaaagcagaaagaggttttaagggtagaacaaccgtctccatctttgccaatacagaggaatctggaaaagaaggcgccaaacagatat

SEQ ID NO: 247352 - DNA, 120 bp, Artificial Sequence
  ENSG00000122707_37 (sequence is synthesized)
gcacagatttcttccaaagtcagagaaaactacttcaaagaagcccttctgaattctgtaatatggttgaaagtgtttttttatttctgattctttgagaaaattaaaggcagagccaaa

SEQ ID NO: 247353 - DNA, 120 bp, Artificial Sequence
  ENSG00000122707_38 (sequence is synthesized)
aattattacttttgtaattaaaaagtcataacaatgagaagagagcctgatatcttttaaaaattagggcctcctgatgaagctgcacctgaaatggctcttcagagtctccgctttgta

SEQ ID NO: 247354 - DNA, 120 bp, Artificial Sequence
  ENSG00000122707_39 (sequence is synthesized)
gatttataaaaactgactgattgaccaaactgaccaaagactgatttataagatgtcaatgttttgatttacactgtgatattgaaagaggctctgtggcttatgtctgtaatctcagcg

SEQ ID NO: 247355 - DNA, 120 bp, Artificial Sequence
  ENSG00000122707_40 (sequence is synthesized)
ggccaagagtttgagaccagcctgggtaacaaagtgagaacccagctctacaaaaaaataataataataattagctgggtgtggtgacacacccagctcctcaggaggctgatgctggag

SEQ ID NO: 247356 - DNA, 120 bp, Artificial Sequence
  ENSG00000122707_41 (sequence is synthesized)
acacccagctcctcaggaggctgatgctggaggatcgcttgagcccaagagttcaaggttgcagtgagccatcatcacttcactgcactccagccagggcaacaaagcaagaccctgcct

SEQ ID NO: 247357 - DNA, 120 bp, Artificial Sequence
  ENSG00000122707_42 (sequence is synthesized)
cggggggaaaaaaaaagatgaaaagaaagaaagacttgttttttgtaactcagtagcagtactgtgtgccttgtttggccaccatctaaatcagaactctaatggcttttgacatccttt

SEQ ID NO: 247358 - DNA, 120 bp, Artificial Sequence
  ENSG00000122711_0 (sequence is synthesized)
gcaggccccagccagctcaggctacactatcccaggatcagcatggccgtccgccagtgggtaatcgccctggccttggctgccctccttgttgtggacagggaagtgccagtggcagca

SEQ ID NO: 247359 - DNA, 120 bp, Artificial Sequence
  ENSG00000122711_1 (sequence is synthesized)
atggtagagtctccaacctgttcccagatgtccaacctggtctgcggcactgatgggctcacatatacgaatgaatgccagctctgcttggcccggataaaaaccaaacaggacatccag

SEQ ID NO: 247360 - DNA, 120 bp, Artificial Sequence
  ENSG00000122711_2 (sequence is synthesized)
atcatgaaagatggcaaatgctgatcccacaggagcacctcaagccatgaagtgtcagctggagaacagtggtgggcatggagaggatatgacatgaaataaaagatccagcccaactga

SEQ ID NO: 247361 - DNA, 120 bp, Artificial Sequence
  ENSG00000122711_3 (sequence is synthesized)
ttctgcaaatgggaggtactggaaagaacgtgagggcaggaggagagatatgccagggtatttattgccctagctccccctctgccagaccacaggtagaatagcaagaagtctacatcc

SEQ ID NO: 247362 - DNA, 120 bp, Artificial Sequence
  ENSG00000122711_4 (sequence is synthesized)
tgatgatcctgggcattgggagctcacctcaccttctctggactctggagggcacacacatatggtccctgctgggggatgcttcgcacacagaccgtcttccagaggcaggggcaggga

SEQ ID NO: 247363 - DNA, 120 bp, Artificial Sequence
  ENSG00000122728_0 (sequence is synthesized)
ccccgcctttattcagcttccggtagacgctggtagggtaagggagctaagtagatcacttccgggcgactgttgttttatttccggtttatgcgacccggctgcgatttgctgctgagg

SEQ ID NO: 247364 - DNA, 120 bp, Artificial Sequence
  ENSG00000122728_1 (sequence is synthesized)
gcagcagctaccgtcactgccgccatcatgtcagactcggacagcgaggaagattcatctggaggtggcccatttactttagcgggtatccttttcggcaacatcagtggagcggggcag

SEQ ID NO: 247365 - DNA, 120 bp, Artificial Sequence
  ENSG00000122728_2 (sequence is synthesized)
ctggagggggaaagcgtcttggatgatgagtgtaagaagcacttggcaggcttgggggctttggggctgggcagcctaatcactgaactcacggcaaatgaagaattgactgggactggc

SEQ ID NO: 247366 - DNA, 120 bp, Artificial Sequence
  ENSG00000122728_3 (sequence is synthesized)
ggtgccttggtaaatgatgaagggtggattaggagtacagaagatgctgtagactattcagacatcaatgaggtggcagaagatgaaagccaaagacaccagcagacgatggggagcttg

SEQ ID NO: 247367 - DNA, 120 bp, Artificial Sequence
  ENSG00000122728_4 (sequence is synthesized)
cagcccctttaccactcggattatgatgaagatgactatgatgctgattgtgaagacattgattgcaagttgatgcctcctccacctccacccccgggaccaatgaagaaggataaggac

SEQ ID NO: 247368 - DNA, 120 bp, Artificial Sequence
  ENSG00000122728_5 (sequence is synthesized)
caagatgctattacctgtgtgtctgaaagtggagaagacatcatcttgccctccatcattgccccttcctttttggcctcagagaaagtggatttcagtagttactctgattcagaatct

SEQ ID NO: 247369 - DNA, 120 bp, Artificial Sequence
  ENSG00000122728_6 (sequence is synthesized)
gagatgggacctcaggaagcaacacaggcagaatctgaggatggaaagctgacccttccattggctgggattatgcagcatgatgccaccaagctgttgccaagtgtcaccgaacttttt

SEQ ID NO: 247370 - DNA, 120 bp, Artificial Sequence
  ENSG00000122728_7 (sequence is synthesized)
ccagaatttcgacctggaaaagtgttacgcttcctacatctttttggaccagggaagaatgtcccatctgtttggcggagtgctcggagaaagaggaagaagcatcgtgagctgatacag

SEQ ID NO: 247371 - DNA, 120 bp, Artificial Sequence
  ENSG00000122728_8 (sequence is synthesized)
gaagagcagatccaggaggtggaatgctcagtagaatcagaagtcagccagaagtctttgtggaactatgactatgctccaccaccacccccagagcagtgtctcgctgatgatgaaatc

SEQ ID NO: 247372 - DNA, 120 bp, Artificial Sequence
  ENSG00000122728_9 (sequence is synthesized)
acgatgatggttcctgtggagtccaaattttcccaatcaactggagatgtagataaagtgacagataccaaaccaagagtggctgagtggcgttatgggcctgcccgactgtggtatgat

SEQ ID NO: 247373 - DNA, 120 bp, Artificial Sequence
  ENSG00000122728_10 (sequence is synthesized)
atgctgggtgtctccgaagatggcagtgggtttgactatggcttcaaactgagaaagacacaacatgaacctgtgataaaatctagaatgatggaggaatttaggaaacttgaggaaagc

SEQ ID NO: 247374 - DNA, 120 bp, Artificial Sequence
  ENSG00000122728_11 (sequence is synthesized)
aatggcactgatcttctggctgacgaaaacttcctgatggtgacacagctgcattgggaggattctatcatctgggatggggaggatatcaaacacaaagggacaaaacctcagggtgca

SEQ ID NO: 247375 - DNA, 120 bp, Artificial Sequence
  ENSG00000122728_12 (sequence is synthesized)
agcctggcaggctggcttccttctattaagactaggaatgtaatggcttacaatgttcagcaaggttttgcacccactctggatgatgacaaaccttggtactccatttttcccattgac

SEQ ID NO: 247376 - DNA, 120 bp, Artificial Sequence
  ENSG00000122728_13 (sequence is synthesized)
aatgaggatctggtgtatggacgctgggaggacaatatcatttgggatgctcaggccatgccccggctgttggaacctcctgttttggcacttgatcccaatgatgagaacctcattttg

SEQ ID NO: 247377 - DNA, 120 bp, Artificial Sequence
  ENSG00000122728_14 (sequence is synthesized)
gaaattcctgatgagaaggaagaggccacctctaactccccctccaaggagagtaagaaggaatcatctctgaagaagagtcgaattctcttgggcaaaacaggtgtcatcagggaggaa

SEQ ID NO: 247378 - DNA, 120 bp, Artificial Sequence
  ENSG00000122728_15 (sequence is synthesized)
ccacagcagaacatgtctcagccagaagtgaaagatccatggaatctctccaatgatgagtattatttccccaagcaacagggtcttcggggcacctttggagggaatattatccagcat

SEQ ID NO: 247379 - DNA, 120 bp, Artificial Sequence
  ENSG00000122728_16 (sequence is synthesized)
tcaattcctgctatggaattatggcagcccttctttcccacccacatggggcccatcaaaatccggcagttccatcgcccacctctgaaaaagtactcatttggtgcactctctcagcca

SEQ ID NO: 247380 - DNA, 120 bp, Artificial Sequence
  ENSG00000122728_17 (sequence is synthesized)
ggtccccattcagtccaacctttgctaaagcacatcaaaaaaaaggccaagatgagagaacaagagaggcaagcctcaggtggtggagagttgttttttatgcgcacacctcaggatctc

SEQ ID NO: 247381 - DNA, 120 bp, Artificial Sequence
  ENSG00000122728_18 (sequence is synthesized)
acaggcaaagatggagatcttattcttgcagaatatagtgaggaaaatggacccttaatgatgcaggttggcatggcaaccaagataaagaactattataaacggaaacctggcaaagat

SEQ ID NO: 247382 - DNA, 120 bp, Artificial Sequence
  ENSG00000122728_19 (sequence is synthesized)
cctggagcaccagattgtaaatatggggaaactgtttactgccatacatctcctttcttgggctctctccatcctggccaattactgcaggcacttgagaacaacctttttcgtgctcca

SEQ ID NO: 247383 - DNA, 120 bp, Artificial Sequence
  ENSG00000122728_20 (sequence is synthesized)
gtgtatcttcataagatgccagaaactgattttctgatcattcggacaagacagggttactatattcgggaattagtggatatttttgtggttggccagcagtgtcccttgtttgaagtt

SEQ ID NO: 247384 - DNA, 120 bp, Artificial Sequence
  ENSG00000122728_21 (sequence is synthesized)
cctgggcctaactccagaagggccaatatgcatattcgagactttctacaggtttttatttaccgccttttctggaagagtaaagatcggccacggaggatacgaatggaagatataaaa

SEQ ID NO: 247385 - DNA, 120 bp, Artificial Sequence
  ENSG00000122728_22 (sequence is synthesized)
aaagcctttccttcccattcagaaagcagcatccggaagaggctaaagctctgcgctgacttcaaacgcacagggatggattcaaactggtgggtgcttaagtctgattttcgtttacca

SEQ ID NO: 247386 - DNA, 120 bp, Artificial Sequence
  ENSG00000122728_23 (sequence is synthesized)
acggaagaagagatcagagctaaggtgtcaccagagcagtgctgtgcttattatagcatgatagctgcaaagcaacgactgaaggatgctggctatggtgagaaatccttttttgcccca

SEQ ID NO: 247387 - DNA, 120 bp, Artificial Sequence
  ENSG00000122728_24 (sequence is synthesized)
gaagaagaaaatgaggaagatttccagatgaagattgatgatgaagttcacgctgctccttggaacaccacaagggccttcattgctgccatgaagggcaagtgtctcctagaggtgact

SEQ ID NO: 247388 - DNA, 120 bp, Artificial Sequence
  ENSG00000122728_25 (sequence is synthesized)
gtgaagaagacagtgacaggaacagatgcagaccttcgtcgcctttccctgaaaaatgccaagcaacttctacgtaaatttggtgtgcctgaggaagagattaaaaagttgtcccgctgg

SEQ ID NO: 247389 - DNA, 120 bp, Artificial Sequence
  ENSG00000122728_26 (sequence is synthesized)
gaagtgattgatgtggtgcgcacaatgtcaacagaacaggctcattctggagaggggcccatgagtaaatttgcccgtggatcaaggttttctgtggctgagcatcaagagcgttacaaa

SEQ ID NO: 247390 - DNA, 120 bp, Artificial Sequence
  ENSG00000122728_27 (sequence is synthesized)
gaggaatgtcagcgtatctttgacctacagaacaaggttctgtcatcaactgaggtcttatcaactgacacagacagcatctcagctgaagatagtgactttgaagaaatgggaaagaac

SEQ ID NO: 247391 - DNA, 120 bp, Artificial Sequence
  ENSG00000122728_28 (sequence is synthesized)
attgagaacatgttgcagaacaagaaaaccagctctcagctgtcacgtgaatgggaggagcaggagcggaaggaactacggcgaatgctactggtagcaggctcagcagcatcaggaaac

SEQ ID NO: 247392 - DNA, 120 bp, Artificial Sequence
  ENSG00000122728_29 (sequence is synthesized)
aatcacagagatgatgtcacagcttccatgactagccttaagtcttctgccactggacactgtctcaagatttatcgcacatttcgagatgaagaggggaaagagtatgttcgctgtgag

SEQ ID NO: 247393 - DNA, 120 bp, Artificial Sequence
  ENSG00000122728_30 (sequence is synthesized)
acagtccgaaaaccagctgtcattgatgcctatgtgcgcatacggactacaaaagatgagaaattcattcaaaaatttgccctttttgatgaaaaacatcgggaagagatgcggaaagaa

SEQ ID NO: 247394 - DNA, 120 bp, Artificial Sequence
  ENSG00000122728_31 (sequence is synthesized)
cggcggaggattcaagagcaactgaggcggcttaagcggaaccaggaaaaggagaagcttaagggtcctcctgagaagaagcccaagaaaatgaaagagcgtcctgacctaaaactgaaa

SEQ ID NO: 247395 - DNA, 120 bp, Artificial Sequence
  ENSG00000122728_32 (sequence is synthesized)
tgtggggcatgtggtgccattggacatatgaggactaacaaattctgccccctctattatcaaacaaatgtgccaccttcgaaacctgttgccatgacagaagagcaggaggaggagttg

SEQ ID NO: 247396 - DNA, 120 bp, Artificial Sequence
  ENSG00000122728_33 (sequence is synthesized)
gaaaagacagtcattcataatgataatgaagaacttatcaaggttgaagggaccaaaattgtcttcgggaaacagctaattgagaatgtgcatgaggttcgcagaaaatctctggttctc

SEQ ID NO: 247397 - DNA, 120 bp, Artificial Sequence
  ENSG00000122728_34 (sequence is synthesized)
aagtttcctaaacagcagcttcctccaaagaagaaacggcgagttggaaccactgttcattgtgactatttgaatatacctcataagtccatccaccgacgccgcacagaccctatggtg

SEQ ID NO: 247398 - DNA, 120 bp, Artificial Sequence
  ENSG00000122728_35 (sequence is synthesized)
acgctgtcatccatcctggagtctatcatcaatgacatgagagatcttccaaatacacaccctttccacactccagtcaatgcaaaggttgtaaaggactactacaaaatcatcactcgg

SEQ ID NO: 247399 - DNA, 120 bp, Artificial Sequence
  ENSG00000122728_36 (sequence is synthesized)
ccaatggacctacaaacactccgtgaaaatgtgcgtaaatgcctctacccatctcgggaagagttcagagagcatctggagctaattgtgaaaaacagtgcgacctacaatgggccaaaa

SEQ ID NO: 247400 - DNA, 120 bp, Artificial Sequence
  ENSG00000122728_37 (sequence is synthesized)
cattcattgactcagatctctcaatccatgctggatctctgtgatgaaaaacttaaagagaaagaagacaaattagctcgcttagagaaagctatcaaccccttgctggatgatgatgac

SEQ ID NO: 247401 - DNA, 120 bp, Artificial Sequence
  ENSG00000122728_38 (sequence is synthesized)
caagtggcattttctttcattctggacaacattgtcacccagaaaatgatggcagttccagattcttggccatttcatcacccagttaataagaagtttgttccagattattacaaaatg

SEQ ID NO: 247402 - DNA, 120 bp, Artificial Sequence
  ENSG00000122728_39 (sequence is synthesized)
attgtcaatccagtggatttagagaccatacgtaagaacatctccaagcacaagtatcagagtcgggagagttttctagatgatgtaaaccttattcttgccaacagtgttaagtataat

SEQ ID NO: 247403 - DNA, 120 bp, Artificial Sequence
  ENSG00000122728_40 (sequence is synthesized)
ggacctgagagtcagtacactaagactgctcaggagattgtgaacatctgttaccagacaattactgagtatgatgagcatttgactcaacttgagaaggatatttgtacagctaaagaa

SEQ ID NO: 247404 - DNA, 120 bp, Artificial Sequence
  ENSG00000122728_41 (sequence is synthesized)
gcagctttggaggaagcagaattagaaagcctggacccaatgaccccagggccctacacatctcagcctcctgatatgtatgataccaacacatccctcagtacgtctcgagatgcctct

SEQ ID NO: 247405 - DNA, 120 bp, Artificial Sequence
  ENSG00000122728_42 (sequence is synthesized)
gtatttcaagatgagagcaatttgtctgtcttggatatttccactgccactccagaaaaacagatgtgccagggccaaggtaggctgggtgaggaagactctgatgtggatgttgaaggg

SEQ ID NO: 247406 - DNA, 120 bp, Artificial Sequence
  ENSG00000122728_43 (sequence is synthesized)
tatgatgatgaggaggaggatgggaaacctaagcctccagccccagaagggggagatggtgatcttgcagatgaagaggaaggaactgtacaacaacctgaagccagtgtcctgtatgag

SEQ ID NO: 247407 - DNA, 120 bp, Artificial Sequence
  ENSG00000122728_44 (sequence is synthesized)
gatttgcttatatctgaaggagaagatgatgaggaagatgctgggagtgacgaagaaggagacaatcctttctctgctatccagctgagtgaaagtggaagtgactctgatgtgggatat

SEQ ID NO: 247408 - DNA, 120 bp, Artificial Sequence
  ENSG00000122728_45 (sequence is synthesized)
ggtggaataagacccaaacaacccttcatgcttcagcatgcttcaggagaacacaaggatgggcacggaaaatgaagaaagcatgatgtcccatgagggagacggtggggaggcttccca

SEQ ID NO: 247409 - DNA, 120 bp, Artificial Sequence
  ENSG00000122728_46 (sequence is synthesized)
tgatttggaggatagcaacatcagttatgggagctgtgaggagcctgatcccaagttgaacacccaagacacaagcttcagcagcatcggaaatttccagctgggcatggtggctcacac

SEQ ID NO: 247410 - DNA, 120 bp, Artificial Sequence
  ENSG00000122728_47 (sequence is synthesized)
tgagactccatctcaaaaaaaaagaaaatttccaagcatggtatcatctcacttttctaatttacaggctggaacagatgagagccctcctgctgggacagagaattgggttctagtgga

SEQ ID NO: 247411 - DNA, 120 bp, Artificial Sequence
  ENSG00000122728_48 (sequence is synthesized)
tggactctgctacacttaaacctatgtgacaaaccgcccattattttattgtttatttaattatacaatgcctcgttcctatatggatttgaggcaaattaccataaattttgaaacagc

SEQ ID NO: 247412 - DNA, 120 bp, Artificial Sequence
  ENSG00000122729_0 (sequence is synthesized)
gaggcggcagctggaaccgcgcagcgcacgggaacgcgtcccgctgcttgggtcaggttcgccggtcgcgggagccccgccgtgcagtcggaggaacacgtggccatcagtaatcatgag

SEQ ID NO: 247413 - DNA, 120 bp, Artificial Sequence
  ENSG00000122729_1 (sequence is synthesized)
caacccattcgcacaccttgctgagccattggatcctgtacaaccaggaaagaaattcttcaatttgaataaattggaggattcaagatatgggcgcttaccattttcgatcagagttct

SEQ ID NO: 247414 - DNA, 120 bp, Artificial Sequence
  ENSG00000122729_2 (sequence is synthesized)
tctggaagcagccattcggaattgtgatgagtttttggtgaagaaacaggatattgaaaatattctacattggaatgtcacgcagcacaagaacatagaagtgccatttaagcctgctcg

SEQ ID NO: 247415 - DNA, 120 bp, Artificial Sequence
  ENSG00000122729_3 (sequence is synthesized)
tgtcatcctgcaggactttacgggtgtgcccgctgtggttgactttgctgcaatgcgtgatgctgtgaaaaagttaggaggagatccagagaaaataaaccctgtctgccctgctgatct

SEQ ID NO: 247416 - DNA, 120 bp, Artificial Sequence
  ENSG00000122729_4 (sequence is synthesized)
tgtaatagatcattccatccaggttgatttcaacagaagggcagacagtttacagaagaatcaagacctggaatttgaaagaaatagagagcgatttgaatttttaaagtggggttccca

SEQ ID NO: 247417 - DNA, 120 bp, Artificial Sequence
  ENSG00000122729_5 (sequence is synthesized)
ggcttttcacaacatgcggattattccccctggctcaggaatcatccaccaggtgaatttggaatatttggcaagagtggtatttgatcaggatggatattattacccagacagcctcgt

SEQ ID NO: 247418 - DNA, 120 bp, Artificial Sequence
  ENSG00000122729_6 (sequence is synthesized)
gggcacagactcgcacactaccatgattgatggcttgggcattcttggttggggtgtcggtggtattgaagcagaagctgtcatgctgggtcagccaatcagtatggtgcttcctcaggt

SEQ ID NO: 247419 - DNA, 120 bp, Artificial Sequence
  ENSG00000122729_7 (sequence is synthesized)
gattggctacaggctgatggggaagccccaccctctggtaacatccactgacatcgtgctcaccattaccaagcacctccgccaggttggggtagtgggcaaatttgtcgagttcttcgg

SEQ ID NO: 247420 - DNA, 120 bp, Artificial Sequence
  ENSG00000122729_8 (sequence is synthesized)
gcctggagtagcccagttgtccattgctgaccgagctacgattgctaacatgtgtccagagtacggagcaactgctgcctttttcccagttgatgaagttagtatcacgtacctggtgca

SEQ ID NO: 247421 - DNA, 120 bp, Artificial Sequence
  ENSG00000122729_9 (sequence is synthesized)
aacaggtcgtgatgaagaaaaattaaagtatattaaaaaatatcttcaggctgtaggaatgtttcgagatttcaatgacccttctcaagacccagacttcacccaggttgtggaattaga

SEQ ID NO: 247422 - DNA, 120 bp, Artificial Sequence
  ENSG00000122729_10 (sequence is synthesized)
tttgaaaacagtagtgccttgctgtagtggacccaaaaggcctcaggacaaagttgctgtgtccgacatgaaaaaggactttgagagctgccttggagccaagcaaggatttaaaggatt

SEQ ID NO: 247423 - DNA, 120 bp, Artificial Sequence
  ENSG00000122729_11 (sequence is synthesized)
ccaagttgctcctgaacatcataatgaccataagacctttatctatgataacactgaattcacccttgctcatggttctgtggtcattgctgccattactagctgcacaaacaccagtaa

SEQ ID NO: 247424 - DNA, 120 bp, Artificial Sequence
  ENSG00000122729_12 (sequence is synthesized)
tccgtctgtgatgttaggggcaggattgttagcaaagaaagctgtggatgctggcctgaacgtgatgccttacatcaaaactagcctgtctcctgggagtggcgtggtcacctactacct

SEQ ID NO: 247425 - DNA, 120 bp, Artificial Sequence
  ENSG00000122729_13 (sequence is synthesized)
acaagaaagcggagtcatgccttatctgtctcagcttgggtttgacgtggtgggctatggctgcatgacctgcattggcaacagtgggcctttacctgaacctgtggtagaagccatcac

SEQ ID NO: 247426 - DNA, 120 bp, Artificial Sequence
  ENSG00000122729_14 (sequence is synthesized)
acagggagaccttgtagctgttggagtactatctggaaacaggaattttgaaggtcgagttcaccccaacacccgggccaactatttagcctctccccccttagtaatagcatatgcaat

SEQ ID NO: 247427 - DNA, 120 bp, Artificial Sequence
  ENSG00000122729_15 (sequence is synthesized)
tgctggaaccatcagaatcgactttgagaaagagccattgggagtaaatgcaaagggacagcaggtatttctgaaagatatctggccgactagagacgagatccaggcagtggagcgtca

SEQ ID NO: 247428 - DNA, 120 bp, Artificial Sequence
  ENSG00000122729_16 (sequence is synthesized)
gtatgtcatcccggggatgtttaaggaagtctatcagaaaatagagactgtgaatgaaagctggaatgccttagcaaccccatcagataagctgtttttctggaattccaaatctacgta

SEQ ID NO: 247429 - DNA, 120 bp, Artificial Sequence
  ENSG00000122729_17 (sequence is synthesized)
tatcaaatcaccaccattctttgaaaacctgactttggatcttcagccccctaaatctatagtggatgcctatgtgctgctaaatttgggagattcggtaacaactgaccacatctcccc

SEQ ID NO: 247430 - DNA, 120 bp, Artificial Sequence
  ENSG00000122729_18 (sequence is synthesized)
agctggaaatattgcaagaaacagtcctgctgctcgctacttaactaacagaggcctaactccacgagaattcaactcctatggctcccgccgaggtaatgacgccgtcatggcacgggg

SEQ ID NO: 247431 - DNA, 120 bp, Artificial Sequence
  ENSG00000122729_19 (sequence is synthesized)
aacatttgccaacattcgcttgttaaacagatttttgaacaagcaggcaccacagactatccatctgccttctggggaaatccttgatgtgtttgatgctgctgagcggtaccagcaggc

SEQ ID NO: 247432 - DNA, 120 bp, Artificial Sequence
  ENSG00000122729_20 (sequence is synthesized)
aggccttcccctgatcgttctggctggcaaagagtacggtgcaggcagctcccgagactgggcagctaagggccctttcctgctgggaatcaaagccgtcctggccgagagctacgagcg

SEQ ID NO: 247433 - DNA, 120 bp, Artificial Sequence
  ENSG00000122729_21 (sequence is synthesized)
cattcaccgcagtaacctggttgggatgggtgtgatcccacttgaatatctccctggtgagaatgcagatgccctggggctcacagggcaagaacgatacactatcattattccagaaaa

SEQ ID NO: 247434 - DNA, 120 bp, Artificial Sequence
  ENSG00000122729_22 (sequence is synthesized)
cctcaaaccacaaatgaaagtccaggtcaagctggatactggcaagaccttccaggctgtcatgaggtttgacactgatgtggagctcacttatttcctcaacgggggcatcctcaacta

SEQ ID NO: 247435 - DNA, 120 bp, Artificial Sequence
  ENSG00000122729_23 (sequence is synthesized)
catgatccgcaagatggccaagtaggagacgtgcacttggtgctgcgcccagggaggaagccgcaccaccagccagcgcaggccctggtggagaggcctccctggctgcctctgggaggg

SEQ ID NO: 247436 - DNA, 120 bp, Artificial Sequence
  ENSG00000122729_24 (sequence is synthesized)
gtgctgccttgtagatggagcaagtgagcactgagggtctggtgccaatcctgtaggcacaaaaccagaagtttctacattctctatttttgttaatcatcttctctttttccagaattt

SEQ ID NO: 247437 - DNA, 120 bp, Artificial Sequence
  ENSG00000122729_25 (sequence is synthesized)
ggaagctagaatggtgggaatgtcagtagtgccagaaagagagaaccaagcttgtctttaaagttactgatcacaggacgttgctttttcactgtttcctattaatcttcagctgaacac

SEQ ID NO: 247438 - DNA, 120 bp, Artificial Sequence
  ENSG00000122729_26 (sequence is synthesized)
aagcaaaccttctcaggaggtgtctcctaccctcttattgttcctcttacgctctgctcaatgaaaccttcctcttgagggtcattttcctttctgtattaattataccagtgttaagtg

SEQ ID NO: 247439 - DNA, 120 bp, Artificial Sequence
  ENSG00000122729_27 (sequence is synthesized)
acatagataagaactttgcacacttcaaatcagagcagtgattctctcttctctccccttttccttcagagtgaatcatccagactcctcatggataggtcgggtgttaaagttgttttg

SEQ ID NO: 247440 - DNA, 120 bp, Artificial Sequence
  ENSG00000122729_28 (sequence is synthesized)
attatgtaccttttgatagatccacataaaaagaaatgtgaagttttcttttactatcttttcatttatcaagcagagacctttgttgggaggcggtttgggagaacacatttctaattt

SEQ ID NO: 247441 - DNA, 120 bp, Artificial Sequence
  ENSG00000122729_29 (sequence is synthesized)
gaatgaaatgaaatctattttcagtgaaaacttgttgactttgagttttgctgtgtttgtggctagagttttgggatatttagtacagagtgaatctcacaccatatcattgggaagcct

SEQ ID NO: 247442 - DNA, 120 bp, Artificial Sequence
  ENSG00000122729_30 (sequence is synthesized)
gaataaccttcatattctcccatttttacaactctatcagaactgtacgggtataacggaaatgtttaggaaccattatgctcgctcttccctgtttgggagcagacaagaaggaagagt

SEQ ID NO: 247443 - DNA, 120 bp, Artificial Sequence
  ENSG00000122729_31 (sequence is synthesized)
ctggtggcagtggcaacgatataagtacataaggaaaagcagataaacttcaggacactaaaaaccaattatctgctcatttttacccctgtagtcatttctgggcatgccttagtttgc

SEQ ID NO: 247444 - DNA, 120 bp, Artificial Sequence
  ENSG00000122729_32 (sequence is synthesized)
ttgggttgctataatgtaatgccatagactggctgaaagaacagaaatgtattttctcacagttatggaggctggaattctgagatcaaagttgaagccacttcattttctggtgaggac

SEQ ID NO: 247445 - DNA, 120 bp, Artificial Sequence
  ENSG00000122729_33 (sequence is synthesized)
actcttcctggtttacagatggccaccttcttgcttgttctcacatggcatttctttggtatgtgcctggtgggggagagagaaaataggctctcatgtctcttcttacagcaacactaa

SEQ ID NO: 247446 - DNA, 120 bp, Artificial Sequence
  ENSG00000122729_34 (sequence is synthesized)
ttgtattggatcagggtcccactcttatggagacccaggaaagctggtggtataacaacttggttcaagtccaaatgcctaagaacctggggaggggcatggggaatgctggtataagtc

SEQ ID NO: 247447 - DNA, 120 bp, Artificial Sequence
  ENSG00000122729_35 (sequence is synthesized)
ccagagtctgaatgcccaggaacaagcaggagctgtgatgtccaaggacaggagggcaggatctttgtaatgaatttttaatgtcaaccttagcactcaggggatatggcctggtcatca

SEQ ID NO: 247448 - DNA, 120 bp, Artificial Sequence
  ENSG00000122729_36 (sequence is synthesized)
gaacatctggaatctaatcctctttctacttctcaccagatgagggatcaagacaggttatttagcatccctgcacttgcggtcctggggatcttatttatattcatttaaaaaataaat

SEQ ID NO: 247449 - DNA, 84 bp, Artificial Sequence
  ENSG00000122729_37 (sequence is synthesized)
ggtcctggggatcttatttatattcatttaaaaaataaattacaaacaaacagccaggcgcagtggctcatgcctataattcca

SEQ ID NO: 247450 - DNA, 61 bp, Artificial Sequence
  ENSG00000122729_38 (sequence is synthesized)
aaaatacaaaaaattagccaggtgtggtattgtgcagaggctgcagtgagccgagatcgtg

SEQ ID NO: 247451 - DNA, 120 bp, Artificial Sequence
  ENSG00000122729_39 (sequence is synthesized)
gccgagatcgtgccattgcacgcccgcctgggctacaagagcaaagctccgtctcaaaaaaaaaaaaaaattacaaacaaacagaactccattgtacaaaaaaacctgtgatcctcaagt

SEQ ID NO: 247452 - DNA, 120 bp, Artificial Sequence
  ENSG00000122729_40 (sequence is synthesized)
taagatcagtcctagaataaaaacactaagaatggctgagaaaacagacctccaccctctcagctctccattactgagcagctggggagctgtctcgctccccgcattcagtggctcctg

SEQ ID NO: 247453 - DNA, 120 bp, Artificial Sequence
  ENSG00000122729_41 (sequence is synthesized)
tggtctgtatttttgtatcctccccaaaattcaggtggtgaaaccttaaccccccaggtaatggtaatagaagctggggcctttggaaggtgattagatcatgagggtagtgccttttaa

SEQ ID NO: 247454 - DNA, 120 bp, Artificial Sequence
  ENSG00000122729_42 (sequence is synthesized)
aagagactcaagataagatagagaccccctcatttcttctgccatgggagaacacagcaagaagtcaccatccgtgaaccagaaagtgggttctcaccagatactgaatctgccagtgcc

SEQ ID NO: 247455 - DNA, 120 bp, Artificial Sequence
  ENSG00000122729_43 (sequence is synthesized)
ttgaacctagactttccagccagaactgtgagaaatttctattgtttataagccacccagttgatatttagttacagcagcccaaccaagactgtggttatgaggaaacaaacacattat

SEQ ID NO: 247456 - DNA, 120 bp, Artificial Sequence
  ENSG00000122729_44 (sequence is synthesized)
tgtggctagactaatggaattgggtcccttacctccaagtacaccctctgtccttttcggtaaaaatatcttcgccaggcacggtgtctcatgcctatgatcccaacactttgggaggcc

SEQ ID NO: 247457 - DNA, 83 bp, Artificial Sequence
  ENSG00000122729_45 (sequence is synthesized)
gagaccagcctgggcaacactctaccagccaggtgtgcacctgtggtcccagctgttcaggaggctgaggtgggaggatcact

SEQ ID NO: 247458 - DNA, 83 bp, Artificial Sequence
  ENSG00000122729_46 (sequence is synthesized)
ggaggtcgtggctatgattgctatcaatcaatcaccaccccccccccccccaaaaaaaaaagtatcttggccagtgtctcaac

SEQ ID NO: 247459 - DNA, 120 bp, Artificial Sequence
  ENSG00000122729_47 (sequence is synthesized)
ccccccccaaaaaaaaaagtatcttggccagtgtctcaaccttgcccactaacaagcctaaataaaccaacttcttttacctggttctttaagggctgctcgtcttactatccaaattaa

SEQ ID NO: 247460 - DNA, 120 bp, Artificial Sequence
  ENSG00000122729_48 (sequence is synthesized)
aaatctgctgttctccctcccatattctttgcgaatgaagattcccctgtttgtttggatagttttccaaattcattactgcattcctggcatccgcagcaagctaagagttagttaata

SEQ ID NO: 247461 - DNA, 120 bp, Artificial Sequence
  ENSG00000122729_49 (sequence is synthesized)
tttttaatatagcaaataaggatgagggatgcccttcatgtgtatttacacaccagatttttatggtacatagggagtaatctagggaaaagatatattaggcatgaatcttagctgtgg

SEQ ID NO: 247462 - DNA, 120 bp, Artificial Sequence
  ENSG00000122729_50 (sequence is synthesized)
tagaagcacagctcaaattagcttaaggaaaaaaaaaaaaaagctggctcatagaacttgaggacagtggtggccatgactatgggcttgattggatctagtgactcaagctcccttcca

SEQ ID NO: 247463 - DNA, 120 bp, Artificial Sequence
  ENSG00000122729_51 (sequence is synthesized)
tttgcccctccaaccacccccccatccctccaccaatcataccttctgttggcctctgcagtagagtggcctcttctgggcccttccacatgccaggggatatggccaccagcagttctg

SEQ ID NO: 247464 - DNA, 120 bp, Artificial Sequence
  ENSG00000122729_52 (sequence is synthesized)
gggaaaccattagtaatttgtgatcgtagagatttgtctcccagtattccctagggcaaaaatattgggagttcctagtcacctaaatgaagaaccttatttttagcagtttccctttca

SEQ ID NO: 247465 - DNA, 120 bp, Artificial Sequence
  ENSG00000122729_53 (sequence is synthesized)
gggctctaacaggactgtggagtaatgtacggggttatgtaggagcaatgcagagccacttttgaaaaacagtagccaaggttctactggctgccttcttaggacattattaaatatcat

SEQ ID NO: 247466 - DNA, 120 bp, Artificial Sequence
  ENSG00000122729_54 (sequence is synthesized)
aaacacaagtggaatttaacacccagccagtttgtgttcaaccagacagcgtcattatgaacaaagattatataacgatagctgatattaagtaagttttaaaagttgacatcccaagag

SEQ ID NO: 247467 - DNA, 120 bp, Artificial Sequence
  ENSG00000122729_55 (sequence is synthesized)
tgaagcctacttattcagtacagatttgttgaatgaaattcgtagttttattttacggcataatgaaacagagttccagacatgtacctgccaaatttggttctggttgtcttatcgtat

SEQ ID NO: 247468 - DNA, 120 bp, Artificial Sequence
  ENSG00000122729_56 (sequence is synthesized)
gcaggctggatacctgctactgtgcttctacaggatgttaacagtgtcccctgagtaaaacagttccacggtcagtacatttgggaaccactgagttaaatgggttttatcactgcagaa

SEQ ID NO: 247469 - DNA, 120 bp, Artificial Sequence
  ENSG00000122729_57 (sequence is synthesized)
cagacacaagaacaatgtgtgctgtaaatcactgtttgcagggaaggtggcagcaaatggcacagaaacccacctgaccacagactgctttcttctgggcgttcacgcactgtgctccac

SEQ ID NO: 247470 - DNA, 120 bp, Artificial Sequence
  ENSG00000122729_58 (sequence is synthesized)
aggatactcttgagaaacattgagctatggttggtctgttgtttgaaattcaaataataatgaatccattttaaggacaggaattggtttactgaccttgatgttgggatgactcttcat

SEQ ID NO: 247471 - DNA, 120 bp, Artificial Sequence
  ENSG00000122729_59 (sequence is synthesized)
ttcagggtgaaaatatcacagcatcagcacaggccaggaccacagagataacaaggtggtagttgtgtaacaggttgtgtctgaaccacaggagcttcaaaacatacacggctggacacc

SEQ ID NO: 247472 - DNA, 120 bp, Artificial Sequence
  ENSG00000122729_60 (sequence is synthesized)
ctgccaggatgctctaatggggctgggcatgtgtccatgaaaaagactccccagttgtttctaaaatgtggcctttgttctagaaatgcaatgaccagcatttgggagtcagtcaaaaga

SEQ ID NO: 247473 - DNA, 120 bp, Artificial Sequence
  ENSG00000122729_61 (sequence is synthesized)
tccacttcctaaaagcctacctgctcatttctttcattcaatacatattaaccaagtgcctactttgtttgagtccatgcctggcaatgacattattccattaaaagtcaaacaaggaaa

SEQ ID NO: 247474 - DNA, 120 bp, Artificial Sequence
  ENSG00000122729_62 (sequence is synthesized)
ggggcgagagggggcggagcgtggaggcggcagctggaaccgcgcagcgcacgggaacgcgtcccgctgcttgggtcaggttcgccggtcgcgggagccccgccgtgcagtcggagaggg

SEQ ID NO: 247475 - DNA, 120 bp, Artificial Sequence
  ENSG00000122733_0 (sequence is synthesized)
gctgccgtgggctgcgcggggcccgcggtgtgtagagtccgccgccccggagccgcgtcccgcacccggacggtcccgagccatgggggtgttgatgtccaagcggcagacagtggagca

SEQ ID NO: 247476 - DNA, 120 bp, Artificial Sequence
  ENSG00000122733_1 (sequence is synthesized)
ggtgcagaaggtgagtctggctgtgtctgctttcaaggatgggctgcgggacaggccttccatccgacgcacaggtgagctgccagggtcccgccgtggcactgtagagggctccgtcca

SEQ ID NO: 247477 - DNA, 120 bp, Artificial Sequence
  ENSG00000122733_2 (sequence is synthesized)
ggaggtacaggaggagaaggaagcagaagcaggaacctcggtggtccaggaagagagtagtgccggccgcgcagcctgggagcggctccgagatgggcgcggcgtggagcctgaggagtt

SEQ ID NO: 247478 - DNA, 120 bp, Artificial Sequence
  ENSG00000122733_3 (sequence is synthesized)
tgacaggacaagtcgattcacaccccctgcgttcatccgccccacccggaagctggatgatgacaaacctccagaaatctgcctggagcccagagagcctgttgtcaacgatgagatgtg

SEQ ID NO: 247479 - DNA, 120 bp, Artificial Sequence
  ENSG00000122733_4 (sequence is synthesized)
tgatgtttgtgaggtctggacagctgagagcctcttcccgtgcagggtctgcaccagggttttccatgatggctgcctgcgccgcatgggctacatccaaggagacagtgcagcggaggt

SEQ ID NO: 247480 - DNA, 120 bp, Artificial Sequence
  ENSG00000122733_5 (sequence is synthesized)
gacggagatggcccacacagaaacaggctggagctgccactactgtgacaacatcaacttgctgcttactgaggaggaaatgtatagcctcacggagacctttcagcggtgtaaagtcat

SEQ ID NO: 247481 - DNA, 120 bp, Artificial Sequence
  ENSG00000122733_6 (sequence is synthesized)
ccctgattgctccctgacactggaggactttctgcgttaccgccaccaagcagccaagcggggggaccgtgacagggccctgagtgaggagcaagaagagcaggcggcccgccagtttgc

SEQ ID NO: 247482 - DNA, 120 bp, Artificial Sequence
  ENSG00000122733_7 (sequence is synthesized)
tgccctggaccctgaacatcgaggccacatagagtggcctgacttcttgtcccatgagtccctcctgcttctgcagcagttgcgtccccagaactctctgttgaggcttctgacagtgaa

SEQ ID NO: 247483 - DNA, 120 bp, Artificial Sequence
  ENSG00000122733_8 (sequence is synthesized)
ggagcgggagcgagcccgagccgccttcctggctcggggcagtgggagcaccgtcagtgaggcagagtgccgccgggcccagcactcttggttttgcaaacggttcccagaggctccttc

SEQ ID NO: 247484 - DNA, 120 bp, Artificial Sequence
  ENSG00000122733_9 (sequence is synthesized)
ctgcagtgtcagcatcagccatgtgggtcccatcgcagatagcagcccagccagcagcagcagcaagagtcaggacaagaccctgctgcccacagagcaggagtccagatttgtggactg

SEQ ID NO: 247485 - DNA, 120 bp, Artificial Sequence
  ENSG00000122733_10 (sequence is synthesized)
gcctaccttcctgcaagagaatgtcctctacatcctggctgctcgccccaacagcgcagccattcacctgaagcccccaggatagcatggagcagagaagctcggtttgaggacagtgac

SEQ ID NO: 247486 - DNA, 120 bp, Artificial Sequence
  ENSG00000122733_11 (sequence is synthesized)
atcctctccctcctttcctttctcccttcccccaccaacctctggcacagagactcatggggttgggacactgccagcgtcttaacttgtcactaagctttaaggcactgaaatcaccat

SEQ ID NO: 247487 - DNA, 120 bp, Artificial Sequence
  ENSG00000122733_12 (sequence is synthesized)
tcccctcacaatagaggcagtgaatgcattgccacaaggagaagccctgggagctgtggcagcatcctctcctggaccgcccctgccccacatcatagacgggacctgccaccacactta

SEQ ID NO: 247488 - DNA, 120 bp, Artificial Sequence
  ENSG00000122733_13 (sequence is synthesized)
tatacatgtgcacatgctgcccagctgtccatgccttcagaagcctggttctttttggttgagaaaggaccaaagtccctttgtgaagcccctggtatagaggagggggtctctactcac

SEQ ID NO: 247489 - DNA, 120 bp, Artificial Sequence
  ENSG00000122733_14 (sequence is synthesized)
cccttctataggcaggccagttctaatttccaatagataagtctctggccaagtgattcttaggaagggggcatgtcagactcgcatgcctgcctagagctcctggagatcctaatgggc

SEQ ID NO: 247490 - DNA, 120 bp, Artificial Sequence
  ENSG00000122733_15 (sequence is synthesized)
cccgctttctccaccaaaaatcccttctgcagtcagctgctgttactagtaggtgtgcattatgtacctcggctgtactgagttgggaaaagagttaaacatcaccactgaaattcagcc

SEQ ID NO: 247491 - DNA, 120 bp, Artificial Sequence
  ENSG00000122733_16 (sequence is synthesized)
ctttatttatttaaattccaattcctggtgacagaaaaggcaactagcctggagaatcctgactggaagagggggaggcagcccttcccagggactcgggattctaggaacctctcagtc

SEQ ID NO: 247492 - DNA, 120 bp, Artificial Sequence
  ENSG00000122733_17 (sequence is synthesized)
aggtcacctgagtccaaaagtctttagcagggtagtcaaaaatcaaggtgagccttcttggccccatttttcagatggtagctcatggcctagggccaagggggcctgaatggagcaaac

SEQ ID NO: 247493 - DNA, 120 bp, Artificial Sequence
  ENSG00000122733_18 (sequence is synthesized)
acactggcaggagccacagccctctgtgttagatgcttcacccaagtcaccgaccacagagactgacgagagcacactctggaggaagaggagagaacggggctctgcttcctcatcatt

SEQ ID NO: 247494 - DNA, 120 bp, Artificial Sequence
  ENSG00000122733_19 (sequence is synthesized)
ccagctcaactcaactgtagacaccttccacagcccaagaaagatctgcagagccctgagcagggactctttcagccatcctgacaaacaggataagaggctggggcttaagaagaggct

SEQ ID NO: 247495 - DNA, 120 bp, Artificial Sequence
  ENSG00000122733_20 (sequence is synthesized)
ctgcagagaaggtcctgggaaagccttacagaagaagttttccgcttctccctatcactgagactcggcttgagtggctgcttctcctcactgctcatcacatgtccttccccagcaggc

SEQ ID NO: 247496 - DNA, 120 bp, Artificial Sequence
  ENSG00000122733_21 (sequence is synthesized)
tagggcttgggcctggcatggaaggccttttggggcaatcagaggctgccacaagagcaccaagcctggcctccaagccccagccctccttcctaagtactcatcaaattcaaattcttc

SEQ ID NO: 247497 - DNA, 120 bp, Artificial Sequence
  ENSG00000122733_22 (sequence is synthesized)
agtccgtgtgttatggctcatcttggccggccgtggggtccatgttctaggcttctgtttccaacttaatgacttaggcatagcgagatctgactaccaagagttattcaaaagggagtg

SEQ ID NO: 247498 - DNA, 120 bp, Artificial Sequence
  ENSG00000122733_23 (sequence is synthesized)
acaccgctcggtgctgaatgtttcgaggaaagcaaggagctgcggccaggggcttcttgagagccctgtgtagtctcctcctgtaggaaccaccttagctggaagcagggtggtgagctg

SEQ ID NO: 247499 - DNA, 120 bp, Artificial Sequence
  ENSG00000122733_24 (sequence is synthesized)
ctggggttggattatttgggactgaaatgaagcagacaggagacaaatctgggctcaggtgtatggcccacagcttttagaaatgctcttcagccgtcccccaggattgatccataggag

SEQ ID NO: 247500 - DNA, 120 bp, Artificial Sequence
  ENSG00000122733_25 (sequence is synthesized)
gggccattattcagtctagtcaaaacaagaaagcgcaggactcctgggcctaagaactgcatctgaagcagccaggcctggggttttgcactgagatgaaagcacattaagcacaggggc

SEQ ID NO: 247501 - DNA, 120 bp, Artificial Sequence
  ENSG00000122733_26 (sequence is synthesized)
tcttacctactctcctggcaaatcatctcctgtgccactggccttgggctgctcgatctcacagacggggcattttgagtagagacaagctctgggctttgagagctgaatagcattttt

SEQ ID NO: 247502 - DNA, 120 bp, Artificial Sequence
  ENSG00000122733_27 (sequence is synthesized)
ctcctgcctcatcagtcacagggactggaagtccatcttgttccctgatccttcacagatcaaggtgatgcctacctctttggagctgctgcctctagctctccacgggtgagtgaggag

SEQ ID NO: 247503 - DNA, 120 bp, Artificial Sequence
  ENSG00000122733_28 (sequence is synthesized)
agttggtgggccaggtcaggcctgccgtattccagggcctggcaaagcagccccagagttcttccacaacaggaacaggcccatttggatcacgcttctccctattccagaacagcaaac

SEQ ID NO: 247504 - DNA, 120 bp, Artificial Sequence
  ENSG00000122733_29 (sequence is synthesized)
ttcctgggtgagggcctgctacagagatcccaggggacacttccctcagcaaagagtagagttcccatcccacaagagtcctaggaagcaggaaagcacgaaggagcagccagcctcttc

SEQ ID NO: 247505 - DNA, 120 bp, Artificial Sequence
  ENSG00000122733_30 (sequence is synthesized)
tccacaggcagtcatctagctttttaccaaaggggaagtgccgttgctccccaagtccagagttgcagacgccctgccccaacccccgtccagaatctccctttgcagtgttctaatccc

SEQ ID NO: 247506 - DNA, 120 bp, Artificial Sequence
  ENSG00000122733_31 (sequence is synthesized)
cagagcccctctgcggtatgtatagagttgttaaaaacgttcagaaacccagtgaagcccatttcgttttcaagccctcccatcactgtgactctgaaattctgccaagtacaaatatta

SEQ ID NO: 247507 - DNA, 120 bp, Artificial Sequence
  ENSG00000122733_32 (sequence is synthesized)
gcgtttggctctaataagggtatgagaaaatgtttcagtcttttctttgtggctacccaaaattgagatcagtgtttctaaccaaggaaggcctgggttatagacaggctcctctgaagc

SEQ ID NO: 247508 - DNA, 120 bp, Artificial Sequence
  ENSG00000122733_33 (sequence is synthesized)
ccacttgccctaagcatttttcacctagcattcctcttcctcatgttcagatgtgaatgaaggggcagctggaggatgtggtggagctgcagggaccgagggtcagctgagcagtggccc

SEQ ID NO: 247509 - DNA, 120 bp, Artificial Sequence
  ENSG00000122733_34 (sequence is synthesized)
tggccacaaaaccactccaagtctgctccttggcttcctctcctgagcccagccttccccaacagaacacttgagcaagggcccctagagtatcccagggatggagcagtcccctcactc

SEQ ID NO: 247510 - DNA, 120 bp, Artificial Sequence
  ENSG00000122733_35 (sequence is synthesized)
taggtactgatctaaccttcaagtgctcctcttcatttgaggacacctacagtagaaaccatgaggacattgcctctttctgccctcagcccaagtacctggggctagcagggcagatac

SEQ ID NO: 247511 - DNA, 120 bp, Artificial Sequence
  ENSG00000122733_36 (sequence is synthesized)
cagcctttctggtcctgctgctccctatgggatgtcaccctgaccttgcttaagtggccaagtcttagggtccccttattcctgtcaccattatgaaaaacacagcattaaactgcctgg

SEQ ID NO: 247512 - DNA, 120 bp, Artificial Sequence
  ENSG00000122733_37 (sequence is synthesized)
gaagaggacacctccttgggggagtgagccccaaggttatacccaggactcatagcccaaagcacaacctcggccattgcaggtttcacagcttcagtcagagtggtgccaggaagccca

SEQ ID NO: 247513 - DNA, 120 bp, Artificial Sequence
  ENSG00000122733_38 (sequence is synthesized)
aaagccaagagggaaggtcagcagaagctgcctggcaaggccccaggccagccaggcccaccccagagccaagagaaacttcaagcaggactgagaactggtagctggctctagtgatcc

SEQ ID NO: 247514 - DNA, 120 bp, Artificial Sequence
  ENSG00000122733_39 (sequence is synthesized)
tgaaagcatgttcccttcagaccagcagagtgaagacagacagatgtgtggccctaaaaggcagaacagttttgatgccagaacttcaggactgtcaccacagtccctttttacccctcc

SEQ ID NO: 247515 - DNA, 120 bp, Artificial Sequence
  ENSG00000122733_40 (sequence is synthesized)
ttttttttttttaattttccttatttcaagctcttatctgaaaaaatgctactttctcctaccacttagtttgaatttgcccaggatatctgtctgggcccctggctgcaacccagacaa

SEQ ID NO: 247516 - DNA, 120 bp, Artificial Sequence
  ENSG00000122733_41 (sequence is synthesized)
gatatctgtctgggcccctggctgcaacccagacaatggcgagatctcctggagtgggggatattcacgcatcgtgcctgttcctgacagctcagccctggtgtagggtgggactgggca

SEQ ID NO: 247517 - DNA, 120 bp, Artificial Sequence
  ENSG00000122733_42 (sequence is synthesized)
ttttctctgctgttacttttctgctaccactatttttggcaaccttggaaagaaaataaacaggttacagaatttcggctagcactaagggaaagctttttcctctgggccacatgcccc

SEQ ID NO: 247518 - DNA, 120 bp, Artificial Sequence
  ENSG00000122733_43 (sequence is synthesized)
agtgacccagagcatggaaagggggtcagctctggtctgggccagtgactaagaagcccaatcacattccagtttctatagcactgggtaggcacaacccacagttaagaacatcaagtt

SEQ ID NO: 247519 - DNA, 120 bp, Artificial Sequence
  ENSG00000122733_44 (sequence is synthesized)
ataagtagccaggccttttcatagccatggtgacacaaaggccctcaagattagcctcctgccatcatgggttggcctgtgatctgtcccccagccaaacccaagtttgtgagagggact

SEQ ID NO: 247520 - DNA, 120 bp, Artificial Sequence
  ENSG00000122733_45 (sequence is synthesized)
ctgagaacacttgagcaacacttgggaatccaatgcgctctggtccctcatgcccttcccatgtgcttttctgcagaaggtaacttgacagcaagctgaggggaacgtccccaagccctg

SEQ ID NO: 247521 - DNA, 120 bp, Artificial Sequence
  ENSG00000122733_46 (sequence is synthesized)
tctccctgtctctacagctgcatgctcctctgcgtggcccagccttcacagcgctccagaagaagctgatgccctgaggctgggcacagtggaaatcataataaagcgattgcgatgctc

SEQ ID NO: 247522 - DNA, 120 bp, Artificial Sequence
  ENSG00000122733_47 (sequence is synthesized)
cagaaaacagcgcatagggtaggctgggccagccgaggattatgtgaaggttcgttgggaccctccggaggccagtggggtactgcaaagagccatgggggtgttgatgtccaagcggca

SEQ ID NO: 247523 - DNA, 120 bp, Artificial Sequence
  ENSG00000122735_0 (sequence is synthesized)
ggttgctgggtaaccgcgtcagggagttggattctatcctgcaagggcacggggacccacaacgacggctgtccctaaagaaccgttgcgactggtaactgaagtggaagagagtccaga

SEQ ID NO: 247524 - DNA, 120 bp, Artificial Sequence
  ENSG00000122735_1 (sequence is synthesized)
tttcttgtgtgtggtcaaggagacggacaaactttttgtcttcagacgagggagcgttttgtaggctctccaggggttgagatgattcctgcttctgcgaaggctccccataaacagcct

SEQ ID NO: 247525 - DNA, 120 bp, Artificial Sequence
  ENSG00000122735_2 (sequence is synthesized)
cataagcagagcatcagcataggcagaggaaccaggaagagagatgaagattcagggactgaagtgggagaaggcacagatgaatgggcccaatccaaagccacagttagaccccctgac

SEQ ID NO: 247526 - DNA, 120 bp, Artificial Sequence
  ENSG00000122735_3 (sequence is synthesized)
cagctggagttgaccgatgcggagttaaaggaggagttcactcggattttgacagccaacaacccacacgcaccccagaacattgtcaggtacagcttcaaagaaggcacatataagcct

SEQ ID NO: 247527 - DNA, 120 bp, Artificial Sequence
  ENSG00000122735_4 (sequence is synthesized)
attggctttgtgaaccaactggcagttcactacacccaggttgggaacctgatccccaaagactcagatgaaggacggcggcagcattaccgcgatgaattagtggcaggttctcaggag

SEQ ID NO: 247528 - DNA, 120 bp, Artificial Sequence
  ENSG00000122735_5 (sequence is synthesized)
tctgtcaaggtgatttcagaaacaggaaacctcgaagaagacgaagagcccaaggagttagaaactgagcctgggagtcaaacagatgtgcctgcagctggggcagctgaaaaagtgact

SEQ ID NO: 247529 - DNA, 120 bp, Artificial Sequence
  ENSG00000122735_6 (sequence is synthesized)
gaagaagaattgatgactcctaagcagcccaaggagagaaagctcactaaccagttcaacttcagtgagagggcctcacagacctacaacaaccctgtccgggatcgagaatgccagacg

SEQ ID NO: 247530 - DNA, 120 bp, Artificial Sequence
  ENSG00000122735_7 (sequence is synthesized)
gagcctcctcccaggacaaacttttcagccacagccaatcagtgggagatctatgatgcctatgtagaggaacttgagaagcaggaaaagaccaaagagaaggagaaggcaaagacccca

SEQ ID NO: 247531 - DNA, 120 bp, Artificial Sequence
  ENSG00000122735_8 (sequence is synthesized)
gtggctaaaaaatcagggaagatggccatgaggaagctgacatctatggagtctcagactgatgatctcatcaaattgtcccaagctgctaagatcatggagcggatggtcaaccagaat

SEQ ID NO: 247532 - DNA, 120 bp, Artificial Sequence
  ENSG00000122735_9 (sequence is synthesized)
acatatgatgacattgctcaagattttaagtactatgacgatgctgctgatgaataccgggaccaggtgggtaccctgctgccgctctggaagttccaaaatgacaaagccaagcgcctg

SEQ ID NO: 247533 - DNA, 120 bp, Artificial Sequence
  ENSG00000122735_10 (sequence is synthesized)
gccctctgctggaatccaaagtacagggatctgtttgcagtgggatatggctcttatgacttcatgaagcagagccggggcatgctgctgctctacagcctgaagaaccccagcttccct

SEQ ID NO: 247534 - DNA, 120 bp, Artificial Sequence
  ENSG00000122735_11 (sequence is synthesized)
gagtacatgttcagcagcaacagcggcgtcatgtgtctcgacatccacgtggaccacccctacctggtggcagtaggccactatgacggcaacgtggccatttacaacctcaagaagccc

SEQ ID NO: 247535 - DNA, 120 bp, Artificial Sequence
  ENSG00000122735_12 (sequence is synthesized)
cactcccagccctccttctgcagctcagccaagtctggcaagcactcagaccctgtgtggcaggtcaagtggcagaaggatgacatggaccaaaaccttaacttcttctctgtgtcatct

SEQ ID NO: 247536 - DNA, 120 bp, Artificial Sequence
  ENSG00000122735_13 (sequence is synthesized)
gacggcaggattgtgtcttggactctcgtgaagagaaagctggttcacatagatgtcatcaagctgaaggtggaaggcagcaccacggaagttcctgaggggttgcagctgcacccagtg

SEQ ID NO: 247537 - DNA, 120 bp, Artificial Sequence
  ENSG00000122735_14 (sequence is synthesized)
ggttgtggcactgcctttgacttccacaaagagattgactacatgttcctagtgggcacagaggagggaaaaatctacaagtgctctaaatcctactccagccaattcctcgacacctat

SEQ ID NO: 247538 - DNA, 120 bp, Artificial Sequence
  ENSG00000122735_15 (sequence is synthesized)
gacgcccacaacatgtcagtggacactgtgtcctggaacccataccacaccaaggtcttcatgtcctgcagctccgactggacagtgaagatctgggaccacaccatcaagaccccgatg

SEQ ID NO: 247539 - DNA, 120 bp, Artificial Sequence
  ENSG00000122735_16 (sequence is synthesized)
ttcatctatgacctgaactcagccgtgggtgatgtggcctgggcgccatactcttctactgtgttcgcagcagtcaccacagatgggaaggcccacatatttgacttagccatcaacaag

SEQ ID NO: 247540 - DNA, 120 bp, Artificial Sequence
  ENSG00000122735_17 (sequence is synthesized)
tatgaggccatctgcaaccagcctgtggcggccaaaaagaacaggctcacccacgtgcagttcaatctcatccaccccatcatcattgtgggcgatgaccgtgggcacatcatcagcctc

SEQ ID NO: 247541 - DNA, 120 bp, Artificial Sequence
  ENSG00000122735_18 (sequence is synthesized)
aagctctcacccaatttgcgcaagatgccaaaggaaaagaaggggcaggaggtgcagaagggtccagctgtggagattgcgaaactggacaaactgctgaacctggtgagggaagtgaaa

SEQ ID NO: 247542 - DNA, 120 bp, Artificial Sequence
  ENSG00000122735_19 (sequence is synthesized)
atcaagacctgaggggctggcctcagtctctgtcccatcgcttgaatacagtactcctagggcttgaccctggtacccagcccagccttagcacccagcatgtgaccccactcctgatca

SEQ ID NO: 247543 - DNA, 120 bp, Artificial Sequence
  ENSG00000122735_20 (sequence is synthesized)
ggtcccagcatcttcccttcttgttctgttccttaaggtcccagcaccttaccccaggacttggtcttcaaccaccattacccctctaactttgcacaaataaacctgtgtagaaaccca

SEQ ID NO: 247544 - DNA, 120 bp, Artificial Sequence
  ENSG00000122735_21 (sequence is synthesized)
tgggaatcttcatcatgaaaatagttactattttattgaacattaatattgagcatttattatgtgtcagacactgtgttaataggttgtttttattatttttaatacttataattatca

SEQ ID NO: 247545 - DNA, 120 bp, Artificial Sequence
  ENSG00000122735_22 (sequence is synthesized)
tgcaaattagatagtattagccttcttttatagatgaagaacttagggcttagagtggttaagcccaaagtcatgaagataagaagcagcagaataaagattcaaacccaactctgcctg

SEQ ID NO: 247546 - DNA, 120 bp, Artificial Sequence
  ENSG00000122735_23 (sequence is synthesized)
cctccaaagaccatgctcttaaccactgcactgacttgtcttcccatacatctgagttactgaaagaagaagggctctgtggtgacttttaaatacagagcttcccaacctgtgtgatgg

SEQ ID NO: 247547 - DNA, 120 bp, Artificial Sequence
  ENSG00000122735_24 (sequence is synthesized)
cgatccttccagccctccaggggcagggagatctgtgcaactggaccccatgaactggtttcctctactgtgagtttaccgtagtgtgccatacaaacatagtttctatatggcttgaaa

SEQ ID NO: 247548 - DNA, 120 bp, Artificial Sequence
  ENSG00000122735_25 (sequence is synthesized)
cttggcttctgggagtgtttgtgaatgaaggggctttctgtatgcttgtccaagcagaaaagacactcccaagcctcatgtgaggtttttgtctaggatgaagattcagggactgaagtg

SEQ ID NO: 247549 - DNA, 120 bp, Artificial Sequence
  ENSG00000122735_26 (sequence is synthesized)
gttattcacccaagcccctctttacttccccagctctgtgtcccaaacctccatcagccccagccaaaatgcttctctcaaagatatactgttggattaagtgagaaggagttgagggct

SEQ ID NO: 247550 - DNA, 120 bp, Artificial Sequence
  ENSG00000122735_27 (sequence is synthesized)
ttttgtgggtctcctgttgtcttgttctttaggatcgagaatgccagacggagcctcctcccaggacaaacttttcagccacagccaatcagtgggagatctatgatgcctatgtagagg

SEQ ID NO: 247551 - DNA, 120 bp, Artificial Sequence
  ENSG00000122741_0 (sequence is synthesized)
agctgaacaggggcactgaggtgtcggccggcggggcagtggcccggagcggggggcgggggcgttgatcatgtttccctttgggccccatagccctggaggggacggatcggccggagc

SEQ ID NO: 247552 - DNA, 120 bp, Artificial Sequence
  ENSG00000122741_1 (sequence is synthesized)
cggggctgaggagccgacgccccacgaggggcaggcagcagccaccgggccgccctcgccactacatcccggggctgatgcgacccatccccctccacccgcccgaagccctcgccgccc

SEQ ID NO: 247553 - DNA, 120 bp, Artificial Sequence
  ENSG00000122741_2 (sequence is synthesized)
cggcgccccatcgctgtccccggccccgcgctccggagagctagggctgcctggagctccggagtcctcaactgcctccgccccgggagagccgtcacctccctcccctccgtgccggcg

SEQ ID NO: 247554 - DNA, 120 bp, Artificial Sequence
  ENSG00000122741_3 (sequence is synthesized)
gggccagactgcagggccaagagccggggccgacacggcctcggcgcgggcctgggcggccctggcgctaggctgttcgggtggctgaaagagcgcagcctgggccgcgggctgttcgtg

SEQ ID NO: 247555 - DNA, 120 bp, Artificial Sequence
  ENSG00000122741_4 (sequence is synthesized)
cgtggacccggcgcgggacaattttcgcaccatgactagcctctacggttccatccaccccgcggactcggtgtacctcagcacccgcacccacggcgccgtcttcaacctcgagtactc

SEQ ID NO: 247556 - DNA, 120 bp, Artificial Sequence
  ENSG00000122741_5 (sequence is synthesized)
gcccgacgggtcagtgctgacagttgcttgtgaacaaactgaagttctgctttttgaccctatatcttcaaagcacataaaaacactttctgaagctcatgaagactgtgtaaataatat

SEQ ID NO: 247557 - DNA, 120 bp, Artificial Sequence
  ENSG00000122741_6 (sequence is synthesized)
cagatttcttgataaccggctgtttgctacctgctctgatgacactacaatagcactatgggatctgagaaaattgaacaccaaagtatgcactttacatggtcacactagctgggtgaa

SEQ ID NO: 247558 - DNA, 120 bp, Artificial Sequence
  ENSG00000122741_7 (sequence is synthesized)
gaacatcgaatatgatactaatacaagactcttagtaacatcaggatttgatggaaatgtcattatttgggacactaacaggtatacagaagatgggtgtccacataagaaattctttca

SEQ ID NO: 247559 - DNA, 120 bp, Artificial Sequence
  ENSG00000122741_8 (sequence is synthesized)
cacacgttttctcatgcgaatgaggttaacaccagattgttccaaaatgttgatttcaacgtcctctggatatctcttaattttgcatgaccttgacttaactaagtctttagaagtagg

SEQ ID NO: 247560 - DNA, 120 bp, Artificial Sequence
  ENSG00000122741_9 (sequence is synthesized)
cagctatcccattttaagagcaagaagaactacttcaagttcagatttgaccacttcatcaagttcatctggtcctagagtttctggctcaccttgtcatcatagtgattctaattcttc

SEQ ID NO: 247561 - DNA, 120 bp, Artificial Sequence
  ENSG00000122741_10 (sequence is synthesized)
tgagaaacacatgtcacgagcctctcaaagagaaggagtttcaccacgaaatagtcttgaagtcgtaacccctgaagttcttggtgagagtgaccacggaaactgcatcacgtccttaca

SEQ ID NO: 247562 - DNA, 120 bp, Artificial Sequence
  ENSG00000122741_11 (sequence is synthesized)
gctgcacccaaaaggctgggccactcttcttcggtgctcaagcaacagtgatgatgaggagtgtacttgtgtctatgaattccaagaaggagctccagtgcgacctgtctcacctcgctg

SEQ ID NO: 247563 - DNA, 120 bp, Artificial Sequence
  ENSG00000122741_12 (sequence is synthesized)
ttctctacgactgactcattacattgaagaagccaatgtaggcaggggttacatcaaagaactttgcttcagccccgatggacgaatgatttcttccccacatggctatgggattcgctt

SEQ ID NO: 247564 - DNA, 120 bp, Artificial Sequence
  ENSG00000122741_13 (sequence is synthesized)
gttgggatttgacaaacagtgcagtgaacttgttgactgcttgcccaaagaagccagtcccctgcgggtgatccgttctctgtactctcataatgatgtggtactgacaacaaagttctc

SEQ ID NO: 247565 - DNA, 120 bp, Artificial Sequence
  ENSG00000122741_14 (sequence is synthesized)
tccaacacattgtcagattgcctcagggtgccttagtggacgggtttctttgtatcagccaaagttttaggcacaacttacatcaaataaggaactcttctggtgtttgacttaggaatt

SEQ ID NO: 247566 - DNA, 120 bp, Artificial Sequence
  ENSG00000122741_15 (sequence is synthesized)
gcttcaatttagatgaagtattttctttttagaagatcttataagtttgggtcaagatcctggttcttatgggtccatgaacacacttgtgaccttagtacttggtcatccagcatcata

SEQ ID NO: 247567 - DNA, 120 bp, Artificial Sequence
  ENSG00000122741_16 (sequence is synthesized)
caggcatctccaagttagactctatgcagcatcatcttttgcagcattcctctgctcctgctgatctgtgccactgaactccagttcttctggtcattttgcatggtagctcttgtcacg

SEQ ID NO: 247568 - DNA, 120 bp, Artificial Sequence
  ENSG00000122741_17 (sequence is synthesized)
ttccttccttcctcactctctatttctctttccctctccctgtccctctctttctttgtgtttgttgattttggtgtcaattttgtggacatttggcaggagttttgactggggtaggag

SEQ ID NO: 247569 - DNA, 120 bp, Artificial Sequence
  ENSG00000122741_18 (sequence is synthesized)
aaacccatgacattagaattgaataaaacctagaagttggatattggcatattggttgttgaaaaataaatttcatcctcacttatgagtatacttggccttttaaagttactgttatgt

SEQ ID NO: 247570 - DNA, 120 bp, Artificial Sequence
  ENSG00000122741_19 (sequence is synthesized)
ttatctatattgagcacagataatggcattattcttataattgttaagatagtcttgcaacaaaatgtcttttaagtttcctgttaaaattataaaaagattttcatggtgagagggatt

SEQ ID NO: 247571 - DNA, 120 bp, Artificial Sequence
  ENSG00000122741_20 (sequence is synthesized)
ttattgtgaaattctagaaaaaaatattaccacctctctttgtaatttactttacttgtatgaatttaacatctctagcatgtatccttacttgatattttgttcctatcaacagcatta

SEQ ID NO: 247572 - DNA, 120 bp, Artificial Sequence
  ENSG00000122741_21 (sequence is synthesized)
gaaaggaaaggagacagaatgagctttggttatttctattgcacagaaaaggatttttaaaattagattagtataatatctggccatagagtgataagaacaatatgacttagattttct

SEQ ID NO: 247573 - DNA, 120 bp, Artificial Sequence
  ENSG00000122741_22 (sequence is synthesized)
gtatttcatctgccagattatttgaatcacacaggatgatgtgttaacagtattagggtggaagaggaatcaagagtaaagaggtaggggtttactcatttttcttccctgagccaggtg

SEQ ID NO: 247574 - DNA, 120 bp, Artificial Sequence
  ENSG00000122741_23 (sequence is synthesized)
tgacaagccaactctgtcaccattcgtgaggggagagttgcagtcctcttcaagctgttatcataagtacagtagtcagctacttggatatcaagactaagtgctgatatgaagacttgc

SEQ ID NO: 247575 - DNA, 120 bp, Artificial Sequence
  ENSG00000122741_24 (sequence is synthesized)
ctttgtgttttgttatgaaacacgcaagcataaagcaggactcaagcacaaggctgactgttctactttgaataacagcttccttgcagtctcctccacatgggtggtactgtgtttaga

SEQ ID NO: 247576 - DNA, 120 bp, Artificial Sequence
  ENSG00000122741_25 (sequence is synthesized)
agggattaccaaaggctggagcgatttaagctatgcactagccttgccctcttaggttgcattctctttaggccactggttctcaaacattagggtgcactgtaaccattacagagcttg

SEQ ID NO: 247577 - DNA, 120 bp, Artificial Sequence
  ENSG00000122741_26 (sequence is synthesized)
tgaaaagtgcagaaacctgagcctcaccttatgagattctgattcagccagggggaggacaggaatctgtatttttcatagcaacctcaagtaatctttattctgagggtctcgggattg

SEQ ID NO: 247578 - DNA, 84 bp, Artificial Sequence
  ENSG00000122741_27 (sequence is synthesized)
gcaacctcaagtaatctttattctgagggtctcgggattgcaggttgaaaaacacaaccttaatcagcagtaaattcttctcta

SEQ ID NO: 247579 - DNA, 120 bp, Artificial Sequence
  ENSG00000122741_28 (sequence is synthesized)
acccatttgggcttaagacaattcccagaaagtgttttcattatttaaaaaataataatagtaaatgaaagcaattttagaggtggaaaataccttagaatggaatcatttgcattattt

SEQ ID NO: 247580 - DNA, 120 bp, Artificial Sequence
  ENSG00000122741_29 (sequence is synthesized)
gacaaatgagagaagtgacatgacttgcctaaggtcatcctgcaaagttagtggcagagttaggacttgaattccagtcttctaattccttggtcagggcaatttctactgtgttatgct

SEQ ID NO: 247581 - DNA, 120 bp, Artificial Sequence
  ENSG00000122741_30 (sequence is synthesized)
gctgagaattctagccataagaagaaaagtattttaaatcttacagaaatgtttaaacaacccaaaatacatgaataaaaatgacatttctttgtaggacctgccaactaactattcaca

SEQ ID NO: 247582 - DNA, 120 bp, Artificial Sequence
  ENSG00000122741_31 (sequence is synthesized)
cacatttatagaggttataaggatcttggctctagaacaaatttttgaaattagatcattttaccatggatgttaacaaaattggaaattttttgtcactgagaaaattatcacaaagca

SEQ ID NO: 247583 - DNA, 120 bp, Artificial Sequence
  ENSG00000122741_32 (sequence is synthesized)
ttttttgtcactgagaaaattatcacaaagcacagtaaatacatatacttaccatacattttgtaaaaaacacattttttaaagaaaatagggatgggtatggtggctcacgtctgtaat

SEQ ID NO: 247584 - DNA, 64 bp, Artificial Sequence
  ENSG00000122741_33 (sequence is synthesized)
gcactttgggaggccaaggtgggaggttcacttgagcccaggagttccatgggcatgttggtac

SEQ ID NO: 247585 - DNA, 68 bp, Artificial Sequence
  ENSG00000122741_34 (sequence is synthesized)
ccctgggcaatagagccagatcctgtctcaaaaaataaaaatagactgggcatggtggctcatgcctg

SEQ ID NO: 247586 - DNA, 86 bp, Artificial Sequence
  ENSG00000122741_35 (sequence is synthesized)
gttttggaggtgaaaacacccaaactgttattatttaaaaatacctaccaagtactgtggtcatattgacattcaaaagaagtttc

SEQ ID NO: 247587 - DNA, 120 bp, Artificial Sequence
  ENSG00000122741_36 (sequence is synthesized)
accaagtactgtggtcatattgacattcaaaagaagtttcataaatcgtatcaactctggaaagagttcatgtcagatgctagaccagcaagttacccaactcaaaattcagccaatgat

SEQ ID NO: 247588 - DNA, 120 bp, Artificial Sequence
  ENSG00000122741_37 (sequence is synthesized)
tctttactatagagtacctatcatgtgtcaaataatatacagacttcactactaaccctcacaaaaacttgcagggtaggtggaatgagccccaatttaatttggaggtaatagtgggtc

SEQ ID NO: 247589 - DNA, 120 bp, Artificial Sequence
  ENSG00000122741_38 (sequence is synthesized)
agaaagattaaatgacttgccttaagtcatagagttagcagtgagtggcagcactgggattcaaacccaggtttgtgtcttgtccaaagcctgtgcttactgctttaccattgtgctctt

SEQ ID NO: 247590 - DNA, 120 bp, Artificial Sequence
  ENSG00000122741_39 (sequence is synthesized)
tagtttgtaaagtatggtaagctggcctgttatttgtttagtatcttctggattttttttttttaattatagagctagcttaccgtgtgtatcatgtaaaaaaaattcataagattaaca

SEQ ID NO: 247591 - DNA, 120 bp, Artificial Sequence
  ENSG00000122741_40 (sequence is synthesized)
atttccatgagaatatcataaactcagggcacacattctggccattcctgactaaaaaacttcaagcagaataagcagctataaaatagaaaagaaaaattaaggataaacggcattgtg

SEQ ID NO: 247592 - DNA, 120 bp, Artificial Sequence
  ENSG00000122741_41 (sequence is synthesized)
aaaaaaaaccgagccacacagatgagaattaaaaattaacagccagcaaactcaaaagaacctttgtcctccttgagatatggtgatgatcaaaaagttagcaaggaatattaatcaagg

SEQ ID NO: 247593 - DNA, 120 bp, Artificial Sequence
  ENSG00000122741_42 (sequence is synthesized)
aattaaagggcattaggaatgctatagtattggaagaaattacatcttaacatttcaaagccccatttcacttaagagtaaaatctaatctgatgttttttactctgaattttattcagt

SEQ ID NO: 247594 - DNA, 120 bp, Artificial Sequence
  ENSG00000122741_43 (sequence is synthesized)
aatttttattcataattcatgataattggtaatgtagtataattgttagtaaatgcagtacaaattgttctactgttttaaaaagttttccgcagaacagtgcatttatggcaatgctat

SEQ ID NO: 247595 - DNA, 120 bp, Artificial Sequence
  ENSG00000122741_44 (sequence is synthesized)
gtttaatgagttagggacatcaaatatatagtagttccttattttcagttgtgaaaatgaaatggctaaagcagaagagacgtctattttagtcttttaaaaatgtgtgtgggtggtctt

SEQ ID NO: 247596 - DNA, 120 bp, Artificial Sequence
  ENSG00000122741_45 (sequence is synthesized)
ttttcctcagaagcccaaagcacatgtatattttgttatttctccttgctatattcctgagactatactaaaaactttaagaaaaggaacaagaaaaaggtaaattcatgtgttccccac

SEQ ID NO: 247597 - DNA, 120 bp, Artificial Sequence
  ENSG00000122741_46 (sequence is synthesized)
tgctgtgtctagaaccaagatcacattatatcattgttaaaattgtgttatctagaaagtgcaatatagggaaaacactctaagaatcttttaaaagcctagtgtttcccttatttgtca

SEQ ID NO: 247598 - DNA, 120 bp, Artificial Sequence
  ENSG00000122741_47 (sequence is synthesized)
gaatatgtggtagtggcatccataagtatcttttaacttgcatttagcaggacaaatagtgtgatacttatactgatgacaatcatccccatttaatgaccagcagtcactgagcgctgt

SEQ ID NO: 247599 - DNA, 120 bp, Artificial Sequence
  ENSG00000122741_48 (sequence is synthesized)
gaaaattcactcagtgataccccgtgttggtcttgaaggaaaccgtacatatgaatttttggatagctaatgtatatctctcaagtgccaacatttaaaacttgtaattatttttgatgt

SEQ ID NO: 247600 - DNA, 120 bp, Artificial Sequence
  ENSG00000122741_49 (sequence is synthesized)
gagtatttcaggtatgttagtataccttcctgccttcttcttaaacatcatgctcagtataattcacattttcatgatgaaaagttaaagttatattcataatgtattattataagtatc

SEQ ID NO: 247601 - DNA, 120 bp, Artificial Sequence
  ENSG00000122741_50 (sequence is synthesized)
cagctctgatgtatgtaaaacacttcataaaatgtaaagggctataacaaatatgttataaagtgattctctcagccctgaggtatacagaatcatttgcctcagactgctgttggattt

SEQ ID NO: 247602 - DNA, 120 bp, Artificial Sequence
  ENSG00000122741_51 (sequence is synthesized)
taaaatttttaaaatatctgctaagtaatttgctatgtcttctcccacactatcaatatgcctgcttctaacaggctccccactttcttctaatgtgctgttatgagctttggacatgag

SEQ ID NO: 247603 - DNA, 120 bp, Artificial Sequence
  ENSG00000122741_52 (sequence is synthesized)
ataaccgtgcctgttcagagtgtctacagtaagagctggacaaactctggggggacacagtctttgagacagctcttttggttgctttccacttttctgaaaggttcacagtaaccttct

SEQ ID NO: 247604 - DNA, 120 bp, Artificial Sequence
  ENSG00000122741_53 (sequence is synthesized)
agataatagaaactcccagttaaagcctaggctagcaattttttttagttgcaactaagtaagatatactacaaactaaggatgctgctagactaaggaataaacagcaaggtaccaaag

SEQ ID NO: 247605 - DNA, 120 bp, Artificial Sequence
  ENSG00000122741_54 (sequence is synthesized)
tacagcaaagcaacaacaaaggctctgtatttgcagaggggtctatcatgcttttaagaaaaaagaagagtacaggaaaaaaattcagatagacataagagtattttggatgccattaaa

SEQ ID NO: 247606 - DNA, 120 bp, Artificial Sequence
  ENSG00000122741_55 (sequence is synthesized)
ctttgtcaataaccattaaaacataggcttaaattatcacgtattgttacaaagacacagttttgtctcattataaaataagattatatgaaatttatattctagaaatgattccaaatc

SEQ ID NO: 247607 - DNA, 120 bp, Artificial Sequence
  ENSG00000122741_56 (sequence is synthesized)
atgtcctaagaatttctcccattcaaatgataatggaaattactgtcaaaaggaaaatctcaaagttaccattacgctgctctcttgtaaatgaactagggataaagatatgggttttat

SEQ ID NO: 247608 - DNA, 120 bp, Artificial Sequence
  ENSG00000122741_57 (sequence is synthesized)
caaaagccctaaggaatatatctcacattcacctcctatatgtatgtgtatatataaatgccactataaatgaaaatgtcacccagagataataaaataatttttaaagtttaaatctgg

SEQ ID NO: 247609 - DNA, 120 bp, Artificial Sequence
  ENSG00000122741_58 (sequence is synthesized)
tccaaagtctttaaaataggtagattttcagctttcttaagtttctccctcatttagatttcatggtttttacataaagggtgaatatttgaattttcttttaaatttcactgcatcttc

SEQ ID NO: 247610 - DNA, 120 bp, Artificial Sequence
  ENSG00000122741_59 (sequence is synthesized)
aattgcccaactgtgtttcctgataaattttagattcacatttttaggaaatttggagtattccagacaatatactagatacccagaaacttttctcagtaggttctgaggtgttttaag

SEQ ID NO: 247611 - DNA, 120 bp, Artificial Sequence
  ENSG00000122741_60 (sequence is synthesized)
ttcttatgctagactgtaagctccttgagggcagagactgttttatttattcttgtatcctcagtgcctggtacaggacttgacacagagtagttgttcaataaatatttgttgaatgaa

SEQ ID NO: 247612 - DNA, 120 bp, Artificial Sequence
  ENSG00000122741_61 (sequence is synthesized)
gctgacagttgcttgtgaacaaactgaagttctgctttttgaccctatatcttcaaagcacataaaaacactttctgaagctcatgaagactgtgtaaataatatcaggtatacagaaga

SEQ ID NO: 247613 - DNA, 120 bp, Artificial Sequence
  ENSG00000122741_62 (sequence is synthesized)
agcagcactccaccttcaacagggctcattggacaaattgccattgccgtgtgtgcagagcttaggccgatcgctgactgcagtctctgccttcaagggcatactgctagagatcctgct

SEQ ID NO: 247614 - DNA, 120 bp, Artificial Sequence
  ENSG00000122741_63 (sequence is synthesized)
tctcgactctcctgtttctgtcctctcttgcttcatatggtatcattatcccttccaaactcttcttattcctctcctgctggggttgagcaaggtgggaggtactttaaaggccagcat

SEQ ID NO: 247615 - DNA, 80 bp, Artificial Sequence
  ENSG00000122756_0 (sequence is synthesized)
gaggctcggcggtgggatccggcgggcggtgctagctccgcgctccctgcctcgctcgctgccgggggcggtcggaaggc

SEQ ID NO: 247616 - DNA, 120 bp, Artificial Sequence
  ENSG00000122756_1 (sequence is synthesized)
gcggcgcgaagcccgggtggcccgagggcgcgatggctgctcctgtcccgtgggcctgctgtgctgtgcttgccgccgccgccgcagttgtctacgcccagagacacagtccacaggagg

SEQ ID NO: 247617 - DNA, 120 bp, Artificial Sequence
  ENSG00000122756_2 (sequence is synthesized)
caccccatgtgcagtacgagcgcctgggctctgacgtgacactgccatgtgggacagcaaactgggatgctgcggtgacgtggcgggtaaatgggacagacctggcccctgacctgctca

SEQ ID NO: 247618 - DNA, 120 bp, Artificial Sequence
  ENSG00000122756_3 (sequence is synthesized)
acggctctcagctggtgctccatggcctggaactgggccacagtggcctctacgcctgcttccaccgtgactcctggcacctgcgccaccaagtcctgctgcatgtgggcttgccgccgc

SEQ ID NO: 247619 - DNA, 120 bp, Artificial Sequence
  ENSG00000122756_4 (sequence is synthesized)
gggagcctgtgctcagctgccgctccaacacttaccccaagggcttctactgcagctggcatctgcccacccccacctacattcccaacaccttcaatgtgactgtgctgcatggctcca

SEQ ID NO: 247620 - DNA, 120 bp, Artificial Sequence
  ENSG00000122756_5 (sequence is synthesized)
aaattatggtctgtgagaaggacccagccctcaagaaccgctgccacattcgctacatgcacctgttctccaccatcaagtacaaggtctccataagtgtcagcaatgccctgggccaca

SEQ ID NO: 247621 - DNA, 120 bp, Artificial Sequence
  ENSG00000122756_6 (sequence is synthesized)
atgccacagctatcacctttgacgagttcaccattgtgaagcctgatcctccagaaaatgtggtagcccggccagtgcccagcaaccctcgccggctggaggtgacgtggcagaccccct

SEQ ID NO: 247622 - DNA, 120 bp, Artificial Sequence
  ENSG00000122756_7 (sequence is synthesized)
atcacagatgcctacgccgggaaggagtacattatccaggtggcagccaaggacaatgagattgggacatggagtgactggagcgtagccgcccacgctacgccctggactgaggaaccg

SEQ ID NO: 247623 - DNA, 120 bp, Artificial Sequence
  ENSG00000122756_8 (sequence is synthesized)
cgacacctcaccacggaggcccaggctgcggagaccacgaccagcaccaccagctccctggcacccccacctaccacgaagatctgtgaccctggggagctgggcagcggcgggggaccc

SEQ ID NO: 247624 - DNA, 120 bp, Artificial Sequence
  ENSG00000122756_9 (sequence is synthesized)
tcggcacccttcttggtcagcgtccccatcactctggccctggctgccgctgccgccactgccagcagtctcttgatctgagcccggcaccccatgaggacatgcagagcacctgcagag

SEQ ID NO: 247625 - DNA, 120 bp, Artificial Sequence
  ENSG00000122756_10 (sequence is synthesized)
gagcaggaggccggagctgagcctgcagaccccggtttctattttgcacacgggcaggaggaccttttgcattctcttcagacacaatttgtggagaccccggcgggcccgggcctgccg

SEQ ID NO: 247626 - DNA, 120 bp, Artificial Sequence
  ENSG00000122756_11 (sequence is synthesized)
ccccccagccctgccgcaccaagctggccctccttcctccctcaggggaggtgggccatgcagctaacccacccaccaaagaccccctcaccctggccccttgggctggaccctccaatg

SEQ ID NO: 247627 - DNA, 120 bp, Artificial Sequence
  ENSG00000122756_12 (sequence is synthesized)
ccagcgactcccaggagcccttgggggacgtgaggggagcctctcacatccgatttctcctcctgccccagcctcctgtctatcccagggtctctgttgccaccatcagattataagctc

SEQ ID NO: 247628 - DNA, 120 bp, Artificial Sequence
  ENSG00000122756_13 (sequence is synthesized)
ctgatgctgggggggcccagccatccccctccccccagcacccacaattttcagtcccctcccctctgccctgttttgtatacccctcccctgaccctgctcctatcccacagtatttaa

SEQ ID NO: 247629 - DNA, 120 bp, Artificial Sequence
  ENSG00000122756_14 (sequence is synthesized)
tgccctgtcagtcccttctagtctgactcaatggtaacttgctgtatttgaattttttatagatgtatatacagggtggggggagtgggcggttctcattaaacgtcaccatttcatgag

SEQ ID NO: 247630 - DNA, 120 bp, Artificial Sequence
  ENSG00000122756_15 (sequence is synthesized)
ccggggctgcgcgtgaagcacggggaccacagccgtcttgagggcgcgcccgagaaaggactctagccttgtcacctcatcttgcccccttggttttggaagtcctgaagagttggtctg

SEQ ID NO: 247631 - DNA, 120 bp, Artificial Sequence
  ENSG00000122778_0 (sequence is synthesized)
cgacggccttccgcccgctgcgcccgccgccgccgcccggggctgctgcttcctggcctctggctgctgctgctggcccggccggcctcgtgcgccccagatgagctctctccggaacag

SEQ ID NO: 247632 - DNA, 120 bp, Artificial Sequence
  ENSG00000122778_1 (sequence is synthesized)
gctctctccggaacagcacaacctttctttatactccatggagctcgtgctgaagaaaagcactgggcacagcgctgcacaagtggccttaacagaaactgctcccggctcccagcacag

SEQ ID NO: 247633 - DNA, 120 bp, Artificial Sequence
  ENSG00000122778_2 (sequence is synthesized)
cagtcctctccatgtcacagccccgccgtctgccactacttttgatacagccttttttaaccaaggaaaacagaccaaaagtacagcagatcccagcatctttgtggcaacttacgtgtc

SEQ ID NO: 247634 - DNA, 120 bp, Artificial Sequence
  ENSG00000122778_3 (sequence is synthesized)
agtgacgagtaaagaggtggccgtcaatgacgatgagatggataactttctgccagatactcactggaccactccacggatggtttctccaatacagtatatcacagtcagcccaccagg

SEQ ID NO: 247635 - DNA, 120 bp, Artificial Sequence
  ENSG00000122778_4 (sequence is synthesized)
gctgcccagggaagcattagaacctatgctcactccatcattacccatggtttctttacaagatgaagaagtgacatcgggctggcagaacacaacgcgacaaccagcggcatatgctga

SEQ ID NO: 247636 - DNA, 120 bp, Artificial Sequence
  ENSG00000122778_5 (sequence is synthesized)
gtccgccagtcatttccacacctttcggtcagcttttcgcacctctgagggcatcgttccaactcctggcaggaatttggtgctttatcctactgatgcttacagtcatttatcaagcag

SEQ ID NO: 247637 - DNA, 120 bp, Artificial Sequence
  ENSG00000122778_6 (sequence is synthesized)
gactctgccagagattgtggcttccctaacagagggtgtggaaaccaccctttttttaagctcccggtctttaatgccacagccgttaggcgacggcattactataccgttgccctcctt

SEQ ID NO: 247638 - DNA, 120 bp, Artificial Sequence
  ENSG00000122778_7 (sequence is synthesized)
gggggaggtctcacagcctccagaggaggtttgggccacaagtgcagacagatacactgatgtgaccactgtgttgagtcaaagcctagaagaaaccatctctccaagaacataccccac

SEQ ID NO: 247639 - DNA, 120 bp, Artificial Sequence
  ENSG00000122778_8 (sequence is synthesized)
tgtgactgcatcgcacgcagcccttgcattcagcaggacacattctccattgctttcaactcctcttgcatttgcgtcctctgcttcaccaactgatgtttcatctaacccctttctccc

SEQ ID NO: 247640 - DNA, 120 bp, Artificial Sequence
  ENSG00000122778_9 (sequence is synthesized)
tagcgactccagcaaaacatccgaattgcatagcaattcagccctccccggtcctgtggacaacactcatatcctgagcccggtgtcctcattcagaccatacacttggtgtgcggcctg

SEQ ID NO: 247641 - DNA, 120 bp, Artificial Sequence
  ENSG00000122778_10 (sequence is synthesized)
cactgtgccttcacctcagcaagttctggccacgagcctcatggagaaagacgtgggatcaggggatggtgccgagactctgtgcatgaccgtgctggaagaaagcagcatctctctaat

SEQ ID NO: 247642 - DNA, 120 bp, Artificial Sequence
  ENSG00000122778_11 (sequence is synthesized)
gagtagcgtcgtagcagacttctctgaatttgaggaagatcctcaagtatttaatacgcttttcccctccagacctatcgtcccactttcttctagatccatggaaatctcagagacgag

SEQ ID NO: 247643 - DNA, 120 bp, Artificial Sequence
  ENSG00000122778_12 (sequence is synthesized)
tgttggcatttctgccgaggtggatatgagtagtgttacaaccacacaggttccccctgcccacggccgcctctctgtgccggcgtcacttgatcctactgctggctccttgtctgttgc

SEQ ID NO: 247644 - DNA, 120 bp, Artificial Sequence
  ENSG00000122778_13 (sequence is synthesized)
tgaaacccaagtgacgccatccagcgtgaccactgcatttttctcggtcatcaccagcattctccttgactcatctttctctgtcatagcaaacaaaaacacaccgtcgcttgccgtcag

SEQ ID NO: 247645 - DNA, 120 bp, Artificial Sequence
  ENSG00000122778_14 (sequence is synthesized)
agacccgagtgtttttacgccttatagtctggttccttcagtggagtcttcacttttctctgaccaagaacgttccagtttttctgagcataaacccagaggtgctttggattttgcatc

SEQ ID NO: 247646 - DNA, 120 bp, Artificial Sequence
  ENSG00000122778_15 (sequence is synthesized)
cagctttttctcaacacccccgctggaactcagcggctccatctcttcgccttcggaagcacctgcgtctctgtctctgatgccgagtgacttgtcccccttcacatctcagtctttttc

SEQ ID NO: 247647 - DNA, 120 bp, Artificial Sequence
  ENSG00000122778_16 (sequence is synthesized)
tcccttggttgagacatttacattgtttgactctagtgatctgcagtcatctcagctgtctcttcccagttccacaaatcttgagttttcgcagctccagccaagttccgagctgccttt

SEQ ID NO: 247648 - DNA, 120 bp, Artificial Sequence
  ENSG00000122778_17 (sequence is synthesized)
aaacaccatcatgttgctacctagccgttctgaggtgtcaccatggtcaagcttcccttctgattctctcgagtttgttgaagcgtctacggtttcactgacggattcagaagctcattt

SEQ ID NO: 247649 - DNA, 120 bp, Artificial Sequence
  ENSG00000122778_18 (sequence is synthesized)
tacctcagctttcattgaaactacctcctatcttgagtcttcactcatttcccatgaatccgcagtcactgcactggtgccccccggctctgagtcttttgacattttgactgccgggat

SEQ ID NO: 247650 - DNA, 120 bp, Artificial Sequence
  ENSG00000122778_19 (sequence is synthesized)
tcaagcaacatcaccattgaccactgtccacacaacgcccattttaactgagtcttctttgttctcaactctgacacctcctgacgaccaaatcagtgctctagacggtcacgtgtctgt

SEQ ID NO: 247651 - DNA, 120 bp, Artificial Sequence
  ENSG00000122778_20 (sequence is synthesized)
cctggcctctttctccaaagccattcccactggtacggtgttgatcactgacgcgtacctgccatcaggatcctcgtttgtttctgaagcaacccccttccctctgcccacagagctgac

SEQ ID NO: 247652 - DNA, 120 bp, Artificial Sequence
  ENSG00000122778_21 (sequence is synthesized)
cgtcgtgggcccatcactcacacccacagaggtgccactgaacacctccacggaagtgagcacaaccagcaccggtgctgccactggtggtcccctcgactccaccctgatgggtgacgc

SEQ ID NO: 247653 - DNA, 120 bp, Artificial Sequence
  ENSG00000122778_22 (sequence is synthesized)
cgcaagtcagagccccccagagagtagtgctgctcctcccctgccatccctgcgtcccgtgactgccttcactctcgaagcaacagtcgacacaccaacactggctactgccaagccgcc

SEQ ID NO: 247654 - DNA, 120 bp, Artificial Sequence
  ENSG00000122778_23 (sequence is synthesized)
atatgtttgtgatatcacagtccccgatgcctatctgatcacaactgtgctggccagaagagctgtgcaggagtacatcattacagcaatcaaagaagtactgaggattcacttcaaccg

SEQ ID NO: 247655 - DNA, 120 bp, Artificial Sequence
  ENSG00000122778_24 (sequence is synthesized)
tgcagtggaactgaaggtttacgaactatttactgacttcacttttctggtaacatccggtcctttcgtttacacggcaatatccgtcataaatgtgcttataaacagtaagcttgtccg

SEQ ID NO: 247656 - DNA, 120 bp, Artificial Sequence
  ENSG00000122778_25 (sequence is synthesized)
tgaccagactcctttaatcctgtctgtgaaaccttctttccttgtgccagagtccaggttccaagttcaaacagtacttcagtttgtgcctccgagtgtggatactggcttctgcaactt

SEQ ID NO: 247657 - DNA, 120 bp, Artificial Sequence
  ENSG00000122778_26 (sequence is synthesized)
cacccagcgcattgagaaaggcctaatgacagctctctttgaagtgagaaaacaccaccagggaacgtataacctcacggtgcagatcttgaatatcaccatcagttcctcaagggtgac

SEQ ID NO: 247658 - DNA, 120 bp, Artificial Sequence
  ENSG00000122778_27 (sequence is synthesized)
tcctcggcggggcccggtgaatatcatctttgcggttaaaagcacacagggatttttgaatgggtcggaagtgagcgagctgctcagaaacttgagtgtggtggagttcagtttctatct

SEQ ID NO: 247659 - DNA, 120 bp, Artificial Sequence
  ENSG00000122778_28 (sequence is synthesized)
gggatacccagtgctgcagatcgcagagcccttccagtatccacagctcaacttatctcagttgctgaagtcctcttgggtcagaacagttctcctgggcgtcatggagaagcaactcca

SEQ ID NO: 247660 - DNA, 120 bp, Artificial Sequence
  ENSG00000122778_29 (sequence is synthesized)
gaatgaagtgtttcaagccgagatggaacgcaagctggcccagctgctcagcgaggtttccaccagaaggcggatgtggagaagggccactgtagctgcagggaacagtgtggtgcaggt

SEQ ID NO: 247661 - DNA, 120 bp, Artificial Sequence
  ENSG00000122778_30 (sequence is synthesized)
ggtaaatgtgtcgaggctggagggagatgacaatccggtacagctcatctactttgtggaggatcaagatggagaaagactcagtgcagtcaagtcttcggacctgattaacaaaatgga

SEQ ID NO: 247662 - DNA, 120 bp, Artificial Sequence
  ENSG00000122778_31 (sequence is synthesized)
cctccagagagcagccatcatcttgggttaccgaattcaaggtgtcattgcccagcctgtcgacagggtgaagaggccgtctccggaatcccagagcaacaacttgtgggtcattgttgg

SEQ ID NO: 247663 - DNA, 120 bp, Artificial Sequence
  ENSG00000122778_32 (sequence is synthesized)
cgtggtcatcccagtgctggtggtgatggtgattgttgtcatcctctactggaaactatgccgcacagacaagctagactttcagcctgacactgtggccaacattcagcagcgtcagaa

SEQ ID NO: 247664 - DNA, 120 bp, Artificial Sequence
  ENSG00000122778_33 (sequence is synthesized)
gctgcagatccctagtgtgaagggcttcgattttgctaagcagcatctgggtcagcacaataaagacgacatattgattattcatgagccagcgccactgccaggacctctgaaggacca

SEQ ID NO: 247665 - DNA, 120 bp, Artificial Sequence
  ENSG00000122778_34 (sequence is synthesized)
caccacgccctcggaaaatggagacgtgccaagccccaagtcaaagatcccttccaagaatgttcgtcacagaggaagagtttctccctcagatgctgactctacggtcagtgaagagtc

SEQ ID NO: 247666 - DNA, 120 bp, Artificial Sequence
  ENSG00000122778_35 (sequence is synthesized)
cagcgagagggacgcaggagataagacgccgggagccgtcaacgatggcaggtcccacagagctccgcagagcgggccaccactgcccagttcgggaaatgagcagcactcatcagcctc

SEQ ID NO: 247667 - DNA, 120 bp, Artificial Sequence
  ENSG00000122778_36 (sequence is synthesized)
catcttcgagcacgtggacaggatctcccgccccccggaggctagccggcgggtccccagtaagatccagcttatcgccatgcagccgatcccggcacctcccgtccagcgcccctcccc

SEQ ID NO: 247668 - DNA, 120 bp, Artificial Sequence
  ENSG00000122778_37 (sequence is synthesized)
agccgaccgagtggcggaaagcaataaaatcaacaaagagattcagaccgcgctgcggcacaagtctgagatcgagcaccatcgcaacaagatccgcctgcgcgccaagcgccgcgggca

SEQ ID NO: 247669 - DNA, 120 bp, Artificial Sequence
  ENSG00000122778_38 (sequence is synthesized)
ctacgagttcccggtggtagacgacctgtcctcgggcgacactaaggagcgacaccgggtgtaccgcagggcacagatgcagatcgacaagatcctggaccccacggccagcgtgccctc

SEQ ID NO: 247670 - DNA, 120 bp, Artificial Sequence
  ENSG00000122778_39 (sequence is synthesized)
cgtgttcatagagcccaggaagagctcacggataaaacgttctcccaagcctcgccggaaacaccaggtcaacggctgtcctgccgacgctgagaaggaccggctcatcaccacagacag

SEQ ID NO: 247671 - DNA, 120 bp, Artificial Sequence
  ENSG00000122778_40 (sequence is synthesized)
cgatggcacctacaggaggccccccggcgtccacaactcagcctacatcggatgcccatcggatcctgacctcccagccgatgtgcagacaccatcctcggtggaactggggaggtatcc

SEQ ID NO: 247672 - DNA, 120 bp, Artificial Sequence
  ENSG00000122778_41 (sequence is synthesized)
agcccttcccttcccggcctcccagtacatcccaccccagccgtccatcgaggaggcacgccagaccatgcactccctcctggacgacgcctttgccctcgtggcccccagcagccagcc

SEQ ID NO: 247673 - DNA, 120 bp, Artificial Sequence
  ENSG00000122778_42 (sequence is synthesized)
tgccagcaccgcaggtgtaggccccggagtcccacccggcctgcccgcaaacagcaccccttcccaggaagagaggcgagccacccagtgggggtccttctacagcccagcccagacggc

SEQ ID NO: 247674 - DNA, 120 bp, Artificial Sequence
  ENSG00000122778_43 (sequence is synthesized)
caacaatccctgcagtagatacgaagactatggaatgactcccccgacgggtccattgccaagaccaggttttggccccggtttgctgcagtctacagagctggtgccccctgaccctca

SEQ ID NO: 247675 - DNA, 120 bp, Artificial Sequence
  ENSG00000122778_44 (sequence is synthesized)
gcagccacaggcctccgccgaagccccatttgctgccagagggatctactcggaggagatgccgtcggtggcccggcctcggcctgtcgggggtaccacaggctcccagatccagcacct

SEQ ID NO: 247676 - DNA, 120 bp, Artificial Sequence
  ENSG00000122778_45 (sequence is synthesized)
gacacaggtggggattgccagcagaattggagctcagccagtggaaatcccgccaagcagaggcagccagtatggggggccaggctggccttcgtacggggaggacgaagcggggcgaag

SEQ ID NO: 247677 - DNA, 120 bp, Artificial Sequence
  ENSG00000122778_46 (sequence is synthesized)
agaggccgtgccaaggacttcaggcagggagccctcagctccttccgggaacctcccccaccggggactgcagggccctgggctgggttaccccaccagctccacggaagacctccagcc

SEQ ID NO: 247678 - DNA, 120 bp, Artificial Sequence
  ENSG00000122778_47 (sequence is synthesized)
tggccactcctcggcctctctcatcaaagcaatccgcgaggagctcctccggctctcccagaaacagagcaccgtgcagaacttccacagctgatcggcctcgcctcgcagatttgccaa

SEQ ID NO: 247679 - DNA, 120 bp, Artificial Sequence
  ENSG00000122778_48 (sequence is synthesized)
gtatccgcttcctgtggaagcaagaccaaaaggaaatcaactgagtgggtgtttggaagaggaaggagcaactctcgggcagcctgcccaagggagggagcaagttgcaatttagaagat

SEQ ID NO: 247680 - DNA, 120 bp, Artificial Sequence
  ENSG00000122778_49 (sequence is synthesized)
gccatacgtcgtgtgacagctcatgagcctttcactgggctggcaattgtctgaacacttgggttcagttgaaatatatgtattttggccaaaagccagcagcacttcacaaaaacaaaa

SEQ ID NO: 247681 - DNA, 120 bp, Artificial Sequence
  ENSG00000122778_50 (sequence is synthesized)
aatgactgcattcgtctcttttttaaaggtagagattaaactgtatagacagcatagggatgaaaggaaccaagcgtttctgtgggattgagactggtacgtgtacgatgaacctgctgc

SEQ ID NO: 247682 - DNA, 120 bp, Artificial Sequence
  ENSG00000122778_51 (sequence is synthesized)
tttgttttctgagaagaggtttgaagacattttattaacagcttaatttttctcttttactccataggaacttattttaatagtaacattaacaacaagaatactaagactgtttgggaa

SEQ ID NO: 247683 - DNA, 120 bp, Artificial Sequence
  ENSG00000122778_52 (sequence is synthesized)
ttttaaaaagctactagtgagaaaccaaatgataggttgtagagcctgatgactccaaacaaagccatcacccgcattcttcctccttcttctggtgctacagctccaagggcccttcac

SEQ ID NO: 247684 - DNA, 120 bp, Artificial Sequence
  ENSG00000122778_53 (sequence is synthesized)
cttcatgtctgaaatggaactttggctttttcagtggaagaatatgttgaaggtttcattttgttctagaaaaaaaaaatccctcccaaagtggggcaaaaagctttatatttatttgat

SEQ ID NO: 247685 - DNA, 120 bp, Artificial Sequence
  ENSG00000122778_54 (sequence is synthesized)
tatccaaaatacagatcaaagtttagatctacattcttcattgtatttgctgtttcttaattgggcacacacaactcctggtcatgtcccagttcagcaccgatcgctaaggccgatcct

SEQ ID NO: 247686 - DNA, 120 bp, Artificial Sequence
  ENSG00000122778_55 (sequence is synthesized)
gtagaatgcggctttcaagaggtcctaactgatcctttcttccactttgctgttgatttgttcacaaattatgtctgaatgagaaatcttctgtaagcagaagttatttaataattccca

SEQ ID NO: 247687 - DNA, 120 bp, Artificial Sequence
  ENSG00000122778_56 (sequence is synthesized)
gcaccacgaaattgttatacatacatccctaccagtcacattccctgtgttcagagcctggaaatgaaattgagttcagttcagcctctctgtaatgaatcaagaaatgtaaaagagctt

SEQ ID NO: 247688 - DNA, 120 bp, Artificial Sequence
  ENSG00000122778_57 (sequence is synthesized)
tgagaccccaagggaaaggagagagttgcttctcatttctgattttattgtgctgttactctgtcgagtggctattaaaattgtcttatgctctttgggctaagaggggatcatctcgct

SEQ ID NO: 247689 - DNA, 120 bp, Artificial Sequence
  ENSG00000122778_58 (sequence is synthesized)
taagatgtactcctgatgtaaacatttcccccactttccaaataatggtaaagaaaacagtggcaagggctgttctgttttctggtacctgagtgaaactcagaagaaaagcaggcttag

SEQ ID NO: 247690 - DNA, 120 bp, Artificial Sequence
  ENSG00000122778_59 (sequence is synthesized)
ctaagagattttcactattaacctgtttttattagatcagcgaagacagtcatgcatcgcttaatgatggggatgcattctgagaaatgtgtcattaggctgttttgttgctgtgccaac

SEQ ID NO: 247691 - DNA, 120 bp, Artificial Sequence
  ENSG00000122778_60 (sequence is synthesized)
ttgttgctgtgccaacatcctagattgtacttacacaacctacatggtatagcctactacacacctgggctgtgtggcatggcctattcctcttaggctacaaacctgtacagcatgtta

SEQ ID NO: 247692 - DNA, 120 bp, Artificial Sequence
  ENSG00000122778_61 (sequence is synthesized)
ggtaagtatttgtgtatctaaacatagctaaacatagaaaaggtatggtaaaaatacaattttataatcttatgggactaccatcaatatgtagaccgtcattgaccaaaacatcctgat

SEQ ID NO: 247693 - DNA, 120 bp, Artificial Sequence
  ENSG00000122778_62 (sequence is synthesized)
gtgtgcatgactgtacttttcattaaataacagataaggggctatagaatttggggctctgactgatcaaaacctgtgtatctgtgtcaagttttaagacccctgaaacagctaaaacag

SEQ ID NO: 247694 - DNA, 120 bp, Artificial Sequence
  ENSG00000122778_63 (sequence is synthesized)
gtttccaaagtgtaatcactggatttcaaaaccatgttttagcccttcattaatgaagcctgttgtacagatttagagtcttacaatatgagggaagttggttctgggaaggtaagatgt

SEQ ID NO: 247695 - DNA, 120 bp, Artificial Sequence
  ENSG00000122778_64 (sequence is synthesized)
agccagttttcatctgggcacctctgaaagagaaggagtgcaggagagtaagtctctcaaggacgttcaacaaaggaccagcagcatcttatcaggcgatcctcagaggctccaaggagc

SEQ ID NO: 247696 - DNA, 120 bp, Artificial Sequence
  ENSG00000122778_65 (sequence is synthesized)
attggagagaatgcccctttctgggcttgatgtcttggttttggtttaataccaaatttctcttggtcttggtttaatacccgactcctcccaaattgaacgattatctttgtatgtcac

SEQ ID NO: 247697 - DNA, 120 bp, Artificial Sequence
  ENSG00000122778_66 (sequence is synthesized)
tcaaaaataccaggtttcctgaatatgttattaagaatttcagatatccaagcagaattttattatggacaccttgtaatgaattcaaatcgtgtgacagcaaacgggataaatggcccc

SEQ ID NO: 247698 - DNA, 120 bp, Artificial Sequence
  ENSG00000122778_67 (sequence is synthesized)
ttctcacccagttccgctcagggccatacaggcttgcacatagagtgtgctaaaaatggtaacctcctttgagcattgcagaaagagggttctgtttcaaattgggctgaccgtaaaagc

SEQ ID NO: 247699 - DNA, 120 bp, Artificial Sequence
  ENSG00000122778_68 (sequence is synthesized)
aattttgatgtctttcaaactaccataaagggattttaactgtatttttattcttagaaacaatacacctttaaacagatgtcaagaccaaagatgatgtataataaacagccggtggtt

SEQ ID NO: 247700 - DNA, 120 bp, Artificial Sequence
  ENSG00000122778_69 (sequence is synthesized)
atggtgtggtgtgagcaggcccccggatcaccagccctctgctggtggtcataaagcacacacagtttgtacttgcttcctctcgacgcctgccacaacagttttgccagtcaccaaact

SEQ ID NO: 247701 - DNA, 120 bp, Artificial Sequence
  ENSG00000122778_70 (sequence is synthesized)
cagaaaaaactagctgtgtgagcagcaccgtaccctagcggtcttcagacattaagttcacgtcatccactgaaaggaagggtccttgcgttgacagcgtgtggctttggagtccgttta

SEQ ID NO: 247702 - DNA, 120 bp, Artificial Sequence
  ENSG00000122778_71 (sequence is synthesized)
tggaagcactctacaatgaacagttgaattttatgtctattcttttttcctattttaaaagttctagtggtaacacaaactgtaaatttgagtcagaatgtttggagaaatgttgttttt

SEQ ID NO: 247703 - DNA, 120 bp, Artificial Sequence
  ENSG00000122778_72 (sequence is synthesized)
ttttttttcagagactactttgtcactcactgaccatgtctggttccttctctgaacttcattctccccataagccaaacaagaacagacctcccccgccacctcccaggcaccgtagtt

SEQ ID NO: 247704 - DNA, 120 bp, Artificial Sequence
  ENSG00000122778_73 (sequence is synthesized)
gtgagaatcagatgtgatcatgtgtgcagatgtcctgtgaggagggagcataaagcactgtgaaaatgtagcatgctgtctatgtggacgccctaggatgagtgatgtgaaacgctgcac

SEQ ID NO: 247705 - DNA, 120 bp, Artificial Sequence
  ENSG00000122778_74 (sequence is synthesized)
tactgcggtgaatgggttcacacatgggtaatgagcaaaaccgaaagctcggtgtgactcagtttcctcactcccattttgctttaatttcacttccttcaccaattttccgattgcatt

SEQ ID NO: 247706 - DNA, 120 bp, Artificial Sequence
  ENSG00000122778_75 (sequence is synthesized)
tattaagcatctttctgctcccgactttctggtgtctctggcaccaaataacccagcagacatgagccttgccttctgagattttagaatctaagatagcacgagtgggtatagaagatg

SEQ ID NO: 247707 - DNA, 120 bp, Artificial Sequence
  ENSG00000122778_76 (sequence is synthesized)
attttagaatctaagatagcacgagtgggtatagaagatggaagataccgataaataacatggtttaagtgtcaataaaattcattcgaagagatcaggcgcggtggctcacgcctgtaa

SEQ ID NO: 247708 - DNA, 120 bp, Artificial Sequence
  ENSG00000122778_77 (sequence is synthesized)
agctgagattgcaccactgtactccaacctgggcgacagagcaagactgtgtctcaaaaagaaaaaaatttgttcaaaagacataaatgaattaggcacccagaagaagttgcatgtttg

SEQ ID NO: 247709 - DNA, 120 bp, Artificial Sequence
  ENSG00000122778_78 (sequence is synthesized)
taggcacccagaagaagttgcatgtttggaaatgcaatatcttggggagacgtcaacttctgaagtgactttgaaggcagggcagctacccaggcaaatggcgtggaaggaagagctgag

SEQ ID NO: 247710 - DNA, 120 bp, Artificial Sequence
  ENSG00000122778_79 (sequence is synthesized)
agtgggcctgggaaaggctgtagggaaggagtgaagctgtcactgaaatgaacttgatcttgatctgctttgatatggggacagaatccccgactgcactattgagggagtttcagaaga

SEQ ID NO: 247711 - DNA, 120 bp, Artificial Sequence
  ENSG00000122778_80 (sequence is synthesized)
gaaggaagaggtgctggaaggatgcttttgcagtcatgcagcaaggaaacgaccagggctgtgaagatctacagaggaagtactccagtgtgggggaggcaagggaagaggacgaaaatg

SEQ ID NO: 247712 - DNA, 120 bp, Artificial Sequence
  ENSG00000122778_81 (sequence is synthesized)
atgagaatgacactgaggtcattgtttagagcagatctcaagcagccgtttggccacgccatatcctttgtggagcatagtgggttatctatctgtctgtctgtctatgtatctgtctat

SEQ ID NO: 247713 - DNA, 120 bp, Artificial Sequence
  ENSG00000122778_82 (sequence is synthesized)
ctatctatatatatattcagcttctttactgctacctacacatttttctccaaattttattaatttcatagtgttttgatttgggtggcagatgacttttaagcagtgggtgtttgccgg

SEQ ID NO: 247714 - DNA, 120 bp, Artificial Sequence
  ENSG00000122778_83 (sequence is synthesized)
ccagatctttcctggcatgcggactgtgaggcaaagcacgggtgaaggtaggcgctaaaggctttgggctaaagccagcacgcggttctgtgctataggagtctcccgtttcccgtggac

SEQ ID NO: 247715 - DNA, 120 bp, Artificial Sequence
  ENSG00000122778_84 (sequence is synthesized)
aggttcagcgttccttctttcgcacaacttttttctaagtgttccagtgaccaagccagtcattcggacactgatttgcagtgcattggcagtaattcacaaattagttgttatataagt

SEQ ID NO: 247716 - DNA, 120 bp, Artificial Sequence
  ENSG00000122778_85 (sequence is synthesized)
ctctctcatccctttcacactagattctcagacatgaatgaatttgtcgtttggaaggaaagctgggtaacgttttgggcacaggggaaggaggactccggtcttaactcccacgctaac

SEQ ID NO: 247717 - DNA, 120 bp, Artificial Sequence
  ENSG00000122778_86 (sequence is synthesized)
tttagctcaagtggagttttcaccgtggtcatttctacctccggagcaaggtgccagcgccagtactagagcctgcttatccacatttgccctggacaggagcaggaggaagtccacttc

SEQ ID NO: 247718 - DNA, 120 bp, Artificial Sequence
  ENSG00000122778_87 (sequence is synthesized)
tgtaccggcagacagagcatgtgaacacaaaacacatttctatggcatagtcaactgaacttcatttttacatttaatctaacatgttaacacgttctaacagggtttctatgagcagct

SEQ ID NO: 247719 - DNA, 120 bp, Artificial Sequence
  ENSG00000122778_88 (sequence is synthesized)
gctgtaacatactcatcaactatgatagacttaacacttgttacctaatgaacaaggaggatgtgcatttcgggtttcttttgatattcgtggaggtgattgtcagtgtttaaacaggac

SEQ ID NO: 247720 - DNA, 120 bp, Artificial Sequence
  ENSG00000122778_89 (sequence is synthesized)
tactttctccactatgaagatgacttggaaatcgcaacatcatggtacattgctaagtccatgcttgtgtgtgtgacagtaggcttgataatttatcttaaaacacagcagcattgaaat

SEQ ID NO: 247721 - DNA, 120 bp, Artificial Sequence
  ENSG00000122778_90 (sequence is synthesized)
ttaggaaaagaatattaaatgcctttggaaacatgaaacaaagttaggagccagtaagaaagtgacagaagcaatgaatgtcttaatgcagtatagttaaaatggcttcccacagggtag

SEQ ID NO: 247722 - DNA, 120 bp, Artificial Sequence
  ENSG00000122778_91 (sequence is synthesized)
ataattatccaggatccttccttttccttcttcctccaggtttttcaggggtcacttcacatttctaaagaaagagtgaataggctgggcatggtggctcaagcctctaatctcaacgct

SEQ ID NO: 247723 - DNA, 90 bp, Artificial Sequence
  ENSG00000122778_92 (sequence is synthesized)
gatcgcttgaggccaggagtttgagaccaccttgggcaacataacgagaccccgtctctacaaaaaaaatttagtagtcccagctactcg

SEQ ID NO: 247724 - DNA, 120 bp, Artificial Sequence
  ENSG00000122778_93 (sequence is synthesized)
ccagtagtcccagctactcgaaaggctaagactggaggatcgcttgagccaatgagttggaggctgcagtgagctataatcacgccactgcactccagcctgggctgcagggtgaggtcc

SEQ ID NO: 247725 - DNA, 120 bp, Artificial Sequence
  ENSG00000122778_94 (sequence is synthesized)
tgtctctggaaaaaaaaaaaaaaaaaaaaggaataggtaaaagggacagaggtgaaattttgagtgacttgagtctcttgcagtccctgattacacagaacctttctgggctacttggag

SEQ ID NO: 247726 - DNA, 120 bp, Artificial Sequence
  ENSG00000122778_95 (sequence is synthesized)
catcacgaatagtctttcctgtacttaccagatttcaagtattcataacttgactccctaagtgtacaagttgggaatagtacagggccaagttcaagtcgcatatgctgtactgttcct

SEQ ID NO: 247727 - DNA, 120 bp, Artificial Sequence
  ENSG00000122778_96 (sequence is synthesized)
cctgcaaatgtggggaaagaagagggagatactagaggaactgaggctccacccattcattcagttgctctaagcaccagaggacttgtttcagaaaaggggagtgggaacgccctcgac

SEQ ID NO: 247728 - DNA, 120 bp, Artificial Sequence
  ENSG00000122778_97 (sequence is synthesized)
tttgccctcctccggagcatctctgggacgcagggagtctggctagcgttaataggaaaggttgctcggcagagctgccctggagtactgacttgtctctccctcctttgtcaaggtcca

SEQ ID NO: 247729 - DNA, 120 bp, Artificial Sequence
  ENSG00000122778_98 (sequence is synthesized)
tgtttttctggctcttcctgcacactcatccctagattatgagcgttaatgtacgaaatgtgcagagcaaattgaggccaactgtggcatcaatactgcaacttaaacttgacaatcatg

SEQ ID NO: 247730 - DNA, 120 bp, Artificial Sequence
  ENSG00000122778_99 (sequence is synthesized)
gtttgctggtcctcaaacaggcactgaaatctcagtatgggtatacgatttaataatcggcccctcccttctatttgtcggttttatgtttctatccttcaatagctgcactgttttcta

SEQ ID NO: 247731 - DNA, 120 bp, Artificial Sequence
  ENSG00000122778_100 (sequence is synthesized)
atgtgctgtagagtttttgaaataatttatgcaagtatttggtttccatgtttacaatttatacagctttcctagcattttaaatggaaatgtcaataaatgctatgaattggtgtcaaa

SEQ ID NO: 247732 - DNA, 120 bp, Artificial Sequence
  ENSG00000122779_0 (sequence is synthesized)
gtattccacgagcgcctcggcggttggcgaagcggacggggtgcagcctccccggtgcgaggaacggtctccgctgacagataccctccttccggccgcgccactcgggaggcggatccc

SEQ ID NO: 247733 - DNA, 120 bp, Artificial Sequence
  ENSG00000122779_1 (sequence is synthesized)
gtgggcctgaggaggcttcccccgcccggtttgctttccctccctcgctggcgctgccgcgagtccaccgagcggcctctgaggagcagccgcaggaggaggaggaggtcgtcgggggcg

SEQ ID NO: 247734 - DNA, 120 bp, Artificial Sequence
  ENSG00000122779_2 (sequence is synthesized)
aggaggaggaggtcgtcgggggcggcgggcggagaccgcgctctcgcttccccggcggcggcaagggcaggacaatggaggtggcggtggagaaggcggtggcggcggcggcagcggcct

SEQ ID NO: 247735 - DNA, 120 bp, Artificial Sequence
  ENSG00000122779_3 (sequence is synthesized)
cggcggcgccgagcggggagaacgaggccgagagtcggcagggcccggactcggagcgcggcggcgaggcggcccggctcaacctgttggacacttgcgccgtgtgccaccagaacatcc

SEQ ID NO: 247736 - DNA, 120 bp, Artificial Sequence
  ENSG00000122779_4 (sequence is synthesized)
agagccgggcgcccaagctgctgccctgcctgcactctttctgccagcgctgcctgcccgcgccccagcgctacctcatgctgcccgcgcccatgctgggctcggccgagaccccgccac

SEQ ID NO: 247737 - DNA, 120 bp, Artificial Sequence
  ENSG00000122779_5 (sequence is synthesized)
ccgtccctgcccccggctcgccggtcagcggctcgtcgccgttcgccacccaagttggagtcattcgttgcccagtttgcagccaagaatgtgcagagagacacatcatagataactttt

SEQ ID NO: 247738 - DNA, 120 bp, Artificial Sequence
  ENSG00000122779_6 (sequence is synthesized)
ttgtgaaggacactactgaggttcccagcagtacagtagaaaagtcaaatcaggtatgtacaagctgtgaggacaacgcagaagccaatgggttttgtgtagagtgtgttgaatggctct

SEQ ID NO: 247739 - DNA, 120 bp, Artificial Sequence
  ENSG00000122779_7 (sequence is synthesized)
gcaagacgtgtatcagagctcatcagagggtaaagttcacaaaagaccacactgtcagacagaaagaggaagtatctccagaggcagttggtgtcaccagccagcgaccagtgttttgtc

SEQ ID NO: 247740 - DNA, 120 bp, Artificial Sequence
  ENSG00000122779_8 (sequence is synthesized)
cttttcataaaaaggagcagctgaagctgtactgtgagacatgtgacaaactgacatgtcgagactgtcagttgttagaacataaagagcatagataccaatttatagaagaagcttttc

SEQ ID NO: 247741 - DNA, 120 bp, Artificial Sequence
  ENSG00000122779_9 (sequence is synthesized)
agaatcagaaagtgatcatagatacactaatcaccaaactgatggaaaaaacaaaatacataaaattcacaggaaatcagatccaaaacagaattattgaagtaaatcaaaatcaaaagc

SEQ ID NO: 247742 - DNA, 120 bp, Artificial Sequence
  ENSG00000122779_10 (sequence is synthesized)
aggtggaacaggatattaaagttgctatatttacactgatggtagaaataaataaaaaaggaaaagctctactgcatcagttagagagccttgcaaaggaccatcgcatgaaacttatgc

SEQ ID NO: 247743 - DNA, 120 bp, Artificial Sequence
  ENSG00000122779_11 (sequence is synthesized)
aacaacaacaggaagtggctggactctctaaacaattggagcatgtcatgcatttttctaaatgggcagtttccagtggcagcagtacagcattactttatagcaaacgactgattacat

SEQ ID NO: 247744 - DNA, 120 bp, Artificial Sequence
  ENSG00000122779_12 (sequence is synthesized)
accggttacggcacctccttcgtgcaaggtgtgatgcatccccagtgaccaacaacaccatccaatttcactgtgatcctagtttctgggctcaaaatatcatcaacttaggttctttag

SEQ ID NO: 247745 - DNA, 120 bp, Artificial Sequence
  ENSG00000122779_13 (sequence is synthesized)
taatcgaggataaagagagccagccacaaatgcctaagcagaatcctgtcgtggaacagaattcacagccaccaagtggtttatcatcaaaccagttatccaagttcccaacacagatca

SEQ ID NO: 247746 - DNA, 120 bp, Artificial Sequence
  ENSG00000122779_14 (sequence is synthesized)
gcctagctcaattacggctccagcatatgcagcaacaggtaatggctcagaggcaacaggtgcaacggaggccagcacctgtgggtttaccaaaccctagaatgcaggggcccatccagc

SEQ ID NO: 247747 - DNA, 120 bp, Artificial Sequence
  ENSG00000122779_15 (sequence is synthesized)
aaccttccatctctcatcagcaaccgcctccacgtttgataaactttcagaatcacagccccaaacccaatggaccagttcttcctcctcatcctcaacaactgagatatccaccaaacc

SEQ ID NO: 247748 - DNA, 120 bp, Artificial Sequence
  ENSG00000122779_16 (sequence is synthesized)
agaacataccacgacaagcaataaagccaaaccccctacagatggctttcttggctcaacaagccataaaacagtggcagatcagcagtggacagggaaccccatcaactaccaacagca

SEQ ID NO: 247749 - DNA, 120 bp, Artificial Sequence
  ENSG00000122779_17 (sequence is synthesized)
catcctctactccttccagccccacgattactagtgcagcaggatatgatggaaaggcttttggttcacctatgatcgatttgagctcaccagtgggagggtcttataatcttccctctc

SEQ ID NO: 247750 - DNA, 120 bp, Artificial Sequence
  ENSG00000122779_18 (sequence is synthesized)
ttccggatattgactgttcaagtactattatgctggacaatattgtgaggaaagatactaatatagatcatggccagccaagaccaccctcaaacagaacggtccagtcaccaaattcat

SEQ ID NO: 247751 - DNA, 120 bp, Artificial Sequence
  ENSG00000122779_19 (sequence is synthesized)
cagtgccatctccaggccttgcaggacctgttactatgactagtgtacaccccccaatacgttcacctagtgcctccagcgttggaagccgaggaagctctggctcttccagcaaaccag

SEQ ID NO: 247752 - DNA, 120 bp, Artificial Sequence
  ENSG00000122779_20 (sequence is synthesized)
caggagctgactctacacacaaagtcccagtggtcatgctggagccaattcgaataaaacaagaaaacagtggaccaccggaaaattatgatttccctgttgttatagtgaagcaagaat

SEQ ID NO: 247753 - DNA, 120 bp, Artificial Sequence
  ENSG00000122779_21 (sequence is synthesized)
cagatgaagaatctaggcctcaaaatgccaattatccaagaagcatactcacctccctgctcttaaatagcagtcagagctctacttctgaggagactgtgctaagatcagatgcccctg

SEQ ID NO: 247754 - DNA, 120 bp, Artificial Sequence
  ENSG00000122779_22 (sequence is synthesized)
atagtacaggagatcaacctggacttcaccaggacaattcctcaaatggaaagtctgaatggttggatccttcccagaagtcacctcttcatgttggagagacaaggaaagaggatgacc

SEQ ID NO: 247755 - DNA, 120 bp, Artificial Sequence
  ENSG00000122779_23 (sequence is synthesized)
ccaatgaggactggtgtgcagtttgtcaaaacggaggggaactcctctgctgtgaaaagtgccccaaagtattccatctttcttgtcatgtgcccacattgacaaattttccaagtggag

SEQ ID NO: 247756 - DNA, 120 bp, Artificial Sequence
  ENSG00000122779_24 (sequence is synthesized)
agtggatttgcactttctgccgagacttatctaaaccagaagttgaatatgattgtgatgctcccagtcacaactcagaaaaaaagaaaactgaaggccttgttaagttaacacctatag

SEQ ID NO: 247757 - DNA, 120 bp, Artificial Sequence
  ENSG00000122779_25 (sequence is synthesized)
ataaaaggaagtgtgagcgcctacttttatttctttactgccatgaaatgagcctggcttttcaagaccctgttcctctaactgtgcctgattattacaaaataattaaaaatccaatgg

SEQ ID NO: 247758 - DNA, 120 bp, Artificial Sequence
  ENSG00000122779_26 (sequence is synthesized)
atttgtcaaccatcaagaaaagactacaagaagattattccatgtactcaaaacctgaagattttgtagctgattttagattgatctttcaaaactgtgctgaattcaatgagcctgatt

SEQ ID NO: 247759 - DNA, 120 bp, Artificial Sequence
  ENSG00000122779_27 (sequence is synthesized)
cagaagtagccaatgctggtataaaacttgaaaattattttgaagaacttctaaagaacctctatccagaaaaaaggtttcccaaaccagaattcaggaatgaatcagaagataataaat

SEQ ID NO: 247760 - DNA, 120 bp, Artificial Sequence
  ENSG00000122779_28 (sequence is synthesized)
ttagtgatgattcagatgatgactttgtacagccccggaagaaacgcctcaaaagcattgaagaacgccagttgcttaaataatatgcagcaccactagcttgtgctggtttttagattt

SEQ ID NO: 247761 - DNA, 120 bp, Artificial Sequence
  ENSG00000122779_29 (sequence is synthesized)
ttttgttttcaaaaaaacatttgtcagtaatttaacatcactacaaaaagaagagtttgtgactattctcatctctgttttggacgtttactagactttgatttccttaatagcccattt

SEQ ID NO: 247762 - DNA, 120 bp, Artificial Sequence
  ENSG00000122779_30 (sequence is synthesized)
ctgttaacctcttatcactaagaaagaaaggaaagaaggagatgaatagaagaaagaaaatggaaagaaggaaaaaaggaggatagaaaaaggatggaagaaagaagcattgaaaacaaa

SEQ ID NO: 247763 - DNA, 120 bp, Artificial Sequence
  ENSG00000122779_31 (sequence is synthesized)
gacattcttcccacttcttggatttttaaaccacagtctggagtgatagctactgtagaaaggaaatagactttgtatgaactctttaagttgaaaagtaaaaaatatatgtggtttgga

SEQ ID NO: 247764 - DNA, 120 bp, Artificial Sequence
  ENSG00000122779_32 (sequence is synthesized)
tgtgtgctttaattcagctttagaaattaataccactacccgtgaattatatggcctgacaatatgaattaggtgtactgtactgaagaacagtactccacaaacatgggtggtaacaag

SEQ ID NO: 247765 - DNA, 120 bp, Artificial Sequence
  ENSG00000122779_33 (sequence is synthesized)
agttccatcccaggaggccaaacggtgcaacagaagggtaggttagatgctattaagaaggcacttaatagtacatcatgtaagatggcaactgtattaaagaaaaatccggaaaacaaa

SEQ ID NO: 247766 - DNA, 120 bp, Artificial Sequence
  ENSG00000122779_34 (sequence is synthesized)
tgtttgatttttgtttttgtttttatcttgtctgtagaggtattttggtatagcaggttttcaaggccattttttatacatttctagatctagattttcaacttcttccactgagggaag

SEQ ID NO: 247767 - DNA, 120 bp, Artificial Sequence
  ENSG00000122779_35 (sequence is synthesized)
cttttagtggaactacccaaaatataaatacagcagcgtgcactgtatttgatgtgagggttcttcatcatataccctactgggcattaaatataagttcctctgaaagggactcgtttt

SEQ ID NO: 247768 - DNA, 120 bp, Artificial Sequence
  ENSG00000122779_36 (sequence is synthesized)
tgtggttttcatctgtctataatttggaatgaaaatgtgttgtaggattttgggagcaggcagctggggggaattaatagtgattttttttttttcctgaagcatctatctcatgttttt

SEQ ID NO: 247769 - DNA, 120 bp, Artificial Sequence
  ENSG00000122779_37 (sequence is synthesized)
cttttgagagtcagaacatcaaacttaatctttgatctgacttctgattttattcttctgattgattgatagaggtacaaaagacttatcttctgaggacaagcatattcttaatgtgcc

SEQ ID NO: 247770 - DNA, 120 bp, Artificial Sequence
  ENSG00000122779_38 (sequence is synthesized)
agacctacccggttcagctgatatagatagatagatagatagaagaaaattgctgtgccatacattaatccagcatttgacacaatatctaaatggtttgccgaagttaatctgtattta

SEQ ID NO: 247771 - DNA, 120 bp, Artificial Sequence
  ENSG00000122779_39 (sequence is synthesized)
taaaacattaactggagtaaatttttctccttaggatgatagaataaaaagagctcacttgaaagaaggctattatttgcattatatcacctgccataaatttaacatagaagacttggt

SEQ ID NO: 247772 - DNA, 120 bp, Artificial Sequence
  ENSG00000122779_40 (sequence is synthesized)
tttatctacatggctttacttcttaaagtggaaaatatcctgtggctaattcattgggttttcaggtactgctaaagataaaatacagggagaaaataacttgttagcaatagatcccca

SEQ ID NO: 247773 - DNA, 120 bp, Artificial Sequence
  ENSG00000122779_41 (sequence is synthesized)
ttgtttatatatataggtcttgttcataatatgtcaattatgtattgttaaaaagtcctactcacttttcaaatatgtgttacatggtaatgtttgtcattgttgttttaaagttgcatt

SEQ ID NO: 247774 - DNA, 120 bp, Artificial Sequence
  ENSG00000122779_42 (sequence is synthesized)
tgacatttgttctccaaagagtgtttgaacagattttgataacagtgcatacaccttttgtctttttttgctccagcattttatttttagcacagcagctgtggagcttttgctgataat

SEQ ID NO: 247775 - DNA, 120 bp, Artificial Sequence
  ENSG00000122779_43 (sequence is synthesized)
tttattgttggtatcttagaatactgttcgtctgacagtttattcttccatacttgtctcccaagttaaaacagagcaaaacagataaattattttgagaatcatcacaaaagggagtta

SEQ ID NO: 247776 - DNA, 120 bp, Artificial Sequence
  ENSG00000122779_44 (sequence is synthesized)
gaacttgtgagactaaaactataatttcctaaatgtgactaatgaaccccaaactgtcactattacattcagtgccatatttatctttcaaaacagtatttgtttcaccctaaccatctt

SEQ ID NO: 247777 - DNA, 120 bp, Artificial Sequence
  ENSG00000122779_45 (sequence is synthesized)
tgtttcaccctaaccatctttggctgaatgaaaggcagttgagaaccatcttttggtcatacataatataattatattaaaagtaaagatcggggctgggcgcagtggctcacacctgca

SEQ ID NO: 247778 - DNA, 68 bp, Artificial Sequence
  ENSG00000122779_46 (sequence is synthesized)
agtgacagagactcagtctcaaaaacaaaaagtaaaggtcttgggtttctctctgtaaatagcctttg

SEQ ID NO: 247779 - DNA, 120 bp, Artificial Sequence
  ENSG00000122779_47 (sequence is synthesized)
aaagtaaaggtcttgggtttctctctgtaaatagcctttgtgtaatggtctttagattaatatcctttgactttattaataagtacctgtgtgcccaggtggatctcagctaagtcatcc

SEQ ID NO: 247780 - DNA, 120 bp, Artificial Sequence
  ENSG00000122779_48 (sequence is synthesized)
ttaaattctgttcaaatagaaataaaccataaaatgagcctaactataacccacactcacttatcaagcattcccccaaaagttcagtgcgattcaggtaaccttgacctaaacttgtac

SEQ ID NO: 247781 - DNA, 120 bp, Artificial Sequence
  ENSG00000122779_49 (sequence is synthesized)
actccggtgtacatctttgaccataaactctgggagatttccctctggatttgggatcaggagcccagtagggccccattgctgaatgtttatcacacttctggctagggcttatggatg

SEQ ID NO: 247782 - DNA, 120 bp, Artificial Sequence
  ENSG00000122779_50 (sequence is synthesized)
agcagaccacgtaggagctaggatttactcagttccacctcactgacagcttttctaggtgccaagcaactgacttttcctgtgtaaggaagcccaagtacttgaccagtgatatatatg

SEQ ID NO: 247783 - DNA, 120 bp, Artificial Sequence
  ENSG00000122779_51 (sequence is synthesized)
gccatggcaaaagtataaatggatggatgtagaccatattcaacgcagaatacattttagatcggtatctggcattgtaatcattttgtcttttgaattaacatgccctgcttgtctttt

SEQ ID NO: 247784 - DNA, 120 bp, Artificial Sequence
  ENSG00000122779_52 (sequence is synthesized)
ctgaatggaagggtaggaaagtggaaggtactaaaaaggaaaatgtagttttagtttcttttctaagctaaagaactggctttactactgctatattttactaccacatagtagtgtaga

SEQ ID NO: 247785 - DNA, 120 bp, Artificial Sequence
  ENSG00000122779_53 (sequence is synthesized)
tgtagtataacttgcttaggaatgctttcaaaaaggttacctccatagtcaaaaaaagggggagtatacagctgattgttgcatttatgaaactgcatttcaatatgctatgctgttact

SEQ ID NO: 247786 - DNA, 120 bp, Artificial Sequence
  ENSG00000122779_54 (sequence is synthesized)
gtgcttagacacttccttacgtttgagttccaaggagagagagtgagaagaggaactccttttgctgagctctggtccaaattaatgtgaatccccaaagtaaattgctgcatatgaaca

SEQ ID NO: 247787 - DNA, 120 bp, Artificial Sequence
  ENSG00000122779_55 (sequence is synthesized)
acaggttttaggtttaaattgaagatacattcattttatatgtatttgttgtgaatgagagaaattgagtgatctgattggccattaaaattatggtgaatgggtcgggcgcagtggctc

SEQ ID NO: 247788 - DNA, 67 bp, Artificial Sequence
  ENSG00000122779_56 (sequence is synthesized)
ggctgaggcaggagaatgtccagcctgggtgtcagagcaagactctgtcacaaaaagaaaaattatg

SEQ ID NO: 247789 - DNA, 78 bp, Artificial Sequence
  ENSG00000122779_57 (sequence is synthesized)
cagtgagctgagatcgcaccactgtagtccagcctgggtgtcagagcaagactctgtcacaaaaagaaaaattatggg

SEQ ID NO: 247790 - DNA, 66 bp, Artificial Sequence
  ENSG00000122779_58 (sequence is synthesized)
tggccaacatggtgaaaccccacctcaacagaatgggatgctgaggcaggagaatagcttgaaccc

SEQ ID NO: 247791 - DNA, 120 bp, Artificial Sequence
  ENSG00000122779_59 (sequence is synthesized)
ttcaaccatataatttcttactgaaattgagctcctccttttgaataaccatgtacatatttttaaaagtattttatagccctatgtaaattaatagttgatgtctttttataaatgttt

SEQ ID NO: 247792 - DNA, 120 bp, Artificial Sequence
  ENSG00000122779_60 (sequence is synthesized)
attgcatattcatcttgaatgtgaatttactgttgtaattcacatactggtgtcatgtttctgagtgagaataatgctagtcagtcagatcacagatttttctccatgaaggttttactt

SEQ ID NO: 247793 - DNA, 120 bp, Artificial Sequence
  ENSG00000122779_61 (sequence is synthesized)
attgagagggacatctgaggcagtagtcttcgtctttaatttttgggggcagattggtgctttggttttaataaaaactaactttgatggatttttactgtcaatattttaccacaagga

SEQ ID NO: 247794 - DNA, 120 bp, Artificial Sequence
  ENSG00000122779_62 (sequence is synthesized)
ttttttaatagaaaaattactgaatgttacttcagcagagttctatctactttgagtctccattactactactgttgttcccctagctgtaacattgatccatataggggcaagctacta

SEQ ID NO: 247795 - DNA, 120 bp, Artificial Sequence
  ENSG00000122779_63 (sequence is synthesized)
gtccataaatagctgtaataggaaaacagttttttaaaattctaacacgtgtatttcaccagccttaaaagatttaaaaaaaaatctgacaggaaggaaagcgggtggtaagtatcttgg

SEQ ID NO: 247796 - DNA, 120 bp, Artificial Sequence
  ENSG00000122779_64 (sequence is synthesized)
attattctgcctcataccagccactcccaaagtaggaggaccaaagatgccatgaagacttctagttgtctggaagttatttggggaaggggggaaagacacagagtggggacctttgga

SEQ ID NO: 247797 - DNA, 120 bp, Artificial Sequence
  ENSG00000122779_65 (sequence is synthesized)
agtcattttaaaaatttagctatgttaattccacttgtaaagtttgaaaggttttgattcttgtaatttctgagaattactatgttttaaatttactattggatatttaacagatctttc

SEQ ID NO: 247798 - DNA, 120 bp, Artificial Sequence
  ENSG00000122779_66 (sequence is synthesized)
atggggccaacctatttgcttccttaattttcaaattaagtcctaatttgagtcctaaaaaaatctttccttgttagttgcaagttaaacatttaataaaattattttcccacgttttca

SEQ ID NO: 247799 - DNA, 120 bp, Artificial Sequence
  ENSG00000122779_67 (sequence is synthesized)
aaaattgccttgtgactctgcttaatctggcccctgtctcttgtcctagcttcttttgccagtcttcccctgaatcgcaccacttcagtcatacttaccttcgttcagttctttgaacct

SEQ ID NO: 247800 - DNA, 120 bp, Artificial Sequence
  ENSG00000122779_68 (sequence is synthesized)
gcctgctcttcttgcttgggactttttgtacatgctgttctctcttcctagaagtaaaagccttcactgggtaatccctcctcatgctttccccagccttccaaccccactaaaatgaga

SEQ ID NO: 247801 - DNA, 120 bp, Artificial Sequence
  ENSG00000122779_69 (sequence is synthesized)
agtttgtaattatatattgatgtgcttattctaataatgtacatctgccgcacatttaatcttcacaactactcagtaatatctgtattattaccctcatattaaagatgagtactctgt

SEQ ID NO: 247802 - DNA, 120 bp, Artificial Sequence
  ENSG00000122779_70 (sequence is synthesized)
gtaacctgcccaagaccactgagctagtatgtacaagctgtgaggacaacgcagaagccaatgggttttgtgtagagtgtgttgaatggctctgcaagacgtgtatcagagctcatcaga

SEQ ID NO: 247803 - DNA, 120 bp, Artificial Sequence
  ENSG00000122779_71 (sequence is synthesized)
atggagggcccgcgctctgcggcgtgtcgcgctcggccagcaacttccccgggcgctgtggacttgaccgcgccgccgccgccgccgctgctccgcattctcaacagccgggcggcccct

SEQ ID NO: 247804 - DNA, 120 bp, Artificial Sequence
  ENSG00000122779_72 (sequence is synthesized)
gccactcgcacttttgcagacctctgtcggagtctcctgcagccggaatctcgggttctttgccggctgcagccagttaactgctacccgcccgctgcctccacaaagctttgtccagtt

SEQ ID NO: 247805 - DNA, 120 bp, Artificial Sequence
  ENSG00000122783_0 (sequence is synthesized)
cagagtttgggcgccaggcgagacggcagggcttaaagttccgggaatcaaagatcaactcccactgaggacaaatggacctgtaattccgggtgtgacgagagaacgagatttaccttc

SEQ ID NO: 247806 - DNA, 120 bp, Artificial Sequence
  ENSG00000122783_1 (sequence is synthesized)
ctgaattaaaaaacaggtcattaagcttgggccctgactcttctttgtgagaaggtacagagatggaaaccttacaatccgagactaaaacgagggtccttccctcatggctgacagccc

SEQ ID NO: 247807 - DNA, 120 bp, Artificial Sequence
  ENSG00000122783_2 (sequence is synthesized)
aggtggctacaaagaatgtggcaccaatgaaggcccccaagaggatgagaatggcagcagtgccagtggcagcagcaagactccctgcgacaaggactgtgtactgcatgaatgaggctg

SEQ ID NO: 247808 - DNA, 120 bp, Artificial Sequence
  ENSG00000122783_3 (sequence is synthesized)
agatagttgatgttgctctgggaatcctgattgagagccgcaaacaggaaaaggcctgcgagcagccggccctggcgggggctgataacccagagcactcccctccctgctccgtgtcgc

SEQ ID NO: 247809 - DNA, 120 bp, Artificial Sequence
  ENSG00000122783_4 (sequence is synthesized)
ctcacacaagttctgggagcagcagtgaggaagaggacagtgggaaacaggcactggctccaggcctcagcccttcccagaggccggggggttccagctctgcctgtagcaggagccctg

SEQ ID NO: 247810 - DNA, 120 bp, Artificial Sequence
  ENSG00000122783_5 (sequence is synthesized)
aggaggaggaggaagaggatgtgctgaaatacgtccgggagatctttttcagctagggcataaactgtgcactgaactgtctgccgagagcagctggaggacagctgagcttccactggt

SEQ ID NO: 247811 - DNA, 120 bp, Artificial Sequence
  ENSG00000122783_6 (sequence is synthesized)
cctacctttgtgccttcttgggcctggcagattcacctcaggccagaagcccctggacactccgggccttggggctgccgttctgagtgtgcggaaggcaggactcaaaatgagatccca

SEQ ID NO: 247812 - DNA, 120 bp, Artificial Sequence
  ENSG00000122783_7 (sequence is synthesized)
tttgactccctctgtatgtactgtgccctctcctggctcttgaggctctggagtcccaattgtctgtgttagtcagtgaccaggttccagggaaaatgatgtcatgtggtggtccaactt

SEQ ID NO: 247813 - DNA, 120 bp, Artificial Sequence
  ENSG00000122783_8 (sequence is synthesized)
actggaaccaaagagacagtactttgcaaagaaaaggatcactgccaggtgcactggaattgctacagtttagtccgcatgatctctcctgaaggaggaagcctgtttcaaaaatagttt

SEQ ID NO: 247814 - DNA, 120 bp, Artificial Sequence
  ENSG00000122783_9 (sequence is synthesized)
ccatcatgagtctatcaatgagctcccacctctccagccagcctagaaagcaaacgagctgcccacagttctctgccctgtctgggaggttgaggccacagtgtatagactggtaagcca

SEQ ID NO: 247815 - DNA, 120 bp, Artificial Sequence
  ENSG00000122783_10 (sequence is synthesized)
gacaggcctcctcccgcaagctgctaccttgctttcacctgtaccttggtccccgggcagctagctataaagcaagagggacaggagcccagaagagacactgaggacaagagatcacac

SEQ ID NO: 247816 - DNA, 120 bp, Artificial Sequence
  ENSG00000122783_11 (sequence is synthesized)
cagagtacatgtctctgcctctgttttcagtgtggctttggacaggaatatatgaataaatcactgccatacaggttttccaatacacaagtgctagaaaatacacacaattccccaatg

SEQ ID NO: 247817 - DNA, 120 bp, Artificial Sequence
  ENSG00000122783_12 (sequence is synthesized)
aaagttccgggtgaggcgtgggtcccacaaccgcttggaatttgcctcccggctccgctctggaagctaagaaggggcacgagagccggagacgggaacctgagagcagggaagccagta

SEQ ID NO: 247818 - DNA, 120 bp, Artificial Sequence
  ENSG00000122783_13 (sequence is synthesized)
agtagccggccggaggagcgcgcggccgctccagtcggaaggagccgttgcagccctgcccggcgtgtggcggggtcagcgaggcccctgcggtgcttcgcccgcgccttccgctccgca

SEQ ID NO: 247819 - DNA, 120 bp, Artificial Sequence
  ENSG00000122783_14 (sequence is synthesized)
agacggcagggcttaaagttccgggaatcaaagatcaactcccactgaggacaaatggacctgtaattccgggtgtgacgagagaacgagatttaccttcctgaattaaaaaacagactc

SEQ ID NO: 247820 - DNA, 120 bp, Artificial Sequence
  ENSG00000122783_15 (sequence is synthesized)
gcgacagctctggtcagaagactcctgcgaatctggcaagtggagcaggggcctccatgacctgggccaggtcttccagcctaggcagaacagcaagatgggcgggtgtttcagtctgat

SEQ ID NO: 247821 - DNA, 120 bp, Artificial Sequence
  ENSG00000122783_16 (sequence is synthesized)
catctcttgagcttttagaaggtggaggggctgtgggcgggaggcaaagcgggttaaccctcgaggacaggcacccacttctgcctctgcactggtgagtgccctgccctcagcacacac

SEQ ID NO: 247822 - DNA, 120 bp, Artificial Sequence
  ENSG00000122783_17 (sequence is synthesized)
agagtgggttctccatgtcagccagtctctgatgccagttgtccagaatgccagtctcttcctttacaacaaacatggtaacatcagatgggcaagatcagtggaagggtctgttctgag

SEQ ID NO: 247823 - DNA, 120 bp, Artificial Sequence
  ENSG00000122783_18 (sequence is synthesized)
tggtgcctgcccctgtggacagacctttagggatggacagatgagcagcagctgcagggccagcaagagctaaggagctggggagtgagttagttgaatgacggtaattgccgggggggg

SEQ ID NO: 247824 - DNA, 120 bp, Artificial Sequence
  ENSG00000122783_19 (sequence is synthesized)
tccctgcgacaaggactgtgtactgcatgaatgaggctgagatagttgatgttgctctgggaatcctgattgaggttcccagttgggtagatgacttcttagccattgcccctctcctga

SEQ ID NO: 247825 - DNA, 120 bp, Artificial Sequence
  ENSG00000122783_20 (sequence is synthesized)
ccacaggtcggcgccgccagcggcgggtaccggcccgcagagggagggcgggctgtgaactggcagcacatcgcgttcccgcggggcccccattctgcccaggcagggagcggctgggat

SEQ ID NO: 247826 - DNA, 120 bp, Artificial Sequence
  ENSG00000122783_21 (sequence is synthesized)
agaaaggaggagtggaagggaaatggcaggcagatgcagtcctgagctggtgcccccttgccttcgcagtcgtgcctagtaaacagctctctgaactttggtacatttgttctgactgat

SEQ ID NO: 247827 - DNA, 120 bp, Artificial Sequence
  ENSG00000122783_22 (sequence is synthesized)
gtcactatcagctgatttcactttcgtttcctaacttgccagtggcccatgacttttcagaaatgagagcaactaagaggtctttcttggctctatgagaacctggtgggattcctgaag

SEQ ID NO: 247828 - DNA, 120 bp, Artificial Sequence
  ENSG00000122783_23 (sequence is synthesized)
ataaagtccacaaaaatgaagctccagacaagactatggccaccaggagtttctcactttcaagctagtgcgcactcagcctctggcaatttgttaaaatcactgtttaagtgttcctac

SEQ ID NO: 247829 - DNA, 120 bp, Artificial Sequence
  ENSG00000122783_24 (sequence is synthesized)
cagtttatgattctagcagcttctgcctcagacaagcagatctcagcagtgactccctggattcgtctgtctcttcagatttcagggtagtagtttacttgtcagcctcagttctctgat

SEQ ID NO: 247830 - DNA, 120 bp, Artificial Sequence
  ENSG00000122783_25 (sequence is synthesized)
ggatccaataagttgctgatttttagtttgttcagcttttttgttgttgtaaggacaggaatgttgactttcaagcattattcatgttgcagctaaaacgagaaggccccttattatctg

SEQ ID NO: 247831 - DNA, 120 bp, Artificial Sequence
  ENSG00000122783_26 (sequence is synthesized)
ttattatttttagtgtatggtataaggaacacggccaacttcattcttttgcatgtggatatccagttgtcccagtaccatttgctgaaaagactattttttttccccatccaattgtcc

SEQ ID NO: 247832 - DNA, 120 bp, Artificial Sequence
  ENSG00000122783_27 (sequence is synthesized)
tggcatctttgttgaaaaatcaattgaaatatatataaaggtttatttacatattttcaatcctatttcatttatctatatgtttacccttaggccagtaccacacagtctcaattacta

SEQ ID NO: 247833 - DNA, 120 bp, Artificial Sequence
  ENSG00000122783_28 (sequence is synthesized)
tagcttggtagtcagttttgaaatcaggaatccttaaacattgttctttatcaaaattgctttggttattctgggtcccttgtatttccatataaatttcagatttggtttgttagtttc

SEQ ID NO: 247834 - DNA, 120 bp, Artificial Sequence
  ENSG00000122783_29 (sequence is synthesized)
tgcacaaaaggtagctgacattttgatagggattgcactgaatctatcaatttgaggagtattgccatctagcaatattaaatcttctgatccatgaccagagttatcttgccatttatt

SEQ ID NO: 247835 - DNA, 120 bp, Artificial Sequence
  ENSG00000122783_30 (sequence is synthesized)
taaagcttctttaatacagttcaactgtgttttttgtagttttcagtttataagtcttgtacttcttttgtaaaatttattcctaagtattttgttctttttgatgctaatgtaaatgga

SEQ ID NO: 247836 - DNA, 120 bp, Artificial Sequence
  ENSG00000122783_31 (sequence is synthesized)
attgttttcttaatttcattttttaaatgttcattgctagtgtatagagatacaattgatttttataacaggtttttgagatgtaattcacataccatacagttcattcattacaactga

SEQ ID NO: 247837 - DNA, 120 bp, Artificial Sequence
  ENSG00000122783_32 (sequence is synthesized)
atagtgtggcgtgtgtatgtgtgtgtgtgtgttccttcggattttctatatacaagaacatatatcctacaaatagaaatggcttcgcttttttctttctaatttggatgcctttttttt

SEQ ID NO: 247838 - DNA, 120 bp, Artificial Sequence
  ENSG00000122783_33 (sequence is synthesized)
tttcttgccttattgcccggctgaagccttcattataatgttgaatagaagtgttgagagtgaatatccctgtcttgttccaggtctcagggagaaaagcatttagtcttgcactaccaa

SEQ ID NO: 247839 - DNA, 120 bp, Artificial Sequence
  ENSG00000122783_34 (sequence is synthesized)
ctatgacattagctgcaggatttttgaagatggcttttttttttttagtagaggaagattctatctttcctaatttgttgagtgtctcttttttaatcatgaaagaatgttggattttgc

SEQ ID NO: 247840 - DNA, 120 bp, Artificial Sequence
  ENSG00000122783_35 (sequence is synthesized)
cagatactttttctgcatctattgagatgaccatgtgcctttttctttatattctattaacatggtatattatattgtttaattttcataatttcgtatgctaaactaaccttgcatttc

SEQ ID NO: 247841 - DNA, 120 bp, Artificial Sequence
  ENSG00000122783_36 (sequence is synthesized)
tgggataaatcctatttggtcattgtgtataatcccttttggtttgctagtattttctcttactttttcattctaattcttaatagatatagaagttggttaaaaaaaaagttcaattta

SEQ ID NO: 247842 - DNA, 120 bp, Artificial Sequence
  ENSG00000122783_37 (sequence is synthesized)
tttggcccctgaaatcttaacaattaccttttctgagaaaccttttctgatttgctcctacccacaaacaactccgatgtaaccccataacacaataagtagcatttgtttcatattact

SEQ ID NO: 247843 - DNA, 120 bp, Artificial Sequence
  ENSG00000122783_38 (sequence is synthesized)
atgtctatttacttgtcacccactctgctatattttatttaccattgtacccaagtgtctggcacaaccacttactattacaagttgggacttctgggaagcagagaaacatcagatttt

SEQ ID NO: 247844 - DNA, 120 bp, Artificial Sequence
  ENSG00000122783_39 (sequence is synthesized)
taaaagaacatgaacaacaatggaaagattatgtaacaaaggttgaatataagagagtggataaaccatagaatagtttcaggatgattaaacctcaaataaaccaagatttgaaaaaaa

SEQ ID NO: 247845 - DNA, 120 bp, Artificial Sequence
  ENSG00000122783_40 (sequence is synthesized)
gctgccgtctttccctaagtctggtcctgctttcaggttcctctcagtacagcctcagcccgaggttcccttcctcttgcatccatgtgtgtgtttcagaggcggccatccttccctact

SEQ ID NO: 247846 - DNA, 120 bp, Artificial Sequence
  ENSG00000122783_41 (sequence is synthesized)
tccagatccttgtagggcagttggtggagggtgggaggcaccccggtgttgcctccatgaagccctgtgccagtcactgggctgcaaggctgaggaaattgtgtccgtgtcagaaagctc

SEQ ID NO: 247847 - DNA, 120 bp, Artificial Sequence
  ENSG00000122783_42 (sequence is synthesized)
ctcagctcagaggtgctggtacctcctgcgtggtaggaaggcagggggaagaggccctgcttctcctgttctctttgcccttatgagacttgagagtctgtgtcatctgtgccttgcatg

SEQ ID NO: 247848 - DNA, 120 bp, Artificial Sequence
  ENSG00000122786_0 (sequence is synthesized)
ctgtgctcctgcttaaagaaatcagtccttcctttccgacttagtcctcgggaagaagtttcagactacaaggtatcattggaacatttcaagatcatcaaatcaaattccacagggatt

SEQ ID NO: 247849 - DNA, 120 bp, Artificial Sequence
  ENSG00000122786_1 (sequence is synthesized)
ggtgaccaaccagaaggctcagacatctgattgctgacctgtccagacatcatctggtctccctgaacctgaaatcacaccatggatgattttgagcgtcgcagagaacttagaaggcaa

SEQ ID NO: 247850 - DNA, 120 bp, Artificial Sequence
  ENSG00000122786_2 (sequence is synthesized)
aagagggaggagatgcgactcgaagcagaaagaatcgcctaccagaggaatgacgatgatgaagaggaggcagcccgggaacggcgccgccgagcccgacaggaacggctgcggcagaag

SEQ ID NO: 247851 - DNA, 120 bp, Artificial Sequence
  ENSG00000122786_3 (sequence is synthesized)
caggaggaagaatccttgggacaggtgaccgaccaggtggaggtgaatgcccagaacagtgtgcctgacgaggaggccaagacaaccaccacaaacactcaagtggaaggggatgatgag

SEQ ID NO: 247852 - DNA, 120 bp, Artificial Sequence
  ENSG00000122786_4 (sequence is synthesized)
gccgcattcctggagcgcctggctcggcgtgaggaaagacgccaaaaacgccttcaggaggctctggagcggcagaaggagttcgacccaacaataacagatgcaagtctgtcgctccca

SEQ ID NO: 247853 - DNA, 120 bp, Artificial Sequence
  ENSG00000122786_5 (sequence is synthesized)
agcagaagaatgcaaaatgacacagcagaaaatgaaactaccgagaaggaagaaaaaagtgaaagtcgccaagaaagatacgagatagaggaaacagaaacagtcaccaagtcctaccag

SEQ ID NO: 247854 - DNA, 120 bp, Artificial Sequence
  ENSG00000122786_6 (sequence is synthesized)
aagaatgattggagggatgctgaagaaaacaagaaagaagacaaggaaaaggaggaggaggaagaggagaagccaaagcgagggagcattggagaaaatcagatcaaagatgaaaagatt

SEQ ID NO: 247855 - DNA, 120 bp, Artificial Sequence
  ENSG00000122786_7 (sequence is synthesized)
aaaaaggacaaagaacccaaagaagaagttaagagcttcatggatcgaaagaagggatttacagaagttaagtcgcagaatggagaattcatgacccacaaacttaaacatactgagaat

SEQ ID NO: 247856 - DNA, 120 bp, Artificial Sequence
  ENSG00000122786_8 (sequence is synthesized)
actttcagccgccctggagggagggccagcgtggacaccaaggaggctgagggcgccccccaggtggaagccggcaaaaggctggaggagcttcgtcgtcgtcgcggggagaccgagagc

SEQ ID NO: 247857 - DNA, 120 bp, Artificial Sequence
  ENSG00000122786_9 (sequence is synthesized)
gaagagttcgagaagctcaaacagaagcagcaggaggcggctttggagctggaggaactcaagaaaaagagggaggagagaaggaaggtcctggaggaggaagagcagaggaggaagcag

SEQ ID NO: 247858 - DNA, 120 bp, Artificial Sequence
  ENSG00000122786_10 (sequence is synthesized)
gaggaagccgatcgaaaactcagagaggaggaagagaagaggaggctaaaggaagagattgaaaggcgaagagcagaagctgctgagaaacgccagaagatgccagaagatggcttgtca

SEQ ID NO: 247859 - DNA, 120 bp, Artificial Sequence
  ENSG00000122786_11 (sequence is synthesized)
gatgacaagaaaccattcaagtgtttcactcctaaaggttcatctctcaagatagaagagcgagcagaatttttgaataagtctgtgcagaaaagcagtggtgtcaaatcgacccatcaa

SEQ ID NO: 247860 - DNA, 120 bp, Artificial Sequence
  ENSG00000122786_12 (sequence is synthesized)
gcagcaatagtctccaagattgacagcagactggagcagtataccagtgcaattgagggaacaaaaagcgcaaaacctacaaagccggcagcctcggatcttcctgttcctgctgaaggt

SEQ ID NO: 247861 - DNA, 120 bp, Artificial Sequence
  ENSG00000122786_13 (sequence is synthesized)
gtacgcaacatcaagagtatgtgggagaaagggaatgtgttttcatcccccactgcagcaggcacaccaaataaggaaactgctggcttgaaggtaggggtttctagccgcatcaatgaa

SEQ ID NO: 247862 - DNA, 120 bp, Artificial Sequence
  ENSG00000122786_14 (sequence is synthesized)
tggctaactaaaaccccagatggaaacaagtcacctgctcccaaaccttctgacttgagaccaggagacgtatccagcaagcggaacctctgggaaaagcaatctgtggataaggtcact

SEQ ID NO: 247863 - DNA, 120 bp, Artificial Sequence
  ENSG00000122786_15 (sequence is synthesized)
tcccccactaaggtttgagacagttccagaaagaacccaagctcaagacgcaggacgagctcagttgtagagggctaattcgctctgttttgtatttatgttgatttactaaattgggtt

SEQ ID NO: 247864 - DNA, 120 bp, Artificial Sequence
  ENSG00000122786_16 (sequence is synthesized)
cattatcttttatttttcaatatcccagtaaacccatgtatattatcactatatttaataatcacagtctagagatgttcatggtaaaagtactgcctttgcacaggagcctgtttctaa

SEQ ID NO: 247865 - DNA, 120 bp, Artificial Sequence
  ENSG00000122786_17 (sequence is synthesized)
tgatcatcataactctgtatctgagcagtgataccaaccacatctgaagtcaacagaagatccaagtttaaaattgcctgcggaatgtgtgcagtatctagaaaaatgaaccgtagtttt

SEQ ID NO: 247866 - DNA, 120 bp, Artificial Sequence
  ENSG00000122786_18 (sequence is synthesized)
tgtttttttaaatacagaagtcatgttgtttctgcactttataataaagcatggaagaaattatcttagtaggcaattgtaacactttttgaaagtaacccatttcagatttgaaatact

SEQ ID NO: 247867 - DNA, 120 bp, Artificial Sequence
  ENSG00000122786_19 (sequence is synthesized)
gcaataatggttgtctttaaaaaaaaaaaagaaatgtactgttaaggtattactttttttcatgctgatgattcatatctaaattacattattatgttagctgacagtggtactgatttt

SEQ ID NO: 247868 - DNA, 120 bp, Artificial Sequence
  ENSG00000122786_20 (sequence is synthesized)
ttaggttggttgttttgtggatttctttagtagtgatagtagcctgaaccacattttagataactcaattatgtatgtatgtgcatacacatatacaaacacactaatggtagaatgctt

SEQ ID NO: 247869 - DNA, 120 bp, Artificial Sequence
  ENSG00000122786_21 (sequence is synthesized)
ttttatgtgctagactattatatttagtagtatgtcattgtaactagccaatatcacagcttttgaaaaattaaaaaatcacactatattaatattttatatttgccaacagaaacatgg

SEQ ID NO: 247870 - DNA, 120 bp, Artificial Sequence
  ENSG00000122786_22 (sequence is synthesized)
cagataggtatcaatatgttttcaatgcctgatgacctataagaagaaagtattgaaaagaagagagattagaactgttagaaggagttgaaattttctaaaagacatagtatttagttt

SEQ ID NO: 247871 - DNA, 120 bp, Artificial Sequence
  ENSG00000122786_23 (sequence is synthesized)
ataattaaatgcattcttgaagtccagtgtgaattttattaatgctatcatctcgaccaagctcaaagcctacttattagaaacaatgaagttcacaataggtcataaggtctcttcctt

SEQ ID NO: 247872 - DNA, 120 bp, Artificial Sequence
  ENSG00000122786_24 (sequence is synthesized)
ttctaaaattgaaagacaagaaatttagtgccaatattgtacagacagaaattccatgtatgagtctcaacaaagactacctttggctaaatgtctagaagcagagaagtaaagtgagca

SEQ ID NO: 247873 - DNA, 120 bp, Artificial Sequence
  ENSG00000122786_25 (sequence is synthesized)
aaatccagtgttgaggagtcatgacagtactttgatctttatatactctgaagcatttcttcaaacttttctacttttatttgtcattgatacctgtagtaagttgacaatgtggtgaaa

SEQ ID NO: 247874 - DNA, 120 bp, Artificial Sequence
  ENSG00000122786_26 (sequence is synthesized)
tttcaaaattatatgtaacttctactagttttactttctcccccaagtcttttttaactcatgatttttacacacacaatccagaacttattatatagcctctaagtctttattcttcac

SEQ ID NO: 247875 - DNA, 120 bp, Artificial Sequence
  ENSG00000122786_27 (sequence is synthesized)
agtagataatgaaagagtcctccagtgtcttggcaaaatgttctagtatagctggatacatacagtggagttctataaactcatacctcagtggacttaaccaaaattgtgttagtctca

SEQ ID NO: 247876 - DNA, 120 bp, Artificial Sequence
  ENSG00000122786_28 (sequence is synthesized)
attcctaccacactgagggagcctcccaaataactattttcttatctgcagtattcctccagaagagctaaccagggcagggctggcatgagaagtgacatctgcgttacaaagtctatc

SEQ ID NO: 247877 - DNA, 120 bp, Artificial Sequence
  ENSG00000122786_29 (sequence is synthesized)
ttcctcataagtctgtaaagagcaattgaatcttctagctttagcaaacctaagccaaaggaaggaaagccatgaagaatgcagaagtcaaaccctcatgacaaagtaggcacaagtcta

SEQ ID NO: 247878 - DNA, 120 bp, Artificial Sequence
  ENSG00000122786_30 (sequence is synthesized)
caataagctaaatcagaatttacaaatacaagtgtcccaggtagcattgactcccgtcattggagtgaaatggatcaaagtttgaattaaggcctatggtaaggtaacattgctttgttg

SEQ ID NO: 247879 - DNA, 120 bp, Artificial Sequence
  ENSG00000122786_31 (sequence is synthesized)
tacttttgaacaagagctcctcctgatcactattacatatttttctagaaaatctaaagttcagaagagaatgtatcactgctgacttttattccaatatttggatggagtaagttttag

SEQ ID NO: 247880 - DNA, 120 bp, Artificial Sequence
  ENSG00000122786_32 (sequence is synthesized)
ggtagaattttgttcagtttggatttaatcttttgaaaagtaaattccttgtttactggtttgactataattctctgttatctttacgaggtaaaactgcaagctgactagcatgttctg

SEQ ID NO: 247881 - DNA, 120 bp, Artificial Sequence
  ENSG00000122786_33 (sequence is synthesized)
tgaatctgccattcctaaaaattttataaacacttgatacttttcactgataatggatcgctccaataaacatatattgtgaaaatgcatccacaataaatggaattccttcctgcaaaa

SEQ ID NO: 247882 - DNA, 120 bp, Artificial Sequence
  ENSG00000122786_34 (sequence is synthesized)
atattcaagcctgctctcaggcctgaaatcttttgacttcattctcaggaggcaagactgggtctacctctagatgtctctgatgggatttagtgtgcagcttgaaatgcaggtatcatt

SEQ ID NO: 247883 - DNA, 120 bp, Artificial Sequence
  ENSG00000122786_35 (sequence is synthesized)
aagaattctggattaaactccctcccttgcattgtattcaggggtgccttccttgaagaattgaaagcagaaagatttgggagctgagagttaagctgaacaaaaggtatcattggaaca

SEQ ID NO: 247884 - DNA, 120 bp, Artificial Sequence
  ENSG00000122786_36 (sequence is synthesized)
gtctcttaagtgtagaggggcatatttttttgcatgtcgattttgatttaggaatcacactagtaaataataaaagcagtgaagaaggtgcaatttgtactttgttttgcaatgaccaca

SEQ ID NO: 247885 - DNA, 120 bp, Artificial Sequence
  ENSG00000122786_37 (sequence is synthesized)
aaagcaagctcagagagaatgtgtttgtgaggttgcatgaggtactaagcccgggccatcttactccaaataaagtgcctgggctgaaatgtccacccttggagttggagtggggtgagt

SEQ ID NO: 247886 - DNA, 120 bp, Artificial Sequence
  ENSG00000122786_38 (sequence is synthesized)
aaattccttcccaggtaaagtttacttcattctttaatattttggatgattgcccctttgtaggaaactgctggcttgaaggtaggggtttctagccgcatcaatgaatggctaactaaa

SEQ ID NO: 247887 - DNA, 120 bp, Artificial Sequence
  ENSG00000122786_39 (sequence is synthesized)
accccagatggaaacaagtcacctgctcccaaaccttctgtaagtacctttaggtttttctgagtttctttgatctcccagcttctaccagcagaagaaaacaagcagttggtctgttta

SEQ ID NO: 247888 - DNA, 120 bp, Artificial Sequence
  ENSG00000122786_40 (sequence is synthesized)
cctaggaatggcagtgcccctgttctttgctttccctgatgaatagcaaacaggaaagtgttcagatttacaacagttctaagaagctgcatctcagttactcagagggtaaaatggaac

SEQ ID NO: 247889 - DNA, 120 bp, Artificial Sequence
  ENSG00000122786_41 (sequence is synthesized)
caaataatcacctctacaccctaactgagaggaggaatcagctagaatactgaggcagttcaaatttagatcctttactcgtctatttgtttagcttctattctataaattctggataga

SEQ ID NO: 247890 - DNA, 120 bp, Artificial Sequence
  ENSG00000122786_42 (sequence is synthesized)
aatttgaaaatgaaaggtcacatcattttggctacttctttgtcaagagcacccctaaacttattcccaaaagaatatgtatgttgcctattgggaacccatatgttccaatttgcctca

SEQ ID NO: 247891 - DNA, 120 bp, Artificial Sequence
  ENSG00000122786_43 (sequence is synthesized)
tttttataacttggcacaaaaatgcagttattgggtagctgttgaaataattggtctaattgtgttgtcagcacctcctgaggaaagtcataaaactggaaactagaaaaactggttatg

SEQ ID NO: 247892 - DNA, 120 bp, Artificial Sequence
  ENSG00000122786_44 (sequence is synthesized)
aatgatgtttttgagaatctaaaattttcttaatttattaagtgcagctatcttactaaaaagtacatttcttttcacctttttgttgaatgtatacgacaattgcttgcatttgtcatt

SEQ ID NO: 247893 - DNA, 120 bp, Artificial Sequence
  ENSG00000122786_45 (sequence is synthesized)
ataataagaaaacgtatcaagctccccactgtatattgctgagctttccctgttaagtttgcttttatagctttgttggtgcccaagggagctgagagtccactgtcataatcctacatt

SEQ ID NO: 247894 - DNA, 120 bp, Artificial Sequence
  ENSG00000122786_46 (sequence is synthesized)
ctagaggaagaagaaaaagtttccaatcctaggcctctgtgcatttaattgcatccattggctccatgccatttaattgcatttgttggctccatatataatctccaaagtcattaaatt

SEQ ID NO: 247895 - DNA, 120 bp, Artificial Sequence
  ENSG00000122786_47 (sequence is synthesized)
ttgtcactttccaatttaaaaaggaagaaatggaaatgttcacaaatccttcttgggcacaactccttgaaccgtttaattaatctacaccccgagattctttgcataaaggctcacagg

SEQ ID NO: 247896 - DNA, 120 bp, Artificial Sequence
  ENSG00000122786_48 (sequence is synthesized)
aggtatacactaatgtcaacccaatttacaattggaaaatctttatacattgaaaaaagcaacttttcctccccctctcaataggtacaagaatgcgggtttataaaaggacacagttga

SEQ ID NO: 247897 - DNA, 120 bp, Artificial Sequence
  ENSG00000122786_49 (sequence is synthesized)
ggcaagagaccggacccaaaagttatgtgctctttagtgcctcaagttttccaagcatctctggtaacataaggagtagaaattattttcaaaaacaaaataatcactggttccagacca

SEQ ID NO: 247898 - DNA, 120 bp, Artificial Sequence
  ENSG00000122786_50 (sequence is synthesized)
gtgattattaaccctttttgaattatgaacccctttaaaacctaatgaaatttaaggaccctctcccccaaaatatacatataaaaaaacaaggcagtctatggacctactgagtaactc

SEQ ID NO: 247899 - DNA, 120 bp, Artificial Sequence
  ENSG00000122786_51 (sequence is synthesized)
tcaagatagtaagtaaggagagaaagatctatgtttccctctttgataagtatgaaatatttggaggagatgctaatttttgcacgtttatgatatttgcaatctttcatttttgtagca

SEQ ID NO: 247900 - DNA, 120 bp, Artificial Sequence
  ENSG00000122786_52 (sequence is synthesized)
gattatactcaaaaatttgatccagaacttggcccctattcttttatcagcactttaacttgtaaactgaaaagtttaccatcatctgtatgacatcctaatgaggttaaaaagataaaa

SEQ ID NO: 247901 - DNA, 120 bp, Artificial Sequence
  ENSG00000122786_53 (sequence is synthesized)
tgcagttatgattatgataggtataactgtatccaggtttccacagcaaaaacaaaacaaaacatacaccatgttctggggttattgacagcctcctaaaaaaaaaaaaaaaaaaaaaaa

SEQ ID NO: 247902 - DNA, 120 bp, Artificial Sequence
  ENSG00000122786_54 (sequence is synthesized)
aaccactgacagctctgtaaacaaagcaaggacaaaaagagcccgcttccccctttctggtagtcattttgggtttgggggctgcaggggaattctggaatacttgactccatggcacag

SEQ ID NO: 247903 - DNA, 120 bp, Artificial Sequence
  ENSG00000122786_55 (sequence is synthesized)
taaacatactgagaatactttcagcttgaaaattattgttctggaggacacaggatattcagaactacttcagtgtttaaaaagcatgatatataatatacatatatatattataaaatc

SEQ ID NO: 247904 - DNA, 120 bp, Artificial Sequence
  ENSG00000122786_56 (sequence is synthesized)
tcctttccgacttagtcctcgggaagaagtttcagactacaaggtttaacaattaattctttaaagcattcgttcaattgtggcacaccgacctctcttgttggccagaaacttataggg

SEQ ID NO: 247905 - DNA, 120 bp, Artificial Sequence
  ENSG00000122786_57 (sequence is synthesized)
gcgactcgaagcagaaagagacgaggtctcactatgctgcccaggctgctctcaaactcctggactcaagagatcctcctgcctcgggatcccaaagtgtagagattacagacatgagtc

SEQ ID NO: 247906 - DNA, 120 bp, Artificial Sequence
  ENSG00000122786_58 (sequence is synthesized)
accacacccagtctgtttgctgatctgttttaaaggaatgtctacattcaccttttctaggagtcagttctccaaatcactctacctttcactttgtaagtaacggtggggaagaataaa

SEQ ID NO: 247907 - DNA, 120 bp, Artificial Sequence
  ENSG00000122786_59 (sequence is synthesized)
agaccaacgtgttaacacaaagggagaacacgggagcatcctgcaccgtgcatttcagccacagatcacatggcccctccgcgggcccagcccacgccctgaccgcccggcctggccagg

SEQ ID NO: 247908 - DNA, 120 bp, Artificial Sequence
  ENSG00000122786_60 (sequence is synthesized)
tctccgtatctctctgccccgccgccccttcccaactgcggacatgctgggtggatccggatcgcatggaagacgcagcctggccgcgctctcccaaatcgcctaccagaggaatgacga

SEQ ID NO: 247909 - DNA, 120 bp, Artificial Sequence
  ENSG00000122786_61 (sequence is synthesized)
cttctgttcctcactctttggtctctggttgattggaaacctgcttctcctgccttcatttctccctcttcttccggagtgggtctttctctaaaatgtagtctggtcaggacttgagac

SEQ ID NO: 247910 - DNA, 120 bp, Artificial Sequence
  ENSG00000122786_62 (sequence is synthesized)
gattcaaataaacaatagatgtggccatttatttagagctggctagaaaatataaatggccacctatcgatgtttttctgcttcctttttatcaggacttgagaccaggagacgtatcca

SEQ ID NO: 247911 - DNA, 120 bp, Artificial Sequence
  ENSG00000122786_63 (sequence is synthesized)
tagtgttctggattgagtatctcagttaccagcctgaaatctccatcgaccaacactgccttctctcaaatgacttcttatatgaaagtggacagacagtggaatgcagaaattttagag

SEQ ID NO: 247912 - DNA, 120 bp, Artificial Sequence
  ENSG00000122786_64 (sequence is synthesized)
gacttagtcctcgggaagaagtttcagactacaaggagaactccatctagaacaaaatgtgcattcagcaaggtatcattggaacatttcaagatcatcaaatcaaattccacagggatt

SEQ ID NO: 247913 - DNA, 120 bp, Artificial Sequence
  ENSG00000122786_65 (sequence is synthesized)
ttcaggcctcaaagaccatccttttgagaggccaaatgtggtcatatcgcacaccaaactgttcgcaaaagtagttatggaaaatttttctgctaagactctaaattaagcatttaaaaa

SEQ ID NO: 247914 - DNA, 120 bp, Artificial Sequence
  ENSG00000122786_66 (sequence is synthesized)
gaagccgatcgaaaactcagagaggaggtaaggcgggcgctagcccactgagaacgttgcccgggaaaattccctagtgccgtgcggctgttcttttgagcatgggctctcaaaaatatt

SEQ ID NO: 247915 - DNA, 120 bp, Artificial Sequence
  ENSG00000122786_67 (sequence is synthesized)
tttttaagaataataaacttaccatgtgctaggtactgttttataacttgtagatgtattaatttgtccactgcttctaagaactcgctgacctaggtactaatccccattttacagatg

SEQ ID NO: 247916 - DNA, 120 bp, Artificial Sequence
  ENSG00000122786_68 (sequence is synthesized)
agaaaactgaggcacagagaggttttgtttttgtttttgtttttgtttgtaactttcccaaggtctcccttgagtctgcctgacatgcaggaggagccccatcattaaaaccctttactg

SEQ ID NO: 247917 - DNA, 120 bp, Artificial Sequence
  ENSG00000122786_69 (sequence is synthesized)
gatttcctgagcatgcctagggaatgacaggcatctccacaggcaggctgcatccaccttggctggggtgtcgtcattggctgcctattagaaaaacgacaggacaatgcataccaccgc

SEQ ID NO: 247918 - DNA, 120 bp, Artificial Sequence
  ENSG00000122786_70 (sequence is synthesized)
ctcccgactgtaaacataggggatatgtgttcacttagcatggacttctgggaggggccaaggaagggcggtctggagttttattgaatagagcagtgtgtattcggctgcctgcctgcc

SEQ ID NO: 247919 - DNA, 120 bp, Artificial Sequence
  ENSG00000122786_71 (sequence is synthesized)
agagagatttgagaggaatcaattgataactgcatattgataattgcatttaatcaatacctttcacattggaatgttttaaatgacaaaagtaatgtgtgaatgaaggtttaaaaagct

SEQ ID NO: 247920 - DNA, 120 bp, Artificial Sequence
  ENSG00000122786_72 (sequence is synthesized)
tatataataagaaatgacaaaaaaatgtcaagtattgaatattggaaccacttaggacatgagagtcttcaatctaaaaaatataaaggcaaaaagccctggatgaatcttgtgaaaaat

SEQ ID NO: 247921 - DNA, 120 bp, Artificial Sequence
  ENSG00000122786_73 (sequence is synthesized)
aacaagaggaggagagggaacaaggttcagatgagatttcccatcatgaaaagatggaagaggaagacaaggaaagagctgaggcagagagggcaaggttggaagcagaagaaagagaaa

SEQ ID NO: 247922 - DNA, 120 bp, Artificial Sequence
  ENSG00000122786_74 (sequence is synthesized)
gaattaaagccgagcaagacaaaaagatagcagatgaacgagcaagaattgaagcagaagaaaaagcagctgcccaagaaagagaaaggagagaggcagaagagagggaaaggatgaggg

SEQ ID NO: 247923 - DNA, 120 bp, Artificial Sequence
  ENSG00000122786_75 (sequence is synthesized)
aggaagagaaaagggcagcagaggagaggcagaggataaaggaggaagagaaaagggcagcagaggagaggcagaggataaaggaggaagagaaaagggcagcagaggagaggcagagga

SEQ ID NO: 247924 - DNA, 120 bp, Artificial Sequence
  ENSG00000122786_76 (sequence is synthesized)
taaaagaggaagagaaaagggcagcagaggagaggcaaagggccagggcagaggaggaagagaaggctaaggtagaagagcagaaacgtaacaagcagctagaagagaaaaaacatgcca

SEQ ID NO: 247925 - DNA, 120 bp, Artificial Sequence
  ENSG00000122786_77 (sequence is synthesized)
tgcaagagacaaagataaaaggggaaaaggtagaacagaaaatagaagggaaatgggtaaatgaaaagaaagcacaagaagataaacttcagacagctgtcctaaagaaacagggagaag

SEQ ID NO: 247926 - DNA, 120 bp, Artificial Sequence
  ENSG00000122787_0 (sequence is synthesized)
acctttctaaaaagactccctgtggtgttcagaatcactcctacagtcaggttctccacaatggatctcagtgctgcaagtcaccgcatacctctaagtgatggaaacagcattcccatc

SEQ ID NO: 247927 - DNA, 120 bp, Artificial Sequence
  ENSG00000122787_1 (sequence is synthesized)
atcggacttggtacctactcagaacctaaatcgacccctaagggagcctgtgcaacatcggtgaaggttgctattgacacagggtaccgacatattgatggggcctacatctaccaaaat

SEQ ID NO: 247928 - DNA, 120 bp, Artificial Sequence
  ENSG00000122787_2 (sequence is synthesized)
gaacacgaagttggggaggccatcagggagaagatagcagaaggaaaggtgcggagggaagatatcttctactgtggaaagctatgggctacaaatcatgtcccagagatggtccgccca

SEQ ID NO: 247929 - DNA, 120 bp, Artificial Sequence
  ENSG00000122787_3 (sequence is synthesized)
accctggagaggacactcagggtcctccagctagattatgtggatctttacatcattgaagtacccatggcctttaagccaggagatgaaatataccctagagatgagaatggcaaatgg

SEQ ID NO: 247930 - DNA, 120 bp, Artificial Sequence
  ENSG00000122787_4 (sequence is synthesized)
ttatatcacaagtcaaatctgtgtgccacttgggaggcgatggaagcttgcaaagacgctggcttggtgaaatccctgggagtgtccaattttaaccgcaggcagctggagctcatcctg

SEQ ID NO: 247931 - DNA, 120 bp, Artificial Sequence
  ENSG00000122787_5 (sequence is synthesized)
aacaagccaggactcaaacacaagccagtcagcaaccaggttgagtgccatccgtatttcacccagccaaaactcttgaaattttgccaacaacatgacattgtcattactgcatatagc

SEQ ID NO: 247932 - DNA, 120 bp, Artificial Sequence
  ENSG00000122787_6 (sequence is synthesized)
cctttggggaccagtaggaatccaatctgggtgaatgtttcttctccacctttgttaaaggatgcacttctaaactcattggggaaaaggtacaataagacagcagctcaaattgttttg

SEQ ID NO: 247933 - DNA, 120 bp, Artificial Sequence
  ENSG00000122787_7 (sequence is synthesized)
cgtttcaacatccagcgaggggtggttgtcattcctaaaagctttaatcttgaaaggatcaaagaaaattttcagatctttgacttttctctcactgaagaagaaatgaaggacattgaa

SEQ ID NO: 247934 - DNA, 120 bp, Artificial Sequence
  ENSG00000122787_8 (sequence is synthesized)
gccttgaataaaaatgtccgctttgtagaattgctcatgtggcgcgatcatcctgaatacccatttcatgatgaatactgactgcagggagttcctgaacagatttttcactcccacgag

SEQ ID NO: 247935 - DNA, 120 bp, Artificial Sequence
  ENSG00000122787_9 (sequence is synthesized)
tgccaagacggtgcaatgggtagtcccctagatgtgaaaatgaagagagagggttttaccatcctgagaagaaataatgatggaaacatgtttaatgtttgtgcagtgtaaatgactttg

SEQ ID NO: 247936 - DNA, 120 bp, Artificial Sequence
  ENSG00000122787_10 (sequence is synthesized)
actcagtcacattgaagtaaaaatattaaaatctgttgaaataactcttaggaaattatcaactaattttttcagatcagtatcttctagattccagacagaaaaaaattacacttcaga

SEQ ID NO: 247937 - DNA, 120 bp, Artificial Sequence
  ENSG00000122787_11 (sequence is synthesized)
tgggtagtagcgttggtaatctgagttctttaagggttaacaggacaacgaagtgcatgtggcagtgtgctggcagtggccttgaggctttggaccattggttacaaaacagacacagcc

SEQ ID NO: 247938 - DNA, 120 bp, Artificial Sequence
  ENSG00000122787_12 (sequence is synthesized)
aagataagatccacacacacattattaacaaggaagtgatttgctgcaccttgagttgagagggctacatgtagaaaagtcttaaaatagagctaaacaccacagtggtcaacaaagcca

SEQ ID NO: 247939 - DNA, 120 bp, Artificial Sequence
  ENSG00000122787_13 (sequence is synthesized)
tcataatgttggtgtttgtttccctccaatgtatgtatgtttagtttttatccaacctgaggaatgaaaacttaactggatctctcttgcatccttaaagggcctgagtctcaacatggc

SEQ ID NO: 247940 - DNA, 120 bp, Artificial Sequence
  ENSG00000122787_14 (sequence is synthesized)
tgctgatccatacttacacatcttactgtcaatcttgcctacattgattatagaaccactattacgtgaaaaggcttgaaacaaccaacatatacaaataaaaccctgccttgtaaaata

SEQ ID NO: 247941 - DNA, 120 bp, Artificial Sequence
  ENSG00000122787_15 (sequence is synthesized)
gtaaaagagaagccatatattggcttttcttcttaacttgggagatatattgaaacaaggtgctttataagattattgtacttaagactttaatagtgttacttggatagcttatatgaa

SEQ ID NO: 247942 - DNA, 120 bp, Artificial Sequence
  ENSG00000122787_16 (sequence is synthesized)
ttttgagaattttatatgaattttgagaaagcaagttcaaaagaactctggtaattttcctgtatgtacaatttaaagagtgaataagattattagaattcagcaatagagatatatcta

SEQ ID NO: 247943 - DNA, 75 bp, Artificial Sequence
  ENSG00000122787_17 (sequence is synthesized)
aaaagaaaagaaatatattttattcattcacattaggtcactgtcatactgtcataggatgagagagttcttcaa

SEQ ID NO: 247944 - DNA, 120 bp, Artificial Sequence
  ENSG00000122787_18 (sequence is synthesized)
ggtcactgtcatactgtcataggatgagagagttcttcaaaaattatgttttcccaagatcagttgcttatagataatgttcaatgacctcaagacatatatttttgagaaattatcatt

SEQ ID NO: 247945 - DNA, 120 bp, Artificial Sequence
  ENSG00000122787_19 (sequence is synthesized)
ttaaaaaatttggtctatactgattgttttcactgattccaatattattacttataacactgacctctggaaaatattttgttcacaagaaataataaagtataatgatttgttgcatca

SEQ ID NO: 247946 - DNA, 120 bp, Artificial Sequence
  ENSG00000122787_20 (sequence is synthesized)
aatagagggcttgggtccggaagtgatggactggaggcttgactaatgtgaaaggggcgtctgaaagagaagccagctgccatgccatgaactgcaatgtgaaaaggccaatgtagcaag

SEQ ID NO: 247947 - DNA, 120 bp, Artificial Sequence
  ENSG00000122787_21 (sequence is synthesized)
ccataaacttgccttgcttgatcttcccatactacgagtaactctccattcagtgcatactctgcactcagagaaactggttacaggtgacctgcagtgtcctgggtgaatgtttcttct

SEQ ID NO: 247948 - DNA, 120 bp, Artificial Sequence
  ENSG00000122787_22 (sequence is synthesized)
aatggatctcagtgctgcaagtcaccgcatacctctaagtgatggaaacagcattcccatcatcggacttggtacctactcagaacctaaatcgctatgggctacaaatcatgtcccaga

SEQ ID NO: 247949 - DNA, 120 bp, Artificial Sequence
  ENSG00000122787_23 (sequence is synthesized)
gtaagttcaaatgtgcttcttattttaaaagacgatatttttaaaactgtgatctgattattcctgtcatatttatggagagagatgcaccctttactttcaatgaaaagtaacagtcag

SEQ ID NO: 247950 - DNA, 120 bp, Artificial Sequence
  ENSG00000122787_24 (sequence is synthesized)
attcctaaccataagtacaggtatatgaaatctccacttctgggtactaaataattcttacttttgttttgctggaatgccaaagaaaagagagaggggtggaaggaaaaacagtgtaaa

SEQ ID NO: 247951 - DNA, 120 bp, Artificial Sequence
  ENSG00000122787_25 (sequence is synthesized)
gggtggaaggaaaaacagtgtaaacaaaatatgttctaatataaaagtaattaaaatatatgaataagataaattcacaaatcaaaaaatatatatcaagttgttaatatgatgcctaca

SEQ ID NO: 247952 - DNA, 120 bp, Artificial Sequence
  ENSG00000122824_0 (sequence is synthesized)
agacggcagacggaggcgcctctctctccccgcccctctcctcggccctttctcttcccagcacctcggctgctgcccggcagcggcagcagctgcgtcggcggcccacacagcagcgag

SEQ ID NO: 247953 - DNA, 120 bp, Artificial Sequence
  ENSG00000122824_1 (sequence is synthesized)
aggcgagaggaggctgcctcgaggatgaagtgcaaacccaaccagacacggacctacgaccccgaggggttcaagaagcgggcggcgtgcctgtgcttccggagcgagcgcgaggacgag

SEQ ID NO: 247954 - DNA, 120 bp, Artificial Sequence
  ENSG00000122824_2 (sequence is synthesized)
gtcctgttagtgagtagcagccggtacccggaccgctggatcgtgccgggcgggggcatggagcccgaggaggagccgggcggtgcggcggtccgagaggtgtacgaagaggcgggagtc

SEQ ID NO: 247955 - DNA, 120 bp, Artificial Sequence
  ENSG00000122824_3 (sequence is synthesized)
aaggggaagttaggccggctcctgggcgtcttcgaacagaaccaggaccccaagcacagaacgtacgtgtatgtactgactgtcacggagctgctggaggattgggaagattcggttagc

SEQ ID NO: 247956 - DNA, 120 bp, Artificial Sequence
  ENSG00000122824_4 (sequence is synthesized)
attgggaggaagcgagagtggttcaaagtcgaagatgccatcaaggttctccagtgccacaagcccgtgcacgccgaatatctggagaaactaaagctgggcggttccccaaccaatgga

SEQ ID NO: 247957 - DNA, 120 bp, Artificial Sequence
  ENSG00000122824_5 (sequence is synthesized)
aactccatggccccatcctcgccagatagcgatccctagtgaatggcatagatgttgttcagatttactttgaaagaatcaagtatgtgaatggatggatgaatggaattgtgaagcaca

SEQ ID NO: 247958 - DNA, 120 bp, Artificial Sequence
  ENSG00000122824_6 (sequence is synthesized)
gatgagctctttcacactccaaggacacagctcatcctatgcttttggacacttcttccctgtttattacaatgactattctccaggttgttgcactaccgctgtatctgtacataattc

SEQ ID NO: 247959 - DNA, 120 bp, Artificial Sequence
  ENSG00000122824_7 (sequence is synthesized)
taacttggcacctgtggccttttttgtgctcttatgtgtctgtatttcccggcagagtatacgcccttgaatgccaggaacttgtttccttagtcttttttatatatctagcatataaga

SEQ ID NO: 247960 - DNA, 120 bp, Artificial Sequence
  ENSG00000122824_8 (sequence is synthesized)
cttagaatatggtagacatcactgaagatttgtttcagtagttcatattttgtaatgatactgaatggttaaacaatccctttctaatctgtctagcatatatgtgacttttgtttatca

SEQ ID NO: 247961 - DNA, 120 bp, Artificial Sequence
  ENSG00000122824_9 (sequence is synthesized)
agtgtcacacaactgcttcaaggcagctgtgagatactagaaagcaaaaattcttactcctatgtctgtgtcatcccagatgtgtgcctccagatggcagtatactacactatctgtaaa

SEQ ID NO: 247962 - DNA, 120 bp, Artificial Sequence
  ENSG00000122824_10 (sequence is synthesized)
caggaggctgaggcagaagaatagcttgagcccaggagctttagtctagcctgagcaatataatgagactccgtctcttaaaatatttgcccaaacattgaacctaaatttgaccatgcc

SEQ ID NO: 247963 - DNA, 120 bp, Artificial Sequence
  ENSG00000122824_11 (sequence is synthesized)
aaatatttgcccaaacattgaacctaaatttgaccatgcccctagaaataattcctaatctttagaaaatagggcagagaaacattattttacaccatggagatgagatcagcagaatcc

SEQ ID NO: 247964 - DNA, 120 bp, Artificial Sequence
  ENSG00000122824_12 (sequence is synthesized)
agactataagaaactacaggacacatgacctagtttcttctgtaaataacttgcaaggatgaaagatggaggatgaacctatagatttaaagagacttaagagacatattaaccaattgt

SEQ ID NO: 247965 - DNA, 120 bp, Artificial Sequence
  ENSG00000122824_13 (sequence is synthesized)
taattggatcttatttgaattgtgatttgaccgaactgtaaaacgaatacatttatgagacaatcggggtaatttgaacattggtggggtatttggtattagaataatggttttatcatt

SEQ ID NO: 247966 - DNA, 120 bp, Artificial Sequence
  ENSG00000122824_14 (sequence is synthesized)
atgttagaaagaagggtcctcatctacattctcaaacatctgtggctgatatgatatgattcttggaatttgcttcaaaataataagtctggatgttaagtgcattggaaatattgatga

SEQ ID NO: 247967 - DNA, 120 bp, Artificial Sequence
  ENSG00000122824_15 (sequence is synthesized)
aacgaaattggccttgataattgttgaagctgggtgatggctaaaatgatggttcattatatatgttcatctctatttttgtatgtttggcattttccgtaataaagtttataaaaataa

SEQ ID NO: 247968 - DNA, 120 bp, Artificial Sequence
  ENSG00000122824_16 (sequence is synthesized)
tgagtaagccagaatggttgatagtgggggaggatgatgacgacgctgcctttgcccctgtcttgtgtgaaacaactgcctgtgggtttcctgcagcgcagtggggagtgagaggagaaa

SEQ ID NO: 247969 - DNA, 120 bp, Artificial Sequence
  ENSG00000122852_0 (sequence is synthesized)
gaggcagagacccaagcagctggaggctctgtgtgtggcctggagaccccacaacctccagccggaggcctgaagcatgaggccatgccaggtgccaggagcagcgactggacccagagc

SEQ ID NO: 247970 - DNA, 120 bp, Artificial Sequence
  ENSG00000122852_1 (sequence is synthesized)
catgtggctgtgccctctggccctcaacctcatcttgatggcagcctctggtgctgtgtgcgaagtgaaggacgtttgtgttggaagccctggtatccccggcactcctggatcccacgg

SEQ ID NO: 247971 - DNA, 120 bp, Artificial Sequence
  ENSG00000122852_2 (sequence is synthesized)
cctgccaggcagggacgggagagatggtctcaaaggagaccctggccctccaggccccatgggtccacctggagaaatgccatgtcctcctggaaatgatgggctgcctggagcccctgg

SEQ ID NO: 247972 - DNA, 120 bp, Artificial Sequence
  ENSG00000122852_3 (sequence is synthesized)
tatccctggagagtgtggagagaagggggagcctggcgagaggggccctccagggcttccagctcatctagatgaggagctccaagccacactccacgactttagacatcaaatcctgca

SEQ ID NO: 247973 - DNA, 120 bp, Artificial Sequence
  ENSG00000122852_4 (sequence is synthesized)
gacaaggggagccctcagtctgcagggctccataatgacagtaggagagaaggtcttctccagcaatgggcagtccatcacttttgatgccattcaggaggcatgtgccagagcaggcgg

SEQ ID NO: 247974 - DNA, 120 bp, Artificial Sequence
  ENSG00000122852_5 (sequence is synthesized)
ccgcattgctgtcccaaggaatccagaggaaaatgaggccattgcaagcttcgtgaagaagtacaacacatatgcctatgtaggcctgactgagggtcccagccctggagacttccgcta

SEQ ID NO: 247975 - DNA, 120 bp, Artificial Sequence
  ENSG00000122852_6 (sequence is synthesized)
ctcagacgggacccctgtaaactacaccaactggtaccgaggggagcccgcaggtcggggaaaagagcagtgtgtggagatgtacacagatgggcagtggaatgacaggaactgcctgta

SEQ ID NO: 247976 - DNA, 120 bp, Artificial Sequence
  ENSG00000122852_7 (sequence is synthesized)
ctcccgactgaccatctgtgagttctgagaggcatttaggccatgggacagggaggacgctctctggccttcggcctccatcctgaggctccacttggtctgtgagatgctagaactccc

SEQ ID NO: 247977 - DNA, 120 bp, Artificial Sequence
  ENSG00000122852_8 (sequence is synthesized)
tttcaacagaattcacttgtggctattgggactggaggcacccttagccacttcattcctctgatgggccctgactcttccccataatcactgaccagccttgacactccccttgcaaac

SEQ ID NO: 247978 - DNA, 120 bp, Artificial Sequence
  ENSG00000122852_9 (sequence is synthesized)
tgagatggagccctccttattccccatctggtccagttccttcacttacagatggcagcagtgaggtcttggggtagaaggaccctccaaagtcacacaaagtgcctgcctcctggtccc

SEQ ID NO: 247979 - DNA, 120 bp, Artificial Sequence
  ENSG00000122852_10 (sequence is synthesized)
ctcagctctctctctgcaacccagtgccatcaggatgagcaatcctggccaagcataatgacagagagaggcagacttcggggaagccctgactgtgcagagctaaggacacagtggaga

SEQ ID NO: 247980 - DNA, 120 bp, Artificial Sequence
  ENSG00000122852_11 (sequence is synthesized)
ttctctggcactctgaggtctctgtggcaggcctggtcaggctctccatgaggttagaaggccaggtagtgttccagcagggtggtggccaagccaaccccatgattgatgtgtacgatt

SEQ ID NO: 247981 - DNA, 120 bp, Artificial Sequence
  ENSG00000122852_12 (sequence is synthesized)
cactcctttgagtctttgaatggcaactcagccccctgacctgaagacagccagcctaggcctctagggtgacctagagccgccttcagatgtgacccgagtaactttcaactgatgaac

SEQ ID NO: 247982 - DNA, 120 bp, Artificial Sequence
  ENSG00000122852_13 (sequence is synthesized)
aaatctgcaccctacttcagatttcagtgggcattcacaccaccccccacaccactggctctgctttctcctttcattaatccattcacccagatatttcattaaaattatcacgtgcca

SEQ ID NO: 247983 - DNA, 120 bp, Artificial Sequence
  ENSG00000122852_14 (sequence is synthesized)
ggtcttaggatatgtcgtggggtgggcaaggtaatcagtgacagttgaagatttttttttcccagagcttatgtcttcatctgtgaaatgggaataagatacttgttgctgtcacagtta

SEQ ID NO: 247984 - DNA, 120 bp, Artificial Sequence
  ENSG00000122852_15 (sequence is synthesized)
ttaccatccccccagctaccaaaattactaccagaactgttactatacacagaggctattgactgagcacctatcatttgccaagaaccttgacaagcacttctaatacagcatattatg

SEQ ID NO: 247985 - DNA, 120 bp, Artificial Sequence
  ENSG00000122852_16 (sequence is synthesized)
tactattcaatctttacacaatgtcacgggaccagtattgtttcctcattttttataaggacactgaagcttggaggagttaaatgttttgagtattattccagagagcaagtggcagag

SEQ ID NO: 247986 - DNA, 120 bp, Artificial Sequence
  ENSG00000122852_17 (sequence is synthesized)
gctggatccaaacccatcttcctggacctgaagcttatgcttccagccaccccactcctgagctgaataaagatgatttaagcttaataaatcgtgaatgtgttcacatgagtttccata

SEQ ID NO: 247987 - DNA, 120 bp, Artificial Sequence
  ENSG00000122852_18 (sequence is synthesized)
gacttggaggcagagacccaagcagctggaggctctgtgtgtgggtcgctgatttcttggagcctgaaaagaaagtaacacagcagggatgaggacagatggtgtgagtcagtgagagca

SEQ ID NO: 247988 - DNA, 120 bp, Artificial Sequence
  ENSG00000122852_19 (sequence is synthesized)
cagctggaggctctgtgtgtggcagcctggagaccccacaacctccagccggaggcctgaagcatgaggccatgccaggtgccaggtgatgctgggaattttcccgggagcttcgggtct

SEQ ID NO: 247989 - DNA, 120 bp, Artificial Sequence
  ENSG00000122852_20 (sequence is synthesized)
ggctcacggccatccctcctgcaggagcagcgactggacccagagccatgtggctgtgccctctggccctcaacctcatcttgatggcagcctctggtgctgtgtgcgaagtgaaggacg

SEQ ID NO: 247990 - DNA, 120 bp, Artificial Sequence
  ENSG00000122859_0 (sequence is synthesized)
gctcaggaaatccctgcggtctcaccgccgcgcctcgagagagagcgtgacagaggcctcggaccccattctctcttcttttctcctttggggctggggcaactcccaggcgggggcgcc

SEQ ID NO: 247991 - DNA, 120 bp, Artificial Sequence
  ENSG00000122859_1 (sequence is synthesized)
tgcagctcagctgaacttggcgaccagaagcccgctgagctccccacggccctcgctgctcatcgctctctattcttttgcgccggtagaaaggatgacgcctcaaccctcgggtgcgcc

SEQ ID NO: 247992 - DNA, 120 bp, Artificial Sequence
  ENSG00000122859_2 (sequence is synthesized)
cactgtccaagtgacccgtgagacggagcggtccttccccagagcctcggaagacgaagtgacctgccccacgtccgccccgcccagccccactcgcacacgggggaactgcgcagaggc

SEQ ID NO: 247993 - DNA, 120 bp, Artificial Sequence
  ENSG00000122859_3 (sequence is synthesized)
ggaagagggaggctgccgaggggccccgaggaagctccgggcacggcgcgggggacgcagccggcctaagagcgagttggcactgagcaagcagcgacggagtcggcgaaagaaggccaa

SEQ ID NO: 247994 - DNA, 120 bp, Artificial Sequence
  ENSG00000122859_4 (sequence is synthesized)
cgaccgcgagcgcaatcgaatgcacaacctcaactcggcactggacgccctgcgcggtgtcctgcccaccttcccagacgacgcgaagctcaccaagatcgagacgctgcgcttcgccca

SEQ ID NO: 247995 - DNA, 120 bp, Artificial Sequence
  ENSG00000122859_5 (sequence is synthesized)
caactacatctgggcgctgactcaaacgctgcgcatagcggaccacagcttgtacgcgctggagccgccggcgccgcactgcggggagctgggcagcccaggcggttcccccggggactg

SEQ ID NO: 247996 - DNA, 120 bp, Artificial Sequence
  ENSG00000122859_6 (sequence is synthesized)
ggggtccctctactccccagtctcccaggctggcagcctgagtcccgccgcgtcgctggaggagcgacccgggctgctgggggccaccttttccgcctgcttgagcccaggcagtctggc

SEQ ID NO: 247997 - DNA, 120 bp, Artificial Sequence
  ENSG00000122859_7 (sequence is synthesized)
tttctcagattttctgtgaaaggacctgtctgtcgctgggctgtgggtgctaagggtaagggagagggagggagccgggagccgtagagggtggccgacggcggcggccctcaaaagcac

SEQ ID NO: 247998 - DNA, 120 bp, Artificial Sequence
  ENSG00000122859_8 (sequence is synthesized)
ttgttccttctgcttctccctggctgacccctggccggcccaggcctccacgggggcggcaggctgggttcattccccggccctccgagccgcgccaacgcacgcaacccttgctgctgc

SEQ ID NO: 247999 - DNA, 120 bp, Artificial Sequence
  ENSG00000122859_9 (sequence is synthesized)
ccgcgcgaagtgggcattgcaaagtgcgctcattttaggcctcctctctgccaccaccccataatctcattcaaagaatactagaatggtagcactacccggccggagccgcccaccgtc

SEQ ID NO: 248000 - DNA, 120 bp, Artificial Sequence
  ENSG00000122859_10 (sequence is synthesized)
ttgggtcgccctaccctcactcaagtctgtctgcctctcagtctcttaccacccctcctccaatgtgattcaatccaatgtttggtctctcagcgcttactccccttgccttgctccaaa

SEQ ID NO: 248001 - DNA, 120 bp, Artificial Sequence
  ENSG00000122859_11 (sequence is synthesized)
gacgctgccgatctgctctactcccaatcaggtccgggatttcagggcgcctcactctgccttaaagccacgaaggcgaccctctgccttctcctcgtgcacttttcggagccattgccc

SEQ ID NO: 248002 - DNA, 120 bp, Artificial Sequence
  ENSG00000122859_12 (sequence is synthesized)
tcccggggcggaagaccaggctgtgaactgggaaagcgctagcccggccagggagcatctccccagcctccctgcgaactgcgcctgaaacgtgagctgcgctgcaggtgcctggagcac

SEQ ID NO: 248003 - DNA, 120 bp, Artificial Sequence
  ENSG00000122861_0 (sequence is synthesized)
gagaccgcagccccggagcccgggccagggtccacctgtccccgcagcgccggctcgcgccctcctgccgcagccaccgagccgccgtctagcgccccgacctcgccaccatgagagccc

SEQ ID NO: 248004 - DNA, 120 bp, Artificial Sequence
  ENSG00000122861_1 (sequence is synthesized)
gagagccctgctggcgcgcctgcttctctgcgtcctggtcgtgagcgactccaaaggcagcaatgaacttcatcaagttccatcgaactgtgactgtctaaatggaggaacatgtgtgtc

SEQ ID NO: 248005 - DNA, 120 bp, Artificial Sequence
  ENSG00000122861_2 (sequence is synthesized)
caacaagtacttctccaacattcactggtgcaactgcccaaagaaattcggagggcagcactgtgaaatagataagtcaaaaacctgctatgaggggaatggtcacttttaccgaggaaa

SEQ ID NO: 248006 - DNA, 120 bp, Artificial Sequence
  ENSG00000122861_3 (sequence is synthesized)
ggccagcactgacaccatgggccggccctgcctgccctggaactctgccactgtccttcagcaaacgtaccatgcccacagatctgatgctcttcagctgggcctggggaaacataatta

SEQ ID NO: 248007 - DNA, 120 bp, Artificial Sequence
  ENSG00000122861_4 (sequence is synthesized)
ctgcaggaacccagacaaccggaggcgaccctggtgctatgtgcaggtgggcctaaagctgcttgtccaagagtgcatggtgcatgactgcgcagatggaaaaaagccctcctctcctcc

SEQ ID NO: 248008 - DNA, 120 bp, Artificial Sequence
  ENSG00000122861_5 (sequence is synthesized)
agaagaattaaaatttcagtgtggccaaaagactctgaggccccgctttaagattattgggggagaattcaccaccatcgagaaccagccctggtttgcggccatctacaggaggcaccg

SEQ ID NO: 248009 - DNA, 120 bp, Artificial Sequence
  ENSG00000122861_6 (sequence is synthesized)
ggggggctctgtcacctacgtgtgtggaggcagcctcatcagcccttgctgggtgatcagcgccacacactgcttcattgattacccaaagaaggaggactacatcgtctacctgggtcg

SEQ ID NO: 248010 - DNA, 120 bp, Artificial Sequence
  ENSG00000122861_7 (sequence is synthesized)
ctcaaggcttaactccaacacgcaaggggagatgaagtttgaggtggaaaacctcatcctacacaaggactacagcgctgacacgcttgctcaccacaacgacattgccttgctgaagat

SEQ ID NO: 248011 - DNA, 120 bp, Artificial Sequence
  ENSG00000122861_8 (sequence is synthesized)
ccgttccaaggagggcaggtgtgcgcagccatcccggactatacagaccatctgcctgccctcgatgtataacgatccccagtttggcacaagctgtgagatcactggctttggaaaaga

SEQ ID NO: 248012 - DNA, 120 bp, Artificial Sequence
  ENSG00000122861_9 (sequence is synthesized)
ccgggagtgtcagcagccccactactacggctctgaagtcaccaccaaaatgctgtgtgctgctgacccacagtggaaaacagattcctgccagggagactcagggggacccctcgtctg

SEQ ID NO: 248013 - DNA, 120 bp, Artificial Sequence
  ENSG00000122861_10 (sequence is synthesized)
ttccctccaaggccgcatgactttgactggaattgtgagctggggccgtggatgtgccctgaaggacaagccaggcgtctacacgagagtctcacacttcttaccctggatccgcagtca

SEQ ID NO: 248014 - DNA, 120 bp, Artificial Sequence
  ENSG00000122861_11 (sequence is synthesized)
caccaaggaagagaatggcctggccctctgagggtccccagggaggaaacgggcaccacccgctttcttgctggttgtcatttttgcagtagagtcatctccatcagctgtaagaagaga

SEQ ID NO: 248015 - DNA, 120 bp, Artificial Sequence
  ENSG00000122861_12 (sequence is synthesized)
ctgggaagataggctctgcacagatggatttgcctgtgccacccaccagggcgaacgacaatagctttaccctcaggcataggcctgggtgctggctgcccagacccctctggccaggat

SEQ ID NO: 248016 - DNA, 120 bp, Artificial Sequence
  ENSG00000122861_13 (sequence is synthesized)
ggaggggtggtcctgactcaacatgttactgaccagcaacttgtctttttctggactgaagcctgcaggagttaaaaagggcagggcatctcctgtgcatgggtgaagggagagccagct

SEQ ID NO: 248017 - DNA, 120 bp, Artificial Sequence
  ENSG00000122861_14 (sequence is synthesized)
cccccgacggtgggcatttgtgaggcccatggttgagaaatgaataatttcccaattaggaagtgtaacagctgaggtctcttgagggagcttagccaatgtgggagcagcggtttgggg

SEQ ID NO: 248018 - DNA, 120 bp, Artificial Sequence
  ENSG00000122861_15 (sequence is synthesized)
agcagagacactaacgacttcagggcagggctctgatattccatgaatgtatcaggaaatatatatgtgtgtgtatgtttgcacacttgtgtgtgggctgtgagtgtaagtgtgagtaag

SEQ ID NO: 248019 - DNA, 120 bp, Artificial Sequence
  ENSG00000122861_16 (sequence is synthesized)
agctggtgtctgattgttaagtctaaatatttccttaaactgtgtggactgtgatgccacacagagtggtctttctggagaggttataggtcactcctggggcctcttgggtcccccacg

SEQ ID NO: 248020 - DNA, 120 bp, Artificial Sequence
  ENSG00000122861_17 (sequence is synthesized)
tgacagtgcctgggaatgtattattctgcagcatgacctgtgaccagcactgtctcagtttcactttcacatagatgtccctttcttggccagttatcccttccttttagcctagttcat

SEQ ID NO: 248021 - DNA, 120 bp, Artificial Sequence
  ENSG00000122861_18 (sequence is synthesized)
ccaatcctcactgggtggggtgaggaccactcctgtacactgaatatttatatttcactatttttatttatatttttgtaattttaaataaaagtgatcaataaaatgtgatttttctga

SEQ ID NO: 248022 - DNA, 120 bp, Artificial Sequence
  ENSG00000122861_19 (sequence is synthesized)
acctctgatcagcaccaggggagaggaggggctgctcagggagctggggtcctccggattccatccacagcagggccagactctccccaggaaatgggacagggtggcagcggaggcttg

SEQ ID NO: 248023 - DNA, 120 bp, Artificial Sequence
  ENSG00000122861_20 (sequence is synthesized)
agaaccacgggggttggcactggctggcaagggaggaagaggccgccgggactgccccagcctgcgggcatctggtagatgaagcttgcttgggtcaatccatttctcctggctggaaac

SEQ ID NO: 248024 - DNA, 120 bp, Artificial Sequence
  ENSG00000122861_21 (sequence is synthesized)
agcaatcagcatgacagcctccagccaagtaatctggagtcatgagagctgctaggggagcaacatgaatcatgacggtccctgggaatttcctgataactaacctgggagtttcgggag

SEQ ID NO: 248025 - DNA, 120 bp, Artificial Sequence
  ENSG00000122861_22 (sequence is synthesized)
ttttctgtctgtgcttctgggagagtatgtctcgtacatttgtcgcgttgatgaagacttcacagctccatcagctgcgggcaagggggtctgaggcagtcttagagccgccgtctagcg

SEQ ID NO: 248026 - DNA, 120 bp, Artificial Sequence
  ENSG00000122862_0 (sequence is synthesized)
acatttcctaatcaagaagttggcgtgcagctgggagagctagactaagttggtcatgatgcagaagctactcaaatgcagtcggcttgtcctggctcttgccctcatcctggttctgga

SEQ ID NO: 248027 - DNA, 120 bp, Artificial Sequence
  ENSG00000122862_1 (sequence is synthesized)
atcctcagttcaaggttatcctacgcggagagccaggtaccaatgggtgcgctgcaatccagacagtaattctgcaaactgccttgaagaaaaaggaccaatgttcgaactacttccagg

SEQ ID NO: 248028 - DNA, 120 bp, Artificial Sequence
  ENSG00000122862_2 (sequence is synthesized)
tgaatccaacaagatcccccgtctgaggactgacctttttccaaagacgagaatccaggacttgaatcgtatcttcccactttctgaggactactctggatcaggcttcggctccggctc

SEQ ID NO: 248029 - DNA, 120 bp, Artificial Sequence
  ENSG00000122862_3 (sequence is synthesized)
cggctctggatcaggatctgggagtggcttcctaacggaaatggaacaggattaccaactagtagacgaaagtgatgctttccatgacaaccttaggtctcttgacaggaatctgccctc

SEQ ID NO: 248030 - DNA, 120 bp, Artificial Sequence
  ENSG00000122862_4 (sequence is synthesized)
agacagccaggacttgggtcaacatggattagaagaggattttatgttataaaagaggattttcccaccttgacaccaggcaatgtagttagcatattttatgtaccatggttatatgat

SEQ ID NO: 248031 - DNA, 120 bp, Artificial Sequence
  ENSG00000122862_5 (sequence is synthesized)
attttatagaaatttttaaacatctgaaaaagaagcttaagttttatcatccttttttttctcatgaattcttaaaggattatgctttaatgctgttatctattttattgttcttgaaaa

SEQ ID NO: 248032 - DNA, 120 bp, Artificial Sequence
  ENSG00000122862_6 (sequence is synthesized)
tacctgcattttttggtatcatgttcaaccaacatcattatgaaattaattagattcccatggccataaaatggctttaaagaatatatatatatttttaaagtagcttgagaagcaaat

SEQ ID NO: 248033 - DNA, 120 bp, Artificial Sequence
  ENSG00000122862_7 (sequence is synthesized)
tggcaggtaatatttcatacctaaattaagactctgacttggattgtgaattataatgatatgccccttttcttataaaaacaaaaaaaaaaataatgaaacacagtgaatttgtagagt

SEQ ID NO: 248034 - DNA, 120 bp, Artificial Sequence
  ENSG00000122862_8 (sequence is synthesized)
gggggtatttgacatattttacagggtggagtgtactatatactattacctttgaatgtgtttgcagagctagtggatgtgtttgtctacaagtatgattgctgttacataacaccccaa

SEQ ID NO: 248035 - DNA, 120 bp, Artificial Sequence
  ENSG00000122862_9 (sequence is synthesized)
attaactcccaaattaaaacacagttgtgctgtcaatacctcatactgctttacctttttttcctggatatctgtgtattttcaaatgttactatatattaaagcagaaatataaccaaa

SEQ ID NO: 248036 - DNA, 120 bp, Artificial Sequence
  ENSG00000122863_0 (sequence is synthesized)
ccaggcaggacctctcgcaggctcgctgcgcaggacggcgcccgcctggcgccgcttcccttccagcgtgccgaccggccccgcagcgcctccatccctccggcccgccccggagaagac

SEQ ID NO: 248037 - DNA, 120 bp, Artificial Sequence
  ENSG00000122863_1 (sequence is synthesized)
cctccatccctccggcccgccccggagaagacgcacagctcgggccgcgcgggcgccggggccgcggaaccgcttctgccgggatcttccaggaggaaagcgaagttgcgagcggatgct

SEQ ID NO: 248038 - DNA, 120 bp, Artificial Sequence
  ENSG00000122863_2 (sequence is synthesized)
gcccgcgccggaccccagccgcggagggtcggggccgccggtggagtctcggcggccggggacaagggtgtcccccacctgaagacggcaagctgggtcctgagtgatgcccctcagctg

SEQ ID NO: 248039 - DNA, 120 bp, Artificial Sequence
  ENSG00000122863_3 (sequence is synthesized)
agtgtccaaggctggcccgaggagcccccacggccccacctttccccatggagaaaggactcactttgccccaggactgccgggactttgtgcacagcctgaagatgagaagcaaatacg

SEQ ID NO: 248040 - DNA, 120 bp, Artificial Sequence
  ENSG00000122863_4 (sequence is synthesized)
cccttttcttggtttttgtggtgatagtttttgtcttcatcgaaaaggaaaataaaatcatatcaagggtctcagacaagctgaagcagattccccaagctctagcagatgccaacagca

SEQ ID NO: 248041 - DNA, 120 bp, Artificial Sequence
  ENSG00000122863_5 (sequence is synthesized)
ccgacccagccctgatcttagctgagaacgcatctctcttgtccctgagcgagctcgattcagccttctcccagcttcagagccgtctccgcaacctcagcttgcagctgggcgtggagc

SEQ ID NO: 248042 - DNA, 120 bp, Artificial Sequence
  ENSG00000122863_6 (sequence is synthesized)
cagccatggaggccgcaggggaggaagaggaagagcagagaaaggaggaggagccgcccagaccggccgtggcggggccccggcgccacgtgctgctcatggccaccacgcgcaccggct

SEQ ID NO: 248043 - DNA, 120 bp, Artificial Sequence
  ENSG00000122863_7 (sequence is synthesized)
cctcgttcgtgggcgagttcttcaaccagcagggcaacatcttctacctcttcgagccgctgtggcacatcgagcgcacagtgtccttcgagccggggggcgccaacgccgcgggctcgg

SEQ ID NO: 248044 - DNA, 120 bp, Artificial Sequence
  ENSG00000122863_8 (sequence is synthesized)
ccctggtgtaccgcgacgtgctcaagcagctcttcctgtgcgacctgtacgtgctggagcacttcatcacgccgctgcccgaggaccacctgactcagttcatgttccgccggggctcca

SEQ ID NO: 248045 - DNA, 120 bp, Artificial Sequence
  ENSG00000122863_9 (sequence is synthesized)
gccgctccctgtgcgaggaccccgtctgtacgcccttcgtcaagaaggtcttcgagaagtaccactgcaagaaccgccgctgcggccccctcaacgtgacgctggccgcagaggcctgcc

SEQ ID NO: 248046 - DNA, 120 bp, Artificial Sequence
  ENSG00000122863_10 (sequence is synthesized)
gccgcaaggagcacatggccctcaaggcggtgcgcatccggcagctggagttcctgcagccgctggccgaggacccccgcctggacctgcgcgtcatccagctggtgcgcgacccccggg

SEQ ID NO: 248047 - DNA, 120 bp, Artificial Sequence
  ENSG00000122863_11 (sequence is synthesized)
ccgtgctggcctcgcgcatggtggccttcgccggcaagtataagacctggaagaagtggctggacgacgagggccaggacggcctgagggaagaggaggtgcagcggctgcggggcaact

SEQ ID NO: 248048 - DNA, 120 bp, Artificial Sequence
  ENSG00000122863_12 (sequence is synthesized)
gcgagagcatccgcctgtccgcggagctggggctgcggcagcccgcctggctgcggggccgctacatgctggtgcgctacgaggacgtggcacgcgggccgctgcagaaggcccgcgaga

SEQ ID NO: 248049 - DNA, 120 bp, Artificial Sequence
  ENSG00000122863_13 (sequence is synthesized)
tgtaccgcttcgccggcatccccctgaccccgcaggtggaagactggatccaaaagaacacgcaggcggcccacgacggcagcggcatctactccacgcagaagaactcctcggagcagt

SEQ ID NO: 248050 - DNA, 120 bp, Artificial Sequence
  ENSG00000122863_14 (sequence is synthesized)
tcgagaagtggcgcttcagcatgcccttcaagctggcccaggtggtgcaggccgcctgcggccctgccatgcgcctcttcggctacaaactggcgcgggacgccgccgccctcaccaacc

SEQ ID NO: 248051 - DNA, 120 bp, Artificial Sequence
  ENSG00000122863_15 (sequence is synthesized)
gctcagtcagcctgctggaggagaggggcaccttctgggtcacgtaggggggccggggccccgtatgcccctcctcgtgaaaggcctgccccgtctttctgccgcagccctcgcagaggg

SEQ ID NO: 248052 - DNA, 120 bp, Artificial Sequence
  ENSG00000122863_16 (sequence is synthesized)
cgggtgcacagcgccatgagcgggcagcgcctcctgtagcagtagggcccccagccagcgctccagccaaagcggcggccccagggttaattgcggagaacaggacagtgcccggtcccc

SEQ ID NO: 248053 - DNA, 120 bp, Artificial Sequence
  ENSG00000122863_17 (sequence is synthesized)
ttgagggccatcacacccagacccaacgggttgcagcctcctgagcaggcctaggcaggcccgggcctgttggcaagcttcgatctcacacacacagaaacatacattcgtgcctggaga

SEQ ID NO: 248054 - DNA, 120 bp, Artificial Sequence
  ENSG00000122863_18 (sequence is synthesized)
ccctgcaggccagagtccaaatatttaacaatcagaaggggcaaggctctgaccagtgacagtcagacctcctgctttatttggtgttaaccgtttcttgtctggatggtgaagtctgga

SEQ ID NO: 248055 - DNA, 120 bp, Artificial Sequence
  ENSG00000122863_19 (sequence is synthesized)
atctgggtgggtccttggaggaggggctaggacagccgtgggtgtcaaaggtggcatttgaggctcgtttgaggtgacagtggctgtttaccaactagtacagagcgattcagcgttttc

SEQ ID NO: 248056 - DNA, 120 bp, Artificial Sequence
  ENSG00000122863_20 (sequence is synthesized)
atgaatgggttggctgtgctggttactgatgaatatgggccccttatagagctgcaaaacacacacatgcgtatagacatacatacatgtacaccatacatagacaagcatcataaaggc

SEQ ID NO: 248057 - DNA, 120 bp, Artificial Sequence
  ENSG00000122863_21 (sequence is synthesized)
acaagtgcacacacatctatgcagacaagcttcctcgctgcttatgcccacagggtttttctgtatgacacacctcagaggagcctgtgcttaacatttgtaggattatttcgagggcag

SEQ ID NO: 248058 - DNA, 120 bp, Artificial Sequence
  ENSG00000122863_22 (sequence is synthesized)
ggcaggggaaagaaacgcgttaaagggccatgacatgacacagttccctggccgggtttggactgaacagtggattcagaactgcagcgttcaaagcccctgcccgccttagattctcat

SEQ ID NO: 248059 - DNA, 120 bp, Artificial Sequence
  ENSG00000122863_23 (sequence is synthesized)
ggctacctcctctgacccatccacatccttgcggctggcaggcaggatgttttgaaatggtgcagccaaaggccccgtctagcttggctggctcccgaacatgtccatatttgaaggctg

SEQ ID NO: 248060 - DNA, 120 bp, Artificial Sequence
  ENSG00000122863_24 (sequence is synthesized)
cctcaggcctggcaggcagaagcagctgtggtccctggaggcaaaaggcagctcacggggccttccatttccagccaggcctcatctggggtagggccaagaggaaagtacagagtgccc

SEQ ID NO: 248061 - DNA, 120 bp, Artificial Sequence
  ENSG00000122863_25 (sequence is synthesized)
gtgggggagaagtcccaccaggatgccccccctcccctgagaagcccgccttctccctcgtggacaggagtcagccagttggttgctgtggttacagccagtgcctggaattcctcctta

SEQ ID NO: 248062 - DNA, 120 bp, Artificial Sequence
  ENSG00000122863_26 (sequence is synthesized)
gggccctgggaagagtattgcttaacgcaggatgtgctgggtgttttgtttcgggcttttatttatggcttggtgtctttcttgtttcatggctgtgtttttgcttttgtttctgtagga

SEQ ID NO: 248063 - DNA, 120 bp, Artificial Sequence
  ENSG00000122863_27 (sequence is synthesized)
gcgcctcttccaagcagtggaggcctgagggcttgagggaggctggggaaaaccagcagggagcacttggctcctggcagagggagaggacaggaggaggagccttccccaggaggaacg

SEQ ID NO: 248064 - DNA, 120 bp, Artificial Sequence
  ENSG00000122863_28 (sequence is synthesized)
ctagtgtccagagcagcagagatttgcagccctcgcccctccctgagaagaagctggatttgaaaatccctcacaggccctaacatgtttcctgggtgggcaggggcctcatgacaagcg

SEQ ID NO: 248065 - DNA, 120 bp, Artificial Sequence
  ENSG00000122863_29 (sequence is synthesized)
acaagtgtacccagagtagaaggccttccccactcccacctcaaacccaggagcagaactcagtatccagagcttacaaggagctgcaagggtttgccgagggctgcccagctctgcttc

SEQ ID NO: 248066 - DNA, 120 bp, Artificial Sequence
  ENSG00000122863_30 (sequence is synthesized)
tggtttcctggacaatttctctgtcagatacggcccattgtaaacccagagggctgcattttgggttgagtaatatggacaccatggaagtacaggatctgagtccaacattgccatggg

SEQ ID NO: 248067 - DNA, 120 bp, Artificial Sequence
  ENSG00000122863_31 (sequence is synthesized)
ggagggaagagtgtgtcctggcaggaagccaccattggagaaggtgaggccagtaaccatctcatgggattcgctataatcagcctatttgagctgctgggtctctgtcactgtggactc

SEQ ID NO: 248068 - DNA, 120 bp, Artificial Sequence
  ENSG00000122863_32 (sequence is synthesized)
cagtcattcaaggaggtctccactcttgggttttttttattttcttttcttttgctattttgcctgaacaccccaacactcttggttttagagtccaagagtaagttgtgcagagacatg

SEQ ID NO: 248069 - DNA, 120 bp, Artificial Sequence
  ENSG00000122863_33 (sequence is synthesized)
gttctaatttggagttcaaaggaacaccagctctgaaaacatgaccgtggggccaggatgtttctggcaggcccagaagtgctggccgttcttccccagcctccccactgctccctcctc

SEQ ID NO: 248070 - DNA, 120 bp, Artificial Sequence
  ENSG00000122863_34 (sequence is synthesized)
tgttccccatgtggaggtcggaggggctgggactggggagggggcagccacctccatccaaggctcttcctaggggccctgctaatgtggacagtagactttatccctccttcttactct

SEQ ID NO: 248071 - DNA, 120 bp, Artificial Sequence
  ENSG00000122863_35 (sequence is synthesized)
gggccaagacctcccactccgccctctgaggatggtaccaagaatgggcctttgggacttctcaggacattgacaatgtgcacactgcaggttgacttaatttatttattttttgaaaag

SEQ ID NO: 248072 - DNA, 120 bp, Artificial Sequence
  ENSG00000122863_36 (sequence is synthesized)
aagagacagaaaataccttattatctgcagggactcaaagctgtacccaaatcaagaaagacaaaataacaatagaaaccattcacacactccgttcatgcatggacaccagaagacgat

SEQ ID NO: 248073 - DNA, 120 bp, Artificial Sequence
  ENSG00000122863_37 (sequence is synthesized)
tcagaacacaagaggagaatgagctggagcgccagcaccacgatggccccaggacgttgtttaagatctgagatcccttggtttctctcttgttgatctgagatgctacatcagggccct

SEQ ID NO: 248074 - DNA, 120 bp, Artificial Sequence
  ENSG00000122863_38 (sequence is synthesized)
tgctgctgtattacctctgcccgggtgtttgagacaggtcacaagcgcgtggatgtttcctggaagtgtattcccctggggctcagcgatgctctgggaacccttggggtttggggaagg

SEQ ID NO: 248075 - DNA, 120 bp, Artificial Sequence
  ENSG00000122863_39 (sequence is synthesized)
acagtgtggtgtgactattggcttgaaacgttatggatatggttggagtcacccatgtggatatgattttcagcttggagctgggatggagaagatggaagcactggtggccgggcctct

SEQ ID NO: 248076 - DNA, 120 bp, Artificial Sequence
  ENSG00000122863_40 (sequence is synthesized)
ttttccagcgaggccagccctggcttctcctctgttccagcttgtctgccagaagccttcccctgcaaggtgcccacctgcccggagacagagggagcagctgaggcctctctccactgg

SEQ ID NO: 248077 - DNA, 120 bp, Artificial Sequence
  ENSG00000122863_41 (sequence is synthesized)
ccgccagcctccctagcacaaggggaccattcagcaatgagtgtttactcatgttctttcttgttgatgagttctgcggcccagcatatagaaatggctcagaacgttccaggccttggt

SEQ ID NO: 248078 - DNA, 120 bp, Artificial Sequence
  ENSG00000122863_42 (sequence is synthesized)
gagacacagcagcgtccaatgctcacaggctgtccccactctgcctgttcccatcttcccctcgggacctgtttataaattgaggaatggatgagggccctggagggtccttgggagtag

SEQ ID NO: 248079 - DNA, 120 bp, Artificial Sequence
  ENSG00000122863_43 (sequence is synthesized)
ttagtggagggcaggattctcaggtccccatagagagggaaagagaagaccagatgtgcatagaagccagtctctgtcacatacaccgcaggtggtcaccgagttattttccaaaagctg

SEQ ID NO: 248080 - DNA, 120 bp, Artificial Sequence
  ENSG00000122863_44 (sequence is synthesized)
aggaacataaagcaaatttaggcttttgtccttctgcaatacatgcacttgaaaataaacagaaaagagatgtttaataacaagtttacttccggtctgctagcaccctcagcctgggag

SEQ ID NO: 248081 - DNA, 120 bp, Artificial Sequence
  ENSG00000122863_45 (sequence is synthesized)
ctactgccagaggctggcgtagtggggcagctgctgaccaaaccccacagaacagagggcaccaggcatcacacgacatctttccctcccatctctgccatctgtctgtctggcaatgga

SEQ ID NO: 248082 - DNA, 120 bp, Artificial Sequence
  ENSG00000122863_46 (sequence is synthesized)
aggagcttcagcaggaggtccttcccagaaggttgattcttggcctgggtggtagaggagatatcctgaccctaaagtcttccagccccgggtcatcctctcctatactagggcctattg

SEQ ID NO: 248083 - DNA, 120 bp, Artificial Sequence
  ENSG00000122863_47 (sequence is synthesized)
tgactgtagggcttgtcccttgctaagacaggagcagaagactggatggctgtgtcctcaaggcagtcccctcccatccccattcccaaagtcagaaagtgaagccagatctcaagggct

SEQ ID NO: 248084 - DNA, 120 bp, Artificial Sequence
  ENSG00000122863_48 (sequence is synthesized)
gatacctgaggcaaggagagctaaggggagagaaattggggctgagtggaagcagatgcctgcacaagccaagtgtgtcttattgatctgtacaagctgatagaaggaccatctgctgaa

SEQ ID NO: 248085 - DNA, 120 bp, Artificial Sequence
  ENSG00000122863_49 (sequence is synthesized)
atccagggctcctgagttggtgggtttgcttgtgaagcttctaggacaaggcgcagccagatggaagggagagggtccagggcttcctaaatgcagccgcatcacctgtcaactcgctgc

SEQ ID NO: 248086 - DNA, 120 bp, Artificial Sequence
  ENSG00000122863_50 (sequence is synthesized)
agtttcagagacagtggaagctgctctttacctcaaaagcacaaagcagaattggcaacttcacttgtctcaagagctccaagatcctttggtctcgtgtcctttggcaccccgtaactg

SEQ ID NO: 248087 - DNA, 120 bp, Artificial Sequence
  ENSG00000122863_51 (sequence is synthesized)
gactggggacaaatttgttacgtgtttccaaggctacagacatggcgccatcctcacaggcctagctcatgtcatggatcaggtgctttgctggggggatacaatgacccatgtggtctg

SEQ ID NO: 248088 - DNA, 120 bp, Artificial Sequence
  ENSG00000122863_52 (sequence is synthesized)
cgtcttctgccattggcttgaactgggcaccccctgaagtctccatctcagctgtatattctagtccaaattttcctggctcccctgctccctcccaggtcctgcacactgtctttttgc

SEQ ID NO: 248089 - DNA, 120 bp, Artificial Sequence
  ENSG00000122863_53 (sequence is synthesized)
caacacctcagccctgtttgctatttcatgtctgcatggtacgagacaccccttcacggcatacactgccatggtatgtacatatgcatccacgtgtgtgtatgtgtagcatgtagctca

SEQ ID NO: 248090 - DNA, 120 bp, Artificial Sequence
  ENSG00000122863_54 (sequence is synthesized)
ttctgctcagcctctggcgccgttccacattgctcccagccccattgctgtcactgtcgtcccagatgtccttgccatggccacagacaatctgccgtctcctggaaacgctggggctgc

SEQ ID NO: 248091 - DNA, 120 bp, Artificial Sequence
  ENSG00000122863_55 (sequence is synthesized)
ccttcagagagctggcagccccagcagtcagggcctgctttgcagaatagaatgtgaacccaactcctgatggcctacttgacttatttaattaaagatgaaatcatgcaatgagcaaaa

SEQ ID NO: 248092 - DNA, 80 bp, Artificial Sequence
  ENSG00000122870_0 (sequence is synthesized)
ggcggcggcggcgttggcggtggcgtcggcggctgcagggggacgagctagcgccgcggcgctgggagccagttgagccc

SEQ ID NO: 248093 - DNA, 120 bp, Artificial Sequence
  ENSG00000122870_1 (sequence is synthesized)
ggcagcgggagcccgagcgctgcgcgcccaccatggccgcccagggagagcccggctacctggcggcgcagtcggaccccggctccaacagcgagcgcagcaccgactccccagtgcccg

SEQ ID NO: 248094 - DNA, 120 bp, Artificial Sequence
  ENSG00000122870_2 (sequence is synthesized)
gctccgaggacgacttggtcgccggggcgaccctgcacagcccggagtggagcgaggagcgcttccgcgtggacaggaagaaacttgaggccatgttacaagctgctgctgaagggaaag

SEQ ID NO: 248095 - DNA, 120 bp, Artificial Sequence
  ENSG00000122870_3 (sequence is synthesized)
gcagaagtggggaagacttttttcaaaagatcatggaggaaacaaatacgcagattgcttggccatcaaaactgaagatcggagccaaatccaagaaagatccccatattaaggtttctg

SEQ ID NO: 248096 - DNA, 120 bp, Artificial Sequence
  ENSG00000122870_4 (sequence is synthesized)
gaaagaaagaagatgttaaagaagccaaggaaatgatcatgtctgtcttagacacaaaaagcaatcgagtcacactgaagatggatgtttcacatacagaacattcacatgtaatcggca

SEQ ID NO: 248097 - DNA, 120 bp, Artificial Sequence
  ENSG00000122870_5 (sequence is synthesized)
aaggtggcaacaatattaaaaaagtgatggaagaaaccggatgccatatccactttccagattccaacaggaataaccaagcagaaaaaagcaaccaggtatctatagcgggacaaccag

SEQ ID NO: 248098 - DNA, 120 bp, Artificial Sequence
  ENSG00000122870_6 (sequence is synthesized)
caggagtagaatctgcccgagttagaattcgggagctgcttcctttggtgctgatgtttgagctaccaattgctggaattcttcaaccggttcctgatcctaattccccctctattcagc

SEQ ID NO: 248099 - DNA, 120 bp, Artificial Sequence
  ENSG00000122870_7 (sequence is synthesized)
atatatcacaaacgtacaatatttcagtatcatttaaacagcgttcccgaatgtatggtgctactgtcatagtacgagggtctcagaataacactagtgctgtgaaggaaggaactgcca

SEQ ID NO: 248100 - DNA, 120 bp, Artificial Sequence
  ENSG00000122870_8 (sequence is synthesized)
tgctgttagaacatcttgctgggagcttagcatcagctattcctgtgagcacacaactagatattgcagctcaacatcatctctttatgatgggtcgaaatgggagcaacatcaaacata

SEQ ID NO: 248101 - DNA, 120 bp, Artificial Sequence
  ENSG00000122870_9 (sequence is synthesized)
tcatgcagagaacaggtgctcagatccactttcctgatcccagtaatccacaaaagaaatctaccgtctacctccagggcaccattgagtctgtctgtcttgcaaggcaatatctcatgg

SEQ ID NO: 248102 - DNA, 120 bp, Artificial Sequence
  ENSG00000122870_10 (sequence is synthesized)
gttgtcttcctcttgtgttgatgtttgatatgaaggaagaaattgaagtagatccacaattcattgcgcagttgatggaacagcttgatgtcttcatcagtattaaaccaaagcccaaac

SEQ ID NO: 248103 - DNA, 120 bp, Artificial Sequence
  ENSG00000122870_11 (sequence is synthesized)
agccaagcaagtctgtgattgtgaaaagtgttgagcgaaatgccttaaatatgtatgaagcaaggaaatgtctcctcggacttgaaagcagtggggttaccatagcaaccagtccatccc

SEQ ID NO: 248104 - DNA, 120 bp, Artificial Sequence
  ENSG00000122870_12 (sequence is synthesized)
cagcatcctgccctgccggcctggcatgtcccagcctggatatcttagcttcagcaggccttggactcactggactaggtcttttgggacccaccaccttatctctgaacacttcaacaa

SEQ ID NO: 248105 - DNA, 120 bp, Artificial Sequence
  ENSG00000122870_13 (sequence is synthesized)
ccccaaactcactcttgaatgctcttaatagctcagtcagtcctttgcaaagtccaagttctggtacacccagccccacattatgggcacccccacttgctaatacttcaagtgccacag

SEQ ID NO: 248106 - DNA, 120 bp, Artificial Sequence
  ENSG00000122870_14 (sequence is synthesized)
gtttttctgctataccacaccttatgattccatctactgcccaagccacattaactaatattttgttgtctggagtgcccacctatgggcacacagctccatctccccctcctggcttga

SEQ ID NO: 248107 - DNA, 120 bp, Artificial Sequence
  ENSG00000122870_15 (sequence is synthesized)
ctcctgttgatgtccatatcaacagtatgcagaccgaaggcaaaaaaatctctgctgctttaaatggacatgcacagtctccagatataaaatatggtgcaatatccacttcatcacttg

SEQ ID NO: 248108 - DNA, 120 bp, Artificial Sequence
  ENSG00000122870_16 (sequence is synthesized)
gagaaaaagtgctgagtgcaaatcacggggatccgtccatccagacaagtgggtctgagcagacatctcccaaatcaagccccactgaaggttgtaatgatgcttttgttgaagtaggca

SEQ ID NO: 248109 - DNA, 120 bp, Artificial Sequence
  ENSG00000122870_17 (sequence is synthesized)
tgcctcgaagtccttcccattctgggaatgctggtgacttgaaacagatgatgtgtccctccaaggtttcctgtgccaaaaggcagacagtggaactattgcaaggcacgaaaaactcac

SEQ ID NO: 248110 - DNA, 120 bp, Artificial Sequence
  ENSG00000122870_18 (sequence is synthesized)
acttacacagcactgacaggttgctctcagaccctgaactgagtgctaccgaaagccctttggctgacaagaaggctccagggagtgagcgcgctgcagagagggcagcagctgcccagc

SEQ ID NO: 248111 - DNA, 120 bp, Artificial Sequence
  ENSG00000122870_19 (sequence is synthesized)
aaaactccgaaagggcccaccttgctccacggtcatcatatgtcaacatgcaggcatttgactatgaacagaagaagctattagccaccaaagctatgttaaagaaaccagtggtgacgg

SEQ ID NO: 248112 - DNA, 120 bp, Artificial Sequence
  ENSG00000122870_20 (sequence is synthesized)
aggtcagaacgcccacaaatacctggagtggcctgggtttttctaaatccatgccagctgaaactatcaaggagttgagaagggccaatcatgtgtcctataagcccacaatgacaacca

SEQ ID NO: 248113 - DNA, 120 bp, Artificial Sequence
  ENSG00000122870_21 (sequence is synthesized)
cttatgagggctcatccatgtccctttcacggtccaacagtcgtgagcacttgggaggtggaagcgaatctgataactggagagaccgaaatggaattggacctggaagtcatagtgaat

SEQ ID NO: 248114 - DNA, 120 bp, Artificial Sequence
  ENSG00000122870_22 (sequence is synthesized)
agcaatggctgtaacttaaatagctctttcaaaggttctgacctccctgagctcttcagcaaactgggcctgggcaaatacacagatgttttccagcaacaagagatcgatcttcagaca

SEQ ID NO: 248115 - DNA, 120 bp, Artificial Sequence
  ENSG00000122870_23 (sequence is synthesized)
ttcctcactctcacagatcaggatctgaaggagctgggaataactacttttggtgccaggaggaaaatgctgcttgcaatttcagaactaaataaaaaccgaagaaagctttttgaatcg

SEQ ID NO: 248116 - DNA, 120 bp, Artificial Sequence
  ENSG00000122870_24 (sequence is synthesized)
ccaaatgcacgcacctctttcctggaaggtggagcgagtggaaggctaccccgtcagtatcactcagacattgctagtgtcagtggccgctggtagcagcaccctcttggcacatgcccg

SEQ ID NO: 248117 - DNA, 120 bp, Artificial Sequence
  ENSG00000122870_25 (sequence is synthesized)
ctgactaactgtaaagtggacacaggagatgtatgaacagccttcacagcacaccatccttagcactctgggtgtctggtatcaggaccaaagcattttattcgcacctgtactttatgg

SEQ ID NO: 248118 - DNA, 120 bp, Artificial Sequence
  ENSG00000122870_26 (sequence is synthesized)
caaaaaggaagaagagagagaagatgttcttatgatgtcatacagaacaccaaatatggattacttttttaaaatggcagttggacagaatttgcaatataaggatagggctttatttcc

SEQ ID NO: 248119 - DNA, 86 bp, Artificial Sequence
  ENSG00000122870_27 (sequence is synthesized)
atgaaggatgaattgacatctgggatgccagaagacttagaagttattttgtttgcttgttttgtttgggtatttggggattttta

SEQ ID NO: 248120 - DNA, 120 bp, Artificial Sequence
  ENSG00000122870_28 (sequence is synthesized)
ttttgtttgcttgttttgtttgggtatttggggatttttaaaaaataatcaaagtggaattttctggtactgctttaaaataattattgtggtctttcagcactttacacgttctaattt

SEQ ID NO: 248121 - DNA, 120 bp, Artificial Sequence
  ENSG00000122870_29 (sequence is synthesized)
cttgtcctatggaagttctcgctgtctccatctctctcatttttgtgtcacctaatatgttggtacagataagagttagtcacatttttctgactgcatcaaacttttatttgaaatggt

SEQ ID NO: 248122 - DNA, 120 bp, Artificial Sequence
  ENSG00000122870_30 (sequence is synthesized)
actggatcttagtttctgtgcagaatattctgtgattttgggaaatgtaagtgagtccacttgcttctggaccaattctgtttcatgtatgttagcatcctagaaacacctagcaatgga

SEQ ID NO: 248123 - DNA, 120 bp, Artificial Sequence
  ENSG00000122870_31 (sequence is synthesized)
cctagttcacagtaataggtgcaaagaaagaccaaatggactttgcagtattaaccctttgcagtcgtcatacttagctgctgcctgtaatgctaaaatgattttaatggttgtctggag

SEQ ID NO: 248124 - DNA, 120 bp, Artificial Sequence
  ENSG00000122870_32 (sequence is synthesized)
gcaaagggctgttttttagtatattgccactaaaggacatttatttatatcaaacttttatttttagatattataagcatacagtacataattgatgaaattgatatttactagagattt

SEQ ID NO: 248125 - DNA, 120 bp, Artificial Sequence
  ENSG00000122870_33 (sequence is synthesized)
atggtagagaatggacgacattcaataactggagcccgagattgtcactttatttaaaaagacaaataatcatctgacaagacagcactgttgccattataaggagaaatagattacaat

SEQ ID NO: 248126 - DNA, 120 bp, Artificial Sequence
  ENSG00000122870_34 (sequence is synthesized)
ccttatcatgtacacgttagctatgttccgtatggccacaggactttcctgaaaccgtatctgtctgcttgaagtagacttatgtttgttgagaatgaacaggcttatttgagcctccag

SEQ ID NO: 248127 - DNA, 120 bp, Artificial Sequence
  ENSG00000122870_35 (sequence is synthesized)
ggtggcagttcataaagacagctaagttctgaaggaaaaaaaaaatatatctttttaagtggctagagtcattattacaatcttatactgtgaaagtccaagaaatcaggcaacattgtt

SEQ ID NO: 248128 - DNA, 120 bp, Artificial Sequence
  ENSG00000122870_36 (sequence is synthesized)
tcctgggtcttttcagagatcttatagatttatgaagtgtttttaatccatgaagaaacactaaagtgcctttctttcttcaaagcaatattatttccaagtatattaatttgttagaaa

SEQ ID NO: 248129 - DNA, 120 bp, Artificial Sequence
  ENSG00000122870_37 (sequence is synthesized)
actttcccataggaaatgttgtcaagttacctgtactgtaaagagttatttatgttcagtagtcaagattttctacatggacataaaccactctcacgtgctctcagcagaaggcattag

SEQ ID NO: 248130 - DNA, 120 bp, Artificial Sequence
  ENSG00000122870_38 (sequence is synthesized)
ataagcatatacaagaattgggtacttttatacaaatatgggataagaaatacttgcctgacacttttccatggctgagtctgaccattacagtaagaacaagaattgaagaggcatttt

SEQ ID NO: 248131 - DNA, 120 bp, Artificial Sequence
  ENSG00000122870_39 (sequence is synthesized)
gcacacagaaacattctcactttaaaaaatggtattggttaccttgaaggcatagataatgggcctgtcataaaattatcaattataactggcaccgagggactgccctttttaagctaa

SEQ ID NO: 248132 - DNA, 120 bp, Artificial Sequence
  ENSG00000122870_40 (sequence is synthesized)
actaagccttatctgcttaaggatgttgaactgaatcactccctttactcatcctgtgcatatgtgtacaaatggtcatgtggatcatgtgatgatcatccatcttatttgattgtatta

SEQ ID NO: 248133 - DNA, 120 bp, Artificial Sequence
  ENSG00000122870_41 (sequence is synthesized)
atgcatcatgctaaacatgtagtacaggttaacaataccagatttatgtcctgttcaacaactcagtactctaaatgttgttatgcttttaataagaccttcccagataataatcttgga

SEQ ID NO: 248134 - DNA, 120 bp, Artificial Sequence
  ENSG00000122870_42 (sequence is synthesized)
gctcttttcccagctgtctaccatgcatttgcaacaggaggaagatgtaatgaatatgcagtattaagttgatttatgaacagtgctttgatatgccaaagggaaaactgtcccacttaa

SEQ ID NO: 248135 - DNA, 120 bp, Artificial Sequence
  ENSG00000122870_43 (sequence is synthesized)
attagattaagtagggtggctaaaaataaataaaaacactggaaattctttctctcactttctcttgatgcaatgaagggaatatgacactacagtatacagagttgttgttatatgatg

SEQ ID NO: 248136 - DNA, 120 bp, Artificial Sequence
  ENSG00000122870_44 (sequence is synthesized)
cacaaaatattttgatgatttgaataaatgttaacttttaatctgcgccttaataatgactggttatctgtaaatatagaacagatacagattgtatttttctgtgggtttttgtccttt

SEQ ID NO: 248137 - DNA, 120 bp, Artificial Sequence
  ENSG00000122870_45 (sequence is synthesized)
tagtgatttttttccaaaaacgagagatggaattaacattgaaaatgggaaatttttctaactgaatcaattgttacatgaaaaataaatttatataacccctttgtattgctcttgcta

SEQ ID NO: 248138 - DNA, 120 bp, Artificial Sequence
  ENSG00000122870_46 (sequence is synthesized)
tggcagccctaagcgtaaacaaaacaaatcaagtgagcgttgtgttttatgcacacttttaggtatccccagattagaatgtgtttatttgggttggagtatcactgactgtggcctctc

SEQ ID NO: 248139 - DNA, 120 bp, Artificial Sequence
  ENSG00000122870_47 (sequence is synthesized)
tgacttcaagtgcttggtgtaattcacatgccatctcctctgtgaagcctccttgtttctcccagtgaagcaggccacctggttctctttcctctcactccattttgtgcgtgctttcac

SEQ ID NO: 248140 - DNA, 120 bp, Artificial Sequence
  ENSG00000122870_48 (sequence is synthesized)
tctagcacttgccataccaaagggcaattatttatctacctatctgtatctccttgtgaaatttgtgctccacaaaccaaagactgtatttgttcattttataaacatttatgaagtgtc

SEQ ID NO: 248141 - DNA, 120 bp, Artificial Sequence
  ENSG00000122870_49 (sequence is synthesized)
ttacagctgctgctgaagggaaaggcagaagtggggaagacttttttcaaaagtcactatctactgaagagatgatctgcagccctgaagaagtttgaaaggagaaaagaacagtgccat

SEQ ID NO: 248142 - DNA, 120 bp, Artificial Sequence
  ENSG00000122870_50 (sequence is synthesized)
tcctaatgtatatttcctctctctgtctctttctccctgtcttcttcctttactccactgcctcccttgcaaacctgagtttcctgagctgttaactctagctggtcatgtggagtaggt

SEQ ID NO: 248143 - DNA, 120 bp, Artificial Sequence
  ENSG00000122870_51 (sequence is synthesized)
taactttgaattaactggttatgagagtggagtgttacatttcactggactgagtttctgatactacaagtgaccagaactttatggaatcttaccttaatgttaatacatgagaaagag

SEQ ID NO: 248144 - DNA, 120 bp, Artificial Sequence
  ENSG00000122870_52 (sequence is synthesized)
gtttggactatgtgaggggcttgcagtccagtcaggatgaccctgtcttcaaggggttgtgcctatcatccatggaacattggctacactattcttattcatggctcaaatggggctgtc

SEQ ID NO: 248145 - DNA, 120 bp, Artificial Sequence
  ENSG00000122870_53 (sequence is synthesized)
aggattctaattccagacctcaagctactttgtgttactagcctagagtaggctttactgaaatagcttattttgctaagtcagacttgtttattactgcatttattatgtgcagcacac

SEQ ID NO: 248146 - DNA, 120 bp, Artificial Sequence
  ENSG00000122870_54 (sequence is synthesized)
tcatattcattcattcctccttggcttataatttcttttcaataaaactcaggctcctcgtatcctttttataagcttttcaagttaacctggagctccccttgttaaaaataaataaat

SEQ ID NO: 248147 - DNA, 120 bp, Artificial Sequence
  ENSG00000122873_0 (sequence is synthesized)
agcatcgcggagtcggtgctttagtacgccgctggcacctttactctcgccggccgcgcgaacccgtttgagctcggtatcctagtgcacacgccttgcaagcgacggcgccatgagtct

SEQ ID NO: 248148 - DNA, 120 bp, Artificial Sequence
  ENSG00000122873_1 (sequence is synthesized)
gacttccagttccagcgtacgagttgaatggatcgcagcagttaccattgctgctgggacagctgcaattggttatctagcttacaaaagattttatgttaaagatcatcgaaataaagc

SEQ ID NO: 248149 - DNA, 120 bp, Artificial Sequence
  ENSG00000122873_2 (sequence is synthesized)
tatgataaaccttcacatccagaaagacaaccccaagatagtacatgcttttgacatggaggatttgggagataaagctgtgtactgccgttgttggaggtccaaaaagttcccattctg

SEQ ID NO: 248150 - DNA, 120 bp, Artificial Sequence
  ENSG00000122873_3 (sequence is synthesized)
tgatggggctcacacaaaacataacgaagagactggagacaatgtgggccctctgatcatcaagaaaaaagaaacttaaatggacacttttgatgctgcaaatcagcttgtcgtgaagtt

SEQ ID NO: 248151 - DNA, 120 bp, Artificial Sequence
  ENSG00000122873_4 (sequence is synthesized)
acctgattgtttaattagaatgactaccacctctgtctgattcaccttcgctggattctaaatgtggtatattgcaaactgcagctttcacatttatggcatttgtcttgttgaaacatc

SEQ ID NO: 248152 - DNA, 120 bp, Artificial Sequence
  ENSG00000122873_5 (sequence is synthesized)
caaaaaaaaaaaaaaaaaggaaaaaccaacctgcatggcctgtgggttattttggtcttgtaaggatccatttctttaaaatactgacatatagagttgtaccttatatagaatatagtt

SEQ ID NO: 248153 - DNA, 120 bp, Artificial Sequence
  ENSG00000122873_6 (sequence is synthesized)
accttatatagaatatagttgtatcttgaagtcaacatattaaattattctcaaaattatgtatttgcagattgtacttgtaagtttcaaagaaaaattaccatcttttcatattgacct

SEQ ID NO: 248154 - DNA, 120 bp, Artificial Sequence
  ENSG00000122873_7 (sequence is synthesized)
ggaaactaaataggatgtgattcagctacattaatttcttaatacaatctaggaaagacctgttgtagccttgattttcttgacattggtaatgacactgagaaaatatggcttctgttt

SEQ ID NO: 248155 - DNA, 120 bp, Artificial Sequence
  ENSG00000122873_8 (sequence is synthesized)
ttcaccgttttcaatcaaaatgattgataaatgttattctgtttaatttcataagtcaggtcaataataaaggggtggtaacttcctcatatttatcttcacagatatttaatgaagatg

SEQ ID NO: 248156 - DNA, 120 bp, Artificial Sequence
  ENSG00000122873_9 (sequence is synthesized)
ttctggcccaaggaatggtaagcacttgaactgaggattttgaaggaattggaacatataatgtcaagtcttttgatcactaagccacatatcctgacagaaatagtagtcacaagatta

SEQ ID NO: 248157 - DNA, 120 bp, Artificial Sequence
  ENSG00000122873_10 (sequence is synthesized)
gatcaaaggcgtgggaagatttttttttttcccactctagctaatcaagcacatggcttttaaattgtatgatctttttcttaaaagcaaaaatttgaagacaagtgtttgtttatgtaa

SEQ ID NO: 248158 - DNA, 120 bp, Artificial Sequence
  ENSG00000122873_11 (sequence is synthesized)
tattcttcaaagactccgagcagaaacattgcattcattgttgattcagaaaaaagaaaatataaaaactgaaaataattagcaataaaagatttaagacaaatagttcataaatatttt

SEQ ID NO: 248159 - DNA, 120 bp, Artificial Sequence
  ENSG00000122873_12 (sequence is synthesized)
taaagagattaggtttttgaatttcataggttagaaggaaaatcatggcaaaatttacagaaaattgggcaaacaattgaaattgataaagcaggtaaacatcatcatttattttagtat

SEQ ID NO: 248160 - DNA, 120 bp, Artificial Sequence
  ENSG00000122873_13 (sequence is synthesized)
acatgaattctcagtagtagtcaatcacaaatttctacttgctaaaatccatttaccttgacaggaatcaaacctgacagcagcatatcctatgtaatatatgatcatggctatttttaa

SEQ ID NO: 248161 - DNA, 120 bp, Artificial Sequence
  ENSG00000122873_14 (sequence is synthesized)
atatgtagttttgtgtattactgtagataaaagttggtaacaaaattgtacagtggttttaagaagcccatgtaactaacttggacatgtctttaagtcacatattcatcataaaatcta

SEQ ID NO: 248162 - DNA, 120 bp, Artificial Sequence
  ENSG00000122873_15 (sequence is synthesized)
aaatcctacaaactgattctattagattcttagggtaaattttttctttgcccacctccttctttttaagataagtatgcatgtcagcaaaacagagcaatcatgcttttaaagatgaac

SEQ ID NO: 248163 - DNA, 120 bp, Artificial Sequence
  ENSG00000122873_16 (sequence is synthesized)
tgttttaaagaaaaataaatgcatcaactcccagtgtttctgataaagggacatccttctaacttaacagactattctttatcttgaatttgaaattatattgttagtcatgcatttttg

SEQ ID NO: 248164 - DNA, 120 bp, Artificial Sequence
  ENSG00000122873_17 (sequence is synthesized)
taatgtcagggggaacctggtaccagttctcaaaactataggattatatgagtgtgtgtatacatatggcaaaattataaatgaccaccttactgtgaaatatagatcttgagcattttg

SEQ ID NO: 248165 - DNA, 120 bp, Artificial Sequence
  ENSG00000122873_18 (sequence is synthesized)
aaaggccaaaataattaggtaaatgtattttcaaggtcatgttaaaatgtttacatgcttttgaactagcattcatttatgattaaaacccttttcaggttatttgacctaaaaaccaaa

SEQ ID NO: 248166 - DNA, 120 bp, Artificial Sequence
  ENSG00000122873_19 (sequence is synthesized)
gtacgagcccactccatgctgggaatagacaactctcctctgaggctgaggctaaccagattatgcagaactttcttctctccaacattgcctggagctgggttgaatggatcgcagcag

SEQ ID NO: 248167 - DNA, 120 bp, Artificial Sequence
  ENSG00000122873_20 (sequence is synthesized)
atgactaccacctctgtctgattcaccttcgctggattctaaatgtgatatttaatgaagatggatccattaaaggagccaatagtgaaaatttagttaaaggtgatattagatttaaat

SEQ ID NO: 248168 - DNA, 120 bp, Artificial Sequence
  ENSG00000122877_0 (sequence is synthesized)
aactgagcgaggagcaattgattaatagctcggcgaggggactcactgactgttataataacactacaccagcaactcctggcttcccagcagccggaacacagacaggagagagtcagt

SEQ ID NO: 248169 - DNA, 120 bp, Artificial Sequence
  ENSG00000122877_1 (sequence is synthesized)
ggcaaatagacatttttcttatttcttaaaaaacagcaacttgtttgctacttttatttctgttgatttttttttcttggtgtgtgtggtggttgtttttaagtgtggagggcaaaagga

SEQ ID NO: 248170 - DNA, 120 bp, Artificial Sequence
  ENSG00000122877_2 (sequence is synthesized)
gataccatcccaggctcagtccaacccctctccaaaacggcttttctgacactccaggtagcgagggagttgggtctccaggttgtgcgaggagcaaatgatgaccgccaaggccgtaga

SEQ ID NO: 248171 - DNA, 120 bp, Artificial Sequence
  ENSG00000122877_3 (sequence is synthesized)
caaaatcccagtaactctcagtggttttgtgcaccagctgtctgacaacatctacccggtggaggacctcgccgccacgtcggtgaccatctttcccaatgccgaactgggaggcccctt

SEQ ID NO: 248172 - DNA, 120 bp, Artificial Sequence
  ENSG00000122877_4 (sequence is synthesized)
tgaccagatgaacggagtggccggagatggcatgatcaacattgacatgactggagagaagaggtcgttggatctcccatatcccagcagctttgctcccgtctctgcacctagaaacca

SEQ ID NO: 248173 - DNA, 120 bp, Artificial Sequence
  ENSG00000122877_5 (sequence is synthesized)
gaccttcacttacatgggcaagttctccattgaccctcagtaccctggtgccagctgctacccagaaggcataatcaatattgtgagtgcaggcatcttgcaaggggtcacttccccagc

SEQ ID NO: 248174 - DNA, 120 bp, Artificial Sequence
  ENSG00000122877_6 (sequence is synthesized)
ttcaaccacagcctcatccagcgtcacctctgcctcccccaacccactggccacaggacccctgggtgtgtgcaccatgtcccagacccagcctgacctggaccacctgtactctccgcc

SEQ ID NO: 248175 - DNA, 120 bp, Artificial Sequence
  ENSG00000122877_7 (sequence is synthesized)
accgcctcctcctccttattctggctgtgcaggagacctctaccaggacccttctgcgttcctgtcagcagccaccacctccacctcttcctctctggcctacccaccacctccttccta

SEQ ID NO: 248176 - DNA, 120 bp, Artificial Sequence
  ENSG00000122877_8 (sequence is synthesized)
tccatcccccaagccagccacggacccaggtctcttcccaatgatcccagactatcctggattctttccatctcagtgccagagagacctacatggtacagctggcccagaccgtaagcc

SEQ ID NO: 248177 - DNA, 120 bp, Artificial Sequence
  ENSG00000122877_9 (sequence is synthesized)
ctttccctgcccactggacaccctgcgggtgccccctccactcactccactctctacaatccgtaactttaccctggggggccccagtgctggggtgaccggaccaggggccagtggagg

SEQ ID NO: 248178 - DNA, 120 bp, Artificial Sequence
  ENSG00000122877_10 (sequence is synthesized)
cagcgagggaccccggctgcctggtagcagctcagcagcagcagcagccgccgccgccgccgcctataacccacaccacctgccactgcggcccattctgaggcctcgcaagtaccccaa

SEQ ID NO: 248179 - DNA, 120 bp, Artificial Sequence
  ENSG00000122877_11 (sequence is synthesized)
cagacccagcaagacgccggtgcacgagaggccctacccgtgcccagcagaaggctgcgaccggcggttctcccgctctgacgagctgacacggcacatccgaatccacactgggcataa

SEQ ID NO: 248180 - DNA, 120 bp, Artificial Sequence
  ENSG00000122877_12 (sequence is synthesized)
ctactgtggccgaaagtttgcccggagtgatgagaggaagcgccacaccaagatccacctgagacagaaagagcggaaaagcagtgccccctctgcatcggtgccagccccctctacagc

SEQ ID NO: 248181 - DNA, 120 bp, Artificial Sequence
  ENSG00000122877_13 (sequence is synthesized)
ctcctgctctgggggcgtgcagcctgggggtaccctgtgcagcagtaacagcagcagtcttggcggagggccgctcgccccttgctcctctcggacccggacaccttgagatgagactca

SEQ ID NO: 248182 - DNA, 120 bp, Artificial Sequence
  ENSG00000122877_14 (sequence is synthesized)
ggctgatacaccagctcccaaaggtcccggaggccctttgtccactggagctgcacaacaaacactaccaccctttcctgtccctctctccctttgttgggcaaagggctttggtggagc

SEQ ID NO: 248183 - DNA, 120 bp, Artificial Sequence
  ENSG00000122877_15 (sequence is synthesized)
tagcactgccccctttccacctagaagcaggttcttcctaaaacttagcccattctagtctctcttaggtgagttgactatcaacccaaggcaaaggggaggctcagaaggaggtggtgt

SEQ ID NO: 248184 - DNA, 120 bp, Artificial Sequence
  ENSG00000122877_16 (sequence is synthesized)
ggggacccctggccaagagggctgaggtctgaccctgctttaaagggttgtttgactaggttttgctaccccacttccccttattttgacccatcacaggtttttgaccctggatgtcag

SEQ ID NO: 248185 - DNA, 120 bp, Artificial Sequence
  ENSG00000122877_17 (sequence is synthesized)
agttgatctaagacgttttctacaataggttgggagatgctgatcccttcaagtggggacagcaaaaagacaagcaaaactgatgtgcactttatggcttgggactgatttgggggacat

SEQ ID NO: 248186 - DNA, 120 bp, Artificial Sequence
  ENSG00000122877_18 (sequence is synthesized)
tgtacagtgagtgaagtatagcctttatgccacactctgtggccctaaaatggtgaatcagagcatatctagttgtctcaacccttgaagcaatatgtattataaactcagagaacagaa

SEQ ID NO: 248187 - DNA, 120 bp, Artificial Sequence
  ENSG00000122877_19 (sequence is synthesized)
gtgcaatgtgatgggaggaacatagcaatatctgctccttttcgagttgtttgagaaatgtaggctattttttcagtgtatatccactcagattttgtgtatttttgatgtacactgttc

SEQ ID NO: 248188 - DNA, 120 bp, Artificial Sequence
  ENSG00000122877_20 (sequence is synthesized)
tctaaattctgaatctttgggaaaaaatgtaaagcatttatgatctcagaggttaacttatttaagggggatgtacatatattctctgaaactaggatgcatgcaattgtgttggaagtg

SEQ ID NO: 248189 - DNA, 120 bp, Artificial Sequence
  ENSG00000122877_21 (sequence is synthesized)
tccttggtgccttgtgtgatgtagacaatgttacaaggtctgcatgtaaatgggttgccttattatggagaaaaaaaatcactccctgagtttagtatggctgtatatttctgcctatta

SEQ ID NO: 248190 - DNA, 120 bp, Artificial Sequence
  ENSG00000122877_22 (sequence is synthesized)
atatttggaattttttttagaaagtatatttttgtatgctttgttttgtgacttaaaagtgttacctttgtagtcaaatttcagataagaatgtacataatgttaccggagctgatttgt

SEQ ID NO: 248191 - DNA, 120 bp, Artificial Sequence
  ENSG00000122877_23 (sequence is synthesized)
ttggtcattagctcttaatagttgtgaaaaaataaatctattctaacgcaaaaccactaactgaagttcagataatggatggtttgtgactatagtgtaaataaatacttttcaacaata

SEQ ID NO: 248192 - DNA, 120 bp, Artificial Sequence
  ENSG00000122877_24 (sequence is synthesized)
gatgcagcgtagctcttagggggaggtgtgagtccttggaaagctcacaagaatttcagaggggcccgagatgcgagtcggactcccttccgaggcgtcgtcttgcccatggtcagcgcg

SEQ ID NO: 248193 - DNA, 120 bp, Artificial Sequence
  ENSG00000122877_25 (sequence is synthesized)
caagttctaaggccttactgatttccagtcaacttgttctatccattattgagagacgagtgttatagtcagcaactataattagccgtctgttctcaggccaagcttgcttcctactct

SEQ ID NO: 248194 - DNA, 120 bp, Artificial Sequence
  ENSG00000122877_26 (sequence is synthesized)
gccataaggtgagccatctctacctgcctggagatggacctgcggtcatccagttccaccagtgcctggctggagctataagttggtgctgtttgccagggttggtgtctacagagggcc

SEQ ID NO: 248195 - DNA, 120 bp, Artificial Sequence
  ENSG00000122877_27 (sequence is synthesized)
tcccaggggcctaagtggccaccctcttgggaatgcccaaagcatctgctatttaggacttggttacagagcaccatcagcttccccaagtttgcaagcaagcattttcccaggagatag

SEQ ID NO: 248196 - DNA, 120 bp, Artificial Sequence
  ENSG00000122877_28 (sequence is synthesized)
agtggccaaggtattgcttgtgtctgacccccttcttctgtctgaaacaagggctaccctccacccagccactgtctaaagagcttcatttaaagctgtctgacaacatctacccggtgg

SEQ ID NO: 248197 - DNA, 120 bp, Artificial Sequence
  ENSG00000122877_29 (sequence is synthesized)
aactgagcgaggagcaattgattaatagctcggcgaggggactcactgactgttataataacactacaccagcaactcctggcttcccagcagccggaacacagacaggagagagtagcg

SEQ ID NO: 248198 - DNA, 120 bp, Artificial Sequence
  ENSG00000122882_0 (sequence is synthesized)
ggcttcaggttccggtcaggcgtcgggacagagcctgatccaggcttcggcggccggtggcagctctcgatcagctctcgcagtcggagaggcggctaaggaaaggtgccacagcagaga

SEQ ID NO: 248199 - DNA, 120 bp, Artificial Sequence
  ENSG00000122882_1 (sequence is synthesized)
cgcgaaggagaggccctagaaccttttcaaagaagaatggaagaaaccatgaagcttgctacgatggaagacacagtggagtactgcctgttcctgataccagatgagtcaagggactca

SEQ ID NO: 248200 - DNA, 120 bp, Artificial Sequence
  ENSG00000122882_2 (sequence is synthesized)
gataaacataaagagattcttcagaagtacattgagagaataatcactcggtttgcacctatgctggtcccctacatctggcagaatcagcctttcaatcttaaatataaacctgggaaa

SEQ ID NO: 248201 - DNA, 120 bp, Artificial Sequence
  ENSG00000122882_3 (sequence is synthesized)
ggaggtgttcctgctcatatgtttggcgtgacaaagtttggggataacattgaggatgaatggtttattgtttatgtaataaagcagatcacaaaggaatttccagagttagtagcaagg

SEQ ID NO: 248202 - DNA, 120 bp, Artificial Sequence
  ENSG00000122882_4 (sequence is synthesized)
attgaagacaatgatggtgaattcttgttaatagaagctgctgactttctccctaaatggctggatcctgaaaatagcaccaatagggtatttttctgccatggggaattgtgtattatc

SEQ ID NO: 248203 - DNA, 120 bp, Artificial Sequence
  ENSG00000122882_5 (sequence is synthesized)
cctgcaccaagaaaatctggagcagaatcttggttacccaccacacccccaacaattccacaagcattgaatataatcacagcacattcagaaaaaatacttgcttcagaatctatacga

SEQ ID NO: 248204 - DNA, 120 bp, Artificial Sequence
  ENSG00000122882_6 (sequence is synthesized)
gctgctgtgaataggcgcatcagagggtacccagaaaaaattcaggcctcacttcatcgagcacactgcttccttccagctggcattgtggcagtgctaaagcagcgccccagattggtg

SEQ ID NO: 248205 - DNA, 120 bp, Artificial Sequence
  ENSG00000122882_7 (sequence is synthesized)
gctgcagcagtccaggcattttacctacgagaccctattgacctgcgagcttgtcgtgttttcaagacattcttgcctgaaacacgaataatgacatcggtcacattcactaaatgtcta

SEQ ID NO: 248206 - DNA, 120 bp, Artificial Sequence
  ENSG00000122882_8 (sequence is synthesized)
tatgcacaattggtgcaacaaaggtttgtgccagaccggcggagtggatacaggctgcctcctccatctgatccccagtaccgagcccatgaattgggcatgaaattggctcatggattt

SEQ ID NO: 248207 - DNA, 120 bp, Artificial Sequence
  ENSG00000122882_9 (sequence is synthesized)
gagatcttatgctccaaatgtagcccacatttttctgactgcaagaaatcccttgtgactgcctcaccactctgggccagtttccttgaaagtctgaaaaagaatgattactttaaggga

SEQ ID NO: 248208 - DNA, 120 bp, Artificial Sequence
  ENSG00000122882_10 (sequence is synthesized)
ctgatagaaggttctgctcagtaccgggaaaggctagaaatggcagagaattacttccagctctcagtagactggccagaaagttctcttgctatgagccctggtgaagaaatcttaacc

SEQ ID NO: 248209 - DNA, 120 bp, Artificial Sequence
  ENSG00000122882_11 (sequence is synthesized)
ttattacagacaataccatttgatatagaagaccttaagaaagaagcagctaatcttcccccagaggatgatgaccagtggttagatctctcaccagatcagctggaccagctgctgcag

SEQ ID NO: 248210 - DNA, 120 bp, Artificial Sequence
  ENSG00000122882_12 (sequence is synthesized)
gttggcaaaaaagaatccgagtctgtttccaaggaggagaaggagcagaactatgacttaactgaagtctcagagagcatgaaagctttcatatccaaagtctcaacccacaagggagca

SEQ ID NO: 248211 - DNA, 120 bp, Artificial Sequence
  ENSG00000122882_13 (sequence is synthesized)
gagctgcctcgagaaccttctgaggctccaatcacttttgatgcagattcttttcttaattattttgataagattttagggccaaggcctaatgagtcagattctgatgatctggatgat

SEQ ID NO: 248212 - DNA, 120 bp, Artificial Sequence
  ENSG00000122882_14 (sequence is synthesized)
gaagactttgaatgtttagatagtgatgatgacttggactttgaaacacacgaacctggcgaagaggcttccctgaaaggaacacttgataatctcaagtcatacatggcccagatggac

SEQ ID NO: 248213 - DNA, 120 bp, Artificial Sequence
  ENSG00000122882_15 (sequence is synthesized)
caggaactagcacacacctgcatcagcaaaagtttcaccactaggaaccaagtggaacctgtatcccagactaccgataacaattcagatgaggaagattctggtacgggagaatctgtt

SEQ ID NO: 248214 - DNA, 120 bp, Artificial Sequence
  ENSG00000122882_16 (sequence is synthesized)
atggcaccagtagatgtagacctgaacctggtttcaaatatattggaatcctatagctcccaagctggactggcaggacctgcttccaatcttttacaaagcatgggagtgcagctgcct

SEQ ID NO: 248215 - DNA, 120 bp, Artificial Sequence
  ENSG00000122882_17 (sequence is synthesized)
gacaacaccgatcacagaccaacaagtaagccaacaaaaaattaaccagcacatttagcttctcttttttctttttaaataaatattgaatatgattctgttcatttctagtttagatta

SEQ ID NO: 248216 - DNA, 120 bp, Artificial Sequence
  ENSG00000122882_18 (sequence is synthesized)
ctcatttagtaaaaatgtttcttcattacaagttttacagattgacttctccatgagccccaaatgtggccctcttggcacaagtctttgtgatctcagctgtgggttatacacaggttt

SEQ ID NO: 248217 - DNA, 120 bp, Artificial Sequence
  ENSG00000122882_19 (sequence is synthesized)
tgaactcggcagggtagaatctagcccctagacaaccttgagatgaaattcacacacttcatgctaaagacataccctaccacaatatacccttggagtaattctaaatatttaaatttc

SEQ ID NO: 248218 - DNA, 120 bp, Artificial Sequence
  ENSG00000122882_20 (sequence is synthesized)
tcccttactgctattcatcctcagatcaaaatttcaagttgacaaatttggatttgaaaactcattcactttttcaatttttttaatgaggcataacatgcatatggttaagtgcacaaa

SEQ ID NO: 248219 - DNA, 120 bp, Artificial Sequence
  ENSG00000122882_21 (sequence is synthesized)
tcttaagtgtacagtcagtgaatttttgcatgtatgtatgtacctgaagcaagatatagaacttatttacttgtaaataacagctatattgatatgtcacataccaaaaaatttaccctt

SEQ ID NO: 248220 - DNA, 120 bp, Artificial Sequence
  ENSG00000122882_22 (sequence is synthesized)
taaattatacaattcagtggtttttagtatatttacaaaattgtgcaaccatccctaccatctaattctagaatattagaaaccccatactcactaatagtctctcattcccttctactc

SEQ ID NO: 248221 - DNA, 120 bp, Artificial Sequence
  ENSG00000122882_23 (sequence is synthesized)
ccagcccctagaaaccactagtctactttctgtctctatggatttgcctattttggatatttcatacctgatactgtacttaattgttttaattaattaattggtttgatatttaatata

SEQ ID NO: 248222 - DNA, 120 bp, Artificial Sequence
  ENSG00000122882_24 (sequence is synthesized)
actgatatatcttttgctaagatgaaatgtttatttcttaaaatgatgctcatattcctcctaaaataaatcaagtattatctatatatcataaaattcaccattaaaagcaaaaaaaaa

SEQ ID NO: 248223 - DNA, 120 bp, Artificial Sequence
  ENSG00000122882_25 (sequence is synthesized)
aagcgtgagccaccacggccggccgtgagggtggatctttttaaagccagaaatatttgctctttaaagtctcaaaagcaaaactgatctttatggattctggtgcttaattgcagaggt

SEQ ID NO: 248224 - DNA, 120 bp, Artificial Sequence
  ENSG00000122884_0 (sequence is synthesized)
ggggcgctggtgtgatcgagctcacgtagcgagggctgcagtcgcctcctccctggcgctgccatcgcggcctagaggttataaaagggctaacgggctccctctgctgcccagtcgcgc

SEQ ID NO: 248225 - DNA, 120 bp, Artificial Sequence
  ENSG00000122884_1 (sequence is synthesized)
cgccagcgggctgagggtaggaagtagccgctccgagtggaggcgactgggggctgaagagcgcgccgccctctcgtcccactttccaggtgtgtgatcctgtaaaattaaatcttccaa

SEQ ID NO: 248226 - DNA, 120 bp, Artificial Sequence
  ENSG00000122884_2 (sequence is synthesized)
gatgatctggtatatattaattataggaattctgcttccccagtctttggctcatccaggcttttttacttcaattggtcagatgactgatttgatccatactgagaaagatctggtgac

SEQ ID NO: 248227 - DNA, 120 bp, Artificial Sequence
  ENSG00000122884_3 (sequence is synthesized)
ttctctgaaagattatattaaggcagaagaggacaagttagaacaaataaaaaaatgggcagagaagttagatcggctaactagtacagcgacaaaagatccagaaggatttgttgggca

SEQ ID NO: 248228 - DNA, 120 bp, Artificial Sequence
  ENSG00000122884_4 (sequence is synthesized)
tccagtaaatgcattcaaattaatgaaacgtctgaatactgagtggagtgagttggagaatctggtccttaaggatatgtcagatggctttatctctaacctaaccattcagagacagta

SEQ ID NO: 248229 - DNA, 120 bp, Artificial Sequence
  ENSG00000122884_5 (sequence is synthesized)
ctttcctaatgatgaagatcaggttggggcagccaaagctctgttacgtctccaggatacctacaatttggatacagataccatctcaaagggtaatcttccaggagtgaaacacaaatc

SEQ ID NO: 248230 - DNA, 120 bp, Artificial Sequence
  ENSG00000122884_6 (sequence is synthesized)
ttttctaacggctgaggactgctttgagttgggcaaagtggcctatacagaagcagattattaccatacggaactgtggatggaacaagccctaaggcaactggatgaaggcgagatttc

SEQ ID NO: 248231 - DNA, 120 bp, Artificial Sequence
  ENSG00000122884_7 (sequence is synthesized)
taccatagataaagtctctgttctagattatttgagctatgcggtatatcagcagggagacctggataaggcacttttgctcacaaagaagcttcttgaactagatcctgaacatcagag

SEQ ID NO: 248232 - DNA, 120 bp, Artificial Sequence
  ENSG00000122884_8 (sequence is synthesized)
agctaatggtaacttaaaatattttgagtatataatggctaaagaaaaagatgtcaataagtctgcttcagatgaccaatctgatcagaaaactacaccaaagaaaaaaggggttgctgt

SEQ ID NO: 248233 - DNA, 120 bp, Artificial Sequence
  ENSG00000122884_9 (sequence is synthesized)
ggattacctgccagagagacagaagtacgaaatgctgtgccgtggggagggtatcaaaatgacccctcggagacagaaaaaactcttttgccgctaccatgatggaaaccgtaatcctaa

SEQ ID NO: 248234 - DNA, 120 bp, Artificial Sequence
  ENSG00000122884_10 (sequence is synthesized)
atttattctggctccagctaaacaggaggatgaatgggacaagcctcgtattattcgcttccatgatattatttctgatgcagaaattgaaatcgtcaaagacctagcaaaaccaaggct

SEQ ID NO: 248235 - DNA, 120 bp, Artificial Sequence
  ENSG00000122884_11 (sequence is synthesized)
ctatgaaaatcctgtggtgtctcgaattaatatgagaatacaagatctaacaggactagatgtttccacagcagaggaattacaggtagcaaattatggagttggaggacagtatgaacc

SEQ ID NO: 248236 - DNA, 120 bp, Artificial Sequence
  ENSG00000122884_12 (sequence is synthesized)
ccattttgactttgcacggaaagatgagccagatgctttcaaagagctggggacaggaaatagaattgctacatggctgttttatatgagtgatgtgtctgcaggaggagccactgtttt

SEQ ID NO: 248237 - DNA, 120 bp, Artificial Sequence
  ENSG00000122884_13 (sequence is synthesized)
tcctgaagttggagctagtgtttggcccaaaaaaggaactgctgttttctggtataatctgtttgccagtggagaaggagattatagtacacggcatgcagcctgtccagtgctagttgg

SEQ ID NO: 248238 - DNA, 120 bp, Artificial Sequence
  ENSG00000122884_14 (sequence is synthesized)
caacaaatgggtatccaataaatggctccatgaacgtggacaagaatttcgaagaccttgtacgttgtcagaattggaatgacaaacaggcttccctttttctcctattgttgtactctt

SEQ ID NO: 248239 - DNA, 120 bp, Artificial Sequence
  ENSG00000122884_15 (sequence is synthesized)
atgtgtctgatatacacatttcctagtcttaactttcaggagtttacaattgactaacactccatgattgattcagtcatgaacctcatcccatgtttcatctgtggacaattgcttact

SEQ ID NO: 248240 - DNA, 120 bp, Artificial Sequence
  ENSG00000122884_16 (sequence is synthesized)
ttgtgggttcttttaaaagtaacacgaaatcatcatattgcataaaaccttaaagttctgttggtatcacagaagacaaggcagagtttaaagtgaggaattttatatttaaagaacttt

SEQ ID NO: 248241 - DNA, 120 bp, Artificial Sequence
  ENSG00000122884_17 (sequence is synthesized)
ttggttggataaaaacataatttgagcatccagttttagtatttcactacatctcagttggtgggtgttaagctagaatgggctgtgtgataggaaacaaatgccttacagatgtgccta

SEQ ID NO: 248242 - DNA, 120 bp, Artificial Sequence
  ENSG00000122884_18 (sequence is synthesized)
ggtgttctgtttacctagtgtcttactctgttttctggatctgaagactagtaataaactaggacactaactgggttccatgtgattgccctttcatatgatcttctaagttgatttttt

SEQ ID NO: 248243 - DNA, 120 bp, Artificial Sequence
  ENSG00000122884_19 (sequence is synthesized)
tcctcccaagtcttttttaaagaaagtatactgtattttaccaaccccctctcttttcttttagctcctctgtggtgaattaaacgtacttgagttaaaatatttcgatttttttttttt

SEQ ID NO: 248244 - DNA, 120 bp, Artificial Sequence
  ENSG00000122884_20 (sequence is synthesized)
ttttaatggaaagtcctgcataacaacactgggccttcttaactaaaatgctcaccacttagcctgtttttttatcccttttttaaaatgacagatgattttgttcaggaattttgctgt

SEQ ID NO: 248245 - DNA, 120 bp, Artificial Sequence
  ENSG00000122884_21 (sequence is synthesized)
ttttcttagtgctaataccttgcctcttattcctgctacagcagggtggtaatattggcattctgattaaatactgtgccttaggagactggaagtttaaaaatgtacaagtcctttcag

SEQ ID NO: 248246 - DNA, 120 bp, Artificial Sequence
  ENSG00000122884_22 (sequence is synthesized)
tgatgagggaattgattttttttaaaagtctttttcttagaaagccaaaatgtttgtttttttaagattctgaaatgtgttgtgacaacaatgacctatttatgatcttaaatctttttt

SEQ ID NO: 248247 - DNA, 120 bp, Artificial Sequence
  ENSG00000122884_23 (sequence is synthesized)
attttggaactattatctgtgtcttaaaaacaaaagcccccatgtttgcttaatatgattttaacattgtacaggattcagccaaacaagtgcctaatcataatacaaatttgaaatcag

SEQ ID NO: 248248 - DNA, 120 bp, Artificial Sequence
  ENSG00000122912_0 (sequence is synthesized)
gtacgccatcagccggcgccgcgccgccgggtgttactttgccccgccggcggggcggtcagcctcctgtcaccgcctgttccggctatggtcccgtccggtgttctgtaagttggcaac

SEQ ID NO: 248249 - DNA, 120 bp, Artificial Sequence
  ENSG00000122912_1 (sequence is synthesized)
caacctaggctcctgacgcgaccctggtcctgatggcggcggcgacggccgcggcagccctggcggcggccgatccccctcccgcaatgccgcaggcggcaggggccggagggcccacaa

SEQ ID NO: 248250 - DNA, 120 bp, Artificial Sequence
  ENSG00000122912_2 (sequence is synthesized)
cagagacttctactggctgcgctcctttctggccggaggtattgctggatgctgtgccaaaacaacagttgctccattggatcgagtaaaggttttattacaagctcacaatcaccatta

SEQ ID NO: 248251 - DNA, 120 bp, Artificial Sequence
  ENSG00000122912_3 (sequence is synthesized)
caagcatttaggagtattttctgcattgcgtgctgttcctcaaaaagaaggattccttggattgtataaaggaaatggtgcaatgatgattcgaatctttccctatggtgcaatccagtt

SEQ ID NO: 248252 - DNA, 120 bp, Artificial Sequence
  ENSG00000122912_4 (sequence is synthesized)
tatggcatttgagcattataaaacgttaattactacgaagctgggaatttcaggtcatgtgcacagattaatggctggatccatggcaggtatgacagcagttatctgtacttaccctct

SEQ ID NO: 248253 - DNA, 120 bp, Artificial Sequence
  ENSG00000122912_5 (sequence is synthesized)
tgacatggttagggtccgcctagcattccaggtgaaaggggaacacagctatacaggaattattcatgctttcaaaacaatttatgcaaaggaaggtggtttctttggattttacagagg

SEQ ID NO: 248254 - DNA, 120 bp, Artificial Sequence
  ENSG00000122912_6 (sequence is synthesized)
tctgatgcctactattttaggaatggctccatatgcaggtgtttcattttttacttttggtaccttgaagagtgttgggctttcccatgctcctacccttcttggcagaccttcatcaga

SEQ ID NO: 248255 - DNA, 120 bp, Artificial Sequence
  ENSG00000122912_7 (sequence is synthesized)
caatcctaatgtcttagttttgaaaactcatgtaaacttactttgtggtggtgttgctggagcaatagcgcagacaatatcctacccatttgatgtgactcgtcggcgaatgcaattagg

SEQ ID NO: 248256 - DNA, 120 bp, Artificial Sequence
  ENSG00000122912_8 (sequence is synthesized)
aactgttctgccggaatttgaaaagtgccttaccatgcgggatactatgaagtatgtctatggacaccatggaattcgaaaaggactctatcgtggtttatctcttaattacattcgctg

SEQ ID NO: 248257 - DNA, 120 bp, Artificial Sequence
  ENSG00000122912_9 (sequence is synthesized)
tattccctctcaagcagtggcttttacaacatacgaacttatgaagcagttttttcacctcaactaaaaaaaaattatggttggtttttcttaatacattctcagagggagaaatgaaac

SEQ ID NO: 248258 - DNA, 120 bp, Artificial Sequence
  ENSG00000122912_10 (sequence is synthesized)
attactataattgtggggggaacattacttgaatggggatatttaccctgtcacaagagccactggtattttagtacttgattattttttctttagtcacaaatcagaactgcttaccat

SEQ ID NO: 248259 - DNA, 120 bp, Artificial Sequence
  ENSG00000122912_11 (sequence is synthesized)
actttttgatgccaaacattataccttagaacattgaagaaaatattcctaagctgatgctggctaaaccgctttaaagttttatttggaagtagaactagctttaaaacggggttcaag

SEQ ID NO: 248260 - DNA, 120 bp, Artificial Sequence
  ENSG00000122912_12 (sequence is synthesized)
aggttgccattagctttgtcatgctgttcaaagtttttaattgttatcatggtttttaaaagactgacagtgtttattattattaaaataaacagggttggttatattgcaatagaataa

SEQ ID NO: 248261 - DNA, 120 bp, Artificial Sequence
  ENSG00000122912_13 (sequence is synthesized)
tgagaattgaatttttaagttctatgaaacagccagcattgacattttatttttgttatctctcttctcacaattatgctccactggataataggaaaaacacttctttccttcattttt

SEQ ID NO: 248262 - DNA, 120 bp, Artificial Sequence
  ENSG00000122912_14 (sequence is synthesized)
taaataaaattaatgttgtatttaaaaggtagccatgtagagacacaaaaataaatgaagaagctggacatggtgggatgggcatgtggtcccagctactctggaagctgaggtgagagg

SEQ ID NO: 248263 - DNA, 120 bp, Artificial Sequence
  ENSG00000122912_15 (sequence is synthesized)
atcacttgagccctggaattccatgccagcctatgcaacatcatgaaaccccacttaataaatgaatgaacgactaagtcttgctcaaatgttattatgaggtactatgagtgacttaca

SEQ ID NO: 248264 - DNA, 120 bp, Artificial Sequence
  ENSG00000122912_16 (sequence is synthesized)
tgtgttttaaaatgtcagtgtgtttcccagaggcagaaataaaaatactgaatatctttgctcttaaaaaaaaagtaacactatagatttgtttttgttagatgatttgctctatagtag

SEQ ID NO: 248265 - DNA, 120 bp, Artificial Sequence
  ENSG00000122912_17 (sequence is synthesized)
aatatttaagtagactgtgaaatatttattaatatagatgtgaatatcaaaaaatgtttctaaggtattatgatgcatcaactagttcttccatgtaaaataattttagtgcaatatgaa

SEQ ID NO: 248266 - DNA, 120 bp, Artificial Sequence
  ENSG00000122912_18 (sequence is synthesized)
tttagtgcaatatgaagacgtagaaatgtaaaatatgatttgaattgttatcctttatattaagaaaatgttttaaaatgtaagaattccatttattctgtttagagtactttttatgat

SEQ ID NO: 248267 - DNA, 120 bp, Artificial Sequence
  ENSG00000122912_19 (sequence is synthesized)
actttttatgatttattataagcgtgtcataaatgggaagggaatatttaaagttctgtgttcagaaagagtaatttgtagaactgatgtgactttttttttttttttgagatggagtct

SEQ ID NO: 248268 - DNA, 82 bp, Artificial Sequence
  ENSG00000122912_20 (sequence is synthesized)
atggcctcgatctcctgaagattactggcgtgagccacggcgcccggccctttgatgtgactttaaagacattagaaggcca

SEQ ID NO: 248269 - DNA, 120 bp, Artificial Sequence
  ENSG00000122912_21 (sequence is synthesized)
aagtgctgagattactggcgtgagccacggcgcccggccctttgatgtgactttaaagacattagaaggccaggtgtggtggctcacgcctttattcccagcactttgggaggccgagtt

SEQ ID NO: 248270 - DNA, 120 bp, Artificial Sequence
  ENSG00000122912_22 (sequence is synthesized)
accccacctctactaaaaatacaaaaagtagcaggtgtggtggctcgtgcctgtagtcccagttactcgcgaggctgagacatgagaattgcttgagctcgggaagcggaggttgcagtg

SEQ ID NO: 248271 - DNA, 90 bp, Artificial Sequence
  ENSG00000122912_23 (sequence is synthesized)
ctgcactccagcctgggtgacagaatgagcctccatctcaaaaaaaaggagacattagaaaactaagttgagtccaggcgtggtggctct

SEQ ID NO: 248272 - DNA, 75 bp, Artificial Sequence
  ENSG00000122912_24 (sequence is synthesized)
ggatatcttgattctttcaaacaaaagaaggaaaactaagttgaaagtgttatttttgcttcaatttttatttct

SEQ ID NO: 248273 - DNA, 120 bp, Artificial Sequence
  ENSG00000122912_25 (sequence is synthesized)
gttgaaagtgttatttttgcttcaatttttatttctttacataaaaggtttcttgtcataccttggtaaaaatttgatgagctggtttcattttgaaagcctttattttaaaaataagta

SEQ ID NO: 248274 - DNA, 120 bp, Artificial Sequence
  ENSG00000122912_26 (sequence is synthesized)
tttcttttatacagagtgagactgtataaaagaaaaaaaaaggctgtacaaaaatttcttttatacagagactgtataaaagaaaaaaaaaagaaatacatgtgttcttaaaaccatttg

SEQ ID NO: 248275 - DNA, 120 bp, Artificial Sequence
  ENSG00000122912_27 (sequence is synthesized)
accatttgtatattttcatttctagaccacactgtagctaattattgttattaaatgttaagataatttaagtatataaaataagtattgagccgggcatggtggctcacccctgtaatc

SEQ ID NO: 248276 - DNA, 120 bp, Artificial Sequence
  ENSG00000122912_28 (sequence is synthesized)
aaaaaaaaaaaaaaaaaaagatacctcagttaggttatcagtaaaaggggattgcaaatatcttttaaataaaaatttgcattctatatgttatagaatacagaggatattaaaaataaa

SEQ ID NO: 248277 - DNA, 120 bp, Artificial Sequence
  ENSG00000122912_29 (sequence is synthesized)
aaaataaattttatccatgttttgacaatttctttctttcaactgtttacatattgaagcacaaatgctaaacataagtcagaatggaagaatatttaaaataatgactgtgtttatatc

SEQ ID NO: 248278 - DNA, 120 bp, Artificial Sequence
  ENSG00000122912_30 (sequence is synthesized)
tgatttatttcagattgcccaaagtgcatcttgccaggttatcttccatttgaagactgacattttatttcttttttgatctttattgttcctctcttccacctctcagtgggtatagct

SEQ ID NO: 248279 - DNA, 120 bp, Artificial Sequence
  ENSG00000122912_31 (sequence is synthesized)
ctctggtctgtagaatgggacagtggtctggtttccagattgataagtgaggtatacctcctagttttcagtaattacctgtagaaggtggagaagttactggatatgtttaataatatc

SEQ ID NO: 248280 - DNA, 80 bp, Artificial Sequence
  ENSG00000122912_32 (sequence is synthesized)
gtagaaggtggagaagttactggatatgtttaataatatctcattacattcttttttttttttttttaacgagagtctta

SEQ ID NO: 248281 - DNA, 120 bp, Artificial Sequence
  ENSG00000122912_33 (sequence is synthesized)
aatctccacctccgggttcaagcgattttcccgagtcatctttccaagtaactgggattacagctatgtgctaccatgcccagctgagttttgtatttttctttcttttctttctttttt

SEQ ID NO: 248282 - DNA, 87 bp, Artificial Sequence
  ENSG00000122912_34 (sequence is synthesized)
gagcttacctgacctcaagtgatctgcccccccgacttcccaaaatgctgggactactggcatgagccagtgctcctgtcctcattc

SEQ ID NO: 248283 - DNA, 120 bp, Artificial Sequence
  ENSG00000122912_35 (sequence is synthesized)
ctgggactactggcatgagccagtgctcctgtcctcattccattcttcaccgtggtactgaccatccatttattcagcaccaattgtgtgccagaccttgtgtcagcattatggaggact

SEQ ID NO: 248284 - DNA, 120 bp, Artificial Sequence
  ENSG00000122912_36 (sequence is synthesized)
tcccttgggaggcttgttagctgtacttgcaatctgatttgggttcccaaatcagcatataacaccaggtatttctctaatagagtatgtgccacactttctgctaactgcctgtttatc

SEQ ID NO: 248285 - DNA, 120 bp, Artificial Sequence
  ENSG00000122912_37 (sequence is synthesized)
agtgtccccacatcccaatatctggttccttcaagggcagggagcacagggtatggcgtcagagtggtactcagtgatgtttactggtgggtagaaggaagggttagtccctgtttttga

SEQ ID NO: 248286 - DNA, 120 bp, Artificial Sequence
  ENSG00000122912_38 (sequence is synthesized)
agactttatgttctagcaggcagaaatgaagcacaaatagttcaagaaataaacaatttaggaataaagtcatttggtttgcttcgcagaaatgtcttattgctgatttgccagcatgag

SEQ ID NO: 248287 - DNA, 120 bp, Artificial Sequence
  ENSG00000122912_39 (sequence is synthesized)
atatatatatataaaataaaacttataaatagtttttatggctgggtgaagtgactcatgtctgtaattctagccctttgggaggctgagcgaggaggatcacttgagcctaggcattcg

SEQ ID NO: 248288 - DNA, 120 bp, Artificial Sequence
  ENSG00000122912_40 (sequence is synthesized)
agcccagcctgggcaacattgcaagactctgtctcatttttttatataaaatgtttttttaaaaaaccctatgtataattatttattttttttccccaaggattattcccaaactatgta

SEQ ID NO: 248289 - DNA, 120 bp, Artificial Sequence
  ENSG00000122912_41 (sequence is synthesized)
caattaatgggttgccttgcagagttggatcaataatacctgacacacttgtatagcaagcatacactttacatagttcctcgcatctattctttgaaacccagacacattctagtattg

SEQ ID NO: 248290 - DNA, 120 bp, Artificial Sequence
  ENSG00000122912_42 (sequence is synthesized)
ggcactagaaactggtgataaataataacaattacatatatttcctgaagaattatgtggcattccttgttttaagcacctttgatgccttagctcaatctccattacaatactatgata

SEQ ID NO: 248291 - DNA, 120 bp, Artificial Sequence
  ENSG00000122912_43 (sequence is synthesized)
taagtaccatttaatatttctttttgacagatgggaataatcgaggcctagggagattaaattacttggccaggttcatgtaagtggcagatctaggattcaaattcagccggtctgaat

SEQ ID NO: 248292 - DNA, 120 bp, Artificial Sequence
  ENSG00000122912_44 (sequence is synthesized)
ctagagcctattcttttagctatgatgctatactttaatacagtaatacactgttcaaatgaaactgtaacatgtcattaaatttgaacttgtcaataaacataccaagcaataaaataa

SEQ ID NO: 248293 - DNA, 77 bp, Artificial Sequence
  ENSG00000122912_45 (sequence is synthesized)
ttgttgttttttaaagaccaggtgttgctgtgttatctaggctggagcgaagccgcacaattatagctctccgtgac

SEQ ID NO: 248294 - DNA, 120 bp, Artificial Sequence
  ENSG00000122912_46 (sequence is synthesized)
taggctggagcgaagccgcacaattatagctctccgtgacctccaactgttggctcacgtcatcctccagccttagtctctgagtactgaggcacaccaccatgccttgctaattttttt

SEQ ID NO: 248295 - DNA, 74 bp, Artificial Sequence
  ENSG00000122912_47 (sequence is synthesized)
ttttgtatgctcctgacctcaggagatctgcccgccccgagctgccaaagtgctgggattgcaggcatgaagca

SEQ ID NO: 248296 - DNA, 120 bp, Artificial Sequence
  ENSG00000122912_48 (sequence is synthesized)
gagctcctgacctcaggagatctgcccgccccgagctgccaaagtgctgggattgcaggcatgaagcactgcgcccagccgattttaaaaaattttttgtagagatgaggtctcactgtg

SEQ ID NO: 248297 - DNA, 120 bp, Artificial Sequence
  ENSG00000122912_49 (sequence is synthesized)
ctccgaaagtgctgggattacaggtgcgagctactgtgcctggcctgttattcacctttttataaaaggagcaacccattttttcaagtcattactagatgtacagtattgtagagaagt

SEQ ID NO: 248298 - DNA, 120 bp, Artificial Sequence
  ENSG00000122912_50 (sequence is synthesized)
agatgtacagtattgtagagaagtctatattattgctttagaagcatgccaagctcgaagggctggcctggactctgacctatgctaaagcccatgtatgcactttattctactttcatc

SEQ ID NO: 248299 - DNA, 120 bp, Artificial Sequence
  ENSG00000122912_51 (sequence is synthesized)
tatacttttccccagtggcacatggtagggtcgaaatacatatttgctgaatgtataaatggatgactaattttatgggtaaaagttggttgtttcaatgaaaaatgatccagaagaaga

SEQ ID NO: 248300 - DNA, 120 bp, Artificial Sequence
  ENSG00000122912_52 (sequence is synthesized)
ggagtttacttcaaacagaacctggcaatcggataaataccttcaagtgtctgtctccgtaaaaatgttccagaagaagaggaggttacttcaaacagaacctggcagttggattaatac

SEQ ID NO: 248301 - DNA, 120 bp, Artificial Sequence
  ENSG00000122912_53 (sequence is synthesized)
gcatttgagcattataaaacgttaattactacgaagctgggaatttcaggtcatgtgcacagattaatggctggatccatggcaggtaaacatattctactatttgtattggattgtagt

SEQ ID NO: 248302 - DNA, 120 bp, Artificial Sequence
  ENSG00000122952_0 (sequence is synthesized)
agctgaactcggcgcctggaaagatggaggcagcggagacagaggcggaagctgcagccctagaggtcctggctgaggtggcaggcatcttggaacctgtaggcctgcaggaggaggcag

SEQ ID NO: 248303 - DNA, 120 bp, Artificial Sequence
  ENSG00000122952_1 (sequence is synthesized)
aactgccagccaagatcctggttgagtttgtggtggactctcagaagaaagacaagctgctctgcagccagcttcaggtagcggatttcctgcagaacatcctggctcaggaggacactg

SEQ ID NO: 248304 - DNA, 120 bp, Artificial Sequence
  ENSG00000122952_2 (sequence is synthesized)
ctaagggtctcgaccccttggcttctgaagacacgagccgacagaaggcaattgcagctaaggaacaatggaaagagctgaaggccacctacagggagcacgtagaggccatcaaaattg

SEQ ID NO: 248305 - DNA, 120 bp, Artificial Sequence
  ENSG00000122952_3 (sequence is synthesized)
gcctcaccaaggccctgactcagatggaggaagcccagaggaaacggacacaactccgggaagcctttgagcagctccaggccaagaaacaaatggccatggagaaacgcagagcagtcc

SEQ ID NO: 248306 - DNA, 120 bp, Artificial Sequence
  ENSG00000122952_4 (sequence is synthesized)
agaaccagtggcagctacaacaggagaagcatctgcagcatctggcggaggtttctgcagaggtgagggagcgtaagacagggactcagcaggagcttgacagggtgtttcagaaacttg

SEQ ID NO: 248307 - DNA, 120 bp, Artificial Sequence
  ENSG00000122952_5 (sequence is synthesized)
gaaacctgaagcagcaggcagaacaggagcgggacaagctgcagaggtatcagaccttcctccagcttctgtataccctgcagggtaagctgttgttccctgaggctgaggctgaggcag

SEQ ID NO: 248308 - DNA, 120 bp, Artificial Sequence
  ENSG00000122952_6 (sequence is synthesized)
agaatcttccagatgataaaccccagcagccgactcgaccccaggagcagagtacaggagacaccatggggagagaccctggtgtgtccttcaaggctgttggtctacaacctgctggag

SEQ ID NO: 248309 - DNA, 120 bp, Artificial Sequence
  ENSG00000122952_7 (sequence is synthesized)
ggcctctgacttccctcacctcccaaccatcattacaggaaagactgtgaactcctgagttcagcttgatttctgactacatcccagcaagctctggcatctgtggattaaaatccctgg

SEQ ID NO: 248310 - DNA, 120 bp, Artificial Sequence
  ENSG00000122952_8 (sequence is synthesized)
atctctctcagttgtgtatttgttcatcttcatatgctggcaggaacaactattaatacagatactcagaagccaataacatgacaggagctgggactggtttgaacacagggtgtgcag

SEQ ID NO: 248311 - DNA, 120 bp, Artificial Sequence
  ENSG00000122952_9 (sequence is synthesized)
atggggagggggtactggccttgggcctcctatgatgcagacatggtgaatttaattcaaggaggaggagaatgttttaggcaggtggttatatgtgggaagataattttattcatggat

SEQ ID NO: 248312 - DNA, 120 bp, Artificial Sequence
  ENSG00000122952_10 (sequence is synthesized)
ccaaatgtttgttgagtcctttctttgtgctaaggttcttgcggtgaaccagaattataacagtgagctcatctgactgttttaggatgtacagcctagtgttaacattcttggtatctt

SEQ ID NO: 248313 - DNA, 120 bp, Artificial Sequence
  ENSG00000122952_11 (sequence is synthesized)
tttgtgccttatctaaaacatttctcgatcactggtttcagatgttcatttattatattcttttcaaagattcagagattggcttttgtcatccactattgtatgttttgtttcattgac

SEQ ID NO: 248314 - DNA, 120 bp, Artificial Sequence
  ENSG00000122952_12 (sequence is synthesized)
ctctagtgataccttgatctttcccactttctgttttcggattggagaagatgtaccttttttgtcaactcttacttttatcagatgatcaactcacgtatttggatctttatttgtttt

SEQ ID NO: 248315 - DNA, 120 bp, Artificial Sequence
  ENSG00000122952_13 (sequence is synthesized)
ctcaaataaatatttaaggttatacatttcttctgacttcctttattttcacaatcattcaattcatagcatttcctatattctgttataattatttcattgattcataaatttctttga

SEQ ID NO: 248316 - DNA, 120 bp, Artificial Sequence
  ENSG00000122952_14 (sequence is synthesized)
aaaataatttggtcttctattgattgtgagaagataatctaagtttaatttggtcagagaatatcatctgtttaataaactttgaaatttggtgagtgaattatcttttttactgataaa

SEQ ID NO: 248317 - DNA, 120 bp, Artificial Sequence
  ENSG00000122952_15 (sequence is synthesized)
tggagaaagatcctagaaaaggtcagacccaactcaggccttggtgtccctggactgcaagtgtggaaggagggaaagcctggtttacctctctctgcatctgagctctgctacccatgg

SEQ ID NO: 248318 - DNA, 120 bp, Artificial Sequence
  ENSG00000122952_16 (sequence is synthesized)
aactgccagccaagatcctggttgagtttgtggtggtatgtacaagatgagagcgagcctttcagaagccagggtctggtcctggctcctcttactgagatacagggcagcactggcaga

SEQ ID NO: 248319 - DNA, 120 bp, Artificial Sequence
  ENSG00000122952_17 (sequence is synthesized)
gaggatttcagttaggtctcccatttggctgatgggaaggaggcccagtgttgcagggaggcaggctagcaggccaccctcactcatgtactcattcctggtggctcatctcaggacaga

SEQ ID NO: 248320 - DNA, 120 bp, Artificial Sequence
  ENSG00000122958_0 (sequence is synthesized)
gaggtcacgtgacggagcgccggagcggagggagccggggctgggagttctcctgagggaagaggagtggagtaggggggacgcggcggcggcgttgacaatgagttttcttggaggctt

SEQ ID NO: 248321 - DNA, 120 bp, Artificial Sequence
  ENSG00000122958_1 (sequence is synthesized)
ttttggtccaatttgtgagatcgatattgttcttaatgatggggaaaccaggaaaatggcagaaatgaaaactgaagatggcaaagtagaaaaacactatctcttctatgacggagaatc

SEQ ID NO: 248322 - DNA, 120 bp, Artificial Sequence
  ENSG00000122958_2 (sequence is synthesized)
cgtttcaggaaaggtaaacctagcctttaagcaacctggaaagaggctagaacaccaaggaattagaattgaatttgtaggtcaaattgaacttttcaatgacaagagtaatactcatga

SEQ ID NO: 248323 - DNA, 120 bp, Artificial Sequence
  ENSG00000122958_3 (sequence is synthesized)
atttgtaaacctagtgaaagaactagccttacctggagaactgactcagagcagaagttatgattttgaatttatgcaagttgaaaagccatatgaatcttacatcggtgccaatgtccg

SEQ ID NO: 248324 - DNA, 120 bp, Artificial Sequence
  ENSG00000122958_4 (sequence is synthesized)
cttgaggtattttcttaaagtgacaatagtgagaagactgacagatttggtaaaagagtatgatcttattgttcaccagcttgccacctatcctgatgttaacaactctattaagatgga

SEQ ID NO: 248325 - DNA, 120 bp, Artificial Sequence
  ENSG00000122958_5 (sequence is synthesized)
agtgggcattgaagattgtctacatatagaatttgaatataataaatcaaagtatcatttaaaggatgtgattgttggaaaaatttacttcttattagtaagaataaaaatacaacatat

SEQ ID NO: 248326 - DNA, 120 bp, Artificial Sequence
  ENSG00000122958_6 (sequence is synthesized)
ggagttacagctgatcaaaaaagagatcacaggaattggacccagtaccacaacagaaacagaaacaatcgccaaatatgaaataatggatggtgcaccagtaaaaggtgaatcaattcc

SEQ ID NO: 248327 - DNA, 120 bp, Artificial Sequence
  ENSG00000122958_7 (sequence is synthesized)
aataaggctatttttagcaggatatgacccaactccaacaatgagagatgtgaacaaaaaattttcagtaaggtactttttgaatttagtgcttgttgatgaggaagaccggaggtactt

SEQ ID NO: 248328 - DNA, 120 bp, Artificial Sequence
  ENSG00000122958_8 (sequence is synthesized)
caaacagcaggagataattttatggagaaaagctcctgaaaaactgaggaaacagagaacaaactttcaccagcgatttgaatctccagaatcacaggcatctgccgaacagcctgaaat

SEQ ID NO: 248329 - DNA, 120 bp, Artificial Sequence
  ENSG00000122958_9 (sequence is synthesized)
gtgaactgaacaggagaaaaaaagaaaagcaaaaaactcctgtaacccttgagattaagttcagcaggttaaagatggttgcagctggagggggcggaaaaaggccaaaactccatatat

SEQ ID NO: 248330 - DNA, 120 bp, Artificial Sequence
  ENSG00000122958_10 (sequence is synthesized)
gttagtcttcctttatcttacagcgcagcatttattttatgatataatgaaatgttcgttcatgtatatacatttttaaaagtgctttctttgaaacactggaactttgttaagctgcct

SEQ ID NO: 248331 - DNA, 120 bp, Artificial Sequence
  ENSG00000122958_11 (sequence is synthesized)
ttttttttttaacttcctactttgatgataagcactcagatatatatcagcgtaaacatgaaaaattttcatgtgagtaggctggtatttgtaattttgctttctttctgcataatgttg

SEQ ID NO: 248332 - DNA, 120 bp, Artificial Sequence
  ENSG00000122958_12 (sequence is synthesized)
attataaatcctctcttttcaggctaatgattacctcttattctctacatgcaaaaaattaaatattttgtgttcaaataaaattagaaaacctgagtggcctcttgtgtcctgcagaga

SEQ ID NO: 248333 - DNA, 120 bp, Artificial Sequence
  ENSG00000122958_13 (sequence is synthesized)
tttaaaacatggcatctcaatatttttgagaactacatttgtttttaacatatgtgtttgagaaaagcatatggagtgtttcaccgcaggcacttctgagtaccattccatggcttccag

SEQ ID NO: 248334 - DNA, 120 bp, Artificial Sequence
  ENSG00000122958_14 (sequence is synthesized)
aattttatcctctttgaggtcttctgtgctatgaatattagatttctttccccaagggattatgtggcaggtcattatggccttcttttttttggccatattaagtaacagttttgctat

SEQ ID NO: 248335 - DNA, 120 bp, Artificial Sequence
  ENSG00000122958_15 (sequence is synthesized)
attccagtagtaccgttgtgtgttttctgcaatgtggagttgacttagcttggcattttagatttgttaaaactattttttccataaatactttgaaacatatttatatatttcaattta

SEQ ID NO: 248336 - DNA, 120 bp, Artificial Sequence
  ENSG00000122958_16 (sequence is synthesized)
aggaatctttttgccatgtgtatgcaaatattattttcttcatacattcattttcttttcaggggaaaattttgggatgggggactcaggaggacctgtgaagcatgtagttatctagat

SEQ ID NO: 248337 - DNA, 120 bp, Artificial Sequence
  ENSG00000122958_17 (sequence is synthesized)
gaactttggctagttaaactcatattgaaacttcatctagtctcttaattttttaacactaaattcaagtcatttgttttaagtctctaaaaaagaagattgcagtcatccattcatatg

SEQ ID NO: 248338 - DNA, 120 bp, Artificial Sequence
  ENSG00000122958_18 (sequence is synthesized)
catggggtctgatcgcaaatacactaaatgtggagtgtaggaaccaaaatgaaacctgctgtatggaaactactttcacttatggttcattggtttttgtaccaatattttttatgcact

SEQ ID NO: 248339 - DNA, 120 bp, Artificial Sequence
  ENSG00000122958_19 (sequence is synthesized)
tcagtgcaagtcttgtcagttaaccttactttatgagtaagctaaataacccaaattacatttctttaaacctgttttactactatggcactttgataaaatggtcaggaaccaacttta

SEQ ID NO: 248340 - DNA, 120 bp, Artificial Sequence
  ENSG00000122958_20 (sequence is synthesized)
ctggcaaaagggtccatgtaccaccatgtgctggagcatctgttctacatgtggatatctatgaatggtaatgttttccttcatgtaagtgcctattcagagtttcagaattttaaaatg

SEQ ID NO: 248341 - DNA, 120 bp, Artificial Sequence
  ENSG00000122958_21 (sequence is synthesized)
ccaaatattttcatggtcatttgcatgtagtaagccagaaaatattcaaagagattttgaaaaccaattgtatttaaccagcctcaaattgtgcaaccatgatgtataataaagaatttg

SEQ ID NO: 248342 - DNA, 120 bp, Artificial Sequence
  ENSG00000122958_22 (sequence is synthesized)
aaacagaaactgagcttgctgtttgcatgattaaaatagctctgttctcaaatctcttctcattgttagatttattgtcgaggataggattgttcaatagtttaggaagctgtaactgtg

SEQ ID NO: 248343 - DNA, 120 bp, Artificial Sequence
  ENSG00000122958_23 (sequence is synthesized)
ataatgaatttttataaatattactggtttcaattttaaatagatatataatgcttttaataggctggcttaaaactgtcatatacaggatgcctatccgttttgctcaagactttttgt

SEQ ID NO: 248344 - DNA, 120 bp, Artificial Sequence
  ENSG00000122958_24 (sequence is synthesized)
agcataaccaatttgaaaaaaattcaaatttaatatttggtgatttcagtcaaaagtcagccagctaattagaagtcataaactgaaaaagaaatttgtgtctttaatgaagagttacaa

SEQ ID NO: 248345 - DNA, 120 bp, Artificial Sequence
  ENSG00000122958_25 (sequence is synthesized)
tgtctaatccattggttctcaaccctggctgcatatcagaatcaccttagaagcttttaaaataaccaggcccgggtcctactctgaccaataaaataagaatctcagagactgggccat

SEQ ID NO: 248346 - DNA, 120 bp, Artificial Sequence
  ENSG00000122958_26 (sequence is synthesized)
aagcattaaaaacaaaacaacctcaaaaaaatacctgtcatctcagccacttcaggagtctgaggcggaaggatcacctggaattcgagaccagcctggccaacaaaaatgagaccctat

SEQ ID NO: 248347 - DNA, 120 bp, Artificial Sequence
  ENSG00000122958_27 (sequence is synthesized)
ctctacaaaaaaattaacaatgagctgggcatggtggcatgcacctgtatttccagctatttaggaagctgagacaggaagatccctttgagaggtgaagccagctggacttctgagttg

SEQ ID NO: 248348 - DNA, 120 bp, Artificial Sequence
  ENSG00000122958_28 (sequence is synthesized)
cttggagaacttttctgtcttacaaggggattgtagaatgcaccaatcaacactctagctaggattgtaaaacgcactctggctagctggaggtttgtaaaatgtaccaatcagtgcttg

SEQ ID NO: 248349 - DNA, 60 bp, Artificial Sequence
  ENSG00000122958_29 (sequence is synthesized)
cgcactctggctagctggaggtttgtaaaatgtaccaatcagtgcttgtgaaaacgcacc

SEQ ID NO: 248350 - DNA, 120 bp, Artificial Sequence
  ENSG00000122958_30 (sequence is synthesized)
gatcacaccaatgcactccagcctggctagaagtttgtaaaatggaccaaccagtgttctgtagaatggaccaatcagcaggacgtgggcggggacaaataagagaataaaagctggcca

SEQ ID NO: 248351 - DNA, 120 bp, Artificial Sequence
  ENSG00000122958_31 (sequence is synthesized)
aaaagctggccaccccccagccagcagcggcaaccggctcgggtccccctccatactgtggaagctctgttctttcactcttcacgatacatcttgctgctgctcactctgggcctgtgc

SEQ ID NO: 248352 - DNA, 120 bp, Artificial Sequence
  ENSG00000122958_32 (sequence is synthesized)
cacatttaagagctgtaacactcaaggcgaaggtccacggctccgttaagtcagcgagaccgcaaacccactggaaggaaccaactctggacacaccttgagtacacgaatttgaaatta

SEQ ID NO: 248353 - DNA, 120 bp, Artificial Sequence
  ENSG00000122958_33 (sequence is synthesized)
cactgaggtgatcatgccactgcactgtagcttgggtgacagagacaccatgtctcaaaaatctacccagagttgggaaccactgatctaaaccattaaaatttttatttctgtcactaa

SEQ ID NO: 248354 - DNA, 120 bp, Artificial Sequence
  ENSG00000122958_34 (sequence is synthesized)
gcgcctttgccctctcagaacggctgggcggaacgaggcgagaaagccaagttaagaaaacccagactcagaaggaggtggagcgggactgcgttcaggcaaggtggcagaacgcctcgc

SEQ ID NO: 248355 - DNA, 120 bp, Artificial Sequence
  ENSG00000122958_35 (sequence is synthesized)
cgtggacgaagagagcacatctcttcttgcgaggcctaaggaagtagggctcccactcgcctcggcaacccaaggacccagccaaggagagagcctccagatgaatccttcctctcctcc

SEQ ID NO: 248356 - DNA, 120 bp, Artificial Sequence
  ENSG00000122958_36 (sequence is synthesized)
ttccttcccagccgctcaaactttcacaaagaggaactgggtgcggtaaagaggccggacacggaaccgctcgtccggtgaccgaagagacggcgaggaggagcccgcgaacccgcctct

SEQ ID NO: 248357 - DNA, 120 bp, Artificial Sequence
  ENSG00000122958_37 (sequence is synthesized)
gttcaggccccgcccactcgacgtaatttgcccgcccctctccaccctccgaagggtggagcctgaggccccgcctccaagcggcctctccccggagtgcctggcggccagcagggcggg

SEQ ID NO: 248358 - DNA, 120 bp, Artificial Sequence
  ENSG00000122958_38 (sequence is synthesized)
cagattaataaacatgtagttaaatgtcagttgagtgttcaaagctaagttagaaattaccctgtcctaagtactgtgaaaaatacaaaaactaccttttataaacatgatctgtcctcc

SEQ ID NO: 248359 - DNA, 120 bp, Artificial Sequence
  ENSG00000122958_39 (sequence is synthesized)
tattccagtattgccatcctaatgttgtataattaaacatacatgatttataactttgaaataaattacatgatttttacaatttcaaaatcaattgcatatcatggcactattggagga

SEQ ID NO: 248360 - DNA, 120 bp, Artificial Sequence
  ENSG00000122965_0 (sequence is synthesized)
ggctcggtaaagatggcggcgcccagggcggtagcgtgaaacttggtggaagacgctgaccagtcgtgttggaatcaaaacagcggggaccctgcgccatgtcgcgactgatcgtgaaga

SEQ ID NO: 248361 - DNA, 120 bp, Artificial Sequence
  ENSG00000122965_1 (sequence is synthesized)
atctcccgaatgggatgaaggaggagcgtttcaggcagctgtttgccgccttcggcacgctgacagactgcagcctgaagttcaccaaagatggcaagttccgcaagtttggttttattg

SEQ ID NO: 248362 - DNA, 120 bp, Artificial Sequence
  ENSG00000122965_2 (sequence is synthesized)
gcttcaagtccgaggaagaggcccagaaggcacagaagcatttcaacaagagcttcatcgacacatcccggatcacagtggagttctgcaagtcattcggggacccggccaaacccagag

SEQ ID NO: 248363 - DNA, 120 bp, Artificial Sequence
  ENSG00000122965_3 (sequence is synthesized)
cctggagcaaacatgcccagaaaccaagccagcccaagcagcctccaaaagactctactactccagaaattaagaaagatgagaagaagaaaaaggtggcaggtcaactggagaagctga

SEQ ID NO: 248364 - DNA, 120 bp, Artificial Sequence
  ENSG00000122965_4 (sequence is synthesized)
aggaggatacagagttccaggagtttctgtcagttcatcagaggcgggcgcaggcagccacttgggcgaatgatggcctggatgctgagccctcgaaagggaagagcaagccggccagtg

SEQ ID NO: 248365 - DNA, 120 bp, Artificial Sequence
  ENSG00000122965_5 (sequence is synthesized)
actacctgaacttcgactccgattctgggcaggagagtgaggaggagggagccggggaggacctggaagaagaggcaagcctcgaaccaaaggcagctgtgcagaaggagctgtcggaca

SEQ ID NO: 248366 - DNA, 120 bp, Artificial Sequence
  ENSG00000122965_6 (sequence is synthesized)
tggattacctgaaatccaagatggtgaaggctgggtcgtcctcttcctcggaggaagaggaaagtgaagatgaagccgtgcactgtgatgaagggagtgaggccgaggaagaggattcct

SEQ ID NO: 248367 - DNA, 120 bp, Artificial Sequence
  ENSG00000122965_7 (sequence is synthesized)
ccgccaccccagtcctgcaggaaagagacagcaagggtgcaggccaagagcaagggatgccagctgggaaaaagagaccaccggaggccagagccgagacagagaaaccagcaaaccaga

SEQ ID NO: 248368 - DNA, 120 bp, Artificial Sequence
  ENSG00000122965_8 (sequence is synthesized)
aggaacccaccacctgccacaccgtgaagctgcggggagccccgttcaatgtcacagagaaaaatgttatggaattcctggcacccctgaaaccagtggccattcgaattgtgagaaacg

SEQ ID NO: 248369 - DNA, 120 bp, Artificial Sequence
  ENSG00000122965_9 (sequence is synthesized)
ctcatgggaataaaacaggatacatctttgtggatttcagcaatgaagaggaagtgaagcaagctctgaaatgcaaccgggagtacatgggtgggcgctacatcgaggtgttcagggaaa

SEQ ID NO: 248370 - DNA, 120 bp, Artificial Sequence
  ENSG00000122965_10 (sequence is synthesized)
agaacgtccccaccaccaagggtgcaccaaagaataccaccaaatcctggcaaggccggatactcggggagaacgaagaggaggaggacctggccgaatccggaaggctctttgtacgga

SEQ ID NO: 248371 - DNA, 120 bp, Artificial Sequence
  ENSG00000122965_11 (sequence is synthesized)
acctgccctacaccagcaccgaggaggatctggagaagctcttctccaaatatggtcccctgtctgagctccactaccccatcgacagcctgaccaagaaacccaagggttttgcattca

SEQ ID NO: 248372 - DNA, 120 bp, Artificial Sequence
  ENSG00000122965_12 (sequence is synthesized)
tcaccttcatgttccctgagcacgctgtgaaggcctactcggaggtggacgggcaggtattccagggcaggatgctccacgtgttaccatctaccatcaagaaggaagccagcgaggatg

SEQ ID NO: 248373 - DNA, 120 bp, Artificial Sequence
  ENSG00000122965_13 (sequence is synthesized)
ccagtgccctgggatcgtcgtcctacaagaagaagaaggaggcccaggacaaagccaacagtgccagctctcacaactggaacacactattcatggggccgaatgccgtggccgatgcca

SEQ ID NO: 248374 - DNA, 120 bp, Artificial Sequence
  ENSG00000122965_14 (sequence is synthesized)
tcgcacagaagtacaacgccaccaagagtcaagtgtttgaccacgagaccaagggcagcgtggccgtgcgcgtggctctgggggaaacccagctcgtccaggaagtgcggcgttttctca

SEQ ID NO: 248375 - DNA, 120 bp, Artificial Sequence
  ENSG00000122965_15 (sequence is synthesized)
tagacaacggggtcagcctggattccttcagccaggctgcagcagagcgaagcaagactgtgattctggtcaagaacctcccggcaggcaccctggcggcccagctgcaggagaccttcg

SEQ ID NO: 248376 - DNA, 120 bp, Artificial Sequence
  ENSG00000122965_16 (sequence is synthesized)
gccattttggcagcctgggccgcgtgctgctgccagagggcggaatcactgccatcgtggagttcctggagcccctggaggcccgcaaggccttcaggcatctggcctattccaagttcc

SEQ ID NO: 248377 - DNA, 120 bp, Artificial Sequence
  ENSG00000122965_17 (sequence is synthesized)
aagctccaagacacaccttcagaacccatggaaaaggacccagcagagccagaaacagtgcctgatggcgaaaccccagaagatgaaaatccaacagaggaaggagcagacaactcttca

SEQ ID NO: 248378 - DNA, 120 bp, Artificial Sequence
  ENSG00000122965_18 (sequence is synthesized)
gcaaagatggaagaggaggaggaggaagaggaagaagaagaagagagcctcccaggatgtactctgtttattaagaatctcaattttgacacaacagaagagaagctgaaggaagtgttt

SEQ ID NO: 248379 - DNA, 120 bp, Artificial Sequence
  ENSG00000122965_19 (sequence is synthesized)
tcaaaagtggggacagtgaagagctgctccatctccaagaagaagaacaaagcaggagtgctcctttccatggggtttggatttgtggaatacaggaagccggagcaagcccagaaagct

SEQ ID NO: 248380 - DNA, 120 bp, Artificial Sequence
  ENSG00000122965_20 (sequence is synthesized)
ctcaagcagctccagggtcacgtcgtggacggccacaagctggaagtgaggatctcggaacgagccactaagccagccgtgacattggctcggaagaaacaagttcccagaaagcagacc

SEQ ID NO: 248381 - DNA, 120 bp, Artificial Sequence
  ENSG00000122965_21 (sequence is synthesized)
acctccaagatcctggtgcggaacatccccttccaggcccacagccgggagatccgagagctcttcagcacctttggggagttgaagacggtccgcctgccaaagaagatgactgggaca

SEQ ID NO: 248382 - DNA, 120 bp, Artificial Sequence
  ENSG00000122965_22 (sequence is synthesized)
ggcacacacagaggcttcggctttgtggacttcctcaccaagcaggatgcgaagagagccttcaacgccctgtgtcacagcacccacttgtacgggcggaggctggtgctggagtgggcc

SEQ ID NO: 248383 - DNA, 120 bp, Artificial Sequence
  ENSG00000122965_23 (sequence is synthesized)
gactccgaggtgaccctgcaggccctgcggcggaagacggccgctcactttcacgagcccccgaagaaaaagcggtctgtggtgttggacgagatcctggagcagctggaaggcagtgac

SEQ ID NO: 248384 - DNA, 120 bp, Artificial Sequence
  ENSG00000122965_24 (sequence is synthesized)
agcgacagcgaggagcagacccttcagctgtgagctggcaccgagagggtgtgtggctccggggccctggggaccgggacagccgctccagcttctgcactcaccaccatgtgggctggg

SEQ ID NO: 248385 - DNA, 120 bp, Artificial Sequence
  ENSG00000122965_25 (sequence is synthesized)
gggcggggcggggagcggcaggcggccccaccctgcactggtccaaggtcggaggagacaggggatgaggaaggcctcaggccactgcccagcggcccaggcatcctgggtttcaccagt

SEQ ID NO: 248386 - DNA, 120 bp, Artificial Sequence
  ENSG00000122965_26 (sequence is synthesized)
gacgcgttctagcagacactgactgcgcacctgctctgtagcagacacggaagagtccaagggagcagccacgttaggaagagagacttgggaacagctacacagggagctagaacccct

SEQ ID NO: 248387 - DNA, 120 bp, Artificial Sequence
  ENSG00000122965_27 (sequence is synthesized)
gctccccctgtccccaccccaggagagtaaggggacgagggccagctctctggcatcaggctgcttggacatgaaaccccgtctccaagctcaagctgggagaccctggcccagtttcct

SEQ ID NO: 248388 - DNA, 120 bp, Artificial Sequence
  ENSG00000122965_28 (sequence is synthesized)
tatctccttgggcccagccttccccttgctagctagttcttacttcataaggttttagagagaaataaacgcagtaatgcatgaagagtgccgggcatggtgctgagccctgttcctgct

SEQ ID NO: 248389 - DNA, 120 bp, Artificial Sequence
  ENSG00000122965_29 (sequence is synthesized)
ctccctccagggctgctgagctagaattcccacctatgtctttccaagggactgttcacggcttgggacttggtctctgtcctgccccatcctcgtcacttgggaccacgagccctggtt

SEQ ID NO: 248390 - DNA, 120 bp, Artificial Sequence
  ENSG00000122965_30 (sequence is synthesized)
cagtcacccagggaagcctcccagcggctcatgaagcatcgagctccaagcccagatgccaagctccctggctgagctgaatgatgtcactcatggtggacgcgttctgctcacgggccc

SEQ ID NO: 248391 - DNA, 120 bp, Artificial Sequence
  ENSG00000122965_31 (sequence is synthesized)
agagccctgtgaaatgcatcaaggtcctctccgctggccagcagcatccccaggcttctctcaggcgcccgtgttcacattttctccagcctgagacgcagcctcccgcctggaagggcc

SEQ ID NO: 248392 - DNA, 120 bp, Artificial Sequence
  ENSG00000122965_32 (sequence is synthesized)
tgtgccagcaccaggcagagggcaagacggagagggcagagcaagaactgcactgcatctcactgcagtctgaatctagacatcgccattccccgaggtgcgacctcagactaatgacat

SEQ ID NO: 248393 - DNA, 120 bp, Artificial Sequence
  ENSG00000122965_33 (sequence is synthesized)
cctggctgagcctctgtttttctctctaggaaatgggggtgataattgtgcctacctcagatagacagtgccagaattaagtgagtcaagccaagtaaagcccagagaagattctcatca

SEQ ID NO: 248394 - DNA, 88 bp, Artificial Sequence
  ENSG00000122965_34 (sequence is synthesized)
agctgtgagctggcaccgagagctccctggttcaagcgattgtcccgcctcagcctcccaaggctgggattacaggtatgcaccacca

SEQ ID NO: 248395 - DNA, 120 bp, Artificial Sequence
  ENSG00000122965_35 (sequence is synthesized)
tgcccagcctgttcctaaccctttcaactggggggtctcaagtgggtgaggactccatggccacggcagcagaactgtctcttctgaaaaccagactccggggcccctgggtcagcacct

SEQ ID NO: 248396 - DNA, 120 bp, Artificial Sequence
  ENSG00000122965_36 (sequence is synthesized)
ctaggtcattccacagacttacacagtttaaagaaagagccagcgaacatggggtgatcctggggtgccactgggatcccaagccaggcccggaggtctgcctgtttcgtccccagaaac

SEQ ID NO: 248397 - DNA, 120 bp, Artificial Sequence
  ENSG00000122965_37 (sequence is synthesized)
ttgagctggcatcctccgctggtttgcactgggcacggggactggagagccaccaggccactgagcgcagcatgctatcacttctcaggaagttgtgagggtgaggagaatagccgggcc

SEQ ID NO: 248398 - DNA, 120 bp, Artificial Sequence
  ENSG00000122965_38 (sequence is synthesized)
ttgtgagggtgaggagaatagccgggcccactctgcagaggggaggaacaggcacaggctagaggcacgggctgatagagtgagtcctctccctcattcattcattcattcattcattca

SEQ ID NO: 248399 - DNA, 120 bp, Artificial Sequence
  ENSG00000122965_39 (sequence is synthesized)
gtgtgcgagacactgtgctgggtgccccagacacaagacagaaactcgggtcgctctgtgtgcctccacactggccttccctgctgcgtggacgcaggctctgtctcctaggctttaagc

SEQ ID NO: 248400 - DNA, 120 bp, Artificial Sequence
  ENSG00000122965_40 (sequence is synthesized)
cccatgcatcaggtggaagacaatttccagcagcctctgcccgcttgtttttcctcctctccttttcctgccgccttggtcttttttgtcttttgtgcagggccgtctctcgcagcgccc

SEQ ID NO: 248401 - DNA, 120 bp, Artificial Sequence
  ENSG00000122965_41 (sequence is synthesized)
gtctgtgctccgcagcgtctaggaaaggattagtgtgagcagagcacgcaggctttggtgaacagagccgagcttggtttcaacatctaattcaatttgttctgccgagattgaaatatg

SEQ ID NO: 248402 - DNA, 120 bp, Artificial Sequence
  ENSG00000122965_42 (sequence is synthesized)
aaatggttgccagtcaaacgttcaaaggacggggaagggagagtgagcgcatgctgaaatttaaattttaatgaaaatgactttaaccctttggtacaccttgcaaaatgtaacccatcc

SEQ ID NO: 248403 - DNA, 120 bp, Artificial Sequence
  ENSG00000122965_43 (sequence is synthesized)
tcccatcctgtgaaagcggcctctcgggttagagcttttccacccacttctcttccactgagcttcactaataatatgtaatcatttttttcagccgtcttaataataaaagattaatag

SEQ ID NO: 248404 - DNA, 120 bp, Artificial Sequence
  ENSG00000122965_44 (sequence is synthesized)
gcaggactttctctctgtctcaagagttgctgaagctcagcacaagttggggatcacggtgccccttcctgccactgcccgcagaggcagaacccctttacctagtgggctttttgcagt

SEQ ID NO: 248405 - DNA, 120 bp, Artificial Sequence
  ENSG00000122965_45 (sequence is synthesized)
tggccccagggctctggtgggtttgacattatttcatggatttgatgtttttgtttttgtttttgttttgatgggggttcagtgcctgatggcgaaaccccagaagatgaaaatccaaca

SEQ ID NO: 248406 - DNA, 78 bp, Artificial Sequence
  ENSG00000122965_46 (sequence is synthesized)
tgcagtggcgtgatctgggctcacctccctggttcaagcgattgtcccgcctcagcctcccaaggctgggattaccaa

SEQ ID NO: 248407 - DNA, 120 bp, Artificial Sequence
  ENSG00000122966_0 (sequence is synthesized)
gttcctcgggttcaaacgcggcggcgggaggcgcggggcggaacagatcgcagacctgggggttcgcagagccgccagtggggagatgttgaagttcaaatatggagcgcggaatccttt

SEQ ID NO: 248408 - DNA, 120 bp, Artificial Sequence
  ENSG00000122966_1 (sequence is synthesized)
ggatgctggtgctgctgaacccattgccagccgggcctccaggctgaatctgttcttccaggggaaaccaccctttatgactcaacagcagatgtctcctctttcccgagaagggatatt

SEQ ID NO: 248409 - DNA, 120 bp, Artificial Sequence
  ENSG00000122966_2 (sequence is synthesized)
agatgccctctttgttctctttgaagaatgcagtcagcctgctctgatgaagattaagcacgtgagcaactttgtccggaagtattccgacaccatagctgagttacaggagctccagcc

SEQ ID NO: 248410 - DNA, 120 bp, Artificial Sequence
  ENSG00000122966_3 (sequence is synthesized)
ttcggcaaaggacttcgaagtcagaagtcttgtaggttgtggtcactttgctgaagtgcaggtggtaagagagaaagcaaccggggacatctatgctatgaaagtgatgaagaagaaggc

SEQ ID NO: 248411 - DNA, 120 bp, Artificial Sequence
  ENSG00000122966_4 (sequence is synthesized)
tttattggcccaggagcaggtttcattttttgaggaagagcggaacatattatctcgaagcacaagcccgtggatcccccaattacagtatgcctttcaggacaaaaatcacctttatct

SEQ ID NO: 248412 - DNA, 120 bp, Artificial Sequence
  ENSG00000122966_5 (sequence is synthesized)
ggtcatggaatatcagcctggaggggacttgctgtcacttttgaatagatatgaggaccagttagatgaaaacctgatacagttttacctagctgagctgattttggctgttcacagcgt

SEQ ID NO: 248413 - DNA, 120 bp, Artificial Sequence
  ENSG00000122966_6 (sequence is synthesized)
tcatctgatgggatacgtgcatcgagacatcaagcctgagaacattctcgttgaccgcacaggacacatcaagctggtggattttggatctgccgcgaaaatgaattcaaacaagatggt

SEQ ID NO: 248414 - DNA, 120 bp, Artificial Sequence
  ENSG00000122966_7 (sequence is synthesized)
gaatgccaaactcccgattgggaccccagattacatggctcctgaagtgctgactgtgatgaacggggatggaaaaggcacctacggcctggactgtgactggtggtcagtgggcgtgat

SEQ ID NO: 248415 - DNA, 120 bp, Artificial Sequence
  ENSG00000122966_8 (sequence is synthesized)
tgcctatgagatgatttatgggagatcccccttcgcagagggaacctctgccagaaccttcaataacattatgaatttccagcggtttttgaaatttccagatgaccccaaagtgagcag

SEQ ID NO: 248416 - DNA, 120 bp, Artificial Sequence
  ENSG00000122966_9 (sequence is synthesized)
tgactttcttgatctgattcaaagcttgttgtgcggccagaaagagagactgaagtttgaaggtctttgctgccatcctttcttctctaaaattgactggaacaacattcgtaactctcc

SEQ ID NO: 248417 - DNA, 120 bp, Artificial Sequence
  ENSG00000122966_10 (sequence is synthesized)
tccccccttcgttcccaccctcaagtctgacgatgacacctccaattttgatgaaccagagaagaattcgtgggtttcatcctctccgtgccagctgagcccctcaggcttctcgggtga

SEQ ID NO: 248418 - DNA, 120 bp, Artificial Sequence
  ENSG00000122966_11 (sequence is synthesized)
agaactgccgtttgtggggttttcgtacagcaaggcactggggattcttggtagatctgagtctgttgtgtcgggtctggactcccctgccaagactagctccatggaaaagaaacttct

SEQ ID NO: 248419 - DNA, 120 bp, Artificial Sequence
  ENSG00000122966_12 (sequence is synthesized)
catcaaaagcaaagagctacaagactctcaggacaagtgtcacaagatggagcaggaaatgacccggttacatcggagagtgtcagaggtggaggctgtgcttagtcagaaggaggtgga

SEQ ID NO: 248420 - DNA, 120 bp, Artificial Sequence
  ENSG00000122966_13 (sequence is synthesized)
gctgaaggcctctgagactcagagatccctcctggagcaggaccttgctacctacatcacagaatgcagtagcttaaagcgaagtttggagcaagcacggatggaggtgtcccaggagga

SEQ ID NO: 248421 - DNA, 120 bp, Artificial Sequence
  ENSG00000122966_14 (sequence is synthesized)
tgacaaagcactgcagcttctccatgatatcagagagcagagccggaagctccaagaaatcaaagagcaggagtaccaggctcaagtggaagaaatgaggttgatgatgaatcagttgga

SEQ ID NO: 248422 - DNA, 120 bp, Artificial Sequence
  ENSG00000122966_15 (sequence is synthesized)
agaggatcttgtctcagcaagaagacggagtgatctctacgaatctgagctgagagagtctcggcttgctgctgaagaattcaagcggaaagcgacagaatgtcagcataaactgttgaa

SEQ ID NO: 248423 - DNA, 120 bp, Artificial Sequence
  ENSG00000122966_16 (sequence is synthesized)
ggctaaggatcaagggaagcctgaagtgggagaatatgcgaaactggagaagatcaatgctgagcagcagctcaaaattcaggagctccaagagaaactggagaaggctgtaaaagccag

SEQ ID NO: 248424 - DNA, 120 bp, Artificial Sequence
  ENSG00000122966_17 (sequence is synthesized)
cacggaggccaccgagctgctgcagaatatccgccaggcaaaggagcgagccgagagggagctggagaagctgcagaaccgagaggattcttctgaaggcatcagaaagaagctggtgga

SEQ ID NO: 248425 - DNA, 120 bp, Artificial Sequence
  ENSG00000122966_18 (sequence is synthesized)
agctgaggaacgccgccattctctggagaacaaggtaaagagactagagaccatggagcgtagagaaaacagactgaaggatgacatccagacaaaatcccaacagatccagcagatggc

SEQ ID NO: 248426 - DNA, 120 bp, Artificial Sequence
  ENSG00000122966_19 (sequence is synthesized)
tgataaaattctggagctcgaagagaaacatcgggaggcccaagtctcagcccagcacctagaagtgcacctgaaacagaaagagcagcactatgaggaaaagattaaagtgttggacaa

SEQ ID NO: 248427 - DNA, 120 bp, Artificial Sequence
  ENSG00000122966_20 (sequence is synthesized)
tcagataaagaaagacctggctgacaaggagacactggagaacatgatgcagagacacgaggaggaggcccatgagaagggcaaaattctcagcgaacagaaggcgatgatcaatgctat

SEQ ID NO: 248428 - DNA, 120 bp, Artificial Sequence
  ENSG00000122966_21 (sequence is synthesized)
ggattccaagatcagatccctggaacagaggattgtggaactgtctgaagccaataaacttgcagcaaatagcagtctttttacccaaaggaacatgaaggcccaagaagagatgatttc

SEQ ID NO: 248429 - DNA, 120 bp, Artificial Sequence
  ENSG00000122966_22 (sequence is synthesized)
tgaactcaggcaacagaaattttacctggagacacaggctgggaagttggaggcccagaaccgaaaactggaggagcagctggagaagatcagccaccaagaccacagtgacaagaatcg

SEQ ID NO: 248430 - DNA, 120 bp, Artificial Sequence
  ENSG00000122966_23 (sequence is synthesized)
gctgctggaactggagacaagattgcgggaggtcagtctagagcacgaggagcagaaactggagctcaagcgccagctcacagagctacagctctccctgcaggagcgcgagtcacagtt

SEQ ID NO: 248431 - DNA, 120 bp, Artificial Sequence
  ENSG00000122966_24 (sequence is synthesized)
gacagccctgcaggctgcacgggcggccctggagagccagcttcgccaggcgaagacagagctggaagagaccacagcagaagctgaagaggagatccaggcactcacggcacatagaga

SEQ ID NO: 248432 - DNA, 120 bp, Artificial Sequence
  ENSG00000122966_25 (sequence is synthesized)
tgaaatccagcgcaaatttgatgctcttcgtaacagctgtactgtaatcacagacctggaggagcagctaaaccagctgaccgaggacaacgctgaactcaacaaccaaaacttctactt

SEQ ID NO: 248433 - DNA, 120 bp, Artificial Sequence
  ENSG00000122966_26 (sequence is synthesized)
gtccaaacaactcgatgaggcttctggcgccaacgacgagattgtacaactgcgaagtgaagtggaccatctccgccgggagatcacggaacgagagatgcagcttaccagccagaagca

SEQ ID NO: 248434 - DNA, 120 bp, Artificial Sequence
  ENSG00000122966_27 (sequence is synthesized)
aacgatggaggctctgaagaccacgtgcaccatgctggaggaacaggtcatggatttggaggccctaaacgatgagctgctagaaaaagagcggcagtgggaggcctggaggagcgtcct

SEQ ID NO: 248435 - DNA, 120 bp, Artificial Sequence
  ENSG00000122966_28 (sequence is synthesized)
gggtgatgagaaatcccagtttgagtgtcgggttcgagagctgcagagaatgctggacaccgagaaacagagcagggcgagagccgatcagcggatcaccgagtctcgccaggtggtgga

SEQ ID NO: 248436 - DNA, 120 bp, Artificial Sequence
  ENSG00000122966_29 (sequence is synthesized)
gctggcagtgaaggagcacaaggctgagattctcgctctgcagcaggctctcaaagagcagaagctgaaggccgagagcctctctgacaagctcaatgacctggagaagaagcatgctat

SEQ ID NO: 248437 - DNA, 120 bp, Artificial Sequence
  ENSG00000122966_30 (sequence is synthesized)
gcttgaaatgaatgcccgaagcttacagcagaagctggagactgaacgagagctcaaacagaggcttctggaagagcaagccaaattacagcagcagatggacctgcagaaaaatcacat

SEQ ID NO: 248438 - DNA, 120 bp, Artificial Sequence
  ENSG00000122966_31 (sequence is synthesized)
tttccgtctgactcaaggactgcaagaagctctagatcgggctgatctactgaagacagaaagaagtgacttggagtatcagctggaaaacattcaggttctctattctcatgaaaaggt

SEQ ID NO: 248439 - DNA, 120 bp, Artificial Sequence
  ENSG00000122966_32 (sequence is synthesized)
gaaaatggaaggcactatttctcaacaaaccaaactcattgattttctgcaagccaaaatggaccaacctgctaaaaagaaaaagggtttatttagtcgacggaaagaggaccctgcttt

SEQ ID NO: 248440 - DNA, 120 bp, Artificial Sequence
  ENSG00000122966_33 (sequence is synthesized)
acccacacaggttcctctgcagtacaatgagctgaagctggccctggagaaggagaaagctcgctgtgcagagctagaggaagcccttcagaagacccgcatcgagctccggtccgcccg

SEQ ID NO: 248441 - DNA, 120 bp, Artificial Sequence
  ENSG00000122966_34 (sequence is synthesized)
ggaggaagctgcccaccgcaaagcaacggaccacccacacccatccacgccagccaccgcgaggcagcagatcgccatgtccgccatcgtgcggtcgccagagcaccagcccagtgccat

SEQ ID NO: 248442 - DNA, 120 bp, Artificial Sequence
  ENSG00000122966_35 (sequence is synthesized)
gagcctgctggccccgccatccagccgcagaaaggagtcttcaactccagaggaatttagtcggcgtcttaaggaacgcatgcaccacaatattcctcaccgattcaacgtaggactgaa

SEQ ID NO: 248443 - DNA, 120 bp, Artificial Sequence
  ENSG00000122966_36 (sequence is synthesized)
gtgctccacgtgcttgccagccacctgcggcttgcctgctgaatatgccacacacttcaccgaggccttctgccgtgacaaaatgaactccccaggtctccagaccaaggagcccagcag

SEQ ID NO: 248444 - DNA, 120 bp, Artificial Sequence
  ENSG00000122966_37 (sequence is synthesized)
cagcttgcacctggaagggtggatgaaggtgcccaggaataacaaacgaggacagcaaggctgggacaggaagtacattgtcctggagggatcaaaagtcctcatttatgacaatgaagc

SEQ ID NO: 248445 - DNA, 120 bp, Artificial Sequence
  ENSG00000122966_38 (sequence is synthesized)
cagagaagctggacagaggccggtggaagaatttgagctgtgccttcccgacggggatgtatctattcatggtgccgttggtgcttccgaactcgcaaatacagccaaagcagatgtccc

SEQ ID NO: 248446 - DNA, 120 bp, Artificial Sequence
  ENSG00000122966_39 (sequence is synthesized)
atacatactgaagatggaatctcacccgcacaccacctgctggcccgggagaaccctctacttgctagctcccagcttccctgacaaacagcgctgggtcaccgccttagaatcagttgt

SEQ ID NO: 248447 - DNA, 120 bp, Artificial Sequence
  ENSG00000122966_40 (sequence is synthesized)
cgcaggtgggagagtttctagggaaaaagcagaagctgatgctaaactgcttggaaactccctgctgaaactggaaggtgatgaccgtctagacatgaactgcacgctgcccttcagtga

SEQ ID NO: 248448 - DNA, 120 bp, Artificial Sequence
  ENSG00000122966_41 (sequence is synthesized)
ccaggtggtgttggtgggcaccgaggaagggctctacgccctgaatgtcttgaaaaactccctaacccatgtcccaggaattggagcagtcttccaaatttatattatcaaggacctgga

SEQ ID NO: 248449 - DNA, 120 bp, Artificial Sequence
  ENSG00000122966_42 (sequence is synthesized)
gaagctactcatgatagcaggagaagagcgggcactgtgtcttgtggacgtgaagaaagtgaaacagtccctggcccagtcccacctgcctgcccagcccgacatctcacccaacatttt

SEQ ID NO: 248450 - DNA, 120 bp, Artificial Sequence
  ENSG00000122966_43 (sequence is synthesized)
tgaagctgtcaagggctgccacttgtttggggcaggcaagattgagaacgggctctgcatctgtgcagccatgcccagcaaagtcgtcattctccgctacaacgaaaacctcagcaaata

SEQ ID NO: 248451 - DNA, 120 bp, Artificial Sequence
  ENSG00000122966_44 (sequence is synthesized)
ctgcatccggaaagagatagagacctcagagccctgcagctgtatccacttcaccaattacagtatcctcattggaaccaataaattctacgaaatcgacatgaagcagtacacgctcga

SEQ ID NO: 248452 - DNA, 120 bp, Artificial Sequence
  ENSG00000122966_45 (sequence is synthesized)
ggaattcctggataagaatgaccattccttggcacctgctgtgtttgccgcctcttccaacagcttccctgtctcaatcgtgcaggtgaacagcgcagggcagcgagaggagtacttgct

SEQ ID NO: 248453 - DNA, 120 bp, Artificial Sequence
  ENSG00000122966_46 (sequence is synthesized)
gtgtttccacgaatttggagtgttcgtggattcttacggaagacgtagccgcacagacgatctcaagtggagtcgcttacctttggcctttgcctacagagaaccctatctgtttgtgac

SEQ ID NO: 248454 - DNA, 120 bp, Artificial Sequence
  ENSG00000122966_47 (sequence is synthesized)
ccacttcaactcactcgaagtaattgagatccaggcacgctcctcagcagggacccctgcccgagcgtacctggacatcccgaacccgcgctacctgggccctgccatttcctcaggagc

SEQ ID NO: 248455 - DNA, 120 bp, Artificial Sequence
  ENSG00000122966_48 (sequence is synthesized)
gatttacttggcgtcctcataccaggataaattaagggtcatttgctgcaagggaaacctcgtgaaggagtccggcactgaacaccaccggggcccgtccacctcccgcagcagccccaa

SEQ ID NO: 248456 - DNA, 120 bp, Artificial Sequence
  ENSG00000122966_49 (sequence is synthesized)
caagcgaggcccacccacgtacaacgagcacatcaccaagcgcgtggcctccagcccagcgccgcccgaaggccccagccacccgcgagagccaagcacaccccaccgctaccgcgaggg

SEQ ID NO: 248457 - DNA, 120 bp, Artificial Sequence
  ENSG00000122966_50 (sequence is synthesized)
gcggaccgagctgcgcagggacaagtctcctggccgccccctggagcgagagaagtcccccggccggatgctcagcacgcggagagagcggtcccccgggaggctgtttgaagacagcag

SEQ ID NO: 248458 - DNA, 120 bp, Artificial Sequence
  ENSG00000122966_51 (sequence is synthesized)
caggggccggctgcctgcgggagccgtgaggaccccgctgtcccaggtgaacaaggtctgggaccagtcttcagtataaatctcagccagaaaaaccaactcctcatcttgatctgcagg

SEQ ID NO: 248459 - DNA, 120 bp, Artificial Sequence
  ENSG00000122966_52 (sequence is synthesized)
aaaacaccaaacacactatggaactctgctgatggggacccaagcgcccacgtgctcagccaccctctggctcagcggggcccagacccacctcggcacggacacccctgtctccaggag

SEQ ID NO: 248460 - DNA, 120 bp, Artificial Sequence
  ENSG00000122966_53 (sequence is synthesized)
gggcaggtggctgaggctcttcggagctgtcagcgcccggtgcctgccctgggcacctccctgcagtcatctctttgcactttgttactctttcaaagcattcacaaacttttgtaccta

SEQ ID NO: 248461 - DNA, 120 bp, Artificial Sequence
  ENSG00000122966_54 (sequence is synthesized)
gctctagcctgtaccagttagttcatcaaaggaaaccaaccgggatgctaactacaacatggttagaatcctaattagctactttaagatcctaggattggttggtttttcttttttttt

SEQ ID NO: 248462 - DNA, 120 bp, Artificial Sequence
  ENSG00000122966_55 (sequence is synthesized)
tttcctttttttttttttttttttaagacaacagaattcttaatagatttgaatagcgacgtatttcctgttgtagtcatttttagctcgaccacatcatcaggtctttgccaccgaggc

SEQ ID NO: 248463 - DNA, 120 bp, Artificial Sequence
  ENSG00000122966_56 (sequence is synthesized)
tgccaccgaggcatagtgtagaacagtcccggtcagttggccaacctcccgcagccaagtaggttcatccttgttcctgttcattctcatagatggccctgctttccccagggtgacatc

SEQ ID NO: 248464 - DNA, 120 bp, Artificial Sequence
  ENSG00000122966_57 (sequence is synthesized)
gtagccaaatgtttactgttttcattgccttttatggccttgacgacttcccctcccaccagctgagaatgtatggaggtcatcggggcctcagctcggaggcagtgacttggggccaag

SEQ ID NO: 248465 - DNA, 120 bp, Artificial Sequence
  ENSG00000122966_58 (sequence is synthesized)
ggacctcgagacgctttccttccccaccccccagcgtcatctccccagcctgctgttcccgctttccatatagctttggccaggaaagcatgcaatagacttgctcggagcccagcactc

SEQ ID NO: 248466 - DNA, 120 bp, Artificial Sequence
  ENSG00000122966_59 (sequence is synthesized)
ctgggtctcggggtcggggaggggacgggggcacccacttccttgtctgtgacggcgtgttgttccccactctgggatggggaagaggcccgtcgggagttctgcatggcagttcactgc

SEQ ID NO: 248467 - DNA, 120 bp, Artificial Sequence
  ENSG00000122966_60 (sequence is synthesized)
atgtgctgcccccttgggttgctctgccaatgtattaataccatcccatagctcctgccaaatcgagaccctctgacgacttgccgactaactggccaccacaagctgcagtctgtagca

SEQ ID NO: 248468 - DNA, 120 bp, Artificial Sequence
  ENSG00000122966_61 (sequence is synthesized)
ctgaacaaacaaaaaacaaaacgctcaagccttacgaccagagaaggatttcagcaaaccaccacctcccactcagtgtcccctccaaacttcacacttccctgcctgcagaggatgact

SEQ ID NO: 248469 - DNA, 120 bp, Artificial Sequence
  ENSG00000122966_62 (sequence is synthesized)
ctgttcacacccaatccagcgcggttctaccccacgaaactgtgactttccaaatgagcctttccctagggctagacctaagaccaggaagtttgagaaagcagccgcagctcaactctt

SEQ ID NO: 248470 - DNA, 120 bp, Artificial Sequence
  ENSG00000122966_63 (sequence is synthesized)
ccagctccgccagggttgggaagtccttaggtgcagtgcggctcccactgggtctgcggaccctcctattagagtacgaaattcctggcaactggtacagaaccaacctagaggctttgc

SEQ ID NO: 248471 - DNA, 120 bp, Artificial Sequence
  ENSG00000122966_64 (sequence is synthesized)
agttggcaagctaactcgcggccttatttctgcctttaatctcccacaaggcatctgttgctttgggtcctccacgactcttaggcccgcctcaacaacccaggcacctcctaggtaggc

SEQ ID NO: 248472 - DNA, 120 bp, Artificial Sequence
  ENSG00000122966_65 (sequence is synthesized)
tcaaaggtagacccgtttccaccgcagcaggtgaacatgaccgtgttttcaactgtgtccacagttcagatccctttccagattgcaacctggcctgcatcccagctccttcctgctcgt

SEQ ID NO: 248473 - DNA, 120 bp, Artificial Sequence
  ENSG00000122966_66 (sequence is synthesized)
gtcttaacctaagtgctttcttgtttgaaacgcctacaaacctccatgtggtagctcctttggcaaatgtcctgctgtggcgttttatgtgttgcttggagtctgtggggtcgtactccc

SEQ ID NO: 248474 - DNA, 120 bp, Artificial Sequence
  ENSG00000122966_67 (sequence is synthesized)
tcccctcccgtccccagggcagatttgattgaatgtttgctgaagttttgtctcttggtccacagtatttggaaaggtcactgaaaatgggtctttcagtcttggcatttcatttaggat

SEQ ID NO: 248475 - DNA, 120 bp, Artificial Sequence
  ENSG00000122966_68 (sequence is synthesized)
ctccatgagaaatgggcttcttgagccctgaaaatgtatattgtgtgtctcatctgtgaactgctttctgctatatagaactagctcaaaagactgtacatatttacaagaaactttata

SEQ ID NO: 248476 - DNA, 120 bp, Artificial Sequence
  ENSG00000122966_69 (sequence is synthesized)
ttcgtaaaaaaaaaaagaggaaattgaattggtttctacttttttattgtaaaaggtgcatttttcaacacttacttttggtttcaatggtggtagttgtggacagccatcttcactgga

SEQ ID NO: 248477 - DNA, 120 bp, Artificial Sequence
  ENSG00000122966_70 (sequence is synthesized)
gggtggggagctccgtgtgaccaccaagatgccagcaggatataccgtaacacgaaattgctgtcaaaagcttattagcatcaatcaagattctaggtctccaaaagtacaggctttttc

SEQ ID NO: 248478 - DNA, 120 bp, Artificial Sequence
  ENSG00000122966_71 (sequence is synthesized)
ttcattaccttttttattcagaacgaggaagagaacacaaggaatgattcaagatccaccttgagaggaatgaactttgttgttgaacaattagtgaaataaagcaatgatctaaactaa

SEQ ID NO: 248479 - DNA, 120 bp, Artificial Sequence
  ENSG00000122966_72 (sequence is synthesized)
agatatgtatttgttgggtgagttgctttacacaggattgctgggtcaaagaatgcattgcagtcagattttgattttccctcttttcaccattctttggcccacactgtgcctgcatgg

SEQ ID NO: 248480 - DNA, 120 bp, Artificial Sequence
  ENSG00000122966_73 (sequence is synthesized)
ctggcccctggcaggcaggcggcagccaggtggggttccagccagagcacgcacgcacggagccgggagcatgcagcctgcactgcgggggatgtgatgctcggctctaactcgcctggc

SEQ ID NO: 248481 - DNA, 120 bp, Artificial Sequence
  ENSG00000122966_74 (sequence is synthesized)
tggcccgccacggacgcctcagcttgcaaccatggtaacgtttctggcgggggacacccccgggagcccaccgcgatgggcagcctcctggtgactgatggacgagtgtccacctcccag

SEQ ID NO: 248482 - DNA, 120 bp, Artificial Sequence
  ENSG00000122966_75 (sequence is synthesized)
accgagagcgcttagtaggtcggaggaagtggagaggatgtaacacgcccccagccgggagtgaagccctgaggaggtaggagccgcatatgtccatccgtgcattcccaccgtcagcgc

SEQ ID NO: 248483 - DNA, 120 bp, Artificial Sequence
  ENSG00000122966_76 (sequence is synthesized)
tccgtatatgccaagggatccgcccggggccgctgctggctctgagccgcctgatccgtagagagtgaggcgctcctgccttcgctgaagtcgcgcctccagcagctcagagggagatga

SEQ ID NO: 248484 - DNA, 120 bp, Artificial Sequence
  ENSG00000122966_77 (sequence is synthesized)
attcgggccttgctgttgctgtaaatcctttaaatctaaaccagaggaggccctggatttaaacagtccgtttctcagcatgacccagccagatgtctgcttcttccggcaggtggcctg

SEQ ID NO: 248485 - DNA, 120 bp, Artificial Sequence
  ENSG00000122966_78 (sequence is synthesized)
ggtcctcacctgtggctgagatacatcccatctgctttgagtgatgcgaagtctctcttcctagtcttttaaaactcctgcttatgtcactgcggccactgtgttgattacgctcaacgt

SEQ ID NO: 248486 - DNA, 120 bp, Artificial Sequence
  ENSG00000122966_79 (sequence is synthesized)
ctcttaacattcactgttcctgcccagaggcaacgctctggaaactaataagtcactgcttgcctgggactcctaagagtgcagacgaataaatatctccttgccctgtcctggatttgt

SEQ ID NO: 248487 - DNA, 120 bp, Artificial Sequence
  ENSG00000122966_80 (sequence is synthesized)
cctctagatctttgcaaggagatggggggggatcaagatggatttgggataaaattaaagtgacgtctgcaaaaacaaaacaaaaacaaaagcaaacaggtgaaaaatgatgattgtggc

SEQ ID NO: 248488 - DNA, 120 bp, Artificial Sequence
  ENSG00000122966_81 (sequence is synthesized)
ttccttgctaactgggttagagaagtgatcaagtgtgaaccgggacttgaatgagaggagtgacttagcatttggtgactgtccttaacgaagaactgtgcgctcctgggcgaagaaaca

SEQ ID NO: 248489 - DNA, 120 bp, Artificial Sequence
  ENSG00000122966_82 (sequence is synthesized)
ctttctgcaggggcctggcaccaggggaagctcaggagactacctgcaagccagggccagactctctgggcccggctggggtagagaagcccaggcgttggctggcagaggaagggaagg

SEQ ID NO: 248490 - DNA, 120 bp, Artificial Sequence
  ENSG00000122966_83 (sequence is synthesized)
acggcgcctttgcacttctgctgcagccttatgggggaaggagtctttcatgtgtcttattaaccctgcgcaggtgaaatctccttagcttcagcttatttcttattacagaatagcttt

SEQ ID NO: 248491 - DNA, 120 bp, Artificial Sequence
  ENSG00000122966_84 (sequence is synthesized)
ccatgtctactaccctcccttatttctgcatcccagccaaattataactcagatgctaattaacagctgccccagagataccaatagcactcgcattttgcatttggagctcagatcaaa

SEQ ID NO: 248492 - DNA, 120 bp, Artificial Sequence
  ENSG00000122966_85 (sequence is synthesized)
tttccaggaataacttggccttaaccttctcttggtttctctggatggtttggtcataaacagatcagcctcacgatgtcttctgtttttcttttctttcacctatgaaaagaaactgct

SEQ ID NO: 248493 - DNA, 120 bp, Artificial Sequence
  ENSG00000122966_86 (sequence is synthesized)
gcgaaggctttgttttttggactgccttgcaagccttctacgcttttccatttttgaaacttacaaaccaaatgacttctctaaaggttattggtgcgatactcacatctataggtctcc

SEQ ID NO: 248494 - DNA, 120 bp, Artificial Sequence
  ENSG00000122966_87 (sequence is synthesized)
agttggagggaagagggaaaatactcatcttttcagaatgggaataggacaaatgaaggagagtaaaacttcatcctttattgctttttttcccttttctcctaatagcctgtaggtgtt

SEQ ID NO: 248495 - DNA, 120 bp, Artificial Sequence
  ENSG00000122966_88 (sequence is synthesized)
aatataaatgttaaaaatatttgtacagggtgtgcatgtatggtctaaagaattaattgttattaacacagcattgtgtattcctgtaacttatttctggtgttggggatgatttgatta

SEQ ID NO: 248496 - DNA, 120 bp, Artificial Sequence
  ENSG00000122966_89 (sequence is synthesized)
acatgccatttttactaaatacacttacagtgagtatgctcctggcttttgtggtttgctcctcccgagtcagatttcctttagctagtttcaagtgccagtttccaggagttaggagat

SEQ ID NO: 248497 - DNA, 120 bp, Artificial Sequence
  ENSG00000122966_90 (sequence is synthesized)
atgatggctccatgaggcacatcacagccaatggcagagagtagagagagggagagcacaaaagcaagatctgtgttttgcagagtagtgagagccaggcgtaaggtccccaagaaatga

SEQ ID NO: 248498 - DNA, 120 bp, Artificial Sequence
  ENSG00000122966_91 (sequence is synthesized)
gattggactcatttccagcagaaagtgcaggtagacggctggtaccatggagtctggagatgggagtaatccatctttgccgcaagttgcaaaagatcttaacatctcccatcccagcct

SEQ ID NO: 248499 - DNA, 120 bp, Artificial Sequence
  ENSG00000122966_92 (sequence is synthesized)
ctgtggtctgcgttgtgtctgacatgagcagccttgagaaccagactcccaactatgtacaagaaaacttactttcaatcttcctgacatcaaattttccattggccagaaccagtgtag

SEQ ID NO: 248500 - DNA, 120 bp, Artificial Sequence
  ENSG00000122966_93 (sequence is synthesized)
tgacaagaaaatagccttgaaaacccagaccctctgtcattatttaccatgtgactttcattttttctttccttcacaagagtagactgtcttcttctccattgtcttgttaaatttttc

SEQ ID NO: 248501 - DNA, 120 bp, Artificial Sequence
  ENSG00000122966_94 (sequence is synthesized)
caggtgttttttaatgtgcccaattaaacagtctcaagaagttgaatcacacatttctaaagtttttttcacaagggagaggaaatctatagaacgtggctgattaagaataactgctat

SEQ ID NO: 248502 - DNA, 120 bp, Artificial Sequence
  ENSG00000122966_95 (sequence is synthesized)
gtttccattccagacttggctgcctttcagtggtgggtgaagttattcagctatgtatttcagatatagatttcagtgccattgaagcattaagggattcttatggatgaaaggtgtcca

SEQ ID NO: 248503 - DNA, 120 bp, Artificial Sequence
  ENSG00000122966_96 (sequence is synthesized)
ggaaaaataagccaggaggtagaaatagaccacttggagtcttaaatgacaactgggcagaggatatgaagtcattgctactttgaaagaggcatatgtactttagggcccacaaataac

SEQ ID NO: 248504 - DNA, 120 bp, Artificial Sequence
  ENSG00000122966_97 (sequence is synthesized)
tgtagaaaacactttgtagctatccacatggtggctgtaatagctactgggtcttaataggttttagtcctgaacatgcaagtaagtatctcctaggacaggtagatggtggcaggagac

SEQ ID NO: 248505 - DNA, 120 bp, Artificial Sequence
  ENSG00000122966_98 (sequence is synthesized)
aggctgatgcagtttccggctggatccctaaggtcaccaggttgagatgatgtttcttgaaccaaggggttttacaggatggaaaccggagtcggcaaccaactggaagttgtgaactgt

SEQ ID NO: 248506 - DNA, 120 bp, Artificial Sequence
  ENSG00000122966_99 (sequence is synthesized)
ggtccgtcactcgaaactgtcctggtgtctgcgaagcagcttgcagctctcttaatgagtcttttcaaacaaagcaggatccacagggcatccctattaaaatttttgctttctgcagag

SEQ ID NO: 248507 - DNA, 120 bp, Artificial Sequence
  ENSG00000122966_100 (sequence is synthesized)
aggcctgcttgcctgggagcacagcagcatctcggcttgcttggacctctaatttcaggagaggcgtgtttgagagagaaataggaagaaagggagagagagaaagggtgggggcagagt

SEQ ID NO: 248508 - DNA, 120 bp, Artificial Sequence
  ENSG00000122966_101 (sequence is synthesized)
ggaagagagacaggtatgtaggtcattcagaaacttcagatttctcataatttatatacatcatagaatgcttgttccagctccttttgaagctgataccccataatgtctgcttttaaa

SEQ ID NO: 248509 - DNA, 120 bp, Artificial Sequence
  ENSG00000122966_102 (sequence is synthesized)
aataaagatgtaggtttagagcaagagtgggcagacttcagcctgtggggcaaagctggtccaacacctattttctatggcccacaagctaagaatggggttacgtttttaaacagttgg

SEQ ID NO: 248510 - DNA, 120 bp, Artificial Sequence
  ENSG00000122966_103 (sequence is synthesized)
cgctcctcagcagggtaagcattgtcctcccatgcgtggaaaacttcagctattggggtaggtgttggggccggccgcatgttccttcctaacttgcctagcaatggaggtagcctgcaa

SEQ ID NO: 248511 - DNA, 120 bp, Artificial Sequence
  ENSG00000122970_0 (sequence is synthesized)
gttgccaaggagctcgactctgggagcggtctagagcccgggcgcctcctggggggtggggaaacggtttcgtgaggagaatttgaggtaacctcgccaactcgcggtcggaagctcctc

SEQ ID NO: 248512 - DNA, 120 bp, Artificial Sequence
  ENSG00000122970_1 (sequence is synthesized)
tgaaccccgaaataggagagagctcccgtcctctctcggtcctgatgcagcacctcgcaagtggaaggggtcgtcgcggttaagcccccggataggggaatcgggccccttctgggattc

SEQ ID NO: 248513 - DNA, 120 bp, Artificial Sequence
  ENSG00000122970_2 (sequence is synthesized)
gagcggatccaggccgctccctggagggatgaactgtcgaggggcccagggcagcccccgctagaggcccggtcgggtgtggggtcccctgtcccctgtcccgagcccggggagggggac

SEQ ID NO: 248514 - DNA, 120 bp, Artificial Sequence
  ENSG00000122970_3 (sequence is synthesized)
actatttctggtactcccaggaggctgcgggtcgatgctcgtgccagcctgggacccaggcagcacggtttctctcccaaattgtgccagagaacacgcacgtcctggttttcattgttc

SEQ ID NO: 248515 - DNA, 120 bp, Artificial Sequence
  ENSG00000122970_4 (sequence is synthesized)
cccgcctcctgcgactcgtttgtggttaaaattataagacctaattatgagtgatcaaattaaattcattatggacagtctcaataaggagccctttaggaagaactataatttaatcac

SEQ ID NO: 248516 - DNA, 120 bp, Artificial Sequence
  ENSG00000122970_5 (sequence is synthesized)
gtttgattccttggagccaatgcaactattacaagttctcagtgatgttctggctgagattgacccaaagcaacttgtggatatcagagaggagatgccagagcagacagccaaacgaat

SEQ ID NO: 248517 - DNA, 120 bp, Artificial Sequence
  ENSG00000122970_6 (sequence is synthesized)
gttgagccttcttggtattcttaagtacaaaccttcaggaaatgccacagatatgagtacttttcgtcagggtttggtgattggaagtaaacctgtaatttacccagtgctccactggct

SEQ ID NO: 248518 - DNA, 120 bp, Artificial Sequence
  ENSG00000122970_7 (sequence is synthesized)
tcttcagaggactaatgaactgaagaaaagagcatatttagctcgttttttaataaaacttgaggtaccaagtgagtttcttcaggatgaaactgtggctgacaccaataaacagtatga

SEQ ID NO: 248519 - DNA, 120 bp, Artificial Sequence
  ENSG00000122970_8 (sequence is synthesized)
agagttaatggaagcctttaaaactttgcataaagaatatgagcagctcaagatatctggattttctacagcagaaataagaaaggatatcagtgcaatggaagaagaaaaggatcagct

SEQ ID NO: 248520 - DNA, 120 bp, Artificial Sequence
  ENSG00000122970_9 (sequence is synthesized)
cattaagagagttgaacatttgaagaaaagggttgagacagctcagaatcatcaatggatgcttaaaatagcaaggcaacttcgagttgaaaaagagagagaagaatatcttgcacaaca

SEQ ID NO: 248521 - DNA, 120 bp, Artificial Sequence
  ENSG00000122970_10 (sequence is synthesized)
gaaacaggaacaaaagaatcagctatttcatgcagtgcaaagattgcaaagagtacaaaaccagctgaaaagcatgcgccaagctgcagcagatgcaaagcctgaaagtttaatgaagag

SEQ ID NO: 248522 - DNA, 120 bp, Artificial Sequence
  ENSG00000122970_11 (sequence is synthesized)
gctagaggaggagataaaatttaatttatatatggtaactgaaaaatttcctaaagaattagaaaataagaaaaaggaattacattttttacaaaaagtagtttcagagccagctatggg

SEQ ID NO: 248523 - DNA, 120 bp, Artificial Sequence
  ENSG00000122970_12 (sequence is synthesized)
ccattctgatcttcttgaacttgaatctaaaataaatgaaataaacacagaaattaaccagttgattgaaaagaaaatgatgagaaatgagcccattgaaggcaaactctcactgtatag

SEQ ID NO: 248524 - DNA, 120 bp, Artificial Sequence
  ENSG00000122970_13 (sequence is synthesized)
caggcatctatcatttcccgtaaaaaagaagccaaagctgaggaacttcaggaggccaaggagaagttagccagcctagagagagaagcatcagtaaagagaaatcagacccgtgaattt

SEQ ID NO: 248525 - DNA, 120 bp, Artificial Sequence
  ENSG00000122970_14 (sequence is synthesized)
gatggtactgaagttttaaagggagatgagttcaaacgatatgtcaataaacttcgaagcaagagtacagttttcaaaaagaagcatcagataatagctgaacttaaagctgaattcggt

SEQ ID NO: 248526 - DNA, 120 bp, Artificial Sequence
  ENSG00000122970_15 (sequence is synthesized)
cttttgcagaggactgaagaacttcttaagcaacgtcatgaaaatattcaacaacaactgcaaactatggaggagaaaaagggtatatctggatatagttacacccaagaagagctagaa

SEQ ID NO: 248527 - DNA, 120 bp, Artificial Sequence
  ENSG00000122970_16 (sequence is synthesized)
agagtatctgcactgaagagtgaagttgatgaaatgaaaggacgaacattggatgatatgtctgaaatggtgaaaaaactgtattcattggtatctgaaaagaagtcagctcttgcctca

SEQ ID NO: 248528 - DNA, 120 bp, Artificial Sequence
  ENSG00000122970_17 (sequence is synthesized)
gttataaaagagctacgacagttgcgtcaaaaatatcaagaactgacccaggagtgtgatgaaaagaaatcccagtatgatagctgtgcagcaggcctcgaaagcaatcggtccaaatta

SEQ ID NO: 248529 - DNA, 120 bp, Artificial Sequence
  ENSG00000122970_18 (sequence is synthesized)
gaacaggaagttagaagactccgtgaagaatgtcttcaagaagaaagtagataccattatacaaattgtatgattaagaacctagaagttcaacttcgtcgtgctactgatgagatgaag

SEQ ID NO: 248530 - DNA, 120 bp, Artificial Sequence
  ENSG00000122970_19 (sequence is synthesized)
gcatatatctcttctgatcaacaagaaaaaagaaaggcaattagggaacagtataccaaaaatactgctgaacaagaaaaccttggaaagaaacttcgggaaaaacaaaaagttatacga

SEQ ID NO: 248531 - DNA, 120 bp, Artificial Sequence
  ENSG00000122970_20 (sequence is synthesized)
gaaagtcatggtccaaatatgaaacaagcaaaaatgtggcgtgatttggaacaattaatggaatgtaagaaacagtgctttctgaaacaacaaagccaaacttccattggtcaggtaatt

SEQ ID NO: 248532 - DNA, 120 bp, Artificial Sequence
  ENSG00000122970_21 (sequence is synthesized)
caggagggtggggaggaccggctaatactgtgaattcttgtgtcatcgtttggggttttacttgataccactagctataagcctaatctcataatgtatttcttttttgaaactgatttg

SEQ ID NO: 248533 - DNA, 120 bp, Artificial Sequence
  ENSG00000122970_22 (sequence is synthesized)
tatagcattttgttttcagaagagccattctttattaagttttcatagaaaataatgttaaggtagatttagtttgaatgttttttcatatgaaaaagaggcttttattcttttccatag

SEQ ID NO: 248534 - DNA, 120 bp, Artificial Sequence
  ENSG00000122970_23 (sequence is synthesized)
tttagacatcactggcgtcttctgagttttatgagacaggaaactaagtttactatctgtaaatgtaaacatatgtccattaagaaacatgtagtttttttttagaatgtaataacccag

SEQ ID NO: 248535 - DNA, 120 bp, Artificial Sequence
  ENSG00000122970_24 (sequence is synthesized)
tggcttactgtttttcttaatctcttttaaaaaaactttagaagaatcttttaggaactaatatctcttgttctgaagaaacatttatctgacgttcagcagttcctacagttttacttc

SEQ ID NO: 248536 - DNA, 120 bp, Artificial Sequence
  ENSG00000122970_25 (sequence is synthesized)
agtttatttttcttctgtaaaatgcaagaaaatttaatattttgactaacatgtcttttctgtttgtatcatttaaaggcaaataaacttggtacgtatttcatatctatttaaaaaatg

SEQ ID NO: 248537 - DNA, 120 bp, Artificial Sequence
  ENSG00000122970_26 (sequence is synthesized)
gtaactctacggcctagcaaccgttgccaaggagctcgactctgggagcggtctagagcccgggcgcctcctggggggtggggaaacggtttcgtgaggagaatttgagttaaaattata

SEQ ID NO: 248538 - DNA, 85 bp, Artificial Sequence
  ENSG00000122970_27 (sequence is synthesized)
acccaggctggagtgcggtggtgtgatcatggcttactgcagcctgaaactcctaagctcggactacaggcacgagccaccatgc

SEQ ID NO: 248539 - DNA, 120 bp, Artificial Sequence
  ENSG00000122970_28 (sequence is synthesized)
gcacgagccaccatgcccagctaattttctttttttgttttgttttgtagagatgtggtctcactatgtttcccaggctggtcttaaactcccggcctcaagcagtcctcccacttcggc

SEQ ID NO: 248540 - DNA, 120 bp, Artificial Sequence
  ENSG00000122970_29 (sequence is synthesized)
tcccacttcggcctcctgaagtgttaggattacaggcgtgagcctgcgcctggctgtaattactatacccagtttttacagataaaggatctgagacatgcagaggttttaagctgactt

SEQ ID NO: 248541 - DNA, 120 bp, Artificial Sequence
  ENSG00000122970_30 (sequence is synthesized)
gcctgacaccccattgctagtaagtagtagaaccaggagttggatttagcagtctggctgtagagtcatcaatagtttgcacatgacagaaagctggaagaaatagtcaacctgaaacac

SEQ ID NO: 248542 - DNA, 120 bp, Artificial Sequence
  ENSG00000122970_31 (sequence is synthesized)
atgatggaattataattcagaatcatcttggtagataggggcactgtgcttaaacaaaatgccattaatgggattataataaatataatgtggtagaattcaagttttgtttgccaattc

SEQ ID NO: 248543 - DNA, 120 bp, Artificial Sequence
  ENSG00000122970_32 (sequence is synthesized)
aacacatcatctgttactaacgcagctttaaaaaatgcataaacgattatactacattaatttttttaaaaagtatcctgtttatggtctgattatgcctggagtattattttatatttt

SEQ ID NO: 248544 - DNA, 120 bp, Artificial Sequence
  ENSG00000122970_33 (sequence is synthesized)
tgacttcatgttttaagagacaatcatgccagagtcccacatgagggtgactaaaatggacaaaaagtctggaaactttcatatcaataattgattatgtattaactgaaacaaaagact

SEQ ID NO: 248545 - DNA, 120 bp, Artificial Sequence
  ENSG00000122970_34 (sequence is synthesized)
agagaaagacacagtgggaattgattatgtattaactgaggaataaaagactgaagaaagacataataaatagttaaaggattatggaaaagatggtgttcagaaaaaaattaacatgca

SEQ ID NO: 248546 - DNA, 120 bp, Artificial Sequence
  ENSG00000122970_35 (sequence is synthesized)
ggcctgagactgctatccctagaaaggtctgcttgcaaagttggcccttggctggcatctgggggaacttggttcttggatggattcctgccattcactgataagaatggctcaccttgc

SEQ ID NO: 248547 - DNA, 120 bp, Artificial Sequence
  ENSG00000122970_36 (sequence is synthesized)
actgataagaatggctcaccttgcctaaagtatatgaagagtgtgctttatgtcgagctcctgcttgcttgcctctttctttgtctttctttcttttccttcctcccttccttccttcct

SEQ ID NO: 248548 - DNA, 83 bp, Artificial Sequence
  ENSG00000122970_37 (sequence is synthesized)
tctttcttctttctggaattttggtacaggctaggcagaatgtgcctagatgatcagctcctagtaaaaaccttgagaactaa

SEQ ID NO: 248549 - DNA, 120 bp, Artificial Sequence
  ENSG00000122970_38 (sequence is synthesized)
gttctatctcatctcgtgcctaactcccttgggccaattcctgtagttgtctatgcttatacatcgtttgatgaaataactgacaaagatgtgatttaattaagaaatggaaaatagcat

SEQ ID NO: 248550 - DNA, 120 bp, Artificial Sequence
  ENSG00000122970_39 (sequence is synthesized)
cttgttctctgtagctttcaatcctttatacatagtgttccttttttttaaatactgtcttccccttgttcatcttccacctaactgttcttactaatccttcgtgattagcttagatat

SEQ ID NO: 248551 - DNA, 120 bp, Artificial Sequence
  ENSG00000122970_40 (sequence is synthesized)
caatttctccaggaaattgtccccactgatccccaagcctgggttaggttcccgggagtcctgtgtgccttctgtaacaccttgtgttttcctatcatagctctcagcagcctgtttact

SEQ ID NO: 248552 - DNA, 120 bp, Artificial Sequence
  ENSG00000122970_41 (sequence is synthesized)
tgtctgaacattacttgagaggaagaatttttggctgttttattcactattgtctccccagctcctaacaaagaacctggcacacagctcaatacatggtagctattattattatcagca

SEQ ID NO: 248553 - DNA, 120 bp, Artificial Sequence
  ENSG00000122970_42 (sequence is synthesized)
ccttcatctatcataattctcaaatgtctggttgttgcataaataactcttaagtatgccaagaagcttagagttaagttacaagactgacaagggcatgcattgtttcagagccatgtt

SEQ ID NO: 248554 - DNA, 120 bp, Artificial Sequence
  ENSG00000122970_43 (sequence is synthesized)
tgggacctttgtttttcacttattcaatcattttccctttttatactaggaactgacccaggagtgtgatgaaaagaaatcccagtatgatagctgtgcagcaggcctcgaaagcaatcg

SEQ ID NO: 248555 - DNA, 120 bp, Artificial Sequence
  ENSG00000122970_44 (sequence is synthesized)
gctgtgcagcaggcctcgaaagcaatcggtccaaattagaacaggtaagaagagagtttttattttaacaatttagcaaaaactacctgtgtgtacacctgtagtcccagctactctgga

SEQ ID NO: 248556 - DNA, 120 bp, Artificial Sequence
  ENSG00000122970_45 (sequence is synthesized)
ctacagtgagctatgatcacaccactgcattctagcctgggccacagagcaagactctctctctaaaaaaaatgttttaaatactgcccgtgtacgcacattttcactacatcaatgtca

SEQ ID NO: 248557 - DNA, 120 bp, Artificial Sequence
  ENSG00000122970_46 (sequence is synthesized)
acatcaatgtcaaaagattcccaaatctttatcatcatctcctaagctccagagatctttatttctttaatttgtacacacttaatttcccatctgtaccactcccagcaaagtacaagg

SEQ ID NO: 248558 - DNA, 120 bp, Artificial Sequence
  ENSG00000122970_47 (sequence is synthesized)
ctcattatctgctgcctggcctcccacagtaaactcttacctattctcttgcttctactcttgctctcctaaggtttattcttcatagggaagcctaagaaacctgtttaaaatttttgc

SEQ ID NO: 248559 - DNA, 120 bp, Artificial Sequence
  ENSG00000122970_48 (sequence is synthesized)
cacccttcattggcttcctgttgcacttaaaataaaatctaaccaccaaactatggtctacaaggccccacctgccttatgaacttcatgtccatgtgctctactcctcatccatggagc

SEQ ID NO: 248560 - DNA, 120 bp, Artificial Sequence
  ENSG00000122970_49 (sequence is synthesized)
ttcagccactctgaccttcttcctgagctttaaacaggccaagcttgttttcactttgggattttgcatgtactcttcccttctgcgtgatatactctgctcctaactcttcgccctccc

SEQ ID NO: 248561 - DNA, 120 bp, Artificial Sequence
  ENSG00000122970_50 (sequence is synthesized)
tacccactcttcttcccaacctggcccacccagtccctctatcacattctactgatggatttccttcatagcgcttatccccatctcaaatatccttcattatgtttccttgtttatgtt

SEQ ID NO: 248562 - DNA, 120 bp, Artificial Sequence
  ENSG00000122970_51 (sequence is synthesized)
ggtttcttctacttcagtgaaagcagggaacctgcctgttcacttctgtgtcctcagcacttagaacagtgctggacacacagtaggtacttaataaatgtatgattgggccagatgcag

SEQ ID NO: 248563 - DNA, 82 bp, Artificial Sequence
  ENSG00000122970_52 (sequence is synthesized)
agatgcagggcgggaggatcacttgaggctaggagttcgagatcagcctggccaacccggtgaaaccctgtctctactaaaa

SEQ ID NO: 248564 - DNA, 120 bp, Artificial Sequence
  ENSG00000122970_53 (sequence is synthesized)
agagtgagactctgtctcaaaaaatacaattgaacttgcaggttatagagtgatatgtgtattctctagaaaaagattatctcttattgtgctagaataaacaaagttaaaattgcagaa

SEQ ID NO: 248565 - DNA, 120 bp, Artificial Sequence
  ENSG00000122970_54 (sequence is synthesized)
aaaattgcagaagaggaaatgactctgatggtagtcctttgttgtacatctaaagtcatcgtcgccatatctgtctcattctttcgataatgtcacctatctaaaattatatattatagg

SEQ ID NO: 248566 - DNA, 60 bp, Artificial Sequence
  ENSG00000122970_55 (sequence is synthesized)
aaagaaaggcaattagggaacagtataccaaaaatactgctgaacaagaaaaccttggaa

SEQ ID NO: 248567 - DNA, 120 bp, Artificial Sequence
  ENSG00000122970_56 (sequence is synthesized)
ctcctgacttcaggtgatctgcccacctatatagcatgagtcctgttttccacttgaaactccaagcatacctgacatataacagaaacttcgggaaaaacaaaaagttatacgagaaag

SEQ ID NO: 248568 - DNA, 120 bp, Artificial Sequence
  ENSG00000122971_0 (sequence is synthesized)
actccggaacagcgcgctcgcagcgggaggtcgcgaagcctgggactgtgtctgtcgcccatggccgccgcgctgctcgcccgggcctcgggccctgcccgcagagctctctgtcctagg

SEQ ID NO: 248569 - DNA, 120 bp, Artificial Sequence
  ENSG00000122971_1 (sequence is synthesized)
gcctggcggcagttacacaccatctaccagtctgtggaactgcccgagacacaccagatgttgctccagacatgccgggactttgccgagaaggagttgtttcccattgcagcccaggtg

SEQ ID NO: 248570 - DNA, 120 bp, Artificial Sequence
  ENSG00000122971_2 (sequence is synthesized)
gataaggaacatctcttcccagcggctcaggtgaagaagatgggcgggcttgggcttctggccatggacgtgcccgaggagcttggcggtgctggcctcgattacctggcctacgccatc

SEQ ID NO: 248571 - DNA, 120 bp, Artificial Sequence
  ENSG00000122971_3 (sequence is synthesized)
gccatggaggagatcagccgtggctgcgcctccaccggagtcatcatgagtgtcaacaactctctctacctggggcccatcttgaagtttggctccaaggagcagaagcaggcgtgggtc

SEQ ID NO: 248572 - DNA, 120 bp, Artificial Sequence
  ENSG00000122971_4 (sequence is synthesized)
acgcctttcaccagtggtgacaaaattggctgctttgccctcagcgaaccagggaacggcagtgatgcaggagctgcgtccaccaccgcccgggccgagggcgactcatgggttctgaat

SEQ ID NO: 248573 - DNA, 120 bp, Artificial Sequence
  ENSG00000122971_5 (sequence is synthesized)
ggaaccaaagcctggatcaccaatgcctgggaggcttcggctgccgtggtctttgccagcacggacagagccctgcaaaacaagggcatcagtgccttcctggtccccatgccaacgcct

SEQ ID NO: 248574 - DNA, 120 bp, Artificial Sequence
  ENSG00000122971_6 (sequence is synthesized)
gggctcacgttggggaagaaagaagacaagctgggcatccggggctcatccacggccaacctcatctttgaggactgtcgcatccccaaggacagcatcctgggggagccagggatgggc

SEQ ID NO: 248575 - DNA, 120 bp, Artificial Sequence
  ENSG00000122971_7 (sequence is synthesized)
gggcattgcccagaccgccctcgattgtgctgtgaactacgctgagaatcgcatggccttcggggcgcccctcaccaagctccaggtcatccagttcaagttggcagacatggccctggc

SEQ ID NO: 248576 - DNA, 120 bp, Artificial Sequence
  ENSG00000122971_8 (sequence is synthesized)
cctggagagtgcccggctgctgacctggcgcgctgccatgctgaaggataacaagaagcctttcatcaaggaggcagccatggccaagctggccgcctcggaggccgcgaccgccatcag

SEQ ID NO: 248577 - DNA, 120 bp, Artificial Sequence
  ENSG00000122971_9 (sequence is synthesized)
ccaccaggccatccagatcctgggcggcatgggctacgtgacagagatgccggcagagcggcactaccgcgacgcccgcatcactgagatctacgagggcaccagcgaaatccagcggct

SEQ ID NO: 248578 - DNA, 120 bp, Artificial Sequence
  ENSG00000122971_10 (sequence is synthesized)
ggtgatcgccgggcatctgctcaggagctaccggagctgagcccgcggcggactgccccaggactgcgggaaggcgcgggagccaggggcctccaccccaaccccggctcagagactggg

SEQ ID NO: 248579 - DNA, 120 bp, Artificial Sequence
  ENSG00000122971_11 (sequence is synthesized)
cggcccggcgggggctccctggggaccccagatgggctcagtgctgccacccagatcagatcacatgggaatgaggccctccgaccattggcagctccgcctctgggcctttccgcctcc

SEQ ID NO: 248580 - DNA, 120 bp, Artificial Sequence
  ENSG00000122971_12 (sequence is synthesized)
tcaccactgtgcctcaagttcctcatctaagtggccctggcctcctgggggcggggttgtgggggggctgagcgacactcagggacacctcagttgtcctcccgcgggccctggtgccct

SEQ ID NO: 248581 - DNA, 120 bp, Artificial Sequence
  ENSG00000122971_13 (sequence is synthesized)
ggcatgaaggcccagtgcgacaggcccttggtggggtctgtcttttccttgaggtcagaggtcaggagcagggctggggtcaggatgacgaggcctggggtcctggtgttgggcaggtgg

SEQ ID NO: 248582 - DNA, 120 bp, Artificial Sequence
  ENSG00000122971_14 (sequence is synthesized)
tggggctgggccatggagctggcccagaggcccctcagccctttgtaaagtctgatgaaggcaggggtggtgattcatgctgtgtgactgactgtgggtaataaacacacctgtccccca

SEQ ID NO: 248583 - DNA, 120 bp, Artificial Sequence
  ENSG00000122971_15 (sequence is synthesized)
tgccctcagcgaaccagggccttctctccttggcccgactggacctatttttgctctggggcaagtgggctgtccctgtccctcctcagctgccactgaagcctgcaccttccccagaag

SEQ ID NO: 248584 - DNA, 120 bp, Artificial Sequence
  ENSG00000122971_16 (sequence is synthesized)
tcggctcccagccctgatctctctggagacgtcacaggccttggtcctactgggtaggccctggacagaacaggccctgaggtgcagcccgcaggtgggcaggatgcgcctgggcctggg

SEQ ID NO: 248585 - DNA, 120 bp, Artificial Sequence
  ENSG00000122971_17 (sequence is synthesized)
gcctccgaccgctccccgctgtcctcctagtctctctacctggggcccatcttgaagtttggctccaaggagcagaagcaggcgtgggtcacgcctttcaccagtggtgacaaaattggc

SEQ ID NO: 248586 - DNA, 120 bp, Artificial Sequence
  ENSG00000122971_18 (sequence is synthesized)
tgctttgccctcagcgaaccaggtacctgccctgtcccctcacctgtccttagggtgacaggcccagaggggaggagaggaaggtgctaggccaactgcccactgcttcggaggccagag

SEQ ID NO: 248587 - DNA, 120 bp, Artificial Sequence
  ENSG00000122971_19 (sequence is synthesized)
gggaggctccccgtgtggttggtagggtgagcgctcttgccaccgcggcgctgggaggaagattgccttcggggtcccctggtttaagacgccagctcctgcacacccccctcgccctct

SEQ ID NO: 248588 - DNA, 120 bp, Artificial Sequence
  ENSG00000122971_20 (sequence is synthesized)
ggtcccatcactgagagctttgggaccctcatctttggagcccgagtcatagggtttcgtgtctgccagcaggggtgtggagggagtgaggctggtgcccttaggttgtgtggggtgggg

SEQ ID NO: 248589 - DNA, 120 bp, Artificial Sequence
  ENSG00000122986_0 (sequence is synthesized)
acggggcgggacgggctgggccggacctgctctgaggctcccagtcgcagcggtgaccgcgggcgggtggggcgccgggtgaagaaaccaagacgcagagaggccaagccccttgccttg

SEQ ID NO: 248590 - DNA, 120 bp, Artificial Sequence
  ENSG00000122986_1 (sequence is synthesized)
ggtcacacagccaaaggaggcagagccagaactcacaaccagatccagaggcaacagggacatggccacctgggacgaaaaggcagtcacccgcagggccaaggtggctcccgctgagag

SEQ ID NO: 248591 - DNA, 120 bp, Artificial Sequence
  ENSG00000122986_2 (sequence is synthesized)
gatgagcaagttcttaaggcacttcacggtcgtgggagacgactaccatgcctggaacatcaactacaagaaatgggagaatgaagaggaggaggaggaggaggagcagccaccacccac

SEQ ID NO: 248592 - DNA, 120 bp, Artificial Sequence
  ENSG00000122986_3 (sequence is synthesized)
accagtctcaggcgaggaaggcagagctgcagcccctgacgttgcccctgcccctggccccgcacccagggccccccttgacttcaggggcatgttgaggaaactgttcagctcccacag

SEQ ID NO: 248593 - DNA, 120 bp, Artificial Sequence
  ENSG00000122986_4 (sequence is synthesized)
gtttcaggtcatcatcatctgcttggtggttctggatgccctcctggtgcttgctgagctcatcctggacctgaagatcatccagcccgacaagaataactatgctgccatggtattcca

SEQ ID NO: 248594 - DNA, 120 bp, Artificial Sequence
  ENSG00000122986_5 (sequence is synthesized)
ctacatgagcatcaccatcttggtcttttttatgatggagatcatctttaaattatttgtcttccgcctggagttctttcaccacaagtttgagatcctggatgccgtcgtggtggtggt

SEQ ID NO: 248595 - DNA, 120 bp, Artificial Sequence
  ENSG00000122986_6 (sequence is synthesized)
ggctgtggcgggtggcccggatcatcaatgggattatcatctcagttaagacacgttcagaacggcaactcttaaggttaaaacagatgaatgtacaattggccgccaagattcaacacc

SEQ ID NO: 248596 - DNA, 120 bp, Artificial Sequence
  ENSG00000122986_7 (sequence is synthesized)
ttgagttcagctgctctgagaaggaacaagaaattgaaagacttaacaaactattgcgacagcatggacttcttggtgaagtgaactagacccggaccagctcccctcaaaaagaagaca

SEQ ID NO: 248597 - DNA, 120 bp, Artificial Sequence
  ENSG00000122986_8 (sequence is synthesized)
ctgtctcatgggcctgtgctgtcacgagaggaacagctgcccctcctgggccgcttggtgagaggtttggtttgatacctctgcctccctcctgccagcatggattctgggtggacacag

SEQ ID NO: 248598 - DNA, 120 bp, Artificial Sequence
  ENSG00000122986_9 (sequence is synthesized)
ccttgtggaaggtccagtaccaccaagagctgcccatccactcccaccccacactgtatcaaatgtatcacattttctcatgttgaacactttagccttaattgaaaatgagcaacaaag

SEQ ID NO: 248599 - DNA, 120 bp, Artificial Sequence
  ENSG00000122986_10 (sequence is synthesized)
ctggacaattgctagttgtatataaaatttaatctcaccgaatgtacagttttcaaatttcacgtgtatattaaggaactgatgcatctgagcattctgaaagaaagaaaaagaagctac

SEQ ID NO: 248600 - DNA, 120 bp, Artificial Sequence
  ENSG00000122986_11 (sequence is synthesized)
tttagctgccaccccattctagaaaagtctcttattttcaagctgttctaaatagcttcgtctcagtttccccaaaaggggtacccaggcccctcctctgtgtgccccagctgcatcagc

SEQ ID NO: 248601 - DNA, 120 bp, Artificial Sequence
  ENSG00000122986_12 (sequence is synthesized)
cagcttctaggtggctccattgttttctgccacctgacaacatttttcctcaattactgtacaactactgtataaaataaaacaactactgtataaaataaactctctcttttccctgga

SEQ ID NO: 248602 - DNA, 120 bp, Artificial Sequence
  ENSG00000122986_13 (sequence is synthesized)
ggtgaagaaaccaagacgcagagaggccaagccccttgccttgggtcacacagccaaaggaggcagagccagaactcacaaccaggtctgtgtcccctaagtcctcggatgcatcgtccc

SEQ ID NO: 248603 - DNA, 120 bp, Artificial Sequence
  ENSG00000122986_14 (sequence is synthesized)
tgccccgctgccctcccgggagattgtaggagagaagcaggggcagaggcagtgctggatgtcccgggagaaggctgcaatgagcaggcccagccatccctgaaggaggagccccgggga

SEQ ID NO: 248604 - DNA, 120 bp, Artificial Sequence
  ENSG00000122986_15 (sequence is synthesized)
agcaaactcttccctagaaacactttaaaagcacccacctgttggagacagagatgctgaggaacaagagtgattggggccagggtaaacgccaagacagagaggggagagcagttcctc

SEQ ID NO: 248605 - DNA, 120 bp, Artificial Sequence
  ENSG00000122986_16 (sequence is synthesized)
agtggaactccctccaacattgcccccaccacttttaccagtgctgggtgtgggggatcttgcaggctcagcttcgtgacttggcctgtctctgcctcagtttccgcatctgtcccatga

SEQ ID NO: 248606 - DNA, 120 bp, Artificial Sequence
  ENSG00000122986_17 (sequence is synthesized)
ggttaagcatgtacctacctcgcaggattgctgagaagatgatataagatgcttggtgtacaggcttagcccctggcaccaggttactaccaaaagttcatggttccagtgcttcctcca

SEQ ID NO: 248607 - DNA, 120 bp, Artificial Sequence
  ENSG00000122986_18 (sequence is synthesized)
ccctccgtcctgcccctctgagagtacttctctgtcctgggcacctttaacttcaggttgttcagggctatctgagatctgcaggatttccggacagccccaccagcaactaggagctgc

SEQ ID NO: 248608 - DNA, 120 bp, Artificial Sequence
  ENSG00000122986_19 (sequence is synthesized)
gacttcagagctgggcctgcgcctgcggggccgtacgagttggcccggagcaaggcggcccaggacaggcaggggctgcacgcggtgaagaaaccaagacgcagagaggccaagcccctt

SEQ ID NO: 248609 - DNA, 120 bp, Artificial Sequence
  ENSG00000122986_20 (sequence is synthesized)
agcattagaggatatcccagccttgagaggataattctgtttggtgtttcaaacaggagagggagaactccctgttcaggtgtttccactatactgaaatatttaaaatcaaaatgatga

SEQ ID NO: 248610 - DNA, 77 bp, Artificial Sequence
  ENSG00000122986_21 (sequence is synthesized)
ccaagtagcctgatattccacatcagaccatttgaatcccagccctgtatgttaataactatgtgcggttttttttg

SEQ ID NO: 248611 - DNA, 120 bp, Artificial Sequence
  ENSG00000122986_22 (sequence is synthesized)
tcaggctggtctcgaacagtgcatgttaataactatgtgtccttaggcacaaaataactgtgtgcccttcaattccctgagcctcagtttccttatctggaaaatagtgaaaagattatt

SEQ ID NO: 248612 - DNA, 120 bp, Artificial Sequence
  ENSG00000122986_23 (sequence is synthesized)
ggatttttgtgatccgcgattcgctcccacgggcgggacctttgtaactgcgggaggcccaggacaggcccaccctgcggggcgggaggcagccggggtgagggaggtgaagaaaccaag

SEQ ID NO: 248613 - DNA, 120 bp, Artificial Sequence
  ENSG00000122986_24 (sequence is synthesized)
ccaccgtgaaagtcctggagtaaaatgtgctgtgtacagaagagagagaaggaagcaggctggcatgttcactgggctggtgttacgacagagaacctgacagtcactggccagttatca

SEQ ID NO: 248614 - DNA, 120 bp, Artificial Sequence
  ENSG00000122986_25 (sequence is synthesized)
cttcagattacaaatcacacagagcatctgcctgttttcaatcacaagagaacaaaaccaaaatctataaagatattctgaaaatatgacagaatttgacaaataaaagcataaacgtgt

SEQ ID NO: 248615 - DNA, 120 bp, Artificial Sequence
  ENSG00000122986_26 (sequence is synthesized)
gcttctttcccagcctgcctcctggaggtgaacatgtgcaggtggagaagtgcccactgcatcggggccaaaagagagaacgctgcctacctcaccccaacggcatttgaaagtagactg

SEQ ID NO: 248616 - DNA, 120 bp, Artificial Sequence
  ENSG00000122986_27 (sequence is synthesized)
gctcatctgaaatgcttatttgcaagcatctaacttcctgaccctgtgtcacagatggccccacttggccccaagcccctggtgaagaaaccaagacgcagagaggccaagccccttgcc

SEQ ID NO: 248617 - DNA, 120 bp, Artificial Sequence
  ENSG00000123064_0 (sequence is synthesized)
ccttctgcgttcccagcgcgcggcccgaatggcggccgacaagggcccggcggctggacctcggtcgcgagctgccatggcccagtggaggaagaagaaagggctccggaagcgccgagg

SEQ ID NO: 248618 - DNA, 120 bp, Artificial Sequence
  ENSG00000123064_1 (sequence is synthesized)
cgcggcctcccaggcccgcggcagcgactcggaggacggcgagtttgagatccaggcggaagatgacgcccgggcccggaagctgggacctggaagacccctgcccaccttccccacctc

SEQ ID NO: 248619 - DNA, 120 bp, Artificial Sequence
  ENSG00000123064_2 (sequence is synthesized)
ggaatgcacctcggatgtggagccggacacccgggagatggtgcgtgcccagaacaagaagaagaagaagtctggaggcttccagtccatgggcctgagctacccggtgttcaaaggcat

SEQ ID NO: 248620 - DNA, 120 bp, Artificial Sequence
  ENSG00000123064_3 (sequence is synthesized)
catgaagaaggggtacaaggtgccaacacccatccagaggaagaccatcccggtgatcttggatggcaaggacgtggtggccatggcccggacgggcagtggcaagacagcctgcttcct

SEQ ID NO: 248621 - DNA, 120 bp, Artificial Sequence
  ENSG00000123064_4 (sequence is synthesized)
cctcccaatgttcgagcggctcaagacccacagtgcccagaccggggcccgcgccctcatcctctcgccgacccgagagctggccctgcagaccctgaagttcactaaggagctaggcaa

SEQ ID NO: 248622 - DNA, 120 bp, Artificial Sequence
  ENSG00000123064_5 (sequence is synthesized)
gttcactggcctcaagactgccctgatcctgggtggagacaggatggaagaccagtttgcagccctgcacgaaaatcccgacataattattgccacgcccggacggttggtgcatgtggc

SEQ ID NO: 248623 - DNA, 120 bp, Artificial Sequence
  ENSG00000123064_6 (sequence is synthesized)
tgtggaaatgagcctgaagctgcagagtgtggaatacgtggtgttcgatgaagctgaccggctttttgaaatgggtttcgcagagcagctgcaggagatcatcgcccgcctccccggggg

SEQ ID NO: 248624 - DNA, 120 bp, Artificial Sequence
  ENSG00000123064_7 (sequence is synthesized)
ccaccagacggtgctgttctccgccacgctgcccaaactgctggtggaatttgcccgggctggcctcacggagcccgtgctcatccggcttgacgtggataccaagctcaacgagcagct

SEQ ID NO: 248625 - DNA, 120 bp, Artificial Sequence
  ENSG00000123064_8 (sequence is synthesized)
gaagacctccttcttcctcgtgcgggaggacaccaaggctgccgtgctgctccacctgctgcacaacgtggtgcggccccaggaccagaccgtggtgtttgtggccacgaagcaccacgc

SEQ ID NO: 248626 - DNA, 120 bp, Artificial Sequence
  ENSG00000123064_9 (sequence is synthesized)
cgagtacctcactgagctgctgacgacccagcgggtgagctgcgcccacatctacagtgccctagacccgacagcccgcaagatcaatctcgccaaattcacgcttggcaagtgctccac

SEQ ID NO: 248627 - DNA, 120 bp, Artificial Sequence
  ENSG00000123064_10 (sequence is synthesized)
tctcattgtgactgacctggccgcccgaggcctggacatcccgctgctggacaatgtcatcaactacagcttccccgccaagggcaaactcttcctgcaccgcgtgggccgtgtggctcg

SEQ ID NO: 248628 - DNA, 120 bp, Artificial Sequence
  ENSG00000123064_11 (sequence is synthesized)
ggctggccgaagtggcacagcctactccttggtggcccctgatgaaatcccctacctgctggatctgcacctgttcctgggccgctccctcaccctcgcccgacccctcaaggagccctc

SEQ ID NO: 248629 - DNA, 120 bp, Artificial Sequence
  ENSG00000123064_12 (sequence is synthesized)
aggtgtggccggtgtggatggcatgctgggtcgggtgccacagagtgtggtggacgaggaggacagtggtctgcagagcaccctggaggcatcgctggagctacggggcctggcccgcgt

SEQ ID NO: 248630 - DNA, 120 bp, Artificial Sequence
  ENSG00000123064_13 (sequence is synthesized)
tgctgataacgcccagcagcagtatgtgcgctcacgcccggcgccctcgcctgagtccatcaagagggccaaggagatggaccttgtggggctgggcctgcaccccctcttcagctcgcg

SEQ ID NO: 248631 - DNA, 120 bp, Artificial Sequence
  ENSG00000123064_14 (sequence is synthesized)
ttttgaggaggaggagctgcagcggctgaggctggtggacagcataaagaactaccgctcccgggcgactatctttgagatcaacgcctccagccgagacctgtgcagccaggtgatgcg

SEQ ID NO: 248632 - DNA, 120 bp, Artificial Sequence
  ENSG00000123064_15 (sequence is synthesized)
cgccaagcggcagaaggaccgcaaggccatcgcccgcttccagcagggacagcaggggcggcaggagcagcaggagggcccagtgggcccagccccgagccgcccagcactgcaggagaa

SEQ ID NO: 248633 - DNA, 120 bp, Artificial Sequence
  ENSG00000123064_16 (sequence is synthesized)
gcagcctgagaaggaggaggaggaggaggcgggagagagtgtggaggacattttctcagaggtcgtgggccggaagcggcagcggtcaggacccaacaggggagccaagaggcggaggga

SEQ ID NO: 248634 - DNA, 120 bp, Artificial Sequence
  ENSG00000123064_17 (sequence is synthesized)
ggaggcccggcagcgggaccaggaattctacatcccctaccggcccaaggactttgacagcgagcggggcctgagcatcagcggggaagggggagcctttgagcagcaggcagctggcgc

SEQ ID NO: 248635 - DNA, 120 bp, Artificial Sequence
  ENSG00000123064_18 (sequence is synthesized)
caagtgggaccgtaagaagaagcggtttgtgggacagtcaggacaggaagacaagaagaagattaagacagagagcggccgctacatcagcagctcctacaagcgagacctctatcagaa

SEQ ID NO: 248636 - DNA, 120 bp, Artificial Sequence
  ENSG00000123064_19 (sequence is synthesized)
gtggaaacagaaacagaaaattgatgatcgtgactcggacgaagaaggggcatctgaccggcgaggcccagagcgaagaggtgggaagcgagaccgtggccaaggtgcatcccggcccca

SEQ ID NO: 248637 - DNA, 120 bp, Artificial Sequence
  ENSG00000123064_20 (sequence is synthesized)
cgccccaggcacccctgcaggccgagtccgcccggaactcaagaccaagcagcagatcctgaagcagcggcgccgggcccagaagctgcacttcctgcagcgtggtggcctcaagcagct

SEQ ID NO: 248638 - DNA, 120 bp, Artificial Sequence
  ENSG00000123064_21 (sequence is synthesized)
ctctgcccgcaaccgccgccgcgtccaggagctgcagcagggcgccttcggccggggtgcccgctccaagaagggcaagatgcggaagaggatgtgaggaccaggacccagccccgtggc

SEQ ID NO: 248639 - DNA, 120 bp, Artificial Sequence
  ENSG00000123064_22 (sequence is synthesized)
tccttgattggccttagggtgggcatcagcagacgttcccgtgcaccactgtgtgcctggccctgtgctgggcactgggggcactccctgcaggagccatcatctgtgaaaaggagcact

SEQ ID NO: 248640 - DNA, 120 bp, Artificial Sequence
  ENSG00000123064_23 (sequence is synthesized)
gtatggccacagaagggcagcagctgcgtcagcctaagacagagacatttgaacagggccttgaagggtgtgcaggagttcgccagcaaagccaggcaggccaagacttgagttggcaac

SEQ ID NO: 248641 - DNA, 120 bp, Artificial Sequence
  ENSG00000123064_24 (sequence is synthesized)
tcagctgctgctgcttccatgtgttctgggttcagaggtcatggctgcaccggtcagagccctgagtgcctcagggtttggcaatggaatttttaatgtaataaatctttattgagcact

SEQ ID NO: 248642 - DNA, 120 bp, Artificial Sequence
  ENSG00000123064_25 (sequence is synthesized)
gctggtggccaggagtgcggtctacttggggaactggaatggagagacccaggtactaaaatcccagctaacgtggcagaggagttgcgggtctcctgagggtgagttctgctgccttgt

SEQ ID NO: 248643 - DNA, 120 bp, Artificial Sequence
  ENSG00000123064_26 (sequence is synthesized)
ccatttagcgatgaggaaagtgaagctcagagcacaaaccaggtgccagaggcgggagttggtcccccttcctcccactggacatggttgcagctgggagtgggctgggggaggggaaca

SEQ ID NO: 248644 - DNA, 120 bp, Artificial Sequence
  ENSG00000123064_27 (sequence is synthesized)
ggatgcccagcccagggggcaaggacacagctgctcccctctggctatgaagaggttaacgcggcccctccacacctggaggtcagaacctggcctgtcctctgtcttcttgccacccac

SEQ ID NO: 248645 - DNA, 120 bp, Artificial Sequence
  ENSG00000123064_28 (sequence is synthesized)
cccctgtttgaggttctgagaaggtcaagggcagccccagcagctggattctcaggctgggcccctcacctggcagagtccatagtggagggggccttggtgatctctcatctagcatgg

SEQ ID NO: 248646 - DNA, 120 bp, Artificial Sequence
  ENSG00000123064_29 (sequence is synthesized)
accctgttctgagacctgacaaagagttttttttcatgccccaaccaccctggcagggagggcctggtctgatctcattttagaggcagttgccccacacatagccccttgaccttccca

SEQ ID NO: 248647 - DNA, 120 bp, Artificial Sequence
  ENSG00000123064_30 (sequence is synthesized)
tcacctcctcatcagggcctgcatttatggagtgcttgctatgtgcccctcatggcaggcccacagcactctgaacaggcacagccctcccatcttcccaatgaggaaacggattcagga

SEQ ID NO: 248648 - DNA, 120 bp, Artificial Sequence
  ENSG00000123064_31 (sequence is synthesized)
agagccactcagtccacaccccattggaaatgtgggccctcctatctcagggtctctcaggggttccctctcccgctgctcacctgtgtcagggctaggaggcaggggctgcaggctcag

SEQ ID NO: 248649 - DNA, 120 bp, Artificial Sequence
  ENSG00000123064_32 (sequence is synthesized)
cctgacccaggccggccagcatggcagagaggtcctgcatgaacagcttcacctgggggggcccagcacgaagtcacatcccagccccagagtcactgtccagcccccacccctcaacac

SEQ ID NO: 248650 - DNA, 120 bp, Artificial Sequence
  ENSG00000123064_33 (sequence is synthesized)
gcgggggaggccgaaaggtagggcggggactggagatcccctcattaaaagaacagtgatgatggtggttcccagaggtggtgactgagatcctaaaccgttctgggttttgaaagcctc

SEQ ID NO: 248651 - DNA, 120 bp, Artificial Sequence
  ENSG00000123064_34 (sequence is synthesized)
aggccaaccttcccaactgctgcgtgagcagacaccttcacagcttcctcgctgctgtcacctgcactatccaattagtattttcatttacatcaatcagctttattttcttgtaactgg

SEQ ID NO: 248652 - DNA, 120 bp, Artificial Sequence
  ENSG00000123064_35 (sequence is synthesized)
atcagtcatattcattggtttgtgacctactcttatctccgtgggtggctctccttttgttttaattaacttctttatgaatatgaacttaataaataccatggatccattgtaaaaact

SEQ ID NO: 248653 - DNA, 120 bp, Artificial Sequence
  ENSG00000123064_36 (sequence is synthesized)
acgaggggccggcagcagctcaagtggtgagtgatcgagtgagccgcccctccatgctcggggtgagtgaccgagtgagctgctcctccgtgcctggggtgagtgatcgagtgagccgcc

SEQ ID NO: 248654 - DNA, 120 bp, Artificial Sequence
  ENSG00000123064_37 (sequence is synthesized)
cctccctccatgcccggggtgagtgagtgagtgagccgcccctccatgcccggggtgagtgatcgagtgagctgcccctccaggcccagggtgagtgagagagtgagctgcccctccatg

SEQ ID NO: 248655 - DNA, 120 bp, Artificial Sequence
  ENSG00000123064_38 (sequence is synthesized)
tggaacaacagaaggagtgaattgaggtctgtagttgagcccatctcttcagaggaactctgttgttaccattcttttgcatatttcagcttgtatctcttgtcagggcaatgcctttgc

SEQ ID NO: 248656 - DNA, 120 bp, Artificial Sequence
  ENSG00000123064_39 (sequence is synthesized)
ggggtgtgcagccttgcctggacatttggttatgggaagggaaaccaaagagacctgttctatcaagctaaccccttctctcctctctaggatggaagaccagtttgcagccctgcacga

SEQ ID NO: 248657 - DNA, 120 bp, Artificial Sequence
  ENSG00000123066_0 (sequence is synthesized)
gggccgagccgcggtcggcggccgccattgctgtcagagcaagcgagcccggggagggaggagaagcgaggctgactggggaggaggggggggtgggggaggaagaggaaggaggggacg

SEQ ID NO: 248658 - DNA, 120 bp, Artificial Sequence
  ENSG00000123066_1 (sequence is synthesized)
gtgggggaggaagaggaaggaggggacgtcgctcggctgccggggtcgcccgctggcttcgtccgcaccccccccttcgcgagttcgcgctccgcggcggcggcggctccgaggcggcgg

SEQ ID NO: 248659 - DNA, 80 bp, Artificial Sequence
  ENSG00000123066_2 (sequence is synthesized)
cgcgccggcgggggccgagggggagtcggtggctggagataaacaaggcggcggcagcggcagcagcggcggcggcggcg

SEQ ID NO: 248660 - DNA, 120 bp, Artificial Sequence
  ENSG00000123066_3 (sequence is synthesized)
ccggcgaggcgccgccgcccggcccggcctcgcctcggacgcctcgctccgacatgccccgctctggcggccgggctcgcggaggatcatgactgcggcagcgaactgggtggcgaacgg

SEQ ID NO: 248661 - DNA, 120 bp, Artificial Sequence
  ENSG00000123066_4 (sequence is synthesized)
gcgaactgggtggcgaacggggcgagcctggaggattgtcactccaacctcttttcgctggctgaactcacgggaatcaaatggcgtaggtacaattttggagggcatggggactgtgga

SEQ ID NO: 248662 - DNA, 120 bp, Artificial Sequence
  ENSG00000123066_5 (sequence is synthesized)
cccataatttcagccccagcccaagatgatccaattctgttaagtttcatccgctgtctgcaagctaacctgctttgtgtatggcgtcgtgatgtcaaaccagattgcaaagagttatgg

SEQ ID NO: 248663 - DNA, 120 bp, Artificial Sequence
  ENSG00000123066_6 (sequence is synthesized)
atattctggtggggagatgaacccaacctagtgggtgtaatacatcatgaactgcaggttgtggaagaaggactctgggaaaatggcctttcctatgaatgtaggacgctgctcttcaaa

SEQ ID NO: 248664 - DNA, 120 bp, Artificial Sequence
  ENSG00000123066_7 (sequence is synthesized)
gcgatccacaatctgttagaaaggtgcctaatggataagaacttcgttaggattgggaaatggtttgtccgaccctacgaaaaggatgaaaagccagtcaacaaaagtgagcatttgtcc

SEQ ID NO: 248665 - DNA, 120 bp, Artificial Sequence
  ENSG00000123066_8 (sequence is synthesized)
tgtgctttcacattctttctgcatggagaaagtaatgtatgcacaagtgtggagattgcccagcaccagccaatttatttgatcaatgaggagcatatacacatggctcagtcttcacct

SEQ ID NO: 248666 - DNA, 120 bp, Artificial Sequence
  ENSG00000123066_9 (sequence is synthesized)
gcaccatttcaagtactggtaagtccttatggcttaaatgggacgctaacaggccaagcatacaagatgtcagacccagccactcgtaagttgattgaggaatggcagtatttctacccg

SEQ ID NO: 248667 - DNA, 120 bp, Artificial Sequence
  ENSG00000123066_10 (sequence is synthesized)
atggtgctaaaaaagaaagaagaatcgaaagaggaagacgagttgggatatgatgatgatttccctgtggcagttgaagtaattgttggtggtgttcggatggtttacccttcagcattt

SEQ ID NO: 248668 - DNA, 120 bp, Artificial Sequence
  ENSG00000123066_11 (sequence is synthesized)
gttttgatctctcagaatgacatcccggttcctcagagtgttgccagtgctggaggccacattgcagttgggcagcaagggcttggtagtgtgaaggacccaagtaactgtgggatgcct

SEQ ID NO: 248669 - DNA, 120 bp, Artificial Sequence
  ENSG00000123066_12 (sequence is synthesized)
ctgacccctcccacctctccagaacaggctatcctaggtgagagtggaggtatgcagagtgctgccagtcacctggtttcccaagatggagggatgataacgatgcacagtccaaagaga

SEQ ID NO: 248670 - DNA, 120 bp, Artificial Sequence
  ENSG00000123066_13 (sequence is synthesized)
tcggggaagattcctccaaaactccacaatcatatggtccatcgagtctggaaggaatgcatcctcaacagaacccagtccaagaggagccaaatgtcaactccaactcttgaagaagag

SEQ ID NO: 248671 - DNA, 120 bp, Artificial Sequence
  ENSG00000123066_14 (sequence is synthesized)
cctgctagcaatcctgctacttgggattttgtggatccaacccaaagagtcagctgttcttgttccaggcataagcttttaaaacgttgtgcagtcgggcccaatcgacctcccacagta

SEQ ID NO: 248672 - DNA, 120 bp, Artificial Sequence
  ENSG00000123066_15 (sequence is synthesized)
tctcaaccagggttcagtgcaggaccatcatcatcttcatctttaccacctcctgcttcttctaagcacaaaacagcagaaagacaggaaaaaggagacaagctgcaaaagagaccctta

SEQ ID NO: 248673 - DNA, 120 bp, Artificial Sequence
  ENSG00000123066_16 (sequence is synthesized)
ataccatttcaccataggccctctgtggccgaagaattatgcatggagcaagatacaccaggacagaaactagggttggcagggatagactcctccttagaggtgtctagcagtaggaaa

SEQ ID NO: 248674 - DNA, 120 bp, Artificial Sequence
  ENSG00000123066_17 (sequence is synthesized)
tatgataagcaaatggccgtgccttccagaaatacaagcaagcaaatgaatctgaatcctatggattcacctcattcccctatatcccctctgccaccaacactcagccctcagccacga

SEQ ID NO: 248675 - DNA, 120 bp, Artificial Sequence
  ENSG00000123066_18 (sequence is synthesized)
ggtcaggaaacagagagtttggacccaccatcggtccctgtgaatccagccctttatggaaatggactagaactccagcagttgtctactctggatgacagaactgtcctcgtaggccaa

SEQ ID NO: 248676 - DNA, 120 bp, Artificial Sequence
  ENSG00000123066_19 (sequence is synthesized)
agactgcctctcatggcagaggtcagcgagacagccttatattgtgggattaggccctcgaacccggagtcatcagaaaagtggtggcatagttatcgtctcccacccagtgatgatgct

SEQ ID NO: 248677 - DNA, 120 bp, Artificial Sequence
  ENSG00000123066_20 (sequence is synthesized)
gagttcaggcctccagagctccagggtgagagatgtgatgccaaaatggaggtaaactcagagagcactgcattgcaaagactcttagcacaacctaacaaacggtttaaaatctggcaa

SEQ ID NO: 248678 - DNA, 120 bp, Artificial Sequence
  ENSG00000123066_21 (sequence is synthesized)
gacaaacagccccagttgcagccactccacttccttgacccattgcctctatcacaacaacctggagacagtttgggagaagtgaatgacccatatacctttgaagatggtgacataaaa

SEQ ID NO: 248679 - DNA, 120 bp, Artificial Sequence
  ENSG00000123066_22 (sequence is synthesized)
tacatctttacagccaacaagaaatgcaaacaagggacggagaaagattccctgaaaaagaataagtcagaggatggatttggtaccaaggatgtcactacaccaggtcattccacgccg

SEQ ID NO: 248680 - DNA, 120 bp, Artificial Sequence
  ENSG00000123066_23 (sequence is synthesized)
gtgcctgatgggaaaaatgccatgtctattttcagttctgctactaaaacagatgtccggcaggataatgctgctggcagagctggctccagtagccttacacaggtaacagatttggca

SEQ ID NO: 248681 - DNA, 120 bp, Artificial Sequence
  ENSG00000123066_24 (sequence is synthesized)
ccttccctgcatgacttagacaacatctttgataattctgatgacgacgaacttggggctgtatcacctgctctgcgctcatcaaaaatgcctgcagttgggacagaagaccgacctctt

SEQ ID NO: 248682 - DNA, 120 bp, Artificial Sequence
  ENSG00000123066_25 (sequence is synthesized)
gggaaggatggaagagctgctgttccttatccaccaacagttgcagacttgcaaaggatgtttcccactccaccatctttggaacagcatcctgcattttctcctgtgatgaattataaa

SEQ ID NO: 248683 - DNA, 120 bp, Artificial Sequence
  ENSG00000123066_26 (sequence is synthesized)
gatgggatcagctcagagacagtgacagcattaggcatgatggagagccctatggtcagtatggtttcaacacaactcacagaattcaaaatggaagtggaagatggattaggaagtccc

SEQ ID NO: 248684 - DNA, 120 bp, Artificial Sequence
  ENSG00000123066_27 (sequence is synthesized)
aagcccgaggaaattaaggacttttcatatgtgcacaaagttccatcctttcaaccttttgtgggatcctccatgtttgctccactgaagatgttgccgagccattgtttgctacctctg

SEQ ID NO: 248685 - DNA, 120 bp, Artificial Sequence
  ENSG00000123066_28 (sequence is synthesized)
aagatacctgatgcctgtctgtttcggccttcatgggcaattcctcctaaaattgaacaactgcccatgccccctgcagccactttcattagagatggctacaataacgtgcctagtgtt

SEQ ID NO: 248686 - DNA, 120 bp, Artificial Sequence
  ENSG00000123066_29 (sequence is synthesized)
gggagcctagcagatccagactatctgaacacaccacagatgaacacacccgtgacgttgaacagcgctgccccagccagcaatagtggggcaggagtcctaccatctccagcaacccct

SEQ ID NO: 248687 - DNA, 120 bp, Artificial Sequence
  ENSG00000123066_30 (sequence is synthesized)
cgcttctctgtccccacaccacgaacccccaggaccccaagaactcccagaggtgggggcactgccagtggtcaagggtctgttaagtatgatagcaccgatcaaggatcaccagcctcc

SEQ ID NO: 248688 - DNA, 120 bp, Artificial Sequence
  ENSG00000123066_31 (sequence is synthesized)
accccctctactacacggcccctcaactctgtggagcccgccaccatgcagccaattcccgaagcccacagcctctatgttaccctgattctctccgattccgtgatgaatatctttaaa

SEQ ID NO: 248689 - DNA, 120 bp, Artificial Sequence
  ENSG00000123066_32 (sequence is synthesized)
gacagaaactttgacagctgttgcatctgtgcctgcaacatgaacatcaaaggggcggatgtcgggctttacatccccgattcttccaatgaggaccagtaccgctgtacctgtgggttt

SEQ ID NO: 248690 - DNA, 120 bp, Artificial Sequence
  ENSG00000123066_33 (sequence is synthesized)
agtgcgattatgaaccgcaaacttggctacaattcaggactcttccttgaagatgagttggatatttttgggaagaattctgatattggtcaggctgcagagaggcgcttaatgatgtgt

SEQ ID NO: 248691 - DNA, 120 bp, Artificial Sequence
  ENSG00000123066_34 (sequence is synthesized)
cagtccaccttccttcctcaggtggaaggaaccaaaaaaccccaggagccacccataagccttctcctcctcctccagaatcaacacacacaaccttttgcttcactgaatttcctggac

SEQ ID NO: 248692 - DNA, 120 bp, Artificial Sequence
  ENSG00000123066_35 (sequence is synthesized)
tacatttcctctaacaatcgccaaactcttccctgtgtaagctggagttatgaccgggtgcaagcagataataatgattactggacggaatgctttaatgcgttggagcaggggcggcag

SEQ ID NO: 248693 - DNA, 120 bp, Artificial Sequence
  ENSG00000123066_36 (sequence is synthesized)
tatgtggataaccccactggtggaaaagtggacgaagctctggtgagaagtgccactgtgcactcttggcctcacagcaatgtgctggacatcagcatgctctcctcccaggatgtggtt

SEQ ID NO: 248694 - DNA, 120 bp, Artificial Sequence
  ENSG00000123066_37 (sequence is synthesized)
cgtatgctgttgtccctgcagccctttctccaagatgccatccaaaagaagcgcacgggcaggacctgggagaacatccagcatgtgcagggaccactcacttggcagcagttccataaa

SEQ ID NO: 248695 - DNA, 120 bp, Artificial Sequence
  ENSG00000123066_38 (sequence is synthesized)
atggcaggacggggaacctacggttcggaagaatctcctgagccgttgcccatccccactctgctggtaggctatgacaaggatttcctcaccatctcgccattctccttgccgttttgg

SEQ ID NO: 248696 - DNA, 120 bp, Artificial Sequence
  ENSG00000123066_39 (sequence is synthesized)
gagaggctcttgttggacccatatgggggccaccgtgatgttgcctatattgtggtgtgtccagaaaatgaggccttgctcgaaggagccaaaactttcttcagggacttgagtgctgta

SEQ ID NO: 248697 - DNA, 120 bp, Artificial Sequence
  ENSG00000123066_40 (sequence is synthesized)
tacgagatgtgtaggcttgggcagcacaagcccatctgcaaagtgctacgtgacgggatcatgcgcgtgggaaaaactgtggcacagaagctgacagatgagcttgtgagtgagtggttt

SEQ ID NO: 248698 - DNA, 120 bp, Artificial Sequence
  ENSG00000123066_41 (sequence is synthesized)
aaccagccttggagcggcgaggagaatgacaatcattccagactcaaactttatgcgcaagtttgccgccatcacctagcaccttatttagccactctgcagcttgatagcagcctattg

SEQ ID NO: 248699 - DNA, 120 bp, Artificial Sequence
  ENSG00000123066_42 (sequence is synthesized)
ataccacctaaataccagaccccaccagcagcagcacagggacaagctacgccagggaatgctgggcccttagctccaaatggatcagcagctcccccagctggcagtgcatttaatccc

SEQ ID NO: 248700 - DNA, 120 bp, Artificial Sequence
  ENSG00000123066_43 (sequence is synthesized)
acctcgaatagtagttctacaaatcctgcagcaagtagttctgcatctggttcctctgtgccaccggtctcatcgtctgcctctgctcctggtattagccagataagcactacctcttct

SEQ ID NO: 248701 - DNA, 120 bp, Artificial Sequence
  ENSG00000123066_44 (sequence is synthesized)
tcaggattcagtggtagtgttggagggcagaaccccagcactgggggcatttctgcggatagaacgcaagggaacataggctgtggtggagacactgaccctgggcagagctcttctcag

SEQ ID NO: 248702 - DNA, 120 bp, Artificial Sequence
  ENSG00000123066_45 (sequence is synthesized)
ccctcacaggatggacaagagagtgttacagaaagggagagaataggaattcccacggagcctgactctgcagacagccatgcccaccctccagctgttgtcatttacatggtggacccg

SEQ ID NO: 248703 - DNA, 120 bp, Artificial Sequence
  ENSG00000123066_46 (sequence is synthesized)
ttcacgtatgctgcagaggaggactccacttctgggaacttttggctgttgagcttgatgcgctgctacacagaaatgctggataatttacctgagcatatgagaaattctttcattctc

SEQ ID NO: 248704 - DNA, 120 bp, Artificial Sequence
  ENSG00000123066_47 (sequence is synthesized)
cagattgtgccttgccagtacatgctgcagacaatgaaggatgagcaagttttctacattcaatacttgaagtccatggcattttcagtgtactgccagtgcaggcgaccactgcctaca

SEQ ID NO: 248705 - DNA, 120 bp, Artificial Sequence
  ENSG00000123066_48 (sequence is synthesized)
cagatccacattaaatccctcacgggatttgggcctgcagccagcattgagatgaccctcaagaaccctgagcggcccagcccaatccagctttactcccctccctttatattggcccca

SEQ ID NO: 248706 - DNA, 120 bp, Artificial Sequence
  ENSG00000123066_49 (sequence is synthesized)
atcaaagacaagcagacagagctgggagagacgtttggtgaggcgagccagaaatacaatgtgctcttcgtgggctattgtctgtctcacgaccagcgctggcttttggcttcctgcact

SEQ ID NO: 248707 - DNA, 120 bp, Artificial Sequence
  ENSG00000123066_50 (sequence is synthesized)
gacctccatggggaattattagagacctgcgttgtaaatattgctttaccaaacaggtcacggaggagtaaagtatctgcacgtaaaattggactacagaagttatgggagtggtgcata

SEQ ID NO: 248708 - DNA, 120 bp, Artificial Sequence
  ENSG00000123066_51 (sequence is synthesized)
gggattgtccaaatgacatctctaccctggagagttgtaatcgggcgacttgggcgtcttggccatggggagcttaaagattggagtatcctccttggagaatgttcactacagacaatc

SEQ ID NO: 248709 - DNA, 120 bp, Artificial Sequence
  ENSG00000123066_52 (sequence is synthesized)
agcaaaaagctcaaggatgtgtgccggatgtgtggaatctctgccgcagactctccttctatccttagtgcctgcctggttgccatggagccccaggggtcctttgtagtgatgccagat

SEQ ID NO: 248710 - DNA, 120 bp, Artificial Sequence
  ENSG00000123066_53 (sequence is synthesized)
gctgtcacaatgggctctgtttttggccgaagtactgcactgaacatgcagtcatctcagctcaacacccctcaagatgcttcttgtacacacatcttggtgttcccaacatcatcaacc

SEQ ID NO: 248711 - DNA, 120 bp, Artificial Sequence
  ENSG00000123066_54 (sequence is synthesized)
atccaggtggctccagccaactaccccaatgaagatgggtttagccccaacaatgatgatatgtttgttgaccttccattcccagatgatatggacaatgatattggcatattaatgact

SEQ ID NO: 248712 - DNA, 120 bp, Artificial Sequence
  ENSG00000123066_55 (sequence is synthesized)
gggaacctccattcctctcccaactcttccccagtaccctccccaggctctccttctggaattggtgtgggctctcacttccagcatagtcggagccagggtgagcgtcttctttctaga

SEQ ID NO: 248713 - DNA, 120 bp, Artificial Sequence
  ENSG00000123066_56 (sequence is synthesized)
gaagcaccagaggagctaaagcagcagcccctggcccttgggtattttgtatcaactgccaaagctgagaatcttccccagtggttttggtcatcgtgtccccaggctcaaaaccagtgc

SEQ ID NO: 248714 - DNA, 120 bp, Artificial Sequence
  ENSG00000123066_57 (sequence is synthesized)
cctctcttcttaaaggcttcgctgcatcaccacatttcagtagcacagacagacgaacttctgcctgccaggaattctcagcgggttccacaccctcttgactccaaaaccacgtcggat

SEQ ID NO: 248715 - DNA, 120 bp, Artificial Sequence
  ENSG00000123066_58 (sequence is synthesized)
gttttaaggtttgttttggagcagtacaacgctctgtcctggctcacgtgcaatccggccacccaggaccgtacttcctgccttcccgtccactttgtggtgctcactcagttgtacaat

SEQ ID NO: 248716 - DNA, 120 bp, Artificial Sequence
  ENSG00000123066_59 (sequence is synthesized)
gcaaataacccacatccttttcttcagaccactctccacagtcctgcactgtgattccttctcagcaggcacatgtcaattctgcagtgttcattaccagagtgactccttgacacttct

SEQ ID NO: 248717 - DNA, 120 bp, Artificial Sequence
  ENSG00000123066_60 (sequence is synthesized)
ctcatggacctggaaacttccataagtggtgactttcagccagtgcggtggtgtgtgtagccccaaccactggtccccaggaagtggtggtggttgatggcttttcagcgggaaacagaa

SEQ ID NO: 248718 - DNA, 120 bp, Artificial Sequence
  ENSG00000123066_61 (sequence is synthesized)
gagacagtgtccttttgcacaagagtctgtgttttcagcctctgtatacaattgagggcagtctagccctttggatgaaatcctcttagttactggtgtatggcctgtgggttacctgaa

SEQ ID NO: 248719 - DNA, 120 bp, Artificial Sequence
  ENSG00000123066_62 (sequence is synthesized)
ctccataatctgggactttttaaaaataagaaccagctcaagtacatggtttcatactggggtttctgtctccctagtgttcccatccagattagcatgagtgctttggttgacttcaaa

SEQ ID NO: 248720 - DNA, 120 bp, Artificial Sequence
  ENSG00000123066_63 (sequence is synthesized)
cctgtgtgtcaatgcagaaggtctggagacagcttcattttgtttatttattttaatttgttttgtcatatggtttttgtgactttatttttttaattcacaaggaccaggtacagtagc

SEQ ID NO: 248721 - DNA, 120 bp, Artificial Sequence
  ENSG00000123066_64 (sequence is synthesized)
tgaaacccaattcagatccaccataggattctttgactacatacctctgtcctagaagccggaaaaggagtaaaaacacattggggagatcatgcctaaaagtaatatattcaaaaccac

SEQ ID NO: 248722 - DNA, 120 bp, Artificial Sequence
  ENSG00000123066_65 (sequence is synthesized)
ccagcagtaggttttgttaacaacaaactggattttaaaagttctgccatgttaagtggccagcatttcatgaaggataacatttttatacagaaggcagtcaagctcaactcagagcca

SEQ ID NO: 248723 - DNA, 120 bp, Artificial Sequence
  ENSG00000123066_66 (sequence is synthesized)
tggaggcaagtaccttaattagttttatatagtcacaacggaaatatattttctagtgaattcttattggaagccaggtctctcctctcattagatcaaaagggacttatgtacatacaa

SEQ ID NO: 248724 - DNA, 120 bp, Artificial Sequence
  ENSG00000123066_67 (sequence is synthesized)
caattgaaagtgtttgctcatgaaatcagttataaatatggtgaattttttctggaccataggaatattatttcaaagaaatattacaacttaaccattaaattagtacttgaagttgag

SEQ ID NO: 248725 - DNA, 120 bp, Artificial Sequence
  ENSG00000123066_68 (sequence is synthesized)
cctttgtggtgggactttttaaaaaaatgcctttttaaagcattaatggctaattgaagtattttatgactcctcattcctggcccagagggttgtctttgaaaccctgtttctaaccct

SEQ ID NO: 248726 - DNA, 120 bp, Artificial Sequence
  ENSG00000123066_69 (sequence is synthesized)
tgtgttgtgtgtttctgtctgaggacagtgggtgtgtactggcctcccgggagccactgtgaccaggcctttgagctcttgtcatctgtggagagaatcatgcaaattttaaaagttctt

SEQ ID NO: 248727 - DNA, 120 bp, Artificial Sequence
  ENSG00000123066_70 (sequence is synthesized)
ccaagagacttccatgtcctggttattaacaaaaaaggaaaaatgtaataattgatatgattttgtaaaagtatttttcttgaaataatctaaagtttaaaacattatattaaaaaaaaa

SEQ ID NO: 248728 - DNA, 120 bp, Artificial Sequence
  ENSG00000123066_71 (sequence is synthesized)
gttgtgtggtgggaatgtgaaagcagagaaataacttgtaaatggataattttgttctctgtaccaccagttgaagggggggttgactttcgcaatgtataggataaaaaatctgatata

SEQ ID NO: 248729 - DNA, 120 bp, Artificial Sequence
  ENSG00000123066_72 (sequence is synthesized)
tcaaaccatttgtatctaatgtgtacagtgtaaaattgactttaaaaatattgcagtgctattttttcttaatcagaaaggaaaattctcaaggccttttgaagagcataagaagatgaa

SEQ ID NO: 248730 - DNA, 120 bp, Artificial Sequence
  ENSG00000123066_73 (sequence is synthesized)
gattgtaaacttgtataaaattatcttggtgagaagacaaattgtaaagtagatatttgtaatcttttaccactttggggttgcttttttcccggaattcatcagaactttgaatttttt

SEQ ID NO: 248731 - DNA, 120 bp, Artificial Sequence
  ENSG00000123066_74 (sequence is synthesized)
ttcccggaattcatcagaactttgaattttttttttaaatgggctgtttttaatgcaggggcttttcttccctagaaacccaattctaagcagaaaaagaaaaaaaacacaaaaaataaa

SEQ ID NO: 248732 - DNA, 120 bp, Artificial Sequence
  ENSG00000123066_75 (sequence is synthesized)
cagcaaagggtagttttcatctggtgtcttttatttaagttttttaagttaagaaaagctggtgacatatttatacgtttttgtgcaaaaataaatgaatggcaatagattttaaaaaat

SEQ ID NO: 248733 - DNA, 120 bp, Artificial Sequence
  ENSG00000123066_76 (sequence is synthesized)
cttattatgtacttctgtgtgaaaaagtctgtataatatttcccttaaatatgcattattttacttgtgagttttttactgaattaatctgaaatgtacaagccctggatttgctacaga

SEQ ID NO: 248734 - DNA, 120 bp, Artificial Sequence
  ENSG00000123066_77 (sequence is synthesized)
gtgagaagttattttatttttttttatttttaattttggaaattctgcagaaatcagaactcttaccatggtttgaacaaaaaaaggggaaatggggaggggaaaagggtgggattgtcc

SEQ ID NO: 248735 - DNA, 120 bp, Artificial Sequence
  ENSG00000123066_78 (sequence is synthesized)
agcatgcttgtatgtatatttcagaaccttttttaaatgtaaaagctgtacatttctgggaagttctgaatttcttttgtttccttttttccttcaagcattttgcagtgagcttctttt

SEQ ID NO: 248736 - DNA, 120 bp, Artificial Sequence
  ENSG00000123066_79 (sequence is synthesized)
atatatagcaaacaatttgaaagaatacaaaaatatgtgaagttcatttaaaaaaataactacagtatagcgctggtacagtacactaaaagactttgataaaaagaaacaataataaaa

SEQ ID NO: 248737 - DNA, 120 bp, Artificial Sequence
  ENSG00000123066_80 (sequence is synthesized)
ggcctccattttaaatgtcattcatatataccttgtggatgagagctatatacttttacacacttttttagaggaataaattattgaattactgaagctttgagtggcttttttcccttc

SEQ ID NO: 248738 - DNA, 120 bp, Artificial Sequence
  ENSG00000123066_81 (sequence is synthesized)
ctctcctgcctttgtataaaattatctacacctgtttgagaggtgcatgtatatgtattgaatagccctagattagtagccaggcctctaccttccagtcagtgcaatggatgtagaatt

SEQ ID NO: 248739 - DNA, 120 bp, Artificial Sequence
  ENSG00000123066_82 (sequence is synthesized)
ttaccaccctgatcacccccctaacagctgttctgaaatggtattctcatgctccagggcacaagtacactcccccatcagtttttacatgctaacacacacaacaccgaatcaactgct

SEQ ID NO: 248740 - DNA, 120 bp, Artificial Sequence
  ENSG00000123066_83 (sequence is synthesized)
gtgagtcgatgagctctaatggtgtctctcagctgtaagattgtggtcaattctagcacaaatgacaagtctgtatcttatattccaccgcctttctctacacagtctcagccagtttct

SEQ ID NO: 248741 - DNA, 120 bp, Artificial Sequence
  ENSG00000123066_84 (sequence is synthesized)
ttatgatgtctcttagaaatgacagatacatctctctctgctgttttcctgattcacaggctggtgacgggagtttggcatctgatacaccacacgcaagtccctgttggctgcacacca

SEQ ID NO: 248742 - DNA, 120 bp, Artificial Sequence
  ENSG00000123066_85 (sequence is synthesized)
tctaccatgctgttcccttcttgggtccatcagctaggaaaagccacatgttctagcaggagttgcgagggtatatttcgtatactgcccttgcaaaatctctcattaaaaatggttaaa

SEQ ID NO: 248743 - DNA, 120 bp, Artificial Sequence
  ENSG00000123066_86 (sequence is synthesized)
ccccaggacttggcagagcttacaataaacatttgaataattggaaaggccttgcttttaatctgccttcatcattttagaaatatacgttgttctgaacctaacattatcagaatccag

SEQ ID NO: 248744 - DNA, 120 bp, Artificial Sequence
  ENSG00000123066_87 (sequence is synthesized)
agataaagctattgagacaactcaaccttctgttacttcatctgcaaatgagggatgaggatgattgcatgagaaatgctttgcaaactaaaaggcttgtatccatgttacagctgcact

SEQ ID NO: 248745 - DNA, 120 bp, Artificial Sequence
  ENSG00000123066_88 (sequence is synthesized)
gttgaagaaagactgagaaaagtgaggccaactttttggttaaaaaataatagtgatctcatccagttactgccttacatatataacttttatatagtcctgcagcagctaaataatcag

SEQ ID NO: 248746 - DNA, 120 bp, Artificial Sequence
  ENSG00000123066_89 (sequence is synthesized)
aactaggaggtacttttacaagcattcagtagcttcaatgcttagctcatacgttgggtggtactatattcaacaattagtgttggctttatagtaggaatgtcattttcataagtgccc

SEQ ID NO: 248747 - DNA, 120 bp, Artificial Sequence
  ENSG00000123066_90 (sequence is synthesized)
ccacctgtaccaattcagcaaccgcagctaaatctctttgaggtaggataaatgaatgcatttaaatgtcttccaagttagatgtagataagccatcagccttcagcagtttgcatcacc

SEQ ID NO: 248748 - DNA, 120 bp, Artificial Sequence
  ENSG00000123066_91 (sequence is synthesized)
cagattctgctcttcacaccagttcattccctccaaccatgtgattatgtagtttttggttttactgttcaggaagtcatgagcaaaggtatttgttaccaactgggcatcaaagaacca

SEQ ID NO: 248749 - DNA, 120 bp, Artificial Sequence
  ENSG00000123066_92 (sequence is synthesized)
ctaaaaatctttataaaagtacagttcgtcaatgagtttttaaaagcaaacctcgtaagacatactgcagaagcataagccacatattgaaaacagtctttgccgcttgtcatttacagt

SEQ ID NO: 248750 - DNA, 120 bp, Artificial Sequence
  ENSG00000123066_93 (sequence is synthesized)
caagccagtataaaaaggaaatcgtgctttggaattcaccgcacgcccaaatcctatcaagatgcaattttcacttattaccgtgttattttggtgttaaacgattctcttgtttatatt

SEQ ID NO: 248751 - DNA, 120 bp, Artificial Sequence
  ENSG00000123066_94 (sequence is synthesized)
cccttgacaaaaaggtcactttagcagtaattatttcatgtcattaatacctaatgagacaccactagaaaattctgttgtgccaggtaattatagagggttgtaatgtttgccctgggc

SEQ ID NO: 248752 - DNA, 120 bp, Artificial Sequence
  ENSG00000123066_95 (sequence is synthesized)
atcctgctctgcctggaaccagatttaccagtcttcctccactttgcttacaattccagggtcacgtttaaaaaagattttttgacacttaactgcttctagctagaacgctaaatcatg

SEQ ID NO: 248753 - DNA, 120 bp, Artificial Sequence
  ENSG00000123066_96 (sequence is synthesized)
aagcagttaagaaatagaagttgatgagaaagtttaatctccaggaagaaggttggacataaccaaagtattgatttttctctgtaaaggctatttcctcaatgaattcaagttcccagg

SEQ ID NO: 248754 - DNA, 120 bp, Artificial Sequence
  ENSG00000123066_97 (sequence is synthesized)
tgatgggaagacccgaagacagacattcctgttagtcccactttttctttgttttctttcaaacaagcagggaagtgaggaaagcacaggttcagttttaataatctgctaacatggcac

SEQ ID NO: 248755 - DNA, 120 bp, Artificial Sequence
  ENSG00000123066_98 (sequence is synthesized)
ttgtctgggctgttacccatatgggtcaaaccatgtctgtcctggagtgtgcttgaaattcacccagtgatcacagcatgcagacacgttgaaattggcagcatctctgagcatttctct

SEQ ID NO: 248756 - DNA, 120 bp, Artificial Sequence
  ENSG00000123066_99 (sequence is synthesized)
ggctcctgctgcctagtgtatacctcttttgccttgctgttgggtgaggcatgtttcaatctacttgttttataagactagacaatattcagtaaaatgggccaccccagagcttagaac

SEQ ID NO: 248757 - DNA, 120 bp, Artificial Sequence
  ENSG00000123066_100 (sequence is synthesized)
agaagctctgggaaaaaaaatatctaatacgaggaagtattcgttgtgggggaatgtcaatttaaataatttaacatgtaaaatagtaattgtcttaatttaggctataacgtttttcag

SEQ ID NO: 248758 - DNA, 120 bp, Artificial Sequence
  ENSG00000123066_101 (sequence is synthesized)
taagcattttcacgttagcttctcataaatcttagtttgttcacttagaggtcttgatgttcttattaatttcgatacattatttacatatataatttcctgtctgcttcctttgaagta

SEQ ID NO: 248759 - DNA, 120 bp, Artificial Sequence
  ENSG00000123066_102 (sequence is synthesized)
tgtgattttttttttaattgtagaggagacacagtttctgtaattatacatacaccagtgttttttgttgttgctatttcttgtattactgcaaagcttaggaggttttctctcttaggt

SEQ ID NO: 248760 - DNA, 120 bp, Artificial Sequence
  ENSG00000123066_103 (sequence is synthesized)
ctaggggtcaagatcacgtttgcttgataagatgaaccaatgaacttccccgtcattttccgtgagcccaaagagtttatctttcatgacaccaactttctattgggctgagactgaata

SEQ ID NO: 248761 - DNA, 120 bp, Artificial Sequence
  ENSG00000123066_104 (sequence is synthesized)
aaggactgaagtaggcactcacgaaatgtttgtcaaatactgatactgttgaaagagtagaattagttgcacctcaaaaatctgaaataatttaccagtaaattcatcagatcctgatgc

SEQ ID NO: 248762 - DNA, 120 bp, Artificial Sequence
  ENSG00000123066_105 (sequence is synthesized)
cttttggggaagcggtttacaaaacaggaatttttttttttttcgtttttggttgatttggggtttccatttcttttgttgattttgttaatttagatttttacaggaaaaaaatgagtt

SEQ ID NO: 248763 - DNA, 120 bp, Artificial Sequence
  ENSG00000123066_106 (sequence is synthesized)
tttcaaatgtattacttaatgcaatggtgcagaatacccccttaattttgaaactttttggtgatgtatgctcttttccatttctagcaatattaatgcttttattccacctcgattgat

SEQ ID NO: 248764 - DNA, 120 bp, Artificial Sequence
  ENSG00000123066_107 (sequence is synthesized)
ttttttttagtttttgtttgatttttccaaagaaacagctcatggacttaacaattctgctgtttgtaccttggctttgtcttcttattctttttcctagtttccttgagagttatgttt

SEQ ID NO: 248765 - DNA, 120 bp, Artificial Sequence
  ENSG00000123066_108 (sequence is synthesized)
tttccttgagagttatgtttcattttgcttgaattttaattgcctgcttagttaatttattttcacttttgatgatataggcattatagcctgggggcttctggatgtgttggccctcct

SEQ ID NO: 248766 - DNA, 120 bp, Artificial Sequence
  ENSG00000123066_109 (sequence is synthesized)
caaattatatgcagaattcttcatgtgcatttttttttagggagacagtctttgtatcagattctcagagatgtcaaaccctaaaagggataaaattgcttttatcgtttgagatgtcaa

SEQ ID NO: 248767 - DNA, 120 bp, Artificial Sequence
  ENSG00000123066_110 (sequence is synthesized)
acgctaaaagggatgaaatctggcactagatttaagttgattacatcctacaagtcttgatgcttaatgttttcatttttatttttatactcttggttctttatttcttttttgatccgt

SEQ ID NO: 248768 - DNA, 120 bp, Artificial Sequence
  ENSG00000123066_111 (sequence is synthesized)
ttttgttaaggaaaattctcttaaagtctctcacgctgtaatattctcctatgctacaacataatcttgcattctctgaaatcttcaaaacaaggtgtgtcctatttcatgggcagtgtt

SEQ ID NO: 248769 - DNA, 120 bp, Artificial Sequence
  ENSG00000123066_112 (sequence is synthesized)
gcagtgttgcctaatataaatagaatgtgaaccatacatgtaatttaatattttctagaagccacatttaaaaagtaaaaataaacaggtgaaattaattttaatatattttatttaacc

SEQ ID NO: 248770 - DNA, 120 bp, Artificial Sequence
  ENSG00000123066_113 (sequence is synthesized)
ccaaattcttattccatgtcaacctaaaatcaatatgaaaattatcagtgaactatgtagcattcttatttttgcagtaagtctttgaaatctgtatgtagttaacatttacagcacgtc

SEQ ID NO: 248771 - DNA, 120 bp, Artificial Sequence
  ENSG00000123066_114 (sequence is synthesized)
tacatttggatgctaaattttcaatagttgaggaaaaatgtagttctatcaaaaaaaaagggatttagcagaaaaaatgcactgcttccgtttttaaattaaatttaaattaattagact

SEQ ID NO: 248772 - DNA, 120 bp, Artificial Sequence
  ENSG00000123066_115 (sequence is synthesized)
taataaaattaaaagattagtttctcagtcacactcaccgtatttcaaaatgatcaacagccacatggagtagtggtgatcctatgggccagtacagctggggtgtaagatttggtagca

SEQ ID NO: 248773 - DNA, 120 bp, Artificial Sequence
  ENSG00000123066_116 (sequence is synthesized)
actaattgtgtcttgagtatattgtttttgtttgttttctacaccccattcggacctcaacctctgtcccaggcaggcagtaggagttaaaatttcctgctggaagtttggtcttccttt

SEQ ID NO: 248774 - DNA, 120 bp, Artificial Sequence
  ENSG00000123066_117 (sequence is synthesized)
gtacttccttactggtgcataaaggtttaatgatgtttatgtattatataatttatctctgtataatcaccctttgttctgcataatgctctttgctttaaattatccttttaataccgc

SEQ ID NO: 248775 - DNA, 120 bp, Artificial Sequence
  ENSG00000123066_118 (sequence is synthesized)
ccctctttcctttgattagaattccagtgttatatctttggcccaccacttattttcaacctttgtcattttgtgtcaggtgtacttcatacaaactcttgtattttatttcttaagaga

SEQ ID NO: 248776 - DNA, 120 bp, Artificial Sequence
  ENSG00000123066_119 (sequence is synthesized)
acaatactatttttatttgaatagggtaatttttgcctttgcatttcctgtttcatgttatactttgacttgtcagccaatttttataaatacacatacagatttatttgcttcctttaa

SEQ ID NO: 248777 - DNA, 120 bp, Artificial Sequence
  ENSG00000123066_120 (sequence is synthesized)
agacctgcgttgtaaatattgctttaccaaacagggaccccttccccttccccatttctttatttgttaggtcacggaggagtaaagtatctgcacgtaaaattggactacagaagttat

SEQ ID NO: 248778 - DNA, 120 bp, Artificial Sequence
  ENSG00000123066_121 (sequence is synthesized)
ggtcggtttgataacatcgcttttatctgccttcgcctctctcgcgctctctctttctgataattgacaacttttccttcggatttgaatcgcctgccttaatcttgaagcagttagggt

SEQ ID NO: 248779 - DNA, 120 bp, Artificial Sequence
  ENSG00000123066_122 (sequence is synthesized)
agggacggagaaagattccctgaaaaagaataaggtaccatttaacagagagagagtccagcatggtgtgggtttctatctatgtcagtacaacatgtgtgggaagactttggaggcaga

SEQ ID NO: 248780 - DNA, 120 bp, Artificial Sequence
  ENSG00000123066_123 (sequence is synthesized)
acgtttgagatagtcttgcctgattgctctgtccccatattcatgctcttggtactattgtattgaacagcgtattgttcctttttatgtcatggctcacctttgtttaaaagtcagccg

SEQ ID NO: 248781 - DNA, 120 bp, Artificial Sequence
  ENSG00000123066_124 (sequence is synthesized)
aacataaatgaagcctcatattttccaggctatagcttgtacagtgcatgttttctctcatatgctaattcttgttggcctatgctccctatttcttttaaaatattattccgaactacc

SEQ ID NO: 248782 - DNA, 120 bp, Artificial Sequence
  ENSG00000123066_125 (sequence is synthesized)
caaaatgtaaaggaaaaaatgtttgtaacagtaggtatacacaatttatcgagcgcttcttatccttactgtgctgagcgctgtacctatatattctctgggttaatatcaactctaccc

SEQ ID NO: 248783 - DNA, 120 bp, Artificial Sequence
  ENSG00000123066_126 (sequence is synthesized)
atagactatcagtattaattttactggtttcatcatcataaaaatgagtactggttgtgtctgctgtctttaatttcaaattttcagacattctaaaatatgggccattgaaataggtat

SEQ ID NO: 248784 - DNA, 120 bp, Artificial Sequence
  ENSG00000123066_127 (sequence is synthesized)
tcttgagaatcaaggaaataaaacaattataagaggccggtatagttaggggaatgctttttagattgttttatacagatctccctagacccagaaagccaaatctataatttagcatct

SEQ ID NO: 248785 - DNA, 120 bp, Artificial Sequence
  ENSG00000123066_128 (sequence is synthesized)
aaaatgttgttaaaggcagcttttaacaccatggcaggtctgtaatcaaatgccaccagtactgcttaggcataaaacactgattcactcagaataccccataggattgaggggaaagtg

SEQ ID NO: 248786 - DNA, 120 bp, Artificial Sequence
  ENSG00000123066_129 (sequence is synthesized)
gggagctcatggttctgttgaaattccagagaaaggacctatcttttacttcctttggttgcatagaccatggtttatcatacttgtgctcataacaagttccattctaccctctaattc

SEQ ID NO: 248787 - DNA, 120 bp, Artificial Sequence
  ENSG00000123066_130 (sequence is synthesized)
gtgtatggcgtcgtgatgtcaaaccagattgcaaagagttatggatattctggtggggagatgaacccaacctagtgggtgtaatacatcatgaactgcagggaaacattggctccggtg

SEQ ID NO: 248788 - DNA, 120 bp, Artificial Sequence
  ENSG00000123066_131 (sequence is synthesized)
tatctggaaactgaattaatgtatggaattctggtgattttgaaaacatgaatgataccattttgcagcagcattgtagatttgtagtattttagattggtatcacagtgcacctgaaaa

SEQ ID NO: 248789 - DNA, 120 bp, Artificial Sequence
  ENSG00000123066_132 (sequence is synthesized)
ggaaagtataacgtaaaaattttaagtgataaaacattttgatagtttaattggtggtgtttttatttttggtgatatatctcatctggtgtattgcttcagcgacttactaatttgtta

SEQ ID NO: 248790 - DNA, 120 bp, Artificial Sequence
  ENSG00000123066_133 (sequence is synthesized)
taatgctgtaccgttcctcaaatatgaatatttccagttttctatgtaaatgaagtgggtacagcatggataggttctttggaatttctagtgtttgtcttataagtgataaataactct

SEQ ID NO: 248791 - DNA, 120 bp, Artificial Sequence
  ENSG00000123066_134 (sequence is synthesized)
ggttctcttggtctgtgatttcctgcttttgatagagccattaatacaagaagtattcactgttgttgtttactatatgtaaaaagaagcactggctgaagataaaaggcaatgaaaact

SEQ ID NO: 248792 - DNA, 120 bp, Artificial Sequence
  ENSG00000123066_135 (sequence is synthesized)
gcatcagactcaggacagacagcagggaaggggccatgaggtgcctgagagggacagctgctcctcagctccagcaagtggtggttatgcaggaatatgggtctcccagttcaagggaag

SEQ ID NO: 248793 - DNA, 120 bp, Artificial Sequence
  ENSG00000123066_136 (sequence is synthesized)
ctggcaatctagatttgtgtgtgaaatttcctggagtgatttgttccaaagtttaacaaaatattctgtggaccaccactttgcaacctgtgttttactgatttagggacacgtttgaaa

SEQ ID NO: 248794 - DNA, 120 bp, Artificial Sequence
  ENSG00000123066_137 (sequence is synthesized)
atgtcttaagaatccttaatcatcctgtgtttcaaatttagttggcagataaatcttagatttctttccatgccccttccctcatcagctagaagggtaagagggaggcagagtcttcag

SEQ ID NO: 248795 - DNA, 120 bp, Artificial Sequence
  ENSG00000123066_138 (sequence is synthesized)
gaatccagctgtgcagattcacaccacatcacctccagcgtcattagctctttctgcagacctttttaagaatctgatttgcatgatgaaccctccatcctgagaaaaaaatacgtatgt

SEQ ID NO: 248796 - DNA, 120 bp, Artificial Sequence
  ENSG00000123066_139 (sequence is synthesized)
ccaagcgtgcttgcacagttttgcatggagttcagacaactttcaaattttaggttagaaatccctccccagggcgactgctgggactaaagtcatctgcatttagaaggcagtgaatcc

SEQ ID NO: 248797 - DNA, 120 bp, Artificial Sequence
  ENSG00000123066_140 (sequence is synthesized)
catccgtgcctgcagcggacttcggtccttgagggcttcagctgtgtttccctgtgcctctggctgcactgaagattggccttctcttcatgcattctgtattttgtgaaaatattttta

SEQ ID NO: 248798 - DNA, 120 bp, Artificial Sequence
  ENSG00000123066_141 (sequence is synthesized)
caattaggagcatttaaagagtttttaaaagcttttatttaagttccattttttcctacttatcatataaacaaaacattgatatttgcaaataaaagtaataattaagaaacttttgca

SEQ ID NO: 248799 - DNA, 120 bp, Artificial Sequence
  ENSG00000123066_142 (sequence is synthesized)
gctgtcttatgaaaatccttggaaacagatttccatggttttaaaaagtcgcacctatccatttttccacttttaaacaattcttccattaaacttttttatatagagtaatccatttcc

SEQ ID NO: 248800 - DNA, 120 bp, Artificial Sequence
  ENSG00000123066_143 (sequence is synthesized)
ccttttattattgttgatactaaattatcaattattttctctaatttagtagaagaatatctttcctcctgactcctaagtcaaatattttagaatctactacagctaataacgtcattg

SEQ ID NO: 248801 - DNA, 120 bp, Artificial Sequence
  ENSG00000123066_144 (sequence is synthesized)
ataactgaggctcgaggtgatggtgaggaagaggagggtgctagcccccttatcttctctgtttcttctcacttctcttccagtgctggacatcagcatgctctcctcccaggatgtggt

SEQ ID NO: 248802 - DNA, 120 bp, Artificial Sequence
  ENSG00000123066_145 (sequence is synthesized)
taggggagtctttttctttgaccatttagttttataatctctttgttttcctaaagttacttttggagtcaagtttcctaccacccttggcataatccaggtcagtgaggaagctaatcc

SEQ ID NO: 248803 - DNA, 120 bp, Artificial Sequence
  ENSG00000123066_146 (sequence is synthesized)
ctaaaaagtgcattttttagattctcctcattttcccaatcctcactgcattttcatctggatggacttctgggccagttctgtctacttcatcatagtcagaatcataatgcttatctt

SEQ ID NO: 248804 - DNA, 120 bp, Artificial Sequence
  ENSG00000123066_147 (sequence is synthesized)
gaaggaaatgatgtagtgctgcttggaaagttaattttaacttgttctagtctgccctctgatcttactgaacctttataaacaaattctgacttacttaattaagagtcctcatcagtg

SEQ ID NO: 248805 - DNA, 120 bp, Artificial Sequence
  ENSG00000123066_148 (sequence is synthesized)
accatttaattagatgatttcaaaaatacttttaagaatgtcttgtgaacatggagtgacatttcagatgccagaattaagaccagtgcaccaggaatttcaaaattgtaaggttgtggg

SEQ ID NO: 248806 - DNA, 120 bp, Artificial Sequence
  ENSG00000123066_149 (sequence is synthesized)
ggacattcatgatctataaatgtatgagtaggcacggaatagtaaatttacgttgttgctacaaagaaatgaggagatgctaacatgatgtaatgacatcaattaagtcactgccttgga

SEQ ID NO: 248807 - DNA, 120 bp, Artificial Sequence
  ENSG00000123066_150 (sequence is synthesized)
tacattcatttctgaacagtgtctggtcagggcatatataatactattaaatcataattaacagaaaatttgtgtaagcagttttaaagcccagccatttccttgaatggaaccttcaac

SEQ ID NO: 248808 - DNA, 120 bp, Artificial Sequence
  ENSG00000123066_151 (sequence is synthesized)
ataagttacaaaatgtaaaaagcactgccagatctttttaagagggtacagacagacactcttttaaatttttcttaatgacttcactagggttgcttattcggcagtaattgatacctc

SEQ ID NO: 248809 - DNA, 120 bp, Artificial Sequence
  ENSG00000123066_152 (sequence is synthesized)
cttaggaagagtatacactagaggattttgtcggggcttagtaagccttcacttcatctactctagtaagggataataatacgggctctcctgctggtgaacaggtagtttactttttgc

SEQ ID NO: 248810 - DNA, 120 bp, Artificial Sequence
  ENSG00000123066_153 (sequence is synthesized)
aggtttattatattccctgccataagcacccatttagcgtcatggagattaatagcagaatctccttgtcctatttactttaaaaaaaaaaaaggcgatcagcatactcactgcttcagt

SEQ ID NO: 248811 - DNA, 120 bp, Artificial Sequence
  ENSG00000123066_154 (sequence is synthesized)
ggcccctgctattggtgatctccaaatgtctgtaacagaacagatggcccataaaattttaatgttatcttatgggaaaatattatgagtagggattacttaggagattttagtgggcat

SEQ ID NO: 248812 - DNA, 120 bp, Artificial Sequence
  ENSG00000123066_155 (sequence is synthesized)
atgtctcagttagcaacagtaggcaggaatctgctaattctttgtccgttagcaatcaggtagtgttcagcagcctcctcttgtacaggaggaattggcttgagtgaagaaacatttttt

SEQ ID NO: 248813 - DNA, 120 bp, Artificial Sequence
  ENSG00000123066_156 (sequence is synthesized)
tttttagagagcctagtccaagttttagagagacagatagcaatttaagggtacattacaattacctgaaaggaccaacttgtaatgttggtttgattgcatgtgataaccctaaaagaa

SEQ ID NO: 248814 - DNA, 120 bp, Artificial Sequence
  ENSG00000123066_157 (sequence is synthesized)
caagagaggtatgttattcactaattgagatgagtggcttcagctcagaccctttctctcttcttcttctgcaccttttctcccttgacctcatgattctgtgaatcctatgaagtgctc

SEQ ID NO: 248815 - DNA, 120 bp, Artificial Sequence
  ENSG00000123066_158 (sequence is synthesized)
tatttctcttctcaaaagaaaggggcaatggtcgatctaaagctgcagtgttaaaaatttgagacttcttataaattattatgaattataaactttattattaaacttacttactatcaa

SEQ ID NO: 248816 - DNA, 120 bp, Artificial Sequence
  ENSG00000123066_159 (sequence is synthesized)
cttaattagtaacaactttgtacaacataaccacagaaaagaaaggggagttgaaaaagatacctcccattttagaggagtacattgccattttccatctgccctcgatgctctctggct

SEQ ID NO: 248817 - DNA, 120 bp, Artificial Sequence
  ENSG00000123066_160 (sequence is synthesized)
tggtttgcctgtattttggtaaggtgataaatgttactcttacctttaatctgtaaacattctttagggagcctgtgtgctctagaattgagcccttttgtttttcatgttcgtgtaatt

SEQ ID NO: 248818 - DNA, 120 bp, Artificial Sequence
  ENSG00000123066_161 (sequence is synthesized)
aggttaattatcccctaaccaaaatactaggaaccagagtgttttggatttccgattttggaatatttgcatatatataatgggagacctttgcagtgggcccaagtctaaacataaaat

SEQ ID NO: 248819 - DNA, 120 bp, Artificial Sequence
  ENSG00000123066_162 (sequence is synthesized)
ttatttatgtttcatatacaccttacacacataacctgaaggtaattttatacaatatttttggtcatgttgtgctttatacaaagttttgattaaattttgactgcaatacatcacatg

SEQ ID NO: 248820 - DNA, 120 bp, Artificial Sequence
  ENSG00000123066_163 (sequence is synthesized)
aggtctgataacggaattttccacttgtggcgttttattggcattccaaaagttttgggttttggtgcattttggatttcagattttttgattagggatattcaacctgtacatgaaagt

SEQ ID NO: 248821 - DNA, 120 bp, Artificial Sequence
  ENSG00000123066_164 (sequence is synthesized)
ataaaagaaaaatagtcataattccgtcttttacattcaaccaccataaccattttggtgtatttctagcttgtttctctatttttgtttacacagttgagatcatacttttaatataac

SEQ ID NO: 248822 - DNA, 120 bp, Artificial Sequence
  ENSG00000123066_165 (sequence is synthesized)
ttattttctacctaatgttattcattaacacattttcatattatttaaattcttacaagcaacatttttaatgactgcatattttccatagtcattcctatatctccacttctttactgt

SEQ ID NO: 248823 - DNA, 120 bp, Artificial Sequence
  ENSG00000123066_166 (sequence is synthesized)
tataaataaagccataggacacgtttatgtataatcttatttttcacatttcaggtcatttttaacatggattcttagatgctgacaaatattgccaaattccattccaaaagaggttac

SEQ ID NO: 248824 - DNA, 120 bp, Artificial Sequence
  ENSG00000123066_167 (sequence is synthesized)
gggaaaaatgccatgtctattttcagttctgctactaaaacaggtgtgtacaatgattatttgcctcacttggattgttgctaaaatgaaatgcaaaggagatgcttctcaatgtaaaat

SEQ ID NO: 248825 - DNA, 120 bp, Artificial Sequence
  ENSG00000123066_168 (sequence is synthesized)
ttcttattgtaataagaatttcatctcatctttaatatatttttcatagtttgtttttcagttcctttcaaaactgataaacatatttggaaataattgtctctaaatttaactaaaacc

SEQ ID NO: 248826 - DNA, 120 bp, Artificial Sequence
  ENSG00000123066_169 (sequence is synthesized)
aaccatagggaaaaactcacaggcaggtcatgttcattgagatccgtgtcctctccctactcctttgcgcttggtggagttgtttattctgtgtcttttgcctcctttcctacagatgtc

SEQ ID NO: 248827 - DNA, 120 bp, Artificial Sequence
  ENSG00000123066_170 (sequence is synthesized)
ttgcatctgatatctggaaactgaattaattggtattaaatttgtgagtcattgaaattaatccctgactgaattggaaaggaattgtatttgcagtatttggatttatttatttttcag

SEQ ID NO: 248828 - DNA, 120 bp, Artificial Sequence
  ENSG00000123066_171 (sequence is synthesized)
aatgagtatgcttattttcactgcacctttgacagctttatagtgtaatgattttttaaaaaattctatatagatgaaaaacaatgcttcggatgtttgggtttcgttttaatgtcactt

SEQ ID NO: 248829 - DNA, 120 bp, Artificial Sequence
  ENSG00000123066_172 (sequence is synthesized)
taactgaagctatcttgtaaaattaaaagattgaaattaaagttatcagagtacattgctgatagttttccattgttttgaagtctgtatcctaaatgattaggtaataattccaaaaaa

SEQ ID NO: 248830 - DNA, 120 bp, Artificial Sequence
  ENSG00000123066_173 (sequence is synthesized)
gtataacttgaccaacataatcgtacatcttttgaaattgctggtgatagagaattttatgtcagcggaaggaattaggatttaattatattatgtgtggcacagatatattttaaggct

SEQ ID NO: 248831 - DNA, 120 bp, Artificial Sequence
  ENSG00000123066_174 (sequence is synthesized)
gaggttacctctccccattgtggtaaggaattcatgccgtttcctttttcagcttgcttgttagtgtgttagatctcagtttctaggtttttggtttttgttttttttttgtatttgtgt

SEQ ID NO: 248832 - DNA, 120 bp, Artificial Sequence
  ENSG00000123066_175 (sequence is synthesized)
caagctagaagaggtattttatctaacccagagattggctggttgcttagttggtcttctacattgatataagagttgctaggctggatgtgttggctcacacctgtagtcttagcactt

SEQ ID NO: 248833 - DNA, 90 bp, Artificial Sequence
  ENSG00000123066_176 (sequence is synthesized)
aggctggatgtgttggctcacacctgtagtcttagcactttcggaggctgaggtggaaggattgcttaagcctaggagtttgagaccaca

SEQ ID NO: 248834 - DNA, 120 bp, Artificial Sequence
  ENSG00000123066_177 (sequence is synthesized)
aggatcacttgagcccaggagtttgagatggcagtgagctgtgatcacataaccacttccgcctggagagcaagaccctgtctcaggggggaataaaaacgagttggcaggtttctttaa

SEQ ID NO: 248835 - DNA, 120 bp, Artificial Sequence
  ENSG00000123066_178 (sequence is synthesized)
gggaataaaaacgagttggcaggtttctttaactcttaggtttaaatagaggagatacttctctgaactttaaaacatttttgagaagagaggcaagcaaattcttactgttttttttat

SEQ ID NO: 248836 - DNA, 120 bp, Artificial Sequence
  ENSG00000123066_179 (sequence is synthesized)
gtaggactttaggcaataataaatgtatcccttttagtttttaatgttttaatttcctaaatttattttctttatttttctaagctaatctgtgtcttagatcagaaatcctttgcgttt

SEQ ID NO: 248837 - DNA, 120 bp, Artificial Sequence
  ENSG00000123066_180 (sequence is synthesized)
tccagctctggtctgtatcctgggacaacagttgtagttgtgtttactctgcaggggtccctcgttttgtgatgcacatacttagaggaagttgatttctcctttccttgcctcagtgct

SEQ ID NO: 248838 - DNA, 120 bp, Artificial Sequence
  ENSG00000123066_181 (sequence is synthesized)
tccgtatataaatgaatgcattttcactccatcttttaaaacctacttcctacagatatgtgtggatctcaaagggaattttacaacaccaaagctaaacatgttttaaacaaaagtttt

SEQ ID NO: 248839 - DNA, 120 bp, Artificial Sequence
  ENSG00000123066_182 (sequence is synthesized)
tattgcatgaaaagtatcccattagtaaaagccagcatacacctctttaccataagagagctccttaaaacaccaattgctatttttagttggtaatgttgttctgaacaactctatgaa

SEQ ID NO: 248840 - DNA, 120 bp, Artificial Sequence
  ENSG00000123066_183 (sequence is synthesized)
atgcttgcacttttataagtaaaatgcttgggagtgaaaaatgatgcaagtagttaacactgtgtttgttgtaacttggtgcaggtcagcttagtcccaagggagaaaagctgctcagcc

SEQ ID NO: 248841 - DNA, 120 bp, Artificial Sequence
  ENSG00000123066_184 (sequence is synthesized)
aatgacctacattcactccagtgttatataaaatttctattttaggcagttttagtttagtttattctttgagtttgaatttttcacttctatgagcaattcatctgttttctctgttaa

SEQ ID NO: 248842 - DNA, 120 bp, Artificial Sequence
  ENSG00000123066_185 (sequence is synthesized)
atttttctagaatttcaaaaataaatgtctctacttgttttttattttgtttccagaaattatgaattattgcctttctaaaggttattatgctcaggcagaacaccatcaggagctcat

SEQ ID NO: 248843 - DNA, 120 bp, Artificial Sequence
  ENSG00000123066_186 (sequence is synthesized)
aagataaagtgaggtttagattaaaataaatggcaaaaagacttcgagtaatatcgtttttctccattttgcttggaacaggaagagagaagtaaatgattttactttattaaaaacaaa

SEQ ID NO: 248844 - DNA, 120 bp, Artificial Sequence
  ENSG00000123066_187 (sequence is synthesized)
agaaccaaatgttataaatatttgctgaagtttatacattttaatctgcattaaggtaatggttagttggtcaatgctgcctctgcctcagtctgcagcgagaacattgtgttttcattt

SEQ ID NO: 248845 - DNA, 120 bp, Artificial Sequence
  ENSG00000123066_188 (sequence is synthesized)
ggtaaatacagttgagcatctacggtgtgccaggtgctgtattaggtgctaaggatgcaggggtgaacaaaacaggcccctgcctccatgcaattctcattctctgggtggcacagtttt

SEQ ID NO: 248846 - DNA, 120 bp, Artificial Sequence
  ENSG00000123066_189 (sequence is synthesized)
atgcaagttatcacatgtgaaagaatttatagtttttattatgcaagttttcaaataaatccaattgctgttatcttttgtttttcatggaatatctcgcatctcagaacacagtttggg

SEQ ID NO: 248847 - DNA, 120 bp, Artificial Sequence
  ENSG00000123066_190 (sequence is synthesized)
aatcatattttatttagtgttttcagatgctatctattatatctaagatatttcacatttagccattcgttttataaaaaactccaggcaaactcagctggacttttcttgctttaataa

SEQ ID NO: 248848 - DNA, 120 bp, Artificial Sequence
  ENSG00000123066_191 (sequence is synthesized)
caaactcagctggacttttcttgctttaataacagctttattgagatacaattcacatatcacgaaattctttttaaaaattttacagttcaggccgggcgcggtggctcatgcctataa

SEQ ID NO: 248849 - DNA, 120 bp, Artificial Sequence
  ENSG00000123066_192 (sequence is synthesized)
gcccctttgtgatggctcgctcctatgtccttttgacatgatcccatcgttggagcatccccttactttctggcatagcaatatgttccaggctctgaatagtgttttgaggggagaagt

SEQ ID NO: 248850 - DNA, 120 bp, Artificial Sequence
  ENSG00000123066_193 (sequence is synthesized)
gagcttgtatgagaaaaactttttacgtctcttcctgagtctgtatgtagtactttcaggtaatcaaagctgtgaggacttaccagtttcttatccaaactattggctagggtggttacc

SEQ ID NO: 248851 - DNA, 120 bp, Artificial Sequence
  ENSG00000123066_194 (sequence is synthesized)
actgtaatacaactgcttaggacacttgaactacagttgatatgttatttaagctactcagaaagacttttctgacggaagatttctctatttctcattctcaactttagctcctctgag

SEQ ID NO: 248852 - DNA, 120 bp, Artificial Sequence
  ENSG00000123066_195 (sequence is synthesized)
tgttcctccaaatctgtcttttggagtagacctagaaatcatctgttactaaggtgtactatgcatgtggaaccattgatttaagagttgagtactcttaagtattctaaatatttggta

SEQ ID NO: 248853 - DNA, 120 bp, Artificial Sequence
  ENSG00000123066_196 (sequence is synthesized)
attctgtctcccactgtaaaacgaaacaaagtacacagaaactctatccaagaaaatgtggaaaacttactgttgccataatcctgtaccagaataaagctcttggtatctctgcaataa

SEQ ID NO: 248854 - DNA, 120 bp, Artificial Sequence
  ENSG00000123066_197 (sequence is synthesized)
ctctgatttttagtctggcatttaatcacatgagcggtttaccttagaatatattgctaattcatcttactactcgtaaatggagttgggaggctgttggctgagttgtcatctcatgtg

SEQ ID NO: 248855 - DNA, 120 bp, Artificial Sequence
  ENSG00000123066_198 (sequence is synthesized)
tcatctcatgtgtctttgaatttaattttaattttacatttcaatgttgtgacattgtataagtataaataaataaaaggccttctatttgtaaaaatcattttttgctttattttatat

SEQ ID NO: 248856 - DNA, 120 bp, Artificial Sequence
  ENSG00000123066_199 (sequence is synthesized)
catcaccagttcatttaatgttaaagataatcttgcccagtaatgcacttggtttgtttttgaataacagatcagagaaaaaccttctgaatatttcaataattttacacaataaggtta

SEQ ID NO: 248857 - DNA, 120 bp, Artificial Sequence
  ENSG00000123066_200 (sequence is synthesized)
tttttggtgaagataaatagtaactataaaaataggtacagaagatacatagtttgttgtgataaatgcaaaaaaaaaaaaagaattggagggcttgagattatgccttttagctgcttg

SEQ ID NO: 248858 - DNA, 120 bp, Artificial Sequence
  ENSG00000123066_201 (sequence is synthesized)
cttccaagtataagggaaaccagaccaattgtcagttactactggaggcaccaccctaatgtaacactgtgtccctgaaaattgacttgggagggaagaattgcttaaggtctgcaagct

SEQ ID NO: 248859 - DNA, 120 bp, Artificial Sequence
  ENSG00000123066_202 (sequence is synthesized)
ctcctttgatggcgcaatctgccctcacaagatccatgaaaaaaattcactgtttcttacacttgataagcttgtaaccatctcctttgtttcactatctgttggtatttctagaggttc

SEQ ID NO: 248860 - DNA, 120 bp, Artificial Sequence
  ENSG00000123066_203 (sequence is synthesized)
acctggtaaacgcttctaccaagaggcatctaccaataggcatacattaggaaatatttgaatgctgccctacttatatacacgtcactctgttttaataacaccgtctgttcttaggct

SEQ ID NO: 248861 - DNA, 120 bp, Artificial Sequence
  ENSG00000123066_204 (sequence is synthesized)
actcagagagcactgcattgcaaaggtaagacagctctctgcaccacccacccgtccaccggaagggcatgggctccctccccatctctacctgctaaactttcagattcaaaattgaag

SEQ ID NO: 248862 - DNA, 120 bp, Artificial Sequence
  ENSG00000123066_205 (sequence is synthesized)
taggcttttctttgtccttcttgactccggatatggaaaatgtttaatggtcaaatgctttgtcctacttataggttagcacacatgtcatttgacacatgggcatataaagaactcttt

SEQ ID NO: 248863 - DNA, 120 bp, Artificial Sequence
  ENSG00000123066_206 (sequence is synthesized)
atgccatttaagtacactccaaatatattaatacatttttgccctactgtttgttaattaaagaatatagctttataagactttccatactgctgtcagtgccttctttgtatgttgaca

SEQ ID NO: 248864 - DNA, 120 bp, Artificial Sequence
  ENSG00000123066_207 (sequence is synthesized)
tatagctcttttgagccacccattctaaaactttacatagatgatctcatttaatcttcactgtaccatattattacgttaattttataactgagaaactagggccatgcagttagtaaa

SEQ ID NO: 248865 - DNA, 120 bp, Artificial Sequence
  ENSG00000123066_208 (sequence is synthesized)
tgacacagatggaatttgaaactaggcagtctgtcctgagaacctgtgctcttaagtggaattgatggacccagagacaaaaacatatattcttgacaaagtatgctaatttttatttaa

SEQ ID NO: 248866 - DNA, 120 bp, Artificial Sequence
  ENSG00000123066_209 (sequence is synthesized)
tcatgaatataaactgtaaaagcaaatcactatatcggtgaatttttagttgtttttacaaaaagtttaaactttgtaaatgctttaaggcataaatgctcttttttttttttttttttt

SEQ ID NO: 248867 - DNA, 120 bp, Artificial Sequence
  ENSG00000123066_210 (sequence is synthesized)
aacgtcaaagcggctctagacaagtgtggatggctgtgttttaataaaactttatttacaaaaacaaatgggaggcaggatttggcctgtggatcatagtttgctggtccctgcattaga

SEQ ID NO: 248868 - DNA, 120 bp, Artificial Sequence
  ENSG00000123066_211 (sequence is synthesized)
ccatgtactttttttttttataggaaattcacatcaggtatttgtagaatccctaaacaaaaatcactggtacagatataacttgcactgtaggaatgcctaagtgtacctcgcttccta

SEQ ID NO: 248869 - DNA, 120 bp, Artificial Sequence
  ENSG00000123066_212 (sequence is synthesized)
caatgcaggttaaatctggtatcaaattttcagggtttaacagcagtttatataaatattacatcatatgtattaagtaaatgttttctttggcatttacaaattttttaagtaataagt

SEQ ID NO: 248870 - DNA, 120 bp, Artificial Sequence
  ENSG00000123066_213 (sequence is synthesized)
tgtactgtagactaatagacccttttcattttttaaaggaatatcataatgaatcttgtatcaagagcctggaggtctaatacattaggggattcatcattttatttctgtcagaatttt

SEQ ID NO: 248871 - DNA, 120 bp, Artificial Sequence
  ENSG00000123066_214 (sequence is synthesized)
ctatcttcctccccagtctgcttttttagtcaatcttatttcttaaaggctttgagctattcttaacccttggggaaagttagactataataggaaagaagagggaggataaaaatatag

SEQ ID NO: 248872 - DNA, 120 bp, Artificial Sequence
  ENSG00000123066_215 (sequence is synthesized)
agtaatagtctagtcacttggtattttggaaaattattaaggccatctccttcctttgtatgatttttgtaagggcacattcttcttccttatctcttagtggagaggaatgtgtgactg

SEQ ID NO: 248873 - DNA, 120 bp, Artificial Sequence
  ENSG00000123066_216 (sequence is synthesized)
gaggagcccatcaaaagattgaaagaaaatgtatgttcaggaataaaaacacaggaagaacctagtgtacaggaaatctgtttactaatctacagctccttcctttgaggagccaagatc

SEQ ID NO: 248874 - DNA, 120 bp, Artificial Sequence
  ENSG00000123066_217 (sequence is synthesized)
tgtgccacattgcatctccatgggacagtgtatgacaggagccttaggtttcagagtcagctttgtgaatttctgtttcttatctccagagtctttatgatgaaatacacactgcctttt

SEQ ID NO: 248875 - DNA, 120 bp, Artificial Sequence
  ENSG00000123066_218 (sequence is synthesized)
ctttcgtacttggtttgaaatatgaagctcacatctgtgatttcccatagttttaaaacaaacattcttcatgttcctggccacttttatttcagccacttcagtttggggttcattggg

SEQ ID NO: 248876 - DNA, 120 bp, Artificial Sequence
  ENSG00000123066_219 (sequence is synthesized)
aatatggaaacagttttccattcacttgctctttaaggggagaaatggcagcttatttgggggaaaaaaagtgtggaggtagagcagcctgcactggtgtggcattttatgagcaagatg

SEQ ID NO: 248877 - DNA, 120 bp, Artificial Sequence
  ENSG00000123066_220 (sequence is synthesized)
ggatccgaaagcaggggtgatgcataggaatggcgcatacttcgtgtgtgtaagggaggtcagaagaggggaccaagtgctttccacttctcagagtaacataatcctccacagtgctcc

SEQ ID NO: 248878 - DNA, 120 bp, Artificial Sequence
  ENSG00000123066_221 (sequence is synthesized)
agttaggtataatgcttttgtttggaggcaataaacattagaaaggaaatttatgccaacatttcaatctccactattagtatggcatcatttggagcacttcactcacactcgttgtga

SEQ ID NO: 248879 - DNA, 120 bp, Artificial Sequence
  ENSG00000123066_222 (sequence is synthesized)
gctcttttgggtgttctaagaactatttctcttcatttctgctgctgtttgactttcatggaaataactaacctacaacaataaacaaaactcaggtttacctccacctgccagtgcttt

SEQ ID NO: 248880 - DNA, 120 bp, Artificial Sequence
  ENSG00000123066_223 (sequence is synthesized)
cctccagagcagagtactgaaagaatcggaccttgagaaggaggagaaaggatagggcagctaacactgctgtcatcatggaaaagcactctaagtgcctaaatctggtctaggtagatt

SEQ ID NO: 248881 - DNA, 120 bp, Artificial Sequence
  ENSG00000123066_224 (sequence is synthesized)
agactggattagtgctggactctcaaaggtcatttcagacatgacttcagccacagaatagtaggcctttgttcctttgttaatgaagtgtaatagaagtcgagtaacattctctatagc

SEQ ID NO: 248882 - DNA, 120 bp, Artificial Sequence
  ENSG00000123066_225 (sequence is synthesized)
aaggaggggaacatatgtaaagccataattccctttagggcccaaccttggaaattcaattaccgggcagaactgctaaaaagctcaaatctcccatcagtatgaatttctaaagactgt

SEQ ID NO: 248883 - DNA, 120 bp, Artificial Sequence
  ENSG00000123066_226 (sequence is synthesized)
tttatatcagtgttgtagtatttctttatagtttggtgtcctgaatttgggggctcttatttcaggttctgaatgttctttataaatgtctgtatactggaatctagtcatgctgtataa

SEQ ID NO: 248884 - DNA, 120 bp, Artificial Sequence
  ENSG00000123066_227 (sequence is synthesized)
aaaaagtttgtatacttggaaaagattgtaaaggttattagtgtagtgtatccacctcgagttttgttcattgaaggatctttttcattagtgtattccagttgtacatattaaaatctc

SEQ ID NO: 248885 - DNA, 120 bp, Artificial Sequence
  ENSG00000123066_228 (sequence is synthesized)
tcacatttattgtaataaattcttctaaatatcacaggactactagaaatgtattacattgtcccttaggtttgatttttaaagtaatgcccacataactttttattcatctaataagtc

SEQ ID NO: 248886 - DNA, 120 bp, Artificial Sequence
  ENSG00000123066_229 (sequence is synthesized)
agaggttaggtatgcaaatatgatttatactttttaagatcatggcatcattgtaggggaatagaatttatatacatagaagttaaatactacaaggcagcatacaattaaaatgacaga

SEQ ID NO: 248887 - DNA, 120 bp, Artificial Sequence
  ENSG00000123066_230 (sequence is synthesized)
gaagaataattattataattctttggagatcagcagaactaagagtcaggaaatgtgtgtcctcatcctcctaaccaactctgtacctttgggcaaatacaagtgcctgttttttctggg

SEQ ID NO: 248888 - DNA, 120 bp, Artificial Sequence
  ENSG00000123066_231 (sequence is synthesized)
agatctagagatgagtaagataggctctgttttcaaaaaggtcagcttattagtttacttttctttcattcattcacttatctacctccctattcatctgttttacatacatttgttaat

SEQ ID NO: 248889 - DNA, 120 bp, Artificial Sequence
  ENSG00000123066_232 (sequence is synthesized)
tgtttgaaggttaattcctttgtggtggtactaaggctagtcattgaggttagaaatatgattaaattaccacccttatacttgagacactcacagacataaggagaaatggcacataaa

SEQ ID NO: 248890 - DNA, 120 bp, Artificial Sequence
  ENSG00000123066_233 (sequence is synthesized)
gttataatgtacttattgctgtgagtacaataatagacctgaatctaaagttgctggacattcagatacgacgtgaccaagtgatggggagcagtgtttaagttaaggcttgaaagttaa

SEQ ID NO: 248891 - DNA, 120 bp, Artificial Sequence
  ENSG00000123066_234 (sequence is synthesized)
gtaggaaacatttctaaagcccaaactttaaaataaaatgtatctaacagatattatataccattactgttataagtacttagaagatgaggagatcataatggtctggaagaatggatt

SEQ ID NO: 248892 - DNA, 120 bp, Artificial Sequence
  ENSG00000123066_235 (sequence is synthesized)
gtacttgaaatatggaaagaaggggtcattgagaggaagggggagggacattagtttaagtgtggaatgagccttgattaaacaacaaaaacgaactagattagctttcagggataagga

SEQ ID NO: 248893 - DNA, 120 bp, Artificial Sequence
  ENSG00000123066_236 (sequence is synthesized)
acagaccattggtctgtttttttggatgattagagactgataggtctaggaaagttttggattttaaactgtactaatatgtgttcctctgagggctgctgagtatagaactgaactggc

SEQ ID NO: 248894 - DNA, 120 bp, Artificial Sequence
  ENSG00000123066_237 (sequence is synthesized)
agaagggctatttttttttccagtctgatatgccgaaagcaggaatcctctaatctggtaacttttgttggattggaacactagaatctgaatttatacagtggccacatgaaggaaaag

SEQ ID NO: 248895 - DNA, 120 bp, Artificial Sequence
  ENSG00000123066_238 (sequence is synthesized)
gacatgaaaatgtgaaaaactctggtagaagaaatgactcatttcttcattgctgatccaggcattgaatttgactatccactggaggccaagtgctgcctgggtttggttttaaagata

SEQ ID NO: 248896 - DNA, 120 bp, Artificial Sequence
  ENSG00000123066_239 (sequence is synthesized)
cagagggttaggataggtgctttggcaatggtgatgggaatccaatatgaaaagaaaaggaggtacaagtcaaaggaggagaaagaaaggaacagagcaagcattttggagtggcctgcc

SEQ ID NO: 248897 - DNA, 120 bp, Artificial Sequence
  ENSG00000123066_240 (sequence is synthesized)
tgatctgttcatgaccaccatcctggtaattgtttctgctctgggccactgaacttattctttgtataaattatgaattactattaagcttaatgaagaaatgtttaactgttgggaata

SEQ ID NO: 248898 - DNA, 84 bp, Artificial Sequence
  ENSG00000123066_241 (sequence is synthesized)
ggattacaggcgtgcactggggtttcaccatgttcgccaggcaggtctcgaaattctgacctcaagtgatctgtccgcctcagc

SEQ ID NO: 248899 - DNA, 120 bp, Artificial Sequence
  ENSG00000123066_242 (sequence is synthesized)
attacaggtgtgagccaccgcacccagcataaacagagacttttaaaaacaaatgcattacttattgcttgcatgaaaggtacattttcaattgatgaagctagctaaaagaattaaaag

SEQ ID NO: 248900 - DNA, 120 bp, Artificial Sequence
  ENSG00000123066_243 (sequence is synthesized)
ataagaaaagtgtcagttgcagcaaaacatagcctcttccaggagtctcttattaaggggaatgctgcaaatgaaaacatggcttctctgtgagcagatcttgcactactggcagctcag

SEQ ID NO: 248901 - DNA, 120 bp, Artificial Sequence
  ENSG00000123066_244 (sequence is synthesized)
gaacttttgtgctgtgcacatactggtgtcacattgtcctggtcaggctggtgcgcttgtgtgtctttggctggttgctggtgaaagagcacctgcgtgtggtagagccttctgctgtca

SEQ ID NO: 248902 - DNA, 120 bp, Artificial Sequence
  ENSG00000123066_245 (sequence is synthesized)
gagattgtaatctttccattttagtttgttacatcataatgccatgaaatagatcttacatcccttagaaaagaaacccaagcaaataaatctgtacttacttgactgaggctgtcagtt

SEQ ID NO: 248903 - DNA, 120 bp, Artificial Sequence
  ENSG00000123066_246 (sequence is synthesized)
ttgctggtatcttctctatgtgtgcagcaaagacgatgctggccccgcttacctttctcagtcacctgttgttttctgtgagatgctgccacaaaggggatcactcactgcagtgtgcag

SEQ ID NO: 248904 - DNA, 120 bp, Artificial Sequence
  ENSG00000123066_247 (sequence is synthesized)
tgcaatcgcactccccttctcctcccctttcccccctttttttccccccgtaaatgtggaaggctttgccttgtgctgccgcgcctccgatcggcaacctcttcccccgttgttggatca

SEQ ID NO: 248905 - DNA, 120 bp, Artificial Sequence
  ENSG00000123066_248 (sequence is synthesized)
gctgcctgcccgcccgcctgccttttgaatttttttaaattccataatgacacctgcaatttcgccctaaaatagttgattgaatgcgattgtgtcaggaaaggactcttgcacccgaag

SEQ ID NO: 248906 - DNA, 120 bp, Artificial Sequence
  ENSG00000123066_249 (sequence is synthesized)
ctcccgcgattgtaaacatcgacagccgcctgcctctcggggcttactatgctggagagccgtaaagccattgcaccgagccgacggaaggctgaactcacgggaatcaaatggcgtagg

SEQ ID NO: 248907 - DNA, 120 bp, Artificial Sequence
  ENSG00000123066_250 (sequence is synthesized)
ttgcctgatttttagcttcagattgcatctgatatctggaaactgaattaatagtgctgccacctgtgccaggaggtgtgggcgattgtaaaaacattagacataagagagcctggaaaa

SEQ ID NO: 248908 - DNA, 120 bp, Artificial Sequence
  ENSG00000123066_251 (sequence is synthesized)
atggatctgttttctgacagtgaccacggttggtattaaatttgtgagtcattgaaattaatccctgactgaattggaaaggaattgtatttgcagtatttggatttatttatttttcag

SEQ ID NO: 248909 - DNA, 120 bp, Artificial Sequence
  ENSG00000123066_252 (sequence is synthesized)
aatacatcatgaactgcagggtatggaattctggtgattttgaaaacatgaatgataccattttgcagcagcattgtagatttgtagtattttagattggtatcacagtgcacctgaaaa

SEQ ID NO: 248910 - DNA, 120 bp, Artificial Sequence
  ENSG00000123066_253 (sequence is synthesized)
attttcagaaagtcccaaaacttgacagtggttccatctttttccaatccaggtttgggagggagaattaatttgtactgagttcatcatttgctgaatgtttagatgtttgcagcaaag

SEQ ID NO: 248911 - DNA, 120 bp, Artificial Sequence
  ENSG00000123066_254 (sequence is synthesized)
tgttcacttctgagcatacattatctcaatatgcacaaaaaatatgaagtagatatttttcccattttacggattaggaaattgaagtgagacagactgagtcttccttaagaatatctg

SEQ ID NO: 248912 - DNA, 120 bp, Artificial Sequence
  ENSG00000123066_255 (sequence is synthesized)
atagtaacaatgataaagaccactttataaagtgactctcttggaggtagaatttcatccctgcttttttgtgtgttctctgtttacctttgctaaaattaacagggtggctgaggcttt

SEQ ID NO: 248913 - DNA, 120 bp, Artificial Sequence
  ENSG00000123066_256 (sequence is synthesized)
gaaaactgagatatatgcgtgcgttcaggaagatcaaagaagtcagctaacactaagtgggtggaaatgcctttattatgtttcttacaggaaatgtaaaaacaaatttaatagaactat

SEQ ID NO: 248914 - DNA, 120 bp, Artificial Sequence
  ENSG00000123066_257 (sequence is synthesized)
ttttttttttttgcaaaatcttgtgtcataggatacttataagaaaggctatgtttaagctcatccttttaacttaaagagaatttatacaatttctgtacttcacaaagagctacactg

SEQ ID NO: 248915 - DNA, 120 bp, Artificial Sequence
  ENSG00000123066_258 (sequence is synthesized)
gctattaagatttatggcaatgtgactttgaagattttatgaagcagaattatgttttaaaatataactcaaattatattacagttttgtagtagctgttcttcggcttgagaggaggaa

SEQ ID NO: 248916 - DNA, 89 bp, Artificial Sequence
  ENSG00000123066_259 (sequence is synthesized)
acagttttgtagtagctgttcttcggcttgagaggaggaatagggactaaaggttaaaggtgatggatttatttcaagcgtagatgaac

SEQ ID NO: 248917 - DNA, 90 bp, Artificial Sequence
  ENSG00000123066_260 (sequence is synthesized)
ttcaccgaggctggattgcagtggcgagatctcggctcactgcaatctctgccacctcagttgaagagattcttgtgcctcagcctccat

SEQ ID NO: 248918 - DNA, 120 bp, Artificial Sequence
  ENSG00000123066_261 (sequence is synthesized)
cctcaaatgatctgcctgccttggcctcctaaagtactgggattataggtgtgagctatcccacccggcctccagtgtagactaactttatattaaagatcttggctttgttttaaagaa

SEQ ID NO: 248919 - DNA, 120 bp, Artificial Sequence
  ENSG00000123066_262 (sequence is synthesized)
tgttttaaagaaaacttactgatctggttcctgctacattttaagtcctgtttttccacctcagagtgtatcggttatgtagcctctcaaatagttttctgccagtttcttgtttggctt

SEQ ID NO: 248920 - DNA, 120 bp, Artificial Sequence
  ENSG00000123066_263 (sequence is synthesized)
ggctcatgtttctacttctataaatttttaaggtgccttgaagatcaacttgggatttttagttttttcttcttcttttttttagaagcagcaggtacttttttgtataatgaaatcaga

SEQ ID NO: 248921 - DNA, 120 bp, Artificial Sequence
  ENSG00000123066_264 (sequence is synthesized)
tacagattcctattatagaaaataagtagcagtggagcatcgctaatggaaatgaatgttggaattaacaaccctgctgattggcctctccctctccttattttacaaataactccacag

SEQ ID NO: 248922 - DNA, 120 bp, Artificial Sequence
  ENSG00000123066_265 (sequence is synthesized)
gccaagagaggctaaatgatttaggattatacagttgtttcacttagaaacacggtaaagattatgtaattcagaagttctcaccttttcttctgcctccatatgctgaggtgtttgaaa

SEQ ID NO: 248923 - DNA, 120 bp, Artificial Sequence
  ENSG00000123066_266 (sequence is synthesized)
gctttcctctcccctcacaaacaaagcaaagcaagtaggcccattgagagtcatccatctagccctgccttccctgttagatgaaggaaccaaggccccaaggggggaagtgacctgacc

SEQ ID NO: 248924 - DNA, 120 bp, Artificial Sequence
  ENSG00000123066_267 (sequence is synthesized)
acagcagatctaagtccccagcacctggactgggtagccgtgagcacagcacggtacagttgcccagtgttaatttctgattcggagctaggagtcagatcttagtgattcagtggttat

SEQ ID NO: 248925 - DNA, 120 bp, Artificial Sequence
  ENSG00000123066_268 (sequence is synthesized)
tattggtctgtttaaatcttgaagttgttggaaagagcaataggataggaaactgggacattaaatcactgatttaaaaacctgtggctccaaacttaaaaaatttgctgcataggccac

SEQ ID NO: 248926 - DNA, 120 bp, Artificial Sequence
  ENSG00000123066_269 (sequence is synthesized)
cccctagtggccaaattttacaactacaacttttcaataggtctactttttaagaatcagtgccttaatgaactactgtagtgataattttttactacaggtgtattaaaggaaactttt

SEQ ID NO: 248927 - DNA, 120 bp, Artificial Sequence
  ENSG00000123066_270 (sequence is synthesized)
tttttaaagaaggagttcagaaccgctgttctaagtatttcttaaaagaaactttgaagtttcattttaatatctgtctggaaaaaatatggaactgtttccccaaaagagcagctgtga

SEQ ID NO: 248928 - DNA, 120 bp, Artificial Sequence
  ENSG00000123066_271 (sequence is synthesized)
ccccaaaagagcagctgtaagtgtagtggatttgtcaaactagctgagtaatcagctccaaacaatttttattttttgtaatattttatacatacttgaaagcagggatagaactttagt

SEQ ID NO: 248929 - DNA, 120 bp, Artificial Sequence
  ENSG00000123066_272 (sequence is synthesized)
agtggtaactatctaattgcttccactttctgtttaattcctctccttagacttttcagggaatcagttgttggaagaaacatacaagttatgtagactttgtttacttaattaatgtga

SEQ ID NO: 248930 - DNA, 120 bp, Artificial Sequence
  ENSG00000123066_273 (sequence is synthesized)
agccagaccataaagcatcaagaagttagtgataaagaccaagaaaagtccaggcacagtggctcacacctgccatcccagcgcttggggagtacgaggcaggcgggccacttgagccca

SEQ ID NO: 248931 - DNA, 90 bp, Artificial Sequence
  ENSG00000123066_274 (sequence is synthesized)
tacagtgatactttgtctcacgaaacaaaacaaaacaagacccagaaaaagataattctctgctgatggccttcttcttagtcacttcca

SEQ ID NO: 248932 - DNA, 120 bp, Artificial Sequence
  ENSG00000123066_275 (sequence is synthesized)
gataattctctgctgatggccttcttcttagtcacttccattattaatattcttttgtgaactgatgtgatcatttaattagcactatttttggtgccaaagagtgcgcctggctataag

SEQ ID NO: 248933 - DNA, 120 bp, Artificial Sequence
  ENSG00000123066_276 (sequence is synthesized)
tggctacaagtatgtatagggattgtgtcatttacttgccatatttgatgcaatttttatcttaactaaatgtttgttaaaaatgatgacaaggtccgggcgcggtggctcatgcctgta

SEQ ID NO: 248934 - DNA, 120 bp, Artificial Sequence
  ENSG00000123066_277 (sequence is synthesized)
agactctgtctcagaaagaaaaaaaagaaagaaaaaatgatgacaagtagcatatcatttgaaactttcctttattggtcgttcatgtttttgtgcaaattattttgtgctggaaaatgt

SEQ ID NO: 248935 - DNA, 120 bp, Artificial Sequence
  ENSG00000123066_278 (sequence is synthesized)
gcattattttctaaatgaaattttgtatgcagacagtccctgacttacagtggatttactcaggagtttttgactttttgatgatgtaaaagtaatacacgttcaggacatgctgtactt

SEQ ID NO: 248936 - DNA, 120 bp, Artificial Sequence
  ENSG00000123066_279 (sequence is synthesized)
tgagaacccatacaaccgatctgttttttactttcagtacagtatttgataaattacacgagatagtcagcactttattgtaaaacaggctttgagttagatgatttccccaatggtagg

SEQ ID NO: 248937 - DNA, 120 bp, Artificial Sequence
  ENSG00000123066_280 (sequence is synthesized)
ccaatgtaagtgttctgaatatgttgaagataggctagggccgggtgcggtggctcaaaccgtaatcccaacacttttgggaggccgaggtggatggattgcttgagctcaggagtttga

SEQ ID NO: 248938 - DNA, 83 bp, Artificial Sequence
  ENSG00000123066_281 (sequence is synthesized)
tcaggagtttgagaccagcctgggcaatagttgggcatgatggtgtgtgtctgtgacccagctgcttgggaggctgaggcagg

SEQ ID NO: 248939 - DNA, 77 bp, Artificial Sequence
  ENSG00000123066_282 (sequence is synthesized)
tgtactccagccttccttaatttttgccatgtatgcttccctgcaaacctggaaccctattgtggtcatttttatca

SEQ ID NO: 248940 - DNA, 120 bp, Artificial Sequence
  ENSG00000123066_283 (sequence is synthesized)
tccctgcaaacctggaaccctattgtggtcatttttatcacaattttctcttcccagcctacagacttgttagatgtaatctgtcactggatttcacactgacttcctttgaaatgccta

SEQ ID NO: 248941 - DNA, 120 bp, Artificial Sequence
  ENSG00000123066_284 (sequence is synthesized)
ttgtaatccttctcctttccttgttcttttagtcatgatctatttctacatgcttgggccctgcctcaggtttcttcctaccaccagtcacccatatagtgtgccgacttcgtctgattt

SEQ ID NO: 248942 - DNA, 120 bp, Artificial Sequence
  ENSG00000123066_285 (sequence is synthesized)
tcccactgcctgcatcaggttcttttcctgctgagacgcactgtgattctctcctacctactgtgcattcctcattctaacctttttgcaatgtagctgaatcattaaatacagttgaaa

SEQ ID NO: 248943 - DNA, 120 bp, Artificial Sequence
  ENSG00000123066_286 (sequence is synthesized)
aaacttactttatgattagattatccactttgcaaaaaatctttactttgaagagggtatcataaagtgtctctcaaagaactagtgcgggtaaatgctctctgagaaaaaaagtctaaa

SEQ ID NO: 248944 - DNA, 120 bp, Artificial Sequence
  ENSG00000123066_287 (sequence is synthesized)
agacttttaaattttaggttttaaagtaagtaccttcataagttattgagatactttctgatgagacgttcacatgttactgtggtaccatgctcattgagcttaaagacaagaagttca

SEQ ID NO: 248945 - DNA, 120 bp, Artificial Sequence
  ENSG00000123066_288 (sequence is synthesized)
ggagtgtttgtttttatttttttagagtagcaaagactttggcaagagtatttgcagattatctgctgcaggattaccaaacccattatggtacagaccactccttccactctttaatgg

SEQ ID NO: 248946 - DNA, 120 bp, Artificial Sequence
  ENSG00000123066_289 (sequence is synthesized)
ccttatggagcagggcagccatcctgctgtcccactaaaccatcccattatgccccacaaatccgttttactgctcactagggcatcatttagggcaatgcagcagtaatttaatgccac

SEQ ID NO: 248947 - DNA, 120 bp, Artificial Sequence
  ENSG00000123066_290 (sequence is synthesized)
cctagtggcctcagagagttactactacaccggcaggagacctcatatttttccccgggaatgatttatatattgggaggtactggctgacatgcagtataactttgttgtacagattaa

SEQ ID NO: 248948 - DNA, 120 bp, Artificial Sequence
  ENSG00000123066_291 (sequence is synthesized)
accttggcatcatgtagtgggctcttactgagccatttttcacacccatgcttgccaagaagtgtgttaagatgtgagccgacttggtttttctgcttagatggttcaggtgcatttgtg

SEQ ID NO: 248949 - DNA, 120 bp, Artificial Sequence
  ENSG00000123066_292 (sequence is synthesized)
tatgtgtggtgttaacttctgtcattttaacgtgtgtctgtaagatccaaagttgtcttttatcccttcttgcctagatatagtggcacataaagtttctagtatatttatcctattaaa

SEQ ID NO: 248950 - DNA, 120 bp, Artificial Sequence
  ENSG00000123066_293 (sequence is synthesized)
atattacagttagtagagtgttataaaatagaaattggaagctttgttgtttcttggcagagaatctcatgactctactctcatggttttaagatgcagtatgaataggttatctgaggc

SEQ ID NO: 248951 - DNA, 120 bp, Artificial Sequence
  ENSG00000123066_294 (sequence is synthesized)
cctcaccaaatctaaaagatttgggtttttttgaatcagtgatttgtagggattagcaatgtaccttacatcttttgctgtgcccatttcttatctgcttaacttgtatgtgattgattc

SEQ ID NO: 248952 - DNA, 120 bp, Artificial Sequence
  ENSG00000123066_295 (sequence is synthesized)
ttcatttttcattggggtgtattgtgttttttagttatataagtataattaaaaacttagagcccttttatatgtattagtacatctaatgtatgctttaaaaggcaaaattttgtcaga

SEQ ID NO: 248953 - DNA, 120 bp, Artificial Sequence
  ENSG00000123080_0 (sequence is synthesized)
aacacagaagtaaccagactgccatggtagacatgggagagacgaggaagctgagaaaggactatttcgcagtttccagtccttgattaattaaggcttcagagttcgttcttacatatg

SEQ ID NO: 248954 - DNA, 120 bp, Artificial Sequence
  ENSG00000123080_1 (sequence is synthesized)
ccatgtcttaagttttcataaaattcagtctacacaagacttgctttttgtgagcactgtgcttagtggcagtccggatttttccctccacccccgcggccacccctgcccaccgcgccg

SEQ ID NO: 248955 - DNA, 120 bp, Artificial Sequence
  ENSG00000123080_2 (sequence is synthesized)
tcgggcatggatctggcaggtgcgaggccgaggccagggctcagcgaaggacgccgagtttacagagcgcgcgcgcctagaggaggcagcagcagccgcagcctggccgcccgaactttg

SEQ ID NO: 248956 - DNA, 120 bp, Artificial Sequence
  ENSG00000123080_3 (sequence is synthesized)
cgagcctggcgggggagcacagaggcgggccgacctgccccgctagcgctgaggaacgactccctttatgccagctcgctgtccgccttcccgcagcgtacgctgcggagcctcaaagac

SEQ ID NO: 248957 - DNA, 120 bp, Artificial Sequence
  ENSG00000123080_4 (sequence is synthesized)
cctgcggccctccacaaccgtcttaaataacaaacccctgtcctcgcccccgtaggaattggggcagctgggggttcgcgtcacagactcaagcccgccagcagaagggcaggccggact

SEQ ID NO: 248958 - DNA, 120 bp, Artificial Sequence
  ENSG00000123080_5 (sequence is synthesized)
tcgcggggccgaaccccgctccagctggggacaggccgcctagccggcaggagggagccggcgcgagagacttgacgggaggaggtggagagcgggaggcgggaatgagggcgcgggacc

SEQ ID NO: 248959 - DNA, 120 bp, Artificial Sequence
  ENSG00000123080_6 (sequence is synthesized)
gggcgggcggagcgtgcgagactgcgagcgcgagcgccagcagggcggagggcggggcgtgggcggcgcccggccttcccgctcccgcggcgctgcaactctgccgagcctccttaaaac

SEQ ID NO: 248960 - DNA, 120 bp, Artificial Sequence
  ENSG00000123080_7 (sequence is synthesized)
tctgccgttaaaatgggggcgggtttttcaactcaaaaagcgctcaatttttttcttttcaaaaaaagctgatgaggtcggaaaaaagggagaagaaaccggcaccctctctgagaggca

SEQ ID NO: 248961 - DNA, 120 bp, Artificial Sequence
  ENSG00000123080_8 (sequence is synthesized)
acagaagcagcaattgtttcagcgaaaaaagcagcaagggagggagtgaaggaaaaaagcaaaaaagggggcgacacgcaagtgcctgtaggggtgaaaggagcagggaccggcgatcta

SEQ ID NO: 248962 - DNA, 120 bp, Artificial Sequence
  ENSG00000123080_9 (sequence is synthesized)
gggggggatcagctacaaaagaaactgtcactgggagcggtgcggccaaggaggaagcagtgctgccaggctctgctccagggcacagctggctggcggctgccctgtccgcagcaaagg

SEQ ID NO: 248963 - DNA, 120 bp, Artificial Sequence
  ENSG00000123080_10 (sequence is synthesized)
ggcacaggccggggaccgcgagaggtggcaaagtggcaccgggcgccgaggctgctgagcgctcgccgagacggcgaccggactggctgccccggaactgcggcgactctccctactcag

SEQ ID NO: 248964 - DNA, 120 bp, Artificial Sequence
  ENSG00000123080_11 (sequence is synthesized)
aacttggcctacgtttcccaggactctccccatctccagaggcccccacaaaaccgggaaaggaaggaaaggacagcggcggcagcagctcaatgagtgcctacagcagaaagcctgaac

SEQ ID NO: 248965 - DNA, 120 bp, Artificial Sequence
  ENSG00000123080_12 (sequence is synthesized)
cccgggggggctgcccagtgcagccgcaatgctgccgcgagctgccccagcagtccgggctccgtagacgctttccgcatcactctccttcctcgggctgccgggagtcccgggacctgg

SEQ ID NO: 248966 - DNA, 120 bp, Artificial Sequence
  ENSG00000123080_13 (sequence is synthesized)
cacgcccggcagcctccggagacgcgcgccgagcccggctcccacggcctctgaggctcggcggggctgcggctgcctggcgggcgggctccggagctttcctgagcggcattagcccac

SEQ ID NO: 248967 - DNA, 120 bp, Artificial Sequence
  ENSG00000123080_14 (sequence is synthesized)
cgggctccggagctttcctgagcggcattagcccacggcttggcccggacgcgaccaaaggctcttctggagaagcccagagcactgggcaatcgttacgacctgtaacttgagggccac

SEQ ID NO: 248968 - DNA, 120 bp, Artificial Sequence
  ENSG00000123080_15 (sequence is synthesized)
cgaactgctactcccgttcgcctttggcgatcatcttttaaccctccggagcacgtcagcatccagccaccgcggcgctctcccagcagcggaggacccaggactatcccttcggcgaga

SEQ ID NO: 248969 - DNA, 120 bp, Artificial Sequence
  ENSG00000123080_16 (sequence is synthesized)
cggatggaaaccgagccccctggaggacctgcccctgcagttctgcctcacacggctcaagtcaccaccgtgaacaagggaccctaaagaatggccgagccttgggggaacgagttggcg

SEQ ID NO: 248970 - DNA, 120 bp, Artificial Sequence
  ENSG00000123080_17 (sequence is synthesized)
tccgcagctgccaggggggacctagagcaacttactagtttgttgcaaaataatgtaaacgtcaatgcacaaaatggatttggaaggactgcgctgcaggttatgaaacttggaaatccc

SEQ ID NO: 248971 - DNA, 120 bp, Artificial Sequence
  ENSG00000123080_18 (sequence is synthesized)
gagattgccaggagactgctacttagaggtgctaatcccgatttgaaagaccgaactggtttcgctgtcattcatgatgcggccagagcaggtttcctggacactttacagactttgctg

SEQ ID NO: 248972 - DNA, 120 bp, Artificial Sequence
  ENSG00000123080_19 (sequence is synthesized)
gagtttcaagctgatgttaacatcgaggataatgaagggaacctgcccttgcacttggctgccaaagaaggccacctccgggtggtggagttcctggtgaagcacacggccagcaatgtg

SEQ ID NO: 248973 - DNA, 120 bp, Artificial Sequence
  ENSG00000123080_20 (sequence is synthesized)
gggcatcggaaccataagggggacaccgcctgtgatttggccaggctctatgggaggaatgaggttgttagcctgatgcaggcaaacggggctgggggagccacaaatcttcaataaacg

SEQ ID NO: 248974 - DNA, 120 bp, Artificial Sequence
  ENSG00000123080_21 (sequence is synthesized)
tggggagggctcccccacgttgcctctactttatcaattaactgagtagctctcctgacttttaatgtcatttgttaaaatacagttctgtcatatgttaagcagctaaattttctgaaa

SEQ ID NO: 248975 - DNA, 120 bp, Artificial Sequence
  ENSG00000123080_22 (sequence is synthesized)
ctgcataagtgaaaatcttacaacaggcttatgaatatatttaagcaacatctttttaacctgcaaaatctgttctaacatgtaattgcagataactttgactttcttctgaatatttta

SEQ ID NO: 248976 - DNA, 120 bp, Artificial Sequence
  ENSG00000123080_23 (sequence is synthesized)
tctttccttggcttttcccttgcttccccttttgccaatctcaacacccaagttgaagactttgtttttaaaatggtttgtcctgatgcttttgtctaattaaaacactttcaaaacagg

SEQ ID NO: 248977 - DNA, 120 bp, Artificial Sequence
  ENSG00000123080_24 (sequence is synthesized)
agattaaccatcccagtccttctgtcagtctccgatgccatcatgcagcctggttaggagcaaaggaaaggggaaaaagaaaaacgactaattcatcttttcctgatcgtcaggacccta

SEQ ID NO: 248978 - DNA, 120 bp, Artificial Sequence
  ENSG00000123091_0 (sequence is synthesized)
agtgcccgagccggcctcgttctggctgccgccgtctcgctgaggcggagtaggatgaggcccgcggccgtggctccggcgtcggcgggggcagcagcagctgaggcagcagctgaggca

SEQ ID NO: 248979 - DNA, 120 bp, Artificial Sequence
  ENSG00000123091_1 (sequence is synthesized)
gctgacctggattaggcccagcagctccgtggccgccgccgccccgcgggggggcggggtggggaagtgcttcgtctccccgcccccccccccccatcgctgcctcgcaggaggcgaacg

SEQ ID NO: 248980 - DNA, 120 bp, Artificial Sequence
  ENSG00000123091_2 (sequence is synthesized)
aagtgcttcgtctccccgcccccccccccccatcgctgcctcgcaggaggcgaacgccgcgaccccagcggagcccgcggcccagccttgatcccccaaccccgggggctggcatgagcg

SEQ ID NO: 248981 - DNA, 120 bp, Artificial Sequence
  ENSG00000123091_3 (sequence is synthesized)
gcctccgcctgatccccggcctgtcgcccgaccccacctcgccaaccgaggcggaccgcggagtgtgcgaacgaccccaccgctgctttctcctcccccagatcacgcaccccagctccg

SEQ ID NO: 248982 - DNA, 120 bp, Artificial Sequence
  ENSG00000123091_4 (sequence is synthesized)
gaagatggggaactgcctcaaatcccccacctcggatgacatctccctgcttcacgagtctcagtccgaccgggctagctttggcgaggggacggagccggatcaggagccgccgccgcc

SEQ ID NO: 248983 - DNA, 120 bp, Artificial Sequence
  ENSG00000123091_5 (sequence is synthesized)
atatcaggaacaagttccagttccagtctaccacccaacacctagccagactcggctagcaactcagctgactgaagaggaacaaattaggatagctcaaagaataggtcttatacaaca

SEQ ID NO: 248984 - DNA, 120 bp, Artificial Sequence
  ENSG00000123091_6 (sequence is synthesized)
tctgcctaaaggagtttatgaccctggaagagatggatcagaaaaaaagatccgggagtgtgtgatctgtatgatggactttgtttatggggacccaattcgatttctgccgtgcatgca

SEQ ID NO: 248985 - DNA, 120 bp, Artificial Sequence
  ENSG00000123091_7 (sequence is synthesized)
catctatcacctggactgtatagatgactggttgatgagatccttcacgtgcccctcctgcatggagccagttgatgcagcactgctttcatcctatgagactaattgagccagggtctc

SEQ ID NO: 248986 - DNA, 120 bp, Artificial Sequence
  ENSG00000123091_8 (sequence is synthesized)
ttatctgacttcaagtgaaccaccattttggtggttttgatcttttgtcactgagcccaaagagccagggattaggaattaagatcgtgcacaaaagtttccttaaaattcctggatggc

SEQ ID NO: 248987 - DNA, 120 bp, Artificial Sequence
  ENSG00000123091_9 (sequence is synthesized)
tgcagatgttgggggaaaaagtacgtgatattttagaaacttagtgggaaaagtaggatggtatttttatgtaaagccttgacccaatgtttaaaaatataattgtatttagatcttgtt

SEQ ID NO: 248988 - DNA, 120 bp, Artificial Sequence
  ENSG00000123091_10 (sequence is synthesized)
attgctccagtacataggaattgtgtaaagtgttaacagcagctgtatttgtttaaattgtgtgtattgaagattaggaaaaagatagtagttatttttcctaaatgaaataactttctt

SEQ ID NO: 248989 - DNA, 120 bp, Artificial Sequence
  ENSG00000123091_11 (sequence is synthesized)
ctcttccccttccccacccgaattcttttctgaagttgctggcatttgggtcaaggttttattaaaagctacattttataacactggcacacacaaaaaagtagttttaagcttgtttgc

SEQ ID NO: 248990 - DNA, 120 bp, Artificial Sequence
  ENSG00000123091_12 (sequence is synthesized)
gctggctctatgcttgaaaaccagtttatttataacctgttataagtgctatattctgtttgcagttaggaaatgcagaattcaaagtgatctcctagcttgtaagcaaactgagatgca

SEQ ID NO: 248991 - DNA, 120 bp, Artificial Sequence
  ENSG00000123091_13 (sequence is synthesized)
ctatcccttttctataaaaaataagttaatgtgtcaagaaaccaactctattaaggtggggtttaatattaccctttcctatgtgttttatctaattattttggttgttaatatggtgat

SEQ ID NO: 248992 - DNA, 120 bp, Artificial Sequence
  ENSG00000123091_14 (sequence is synthesized)
aatggaaagtcaagttaaattttaaatattaagaattctgatttattgagattgaattatgccaccacgtttatgtaaaaatgaaggtggcaccgtggtgagacctaatgagaaatagtt

SEQ ID NO: 248993 - DNA, 120 bp, Artificial Sequence
  ENSG00000123091_15 (sequence is synthesized)
actcagttgtaaaaattttgatttattctctttcttctgacctccttgcctcttgtcttgaaccatagcaaaaggatactgcatctctcattactgtagtgctgaggttattgaagttat

SEQ ID NO: 248994 - DNA, 120 bp, Artificial Sequence
  ENSG00000123091_16 (sequence is synthesized)
acaaaacacatctcagtctctgtttcttggaaaggtatctattacatcctgctagctgactgacaaaactaagcagggagaataaagataattgtattttatgttttgcacacaaacgca

SEQ ID NO: 248995 - DNA, 120 bp, Artificial Sequence
  ENSG00000123091_17 (sequence is synthesized)
gaatttgtataaccatatgacttcatagttgtgatctcaaaaaagaaggaatttctcctttgtttcttgcagttaatgtaagaatactttaaatctctaagcttctgaagtgttagaggt

SEQ ID NO: 248996 - DNA, 120 bp, Artificial Sequence
  ENSG00000123091_18 (sequence is synthesized)
agagatggtctagtaaagatgtagtagtaatgttttatccatttagcatgtgtttattttttcatatgtactcaaaggtgacttattggttcacctcagtgatattacagctaaaaaaat

SEQ ID NO: 248997 - DNA, 120 bp, Artificial Sequence
  ENSG00000123091_19 (sequence is synthesized)
cattcattagcaaaaggaaaagtggtctcaacctaacatcagaagtgtttcttattattattttatattgagttgaatattgaactctaacagttttctacatacaaaacacagtgtcat

SEQ ID NO: 248998 - DNA, 120 bp, Artificial Sequence
  ENSG00000123091_20 (sequence is synthesized)
gaaggttattcataattgcattatagaggaatgtagtatgtcataagtactttgtaaagatttgacattcaactgtagtatccatatgttgcttaaatttccttatgagccccatgatgg

SEQ ID NO: 248999 - DNA, 120 bp, Artificial Sequence
  ENSG00000123091_21 (sequence is synthesized)
aaagacttaaagatgaatttgagaaaaattgaaagaaattagattatcaggttctgttaaattgttacatgtatcttgcttaaatttctgtttattaatttatatccacccaagtacata

SEQ ID NO: 249000 - DNA, 120 bp, Artificial Sequence
  ENSG00000123091_22 (sequence is synthesized)
aagcaaatttggaggaaacaactgaagttgtgcaatattttctgataattgctttttttattcttgtgttttctacttaaacataatgtctgtgtcatcaagtattatagtcagactttt

SEQ ID NO: 249001 - DNA, 120 bp, Artificial Sequence
  ENSG00000123091_23 (sequence is synthesized)
ctttttttctagattgttaaaattggcaaatgaacttttttaaaaatcatcttccatgttgcagttagtctttcttttcattacaagtctttcacagaagtttggtggtaatattgaaag

SEQ ID NO: 249002 - DNA, 120 bp, Artificial Sequence
  ENSG00000123091_24 (sequence is synthesized)
aactagcattgggcagaatgtgtcttttttaggcactttatattctcaacatacaatgttaagaaccatcaattttgacttttactaagttgttaaataaagttataatacagctgtgaa

SEQ ID NO: 249003 - DNA, 120 bp, Artificial Sequence
  ENSG00000123094_0 (sequence is synthesized)
agtctgaacgatgaccaatccaccacacgcacctacagtgtaggtcttccattttactctctagtctggttctggggctgggcatagaactgttggagttgatataaagatcagggttac

SEQ ID NO: 249004 - DNA, 120 bp, Artificial Sequence
  ENSG00000123094_1 (sequence is synthesized)
agctcctagagtggagtattttgggctgagacgatggggttttccagatattggatcatgtcatctgcaaagaaagacaacttgacttcctctcctcccatttgactacactttatttct

SEQ ID NO: 249005 - DNA, 120 bp, Artificial Sequence
  ENSG00000123094_2 (sequence is synthesized)
ttctcttgcctgattgccctggcctgaatttccaatactatgttgaattaatgactcaatatatgactaaaagttcaaagtgaaacaatgataattcagataggaaaatatgtggcagta

SEQ ID NO: 249006 - DNA, 120 bp, Artificial Sequence
  ENSG00000123094_3 (sequence is synthesized)
tgctaaagtctaaaaaggaatataaaacgtctgtgagatacctaacatcagatttatagaaacagaatagaatctgactacacagacttagtcttctccactccgtgttcctgcagctag

SEQ ID NO: 249007 - DNA, 120 bp, Artificial Sequence
  ENSG00000123094_4 (sequence is synthesized)
agacatgacctaacaccctgatgaccactctcagggaccttgagtgactggccggtgcaccatggaacttaaagtatgggtggatggagttcagaggattgtttgtggagtcactgaagt

SEQ ID NO: 249008 - DNA, 120 bp, Artificial Sequence
  ENSG00000123094_5 (sequence is synthesized)
cacaacttgccaggaggttgtcatagccttagctcaagcaataggtcgaactggaaggtacacccttatagagaaatggagagatactgaaagacacttagcacctcatgaaaatcctat

SEQ ID NO: 249009 - DNA, 120 bp, Artificial Sequence
  ENSG00000123094_6 (sequence is synthesized)
catatccttaaacaaatgggggcagtatgctagtgatgtgcagctcattctacgacgaactgggccgtctctcagtgagcgacccacttcagacagtgtggctcgaattcctgaaagaac

SEQ ID NO: 249010 - DNA, 120 bp, Artificial Sequence
  ENSG00000123094_7 (sequence is synthesized)
tttatacaggcagagtctgccccccttagctaaactgaggcctcagattgacaaatcaatcaaaaggagggaaccgaaaaggaaatcactgacatttacaggaggtgccaaaggattaat

SEQ ID NO: 249011 - DNA, 120 bp, Artificial Sequence
  ENSG00000123094_8 (sequence is synthesized)
agttgaagaagctaatccgtctgcagacagagaagcttcaatccattgagaaacagctggaatctaatgaaatagaaataagattttgggagcaaaagtataattccaaccttgaagagg

SEQ ID NO: 249012 - DNA, 120 bp, Artificial Sequence
  ENSG00000123094_9 (sequence is synthesized)
aaattgtccgtctagagcaaaagatcaaaagaaacgatgtagaaattgaggaggaagaattctgggaaaatgaattacagattgaacaggaaaatgaaaaacagctgaaggatcaacttc

SEQ ID NO: 249013 - DNA, 120 bp, Artificial Sequence
  ENSG00000123094_10 (sequence is synthesized)
aagaaataagacagaaaataacagaatgtgaaaacaaattaaaggactatttggcacagatccggactatggaaagtggtcttgaagcagaaaaattgcaacgggaagttcaagaggcac

SEQ ID NO: 249014 - DNA, 120 bp, Artificial Sequence
  ENSG00000123094_11 (sequence is synthesized)
aggtcaatgaggaagaggttaaaggaaagatcggtaaggtcaaaggggagattgacattcaaggccagcagagtctgaggttggaaaatggcatcaaagctgtggaaagatctcttggac

SEQ ID NO: 249015 - DNA, 120 bp, Artificial Sequence
  ENSG00000123094_12 (sequence is synthesized)
aagccaccaaacgcttacaggacaaagaacaggaactggagcagttgactaaggagttgcggcaagtcaatctccagcagttcatccagcagacagggacaaaagttaccgttttgccag

SEQ ID NO: 249016 - DNA, 120 bp, Artificial Sequence
  ENSG00000123094_13 (sequence is synthesized)
cggagcccattgaaatagaggcctcacatgcagacattgaaagggaggcaccattccagtctgggtccctgaagcgacctggttcatctcggcagctccccagtaatctccgcattctgc

SEQ ID NO: 249017 - DNA, 120 bp, Artificial Sequence
  ENSG00000123094_14 (sequence is synthesized)
agaatcctatctcatctggttttaatcctgaaggcatatatgtatgacattatctgtctttagggaggagacccaacagaggtaccaaggacagtaaacttcctttttgatttgtgccaa

SEQ ID NO: 249018 - DNA, 120 bp, Artificial Sequence
  ENSG00000123094_15 (sequence is synthesized)
tgatgaacagaggatctattccacaagacgctgtatgttttttctctcctaaattgcataccacttggagccataccctgtgcactgatgctaaagaacaaagaaactgtgttttcacac

SEQ ID NO: 249019 - DNA, 120 bp, Artificial Sequence
  ENSG00000123094_16 (sequence is synthesized)
gcggccgcggagctccgggtgccgccgcgtccccagcgccccggccggcccctctgggcggcctgcgggggcggcgcagttgcgaaactgactgactacacagacttagtcttctccact

SEQ ID NO: 249020 - DNA, 120 bp, Artificial Sequence
  ENSG00000123094_17 (sequence is synthesized)
agctataatgcaaagccttcgtttttatttgtagcattttgagagctttaggaaagtattatatagtgtgtatacataaataagccgtgacttaagtaagagtgaagagaaatttgtgac

SEQ ID NO: 249021 - DNA, 120 bp, Artificial Sequence
  ENSG00000123094_18 (sequence is synthesized)
tggcttagtttaatttatttcatgtaatcaatgtgtgaatgttgatgttttaatatttttattgacttatcctgtgactgacttacgttacatattgtgtgattatgaccgtgtgcatgt

SEQ ID NO: 249022 - DNA, 120 bp, Artificial Sequence
  ENSG00000123094_19 (sequence is synthesized)
tgccagactccatccatgcattgctgatttacactacacaagtgtcctagggtgctccaccatcgaagctaactccacaggaagccacttgcatttgttttgtgaaactgtcctagccat

SEQ ID NO: 249023 - DNA, 120 bp, Artificial Sequence
  ENSG00000123094_20 (sequence is synthesized)
tgcttaattaggtgaaataattcagggttttttaaatctggaatttagtcgttcctttacaatatttccaaatatacgtgtggccacagagcataacagatatttttcataagctaaatt

SEQ ID NO: 249024 - DNA, 120 bp, Artificial Sequence
  ENSG00000123094_21 (sequence is synthesized)
gtatgtataaaacatttgcagtgtttcagacactgttgaacaaaaatgtaattggtaagtatgtatccaaacaggcatggggtttcctgatacattatgtgttttgtttctgccctgtct

SEQ ID NO: 249025 - DNA, 120 bp, Artificial Sequence
  ENSG00000123094_22 (sequence is synthesized)
tatcatttacactcatggatcttcagaattaatctaacatggaagttatagatacctgaaagctgggttggtctacttcaggaacattgctttaagtgatgtattttaaaataacccgct

SEQ ID NO: 249026 - DNA, 120 bp, Artificial Sequence
  ENSG00000123094_23 (sequence is synthesized)
tcatatgtatgatctgttggtgtacacaccatgggtaaggtattgcttgcacataatttgctctgcatattatggaccattgtggtttcttccagtcacttagatggaaaggaggttaaa

SEQ ID NO: 249027 - DNA, 120 bp, Artificial Sequence
  ENSG00000123094_24 (sequence is synthesized)
cctaggtactttttagcaaggatataaagtcaaattcagcatatgtttttatttttaggcttgacttttacaagacattaatctccatttgtacatatgttattttatttgtaaaaccaa

SEQ ID NO: 249028 - DNA, 120 bp, Artificial Sequence
  ENSG00000123094_25 (sequence is synthesized)
gatttggtacagtataattaagactttaatctgaaatttaaagtagttttaattctgaagaagttacatcctctgtattatttacatgcaacaaaataaaagtggattaatatagtaatg

SEQ ID NO: 249029 - DNA, 120 bp, Artificial Sequence
  ENSG00000123094_26 (sequence is synthesized)
ccatggtaacaatagagctatgtcttatgcatgaaggcaactttggatgttttaacacatttgactgactttggtttagtgaatgctgacaatgctgctctacttaggtttcctatgaaa

SEQ ID NO: 249030 - DNA, 120 bp, Artificial Sequence
  ENSG00000123094_27 (sequence is synthesized)
tttttaagaatggctatgagactgtatagaagcttctagagaactgaaagtcataatgcagagttgccttttctagtgcagctaagtggcggacctcaactgaagatatgagtttctttg

SEQ ID NO: 249031 - DNA, 120 bp, Artificial Sequence
  ENSG00000123094_28 (sequence is synthesized)
ggttcttggagttatcaaattgatcttgccattatgttactttgcaaataactgaagtaaatgattcttacctaaataaccacaacctgtacacatttgctcacaatttatagtagttat

SEQ ID NO: 249032 - DNA, 120 bp, Artificial Sequence
  ENSG00000123094_29 (sequence is synthesized)
tttaaaattaggatgattaaaaaataatttatagattttgtgacagtaatgatttacatatgcccaatatatgccttatttttaaataagtcattctgtataaagtcattttgttgttgt

SEQ ID NO: 249033 - DNA, 120 bp, Artificial Sequence
  ENSG00000123094_30 (sequence is synthesized)
gtcattttgttgttgttcagagaaatcaagatcttattcacaaagaaaaacattttataaattgatcgcattttctttaagtcaaaatgttaaactggaggcagtattaaactttgcaat

SEQ ID NO: 249034 - DNA, 120 bp, Artificial Sequence
  ENSG00000123094_31 (sequence is synthesized)
taggagtttcagagatgccttggcataccacgaaaaacactgtcaatatccaactcattataaattgttatcagaattaacctaataactttaagtaaggacaagcagcatcctagcaac

SEQ ID NO: 249035 - DNA, 120 bp, Artificial Sequence
  ENSG00000123094_32 (sequence is synthesized)
ttgtagtagtcttgggttcccagcagagtatcacagttaacctctctgacaacttcatcagaatttccaagctgccaaataatcttcatagacctaattacagatttaaaaaaatttcct

SEQ ID NO: 249036 - DNA, 120 bp, Artificial Sequence
  ENSG00000123094_33 (sequence is synthesized)
aggcgacgaaagtatagaaatgtgaatatgttgaatacattgagaagctgtactttttaattagttatattacttctggaagcacatatctaaggaatattttctaagactcagagggaa

SEQ ID NO: 249037 - DNA, 120 bp, Artificial Sequence
  ENSG00000123094_34 (sequence is synthesized)
aaaaactcgttttcataggatcatctgaagatactttagtatatttgtgatcatttttatctattgcaaatacaaatgaattagataagtgccacatcctggatacatttcggaggggta

SEQ ID NO: 249038 - DNA, 120 bp, Artificial Sequence
  ENSG00000123094_35 (sequence is synthesized)
gtgggcaatggtatacaaaaataccaaatataaaattttcatctgggggaatgttcaggttctaaatactaaattagatttcaatgttttgtgttttttttaaaaaaatcatattgcaac

SEQ ID NO: 249039 - DNA, 120 bp, Artificial Sequence
  ENSG00000123094_36 (sequence is synthesized)
ttgttttattgtgattttctacaagtattaaatacatttaaagatctttttatcttaccaagaaataatttggaatagcattggtatatttgaccttttgagtgtctgtcatcctcagag

SEQ ID NO: 249040 - DNA, 120 bp, Artificial Sequence
  ENSG00000123094_37 (sequence is synthesized)
aatggcccatagtgtgttgcctgtggacatagtgtccatagtccctttcttgtccttctgagatattttggtttgataacattttgttttttgtcttgatgcacagggacttttttataa

SEQ ID NO: 249041 - DNA, 120 bp, Artificial Sequence
  ENSG00000123094_38 (sequence is synthesized)
tatgagacttcagttggtattaataggagttacctatttaattctcccagtcatcaatgaggtaatcatcaattcctatagttcaaattagtcataaacaagagctacagcaagactgat

SEQ ID NO: 249042 - DNA, 120 bp, Artificial Sequence
  ENSG00000123094_39 (sequence is synthesized)
agagtaaaaactatataaatacagtaaaaaaaaaatagaatttatggtgtgaaatatgaagtatagcaatatataacaagaacatgtaagcacttgcttccacagcataaatgtaattta

SEQ ID NO: 249043 - DNA, 120 bp, Artificial Sequence
  ENSG00000123094_40 (sequence is synthesized)
catctgcattaaaggataattttctctgtgaataagagcaaaatggtcttcagagaaacagactgttcatttgaagccatttctgtaaacatcttccaagatagaactgtaatggattga

SEQ ID NO: 249044 - DNA, 120 bp, Artificial Sequence
  ENSG00000123094_41 (sequence is synthesized)
ggaaataacacagaaaagacaaaaacttttgatttcaggcatgcaaagtgcttgggcagatggacagttcccattgtgcattgcctttgataaatttggccttaatttatataacgatgc

SEQ ID NO: 249045 - DNA, 120 bp, Artificial Sequence
  ENSG00000123094_42 (sequence is synthesized)
tgtgttcacatccctctcctacctaaagttgtctttattggtttatattgtgttaaaattagcttataattattacttttgtattgtgttcagttttttaagttgcatgtttatactatt

SEQ ID NO: 249046 - DNA, 120 bp, Artificial Sequence
  ENSG00000123094_43 (sequence is synthesized)
tgctacagtatttttaagtttggggtgaaggccatcagctgtatcaaaaagacaaaacaatcactatttattcagtattgctgctttacatctccagaataagctttcgatgccaggaca

SEQ ID NO: 249047 - DNA, 120 bp, Artificial Sequence
  ENSG00000123094_44 (sequence is synthesized)
gtgactgcctgaaagctgcaggagctcttttcaatgcattttatatatttttagaaaccaaataaatgcagaaaactatttcgtatactaattatattaaaccagcagaaatataaaggc

SEQ ID NO: 249048 - DNA, 120 bp, Artificial Sequence
  ENSG00000123094_45 (sequence is synthesized)
aataaagtatatacatatatatggggggaggggaaagattaaaaaatagatttacagccagacatggtgatagccctaaatgtatttctcaatatgtttttctttattgaccctaggagg

SEQ ID NO: 249049 - DNA, 120 bp, Artificial Sequence
  ENSG00000123094_46 (sequence is synthesized)
atttgagttgctgcagctttaaacagaaaattgccatgttcactaattgtgagcacataaatatgcttttagtactgctttgcttatgtacaaataaatctgtaatatgtattatatgta

SEQ ID NO: 249050 - DNA, 120 bp, Artificial Sequence
  ENSG00000123094_47 (sequence is synthesized)
attatccttttctttgactttcattttaaatgtatattttctgatcattatgagctgtaaaacaaagaatcaatattggatattctcccaaataataaattttcaggattcattggggca

SEQ ID NO: 249051 - DNA, 120 bp, Artificial Sequence
  ENSG00000123094_48 (sequence is synthesized)
ccaggactgtaagaaccctatgtacctttgcaggtgcctgtgtagatcatcctagaatacctgtgtggtgctgtccttcctcaagactacctcattctcactggctcggagactcctgcc

SEQ ID NO: 249052 - DNA, 90 bp, Artificial Sequence
  ENSG00000123094_49 (sequence is synthesized)
atgtgaggacacagcaagaaggtgccatccgtgaaccaaaaagtgagcccttgccagacacctgatccgctggtgccataatcatgacaa

SEQ ID NO: 249053 - DNA, 120 bp, Artificial Sequence
  ENSG00000123094_50 (sequence is synthesized)
aaaccatatttcactgggagagcaaactgctagcatttatcatcccctccagctttaagttacagaggctaaactcctgctgactacacagacttagtcttctccactccgtgttcctgc

SEQ ID NO: 249054 - DNA, 120 bp, Artificial Sequence
  ENSG00000123094_51 (sequence is synthesized)
gcggccgcggagctccgggtgccgccgcgtccccagcgccccggccggcccctctgggcggcctgcgggggcggcgcagttgcgaaactgagtgcctgtgtagatcatcctagaatacct

SEQ ID NO: 249055 - DNA, 120 bp, Artificial Sequence
  ENSG00000123094_52 (sequence is synthesized)
aagcaggagtgtaaagattagatatcacaccaaaagctcaggcaagaaaagcaaaaatgaacaagtgggactacattaaacccaaaactcctgcacaacaaaggaaacgatcaccaaaat

SEQ ID NO: 249056 - DNA, 120 bp, Artificial Sequence
  ENSG00000123094_53 (sequence is synthesized)
gaaaaggtggactgtagattgggagaaaatatttgcaaaccgttatctggtaagggtttaatatccaaactatataaggaactcacagaacttaaagaaaacaaataatccaattaaaaa

SEQ ID NO: 249057 - DNA, 67 bp, Artificial Sequence
  ENSG00000123094_54 (sequence is synthesized)
aggagactgagaccatcctggctaacaccatgatgggctaacacccatctctactaaaaatatgaaa

SEQ ID NO: 249058 - DNA, 87 bp, Artificial Sequence
  ENSG00000123094_55 (sequence is synthesized)
agatatttttccaaagaagacataaaaacagccaacaggtatatgaaaaagtgctcaacatcactgatcagcagggaaatgcaaatc

SEQ ID NO: 249059 - DNA, 120 bp, Artificial Sequence
  ENSG00000123094_56 (sequence is synthesized)
tgcaaatcaaagccacaatgagataccacctcacacctgttaggttacatctgctattgtcaaaaagataagagatagcaagtgtcagcaagggtctggagaaaagggaatttttgtata

SEQ ID NO: 249060 - DNA, 120 bp, Artificial Sequence
  ENSG00000123094_57 (sequence is synthesized)
caagggtctggagaaaagggaatttttgtatactgttggtgggaatgtaaatcagtacagctattgtggaaaacagtgtagaggtttctcaaaaaattaaaactatcatacaacccagca

SEQ ID NO: 249061 - DNA, 120 bp, Artificial Sequence
  ENSG00000123094_58 (sequence is synthesized)
tcactatcagcgaaccagaaagcaggctctcacccgacgctgagtctgacggtgacttgaccttggactttccagcttccagaaaactgactacacagacttagtcttctccactccgtg

SEQ ID NO: 249062 - DNA, 120 bp, Artificial Sequence
  ENSG00000123094_59 (sequence is synthesized)
acctgaagccaccaacagcttgaaaaacaaggaaagctttctctcctgcaaccattggagggaccctggcccagctggcactttgatttcagcccagtgaaagtgattttgagcttctga

SEQ ID NO: 249063 - DNA, 120 bp, Artificial Sequence
  ENSG00000123094_60 (sequence is synthesized)
cccccagaactatgagaggaaaatttttgttgtttttatgctcccccagtttgtggtaatttgctactgcatctccaggaaactactgcactttgtactgaaacaaatgtaaaaatagat

SEQ ID NO: 249064 - DNA, 120 bp, Artificial Sequence
  ENSG00000123094_61 (sequence is synthesized)
agtctgacggtgacttgaccttggactttccagcttccagaaaagagagtggtagaggcacagaagatgatgaggctgttgaactgtggaggcatagattagagtgacgtggtcacaagc

SEQ ID NO: 249065 - DNA, 120 bp, Artificial Sequence
  ENSG00000123095_0 (sequence is synthesized)
caaacactgcctggagtgagagcaaactaccagcgcagtggggccggcgcgagtgtgcgtgtgtgtgcgtgtgtgtgtgcgagcgcggtggaggggggggaccaactgcttcacactttc

SEQ ID NO: 249066 - DNA, 120 bp, Artificial Sequence
  ENSG00000123095_1 (sequence is synthesized)
aacactgcactgaagagggagagcgagagagagactggagacgcacagatccccccaaggtctcccaagcctaccgtcccacagattattgtacagagccccaaaaatcgaaacagagga

SEQ ID NO: 249067 - DNA, 120 bp, Artificial Sequence
  ENSG00000123095_2 (sequence is synthesized)
aacgaacagcagttgaacatggacgaaggaattcctcatttgcaagagagacagttactggaacatagagattttataggactggactattcctctttgtatatgtgtaaacccaaaagg

SEQ ID NO: 249068 - DNA, 120 bp, Artificial Sequence
  ENSG00000123095_3 (sequence is synthesized)
agcatgaaacgagacgacaccaaggatacctacaaattaccgcacagattaatagaaaagaaaagaagagaccgaattaatgaatgcattgctcagctgaaagatttactgcctgaacat

SEQ ID NO: 249069 - DNA, 120 bp, Artificial Sequence
  ENSG00000123095_4 (sequence is synthesized)
ctgaaattgacaactctgggacatctggagaaagctgtagtcttggaattaactttgaaacacttaaaagctttaaccgccttaaccgagcaacagcatcagaagataattgctttacag

SEQ ID NO: 249070 - DNA, 120 bp, Artificial Sequence
  ENSG00000123095_5 (sequence is synthesized)
aatggggagcgatctctgaaatcgcccattcagtccgacttggatgcgttccactcgggatttcaaacatgcgccaaagaagtcttgcaatacctctcccggtttgagagctggacaccc

SEQ ID NO: 249071 - DNA, 120 bp, Artificial Sequence
  ENSG00000123095_6 (sequence is synthesized)
agggagccgcggtgtgtccagctgatcaaccacttgcacgccgtggccacccagttcttgcccaccccgcagctgttgactcaacaggtccctctgagcaaaggcaccggcgctccctcg

SEQ ID NO: 249072 - DNA, 120 bp, Artificial Sequence
  ENSG00000123095_7 (sequence is synthesized)
gccgccgggtccgcggccgccccctgcctggagcgcgcggggcagaagctggagcccctcgcctactgcgtgcccgtcatccagcggactcagcccagcgccgagctcgccgccgagaac

SEQ ID NO: 249073 - DNA, 120 bp, Artificial Sequence
  ENSG00000123095_8 (sequence is synthesized)
gacacggacaccgacagcggctacggcggcgaagccgaggcccggccggaccgcgagaaaggcaaaggcgcgggggcgagccgcgtcaccatcaagcaggagcctcccggggaggactcg

SEQ ID NO: 249074 - DNA, 80 bp, Artificial Sequence
  ENSG00000123095_9 (sequence is synthesized)
ggggaggactcgccggcgcccaagaggatgaagctggattcccgcggcggcggcagcggcggcggcccggggggcggcgc

SEQ ID NO: 249075 - DNA, 120 bp, Artificial Sequence
  ENSG00000123095_10 (sequence is synthesized)
ctgctgagacccgacgccgccctgctcagctcgctggtggcgttcggcggaggcggaggcgcgcccttcccgcagcccgcggccgccgcggcccccttctgcctgcccttctgcttcctc

SEQ ID NO: 249076 - DNA, 120 bp, Artificial Sequence
  ENSG00000123095_11 (sequence is synthesized)
tcgccttctgcagctgccgcctacgtgcagcccttcctggacaagagcggcctggagaagtatctgtacccggcggcggctgccgccccgttcccgctgctataccccggcatccccgcc

SEQ ID NO: 249077 - DNA, 80 bp, Artificial Sequence
  ENSG00000123095_12 (sequence is synthesized)
ccgccgccgcgttcccctgcctgtcctcggtgttgtcgccccctcccgagaaggcgggcgccgccgccgcgaccctcctg

SEQ ID NO: 249078 - DNA, 120 bp, Artificial Sequence
  ENSG00000123095_13 (sequence is synthesized)
ccgcacgaggtggcgccccttggggcgccgcacccccagcacccgcacggccgcacccacctgcccttcgccgggccccgcgagccggggaacccggagagctctgctcaggaagatccc

SEQ ID NO: 249079 - DNA, 120 bp, Artificial Sequence
  ENSG00000123095_14 (sequence is synthesized)
tcgcagccaggaaaggaagctccctgaatccttgcgtcccgaaggacggaggttcaagcagagtgagaagttaaaatacccttaaggaggttcaagcagagtgagaagttaaaataccct

SEQ ID NO: 249080 - DNA, 120 bp, Artificial Sequence
  ENSG00000123095_15 (sequence is synthesized)
taatagatgcacgacaggcataaacaagaacaacaaaacaggtgttatgtgtacattcggagttcctgttttgctcatcccgcaccaccccaccctccacacactaacatccctttcttc

SEQ ID NO: 249081 - DNA, 120 bp, Artificial Sequence
  ENSG00000123095_16 (sequence is synthesized)
cccccaccagctgtaaaagatcctatgcgaaagacactggctcttttttttaatcccccaaataaattttgcccccttttaggccatgttccattatctcttaaaattggaacctaattc

SEQ ID NO: 249082 - DNA, 120 bp, Artificial Sequence
  ENSG00000123095_17 (sequence is synthesized)
gagaggaagtaagaagggtctgttctgtggctgagctaggtgaaccccggggtaggggaaagatgttaacacctttgacgtctttggagttgacatggaacagcaggtagttgttatgta

SEQ ID NO: 249083 - DNA, 120 bp, Artificial Sequence
  ENSG00000123095_18 (sequence is synthesized)
gagctagttctcaaagctgccctgcctgttttaggaggcgttccacaaacagattgaggctcttttagaattgaatttactcttcagtattttctaatgttcagctttctaaaaggcata

SEQ ID NO: 249084 - DNA, 120 bp, Artificial Sequence
  ENSG00000123095_19 (sequence is synthesized)
tatttttcaaagaagtgaggatgcagtttctcacgttgcaacctattctgaagtggtttaaatggtatctcttagtaacttgcactcgttaaagaaacacggagctgggccatcgtcaga

SEQ ID NO: 249085 - DNA, 120 bp, Artificial Sequence
  ENSG00000123095_20 (sequence is synthesized)
actaagtcagggaaggagatggatgagaaggccagaatcattcctagtacatttgctaacactttattgagaaattgaccatgaattaatggactcatcttaatttcttctaagtccata

SEQ ID NO: 249086 - DNA, 120 bp, Artificial Sequence
  ENSG00000123095_21 (sequence is synthesized)
tatagatagatatctatctgtacagatttctatttatccatagataggtatctatacatacacatctcaagtgcatctattcccactctcattaatccatcatgttcctaaatttttgta

SEQ ID NO: 249087 - DNA, 120 bp, Artificial Sequence
  ENSG00000123095_22 (sequence is synthesized)
atcttactgtaaaaaaaagtgcactgaacttcaaaacaaaacaaaaaacaacaacaacaaaaaacaagtccaaactgatatatcctatattctgttaaaattcaaaagtgaacgaaagca

SEQ ID NO: 249088 - DNA, 120 bp, Artificial Sequence
  ENSG00000123095_23 (sequence is synthesized)
tttaactggccagttttgattgcaaatgctgtaaagatatagaatgaagtcctgtgaggccttcctatctccaagtctatgtattttctggagaccaaaccagataccagataatcacaa

SEQ ID NO: 249089 - DNA, 120 bp, Artificial Sequence
  ENSG00000123095_24 (sequence is synthesized)
agaaagcttttttaataaggcttaaaccaagaccttgtctagatatttttagtttgttgccaaggtagcactgtgagaaatctcacttggatgttatgtaaggggtgagacacaacagtc

SEQ ID NO: 249090 - DNA, 120 bp, Artificial Sequence
  ENSG00000123095_25 (sequence is synthesized)
tgactatgagtgaggaaaatatctgggtcttttcgtcagtttggtgcatttgctgctgctgttgctactgtttgcctcaaacgctgtgtttaaacaacgttaaactcttagcctacaagg

SEQ ID NO: 249091 - DNA, 120 bp, Artificial Sequence
  ENSG00000123095_26 (sequence is synthesized)
tggctcttatgtacatagttgttaatacatccaattaatgatgtctgacatgctatttttgtagggagaaaatatgtgctaatgatattttgagttaaaatatcttttggggaggatttg

SEQ ID NO: 249092 - DNA, 120 bp, Artificial Sequence
  ENSG00000123095_27 (sequence is synthesized)
ctgaaaagttgcacttttgttacaatgcttatgcttggtacaagcttatgctgtcttaaattattttaaaaaaataaatactgtctgtgagaaaccagctggtttagaaaagtttagtat

SEQ ID NO: 249093 - DNA, 120 bp, Artificial Sequence
  ENSG00000123095_28 (sequence is synthesized)
gtgacgataaactagaaattacctttatattctagtattttcagcactccataaattctattacctaaatattgccacactattttgtgatttaaaaattcttactaaggaataaaaact

SEQ ID NO: 249094 - DNA, 120 bp, Artificial Sequence
  ENSG00000123095_29 (sequence is synthesized)
ttaatatacgatatgatattgtctaataattaaaaaagacataatggatgctcaattagttttaagatatctataactatagggatacaaatcactacagttctcagatttacagctttt

SEQ ID NO: 249095 - DNA, 120 bp, Artificial Sequence
  ENSG00000123095_30 (sequence is synthesized)
ttttgtcattggcttgatgtcacacatttccaatctcttgcaagcctccaggctctggctttgtctacctgctcgttcccaatgtatcttaatgaaaagtgcaaaagaaaaacctaccaa

SEQ ID NO: 249096 - DNA, 120 bp, Artificial Sequence
  ENSG00000123096_0 (sequence is synthesized)
ctctgctgcgggctccccgtggcctttggaggctcggtgagtcggctccaaatgttttccatatttgttcagcctccataattcgaataccagggcaggccgagccagccgtgcgccgcg

SEQ ID NO: 249097 - DNA, 120 bp, Artificial Sequence
  ENSG00000123096_1 (sequence is synthesized)
cgagccagccgtgcgccgcgctccagggcccagggcgccgcacacgcacccacccacccacccagcctcgcagcgccatgggcaagaacaagcagccacgcggccagcagaggcaggggg

SEQ ID NO: 249098 - DNA, 120 bp, Artificial Sequence
  ENSG00000123096_2 (sequence is synthesized)
gctgggcccgacgacatggagccgaagaagggcacgggggcccccaaggagtgcggggaggaggagccccggacctgctgcggctgccggttcccgctgctgctcgccctgctgcagctg

SEQ ID NO: 249099 - DNA, 120 bp, Artificial Sequence
  ENSG00000123096_3 (sequence is synthesized)
gccctgggcatcgccgtgaccgtggtgggcttcctcatggcgagcatcagctcctccctgctagtcagggacactccattttgggctgggatcattgtctgcttagtggcctatcttggc

SEQ ID NO: 249100 - DNA, 120 bp, Artificial Sequence
  ENSG00000123096_4 (sequence is synthesized)
ttgtttatgctttgtgtctcatatcaggttgacgaacggacatgtattcaattttctatgaaactgttatactttctgctgagtgccctgggcctgacggtctgtgtgctggccgtggcc

SEQ ID NO: 249101 - DNA, 120 bp, Artificial Sequence
  ENSG00000123096_5 (sequence is synthesized)
tttgccgcccaccactattcgcagctcacacagtttacctgtgagaccacactcgactcttgccagtgcaaactgccctcctcggagccgctcagcaggacctttgtttaccgggatgtg

SEQ ID NO: 249102 - DNA, 120 bp, Artificial Sequence
  ENSG00000123096_6 (sequence is synthesized)
acggactgtaccagcgtcactggcactttcaaactgttcttactcatccagatgattcttaatttggtctgcggccttgtgtgcttgttggcctgctttgtgatgtggaaacataggtac

SEQ ID NO: 249103 - DNA, 120 bp, Artificial Sequence
  ENSG00000123096_7 (sequence is synthesized)
caggtcttctatgtgggtgtcaggatatgctccctcacggcttccgaaggcccccagcaaaagatctaacattcttgctcaaagttgcgagagaaagtagcacatggagtagctgaggtt

SEQ ID NO: 249104 - DNA, 120 bp, Artificial Sequence
  ENSG00000123096_8 (sequence is synthesized)
aaacaaacaaaaaaaaattttaaacaaagaaaggaaaaaaattgacaataaaagtcactcttctaattgaatatttttatatttttatgaaacaaaagagcatttcttcaggtttctatt

SEQ ID NO: 249105 - DNA, 120 bp, Artificial Sequence
  ENSG00000123096_9 (sequence is synthesized)
gtattttttttaacattcttgcagagaaagcaagatccaaattgattttgggatattaaaagttaacagaacactgaacaaggaaagaatggcatagatctatctttacagtctggagtt

SEQ ID NO: 249106 - DNA, 120 bp, Artificial Sequence
  ENSG00000123096_10 (sequence is synthesized)
aattcctgttaactcattttatccattccttacataatcttctttcctgttagtccagtttgatggtgtgaatggtgaatttcaggcccagttgctaaattttgtggcatcttcctctag

SEQ ID NO: 249107 - DNA, 120 bp, Artificial Sequence
  ENSG00000123096_11 (sequence is synthesized)
ctctgtcttggagacaggcaggaggtgggggaagagctgaatctctttattttccctggtagagacatcttcaaggcatgaaatagcttaaagagcagagtagaaacggaagaggctttg

SEQ ID NO: 249108 - DNA, 120 bp, Artificial Sequence
  ENSG00000123096_12 (sequence is synthesized)
caaaaggctagataactaacaacacctgggttggggcggcggcctcttctcttcagctcccttagcttggctccgtaagtggatcacttgccaaatgctttagatgattgcctctcaata

SEQ ID NO: 249109 - DNA, 120 bp, Artificial Sequence
  ENSG00000123096_13 (sequence is synthesized)
attgaaaggtggtggtagttgtattctaaatgatgtagaaggtttaaaaataattacattatgcttctattctatcatctaaaacaaatcattaaaactaatttctagctaattgttaat

SEQ ID NO: 249110 - DNA, 120 bp, Artificial Sequence
  ENSG00000123096_14 (sequence is synthesized)
tataattatgctcagaagtctatttaatgagctctgactgtacttacgctgcactgtcggtgttaagagaaattactctcacaagagcagaggcctgaagattctttcttctgaaagcca

SEQ ID NO: 249111 - DNA, 120 bp, Artificial Sequence
  ENSG00000123096_15 (sequence is synthesized)
agcaccacaaggaaaaaaaaaattattaatagctcaggttaaaaacacccatttaaacaaaaacaagagcatttgtaataggaagtgtttatacaaacagcacatttgtgatatgttgaa

SEQ ID NO: 249112 - DNA, 120 bp, Artificial Sequence
  ENSG00000123096_16 (sequence is synthesized)
aagcatctctcttggcaaccaatctatgtttgaggaagattgggtaatgctgatgtgttccattcatgaaactgtatttgatacataatcctattattaattcgtatgcttagtcaacct

SEQ ID NO: 249113 - DNA, 120 bp, Artificial Sequence
  ENSG00000123096_17 (sequence is synthesized)
aggaaatcaaaataatgttttgaagttcttatttgagcaatatggccttgacttggagggtagttttagttgttttgtttttaagtgactgtggtttaaagcacaaatgccccaaggtgg

SEQ ID NO: 249114 - DNA, 120 bp, Artificial Sequence
  ENSG00000123096_18 (sequence is synthesized)
ggagacttctctctgtgattattgttgctattaaattctgaactgtatccatattttaaggaaggagctaaaaatggaaattcatgaaacataaatggtatcaagaactttatcagtatg

SEQ ID NO: 249115 - DNA, 120 bp, Artificial Sequence
  ENSG00000123096_19 (sequence is synthesized)
ctttgttgaaagcagaaattaagataataattgagttcaattcgcctctccgcattgcctattgatacactttactaatcatgaaattctaacctaaaaggaaaacattttcctgcttgt

SEQ ID NO: 249116 - DNA, 120 bp, Artificial Sequence
  ENSG00000123096_20 (sequence is synthesized)
cttagaagaaagtggaataattccactgattgtgataatggtttcaatttctacacaatataaatatccagtataaaggaaagcgttaagtcggtaagctagaggattgtaaatatcttt

SEQ ID NO: 249117 - DNA, 120 bp, Artificial Sequence
  ENSG00000123096_21 (sequence is synthesized)
tatgtcctctagataaaacacccgattaacagatgttaaaccttttaatgttttgatttgctttaaaaatggccttcctacacattagctccagctaaaaagacacattggagagcttag

SEQ ID NO: 249118 - DNA, 120 bp, Artificial Sequence
  ENSG00000123096_22 (sequence is synthesized)
aggataagtctctggagcagaatttatcacacacaaaagttacaccaacagaataccaagcagaatgatgaggacctgtaaaataccttgtgccctattaaaaaaaaaaaaaaaaaaaaa

SEQ ID NO: 249119 - DNA, 120 bp, Artificial Sequence
  ENSG00000123096_23 (sequence is synthesized)
gtcattgtaccaggattgatgtgctcggtgcccagaaggcagtaagctctgctccctagcagccttggatacggtttgccctggcttgaggatgtgctctgtgttgtttgctcatggcac

SEQ ID NO: 249120 - DNA, 120 bp, Artificial Sequence
  ENSG00000123096_24 (sequence is synthesized)
tgtagaggactgttcctccaagcacttccttctcttccacaacccatcttgaaaccagagaaccagcaggactaaggatggaattgaaaaaagttgatgaatttatgtttcatcttccat

SEQ ID NO: 249121 - DNA, 120 bp, Artificial Sequence
  ENSG00000123096_25 (sequence is synthesized)
ctctacttcttctcctggaggtgtgaacgaataatgaaactgctaaggagaaaggcagcatgaaagaaggaggctgcacaattggaccttgcaaattcaagatctagatcattagctgca

SEQ ID NO: 249122 - DNA, 120 bp, Artificial Sequence
  ENSG00000123096_26 (sequence is synthesized)
aatctgagttggaggtgctgaatactcattcacacggtcgtgctcatagcagcagcgagattttttttcttgtcacgatgaacagagtgtcctgacaccttgagacattaggtgcttgca

SEQ ID NO: 249123 - DNA, 120 bp, Artificial Sequence
  ENSG00000123096_27 (sequence is synthesized)
gaacatagtgtgaggtgacaagggaagggacttgcccttcacctccacaccactccaaaaagccctaccatcgtgcaaaattacatacacaatctcatgccacaaaatataaaccaacca

SEQ ID NO: 249124 - DNA, 120 bp, Artificial Sequence
  ENSG00000123096_28 (sequence is synthesized)
tcccctgtgctttctgagcacatagcatatttttccctaatcttaaaatttagctttaaagttcactgttaaggaactaagcagttttttagtcaagagatatatgctggtttaagatac

SEQ ID NO: 249125 - DNA, 120 bp, Artificial Sequence
  ENSG00000123096_29 (sequence is synthesized)
acaaaaacttgaacagtacttgagatcttttgagaggaatgagcaagaaatcagatatttgccttttcatcttctgtagactcatacagcatcttctacatagctagggactcaagaatg

SEQ ID NO: 249126 - DNA, 120 bp, Artificial Sequence
  ENSG00000123096_30 (sequence is synthesized)
ttgaatctccaagctaaagcatctatcaaatgttatttacataaatagagcatatggagggaagcaaaaaagtggaggggtattcagagaggtgatagctctggaaaggaagaataaaaa

SEQ ID NO: 249127 - DNA, 120 bp, Artificial Sequence
  ENSG00000123096_31 (sequence is synthesized)
atttccaaggaggcaacaattcctactgtctgccagtctgtccaggagattcactagactggccactccagttctccccagttcggttgtgctccagggaagacagtgttagaggacaag

SEQ ID NO: 249128 - DNA, 120 bp, Artificial Sequence
  ENSG00000123096_32 (sequence is synthesized)
aagcaggctggaaagaaagtagaataatgcccttagactgcatggaatctcaaacaagttttacttttgtgctatgtatataaggagatctattttctttctcactgaggtcgtatcagt

SEQ ID NO: 249129 - DNA, 120 bp, Artificial Sequence
  ENSG00000123096_33 (sequence is synthesized)
agataaactgcgatctctgtggaaatctttttccttatttttaaagtttactactcatttttttttgttcaaagaagctgttctgaataaagttactcaatacagttggaaaaactgtca

SEQ ID NO: 249130 - DNA, 120 bp, Artificial Sequence
  ENSG00000123096_34 (sequence is synthesized)
gcacacgcgcgcactcgcagcctgtctgaagtgcagaggttcaggcggccaagggacccgcgccggtttccgcgggcgacctgcaaatcctgcccggggcccggcaggcgctgcgtcccg

SEQ ID NO: 249131 - DNA, 120 bp, Artificial Sequence
  ENSG00000123096_35 (sequence is synthesized)
ttttggttgagtttcctacacaaagaagaaaataactgagaatctggaatgttgtagtccatcctttaaagagtaagaaagtagcagttaatgctagtaaccgtgaattaggcaccactg

SEQ ID NO: 249132 - DNA, 120 bp, Artificial Sequence
  ENSG00000123096_36 (sequence is synthesized)
aaagcacatcccgaatttctttaacaacaacattttatagtgaacactacaagtttttatatttaaaaattaagactctgtatatccttaaggtgctctatgctttaccagtaattcaca

SEQ ID NO: 249133 - DNA, 120 bp, Artificial Sequence
  ENSG00000123096_37 (sequence is synthesized)
gggtatttcaaatggtagaatcattttagcttctgtgcttcctttttctaaataatgcaacttgtaagagttgacattgtaataagctttataatagtataaccgtcaggagatatatat

SEQ ID NO: 249134 - DNA, 120 bp, Artificial Sequence
  ENSG00000123096_38 (sequence is synthesized)
atatatacacatacacacacacacacacatatatactatacatatataaaatggggatattactattgtatgattaaatcattcttaagtccccaaggaaaaaaaatcataaacaaatag

SEQ ID NO: 249135 - DNA, 120 bp, Artificial Sequence
  ENSG00000123096_39 (sequence is synthesized)
atagaaagaactaaacagaaaagaaagaaagaaaagatccctttgctatgagctcgctgtatattgataagtgtaagaattgtgttgcatgaataaccgctttgggctggatttgaagta

SEQ ID NO: 249136 - DNA, 120 bp, Artificial Sequence
  ENSG00000123096_40 (sequence is synthesized)
ttttgatgttgtgttttgcaaatattgaagttacaataatggcaacagaaaaggaacagatacacagctttacacttagcagaatgttacatttaaaatctgacaaggcgccaagatggt

SEQ ID NO: 249137 - DNA, 120 bp, Artificial Sequence
  ENSG00000123096_41 (sequence is synthesized)
gactgtctcctctaaaccacgaaagagtaagatttgtgcaaccctcctcctcttccacctccttcaggagaattaaatgaatcaagactttggaaagacggggaagagccgggacttggc

SEQ ID NO: 249138 - DNA, 120 bp, Artificial Sequence
  ENSG00000123096_42 (sequence is synthesized)
agtacttgaaacaggaggaatacaccagcctaaatgtacagactttgtagccgagcccactcgatcggtctgtgccttcacgtgaccaccatctgtgcctccctcgctccatccaaattt

SEQ ID NO: 249139 - DNA, 120 bp, Artificial Sequence
  ENSG00000123096_43 (sequence is synthesized)
gtgtaggctgctccttggagctatgcctaaaatatagctacaccagagccctggaaactgtagtcaagtaacaggcctcactgttttttttctttggattaaaagtgtatatctctctac

SEQ ID NO: 249140 - DNA, 120 bp, Artificial Sequence
  ENSG00000123096_44 (sequence is synthesized)
tgaggggtttccagctttacacttctataggttgttctgacagtgagaacacattatgtacatgttttctattcatgtccagggcatgagaatcttaatattcttatacttccctttttg

SEQ ID NO: 249141 - DNA, 120 bp, Artificial Sequence
  ENSG00000123096_45 (sequence is synthesized)
catgcagtatgtctggaatatgtttataaaattttagcaaggggtgagatcaagggacaaaggtagagtggttatttaaagacaatcagaaatgaacttaaaagctgccctgcaaaacca

SEQ ID NO: 249142 - DNA, 120 bp, Artificial Sequence
  ENSG00000123096_46 (sequence is synthesized)
atcctttcctatcatgaagagtaccttcatattttctagagattgtctctgaaccgttgctacatagccataaatttctgtaaatcatgttggctatcagttcttgctattctcagagca

SEQ ID NO: 249143 - DNA, 120 bp, Artificial Sequence
  ENSG00000123096_47 (sequence is synthesized)
ctctatcatgtttttaggtgtatattgtgtattcaggatagcattaaaaagaactgatggcaaatgtattgactcacagtggaaacattcatttggatgaagaattagtggtttagcctt

SEQ ID NO: 249144 - DNA, 120 bp, Artificial Sequence
  ENSG00000123096_48 (sequence is synthesized)
tgaaatgaataccttgaatcatttcttctgattttctagtagtttattatctcaaatgattattatccccttcaaaaatactggtctgtactttggtgttgtggattcatttttctggca

SEQ ID NO: 249145 - DNA, 120 bp, Artificial Sequence
  ENSG00000123096_49 (sequence is synthesized)
ttgatcaaatagcaaatacaaaataaagcatttctacatgtttgaggtggttgtttttaaaggggatatgtgtaatgcagattttctttattaataaaattttcataatctctgaaaaca

SEQ ID NO: 249146 - DNA, 120 bp, Artificial Sequence
  ENSG00000123096_50 (sequence is synthesized)
gaatgaaacagaagtcaaagagctgtctacacgtccttcccaagctataattaagatggaagctcatttgccattctgaggattggtgcaatcaagcatatgacagcaagattttggaac

SEQ ID NO: 249147 - DNA, 120 bp, Artificial Sequence
  ENSG00000123096_51 (sequence is synthesized)
atttttatcagttttggaaccacagctcctccatggccaaatttctctttatgtctcaggtttcagagcatggcctaatatttcccgtacagacaggccgctccgctgcccttctgattc

SEQ ID NO: 249148 - DNA, 120 bp, Artificial Sequence
  ENSG00000123096_52 (sequence is synthesized)
actctgcttgaacctccttaagggtattttaacttctcactctgcttgaacctccgtccttcgggacgcaaggattcagggagcttcctttcctggctgcgagggatcttcctgagcaga

SEQ ID NO: 249149 - DNA, 120 bp, Artificial Sequence
  ENSG00000123096_53 (sequence is synthesized)
cgggacgcaaggattcagggagcttcctttcctggctgcgagggatcttcctgagcagagctctccgggttccccggctcgcggggcccggcgaagggcagatccattgtcatgacttct

SEQ ID NO: 249150 - DNA, 120 bp, Artificial Sequence
  ENSG00000123096_54 (sequence is synthesized)
ttctcagaatcaagatgtgccagtaaatatgaattggttggatttgacttctcaatgatacacaatgattctctacctggactaacaccacagaggatgccatagaaacttctgagattt

SEQ ID NO: 249151 - DNA, 120 bp, Artificial Sequence
  ENSG00000123096_55 (sequence is synthesized)
cgatgataaatataaaaagttgaagctttggggagcccaagccaggaagctggagacactgtggcagaaagtgaaagaggaagaagccattcgacgtctgtttttaaaaatgtgttctgt

SEQ ID NO: 249152 - DNA, 120 bp, Artificial Sequence
  ENSG00000123104_0 (sequence is synthesized)
cagctcccgccgggcggctgtgacggccgcagcgggtcgcagagcagggagtggacacggagtggggagcggagagggaaggaggaggaggaggagcaaaggtgttggagagaaaacttc

SEQ ID NO: 249153 - DNA, 120 bp, Artificial Sequence
  ENSG00000123104_1 (sequence is synthesized)
agaaaggaacaggaaacctgccggggaggcggcggcggctgcggcttctctgggcgcctgggctgcgctcttcgcggggtgtccgcagctgcggcttggccccggtctggcttccccggc

SEQ ID NO: 249154 - DNA, 120 bp, Artificial Sequence
  ENSG00000123104_2 (sequence is synthesized)
gcgcacgcacggctgagccgcgacgctcagtggctcgggccgtgccctccgccgcggctcttggccgctgtagtcccgcgatccgatccgcttctgccgcggcggctccctggagagagg

SEQ ID NO: 249155 - DNA, 120 bp, Artificial Sequence
  ENSG00000123104_3 (sequence is synthesized)
gcggcgagggcgcagggaagaagagggacgtccactgtggaacatgaagcagcatgactgagaaaatgtccagcttcctctacataggggacatcgtgtccctgtacgcggagggctcgg

SEQ ID NO: 249156 - DNA, 120 bp, Artificial Sequence
  ENSG00000123104_4 (sequence is synthesized)
tcaacggcttcatcagcaccttggggttagtggatgacagatgtgtggtgcacccagaggccggggaccttgccaaccctcccaagaagttcagagactgccttttcaaggtgtgcccta

SEQ ID NO: 249157 - DNA, 120 bp, Artificial Sequence
  ENSG00000123104_5 (sequence is synthesized)
tgaacagatattctgcccagaagcaatattggaaagcaaagcaagccaaacaagggaaccacaccgaggcagccttgctgaagaaactacagcacgctgcagaactggaacaaaaacaaa

SEQ ID NO: 249158 - DNA, 120 bp, Artificial Sequence
  ENSG00000123104_6 (sequence is synthesized)
atgaatcggagaataagaaactgttgggagaaattgtaaaatacagtaatgttatacaactactgcatataaaaagcaacaaatatcttactgtcaacaagagattacctgctttactgg

SEQ ID NO: 249159 - DNA, 120 bp, Artificial Sequence
  ENSG00000123104_7 (sequence is synthesized)
agaagaatgccatgcgtgtgtccttggatgctgcaggaaatgaagggtcttggttttatattcatccgttctggaaactgagaagcgagggtgacaatattgttgtaggagataaagttg

SEQ ID NO: 249160 - DNA, 120 bp, Artificial Sequence
  ENSG00000123104_8 (sequence is synthesized)
ttttgatgcctgtgaatgcagggcagccactacatgccagcaacatagagcttcttgataacccagggtgtaaagaggtgaatgctgtcaattgcaacaccagctggaaaatcactttat

SEQ ID NO: 249161 - DNA, 120 bp, Artificial Sequence
  ENSG00000123104_9 (sequence is synthesized)
tcatgaaatatagttcctatcgagaggatgtattaaaaggaggggacgttgttagattatttcatgcggaacaagagaagtttttgacttgtgatgaatatgagaaaaaacagcacattt

SEQ ID NO: 249162 - DNA, 120 bp, Artificial Sequence
  ENSG00000123104_10 (sequence is synthesized)
tccttcgtacgaccttgcgccaatcagctacttctgctactagttctaaagcactctgggaaatagaggtggttcatcatgacccatgccgtgggggtgcaggacagtggaacagcttgt

SEQ ID NO: 249163 - DNA, 120 bp, Artificial Sequence
  ENSG00000123104_11 (sequence is synthesized)
tcagatttaagcatcttgcaactggaaactatttagctgcagagcttaatcctgattatcgagatgcccaaaatgaaggaaaaaatgtgagagatggagtccctccaacttcaaagaaaa

SEQ ID NO: 249164 - DNA, 120 bp, Artificial Sequence
  ENSG00000123104_12 (sequence is synthesized)
aacgccaggcaggggagaagatcatgtatactttggtttcagtcccgcatggcaatgacattgcatccctttttgaactagatgccacaactcttcagagagctgactgcctggttccaa

SEQ ID NO: 249165 - DNA, 120 bp, Artificial Sequence
  ENSG00000123104_13 (sequence is synthesized)
ggaactcatatgttcggttaaggcatttatgcaccaacacatgggtaaccagtactagtatccccatagacacagatgaagagaggcctgttatgttaaagattggaacctgccaaacca

SEQ ID NO: 249166 - DNA, 120 bp, Artificial Sequence
  ENSG00000123104_14 (sequence is synthesized)
aagaagataaagaagcgttcgcaatcgtgtctgttccactgtctgaagttcgagacttagactttgccaatgatgccaataaagtactagcgaccacagttaaaaagctagaaaacggca

SEQ ID NO: 249167 - DNA, 120 bp, Artificial Sequence
  ENSG00000123104_15 (sequence is synthesized)
caataactcagaatgaaaggaggtttgtaaccaaattattggaagatctcatattctttgttgctgatgtgcctaataatggacaagaagttctggatgtggttatcactaagccaaacc

SEQ ID NO: 249168 - DNA, 120 bp, Artificial Sequence
  ENSG00000123104_16 (sequence is synthesized)
gagagcgtcaaaaattgatgagggaacaaaacatactggcacaggtatttggaattcttaaagcaccctttaaagagaaagcaggagaaggctcgatgctgagacttgaagatctggggg

SEQ ID NO: 249169 - DNA, 120 bp, Artificial Sequence
  ENSG00000123104_17 (sequence is synthesized)
atcaaagatatgcaccctacaagtacatgctgcggctctgttaccgcgtcctgagacactcgcagcaggattaccggaaaaatcaggaatatattgctaagaatttctgtgtcatgcagt

SEQ ID NO: 249170 - DNA, 120 bp, Artificial Sequence
  ENSG00000123104_18 (sequence is synthesized)
cccagattggctatgatattttggcagaagatactatcacagctttgttgcacaacaacagaaaactactagagaaacatatcacagcaaaagaaatagaaacatttgtcagtttactca

SEQ ID NO: 249171 - DNA, 120 bp, Artificial Sequence
  ENSG00000123104_19 (sequence is synthesized)
ggagaaatcgggagccaaggtttttggattatttgtcagatctgtgtgtgtctaataccactgctatccctgtaactcaagaactcatctgtaaatttatgttgagtccaggcaatgcag

SEQ ID NO: 249172 - DNA, 120 bp, Artificial Sequence
  ENSG00000123104_20 (sequence is synthesized)
acattctcattcaaactaaggtggtctcaatgcaagcagacaaccccatggagagctccatcctttcagatgacattgatgatgaagaagtttggctctattggattgacagcaacaagg

SEQ ID NO: 249173 - DNA, 120 bp, Artificial Sequence
  ENSG00000123104_21 (sequence is synthesized)
aacctcatggcaaagctatcaggcaccttgctcaagaggcaaaagaaggcaccaaagctgacttagaagttcttacctattacaggtaccagctaaacctctttgcaaggatgtgcttgg

SEQ ID NO: 249174 - DNA, 120 bp, Artificial Sequence
  ENSG00000123104_22 (sequence is synthesized)
atcgccagtatctggccataaaccagatttctacacagctgtctgtagacctgatcctgcggtgtgtgtcggatgagagcctgccgttcgacctccgagcgtccttctgtcgcctcatgc

SEQ ID NO: 249175 - DNA, 120 bp, Artificial Sequence
  ENSG00000123104_23 (sequence is synthesized)
tccacatgcacgttgaccgggatccccaggagtccgtggtgcctgttcgctatgccaggctctggacagaaatccccacaaagatcacaattcatgaatatgattctataacagactctt

SEQ ID NO: 249176 - DNA, 120 bp, Artificial Sequence
  ENSG00000123104_24 (sequence is synthesized)
ccagaaatgatatgaagaggaaatttgccctgacaatggaatttgttgaagaatatttgaaagaagttgtaaaccagccctttccttttggggataaagaaaaaaataaactgacatttg

SEQ ID NO: 249177 - DNA, 120 bp, Artificial Sequence
  ENSG00000123104_25 (sequence is synthesized)
aggtggtccacttggctcggaatcttatatactttggattttatagtttcagtgagttattaaggctaacaagaacacttctggctattttagacattgtacaggcccccatgtcatcat

SEQ ID NO: 249178 - DNA, 120 bp, Artificial Sequence
  ENSG00000123104_26 (sequence is synthesized)
actttgaaagattaagcaaatttcaagatggaggaaacaatgtgatgagaaccattcatggggtgggagagatgatgacccagatggtactcagtagaggctccatcttccccatgagcg

SEQ ID NO: 249179 - DNA, 120 bp, Artificial Sequence
  ENSG00000123104_27 (sequence is synthesized)
tgccggatgtgccacccagcatccacccgagcaagcaagggagccccaccgagcacgaggatgtgactgtgatggacaccaagctgaagatcattgagattttgcagtttatcctgagtg

SEQ ID NO: 249180 - DNA, 120 bp, Artificial Sequence
  ENSG00000123104_28 (sequence is synthesized)
tcagactggattataggatctcatatatgctgtcaatatataagaaggagtttggagaggacaatgacaatgcggagacatctgccagtggatctccagacactttactaccatcagcta

SEQ ID NO: 249181 - DNA, 120 bp, Artificial Sequence
  ENSG00000123104_29 (sequence is synthesized)
ttgttcctgatatagatgaaattgcagctcaggcagaaactatgtttgcgggaagaaaagaaaaaaatccagttcaacttgacgatgaaggaggcaggacgtttttacgggtcctcattc

SEQ ID NO: 249182 - DNA, 120 bp, Artificial Sequence
  ENSG00000123104_30 (sequence is synthesized)
atctgatcatgcacgactacccgcctttgctgtctggagccctgcagctgttgtttaagcacttcagccagagggcagaggttttacaggcatttaagcaggtgcaattactggtgtcta

SEQ ID NO: 249183 - DNA, 120 bp, Artificial Sequence
  ENSG00000123104_31 (sequence is synthesized)
atcaagacgtagataactacaagcaaatcaaggcagatctagaccagcttcgactgacagtagaaaagtctgagctatgggtggagaagagcagcaactatgagaatggagaaatagggg

SEQ ID NO: 249184 - DNA, 120 bp, Artificial Sequence
  ENSG00000123104_32 (sequence is synthesized)
aaagtcaagtgaaaggtggtgaagagccaattgaggaatcaaacattttaagtccagtgcaggatggaacaaagaaacctcagattgacagcaacaagagcaataactaccggattgtaa

SEQ ID NO: 249185 - DNA, 120 bp, Artificial Sequence
  ENSG00000123104_33 (sequence is synthesized)
aggagattttgatcaggctaagtaaactctgtgtgcagaataaaaagtgtcggaatcaacatcaacgattactgaaaaatatgggggcgcattcggtggtgttggatcttctgcagatac

SEQ ID NO: 249186 - DNA, 120 bp, Artificial Sequence
  ENSG00000123104_34 (sequence is synthesized)
cctatgaaaagaatgatgaaaagatgaatgaagtaatgaatctagcccatacatttctgcagaatttctgtcgaggaaatccacagaatcaagttcttcttcataaacatctgaatttgt

SEQ ID NO: 249187 - DNA, 120 bp, Artificial Sequence
  ENSG00000123104_35 (sequence is synthesized)
ttttaactccaggtctccttgaagcagaaaccatgcggcacatcttcatgaacaattaccatctgtgcaacgaaattagcgagagagttgtacaacactttgtgcactgcattgagacac

SEQ ID NO: 249188 - DNA, 120 bp, Artificial Sequence
  ENSG00000123104_36 (sequence is synthesized)
atggccgccacgtggagtacctgaggtttttgcaaacaattgtaaaagcagatggtaaatatgtgaagaaatgccaggatatggtaatgacagagttgataaatgggggtgaagacgtgc

SEQ ID NO: 249189 - DNA, 120 bp, Artificial Sequence
  ENSG00000123104_37 (sequence is synthesized)
tgatattttacaatgatagagcatcatttccaatccttctccatatgatgtgttcagagagagaccgaggggatgagagtggccccttagcctaccacatcaccctggtggagttgctgg

SEQ ID NO: 249190 - DNA, 120 bp, Artificial Sequence
  ENSG00000123104_38 (sequence is synthesized)
cagcatgcacagaggggaaaaatgtctacactgaaatcaagtgtaattcccttctcccgctggacgacatagtgagggtggtgacccatgacgactgcatccctgaggttaaaattgctt

SEQ ID NO: 249191 - DNA, 120 bp, Artificial Sequence
  ENSG00000123104_39 (sequence is synthesized)
atgtgaactttgttaatcactgttatgttgacactgaagtggaaatgaaagaaatctatacaagtaaccacatttggaaattatttgagaacttcttggtggatatggcaagggtttgca

SEQ ID NO: 249192 - DNA, 120 bp, Artificial Sequence
  ENSG00000123104_40 (sequence is synthesized)
acacaactacagacaggaaacatgcagacatctttttggaaaagtgtgttactgagtcaataatgaatattgtgagcggcttctttaattctcccttttcagacaatagtaccagcctcc

SEQ ID NO: 249193 - DNA, 120 bp, Artificial Sequence
  ENSG00000123104_41 (sequence is synthesized)
agacacatcagccagtttttattcagctactgcaatctgccttcagaatttacaattgcacctggccaaacccagcgcagaaagcctcagtggaatcctgtatcagaactttggctgaag

SEQ ID NO: 249194 - DNA, 120 bp, Artificial Sequence
  ENSG00000123104_42 (sequence is synthesized)
tggcaaaaaatcgtggaattgccattccagtggatttggacagccaagttaatactcttttcatgaagagccattcaaatatggtgcagagagcagcaatgggttggagactatcagctc

SEQ ID NO: 249195 - DNA, 120 bp, Artificial Sequence
  ENSG00000123104_43 (sequence is synthesized)
gctctgggccacgctttaaggaagctcttggagggcctgcttgggattacagaaatattattgaaaagttacaggatgtagtggcctccttggagcaccagttcagcccaatgatgcagg

SEQ ID NO: 249196 - DNA, 120 bp, Artificial Sequence
  ENSG00000123104_44 (sequence is synthesized)
ctgaattctcagtgttggttgatgtattgtacagtccagaactgctgttccctgagggaagcgatgcaagaataagatgtggcgctttcatgtcgaagttgattaatcatacaaagaaac

SEQ ID NO: 249197 - DNA, 120 bp, Artificial Sequence
  ENSG00000123104_45 (sequence is synthesized)
taatggagaaagaagaaaaactgtgcattaaaattcttcagacattacgagaaatgttagagaagaaagacagctttgtggaagagggtaacacattaagaaagatacttctgaatcgat

SEQ ID NO: 249198 - DNA, 120 bp, Artificial Sequence
  ENSG00000123104_46 (sequence is synthesized)
actttaaaggtgattatagtattggtgtgaatggacacctatcaggagcctactccaaaactgcacaggtgggaggaagcttttctggacaagattcagataagatggggatatcaatgt

SEQ ID NO: 249199 - DNA, 120 bp, Artificial Sequence
  ENSG00000123104_47 (sequence is synthesized)
cagacattcagtgtctgctggataaagaaggtgcatcagaacttgtcatcgatgttatagtgaacaccaaaaatgacagaattttttcagaaggcattttcctcggcattgccttgcttg

SEQ ID NO: 249200 - DNA, 120 bp, Artificial Sequence
  ENSG00000123104_48 (sequence is synthesized)
aaggaggaaatacacaaacacagtattctttctaccagcagttgcatgaacaaaaaaagtcagaaaaattctttaaagttctctatgatcgaatgaaggctgctcagaaagaaataagat

SEQ ID NO: 249201 - DNA, 120 bp, Artificial Sequence
  ENSG00000123104_49 (sequence is synthesized)
caacagtgacagttaataccatagatttaggtaacaaaaaaagggacgatgacaatgaattgatgacatctggtccacgaatgagagtaagagattcaacactacatttaaaagagggaa

SEQ ID NO: 249202 - DNA, 120 bp, Artificial Sequence
  ENSG00000123104_50 (sequence is synthesized)
tgaaagggcaattaacagaagcttcttcagcaacatccaaagcatattgtgtatacagaagagaaatggatccagaaatagacattatgtgcacaggaccagaagcgggaaacactgagg

SEQ ID NO: 249203 - DNA, 120 bp, Artificial Sequence
  ENSG00000123104_51 (sequence is synthesized)
aaaaatccgcagaggaagtaacaatgagtcccgcaattgccatcatgcagccaatactgagatttcttcagttactgtgtgagaatcacaaccgggaattgcagaacttcttgaggaatc

SEQ ID NO: 249204 - DNA, 120 bp, Artificial Sequence
  ENSG00000123104_52 (sequence is synthesized)
gcctgttgggtctctacatcaatgagaagaatgtagcgctggtcaaccagaacctggagagcttgactgagtattgccagggcccttgccatgaaaatcagacctgtatcgctacacatg

SEQ ID NO: 249205 - DNA, 120 bp, Artificial Sequence
  ENSG00000123104_53 (sequence is synthesized)
agtctaatgggattgatatcatcattgctttgattctgaatgacataaaccctcttggtaaataccgaatggacctggtgctccagctaaagaacaatgcatctaaacttttgctggcca

SEQ ID NO: 249206 - DNA, 120 bp, Artificial Sequence
  ENSG00000123104_54 (sequence is synthesized)
ttatggaaagcagacatgacagtgagaatgcagaaagaattctttttaacatgagacccagagaactggtggatgtgatgaagaatgcctataaccaaggattggaatgtgaccatgggg

SEQ ID NO: 249207 - DNA, 120 bp, Artificial Sequence
  ENSG00000123104_55 (sequence is synthesized)
atgatgagggtggagatgatggtgtttctccaaaagatgttggacacaatatctatattctggcccatcagttggcccgccacaataaactgttgcagcagatgctcaaaccaggatcgg

SEQ ID NO: 249208 - DNA, 120 bp, Artificial Sequence
  ENSG00000123104_56 (sequence is synthesized)
atccagatgaaggagatgaagccttaaagtattatgccaaccacactgcacagattgagattgtccggcatgataggaccatggaacaaatagtttttcctgtccccaatatatgtgaat

SEQ ID NO: 249209 - DNA, 120 bp, Artificial Sequence
  ENSG00000123104_57 (sequence is synthesized)
acctcactcgagaatccaagtgccgtgtgttcaatacaactgaaagggatgaacaaggaagtaaagtgaatgactttttccagcaaacagaagatctctacaatgaaatgaagtggcaga

SEQ ID NO: 249210 - DNA, 120 bp, Artificial Sequence
  ENSG00000123104_58 (sequence is synthesized)
agaaaatcaggaataaccctgcactgttctggttctcgaggcacatctctctctgggggagcatttccttcaacctggctgtgttcatcaatttagctgttgctctcttctacccatttg

SEQ ID NO: 249211 - DNA, 120 bp, Artificial Sequence
  ENSG00000123104_59 (sequence is synthesized)
gggatgatggagatgaaggtacactttctccattgttctcggttcttctttggatagcagttgcgatctgcacatctatgctgtttttcttctccaagcctgtgggtattcggccgtttc

SEQ ID NO: 249212 - DNA, 120 bp, Artificial Sequence
  ENSG00000123104_60 (sequence is synthesized)
ttgtatcaataatgctcagatcaatatatacaataggtcttgggcctacattaatacttcttggtgcagctaatctttgtaataaaattgtttttctggtgagttttgttggaaatcgtg

SEQ ID NO: 249213 - DNA, 120 bp, Artificial Sequence
  ENSG00000123104_61 (sequence is synthesized)
gcacgttcacccgtgggtaccgagcagtcatcctggatatggcctttctctatcacgtggcgtatgtcctggtttgcatgctgggcctttttgtccatgaattcttctatagcttcctgc

SEQ ID NO: 249214 - DNA, 120 bp, Artificial Sequence
  ENSG00000123104_62 (sequence is synthesized)
tttttgatttggtgtacagggaagagactttgctgaatgtcataaaaagtgtcacacgaaatggccgctctattattctaactgcagtcctggctctcatcctcgtctacctgttttcca

SEQ ID NO: 249215 - DNA, 120 bp, Artificial Sequence
  ENSG00000123104_63 (sequence is synthesized)
ttattgggttcctttttttgaaggatgacttcactatggaagttgataggctgaaaaaccgaactcctgttacaggcagtcatcaagtgcctactatgactttaactaccatgatggaag

SEQ ID NO: 249216 - DNA, 120 bp, Artificial Sequence
  ENSG00000123104_64 (sequence is synthesized)
catgtgccaaggagaactgttcacccacaattccagcttcaaatacagctgatgaagagtatgaagatggaattgaaaggacgtgtgacactctccttatgtgcattgtcaccgtgctga

SEQ ID NO: 249217 - DNA, 120 bp, Artificial Sequence
  ENSG00000123104_65 (sequence is synthesized)
accagggcctcaggaatggcggtggtgtgggggatgtgctaagaaggccatcgaaagatgagcccttgtttgctgcccgagtggtttatgaccttcttttttatttcattgttatcatta

SEQ ID NO: 249218 - DNA, 120 bp, Artificial Sequence
  ENSG00000123104_66 (sequence is synthesized)
ttgttctgaacttgatttttggtgttatcatcgatacttttgctgatctcagaagcgaaaaacagaaaaaagaagaaattctaaagacaacttgtttcatctgtggacttgagagagaca

SEQ ID NO: 249219 - DNA, 120 bp, Artificial Sequence
  ENSG00000123104_67 (sequence is synthesized)
agtttgataataaaacggtttcatttgaggagcacattaagtcagaacacaatatgtggcattatttgtacttcatagtcctggtgaaagttaaagacccaacagaatacactggacctg

SEQ ID NO: 249220 - DNA, 120 bp, Artificial Sequence
  ENSG00000123104_68 (sequence is synthesized)
aaagttatgtggctcaaatgattgtggagaagaatttggattggtttcctcggatgcgagccatgtccctcgttagcaatgaaggcgacagtgagcaaaatgaaattcggagccttcagg

SEQ ID NO: 249221 - DNA, 120 bp, Artificial Sequence
  ENSG00000123104_69 (sequence is synthesized)
agaagttggaatcgaccatgagtctggtcaaacagctgtcgggtcagctggcggagctcaaggagcagatgacagaacaaaggaagaataagcagagactgggcttcctcggatcaaaca

SEQ ID NO: 249222 - DNA, 120 bp, Artificial Sequence
  ENSG00000123104_70 (sequence is synthesized)
caccccatgtgaatcatcacatgccaccacactgataccatggggggaagccgtgactagcctttcatcagtgtcctgcctgatcactgaataaagaactgagatggaggggagtgaaca

SEQ ID NO: 249223 - DNA, 120 bp, Artificial Sequence
  ENSG00000123104_71 (sequence is synthesized)
gtgcctattgttgaaaagttaaaaacaaccaagtgccaagatgttgagtgggttagctccgagaacaatttataactgtgttttcatggttgcgaagacctaacctcaaatgcatctgct

SEQ ID NO: 249224 - DNA, 120 bp, Artificial Sequence
  ENSG00000123104_72 (sequence is synthesized)
agaaagcgtacatcacacattcgcaatgcatcaggaagaaaaggcttgcccaaaaggctggagagggcagggagcggcaggatggaaggagacacggggcagggagaactctcttctgct

SEQ ID NO: 249225 - DNA, 120 bp, Artificial Sequence
  ENSG00000123104_73 (sequence is synthesized)
aaatcgataggagtcagttttgtcttaaatgctgactacagccactgacatggttggctggaatttctttcttttaattgtggcatataggtttgtgacacaagaagtcatactttggtg

SEQ ID NO: 249226 - DNA, 120 bp, Artificial Sequence
  ENSG00000123104_74 (sequence is synthesized)
gctaagttttactaaggaaaataactgaaaagattaaaagtgagagctgaaaagagaaatgataatgcttccaaactgtagctgtcacagggcaatttctttatttataacatgaagcac

SEQ ID NO: 249227 - DNA, 120 bp, Artificial Sequence
  ENSG00000123104_75 (sequence is synthesized)
aatggatttacagctctaggaacttagtactttggagcttttgcctctcacactgacaacataacaggatgtgattgccttctctgggattcagacaggctctgtcaatgtggagcacaa

SEQ ID NO: 249228 - DNA, 120 bp, Artificial Sequence
  ENSG00000123104_76 (sequence is synthesized)
aaggagattttcatataacttgttaaaaacatgttctaagtcatgtataggctaagattttaagaagatctgggggaataaaaagccaacagtaagccccaggaaagggttttttgagac

SEQ ID NO: 249229 - DNA, 120 bp, Artificial Sequence
  ENSG00000123104_77 (sequence is synthesized)
catatgtatgctattaaaatatattgagattaatacatgaaaatgcttaaaagtgataggaattattgagaaacttatgatggtggcattgccttttataaacatggagtgaaagccatt

SEQ ID NO: 249230 - DNA, 120 bp, Artificial Sequence
  ENSG00000123104_78 (sequence is synthesized)
tgactcaacgtttgctgtgcttaaagaattgcttcaggacccgagcgtttttatgtatgctgttcctgcagttaggaaaaaaaaatccaagaaatgtattgaatactcaagaaaatgcca

SEQ ID NO: 249231 - DNA, 120 bp, Artificial Sequence
  ENSG00000123104_79 (sequence is synthesized)
catttcaattacatatttaaaactgtatctgtaagggcttttcaaaatgtagcaagataaaaatctcttattcaaattgtttttgtattaaatcatgcactcagaatttgtcgagggaga

SEQ ID NO: 249232 - DNA, 120 bp, Artificial Sequence
  ENSG00000123104_80 (sequence is synthesized)
gaataacctggtgtgttcaggttattcttagagactacacatttggaatagcagagcaaaatatggataatgaaagtgttgggaaaaaagtgatgtgacagggagtgaagacacttgata

SEQ ID NO: 249233 - DNA, 120 bp, Artificial Sequence
  ENSG00000123104_81 (sequence is synthesized)
ccagactctgggagatactctgcaagttgacctggcctctcccccacaggaacaaaacactgcctccagagtctttaaattctcagttatcaacgccaaggtttaaggtctagatagggt

SEQ ID NO: 249234 - DNA, 120 bp, Artificial Sequence
  ENSG00000123104_82 (sequence is synthesized)
ttgctatagggtttgctctgacaatttttaaagcttttggattgttctaacatagcttaagctattggttcctaaaaatcccaaatcaagatctatgtagaatataaaggaagcctgaac

SEQ ID NO: 249235 - DNA, 120 bp, Artificial Sequence
  ENSG00000123104_83 (sequence is synthesized)
caatccttccacatactgttaagatgtagacttggaacaaagctgttgggacccagagcaatgaatttttgaactgaagctactggtactccccagcaccacctcatactaagaattcct

SEQ ID NO: 249236 - DNA, 120 bp, Artificial Sequence
  ENSG00000123104_84 (sequence is synthesized)
cactctgacatgacagtattttttctgaccaggagctgaaagaccctgacattcatgatccaaagatataagaaattttgatatgtctgcatgcagcacagaactttgaacctaggaggc

SEQ ID NO: 249237 - DNA, 120 bp, Artificial Sequence
  ENSG00000123104_85 (sequence is synthesized)
agtcaataaatacatgagaaattcagctgtcattcagttactcttaattctttataaaactttaaatgataccacatatttgtttgtttaaaatggctttcccaaaatcaaagtagacta

SEQ ID NO: 249238 - DNA, 120 bp, Artificial Sequence
  ENSG00000123104_86 (sequence is synthesized)
aagcagccatctttaaaatccaggatcatcaatgctattaacagtatcaggtaaaaagtacactttaaaatattttaatcaggcagagttttatggatagagaatagaagagaaaggtag

SEQ ID NO: 249239 - DNA, 120 bp, Artificial Sequence
  ENSG00000123104_87 (sequence is synthesized)
taaatattgaacatattccaatataggaacctatctctgttttagtacaaaatatttctgacatctgaactagaggtcaagagaataaattcatttgtatacatctgagcaacctgtctt

SEQ ID NO: 249240 - DNA, 120 bp, Artificial Sequence
  ENSG00000123104_88 (sequence is synthesized)
tcagatgataaagtatctagccttttctgacaccataatagttcattttgtagggaataagccattaggtgtatataattgctttctagaaatgacctaatgtccccaaccactttgtag

SEQ ID NO: 249241 - DNA, 120 bp, Artificial Sequence
  ENSG00000123104_89 (sequence is synthesized)
tggcagatcactgtttcacagcatattttctcccaaggaaagtattcaaaagagactgcaactaacaagactcttatttcatcaaaatttaaatatttctgagttgtatttttaatgcct

SEQ ID NO: 249242 - DNA, 120 bp, Artificial Sequence
  ENSG00000123104_90 (sequence is synthesized)
ctttcttttctgcctaaatgcttagaaattataaagcaaaaaaaaaaaaaacagcaacaaaaaatcgaagcagacaaaaaaggcacttttcagaacatcaaattcctaatgaagaagagg

SEQ ID NO: 249243 - DNA, 120 bp, Artificial Sequence
  ENSG00000123104_91 (sequence is synthesized)
agaagataatggggaaatttgacatttgatataaatttatatttgttatgtgtatgtttgttaatgcaactggaatatttgacttaggtgagtatcagttaacatccttgtatttatata

SEQ ID NO: 249244 - DNA, 120 bp, Artificial Sequence
  ENSG00000123104_92 (sequence is synthesized)
gtgacatcaaaataaatgcaatcatcttgaactttgatgttaagggagattttgaaaaaatatttagttatttcaaattcatattggttcaaaagtatcagtttctgctgaataatattt

SEQ ID NO: 249245 - DNA, 120 bp, Artificial Sequence
  ENSG00000123104_93 (sequence is synthesized)
ttaatttcaaaagggttttgttccctctgtgctccattctgaggctcaagagcttaatgccagtatgttttctgagttaaaataacacttttagatgagaaaatgcttgtatcatacagg

SEQ ID NO: 249246 - DNA, 120 bp, Artificial Sequence
  ENSG00000123104_94 (sequence is synthesized)
cagggctataatataaataaataaattgtatgtatgcaaaatttatcatattttctaccccttaaaaaattaagttagaaataagcttattttcttgcacatcaatatttttctgttggt

SEQ ID NO: 249247 - DNA, 120 bp, Artificial Sequence
  ENSG00000123104_95 (sequence is synthesized)
aggacacaatttctagtagattgttaataacatcaggaagatatttctttcgtcagaactaattgtgtgcttattcccatattctcagctcataactccctgttttggctgctctcttta

SEQ ID NO: 249248 - DNA, 120 bp, Artificial Sequence
  ENSG00000123104_96 (sequence is synthesized)
ttttacaattgtttcattgcaaacagcaaggcagtatagcccacactcagccactagcccccagtccccaggactgagaatgagtggggaggctggggagttggtgagagaaggtggaga

SEQ ID NO: 249249 - DNA, 120 bp, Artificial Sequence
  ENSG00000123104_97 (sequence is synthesized)
tagggatttctgcttcccagtactctatcattagagaaaaggaggggtaaatattagctaagaagaagaaaaaagcttattcttcagggacccagtagattggacgtaagcaagtaaata

SEQ ID NO: 249250 - DNA, 120 bp, Artificial Sequence
  ENSG00000123104_98 (sequence is synthesized)
ttgcacaggcatcatgatgtaatagttgatggaccccagagatacccctcacccatgcagagaacaaagctgtgtggaagagcaactaccataagatggtgtgttccttccagcggctgt

SEQ ID NO: 249251 - DNA, 120 bp, Artificial Sequence
  ENSG00000123104_99 (sequence is synthesized)
taaagccatcctgaataacaaatcagctattcctacctacagacccattccaatatgctgtgatacacgacacggtgcaccgcagaggagacagacatcttcagcacaaacacagatgcc

SEQ ID NO: 249252 - DNA, 120 bp, Artificial Sequence
  ENSG00000123104_100 (sequence is synthesized)
tgcaggagcttggcaagtcactaaattgcatgaaattgtgaggtgcacaccaaatgcagggatgggggaggccgtgggaagctctgtattctcaaaatttgacagctaattccggttttt

SEQ ID NO: 249253 - DNA, 120 bp, Artificial Sequence
  ENSG00000123104_101 (sequence is synthesized)
agaaaatgcctgaggccagtagaggccctctagtcactcactgctgctgtttctgatataattattgagaaagctatctcacttaatagaagaaaacacgcactatcaaaaccagatagc

SEQ ID NO: 249254 - DNA, 120 bp, Artificial Sequence
  ENSG00000123104_102 (sequence is synthesized)
ctaacgtgcatgtgaaaatcgagaaagctgaaaacaaatccaggtacccttctctgaactggagtgtttccacagacttgaataatttatgaaattatcacaccagtatttctcatatca

SEQ ID NO: 249255 - DNA, 120 bp, Artificial Sequence
  ENSG00000123104_103 (sequence is synthesized)
ccaagaagactttctctcctgcagtagaggattgttatatttgcctaaaaaacacgattccaatatatgacaagggcagataatttataagtgaatgttaataaaattggatgtgtataa

SEQ ID NO: 249256 - DNA, 120 bp, Artificial Sequence
  ENSG00000123104_104 (sequence is synthesized)
atacactggctatcgtagtctttaaaaaacttaaattaatgaagaagtggatattttaactgagtctagataattatttgaaaaggatgttatagagtgaatggagagttggctggagga

SEQ ID NO: 249257 - DNA, 120 bp, Artificial Sequence
  ENSG00000123104_105 (sequence is synthesized)
cggactatatgacttttaactgttctgtataatcagggattccaagattcaaaagctgagctataagggaaatctaagaaatgctagtagccttagttacagtgtttttgtatgttggtt

SEQ ID NO: 249258 - DNA, 120 bp, Artificial Sequence
  ENSG00000123104_106 (sequence is synthesized)
aacttgatgagtttggagataagtatacactgtgaaaccaccaccacaatatctgccataaacctgttcgtcacctccaaaaagcttctcccaccctctttatttattatgagaagcaaa

SEQ ID NO: 249259 - DNA, 120 bp, Artificial Sequence
  ENSG00000123104_107 (sequence is synthesized)
atgattattttattgggatgcatttgtaaatttttgcctcagaaaatattatctgatagaaagttaatttttccatgcctcaacatcattcacaaaatgcatttaaagcatttaacatac

SEQ ID NO: 249260 - DNA, 120 bp, Artificial Sequence
  ENSG00000123104_108 (sequence is synthesized)
gcagcatgactgagaaaatgtccagcttcctctacataggggacatcgtgtccctgtacgcggagggctcggtcaacggcttcatcagcaccttgggactgccttttcaaggtgtgccct

SEQ ID NO: 249261 - DNA, 120 bp, Artificial Sequence
  ENSG00000123104_109 (sequence is synthesized)
tttgctgggagaaatgatggtagtcttactgaaattctagatgcaaaacctatgtattcactggtgttcataatttagaatgtgactacacatgttaatacttactctaagtgttttact

SEQ ID NO: 249262 - DNA, 120 bp, Artificial Sequence
  ENSG00000123104_110 (sequence is synthesized)
gaatttcccccccacatttttaaatgtttaaataagcattaaataaatttaaataagctttaaaagtcaaatagctagtagaagggcccagagtagcaaaaccagaaagagacacctgct

SEQ ID NO: 249263 - DNA, 120 bp, Artificial Sequence
  ENSG00000123104_111 (sequence is synthesized)
gcttcaaatacaggtttgtagaaaggactctgggtcagtatgaacttgatatctttgaagttttatttagtaaatattattacctcttagggaattgctctacaaatttcatgatggatt

SEQ ID NO: 249264 - DNA, 120 bp, Artificial Sequence
  ENSG00000123104_112 (sequence is synthesized)
aggtacttgttcatcaatcatggggattacatttattattggtatttcttgtttacttgtcacagaaaccaaggaaaagtaatgtgtttcttttagctcttattactatctaaaaaaaaa

SEQ ID NO: 249265 - DNA, 120 bp, Artificial Sequence
  ENSG00000123104_113 (sequence is synthesized)
atgagatggagcttctacggctcagcagtccggggctgattcatttctgcagcgtctccttgaaccgctattcactctgattttctatccctgtgtctgggccggctccacctttatcct

SEQ ID NO: 249266 - DNA, 120 bp, Artificial Sequence
  ENSG00000123104_114 (sequence is synthesized)
atgacatctggtccacgaatgagagaattttggtcatggggtgaccctaaaacggctctgcaggactaaacttaaatgagacataatcagtgcaaagcaaccaacggcatgaaagatgtt

SEQ ID NO: 249267 - DNA, 120 bp, Artificial Sequence
  ENSG00000123106_0 (sequence is synthesized)
aggtgccacttgaagaatggatgatgatgattttggtggttttgaggctgcggagacttttgatggtggaagtggtgaaacccaaacaacatctcctgctattccttgggctgcctttcc

SEQ ID NO: 249268 - DNA, 120 bp, Artificial Sequence
  ENSG00000123106_1 (sequence is synthesized)
tgcagtatctggagtccatctttcaccatcttctcctgagattgtactggaccgtgaccactcttcttccattggctgcctctcttctgatgccattatttcatcaccagagaatacaca

SEQ ID NO: 249269 - DNA, 120 bp, Artificial Sequence
  ENSG00000123106_2 (sequence is synthesized)
tgcagcaaatagcattgtgagtcaaactattccaaaagcacagattcagcaatcaacacacactcatctggatatctcactttttccattgggtttaactgatgaaaaaagtaatggaac

SEQ ID NO: 249270 - DNA, 120 bp, Artificial Sequence
  ENSG00000123106_3 (sequence is synthesized)
aattgcccttgtggatgattctgaggatcctggagccaatgtatctaacatacagcttcagcaaaaaatttcaagtctggagattaaactcaaagtatctgaagaagaaaaacagagaat

SEQ ID NO: 249271 - DNA, 120 bp, Artificial Sequence
  ENSG00000123106_4 (sequence is synthesized)
taaacaggatgtggaatcattgatggaaaagcataatgtcttagaaaaaggctttctaaaagaaaaagagcaagaggccatttcttttcaagatagatacaaagaacttcaggaaaaaca

SEQ ID NO: 249272 - DNA, 120 bp, Artificial Sequence
  ENSG00000123106_5 (sequence is synthesized)
taaacaagaattggaagacatgaggaaagctggtcacgaagccctcagcattattgtggatgaatataaggcactactgcagtcttcagttaagcaacaagtagaagctattgaaaaaca

SEQ ID NO: 249273 - DNA, 120 bp, Artificial Sequence
  ENSG00000123106_6 (sequence is synthesized)
gtacatttctgcaattgagaaacaggcacacaagtgtgaggagttgctaaatgctcagcatcagaggctccttgaaatgctagatacagagaaggaactgttaaaagaaaaaataaagga

SEQ ID NO: 249274 - DNA, 120 bp, Artificial Sequence
  ENSG00000123106_7 (sequence is synthesized)
agctttgattcagcaatctcaagaacagaaggaaatattggaaaagtgtttggaggaagaaaggcaaagaaataaagaggcattagtatccgctgcaaagcttgaaaaagaagcagtgaa

SEQ ID NO: 249275 - DNA, 120 bp, Artificial Sequence
  ENSG00000123106_8 (sequence is synthesized)
ggatgcagttttaaaagtcgtagaagaagaaagaaaaaatttagaaaaagcgcatgctgaagaaagggaattatggaagacagaacatgcaaaagatcaagaaaaagtatctcaggaaat

SEQ ID NO: 249276 - DNA, 120 bp, Artificial Sequence
  ENSG00000123106_9 (sequence is synthesized)
aataatagaagagcagaaacgaagtgaaaaggctgtggaagaggcagtgaaaagaacaagagatgaattgatagagtatataaaagaacagaaaaggctcgatcaagtcatccgccaaag

SEQ ID NO: 249277 - DNA, 120 bp, Artificial Sequence
  ENSG00000123106_10 (sequence is synthesized)
aagcctgtccagtttggaactgttcctctcctgtgcacagaaacagttaagtgctttaatagctacggaaccagttgacattgaataaaaagaacatgacaaacccacactggcattgga

SEQ ID NO: 249278 - DNA, 120 bp, Artificial Sequence
  ENSG00000123106_11 (sequence is synthesized)
taaatcatattacaccttcaaaatacacactctgaattataaagatgtgtttgttttctttccaaatcatgtagaattgatttccagttcaaggataaaccaaaacaatatttagaacta

SEQ ID NO: 249279 - DNA, 120 bp, Artificial Sequence
  ENSG00000123106_12 (sequence is synthesized)
tcaagtgatctaatttattttcttttggtttcttctttacatttactgttattttattattattagtagtagcagcaacagagtatgatatgacccaaaagccattgtaaagtgccacat

SEQ ID NO: 249280 - DNA, 120 bp, Artificial Sequence
  ENSG00000123106_13 (sequence is synthesized)
taccaaaattaattaagtaaactttatagcctgtgggagtctattatatattattttgcaaaagtagtaaatatattattgtttcatgatgactcttgatgagatgctagaatgtaacca

SEQ ID NO: 249281 - DNA, 120 bp, Artificial Sequence
  ENSG00000123106_14 (sequence is synthesized)
tacatttatcttattttgaggatagaaatagcatggatttcaacatcacttatttatctgtataattggaaataaaacaccgatatgatagagaatcattccggcattacctaacctctt

SEQ ID NO: 249282 - DNA, 120 bp, Artificial Sequence
  ENSG00000123106_15 (sequence is synthesized)
ctgcagttggatctatgtattttcattggtctactgaaaacaaacaatacaattaaaagcactaaagattattatattaattcaactttgatctgatatatcacttaaactaaaggggtg

SEQ ID NO: 249283 - DNA, 120 bp, Artificial Sequence
  ENSG00000123106_16 (sequence is synthesized)
tgtgtggtgtatgcttgtttcctatttctgctctttaaagatactttgaatcaataaaaccattagtctacaaatcaaattgtgaacttaatctctagaaagagaatataactcagccat

SEQ ID NO: 249284 - DNA, 120 bp, Artificial Sequence
  ENSG00000123106_17 (sequence is synthesized)
ttataggaatttaggttcaagtacaggatatatgaaatcttttcccagtatttcagaatgtacttaattcacaggcaggatgcttcaatgcaaaatcatgaatatttttaattcaaaact

SEQ ID NO: 249285 - DNA, 120 bp, Artificial Sequence
  ENSG00000123106_18 (sequence is synthesized)
aaaatgtcattaatatgtatgtatgcaaatgttttatcttattttctgaaatgcatctactttcatgggctttgtacgtttctgagatttctcagtgtaataaaaagagctcccaaactt

SEQ ID NO: 249286 - DNA, 120 bp, Artificial Sequence
  ENSG00000123106_19 (sequence is synthesized)
ttccgggggcagaggtgttcgaagccgggtggtgcgtgggctaccccaacctgtgtggctgggccgcggtctcccctcaagggcctggggccgtgcctcgggtgtacgcgtaggggtctg

SEQ ID NO: 249287 - DNA, 120 bp, Artificial Sequence
  ENSG00000123106_20 (sequence is synthesized)
tgtgctgggggtggctcaccgggcagcgtgggtgagcggcgcagcggcggcagcggagagcgagagaggggagcaggcttctaaccctcctttatgtgactcagagaaaggagacctcat

SEQ ID NO: 249288 - DNA, 120 bp, Artificial Sequence
  ENSG00000123106_21 (sequence is synthesized)
tccaagttccaggattaattctgatgaaagtattctgtctcatgcatctaatactttacttgtgaatgaagattcattatgaggtgctatacgtggatgacctgcttagttttaattttt

SEQ ID NO: 249289 - DNA, 120 bp, Artificial Sequence
  ENSG00000123106_22 (sequence is synthesized)
cctgcttagttttaatttttggagaaatacattttataaaacattttcatcagattgctaaaattgtgagtaatggtaatgataccatgattatattctggttaatttaatacctttcct

SEQ ID NO: 249290 - DNA, 120 bp, Artificial Sequence
  ENSG00000123106_23 (sequence is synthesized)
ttttacaatatgtttctgtctaaatatatattttttagtgtcattacctactgagtttctgtgaaaagaatttcctttgcctgttaaaacaatcgttgaaattaatgtttttactgtttt

SEQ ID NO: 249291 - DNA, 72 bp, Artificial Sequence
  ENSG00000123106_24 (sequence is synthesized)
ttcctccttcacaggctcatgctctctctctcacctgccgccatgtaagatgtgcctgcttctccttctgcc

SEQ ID NO: 249292 - DNA, 120 bp, Artificial Sequence
  ENSG00000123106_25 (sequence is synthesized)
ctcgatcaagtcatccgccaaagaagcctgtccagtttggaactgttcctctcctgtgcacagaaacaaccacggttgaccacaggtaactgaaaccacaggaatgagatgacagggata

SEQ ID NO: 249293 - DNA, 120 bp, Artificial Sequence
  ENSG00000123106_26 (sequence is synthesized)
ctgaggggctacttgtgagatggcaaaaaagagatatggcaaccagaatttccctcagtcgcccctgacaagttctcctacatcttcacacaaagtaagagggccgccacttcacggtga

SEQ ID NO: 249294 - DNA, 120 bp, Artificial Sequence
  ENSG00000123106_27 (sequence is synthesized)
tctcagcactcctaatgccatttggaaaattctggacttggattaagcactactcaggcaggacagttcacagatatctgtgagccatgacttaaggcccatcatctctgaagctatttc

SEQ ID NO: 249295 - DNA, 120 bp, Artificial Sequence
  ENSG00000123106_28 (sequence is synthesized)
catatggacaaacagagggagaggcagaaagagaaatttcttttcctgcaacgtatgtgttatgttaacaataggatacaatgaagttagggaatcatgtatgaatgtaaatgcccctgc

SEQ ID NO: 249296 - DNA, 120 bp, Artificial Sequence
  ENSG00000123106_29 (sequence is synthesized)
atccccaccgtgttcagtactttatgtattacctttgtcttttccatgatatgcttcttacacattcccccactctttccatggttatctgtcaattgtcaaatgctgtttacctagagc

SEQ ID NO: 249297 - DNA, 120 bp, Artificial Sequence
  ENSG00000123106_30 (sequence is synthesized)
atcggggttctcatttgctagacttttttttttttgcagtttattattctttacctctgtttactaaactccagcatctcacctacattatgtaactttttatcaaagttaagtgaaatg

SEQ ID NO: 249298 - DNA, 120 bp, Artificial Sequence
  ENSG00000123106_31 (sequence is synthesized)
actgcggaggaaagctttggacatgaaacctatttttggcttcactttaaggagtggaactctattaaaagctgcgctggtgtttttttgagacagaatcgcctaagctgaagtgtagtg

SEQ ID NO: 249299 - DNA, 120 bp, Artificial Sequence
  ENSG00000123106_32 (sequence is synthesized)
gcgccatcatagctcactgcagcctccagctccttggctcaagtgattctcctgcctgagcctccctagtagctaggactacaggtgctatacgtggatgacctgcttagttttaatttt

SEQ ID NO: 249300 - DNA, 75 bp, Artificial Sequence
  ENSG00000123106_33 (sequence is synthesized)
cttctaaccctcctttatgtgactcagagaaaggagacctcattccaagttccaggattaattctgcatcagagg

SEQ ID NO: 249301 - DNA, 120 bp, Artificial Sequence
  ENSG00000123106_34 (sequence is synthesized)
acagctcaaaaatgctgatcaattttgaaaatctaaatcagccttggccctgaaaccgagggaagaacctttgtggtaggggacagatttccaaaaactcaccacagtcctgttcttagc

SEQ ID NO: 249302 - DNA, 120 bp, Artificial Sequence
  ENSG00000123106_35 (sequence is synthesized)
tggagtttgtgctgatgttgccagacaactgaggaatagatgcaaaaagcaggaagcattattgaattgagctctagtgccaatttgggaaaagcaaattaaaatgtaaaagaatatttt

SEQ ID NO: 249303 - DNA, 120 bp, Artificial Sequence
  ENSG00000123106_36 (sequence is synthesized)
tccactcctggcatctcaacataaaatggcaaaatacatggttgctgaaaaagttacagaaattgctaattttgccaaaaagtaaaagccaattgcaaattcttttttgcataaaaaatg

SEQ ID NO: 249304 - DNA, 120 bp, Artificial Sequence
  ENSG00000123106_37 (sequence is synthesized)
aaaagcaactgagcaaggaggttggataggttgtgtggaggacagatgataactttgttttggaacacttcctccttcacaggctcatgctctctctctcacctgccgccatgtaagatg

SEQ ID NO: 249305 - DNA, 120 bp, Artificial Sequence
  ENSG00000123106_38 (sequence is synthesized)
tgtgaggagttgctaaatgctcagagtgcccttttttcaatccttcctgcgattggctgcttttagaatcctgctgattggtgcgttttacagagtgctgattggtgtattttacaatcc

SEQ ID NO: 249306 - DNA, 120 bp, Artificial Sequence
  ENSG00000123106_39 (sequence is synthesized)
tcttgtaagacaggaaagttccccaactccctactcgacccaggaagtccagctggcctcacctctcaattccaccaggaagaataaagcatcagaggctccttgaaatgctagatacag

SEQ ID NO: 249307 - DNA, 120 bp, Artificial Sequence
  ENSG00000123106_40 (sequence is synthesized)
tgttcctctcctgtgcacagaaacagagaagtctggcctaggaggtggaggatgcagcgcaccaagatcgcaccactgtactccaggatgggcaccagagtgagaccttgtctcaaaaaa

SEQ ID NO: 249308 - DNA, 120 bp, Artificial Sequence
  ENSG00000123106_41 (sequence is synthesized)
gttcgttagaatgagggctccattattttggccacagagctatatccaggactgcttcagagcaagccccgtgtctgaatcttcagagggtagaagtcatcatcctgtttactcaggaaa

SEQ ID NO: 249309 - DNA, 120 bp, Artificial Sequence
  ENSG00000123106_42 (sequence is synthesized)
cagacagaagttaagtaagaggctttgggtcaagactgtgactggattcaaatcctaaagttttcgctacactgtgtgctgtggttcctccttcacaggctcatgctctctctctcacct

SEQ ID NO: 249310 - DNA, 120 bp, Artificial Sequence
  ENSG00000123106_43 (sequence is synthesized)
ttgtaagtttcctgaggcctccccagccgtgcaaacctgcactactgcagtcttcagttaagcaacaagtagaagctattgaaaaacagtacatttctgcaattgagaaacaggcacaca

SEQ ID NO: 249311 - DNA, 120 bp, Artificial Sequence
  ENSG00000123106_44 (sequence is synthesized)
agtatggtgtgactggagtgaagttagcacttagtggtatcatttctggcttgagcaaatggttttttgatgtattattaactgagatggaaaacatgaagcaaagcaggtttatttaag

SEQ ID NO: 249312 - DNA, 120 bp, Artificial Sequence
  ENSG00000123106_45 (sequence is synthesized)
atgatgggcaagcttggtatacctgttggacaactgaatgaaactatctggtagtaagggaaacatgcaattttcattgtgagctgccttccagagtttatggtagaacttcactgaagt

SEQ ID NO: 249313 - DNA, 120 bp, Artificial Sequence
  ENSG00000123106_46 (sequence is synthesized)
ttttccagtggaattttaaacagtttgacaattcagtcttgttaaaaagtgatataaaataaatgcttctttgcaaacaattgtccaacaaatattttaattctgtctcatattctcaca

SEQ ID NO: 249314 - DNA, 120 bp, Artificial Sequence
  ENSG00000123106_47 (sequence is synthesized)
gtggattgttttctgagtctttcagtggaattctttcaaattagagctcaatgatcttctttatattttatccaaagtttaaaatacatgaacctgtctctacttacttgaacaatggcc

SEQ ID NO: 249315 - DNA, 120 bp, Artificial Sequence
  ENSG00000123106_48 (sequence is synthesized)
tctattatggtgtctttttctttaaatccaaatattatactcagcattttaggaattctctatcccaaatacagccaattaaattgtctataagttattcagagccttagaaaatgaaat

SEQ ID NO: 249316 - DNA, 120 bp, Artificial Sequence
  ENSG00000123106_49 (sequence is synthesized)
gaaatgggagtttgtactttgaaatgagttcaaaaatgtgtaccatttgtcaatgctaatctctgtcgaataggcctcattatcttctggttctgcggctaacagatgaaataatctgac

SEQ ID NO: 249317 - DNA, 120 bp, Artificial Sequence
  ENSG00000123106_50 (sequence is synthesized)
acagacttctttaacagagatatttcttcctaggagaagtctggcctaggaggtggaggatgcagcgcaccaagatcgcaccactgtactccaggatgggcaccagagtgagaccttgtc

SEQ ID NO: 249318 - DNA, 120 bp, Artificial Sequence
  ENSG00000123106_51 (sequence is synthesized)
tcaaaaaaaaaaaaaaaaaaaaaatggtccccagtgtgggagatggggcctggtggaaggtgtgtgggtcgggtcatgagagtggatccttcatgaggtgcttggtgcagtcttcactgt

SEQ ID NO: 249319 - DNA, 120 bp, Artificial Sequence
  ENSG00000123106_52 (sequence is synthesized)
aatgagtcagttcatacaagatctggttgtttagaagagtgtgacacccttcccatctctctcttgctccctctcttgccacgtggcacatctgctcctcctttgccttctgccatgatt

SEQ ID NO: 249320 - DNA, 88 bp, Artificial Sequence
  ENSG00000123106_53 (sequence is synthesized)
catctgctcctaaaaccctcaccagaagcagatgccagcaccatgcttcttgtagagcctgcagaaccataagccaaataaacctctt

SEQ ID NO: 249321 - DNA, 120 bp, Artificial Sequence
  ENSG00000123106_54 (sequence is synthesized)
tttatagccatgcaaaactgagacaacacacatataaaaagttcatcccccaaacatttaggtgttcctcatcctaaaggacctcagttatggtgtcatcaccttgttggccaagtgaaa

SEQ ID NO: 249322 - DNA, 120 bp, Artificial Sequence
  ENSG00000123106_55 (sequence is synthesized)
ttgatcacctcacgggtagttcagatgtcatgagggcatggagtttccattgggaacaaagggaagagaaggtgttttggaagaaagaggttaattctcagcctggagcatgtgaggaaa

SEQ ID NO: 249323 - DNA, 120 bp, Artificial Sequence
  ENSG00000123106_56 (sequence is synthesized)
ggcaggagatagggacggaggtgcaggttttgcgcaggcagggtcaagtgtaaggatccaaactagggcagaggctagaaaatgagtgaagggggtgggaggagaaaaaggagctccaga

SEQ ID NO: 249324 - DNA, 120 bp, Artificial Sequence
  ENSG00000123106_57 (sequence is synthesized)
ctctctcttgtccttgccagtaactggtaatgagtgggtccccctccttcactggggaataccccttggcaggacattcctccaaccccctagacgagaaacgttcctattttcttttct

SEQ ID NO: 249325 - DNA, 120 bp, Artificial Sequence
  ENSG00000123106_58 (sequence is synthesized)
cctcagcttccagtgagaatgtttccagatgggaacaccgtaatgcatgggattatttcacagacaggacaaggttgtaccagacaggctggggtcaggaggtgtcatgatcccatctca

SEQ ID NO: 249326 - DNA, 120 bp, Artificial Sequence
  ENSG00000123106_59 (sequence is synthesized)
cagaaaacacactccaataagcaaccaaagaagtaatttgaattaattcatagttttatccagtccctctaaaacagttcaaaatgggactggggaagagaaagtgcattttcatgtcat

SEQ ID NO: 249327 - DNA, 120 bp, Artificial Sequence
  ENSG00000123106_60 (sequence is synthesized)
agaaaagcagcaaaacgttgtacaaattcattctcccttaacttcaccactttttgtatccaccactcctgtatcttctgaagctttctctcatttttcaactcccaaccttaattccca

SEQ ID NO: 249328 - DNA, 120 bp, Artificial Sequence
  ENSG00000123106_61 (sequence is synthesized)
ttctcttcccaatataaatatactagcttctccaggtcacccccagttatttacttacaccaaacttcataataaggtctaggtgaatgtgtgattgcgtggcgggaggacattttgatt

SEQ ID NO: 249329 - DNA, 120 bp, Artificial Sequence
  ENSG00000123106_62 (sequence is synthesized)
tgtcttctgtcttcccccgccagagtgtaaactcgttggtgggttagagacttcactcccttctgcctggagcaacacctggcttgtactgagtactcagtgacattcattaatcaatga

SEQ ID NO: 249330 - DNA, 120 bp, Artificial Sequence
  ENSG00000123106_63 (sequence is synthesized)
atatgcttatattttgtatccatgttccctaaggggtaattacattgtttgtagctgcacttaccaaccttatactgggaattactctgtatattaaaaggcaaagcattgaatagtgag

SEQ ID NO: 249331 - DNA, 120 bp, Artificial Sequence
  ENSG00000123119_0 (sequence is synthesized)
ctcccggatccagagcccggcggcggcgaagcagcagctgcggccgcgcccttgccagagccggtgcgtccgcctagccccgctccgcctgaggccgtcagggctcccgaggatggaaga

SEQ ID NO: 249332 - DNA, 120 bp, Artificial Sequence
  ENSG00000123119_1 (sequence is synthesized)
ttcccaggagacatcgccgtcctccaacaactcctcggaggagctcagctctgctctgcacctgtccaagggcatgtcgatcttcctcgacatactgaggagagcagacaaaaatgatga

SEQ ID NO: 249333 - DNA, 120 bp, Artificial Sequence
  ENSG00000123119_2 (sequence is synthesized)
tggaaaattatcctttgaagaattcaaagcatattttgcagatggtgttctcagtggagaagaattacacgagcttttccataccattgatacacataatactaataatcttgacacaga

SEQ ID NO: 249334 - DNA, 120 bp, Artificial Sequence
  ENSG00000123119_3 (sequence is synthesized)
agagctatgtgaatatttttctcagcacttgggcgagtatgagaatgtactagcagcacttgaagacctgaatctttccatcctgaaggcaatgggcaaaacaaagaaagactaccaaga

SEQ ID NO: 249335 - DNA, 120 bp, Artificial Sequence
  ENSG00000123119_4 (sequence is synthesized)
agcctccaatttggaacaattcgtaactagatttttattgaaggaaaccctgaatcagctgcagtctctccagaattccctggaatgtgccatggaaactactgaggagcaaacccgtca

SEQ ID NO: 249336 - DNA, 120 bp, Artificial Sequence
  ENSG00000123119_5 (sequence is synthesized)
agaaaggcaagggccagccaagccagaagtcctgtcgattcaatggcctggaaaacgatcaagccgccgagtccagagacacaacagcttctccccaaacagccctcagtttaatgtcag

SEQ ID NO: 249337 - DNA, 120 bp, Artificial Sequence
  ENSG00000123119_6 (sequence is synthesized)
cggtccaggcttattagaagaagacaaccagtggatgacccagataaatagactccagaaattaattgatagactggaaaagaaggatctcaaactcgaaccaccagaagaagaaattat

SEQ ID NO: 249338 - DNA, 120 bp, Artificial Sequence
  ENSG00000123119_7 (sequence is synthesized)
tgaagggaatactaaatctcacatcatgcttgtgcagcggcagatgtctgtgatagaagaggacctggaagaattccagctcgctctgaaacactacgtggagagtgcttcctcccaaag

SEQ ID NO: 249339 - DNA, 120 bp, Artificial Sequence
  ENSG00000123119_8 (sequence is synthesized)
tggatgcttgcgtatttctatacagaagctttcaaatgaatctcgctacatgatctatgagttctgggagaatagtagtgtatggaatagccaccttcagacaaattatagcaagacatt

SEQ ID NO: 249340 - DNA, 120 bp, Artificial Sequence
  ENSG00000123119_9 (sequence is synthesized)
ccaaagaagtaatgtggatttcttggaaactccagaactcacatctacaatgctagttcctgcttcgtggtggatcctgaacaactagatgttcctagacattttctttatggttccaag

SEQ ID NO: 249341 - DNA, 120 bp, Artificial Sequence
  ENSG00000123119_10 (sequence is synthesized)
tgcaaaacaggtgttcttatctaaaacgtcaattagaaaattatctgcggttgttaatctactgtatatttttgtttggtatatttactaagtgcactctttcaaaacttattctataac

SEQ ID NO: 249342 - DNA, 120 bp, Artificial Sequence
  ENSG00000123119_11 (sequence is synthesized)
tttatcaattcatgtgaattttagctcaattttcaaagttcactaatattctcaatatttaatgctaaatgctttgctacattgtaactcacctaaaaccttttagtgacaaaatcctaa

SEQ ID NO: 249343 - DNA, 120 bp, Artificial Sequence
  ENSG00000123119_12 (sequence is synthesized)
tatgtggaaaaaagcatatgcataaaggaataatattgtgaaaatgaatctgttatgataaagaaaaaataaagtggaaacttttagagtattacttcatagggcagattttgtaaactg

SEQ ID NO: 249344 - DNA, 120 bp, Artificial Sequence
  ENSG00000123119_13 (sequence is synthesized)
tcgtatactgtaaagggttaaatcagcgttttgtgatttttaagtaactgtgagtgaagtttattcttcaacaatgtctactccatccccaacccaactcacagccctatgactactatc

SEQ ID NO: 249345 - DNA, 120 bp, Artificial Sequence
  ENSG00000123119_14 (sequence is synthesized)
tttgcattagttaaaaagttagtatataggcatcaaacaaccttggctgtaacctatagaatctctatccacgtatcaggttatagactggtttttcaaaagtgaacaatcctgtgataa

SEQ ID NO: 249346 - DNA, 120 bp, Artificial Sequence
  ENSG00000123119_15 (sequence is synthesized)
gttggagtaccatttagtaatacagcaacattgtgtcatttattagcatcataattctttgttatgtaagttaaatatatcaagaaagaagagactgtttggaaaaatgtggttcaagtt

SEQ ID NO: 249347 - DNA, 120 bp, Artificial Sequence
  ENSG00000123119_16 (sequence is synthesized)
ttatgctatatagttttggtatgcgatacagacagctaacttttcttatgaaaaatacatatttgcatgtaaacaatgatttcaaaatacttgaaaaataaaattttaacccaaatgaat

SEQ ID NO: 249348 - DNA, 120 bp, Artificial Sequence
  ENSG00000123119_17 (sequence is synthesized)
aactaagaaatataaaacaagcacaaaatcttagggaagtcataaaatagtagtgaaagtattagacagaagacatctgttttcgaatttcaacactagaatgactaaaactatctacct

SEQ ID NO: 249349 - DNA, 120 bp, Artificial Sequence
  ENSG00000123119_18 (sequence is synthesized)
atagaactatctgtagatagtatactatctacactctgctcaacaagctcagaaattaaatatttttaataataaaaatctgttctggttataaaccttgctaatgaaaatacaatacat

SEQ ID NO: 249350 - DNA, 120 bp, Artificial Sequence
  ENSG00000123119_19 (sequence is synthesized)
ataaaaatgtatagccatgttattttctagtataaattcctttgaaactataagtctttgaggaaaattataaggtaaaattttcctgtttttccccctttgaaaaactcaggaaaaaag

SEQ ID NO: 249351 - DNA, 120 bp, Artificial Sequence
  ENSG00000123119_20 (sequence is synthesized)
gaagattgaactaataaaattttatttcttaaatataaatttgacctaaaatattttctcaaactaattcatgaaacagcaacttttaccaatacctttgtatactctcagttctcattc

SEQ ID NO: 249352 - DNA, 120 bp, Artificial Sequence
  ENSG00000123119_21 (sequence is synthesized)
ttgtatactctcagttctcattcagtataaataaaattttaaaatcctttcatagttctattagaaataagtagtaaattttgatatattgtacatacacacgtgtgtgtgtgtgtgtgt

SEQ ID NO: 249353 - DNA, 120 bp, Artificial Sequence
  ENSG00000123119_22 (sequence is synthesized)
gcctctggtcaactctaaggatgacagacactgtgtaacaacacctgggtcaactcttttaatttatatacaaagcaaagaacaacattaatggagatgcacaatgattattcaaacaag

SEQ ID NO: 249354 - DNA, 120 bp, Artificial Sequence
  ENSG00000123119_23 (sequence is synthesized)
ctatatatatgtacaaaggcaaacagacacataacagtctctgcagactgattgtatatagtaagaaaagatcaaaagactttaaaacctaaatgacttttgacatacaaactcttcttg

SEQ ID NO: 249355 - DNA, 120 bp, Artificial Sequence
  ENSG00000123119_24 (sequence is synthesized)
agaatgtttgttgtaaatggtttcaaaaatacaaattatagccaatcaaaacattgctttggttggtgcatttaagtatccaactcaaaaagcatatcaaatattttgggtactaggcag

SEQ ID NO: 249356 - DNA, 120 bp, Artificial Sequence
  ENSG00000123119_25 (sequence is synthesized)
tttccaaagtagcatggtagtattacttgttaaaagggttctgttttcattaacagtactaagtggaagggatctgcagattccaaactggaataagctctatcatattctgaaacaaga

SEQ ID NO: 249357 - DNA, 120 bp, Artificial Sequence
  ENSG00000123119_26 (sequence is synthesized)
attagaatgacttgagaacgggcaaataacaaagcaaaccaatataattatatggtcattctgaccccagctcttatacaaattatacatgtatttttgtgtatgtttgtgagagttgta

SEQ ID NO: 249358 - DNA, 120 bp, Artificial Sequence
  ENSG00000123119_27 (sequence is synthesized)
gtttgtgagagttgtatgtatgtgaatgtgtgtgagtgtgtattcacatacacatatatactggaacctatagtagaaaaggaaactagtagggccaaaaaaaaaaagaaaaagaaaaag

SEQ ID NO: 249359 - DNA, 120 bp, Artificial Sequence
  ENSG00000123119_28 (sequence is synthesized)
gaaaaaactgggacctaagtataaatatctcatcctaaagtaaacaataagtttatagttaacgaagatttttttctatttaaaaccccattttcctaaagaacaaagtagtaaaataaa

SEQ ID NO: 249360 - DNA, 120 bp, Artificial Sequence
  ENSG00000123119_29 (sequence is synthesized)
aaaaaatttaaaaaattaaaaaataaaaaaaagaggtcactaaaagaccaagatgggaaacgtaacatggaatacaagcttgaatctgggaaacaagctcaaaaaacagtgaaaaaaaaa

SEQ ID NO: 249361 - DNA, 120 bp, Artificial Sequence
  ENSG00000123119_30 (sequence is synthesized)
gtactggtttaggagttcaaaattcagtgaaacaaactttttgccaatagacctagggatctaagaaatagaattagggagagtttacacttacttacctatatatcagcagatttttct

SEQ ID NO: 249362 - DNA, 120 bp, Artificial Sequence
  ENSG00000123119_31 (sequence is synthesized)
ggaagaaaccctttttttttttttttttaaacagtaacatccagagtgacaaattgcaggagatttaatgtataaaatttctaggaattaaaagcttaaacccaaaaattgttcatccat

SEQ ID NO: 249363 - DNA, 120 bp, Artificial Sequence
  ENSG00000123119_32 (sequence is synthesized)
atataagaaattatcgaattaaaacttaatgtatgtcaattattttcaaatgtctaaattcctttggaaataaaaatatcagttttactttgaaattgctcaacttctgctattcatatg

SEQ ID NO: 249364 - DNA, 120 bp, Artificial Sequence
  ENSG00000123119_33 (sequence is synthesized)
gtctgattagtgacataagtagcagccgtttttcaacttcagtttcattcactaccattgtttccaaattatcaatctctgctagtaattatgaatttaagaccatattattatcaaaaa

SEQ ID NO: 249365 - DNA, 120 bp, Artificial Sequence
  ENSG00000123119_34 (sequence is synthesized)
cctagagaccaatcatatatctgaaaagaaatacccattaaaaattctgcctcctgtttattgagaactatgcattgaacattctgaatcattctaagcctctggagagactgtaatgat

SEQ ID NO: 249366 - DNA, 120 bp, Artificial Sequence
  ENSG00000123119_35 (sequence is synthesized)
ccattcatgagctggtatgaaatcagtgggaagcagaacaacagaaggaactttaaaagcaacaagcaattatgtaccatatatacactgtagcaaatattttatatttgagagtcttta

SEQ ID NO: 249367 - DNA, 120 bp, Artificial Sequence
  ENSG00000123119_36 (sequence is synthesized)
cagcttacatttccattccattattacaagtgatgaaaaacaaaaaattgcaagtagtatgcaaattataaatatacagtcttcccacttcactaaccaaattcctactttccagtgtta

SEQ ID NO: 249368 - DNA, 120 bp, Artificial Sequence
  ENSG00000123119_37 (sequence is synthesized)
cttcccaatttatgcaggaaacctcctgcaaagctgaaactgattagaaaattctttatattttaaaatagctctttctcatttttagagaagtcaaatagccaaccatcaaaattaaga

SEQ ID NO: 249369 - DNA, 120 bp, Artificial Sequence
  ENSG00000123119_38 (sequence is synthesized)
ataaattgaattgtcacagtccattacagttattgttgctagatccacctcatttgcagatgtccaaacttaaattcatctgttcttaaaatgctacttaaaactttggttgttttcctg

SEQ ID NO: 249370 - DNA, 120 bp, Artificial Sequence
  ENSG00000123119_39 (sequence is synthesized)
taatataaaagaaaaagttaatttatcaattgattgaatacagtttttactaattagtttatcaaaccaaatactgtgaacgtaccaggtgtttacagatttaaatgcatgttaccatag

SEQ ID NO: 249371 - DNA, 120 bp, Artificial Sequence
  ENSG00000123119_40 (sequence is synthesized)
aaactattaaagtaactagaactgtcaaataacaaaacggctcatgtttttaaaatatatgtaactcattttaaaatatattaaattgtattccaaacctgttcttctgtttctgtggca

SEQ ID NO: 249372 - DNA, 120 bp, Artificial Sequence
  ENSG00000123119_41 (sequence is synthesized)
cctaggtttaaaatatgtattaatgtgtaaatcacaagtaaaatgaattctaatgtacaagtttgttttaaaaagtgtatgtcaagcttttatttacacaataaaatgttattaaagatg

SEQ ID NO: 249373 - DNA, 120 bp, Artificial Sequence
  ENSG00000123119_42 (sequence is synthesized)
attgagaatcactgcttttaaagggaaacacgtcattgtaaagaacacgttgtttagcttctgggactagaggcaaggaaaatatcttgcctagattacagcctttatacagttttatac

SEQ ID NO: 249374 - DNA, 120 bp, Artificial Sequence
  ENSG00000123119_43 (sequence is synthesized)
ttggaatagtcatggccttccttggtcatatttttggatgacaatcatctgtttttgtgaggaggaatgggatgggcagtaggagtcagcttaaatcgggctccgtgacagccaacgcag

SEQ ID NO: 249375 - DNA, 120 bp, Artificial Sequence
  ENSG00000123119_44 (sequence is synthesized)
aatgttgtatattaggagttcacaaaggaaaaattaatcgagatctcaagggatttatctttacccgtgaattttgctcaagtatgtatttcactccagaaagagttgggcctcattagt

SEQ ID NO: 249376 - DNA, 120 bp, Artificial Sequence
  ENSG00000123119_45 (sequence is synthesized)
tcgttcatagaagaagaattgttgttacaatcagtacattagtttcgcaagagcaaattctccacaagtttgaatatatttttaaattgatgtttaatacaacttcattattctctgcat

SEQ ID NO: 249377 - DNA, 120 bp, Artificial Sequence
  ENSG00000123119_46 (sequence is synthesized)
atttgaacagggcctgttgtaagtagttaatgtgtttgacaaccctgtaatatttgatatacctttggaaatgcatgagttactaatttttttgaaatctagttgtttgtaatgattgtc

SEQ ID NO: 249378 - DNA, 120 bp, Artificial Sequence
  ENSG00000123119_47 (sequence is synthesized)
gcacagagagcgtgaatgcattcatgtccaggaagaagaaagggaagaacaatatagagggtatattttgccaagtttgcctatgcttaattctgagatacctctttagtaattaaaatt

SEQ ID NO: 249379 - DNA, 120 bp, Artificial Sequence
  ENSG00000123119_48 (sequence is synthesized)
gctctgaaaaattgactttgaatcagaaaataatgatcttttgtagaaagctcccctgaagtgtttttagattgttcccactttgcagaatgtaaaacaaagtataaattataaataaat

SEQ ID NO: 249380 - DNA, 120 bp, Artificial Sequence
  ENSG00000123124_0 (sequence is synthesized)
attttgggacatggccactgcttcaccaaggtctgatactagtaataaccacagtggaaggttgcagttacaggtaactgtttctagtgccaaacttaaaagaaaaaagaactggttcgg

SEQ ID NO: 249381 - DNA, 120 bp, Artificial Sequence
  ENSG00000123124_1 (sequence is synthesized)
aacagcaatatatacagaagtagttgtagatggagaaattacgaaaacagcaaaatccagtagttcttctaatccaaaatgggatgaacagctaactgtaaatgttacgccacagactac

SEQ ID NO: 249382 - DNA, 120 bp, Artificial Sequence
  ENSG00000123124_2 (sequence is synthesized)
attggaatttcaagtttggagccatcgcactttaaaagcagatgctttattaggaaaagcaacgatagatttgaaacaagctctgttgatacacaatagaaaattggaaagagtgaaaga

SEQ ID NO: 249383 - DNA, 120 bp, Artificial Sequence
  ENSG00000123124_3 (sequence is synthesized)
acaattaaaactttccttggaaaacaagaatggcatagcacaaactggtgaattgacagttgtgcttgatggattggtgattgagcaagaaaatataacaaactgcagctcatctccaac

SEQ ID NO: 249384 - DNA, 120 bp, Artificial Sequence
  ENSG00000123124_4 (sequence is synthesized)
catagaaatacaggaaaatggtgatgccttacatgaaaatggagagccttcagcaaggacaactgccaggttggctgttgaaggcacgaatggaatagataatcatgtacctacaagcac

SEQ ID NO: 249385 - DNA, 120 bp, Artificial Sequence
  ENSG00000123124_5 (sequence is synthesized)
tctagtccaaaactcatgctgctcgtatgtagttaatggagacaacacaccttcatctccgtctcaggttgctgccagacccaaaaatacaccagctccaaaaccactcgcatctgagcc

SEQ ID NO: 249386 - DNA, 120 bp, Artificial Sequence
  ENSG00000123124_6 (sequence is synthesized)
tgccgatgacactgttaatggagaatcatcctcatttgcaccaactgataatgcgtctgtcacgggtactccagtagtgtctgaagaaaatgccttgtctccaaattgcactagtactac

SEQ ID NO: 249387 - DNA, 120 bp, Artificial Sequence
  ENSG00000123124_7 (sequence is synthesized)
tgttgaagatcctccagttcaagaaatactgacttcctcagaaaacaatgaatgtattccttctaccagtgcagaattggaatctgaagctagaagtatattagagcctgacacctctaa

SEQ ID NO: 249388 - DNA, 120 bp, Artificial Sequence
  ENSG00000123124_8 (sequence is synthesized)
ttctagaagtagttctgcttttgaagcagccaaatcaagacagccagatgggtgtatggatcctgtacggcagcagtctgggaatgccaacacagaaaccttgccatcagggtgggaaca

SEQ ID NO: 249389 - DNA, 120 bp, Artificial Sequence
  ENSG00000123124_9 (sequence is synthesized)
aagaaaagatcctcatggtagaacctattatgtggatcataatactcgaactaccacatgggagagaccacaacctttacctccaggttgggaaagaagagttgatgatcgtagaagagt

SEQ ID NO: 249390 - DNA, 120 bp, Artificial Sequence
  ENSG00000123124_10 (sequence is synthesized)
ttattatgtggatcataacaccagaacaacaacgtggcagcggcctaccatggaatctgtccgaaattttgaacagtggcaatctcagcggaaccaattgcagggagctatgcaacagtt

SEQ ID NO: 249391 - DNA, 120 bp, Artificial Sequence
  ENSG00000123124_11 (sequence is synthesized)
taaccaacgatacctctattcggcttcaatgttagctgcagaaaatgacccttatggacctttgccaccaggctgggaaaaaagagtggattcaacagacagggtttactttgtgaatca

SEQ ID NO: 249392 - DNA, 120 bp, Artificial Sequence
  ENSG00000123124_12 (sequence is synthesized)
taacacaaaaacaacccagtgggaagatccaagaactcaaggcttacagaatgaagaacccctgccagaaggctgggaaattagatatactcgtgaaggtgtaaggtactttgttgatca

SEQ ID NO: 249393 - DNA, 120 bp, Artificial Sequence
  ENSG00000123124_13 (sequence is synthesized)
taacacaagaacaacaacattcaaagatcctcgcaatgggaagtcatctgtaactaaaggtggtccacaaattgcttatgaacgcggctttaggtggaagcttgctcacttccgttattt

SEQ ID NO: 249394 - DNA, 120 bp, Artificial Sequence
  ENSG00000123124_14 (sequence is synthesized)
gccagtctaatgcactacctagtcatgtaaagatcaatgtgtcccggcagacattgtttgaagattccttccaacagattatggcattaaaaccctatgacttgaggaggcgcttatatg

SEQ ID NO: 249395 - DNA, 120 bp, Artificial Sequence
  ENSG00000123124_15 (sequence is synthesized)
taatatttagaggagaagaaggacttgattatggtggcctagcgagagaatggtttttcttgctttcacatgaagttttgaacccaatgtattgcttatttgagtatgcgggcaagaaca

SEQ ID NO: 249396 - DNA, 120 bp, Artificial Sequence
  ENSG00000123124_16 (sequence is synthesized)
actattgtctgcagataaatccagcatcaaccattaatccagaccatctttcatacttctgtttcattggtcgttttattgccatggcactatttcatggaaagtttatcgatactggtt

SEQ ID NO: 249397 - DNA, 120 bp, Artificial Sequence
  ENSG00000123124_17 (sequence is synthesized)
tctctttaccattctacaagcgtatgttaagtaaaaaacttactattaaggatttggaatctattgatactgaattttataactcccttatctggataagagataacaacattgaagaat

SEQ ID NO: 249398 - DNA, 120 bp, Artificial Sequence
  ENSG00000123124_18 (sequence is synthesized)
gtggcttagaaatgtacttttctgttgacatggagattttgggaaaagttacttcacatgacctgaagttgggaggttccaatattctggtgactgaggagaacaaagatgaatatattg

SEQ ID NO: 249399 - DNA, 120 bp, Artificial Sequence
  ENSG00000123124_19 (sequence is synthesized)
gtttaatgacagaatggcgtttttctcgaggagtacaagaacagaccaaagctttccttgatggttttaatgaagttgttcctcttcagtggctacagtacttcgatgaaaaagaattag

SEQ ID NO: 249400 - DNA, 120 bp, Artificial Sequence
  ENSG00000123124_20 (sequence is synthesized)
aggttatgttgtgtggcatgcaggaggttgacttggcagattggcagagaaatactgtttatcgacattatacaagaaacagcaagcaaatcatttggttttggcagtttgtgaaagaga

SEQ ID NO: 249401 - DNA, 120 bp, Artificial Sequence
  ENSG00000123124_21 (sequence is synthesized)
cagacaatgaagtaagaatgcgactattgcagttcgtcactggaacctgccgtttacctctaggaggatttgctgagctcatgggaagtaatgggcctcaaaagttttgcattgaaaaag

SEQ ID NO: 249402 - DNA, 120 bp, Artificial Sequence
  ENSG00000123124_22 (sequence is synthesized)
ttggcaaagacacttggttaccaagaagccatacatgttttaatcgcttggatctaccaccatataagagttatgaacaactaaaggaaaaacttctttttgcaatagaagagacagagg

SEQ ID NO: 249403 - DNA, 120 bp, Artificial Sequence
  ENSG00000123124_23 (sequence is synthesized)
gatttggacaagaatgaatgtggcttcttattttggaggagctcttgcatttaaataccccagccaagaaaaattgcacagatagtgtatataagctgttcattctgtacagtgaatttt

SEQ ID NO: 249404 - DNA, 120 bp, Artificial Sequence
  ENSG00000123124_24 (sequence is synthesized)
ccgaacctctcaaagtatgttttccgttcttccacagaaatatgcaaaacagttcatccttttctactttatttattgttcccttgaaatgactgaccaggaaaaagatcatccttaaat

SEQ ID NO: 249405 - DNA, 120 bp, Artificial Sequence
  ENSG00000123124_25 (sequence is synthesized)
tttgaagcaagtgagagactttattaaaaatacatatatatctatataaacatatatgatagtggctctagttttatagagctccaagtgtattaaacatgacagccattcattcataaa

SEQ ID NO: 249406 - DNA, 120 bp, Artificial Sequence
  ENSG00000123124_26 (sequence is synthesized)
gatctggatttgctttaccttgttaatattatctaggggaaaaagtgcaaattgctccatgttcttctctcccttatgtaacatctcctgagggtgtttagttgcatggctgttcagaaa

SEQ ID NO: 249407 - DNA, 120 bp, Artificial Sequence
  ENSG00000123124_27 (sequence is synthesized)
ggtattaagggcttaggccaaatcttactttgagtatgttaaaaaaaaaaaaatgctgctggcttttctgaagacaggtgcttgaacttgtcagtttgttttaaataaatacaatagttg

SEQ ID NO: 249408 - DNA, 80 bp, Artificial Sequence
  ENSG00000123124_28 (sequence is synthesized)
attccgggtccggagttggaggctttgggcggccgcggcgtagcgcgcggtgccggggccggcggggaggcgcgcgctta

SEQ ID NO: 249409 - DNA, 120 bp, Artificial Sequence
  ENSG00000123124_29 (sequence is synthesized)
aggaagggaggtgtggggtcggctgggggtggcgcgtggacggggtgggggtggggggagggtcgggtgtcggcgagctccgcgtgcgggttccgagtggctgctggcggcctgggctgc

SEQ ID NO: 249410 - DNA, 120 bp, Artificial Sequence
  ENSG00000123124_30 (sequence is synthesized)
gtggctgctgccgccgcgcctgctgcgagatggcgatcttgggcgcggaagggtgagggcgcccgccgcaggaggaggtgccgctgccgtggccgcccggctgccgggagccgacagctt

SEQ ID NO: 249411 - DNA, 120 bp, Artificial Sequence
  ENSG00000123124_31 (sequence is synthesized)
cgggagccgacagcttcgcgccggggttgtctcctcacagactatgagctccttgaaagagggaatcgtgtcttactcatctttgtatccccagtgtctagcagttcctgatacatagtt

SEQ ID NO: 249412 - DNA, 120 bp, Artificial Sequence
  ENSG00000123124_32 (sequence is synthesized)
agtcatatactagatccaatactatttagtttattatcgaaattggaaggattcattgagcagcatagaagtttgtttacatgttactttgagatgctaggtatttgtggaattaaaaag

SEQ ID NO: 249413 - DNA, 120 bp, Artificial Sequence
  ENSG00000123124_33 (sequence is synthesized)
aatcaggctcttttgtactttgtttttaaatctgtgatgcttttcaaatttaattcataataaattgatgcaatttcatacttaggaacatacaaaaggtaatgtaaactctgccacttt

SEQ ID NO: 249414 - DNA, 120 bp, Artificial Sequence
  ENSG00000123124_34 (sequence is synthesized)
tttgtgttcaaaattttggtttttatgaagccagatggattgaagagttacataagcatttgaatgctctaatataaggctaatgattttctgttagtgtttgaatatcttcattcctct

SEQ ID NO: 249415 - DNA, 120 bp, Artificial Sequence
  ENSG00000123124_35 (sequence is synthesized)
caaattcataacagttctatttaactgaattaaataaccatatgaaaaatcttttgggtctccccctttttacacagataattatttttgtcataacactttttaattgtttttcatcat

SEQ ID NO: 249416 - DNA, 120 bp, Artificial Sequence
  ENSG00000123124_36 (sequence is synthesized)
aggggcctttgctgaactacaaaaatgtgtaacaaattaaaatctgatgtgaatgatattaatgctacttttagcaaactgggcttcctaatacaaaattttaaatttccatttgtatca

SEQ ID NO: 249417 - DNA, 120 bp, Artificial Sequence
  ENSG00000123124_37 (sequence is synthesized)
tgcttttaatatgcactgtaaatttcattaacttaaacattttttaatagccatggaactgacttcttaaaatctgttgcctataaatatttcactgctaagtacatacagaaaaacagt

SEQ ID NO: 249418 - DNA, 120 bp, Artificial Sequence
  ENSG00000123124_38 (sequence is synthesized)
aattattgttttgccaaaattttatttttctacatattgagagtgtgttctccattttattcagaattcatagtaaagacgaaagaaaggcagagatctgcttggttgaatagactcctt

SEQ ID NO: 249419 - DNA, 120 bp, Artificial Sequence
  ENSG00000123124_39 (sequence is synthesized)
ttccaaatccttattatgaacactctggtaattttcaagcctaaagaattaaaaaaaaaattctaatgtatgtgacaggttatgtgatagagggaaactggccttcaaaaaggactgcgt

SEQ ID NO: 249420 - DNA, 120 bp, Artificial Sequence
  ENSG00000123124_40 (sequence is synthesized)
caagatggcaccttgttgctgcatcctctgaaggggatgaacactgtcctcacatggcaaaagggacagaaaagggcacacccactcactcaagtccttttataaaggccctaattccat

SEQ ID NO: 249421 - DNA, 120 bp, Artificial Sequence
  ENSG00000123124_41 (sequence is synthesized)
tgctgagctcatgggtaaatgtaatttcactgtaatttctctgtacgtaattttgtgataataatggcctttggacatacaatagacttgattgaacctaaagattactcttctgtgctg

SEQ ID NO: 249422 - DNA, 120 bp, Artificial Sequence
  ENSG00000123124_42 (sequence is synthesized)
cctcatatagctgaggtggccattgctttgctccctatggtgactgtgaagggagcgacattctgtagagagagttttcttcccaatgatctaattcttattgctggatctctgcaacaa

SEQ ID NO: 249423 - DNA, 120 bp, Artificial Sequence
  ENSG00000123124_43 (sequence is synthesized)
ttttcttcttcaggcagaagcagcttacattgtgaatttctttattttgtatcattcatatgactgtgcaacatgttctattatttaagcagttgtcagaagaaaaaagtttaaaggacc

SEQ ID NO: 249424 - DNA, 120 bp, Artificial Sequence
  ENSG00000123124_44 (sequence is synthesized)
gatattaatacaaatacactggaaattgcctcaaaaaattgttgaaatgggatttaagctgaattgaagttgaggagacatacccaagcaaaagtgtggcatacaaataagcatgttata

SEQ ID NO: 249425 - DNA, 120 bp, Artificial Sequence
  ENSG00000123124_45 (sequence is synthesized)
tctatatgaggatcagtgaatttgtagtttggccacatcgaaactagcaggtaacttaaatggagagccagatcatagaagaacttggatagagggccaaagaattgggcagtggagttc

SEQ ID NO: 249426 - DNA, 120 bp, Artificial Sequence
  ENSG00000123124_46 (sequence is synthesized)
ttaaagactgttgagcagaggtatgatgtatatatgaatatatttaagatctgtttttaaattcacatattaatgctaaaaaataaccttgacttattttcttatagagaatggtttttc

SEQ ID NO: 249427 - DNA, 120 bp, Artificial Sequence
  ENSG00000123124_47 (sequence is synthesized)
agcaaatgggcattattttaataataccattataaaatattggtgcattattttaataatatttctcaactgtgtgtaaagaatacaactaagtattttttacatcaatttctacactat

SEQ ID NO: 249428 - DNA, 120 bp, Artificial Sequence
  ENSG00000123124_48 (sequence is synthesized)
agcttcccagaaagaaaaaaaagctccttgttataatgtaaataatacaagtacagctttttcgattgcctgttttcttactctgaaaagcttgtgatgagtaaacccaaagtttaacca

SEQ ID NO: 249429 - DNA, 120 bp, Artificial Sequence
  ENSG00000123130_0 (sequence is synthesized)
gctgtccggctcccgggctgtcctcagcaagggcgcggtctggtactcgtgcgtcttttatcgcctcagtttccctccgccgactagcgcgcggggcccggttctccatcgcgcgcacgg

SEQ ID NO: 249430 - DNA, 120 bp, Artificial Sequence
  ENSG00000123130_1 (sequence is synthesized)
cagcctagcgcaatgaggcgggcagcactgcggctttgtgccttgggcaaagggcagcttactcctggaagaggactgactcaaggaccccagaaccccaagaaacagggaatcttccac

SEQ ID NO: 249431 - DNA, 120 bp, Artificial Sequence
  ENSG00000123130_2 (sequence is synthesized)
attcatgaagttcgagataagttgcgggagatagtaggagcatccacaaactggagagaccatgtgaaggcaatggaagaaaggaaattacttcatagtttcttggctaaatcacaggat

SEQ ID NO: 249432 - DNA, 120 bp, Artificial Sequence
  ENSG00000123130_3 (sequence is synthesized)
ggactgcctcctaggagaatgaaggacagttatattgaagttctcttgcctttgggcagtgagcctgaattacgagagaaatatttgactgttcaaaacaccgtaagatttggcaggatt

SEQ ID NO: 249433 - DNA, 120 bp, Artificial Sequence
  ENSG00000123130_4 (sequence is synthesized)
cttgaggatcttgacagcttgggagttcttatttgttacatgcacaacaaaatccactccgccaagatgtctcctttatcgatagttacagccctggtggataagattgatatgtgtaag

SEQ ID NO: 249434 - DNA, 120 bp, Artificial Sequence
  ENSG00000123130_5 (sequence is synthesized)
aagagcttgagcccagaacaggacattaagttcagtggccatgttagctgggtcgggaagacatccatggaagtgaagatgcaaatgttccagttacatggtgatgaattttgtcctgtt

SEQ ID NO: 249435 - DNA, 120 bp, Artificial Sequence
  ENSG00000123130_6 (sequence is synthesized)
tgaacaaggggagaagaattgccttcagctccacgtcgttactgaaaatggcccccagcgctgaggagaggaccaccatacatgagatgtttctcagcacactggatccaaagactataa

SEQ ID NO: 249436 - DNA, 120 bp, Artificial Sequence
  ENSG00000123130_7 (sequence is synthesized)
gttttcggagtcgagttttaccctctaatgcagtgtggatggagaattcaaaactgaagagtttggaaatttgccaccctcaggagcggaacattttcaatcggatctttggtggtttcc

SEQ ID NO: 249437 - DNA, 120 bp, Artificial Sequence
  ENSG00000123130_8 (sequence is synthesized)
ttatgaggaaggcatatgaacttgcgtgggctactgcttgtagctttggtggttctcgaccgtttgtggtagcagtagatgacatcatgtttcagaaacctgttgaggttggctcattgc

SEQ ID NO: 249438 - DNA, 120 bp, Artificial Sequence
  ENSG00000123130_9 (sequence is synthesized)
tctttctttcttcacaggtatgctttactcagaataattatattcaagtcagagtacacagtgaagtggcctccctgcaggagaagcagcatacaaccaccaatgtctttcatttcacgt

SEQ ID NO: 249439 - DNA, 120 bp, Artificial Sequence
  ENSG00000123130_10 (sequence is synthesized)
tcatgtcggaaaaagaagtgccattggttttcccaaaaacatatggagagtccatgttgtacttagatgggcagcggcatttcaactccatgagtggcccagcgaccttgagaaaggact

SEQ ID NO: 249440 - DNA, 120 bp, Artificial Sequence
  ENSG00000123130_11 (sequence is synthesized)
accttgtggagccctaagaacaccacatttgttgaaaactagcactctacccacagtgacgtggtatctgatgaagacctgatcgagtgtattgattttagtattgcttcgtgtcctcca

SEQ ID NO: 249441 - DNA, 120 bp, Artificial Sequence
  ENSG00000123130_12 (sequence is synthesized)
cacaggaggaggatgtattcagcctttaggatgatcagaaaagcagaaagagagagtggccggatggggctgaggggagaaagaattattaaacaataaatactttcaagacaattttaa

SEQ ID NO: 249442 - DNA, 120 bp, Artificial Sequence
  ENSG00000123130_13 (sequence is synthesized)
aagagcagtaacacaaacagggctgaaacacgccctcctcccgtccccacacccccgcgacttgccatgttgcgggtgatgtgaaggagagaagtgctgtggcccttcagggagcacaga

SEQ ID NO: 249443 - DNA, 120 bp, Artificial Sequence
  ENSG00000123130_14 (sequence is synthesized)
gggctgtgacaccctctttggggctctgcggtttctggtatcttcaaacttccgggcaccactgcattccccttgtccagacacaggtgcccacagcagaagccgcttgtggttcatcag

SEQ ID NO: 249444 - DNA, 120 bp, Artificial Sequence
  ENSG00000123130_15 (sequence is synthesized)
agccgcttgtggttcatcagatccagctgcagacttgcatagaaccggcacctttgccggcgcctggagctgcctgcccagctgcagcagctggtgtgtccggctctgcgcagtggccag

SEQ ID NO: 249445 - DNA, 120 bp, Artificial Sequence
  ENSG00000123130_16 (sequence is synthesized)
accctgcgttcgctcgcctgcacacccctcgctgttccgtgcctggctcaccctcggcaggcgtggaatcctggctggtagcatgagctgagcacagcctgccaggccacgtcagtggaa

SEQ ID NO: 249446 - DNA, 120 bp, Artificial Sequence
  ENSG00000123130_17 (sequence is synthesized)
caagtctggcgggcctgatcaaaactcaggcaaaggcaccactggtcacagagctttctagctggaaaagcaacacctgaaggatcccgtgacacaatcaacctgctaggagatccctgc

SEQ ID NO: 249447 - DNA, 120 bp, Artificial Sequence
  ENSG00000123130_18 (sequence is synthesized)
caccctgagaggctgcaggaagctgcctccatccaggcctcttcacagaaggagaattgcagagaccgtaggatttttctactcacaggaacagatggtgtccggtcaggaaggtaaaat

SEQ ID NO: 249448 - DNA, 120 bp, Artificial Sequence
  ENSG00000123130_19 (sequence is synthesized)
gcttcaagaaaagtgcaatagggattataatactgatgatctgagactctgataatgactctgagatgattcccaattctatgatgaatcatctcagaatgactccgagatgatgattcc

SEQ ID NO: 249449 - DNA, 120 bp, Artificial Sequence
  ENSG00000123130_20 (sequence is synthesized)
tgattctacgatgattgaggcagagctcactggttggtgaatctagttggtagagctgaggcaccgcaataccatcatttctttctgaggaaatctaaagatgaaagaattcatcactaa

SEQ ID NO: 249450 - DNA, 120 bp, Artificial Sequence
  ENSG00000123130_21 (sequence is synthesized)
aactgtactacgagaaatgctaaaggaagttgttcaaactgatggaaaattataccagatggacacttgaatttgcccaaaggaatgaagagcaccagaaatggcaaatgtgtggtctta

SEQ ID NO: 249451 - DNA, 120 bp, Artificial Sequence
  ENSG00000123130_22 (sequence is synthesized)
ctgtatcttcatgtcagtgtcatatcaaggacaagacagcagaaatggtccactccagttgcagatagtaaagaccctgtagctccagcatcagctcacctttctggttttgaatttcat

SEQ ID NO: 249452 - DNA, 120 bp, Artificial Sequence
  ENSG00000123130_23 (sequence is synthesized)
cttgctctgtgctgtctaaatcccatcagccgtacatgattcctttgcttccctctatttcccagcttttgttgtcagagggtagatgaaaagttggggcgaagggatttaacaaaagtt

SEQ ID NO: 249453 - DNA, 120 bp, Artificial Sequence
  ENSG00000123130_24 (sequence is synthesized)
actgcatccgtaaagatttgtgggaagatttaggtctgaaaccataccattagaaggtgtttagagatgatctagataaggaaatacaggaccatttggtcattctttcattcaccagac

SEQ ID NO: 249454 - DNA, 120 bp, Artificial Sequence
  ENSG00000123130_25 (sequence is synthesized)
agctatttagcacattctgctagtggctccgcaggatatatctgatttaaaaaataggaaccacaataataatagctgcttatgcttatggagcattgccatgtgctagataggcaccat

SEQ ID NO: 249455 - DNA, 120 bp, Artificial Sequence
  ENSG00000123130_26 (sequence is synthesized)
cctcagcccttggcaggtctgagctcctttatttcttccaatcaacactatgaggcaggttctgtaaccccccttagggttaggccactcgggaaactgaagcacagagagtttaagtaa

SEQ ID NO: 249456 - DNA, 120 bp, Artificial Sequence
  ENSG00000123130_27 (sequence is synthesized)
cttcctggaggtccgacgcgtaacatgtggaggtgctgggattcaaaaccaggcaatgtgggtcccgggcactcttgaccagtgcctgtacttcttccaaggaatagagcaagggaggtc

SEQ ID NO: 249457 - DNA, 120 bp, Artificial Sequence
  ENSG00000123130_28 (sequence is synthesized)
tacttcttccaaggaatagagcaagggaggtcataccgaatatcacagtgtcacctaggaagcccaagggaggtattcccgttaatctgcagccaaggccgggcgcggtagctcatgcct

SEQ ID NO: 249458 - DNA, 120 bp, Artificial Sequence
  ENSG00000123130_29 (sequence is synthesized)
aaaatctgtagccaagaccgttccttttttgacaggaaggtaacttagaagaaaaaataatctctgaaaaaagtcctcccaagaaggaagcaatatttattgtgggttctacattagtgt

SEQ ID NO: 249459 - DNA, 120 bp, Artificial Sequence
  ENSG00000123130_30 (sequence is synthesized)
attagtgttcacaaacttggctctgcctcagaattaggtggaaagtatttttgtgtgtgtgtgtgtgtgtgagacagagtttcactctgtcgctccagctggagtgcagtggcatgatct

SEQ ID NO: 249460 - DNA, 65 bp, Artificial Sequence
  ENSG00000123130_31 (sequence is synthesized)
ggcatgagccactgcacccggccggtggaaagcatttttaacaaaaaatttttaggccaggcacg

SEQ ID NO: 249461 - DNA, 120 bp, Artificial Sequence
  ENSG00000123130_32 (sequence is synthesized)
acaaaaagttaaaaaattatctgagcatggtggtgtgcacctgtagtcccagttaggaggctgaggtgagtggattgcttgagtccaggagtttgagtctgcagtgagctatgatcatgc

SEQ ID NO: 249462 - DNA, 120 bp, Artificial Sequence
  ENSG00000123130_33 (sequence is synthesized)
cactgcactccagtctgggtgacagcaagaccctgtctcaagcaatttttttatattagtttatgtaatgtttattgaaatcacagtgtcaacaagcacctctggcatgaaatagtcaca

SEQ ID NO: 249463 - DNA, 120 bp, Artificial Sequence
  ENSG00000123130_34 (sequence is synthesized)
ggagcgaacacaactatctcttggaagcatgcagtttgactcatggaatcaagcatgtgctgtactataataacttgtctctccatgccgtaatgccatcctgactgagatttacctggc

SEQ ID NO: 249464 - DNA, 120 bp, Artificial Sequence
  ENSG00000123130_35 (sequence is synthesized)
ccttcaatatagcattttgcatatctacctatgacatgatgggaggtggctaatggggagggatgcgccctggggagttttgtgaatgtgttaagtggagttaagagacctactgcatgc

SEQ ID NO: 249465 - DNA, 120 bp, Artificial Sequence
  ENSG00000123130_36 (sequence is synthesized)
tattgtatagattatacattatatatttaaccatttgttgctgtacagtgaagctttttctagtatttcttttttgctattataaacaatgttgcagtaaatatcctaaatactctaaaa

SEQ ID NO: 249466 - DNA, 88 bp, Artificial Sequence
  ENSG00000123130_37 (sequence is synthesized)
ctccgttttaatgaagtgagaaatgcatctcaatgggataactgcaggtcagggctctggatcaggatgatatcaagtgatctcacac

SEQ ID NO: 249467 - DNA, 120 bp, Artificial Sequence
  ENSG00000123130_38 (sequence is synthesized)
tcagggctctggatcaggatgatatcaagtgatctcacactgaaccaatataatttccatgtggaaccaaagactcactgggagttttatgtggcctctgcagttttctcttggatacgt

SEQ ID NO: 249468 - DNA, 120 bp, Artificial Sequence
  ENSG00000123130_39 (sequence is synthesized)
ttccaggccggcatttgtaaatccactcatccctgaaagcccagaggaagaggagctctttagacaaggggaatgtacattaatttgtttataataaaataaatttgaaaagcacattaa

SEQ ID NO: 249469 - DNA, 120 bp, Artificial Sequence
  ENSG00000123130_40 (sequence is synthesized)
tgaaaataaagggccggcatttgtaaatccactcatccctgaaagcccagaggaagaggagctctttagacaaggggaatgtacattaatttgtttataataaaataaatttgaaaagca

SEQ ID NO: 249470 - DNA, 120 bp, Artificial Sequence
  ENSG00000123130_41 (sequence is synthesized)
gtttataataaaataaatttgaaaagcacattaattacgctgcagaagagattatttaagattttatatgggctcttcataccagtcaaatgtcttttttttgtttgtttttttgtttgt

SEQ ID NO: 249471 - DNA, 120 bp, Artificial Sequence
  ENSG00000123131_0 (sequence is synthesized)
gtgcacgcggttgtagctgcccggcggcggcagaagcggcgctcgcgccaagggacgtgtttctgcgctcgcgtggtcatggaggcgctgccgctgctagccgcgacaactccggaccac

SEQ ID NO: 249472 - DNA, 120 bp, Artificial Sequence
  ENSG00000123131_1 (sequence is synthesized)
ggccgccaccgaaggctgcttctgctgccgctactgctgttcctgctgccggctggagctgtgcagggctgggagacagaggagaggccccggactcgcgaagaggagtgccacttctac

SEQ ID NO: 249473 - DNA, 120 bp, Artificial Sequence
  ENSG00000123131_2 (sequence is synthesized)
gcgggtggacaagtgtacccgggagaggcatcccgggtatcggtcgccgaccactccctgcacctaagcaaagcgaagatttccaagccagcgccctactgggaaggaacagctgtgatc

SEQ ID NO: 249474 - DNA, 120 bp, Artificial Sequence
  ENSG00000123131_3 (sequence is synthesized)
cagacttgaagaattcagatctataaatactgaagtggtagcatgctctgttgattcacagtttacccatttggcctggattaatacccctcgaagacaaggaggacttgggccaataag

SEQ ID NO: 249475 - DNA, 120 bp, Artificial Sequence
  ENSG00000123131_4 (sequence is synthesized)
gattccacttctttcagatttgacccatcagatctcaaaggactatggtgtatacctagaggactcaggccacactcttagaggtctcttcattattgatgacaaaggaatcctaagaca

SEQ ID NO: 249476 - DNA, 120 bp, Artificial Sequence
  ENSG00000123131_5 (sequence is synthesized)
aattactctgaatgatcttcctgtgggtagatcagtggatgagacactacgtttggttcaagcattccagtacactgacaaacacggagaagtctgccctgctggctggaaacctggtag

SEQ ID NO: 249477 - DNA, 120 bp, Artificial Sequence
  ENSG00000123131_6 (sequence is synthesized)
tgaaacaataatcccagatccagctggaaagctgaagtatttcgataaactgaattgagaaatacttcttcaagttatgatgcttgaaagttctcaataaagttcacggtttcattacca

SEQ ID NO: 249478 - DNA, 120 bp, Artificial Sequence
  ENSG00000123131_7 (sequence is synthesized)
agggagctccaacagaactgagggacgaacagtaggtgcctgagagctggccgatctggtcactctctccagtgggccacaggggcccacttggtgggcagtctctgctgccagctaggg

SEQ ID NO: 249479 - DNA, 120 bp, Artificial Sequence
  ENSG00000123131_8 (sequence is synthesized)
catctcagctcagcccagagcaaagacgtgtagggacataacgctttcctcaagcttcctttcccaggtccaaacttagaggcccagttttgggcctagaattcactgaggtttgtggct

SEQ ID NO: 249480 - DNA, 120 bp, Artificial Sequence
  ENSG00000123131_9 (sequence is synthesized)
gtttgtccaacagtcaccatggatcaccgaagccgactacggggcacaggcctgaaccgaatccctgggactcagtcccgagccccccgagtcccactccccttccacgtgcaacaggag

SEQ ID NO: 249481 - DNA, 120 bp, Artificial Sequence
  ENSG00000123131_10 (sequence is synthesized)
atcggtcgccgaccactccctgcacctaagcaaagcgaagaaagtctgtaagcttcaccagactgccaaagagatctaaagtttccaagccagcgccctactgggaaggaacagctgtga

SEQ ID NO: 249482 - DNA, 120 bp, Artificial Sequence
  ENSG00000123131_11 (sequence is synthesized)
cctggtcagtatcttacacttatattcgtagaaaaaaaagaatggatttactcttaaagcatggacagataactcttgatatgatataagaatatagtcatttatcagacaattcaggaa

SEQ ID NO: 249483 - DNA, 120 bp, Artificial Sequence
  ENSG00000123131_12 (sequence is synthesized)
tagctttatctaagagtaatacatgtaactacacattttccaggttaaaaaaagagagaagagtaatataatcagctgctataataaaaatgcttaaggattttataggacatttcaaaa

SEQ ID NO: 249484 - DNA, 120 bp, Artificial Sequence
  ENSG00000123131_13 (sequence is synthesized)
taaggggaaaagttaaatgcaatagatgtgatttctatagcgaaaaccactgaattatatgcttatgataaattgggttaccataatctggaggaaaaaaatctttaaaatatgccattt

SEQ ID NO: 249485 - DNA, 120 bp, Artificial Sequence
  ENSG00000123131_14 (sequence is synthesized)
gagagagctataatcccagatccagctggaaagctgaagtatttcgataaactgaattgagaaatacttcttcaagttatgatgcttgaaagttctcaataaagttcacggtttcattac

SEQ ID NO: 249486 - DNA, 120 bp, Artificial Sequence
  ENSG00000123136_0 (sequence is synthesized)
gtctgagcgcccggcggaaaaccgaagttggaagtgtctcttagcagcgcgcggagaagaacggggagccagcatcatggcagaacaggatgtggaaaacgatcttttggattacgatga

SEQ ID NO: 249487 - DNA, 120 bp, Artificial Sequence
  ENSG00000123136_1 (sequence is synthesized)
agaggaagagccccaggctcctcaagagagcacaccagctccccctaagaaagacatcaagggatcctacgtttccatccacagctctggcttccgggactttctgctgaagccggagct

SEQ ID NO: 249488 - DNA, 120 bp, Artificial Sequence
  ENSG00000123136_2 (sequence is synthesized)
cctgcgggccatcgtggactgtggctttgagcatccttctgaggtccagcatgagtgcattccccaggccatcctgggcatggacgtcctgtgccaggccaagtccgggatgggcaagac

SEQ ID NO: 249489 - DNA, 120 bp, Artificial Sequence
  ENSG00000123136_3 (sequence is synthesized)
agcggtcttcgtgctggccaccctacagcagattgagcctgtcaacggacaggtgacggtcctggtcatgtgccacacgagggagctggccttccagatcagcaaggaatatgagcgctt

SEQ ID NO: 249490 - DNA, 120 bp, Artificial Sequence
  ENSG00000123136_4 (sequence is synthesized)
ttccaagtacatgcccagcgtcaaggtgtctgtgttcttcggtggtctctccatcaagaaggatgaagaagtgttgaagaagaactgtccccatgtcgtggtggggaccccgggccgcat

SEQ ID NO: 249491 - DNA, 120 bp, Artificial Sequence
  ENSG00000123136_5 (sequence is synthesized)
cctggcgctcgtgcggaataggagcttcagcctaaagaatgtgaagcactttgtgctggacgagtgtgacaagatgctggagcagctggacatgcggcgggatgtgcaggagatcttccg

SEQ ID NO: 249492 - DNA, 120 bp, Artificial Sequence
  ENSG00000123136_6 (sequence is synthesized)
cggcctgtgtgcaggaagttcatgcaggatcccatggaggtgtttgtggacgacgagaccaagctcacgctgcacggcctgcagcagtactacgtcaaactcaaagacagtgagaagaac

SEQ ID NO: 249493 - DNA, 120 bp, Artificial Sequence
  ENSG00000123136_7 (sequence is synthesized)
cgcaagctctttgatctcttggatgtgctggagtttaaccaggtgataatcttcgtcaagtcagtgcagcgctgcatggccctggcccagctcctcgtggagcagaacttcccggccatc

SEQ ID NO: 249494 - DNA, 120 bp, Artificial Sequence
  ENSG00000123136_8 (sequence is synthesized)
gccatccaccggggcatggcccaggaggagcgcctgtcacgctatcagcagttcaaggatttccagcggcggatcctggtggccaccaatctgtttggccgggggatggacatcgagcga

SEQ ID NO: 249495 - DNA, 120 bp, Artificial Sequence
  ENSG00000123136_9 (sequence is synthesized)
gtcaacatcgtctttaactacgacatgcctgaggactcggacacctacctgcaccgggtggcccgggcgggtcgctttggcaccaaaggcctagccatcacttttgtgtctgacgagaat

SEQ ID NO: 249496 - DNA, 120 bp, Artificial Sequence
  ENSG00000123136_10 (sequence is synthesized)
gatgccaaaatcctcaatgacgtccaggaccggtttgaagttaatgtggcagaacttccagaggaaatcgacatctccacatacatcgagcagagccggtaaccaccacgtgccagagcc

SEQ ID NO: 249497 - DNA, 120 bp, Artificial Sequence
  ENSG00000123136_11 (sequence is synthesized)
gcccacccggagccgcccgcatgcagcttcacctcccctttccaggcgccactgttgagaagctagagattgtatgagaataaacttgttattatggaagcctggctcccaccccatcta

SEQ ID NO: 249498 - DNA, 120 bp, Artificial Sequence
  ENSG00000123136_12 (sequence is synthesized)
accctgagcaaggacatccggcctgtgtgcaggaagttcatgcaggatgtcctctgggaagtgtcgcacaaaggagtcgcccactggaaggttctgggcaggcgagatgcccagaggtga

SEQ ID NO: 249499 - DNA, 120 bp, Artificial Sequence
  ENSG00000123136_13 (sequence is synthesized)
tgcgctaggggtgggccagccgttggcgcgcggtgctcggggctcggggcccgcttctcggaggggctgtcatggcctacggcgctccgagccccacttggagtctgtcagttcgtccga

SEQ ID NO: 249500 - DNA, 120 bp, Artificial Sequence
  ENSG00000123136_14 (sequence is synthesized)
atagaccccgcggcggcctggggccatttggagagggacgagggggttcaagtgattctcctgcctccaagtagctgggattacagcatcatggcagaacaggatgtggaaaacgatctt

SEQ ID NO: 249501 - DNA, 120 bp, Artificial Sequence
  ENSG00000123136_15 (sequence is synthesized)
ggacatccggcctgtgtgcaggaagttcatgcaggatgtgagtagggcgagagtggcagctttggccttccccaggggcctggagcctggggccccaggacacccgcacggcccacatgg

SEQ ID NO: 249502 - DNA, 120 bp, Artificial Sequence
  ENSG00000123136_16 (sequence is synthesized)
cacggaggatgctgggatgctgggagccggcggagcctcctttcctcccctcggtcttgtcaaactgggagtcaagcttggtccacacctgagtcgggccagagcttacatccagctttt

SEQ ID NO: 249503 - DNA, 120 bp, Artificial Sequence
  ENSG00000123136_17 (sequence is synthesized)
cctgcgggccatcgtggactgtggctttgagcatccttctgagggtacgccttctgggtgttatcctcttgcccaggtcctcaccaagacaagaccagccctgcccgcccagagcggtgc

SEQ ID NO: 249504 - DNA, 120 bp, Artificial Sequence
  ENSG00000123136_18 (sequence is synthesized)
cgcctccagtttgccgtgggtgagggaggggcccgtctgtcccgcggatcagttgtgcccagcggggcctgtggctgccctcggcagtggggcgttctgctttgaccaggcggatacccc

SEQ ID NO: 249505 - DNA, 120 bp, Artificial Sequence
  ENSG00000123136_19 (sequence is synthesized)
tgccctcactgtgggcccccggtcaactggtgaggatcctgcacgggggtgcatccaggttctcgtccctcacgctctgcttctcctgcagtccagcatgagtgcattccccaggccatc

SEQ ID NO: 249506 - DNA, 120 bp, Artificial Sequence
  ENSG00000123136_20 (sequence is synthesized)
ctttgttagcctcggctctggcccagccagcatttaccaagcttggcaggggcagctgcctttgaggtttgcggtggtttttgctccttaaaagcctgatgaattatgcatggctcccag

SEQ ID NO: 249507 - DNA, 120 bp, Artificial Sequence
  ENSG00000123136_21 (sequence is synthesized)
gggcctgcgcaggtcccagcctggggctgcctttgagtggagccccgggaggctctcaggcctgccttggtcccctgaggcctcctgttcgcaggtgctgggccgtgcaggttggggcct

SEQ ID NO: 249508 - DNA, 120 bp, Artificial Sequence
  ENSG00000123136_22 (sequence is synthesized)
ggctcgaggcgcacgggcacggctgctccgcgccagcgtgtaagtggattgcagctcctcccgcgcctgcgctcgctggccaccccccagcccctcaggcaccaggactggccactcccg

SEQ ID NO: 249509 - DNA, 120 bp, Artificial Sequence
  ENSG00000123136_23 (sequence is synthesized)
gtcttcgtgctggccaccctacagcagattgagcctgtcaacggacaggtgggtgggctcctcccttcctggccccaccctgcctgtggcggcggaagtagagtaggctggatggggtgg

SEQ ID NO: 249510 - DNA, 73 bp, Artificial Sequence
  ENSG00000123136_24 (sequence is synthesized)
tgcctgtggcggcggaagtagagtaggctggatggggtggctcacacctgttagcccagtgctttgggaatgc

SEQ ID NO: 249511 - DNA, 120 bp, Artificial Sequence
  ENSG00000123136_25 (sequence is synthesized)
gggccatttggagagggacgaggggggcagggctgactggaagcggtgctgttttagttggggctgtgaggaaatgcctttctggagcaaaggaggcccaaaagaagtgggggatttgtg

SEQ ID NO: 249512 - DNA, 120 bp, Artificial Sequence
  ENSG00000123136_26 (sequence is synthesized)
ggggctcctgtggtgatcttggggaaagctctgctgctggcagagggatgtgctgtttctgagcccgagccgaatgggaccacggggcccaagcaagcccccgtccctcctggacgtaaa

SEQ ID NO: 249513 - DNA, 120 bp, Artificial Sequence
  ENSG00000123136_27 (sequence is synthesized)
ggcatgcacacatacctctgggagtatgaggcttctgccacctgttgggttggttccaggccccgcctgccctcagtgagccccgacagggccggtgggagatgggcttgtgtcctggga

SEQ ID NO: 249514 - DNA, 120 bp, Artificial Sequence
  ENSG00000123136_28 (sequence is synthesized)
gtcacggtgccactggctccctggcacaggttgggaggggtctgggtctggtctggggtgggggtcctgcatggcagacgctcatgcccacccatgtcttgccctccccacctagacatg

SEQ ID NO: 249515 - DNA, 120 bp, Artificial Sequence
  ENSG00000123143_0 (sequence is synthesized)
aagagggcggggccctcagcccggacccaggatggcggaggccaataacccctcggagcaggagctggagagtgagcctcgcagctggtccctgctagagcagctgggcctggccggggc

SEQ ID NO: 249516 - DNA, 120 bp, Artificial Sequence
  ENSG00000123143_1 (sequence is synthesized)
agacctggcggcccccggggtacagcagcagctggagctggagcgggagcggctgcggcgggaaatccgcaaggagctgaagctgaaggagggtgctgagaacctgcggcgggccaccac

SEQ ID NO: 249517 - DNA, 120 bp, Artificial Sequence
  ENSG00000123143_2 (sequence is synthesized)
tgacctgggccgcagcctgggccccgtagagctgctgctgcggggctcctcgcgccgcctcgacctgctgcaccagcagctgcaggagctgcacgcccacgtggtgcttcccgacccggc

SEQ ID NO: 249518 - DNA, 120 bp, Artificial Sequence
  ENSG00000123143_3 (sequence is synthesized)
ggccacccacgatggcccccagtcccctggtgcgggtggccccacctgctcggccaccaacctgagccgcgtggcgggcctggagaagcagttggccattgagctgaaggtgaagcaggg

SEQ ID NO: 249519 - DNA, 120 bp, Artificial Sequence
  ENSG00000123143_4 (sequence is synthesized)
ggcggagaacatgatccagacctacagcaatggcagcaccaaggaccggaagctgctgctgacagcccagcagatgttgcaggacagtaagaccaagattgacatcatccgcatgcaact

SEQ ID NO: 249520 - DNA, 120 bp, Artificial Sequence
  ENSG00000123143_5 (sequence is synthesized)
ccgccgggcgctgcaggccggccagctggagaaccaggcagccccggatgacacccaagggagtcctgacctgggggctgtggagctgcgcatcgaagagctgcggcaccacttccgagt

SEQ ID NO: 249521 - DNA, 120 bp, Artificial Sequence
  ENSG00000123143_6 (sequence is synthesized)
ggagcacgcggtggccgagggtgccaagaacgtactgcgcctgctcagcgctgccaaggccccggaccgcaaggcagtcagcgaggcccaggagaaattaacagaatccaaccagaagct

SEQ ID NO: 249522 - DNA, 120 bp, Artificial Sequence
  ENSG00000123143_7 (sequence is synthesized)
ggggctgctgcgggaggctctggagcggagacttggggagctgcccgccgaccaccccaaggggcggctgctgcgagaagagctcgctgcggcctcctccgctgccttcagcacccgcct

SEQ ID NO: 249523 - DNA, 120 bp, Artificial Sequence
  ENSG00000123143_8 (sequence is synthesized)
ggccgggccctttcccgccacgcactacagcaccctgtgcaagcccgcgccgctcacagggaccctggaggtacgagtggtgggctgcagagacctcccagagaccatcccgtggaaccc

SEQ ID NO: 249524 - DNA, 120 bp, Artificial Sequence
  ENSG00000123143_9 (sequence is synthesized)
taccccctcaatggggggacctgggaccccagacagccgcccccccttcctgagccgcccagcccggggcctttacagccgaagcggaagcctcagtggccggagcagcctcaaagcaga

SEQ ID NO: 249525 - DNA, 120 bp, Artificial Sequence
  ENSG00000123143_10 (sequence is synthesized)
agccgagaacaccagtgaagtcagcactgtgcttaagctggataacacagtggtggggcagacgtcttggaagccatgtggccccaatgcctgggaccagagcttcactctggagctgga

SEQ ID NO: 249526 - DNA, 120 bp, Artificial Sequence
  ENSG00000123143_11 (sequence is synthesized)
aagggcacgggaactggagttggctgtgttctggcgggaccagcggggcctgtgtgccctcaaattcctgaagttggaggatttcttggacaatgagaggcatgaggtgcagctggacat

SEQ ID NO: 249527 - DNA, 120 bp, Artificial Sequence
  ENSG00000123143_12 (sequence is synthesized)
agaaaattttctccaagcagcaagggaaggcgttccagcgtgctaggcagatgaacatcgatgtcgccacgtgggtgcggctgctccggaggctcatccccaatgccacgggcacaggca

SEQ ID NO: 249528 - DNA, 120 bp, Artificial Sequence
  ENSG00000123143_13 (sequence is synthesized)
cctttagccctggggcttctccaggatccgaggcccggaccacgggtgacatatcggtggagaagctgaacctcggcactgactcggacagctcacctcagaagagctcgcgggatcctc

SEQ ID NO: 249529 - DNA, 120 bp, Artificial Sequence
  ENSG00000123143_14 (sequence is synthesized)
cttccagcccatcgagcctgagctcccccatccaggaatccactgctcccgagctgccttcggagacccaggagaccccaggccccgccctgtgcagccctctgaggaagtcacctctga

SEQ ID NO: 249530 - DNA, 120 bp, Artificial Sequence
  ENSG00000123143_15 (sequence is synthesized)
ccctcgaagatttcaagttcctggcggtgctgggccggggtcattttgggaaggtgctcctctccgaattccggcccagtggggagctgttcgccatcaaggctctgaagaaaggggaca

SEQ ID NO: 249531 - DNA, 120 bp, Artificial Sequence
  ENSG00000123143_16 (sequence is synthesized)
ttgtggcccgagacgaggtggagagcctgatgtgtgagaagcggatattggcggcagtgaccagtgcgggacaccccttcctggtgaacctcttcggctgtttccagacaccggagcacg

SEQ ID NO: 249532 - DNA, 120 bp, Artificial Sequence
  ENSG00000123143_17 (sequence is synthesized)
tgtgcttcgtgatggagtactcggccggtggggacctgatgctgcacatccacagcgacgtgttctctgagccccgtgccatcttttattccgcctgcgtggtgctgggcctacagtttc

SEQ ID NO: 249533 - DNA, 120 bp, Artificial Sequence
  ENSG00000123143_18 (sequence is synthesized)
ttcacgaacacaagatcgtctacagggacctgaagttggacaatttgctcctggacaccgagggctacgtcaagatcgcagactttggcctctgcaaggaggggatgggctatggggacc

SEQ ID NO: 249534 - DNA, 120 bp, Artificial Sequence
  ENSG00000123143_19 (sequence is synthesized)
ggaccagcacattctgtgggaccccggagttcctggcccctgaggtgctgacggacacgtcgtacacgcgagctgtggactggtggggactgggtgtgctgctctacgagatgctggttg

SEQ ID NO: 249535 - DNA, 120 bp, Artificial Sequence
  ENSG00000123143_20 (sequence is synthesized)
gcgagtccccattcccaggggatgatgaggaggaggtcttcgacagcatcgtcaacgacgaggttcgctacccccgcttcctgtcggccgaagccatcggcatcatgagaaggctgcttc

SEQ ID NO: 249536 - DNA, 120 bp, Artificial Sequence
  ENSG00000123143_21 (sequence is synthesized)
ggaggaacccagagcggaggctgggatctagcgagagagatgcagaagatgtgaagaaacagcccttcttcaggactctgggctgggaagccctgttggcccggcgcctgccaccgccct

SEQ ID NO: 249537 - DNA, 120 bp, Artificial Sequence
  ENSG00000123143_22 (sequence is synthesized)
ttgtgcccacgctgtccggccgcaccgacgtcagcaacttcgacgaggagttcaccggggaggcccccacactgagcccgccccgcgacgcgcggcccctcacagccgcggagcaggcag

SEQ ID NO: 249538 - DNA, 120 bp, Artificial Sequence
  ENSG00000123143_23 (sequence is synthesized)
ccttcctggacttcgacttcgtggccgggggctgctagccccctcccctgcccctgcccctgcccctgcccgagagctcttagtttttaaaaaggcctttgggatttgccggatccttgc

SEQ ID NO: 249539 - DNA, 120 bp, Artificial Sequence
  ENSG00000123143_24 (sequence is synthesized)
aaaggcctccgccgctctcggcttgaacgcgtggaaccgttctcctcgggttcccgcgcgctccaatgggggacccctcggcagcgtgcggtcgtctcgggacccggaaagaggaaagag

SEQ ID NO: 249540 - DNA, 120 bp, Artificial Sequence
  ENSG00000123143_25 (sequence is synthesized)
cacgcgcgctcctctggccgcccctccctccgcgcggggacccctggcgggcggcaggaggacatggccagcgacgccgtgcagtcctgctgatggcctgccggccttgccgaggagctg

SEQ ID NO: 249541 - DNA, 120 bp, Artificial Sequence
  ENSG00000123143_26 (sequence is synthesized)
ggcagggaattgggagaccccccaggtccctggctggccgctaaaaccacccctgcccactgtggttccaggtgctcctctccgaattccggcccagtggggagctgttcgccatcaagg

SEQ ID NO: 249542 - DNA, 70 bp, Artificial Sequence
  ENSG00000123143_27 (sequence is synthesized)
gaacccagagcggaggctgggatctagcgagagagatgcagaagatgtgaagaaacagcccttcttcagg

SEQ ID NO: 249543 - DNA, 120 bp, Artificial Sequence
  ENSG00000123143_28 (sequence is synthesized)
tgggattacaggcctgagccaccacgccgggcctccacttttcctaatccggcttctccaccaggctctcgcagactctgggctgggaagccctgttggcccggcgcctgccaccgccct

SEQ ID NO: 249544 - DNA, 120 bp, Artificial Sequence
  ENSG00000123143_29 (sequence is synthesized)
aatctgatgccacgtgaccagaaccccacttgggcgcgcacacctgtgctcccaggggcttccttaccaagctgtctgcctgcaggtgggcagagggtcctcacattttggtcccttccc

SEQ ID NO: 249545 - DNA, 120 bp, Artificial Sequence
  ENSG00000123143_30 (sequence is synthesized)
accccagcccgggcccctgcctcccctacagcatctgacacttagtccccccgagaggctggcagcctgcttctcacccctccaccctcaggccttgcttccctcagcctcccagagctt

SEQ ID NO: 249546 - DNA, 120 bp, Artificial Sequence
  ENSG00000123143_31 (sequence is synthesized)
tggggagactggggggcttttgaggatgtggaagccaggcttatgtgaccctccctccttgcagggtggccccacccctctcagcagcctctctctctctgcagcttttattccgcctgc

SEQ ID NO: 249547 - DNA, 120 bp, Artificial Sequence
  ENSG00000123143_32 (sequence is synthesized)
gtggtgctgggcctacagtttcttcacgaacacaagatcgtctacaggtgtgtgcgtgtgtgcatgcatgtgcacactgcccgttgtggggacaggacccagacccccgctcatccctct

SEQ ID NO: 249548 - DNA, 120 bp, Artificial Sequence
  ENSG00000123143_33 (sequence is synthesized)
gtgagactcagcctgggggtggggcctaggcctgcacttgggaaggggcaagcctggtcccgcccccagcccccacacttcccaccacaggcccaggagaaattaacagaatccaaccag

SEQ ID NO: 249549 - DNA, 120 bp, Artificial Sequence
  ENSG00000123144_0 (sequence is synthesized)
gtcctttgcgcggcacctggcgacaaaatggctgcccgagggagacgggcggagcctcagggccgggaggctccgggccccgcgggcggtggcggtggcgggagccgttgggctgagtcg

SEQ ID NO: 249550 - DNA, 120 bp, Artificial Sequence
  ENSG00000123144_1 (sequence is synthesized)
ggatcggggacgtcgcccgagagcggggacgaggaggtgtcgggcgcgggttcgagcccggtgtcgggcggcgtgaacttgttcgccaacgacggcagcttcctggagctgttcaagcgg

SEQ ID NO: 249551 - DNA, 120 bp, Artificial Sequence
  ENSG00000123144_2 (sequence is synthesized)
aagatggaggaggagcagcggcagcggcaggaggagccgcccccgggtccgcagcgacccgaccagtcggccgccgccgctggccccggggatccgaagaggaagggcggtccgggctcc

SEQ ID NO: 249552 - DNA, 120 bp, Artificial Sequence
  ENSG00000123144_3 (sequence is synthesized)
ctagccctcaagacgggaatagtagccaagaagcagaagacggaggatgaggtattaacaagtaaaggtgacgcgtgggccaagtacatggcagaagtgaaaaagtacaaagctcaccag

SEQ ID NO: 249553 - DNA, 120 bp, Artificial Sequence
  ENSG00000123144_4 (sequence is synthesized)
tgcggtgacgatgataaaactcggcccctggtgaaatgacgcccctcccccacctgcccatggcctgggactctctgcgatgtacataactatttaatgcagcggcagcggcgacagcct

SEQ ID NO: 249554 - DNA, 120 bp, Artificial Sequence
  ENSG00000123144_5 (sequence is synthesized)
tccctgagaggacttaaaagcagaaggaaaccgagatgcttcccgcagccgtggacgattctccaggactctttttttaccttgagcacttgcctcgtgagacttcatagaacagtggtt

SEQ ID NO: 249555 - DNA, 120 bp, Artificial Sequence
  ENSG00000123144_6 (sequence is synthesized)
tactgtcccccccttctcacctcctcattctctctggctctttctgtcttcctcttctcaccctcctccctccccttagccatcacttctgggaagtaaagaacttgacttagtgccgga

SEQ ID NO: 249556 - DNA, 120 bp, Artificial Sequence
  ENSG00000123144_7 (sequence is synthesized)
gagctgggcgcggcgtcaggacgggccaccaggccgggctaggaaggtgtagtgggcctcagcgccgccaagggcggtcccggctcctgtaaccgttgcagtcttctgtcccttcaccca

SEQ ID NO: 249557 - DNA, 120 bp, Artificial Sequence
  ENSG00000123144_8 (sequence is synthesized)
accgcgcctggtcaaaaagggggtggttctaactttcatcttagggtagctgtgaaaatgaaaggagatgatacatccacagcacttggcacagggcttggcatacagtacatgctcaat

SEQ ID NO: 249558 - DNA, 120 bp, Artificial Sequence
  ENSG00000123144_9 (sequence is synthesized)
aaagggagctgttgccacctcttgtggtccctgctagggagggtgaggccttggcgtggaaagtgagaacagagctggtccctactgaggtggacactcttcttgctccctgggagggca

SEQ ID NO: 249559 - DNA, 120 bp, Artificial Sequence
  ENSG00000123146_0 (sequence is synthesized)
acagctgcctagcctgtggagacgggacagccctgtcccactcactctttcccctgccgctcctgccggcagctccaaccatgggaggccgcgtctttctcgcattctgtgtctggctga

SEQ ID NO: 249560 - DNA, 120 bp, Artificial Sequence
  ENSG00000123146_1 (sequence is synthesized)
ctctgccgggagctgaaacccaggactccaggggctgtgcccggtggtgccctcagaactcctcgtgtgtcaatgccaccgcctgtcgctgcaatccagggttcagctctttttctgaga

SEQ ID NO: 249561 - DNA, 120 bp, Artificial Sequence
  ENSG00000123146_2 (sequence is synthesized)
tcatcaccaccccgacggagacttgtgacgacatcaacgagtgtgcaacaccgtcgaaagtgtcatgcggaaaattctcggactgctggaacacagaggggagctacgactgcgtgtgca

SEQ ID NO: 249562 - DNA, 120 bp, Artificial Sequence
  ENSG00000123146_3 (sequence is synthesized)
gcccgggatatgagcctgtttctggggcaaaaacattcaagaatgagagcgagaacacctgtcaagatgtggacgaatgtcagcagaacccaaggctctgtaaaagctacggcacctgcg

SEQ ID NO: 249563 - DNA, 120 bp, Artificial Sequence
  ENSG00000123146_4 (sequence is synthesized)
tcaacacccttggcagctatacctgccagtgcctgcctggcttcaagttcatacctgaggatccgaaggtctgcacagatgtgaatgaatgcacctccggacaaaacccgtgccacagct

SEQ ID NO: 249564 - DNA, 120 bp, Artificial Sequence
  ENSG00000123146_5 (sequence is synthesized)
ccacccactgcctcaacaacgtgggcagctatcagtgccgctgccgcccgggctggcaaccgattccggggtcccccaatggcccaaacaataccgtctgtgaagatgtggacgagtgca

SEQ ID NO: 249565 - DNA, 120 bp, Artificial Sequence
  ENSG00000123146_6 (sequence is synthesized)
gctccgggcagcatcagtgtgacagctccaccgtctgcttcaacaccgtgggttcatacagctgccgctgccgcccaggctggaagcccagacacggaatcccgaataaccaaaaggaca

SEQ ID NO: 249566 - DNA, 120 bp, Artificial Sequence
  ENSG00000123146_7 (sequence is synthesized)
ctgtctgtgaagatatgactttctccacctggaccccgccccctggagtccacagccagacgctttcccgattcttcgacaaagtccaggacctgggcagagactccaagacaagctcag

SEQ ID NO: 249567 - DNA, 120 bp, Artificial Sequence
  ENSG00000123146_8 (sequence is synthesized)
ccgaggtcaccatccagaatgtcatcaaattggtggatgaactgatggaagctcctggagacgtagaggccctggcgccacctgtccggcacctcatagccacccagctgctctcaaacc

SEQ ID NO: 249568 - DNA, 120 bp, Artificial Sequence
  ENSG00000123146_9 (sequence is synthesized)
ttgaagatatcatgaggatcctggccaagagcctgcctaaaggccccttcacctacatttccccttcgaacacagagctgaccctgatgatccaggagcggggggacaagaacgtcacta

SEQ ID NO: 249569 - DNA, 120 bp, Artificial Sequence
  ENSG00000123146_10 (sequence is synthesized)
tgggtcagagcagcgcacgcatgaagctgaattgggctgtggcagctggagccgaggatccaggccccgccgtggcgggcatcctctccatccagaacatgacgacattgctggccaatg

SEQ ID NO: 249570 - DNA, 120 bp, Artificial Sequence
  ENSG00000123146_11 (sequence is synthesized)
cctccttgaacctgcattccaagaagcaagccgaactggaggagatatatgaaagcagcatccgtggtgtccaactcagacgcctctctgccgtcaactccatctttctgagccacaaca

SEQ ID NO: 249571 - DNA, 120 bp, Artificial Sequence
  ENSG00000123146_12 (sequence is synthesized)
acaccaaggaactcaactcccccatccttttcgccttctcccaccttgagtcctccgatggggaggcgggaagagaccctcctgccaaggacgtgatgcctgggccacggcaggagctgc

SEQ ID NO: 249572 - DNA, 120 bp, Artificial Sequence
  ENSG00000123146_13 (sequence is synthesized)
cagcaagaacggcagcaccacctgccaatgcagccacctgagcagctttgcgatccttatggctcattatgacgtggaggactggaagctgaccctgatcaccagggtgggactggcgct

SEQ ID NO: 249573 - DNA, 120 bp, Artificial Sequence
  ENSG00000123146_14 (sequence is synthesized)
gtcactcttctgcctgctgctgtgcatcctcactttcctgctggtgcggcccatccagggctcgcgcaccaccatacacctgcacctctgcatctgcctcttcgtgggctccaccatctt

SEQ ID NO: 249574 - DNA, 120 bp, Artificial Sequence
  ENSG00000123146_15 (sequence is synthesized)
cctggccggcatcgagaacgaaggcggccaggtggggctgcgctgccgcctggtggccgggctgctgcactactgtttcctggccgccttctgctggatgagcctcgaaggcctggagct

SEQ ID NO: 249575 - DNA, 120 bp, Artificial Sequence
  ENSG00000123146_16 (sequence is synthesized)
ctactttcttgtggtgcgcgtgttccaaggccagggcctgagtacgcgctggctctgcctgatcggctatggcgtgcccctgctcatcgtgggcgtctcggctgccatctacagcaaggg

SEQ ID NO: 249576 - DNA, 120 bp, Artificial Sequence
  ENSG00000123146_17 (sequence is synthesized)
ctacggccgccccagatactgctggttggactttgagcagggcttcctctggagcttcttgggacctgtgaccttcatcattttgtgcaatgctgtcattttcgtgactaccgtctggaa

SEQ ID NO: 249577 - DNA, 120 bp, Artificial Sequence
  ENSG00000123146_18 (sequence is synthesized)
gctcactcagaagttttctgaaatcaatccagacatgaagaaattaaagaaggcgagggcgctgaccatcacggccatcgcgcagctcttcctgttgggctgcacctgggtctttggcct

SEQ ID NO: 249578 - DNA, 120 bp, Artificial Sequence
  ENSG00000123146_19 (sequence is synthesized)
gttcatcttcgacgatcggagcttggtgctgacctatgtgtttaccatcctcaactgcctgcagggcgccttcctctacctgctgcactgcctgctcaacaagaaggttcgggaagaata

SEQ ID NO: 249579 - DNA, 120 bp, Artificial Sequence
  ENSG00000123146_20 (sequence is synthesized)
ccggaagtgggcctgcctagttgctggggggagcaagtactcagaattcacctccaccacgtctggcactggccacaatcagacccgggccctcagggcatcagagtccggcatatgaag

SEQ ID NO: 249580 - DNA, 120 bp, Artificial Sequence
  ENSG00000123146_21 (sequence is synthesized)
gcgcatggttctggacggcccagcagctcctgtggccacagcagctttgtacacgaagaccatccatcctcccttcgtccaccactctactccctccaccctccctccctgatcccgtgt

SEQ ID NO: 249581 - DNA, 120 bp, Artificial Sequence
  ENSG00000123146_22 (sequence is synthesized)
gccaccaggagggagtggcagctatagtctggcaccaaagtccaggacacccagtggggtggagtcggagccactggtcctgctgctggctgcctctctgctccaccttgtgacccaggg

SEQ ID NO: 249582 - DNA, 120 bp, Artificial Sequence
  ENSG00000123146_23 (sequence is synthesized)
tggggacaggggctggcccagggctgcaatgcagcatgttgccctggcacctgtggccagtactcgggacagactaagggcgcttgtcccatcctggacttttcctctcatgtctttgct

SEQ ID NO: 249583 - DNA, 120 bp, Artificial Sequence
  ENSG00000123146_24 (sequence is synthesized)
gcagaactgaagagactaggcgctggggctcagcttccctcttaagctaagactgatgtcagaggccccatggcgaggccccttggggccactgcctgaggctcacggtacagaggcctg

SEQ ID NO: 249584 - DNA, 120 bp, Artificial Sequence
  ENSG00000123146_25 (sequence is synthesized)
ccctgcctggccgggcaggaggttctcactgttgtgaaggttgtagacgttgtgtaatgtgtttttatctgttaaaatttttcagtgttgacacttaaaattaaacacatgcatacagaa

SEQ ID NO: 249585 - DNA, 120 bp, Artificial Sequence
  ENSG00000123146_26 (sequence is synthesized)
gctgccgctgccgcccaggctggaagcccagacacggaatcccgaataaccaaaaggacactgtctgtgaagacgctttcccgattcttcgacaaagtccaggacctgggcagagactcc

SEQ ID NO: 249586 - DNA, 120 bp, Artificial Sequence
  ENSG00000123146_27 (sequence is synthesized)
ggggaccccaggacagtgtagaatcagctagcggaggcttccatgtggccagagagagtgcccaacccaagcaggggcctctagtcagagacacacatgcgcataacatacacacaccac

SEQ ID NO: 249587 - DNA, 120 bp, Artificial Sequence
  ENSG00000123146_28 (sequence is synthesized)
agaaagatcagaaagatccaggaggtctgctctgtgcggtgaagcttctcttcttggcacctgcctggcatcggaagagggccccttctccctccctgggcttttatgtggacactcatt

SEQ ID NO: 249588 - DNA, 120 bp, Artificial Sequence
  ENSG00000123146_29 (sequence is synthesized)
gcgagaacacctgtcaagtgctttgggaggctgaggcgggaggatctcttgaggccaggagttcaagaccagcccatagcaacatagcaagaccccacccctataaaaggggaggcgaag

SEQ ID NO: 249589 - DNA, 120 bp, Artificial Sequence
  ENSG00000123146_30 (sequence is synthesized)
agagcagccagccccaacacagaggccaaagggttcgtcagagccacatggtggaaactctagcagagggtttttgaaagcaggttgcacttcattcttactgagtgcacgtgtgtgtgt

SEQ ID NO: 249590 - DNA, 120 bp, Artificial Sequence
  ENSG00000123146_31 (sequence is synthesized)
gtgtgtgtgtgtgtgtgtgtgtatgcagcgcccctgggtctgtgtttttattgcactttcctgctggcttccagctgcaccgccagttccggggagggccctgggccagcggctgtccgc

SEQ ID NO: 249591 - DNA, 120 bp, Artificial Sequence
  ENSG00000123146_32 (sequence is synthesized)
gcgacccacaaacatctgatcacatgttcaacggcgcccacacaaaccaagcagaatgagcgctggaggcacctggctgtgccaggcgttcgttcattcttctgaggctagatgagaaaa

SEQ ID NO: 249592 - DNA, 120 bp, Artificial Sequence
  ENSG00000123146_33 (sequence is synthesized)
gctgccgctgccgcccaggctggaagcccagacacggaatcccgaataaccaaaaggacactgtctgtgaaggtatgacctggccctagaagctccccacccccagcacacacactgaca

SEQ ID NO: 249593 - DNA, 120 bp, Artificial Sequence
  ENSG00000123146_34 (sequence is synthesized)
aggtaagaaccaccccacgtcctctgactttccatccatgaggtttggggtcaccagagccattctggcagcatccagagagcagggccttggttgtagggtcagtgcctggcgtctgag

SEQ ID NO: 249594 - DNA, 120 bp, Artificial Sequence
  ENSG00000123146_35 (sequence is synthesized)
cctgctcatctgcacggggcccacctgctgtgcccaggcctctccacgcttccataacccagcgtccaccactccaaggggggcactaatgccgggaggaatgagctgggggcacagaca

SEQ ID NO: 249595 - DNA, 120 bp, Artificial Sequence
  ENSG00000123146_36 (sequence is synthesized)
gctgcaaccagacaggcagctagttctccatggagccctactggttgctcagatatatctgcatggttgcacagcccaggtgtccccacgtcacacccttcgcagcctcttcctttggcc

SEQ ID NO: 249596 - DNA, 80 bp, Artificial Sequence
  ENSG00000123146_37 (sequence is synthesized)
ctgtccatcccgtaccagttgtgagatgtcaactaaaagctccccatggagagcattccaagggggcaccacttgccctt

SEQ ID NO: 249597 - DNA, 84 bp, Artificial Sequence
  ENSG00000123146_38 (sequence is synthesized)
gtggcacaatctcagctagtgaggcgagattacaggcgtgcaccaccatgcctgagtaatttttggtatttttagtagagacag

SEQ ID NO: 249598 - DNA, 120 bp, Artificial Sequence
  ENSG00000123146_39 (sequence is synthesized)
ctcctgacctcaggtgatctgccccccctcagcctctcaaagtgctaggattagaggcatgagccaccacacccagcctggagcaccactttctgtacgtgacttcagtaggatccatcg

SEQ ID NO: 249599 - DNA, 120 bp, Artificial Sequence
  ENSG00000123146_40 (sequence is synthesized)
ttaagctgggccttgtcgaaaactgcaattaaccaggcagagaaggggggcgcctgtggtccaggccaaaggcccagcaagcacaaaaatgtgaaatccctagactccccttccagctgg

SEQ ID NO: 249600 - DNA, 120 bp, Artificial Sequence
  ENSG00000123146_41 (sequence is synthesized)
agatgcttccgtgccaggaaacatggcggaccctcagccctgaaagctgctcacagctacgggcatccttcaccctctccttcctcttgcagatgtggacgaatgtcagcagaacccaag

SEQ ID NO: 249601 - DNA, 120 bp, Artificial Sequence
  ENSG00000123154_0 (sequence is synthesized)
gcggtctggaggctcacgggagagaggctgtagccctgggcaatcccgggggtcgttacaggaaggtaggaaaatgccaccctcagggcactggttgggctaaaggtgacactggcgtct

SEQ ID NO: 249602 - DNA, 120 bp, Artificial Sequence
  ENSG00000123154_1 (sequence is synthesized)
cacgggctatgaagacggaatgcctcttaatgccggaattccaagacggaatgcctcttaatgccgggcaagtctcacatgaagctactcatcatttgcttcgtgtcctccgagctccga

SEQ ID NO: 249603 - DNA, 120 bp, Artificial Sequence
  ENSG00000123154_2 (sequence is synthesized)
gagttggcaaagctgatgaaggagcagtagacagcgacccaagcacaccacttcagctagggaaagaccgatttaaggctgcaaggaaggagtcctgggagcatggctttccctgagcca

SEQ ID NO: 249604 - DNA, 120 bp, Artificial Sequence
  ENSG00000123154_3 (sequence is synthesized)
aagccgcggcctccagagctgccgcagaaacggttgaagacgctggactgcgggcagggggcagtgcgagccgtacgatttaatgtggatggcaattactgcctgacgtgcggcagtgac

SEQ ID NO: 249605 - DNA, 120 bp, Artificial Sequence
  ENSG00000123154_4 (sequence is synthesized)
aagacgctgaagctgtggaacccgcttcgggggacgctgctgcggacgtacagcggccacggctacgaggtgctggatgcggccggctcctttgacaacagtagtctctgctccggcggc

SEQ ID NO: 249606 - DNA, 120 bp, Artificial Sequence
  ENSG00000123154_5 (sequence is synthesized)
ggggacaaggcggtggttctgtgggatgtggcatcagggcaggtcgtgcgcaaattccggggccacgcagggaaggtgaacacggtgcagtttaatgaagaggccacagttatcctgtcc

SEQ ID NO: 249607 - DNA, 120 bp, Artificial Sequence
  ENSG00000123154_6 (sequence is synthesized)
attccagtatccgctgttgggattgccgctcacggaggcctgagccagtgcagacgctggatgaggccagagatggcgtgtccagtgtgaaggtgtcagaccacgagatcctggcaggct

SEQ ID NO: 249608 - DNA, 120 bp, Artificial Sequence
  ENSG00000123154_7 (sequence is synthesized)
ccgtggatggccgcgtgagacgctatgacctaaggatggggcagctcttctcagactacgtgggcagccccatcacctgcacctgcttcagccgggatgggcagtgcaccctggtgtcca

SEQ ID NO: 249609 - DNA, 120 bp, Artificial Sequence
  ENSG00000123154_8 (sequence is synthesized)
gcctggactccacattgcggctcctggacaaagacacaggggagctgctgggcgagtacaagggccataagaaccaggaatacaagctggactgctgcctgagcgagcgtgacacacatg

SEQ ID NO: 249610 - DNA, 120 bp, Artificial Sequence
  ENSG00000123154_9 (sequence is synthesized)
tggtcagctgttctgaggacgggaaggtgttcttctgggacctggtggagggtgcgctggctctggccctgcctgtgggttccggtgtggtgcagtcgctggcctaccacccaacagagc

SEQ ID NO: 249611 - DNA, 120 bp, Artificial Sequence
  ENSG00000123154_10 (sequence is synthesized)
cctgcctgctgaccgccatgggaggcagcgtccagtgctggcgagaggaggcctatgaggcagaggatggagcaggctgaagccaggggacccaccaacaggaccaaggaccgagacaca

SEQ ID NO: 249612 - DNA, 120 bp, Artificial Sequence
  ENSG00000123154_11 (sequence is synthesized)
gacatggaaggacttcagataccatcttattctagagacgtagctgaccaaaaagtaggggaggggctgggtctgcaaattaataaatagaagagggggtaagaccttcctgggaccgca

SEQ ID NO: 249613 - DNA, 120 bp, Artificial Sequence
  ENSG00000123154_12 (sequence is synthesized)
gccgtacgatttaatggtgagcgccttcgtcttcattccgggtcctcctcccgcctcctgagatcgacggcccagtaacccccgcctggtgttccccagtggatggcaattactgcctga

SEQ ID NO: 249614 - DNA, 120 bp, Artificial Sequence
  ENSG00000123154_13 (sequence is synthesized)
caataactttctcagaaggtgaacacggtgcagtttaatgaagaggccacagttatcctgtccgtatccgctgttgggattgccgctcacggaggcctgagccagtgcagacgctggatg

SEQ ID NO: 249615 - DNA, 120 bp, Artificial Sequence
  ENSG00000123154_14 (sequence is synthesized)
ccctgggcctgagtctcaaggccagagcttcagaattccactcctgtgcactggaagagcaggcccactgggctgggaaggcacagggctgcctggagccatgtgagtgtagtcaaggtt

SEQ ID NO: 249616 - DNA, 120 bp, Artificial Sequence
  ENSG00000123154_15 (sequence is synthesized)
gagatttaggagaagccagaagtcttcctttcaaagggaaaatggggaaaagaacctgaaagcgggcttcaatagttccaacccgatcaccgaaatgccaaaatgatgaacccggaagtg

SEQ ID NO: 249617 - DNA, 120 bp, Artificial Sequence
  ENSG00000123154_16 (sequence is synthesized)
ataaacaggaagtaggtcaggaagaacaataataaggttacacccaagcgtgggtttctaaggcgcggaattttccgtacagaccgatttaaggctgcaaggaaggagtcctgggagcat

SEQ ID NO: 249618 - DNA, 80 bp, Artificial Sequence
  ENSG00000123159_0 (sequence is synthesized)
cggcggcggcggcggcggcggcggcggagcagatcttctggtgaccccacttctcgctgctcatgccgctgggactgggg

SEQ ID NO: 249619 - DNA, 120 bp, Artificial Sequence
  ENSG00000123159_1 (sequence is synthesized)
ctgctcatgccgctgggactggggcggcggaaaaaggcgccccctctagtggaaaatgaggaggctgagccaggccgtggagggctgggcgtgggggagccagggcctctgggcggaggt

SEQ ID NO: 249620 - DNA, 120 bp, Artificial Sequence
  ENSG00000123159_2 (sequence is synthesized)
gggtcggggggcccccaaatgggcttgcccccccctcccccagccctgcggccccgcctcgtgttccacacccagctggcccatggcagtcccactggccgcatcgagggcttcaccaac

SEQ ID NO: 249621 - DNA, 120 bp, Artificial Sequence
  ENSG00000123159_3 (sequence is synthesized)
gtcaaggagctgtatggcaagatcgccgaggccttccgcctgccaactgccgaggtgatgttctgcaccctgaacacccacaaagtggacatggacaagctcctggggggccagatcggg

SEQ ID NO: 249622 - DNA, 120 bp, Artificial Sequence
  ENSG00000123159_4 (sequence is synthesized)
ctggaggacttcatcttcgcccacgtgaaggggcagcgcaaggaggtggaggtgttcaagtcggaggatgcactcgggctcaccatcacggacaacggggctggctacgccttcatcaag

SEQ ID NO: 249623 - DNA, 120 bp, Artificial Sequence
  ENSG00000123159_5 (sequence is synthesized)
cgcatcaaggagggcagcgtgatcgaccacatccacctcatcagcgtgggcgacatgatcgaggccattaacgggcagagcctgctgggctgccggcactacgaggtggcccggctgctc

SEQ ID NO: 249624 - DNA, 120 bp, Artificial Sequence
  ENSG00000123159_6 (sequence is synthesized)
aaggagctgccccgaggccgtaccttcacgctgaagctcacggagcctcgcaaggccttcgacatgatcagccagcgttcagcgggtggccgccctggctctggcccacaactgggcact

SEQ ID NO: 249625 - DNA, 120 bp, Artificial Sequence
  ENSG00000123159_7 (sequence is synthesized)
gagagttacatgggtatcagggacacggagctggcggccaccatggtggagctgggaaaggacaaaaggaacccggatgagctggccgaggccctggacgaacggctgggtgactttgcc

SEQ ID NO: 249626 - DNA, 120 bp, Artificial Sequence
  ENSG00000123159_8 (sequence is synthesized)
ttccctgacgagttcgtctttgacgtctggggcgccattggggacgccaaggtcggccgctactaggactgcccccggaccctgcgatgatgacccgggcgcaacctggtgggggccccc

SEQ ID NO: 249627 - DNA, 120 bp, Artificial Sequence
  ENSG00000123159_9 (sequence is synthesized)
agcagggacactgacgtcaggacccgagcctccagcctgagcctagctcagcagcccaaggacgatggtgaggggaggtggggccaggccccctgccccgctccaatcggtaccatcccc

SEQ ID NO: 249628 - DNA, 120 bp, Artificial Sequence
  ENSG00000123159_10 (sequence is synthesized)
tccctggttcccagtctggccggggtccccggcccccctgtgccctgttccccacctacctcagctgggtcaggcacagggaggggagggatcagccaaattgggcggccacccccgcct

SEQ ID NO: 249629 - DNA, 120 bp, Artificial Sequence
  ENSG00000123159_11 (sequence is synthesized)
ccaccactttccaccatcagctgccaaactggtccctctgtctccctggggccttgggttctgtttgggggtcatgaccttcctagtttcctgacgcagggaatacaggggagagggttg

SEQ ID NO: 249630 - DNA, 120 bp, Artificial Sequence
  ENSG00000123159_12 (sequence is synthesized)
tccttccccccagcaaatgcaataatgccctcacccctcctgagaggagccccctccctgtggagcctgttacctccgcatttgacacgagtctgctgtgaaccccgcaacctcctcccc

SEQ ID NO: 249631 - DNA, 120 bp, Artificial Sequence
  ENSG00000123159_13 (sequence is synthesized)
acctcccatctctccttccaggcccatccctggcccagagcaggagggagggagggacgatggcggtgggtttttgtatctgaatttgctgtcttgaacataaagaatctatctgctgtt

SEQ ID NO: 249632 - DNA, 85 bp, Artificial Sequence
  ENSG00000123159_14 (sequence is synthesized)
gaggcggaggcagcagatgaagaaactgaggccctgtgatgtgaagtgacttgccccccagccacacagctggaccattctggct

SEQ ID NO: 249633 - DNA, 120 bp, Artificial Sequence
  ENSG00000123159_15 (sequence is synthesized)
gtgacttgccccccagccacacagctggaccattctggctgctgtctggacaagaagtcgtagggggtgagggtggaagctgggaaacccacaggaggcaaccacactagtttagatctt

SEQ ID NO: 249634 - DNA, 85 bp, Artificial Sequence
  ENSG00000123159_16 (sequence is synthesized)
acggggaggcggaggcagcaggaccattctggctgctgtctggacaagaagtcgtagggggtgagggtggaagctgggaaaccca

SEQ ID NO: 249635 - DNA, 120 bp, Artificial Sequence
  ENSG00000123159_17 (sequence is synthesized)
ccccgaggccgtaccttcacgctgaagctcacggagcctcgcaaggccttcggtgaggagccgccccctggacctccccagtggcgctgctcgcatgggcgcaggcggtggtgccgggag

SEQ ID NO: 249636 - DNA, 120 bp, Artificial Sequence
  ENSG00000123159_18 (sequence is synthesized)
cggccagcaggtggcgcccaagcctggcctgccgaaagggaaggggttgcagaaagggaaggggttgcagctcctcccgaccccagacggggtgctggcccttggcccagcctgggagaa

SEQ ID NO: 249637 - DNA, 120 bp, Artificial Sequence
  ENSG00000123159_19 (sequence is synthesized)
gggcgggggcgaggaggaagttgccctcacacctagcttccaggggccattagcccagccaagcgccctcagccctggccagccccctatccccaacaggccaggcttgactgctcagtg

SEQ ID NO: 249638 - DNA, 120 bp, Artificial Sequence
  ENSG00000123159_20 (sequence is synthesized)
ccagcccccccacttttccatctggcttcactaactctcaggaatgggccccaggcccctgaggtgggggtgggggactaaatcacttccctgggcaggtagggctggtctgtggcccag

SEQ ID NO: 249639 - DNA, 120 bp, Artificial Sequence
  ENSG00000123159_21 (sequence is synthesized)
cagccatacccccttggccaagaggagacggactcaggcagctggagactcaggctggggtacacctgcttcctgtcccccagcccctgggagcagaagtggcccctccagtctcccctc

SEQ ID NO: 249640 - DNA, 120 bp, Artificial Sequence
  ENSG00000123159_22 (sequence is synthesized)
cagcatttcctattcctggcccccagctgttccccctgctctgccccacatccatgccaggcctgagtcaggattcctgccctcctgggatcaccccggccccagcccccagaaacttgc

SEQ ID NO: 249641 - DNA, 120 bp, Artificial Sequence
  ENSG00000123159_23 (sequence is synthesized)
aagccaggaaggacaagttcctgcccagaacgtgctaaaaccaagcttcccccacactcactcctctcctgcctcccacagacatgatcagccagcgttcagcgggtggccgccctggct

SEQ ID NO: 249642 - DNA, 69 bp, Artificial Sequence
  ENSG00000123159_24 (sequence is synthesized)
ggctagagtgcagtggtgcgatcttgggtcaccgcaacctccacctctcccttctggtgaccccacttc

SEQ ID NO: 249643 - DNA, 85 bp, Artificial Sequence
  ENSG00000123159_25 (sequence is synthesized)
acggggaggcggaggcagcaggtgatgttctgcaccctgaacacccacaaagtggacatggacaagctcctggggggccagatcg

SEQ ID NO: 249644 - DNA, 120 bp, Artificial Sequence
  ENSG00000123159_26 (sequence is synthesized)
gaccattctggctgctgtctggacaagaagtcgtagggggtgagggtggaagctgggaaacccacaggaggcaaccacactagtttagggatgggatttcgacatgttggtcaggcatct

SEQ ID NO: 249645 - DNA, 120 bp, Artificial Sequence
  ENSG00000123159_27 (sequence is synthesized)
acaggcgtgagccaccgcacccagccctattattacttttatataagtgtcctgtcactatacaagagatgaggatttcaaccgaggccaatttgttctctgagtatttccttgggcctg

SEQ ID NO: 249646 - DNA, 120 bp, Artificial Sequence
  ENSG00000123159_28 (sequence is synthesized)
tctctgagtatttccttgggcctgtatggttcgagtagtgtgggaggggcacccaaggcctctgcccaggccctgagccccacttcctgtcctgcagatcttctggtgaccccacttctc

SEQ ID NO: 249647 - DNA, 120 bp, Artificial Sequence
  ENSG00000123159_29 (sequence is synthesized)
gctgagcctgggccccactcagtggtgggggccaatggcctgggctggatgctgagtccccatgaggcactgggaggcttgtgcccctgtgaattgtggggaactggaggccagggctgg

SEQ ID NO: 249648 - DNA, 120 bp, Artificial Sequence
  ENSG00000123159_30 (sequence is synthesized)
atgctgagttcccatcaggcactgggagacctgtgccccagtggattgtgggagctgatggccagggctgcatgctgacatcccatcaggcattaggaggggtgtacccccagtagattg

SEQ ID NO: 249649 - DNA, 120 bp, Artificial Sequence
  ENSG00000123159_31 (sequence is synthesized)
tgcaagactaggggtggatgctgagttcccaacaggcactgagagacctgagctccaatggactgtgggaggccagggctggatggattgattggatggatggattgagaggcctgcatc

SEQ ID NO: 249650 - DNA, 120 bp, Artificial Sequence
  ENSG00000123159_32 (sequence is synthesized)
ccagtcgattgtgcaaaactgacgaccagggctggacgctgagttcccatcaggcgttgggaggcctgcaccccagtagattgtggggagctgatggccacagttaaatgctgagttccc

SEQ ID NO: 249651 - DNA, 120 bp, Artificial Sequence
  ENSG00000123159_33 (sequence is synthesized)
atcagacactgagaggcctgcacctctacagactgtgggagctgatggccagggctggatgctgagttcctgtcaggcattgggaggccagtgccccatgagatggtggaggctagaggc

SEQ ID NO: 249652 - DNA, 120 bp, Artificial Sequence
  ENSG00000123159_34 (sequence is synthesized)
cagatacgagatgcacttctccgtgatgccttggagaaactcaacgctgtgggaggcaggcttgcctggtgccaagcactgtggggatagatgggagggggtcaaggagggcaatagtgg

SEQ ID NO: 249653 - DNA, 120 bp, Artificial Sequence
  ENSG00000123159_35 (sequence is synthesized)
gtttgagcaagaagtagacgcaggggtctccctaagtgggatgagtttctgtgtcctccacaagcatttcctgagcactcactgtgtgccaggctccgttccctgaaagcagcaatgaat

SEQ ID NO: 249654 - DNA, 120 bp, Artificial Sequence
  ENSG00000123159_36 (sequence is synthesized)
tgagttactgggatggaatccccctagtcctctcccagctctctcccttcgccctccagtggtgattagaaaagggggagggagggggaagaggtttcagcgtctcccacccctgcaggt

SEQ ID NO: 249655 - DNA, 120 bp, Artificial Sequence
  ENSG00000123165_0 (sequence is synthesized)
ggagataagattcagaggttgaggatggggtgtcctggtggactgaaggtagcctactagctgtacatgggtgacaacttgaaacttcagaaccctgaagtttaaaaaattctaaaggtg

SEQ ID NO: 249656 - DNA, 120 bp, Artificial Sequence
  ENSG00000123165_1 (sequence is synthesized)
cctgtcatctcagagagtgacgtaagtgttctttctttatttgggggaagtccaggagaacatattacagacatgtttaatccacatgcattagatgttcctgctgtaatttttgacaat

SEQ ID NO: 249657 - DNA, 120 bp, Artificial Sequence
  ENSG00000123165_2 (sequence is synthesized)
ggttcaggactctgcaaagcaggcctgtctggagagattggaccccgccatgtcatcagctccgtcttgggacattgtaaattcaatgtgcctttagcaagacttaatcagaagtacttc

SEQ ID NO: 249658 - DNA, 120 bp, Artificial Sequence
  ENSG00000123165_3 (sequence is synthesized)
gtggggcaagaagccctgtacaagtatgaggccctacatttgcactaccccattgagcgtggactggtaacaggatgggatgacatggagaaactctggaaacatctctttgagcgggag

SEQ ID NO: 249659 - DNA, 120 bp, Artificial Sequence
  ENSG00000123165_4 (sequence is synthesized)
cttggagtaaaacccagccaacagcctgtacttatgaccgagccctctttgaatcctagggaaattcgagaaaagctagcagaaatgatgtttgagaccttcagtgtgcctggtttctac

SEQ ID NO: 249660 - DNA, 120 bp, Artificial Sequence
  ENSG00000123165_5 (sequence is synthesized)
cacgcagtcaccaaactctgtatggcagggagggacatcacagagcacctcacccggctcctctttgctagcgggtttaacttcccttgcatactcaacaaggccgtggtaaataacatc

SEQ ID NO: 249661 - DNA, 120 bp, Artificial Sequence
  ENSG00000123165_6 (sequence is synthesized)
aaagagaagttgtgctacatcgccttggagccagagaaagagctacgcaagagccggggagaggtcctgggagcatacagactgccagatggacatgtcatccactttggggatgagctg

SEQ ID NO: 249662 - DNA, 120 bp, Artificial Sequence
  ENSG00000123165_7 (sequence is synthesized)
taccaagtgcccgaggttctttttgcacctgaccagctgggcatccacagcccaggactctcaaaaatggtctccagcagcatcatgaagtgtgacactgacatccagaataaactttat

SEQ ID NO: 249663 - DNA, 120 bp, Artificial Sequence
  ENSG00000123165_8 (sequence is synthesized)
gcagacattgtactctccgggggcaccactctcctccctgggctggaggaaaggctcatgaaggaagtggaacagctggcttccaaaggtactcccatcaagatcacagcttctcctgat

SEQ ID NO: 249664 - DNA, 120 bp, Artificial Sequence
  ENSG00000123165_9 (sequence is synthesized)
agatgcttctctgcatggattggtgcatccatcatgacctctatgagcagtttcaagcagatgtgggtcacctcggcagacttcaaggagtatgggacatctgtggttcaaagaaggtgc

SEQ ID NO: 249665 - DNA, 120 bp, Artificial Sequence
  ENSG00000123165_10 (sequence is synthesized)
ttttaaagatccttgagcagaggagacatcttgaagtgtcagattacaggagtaccagtgggagatggcattttcttctgggcttcagcatgatgttcaataaaagttttgccatttcaa

SEQ ID NO: 249666 - DNA, 120 bp, Artificial Sequence
  ENSG00000123171_0 (sequence is synthesized)
aagtcaaagattgaagaggaactctttcaaacctttcaagtgccccctcctttccttaaagtcttttataggggtccccttcttggccatctccatcctgtgagtcaggactgaaagggc

SEQ ID NO: 249667 - DNA, 120 bp, Artificial Sequence
  ENSG00000123171_1 (sequence is synthesized)
acagacaggtcactgccagcattgttggggcaagcctgcaagcacgcatcactggggatctgacatgacaatggccgcctgccccctctgagggctacaggacttaccccagtgggaagc

SEQ ID NO: 249668 - DNA, 120 bp, Artificial Sequence
  ENSG00000123171_2 (sequence is synthesized)
agctaagcaggtctgaccagccgacctggacctggccaagggtcctgtcatccctcatggccaccccgccattccggctgataaggaagatgttttccttcaaggtgagcagatggatgg

SEQ ID NO: 249669 - DNA, 120 bp, Artificial Sequence
  ENSG00000123171_3 (sequence is synthesized)
ggcttgcctgcttccggtccctggcggcatcctctcccagtattcgccagaagaaactaatgcacaagctgcaggaggaaaaggcttttcgcgaagagatgaaaatttttcgtgaaaaaa

SEQ ID NO: 249670 - DNA, 120 bp, Artificial Sequence
  ENSG00000123171_4 (sequence is synthesized)
tttttgggaagaggagagacctttctgggaagaggagaaaaccttctggaaagaggaaaaatccttctgggaaatggaaaagtctttcagggaggaagagaaaactttctggaaaaagta

SEQ ID NO: 249671 - DNA, 120 bp, Artificial Sequence
  ENSG00000123171_5 (sequence is synthesized)
ccgcactttctggaaggaggataaggccttctggaaagaggacaatgccttatgggaaagagaccggaaccttcttcaggaggacaaggccctgtgggaggaagaaaaggccctgtgggt

SEQ ID NO: 249672 - DNA, 120 bp, Artificial Sequence
  ENSG00000123171_6 (sequence is synthesized)
agaggaaagagccctccttgagggggagaaagccctgtgggaagataaaacgtccctctgggaggaagagaatgccctctgggaggaagagagggccttctggatggagaacaatggcca

SEQ ID NO: 249673 - DNA, 120 bp, Artificial Sequence
  ENSG00000123171_7 (sequence is synthesized)
cattgccggagagcagatgctcgaagatgggccccacaacgccaacagagggcagcgcttgctggccttctcccgaggcagggcgtagccagcatgcaggtgcagggccctgtggtccag

SEQ ID NO: 249674 - DNA, 120 bp, Artificial Sequence
  ENSG00000123171_8 (sequence is synthesized)
actcccctgggttgggattcaagtccagggtgagcccatgtgctggagaaaatacacactcattggtctccttgctttgaaagatccaataaagtcctgaggcaaggtttggaaaaccaa

SEQ ID NO: 249675 - DNA, 120 bp, Artificial Sequence
  ENSG00000123178_0 (sequence is synthesized)
atagacaagtccggacctcgggcgggggcaggagacggagctgagcggcggggggcagtgtcgcctcggtctagggacggcggcggagtcggtggtccctgcgcgatggccacctcggtg

SEQ ID NO: 249676 - DNA, 120 bp, Artificial Sequence
  ENSG00000123178_1 (sequence is synthesized)
ttgtgctgcctgcggtgctgcagagacggggggactggccacatccctctgaaggagatgccggccgtgcagctggacacgcagcacatgggaacagatgttgttattgtaaagaatgga

SEQ ID NO: 249677 - DNA, 120 bp, Artificial Sequence
  ENSG00000123178_2 (sequence is synthesized)
agaagaatatgtggaacaggaggttgtttagccagcgcacctttacatcaaaacaaaagctattttgaattcaaaatccagtccacaggaatctggggtattggtgttgcaactcagaag

SEQ ID NO: 249678 - DNA, 120 bp, Artificial Sequence
  ENSG00000123178_3 (sequence is synthesized)
gttaacttgaatcagattcctcttggccgagatatgcacagtctggtgatgagaaatgatggagccctttaccacaacaatgaagagaaaaataggctgccagcaaacagtcttccgcag

SEQ ID NO: 249679 - DNA, 120 bp, Artificial Sequence
  ENSG00000123178_4 (sequence is synthesized)
gaaggagatgtggtgggtattacttatgaccatgtcgaattaaatgtatacttgaatggaaaaaacatgcattgtccagcatcaggtatacgagggacagtgtatccagttgtttatgtt

SEQ ID NO: 249680 - DNA, 120 bp, Artificial Sequence
  ENSG00000123178_5 (sequence is synthesized)
gatgacagtgcaattttggattgccagttcagtgagttttatcatacgcctccacctggttttgaaaaaatattatttgaacagcaaatcttctgaatgtatttgtttttaaaacttgta

SEQ ID NO: 249681 - DNA, 120 bp, Artificial Sequence
  ENSG00000123178_6 (sequence is synthesized)
tttctgcactgttaaaaaatgttcatcatttaataaaactttacctggcctatagatgaaaatatattcttaaaaatatgcttgttgatgctgtctaaggaaccaatgtattcagtatac

SEQ ID NO: 249682 - DNA, 120 bp, Artificial Sequence
  ENSG00000123178_7 (sequence is synthesized)
caccctgaagttgtgatttaaaatactttatgttttgtgaaatgaaaataagcatttgggcagtttatttaattcttatttaaataaatagaattatgggtttaattaacagtataacat

SEQ ID NO: 249683 - DNA, 120 bp, Artificial Sequence
  ENSG00000123178_8 (sequence is synthesized)
gactatatatacatatatatttaaagggaattctttcttacataatatatttgttttgatagagatgtagagttgggtgggtgtttttgtcactctgaagtttagacctcattaaatatt

SEQ ID NO: 249684 - DNA, 120 bp, Artificial Sequence
  ENSG00000123178_9 (sequence is synthesized)
tgacatctacagttggataattttgccgcttagtgtccttttttatatacaatataacaaagtgagagaaatttatattactggcaatttcatttttggcagtctatttctgtatcatgt

SEQ ID NO: 249685 - DNA, 120 bp, Artificial Sequence
  ENSG00000123178_10 (sequence is synthesized)
accgcttttcttaaaacttaaattgcttattttgttgtgtaatgtcattgcttttgatttgctttgtgaaaggagataaacgtttcagtaattgtcagagcattttgttgcctcaggctg

SEQ ID NO: 249686 - DNA, 120 bp, Artificial Sequence
  ENSG00000123178_11 (sequence is synthesized)
tgttacctcaatttcagagtaagtagtggttgattagtaatgtagtatacactggcagacatctagaatagtatgatgctttacatttaaatgaggttattcttttaaggacttttattt

SEQ ID NO: 249687 - DNA, 120 bp, Artificial Sequence
  ENSG00000123178_12 (sequence is synthesized)
attaaacacattcttcctattttgttagttatacactaaattcacatcacccgtgattatttcagttcagagataagtgaatcctcttcatgaccctgagtctttgcctggttcttaaga

SEQ ID NO: 249688 - DNA, 120 bp, Artificial Sequence
  ENSG00000123178_13 (sequence is synthesized)
atcactgtcctttagttaacgccctgtgacctgaaccaatcactctatacatctttagatacgttgtctgttttcaaatgagcatggcaaggatgcatacatttccctcctttatcaact

SEQ ID NO: 249689 - DNA, 120 bp, Artificial Sequence
  ENSG00000123178_14 (sequence is synthesized)
agaaacagtacattgttcaggaaaacatgagtgttagaattagaaagagatccaaattgtagttttgctgctcatcctattttctcctctccaagtctcagattcccatttataaaagga

SEQ ID NO: 249690 - DNA, 120 bp, Artificial Sequence
  ENSG00000123178_15 (sequence is synthesized)
cccatttataaaaggagcaatcatactgacataagattctatgattaaataaggtaatacatatataacaccttaataatcataggcacttgcgccaggcgcggtggctcacacctgtaa

SEQ ID NO: 249691 - DNA, 90 bp, Artificial Sequence
  ENSG00000123178_16 (sequence is synthesized)
ctctgtctctcataggcacttagtaagtgtagtttcctggatggtaaagtatcagggaaagtggttttctttctttttttttttttctcg

SEQ ID NO: 249692 - DNA, 120 bp, Artificial Sequence
  ENSG00000123178_17 (sequence is synthesized)
ccaaagtgctggaattataggcgtaagccaccacacccagccagaaagtggttctcatgatgcttctcagaccggcaacatcagcatcactggaacttgttaaaaatggacactctcaga

SEQ ID NO: 249693 - DNA, 120 bp, Artificial Sequence
  ENSG00000123178_18 (sequence is synthesized)
acccacaccagacccaccaaatcagtttgagaactgccattcagtagagaattatttgcctactgtaaattttctaaggatttatgatgggctatttttgacccataggctcagagaatc

SEQ ID NO: 249694 - DNA, 120 bp, Artificial Sequence
  ENSG00000123178_19 (sequence is synthesized)
ctgcaaaatccttttttattgtttattctgcagacaaaaatgtgacaatatgctttgaaaacatagatatacttgagtaacatttatttacataaatcccaaattctacctctgaaggta

SEQ ID NO: 249695 - DNA, 120 bp, Artificial Sequence
  ENSG00000123178_20 (sequence is synthesized)
tatgaaatttaactatgtatgtattatgcattttgtctggctttctatcataattttaatttgtaaagaatgtgcttacttgggaaagcaaattaaagtgactactgtttgctatcgtta

SEQ ID NO: 249696 - DNA, 120 bp, Artificial Sequence
  ENSG00000123178_21 (sequence is synthesized)
ccgtctccccggcccagcccggccgctcgccctgtccggtctctccccggccccttgattctccgcgtcttcctcgcaggccagcctaagctcagcctgcattgcgccctcccggcctag

SEQ ID NO: 249697 - DNA, 120 bp, Artificial Sequence
  ENSG00000123178_22 (sequence is synthesized)
ctcctgccctgactgtcggtcctgtctcttgagccccatcatttataggttgaatcctatattattggaagtaattttcctctcacctcctaaagtcgaaacaaggcagactgcagaagt

SEQ ID NO: 249698 - DNA, 120 bp, Artificial Sequence
  ENSG00000123178_23 (sequence is synthesized)
caggaacagatgttgttattgtaaagaatggaagaagaatatgtggaacaggaggttgtttagccagcgcacctttacatcaaaacaaaagctattttgaattcaaaatccagtccacag

SEQ ID NO: 249699 - DNA, 120 bp, Artificial Sequence
  ENSG00000123179_0 (sequence is synthesized)
gtttctctccctgctttcctctgccgcatggtcctgggccgttggcgtcggaagcctgaagcatgggcgctgagtgggagctgggggccgaggctggcggttcgctgctgctgtgcgccg

SEQ ID NO: 249700 - DNA, 120 bp, Artificial Sequence
  ENSG00000123179_1 (sequence is synthesized)
gcggcgggctgcgccctgggcctgcgcctgggccgcgggcagggggcggcggaccgcggggcgctcatctggctctgctacgacgcgctggtgcacttcgcgctggaaggcccttttgtc

SEQ ID NO: 249701 - DNA, 120 bp, Artificial Sequence
  ENSG00000123179_2 (sequence is synthesized)
cttttgtctacttgtctttagtaggaaacgttgcaaattccgatggcttgattgcttctttatggaaagaatatggcaaagctgatgcaagatgggtttattttgatccaaccattgtgt

SEQ ID NO: 249702 - DNA, 120 bp, Artificial Sequence
  ENSG00000123179_3 (sequence is synthesized)
ctgtggaaattctgaccgtcgccctggatgggtctctggcattgttcctcatttatgccatagtcaaagaaaaatattaccggcatttcctgcagatcaccctgtgcgtgtgcgagctgt

SEQ ID NO: 249703 - DNA, 120 bp, Artificial Sequence
  ENSG00000123179_4 (sequence is synthesized)
ttcctcccagagtggctcaccagaagccccaacctcaacaccagcaactggctgtactgttggctttacctgtttttttttaacggtgtgtgggttctgatcccaggactgctactgtgg

SEQ ID NO: 249704 - DNA, 120 bp, Artificial Sequence
  ENSG00000123179_5 (sequence is synthesized)
cagtcatggctagaactcaagaaaatgcatcagaaagaaaccagttcagtgaagaagtttcagtgaactttcaaaaccataaacaccattatctaacttcatgaaccagaatgaatcaaa

SEQ ID NO: 249705 - DNA, 120 bp, Artificial Sequence
  ENSG00000123179_6 (sequence is synthesized)
tctttttgtttggccaaaatgtaatacattccagtctacactttgtttttgtattgttgctcctgaacaacctgtttcaaattggttttaaggcgaccagttttcgttgtattgttgttc

SEQ ID NO: 249706 - DNA, 120 bp, Artificial Sequence
  ENSG00000123179_7 (sequence is synthesized)
aattaaatggtgatatagggaaaagagaacaaatttgaatttgtaataataaaatgtttaattatacattttatggctggcattaattgttccacattagtaaaaccaattatcttagaa

SEQ ID NO: 249707 - DNA, 120 bp, Artificial Sequence
  ENSG00000123179_8 (sequence is synthesized)
tatatctcatttctttgtgactctaaaatcatctccagctaggatctgtgtgggggactcctgtttaccactagtgttaggaaacatctagagaattgagtaggctcattagtacttccc

SEQ ID NO: 249708 - DNA, 120 bp, Artificial Sequence
  ENSG00000123191_0 (sequence is synthesized)
ttcccggacccctgtttgctttagagccgagccgcgccgatgccctcacactctgcgcctcctctcccgggactttaacaccccgctctcctccaccgaccaggtgaccttttgctctga

SEQ ID NO: 249709 - DNA, 120 bp, Artificial Sequence
  ENSG00000123191_1 (sequence is synthesized)
gccagatcagagaagaattcggtgtccgtgcgggacgatgcctgagcaggagagacagatcacagccagagaaggggccagtcggaaaatcttatctaagctttctttgcctacccgtgc

SEQ ID NO: 249710 - DNA, 120 bp, Artificial Sequence
  ENSG00000123191_2 (sequence is synthesized)
ctgggaaccagcaatgaagaagagttttgcttttgacaatgttggctatgaaggtggtctggatggcctgggcccttcttctcaggtggccaccagcacagtcaggatcttgggcatgac

SEQ ID NO: 249711 - DNA, 120 bp, Artificial Sequence
  ENSG00000123191_3 (sequence is synthesized)
ttgccagtcatgtgtgaagtccattgaggacaggatttccaatttgaaaggcatcatcagcatgaaggtttccctggaacaaggcagtgccactgtgaaatatgtgccatcggttgtgtg

SEQ ID NO: 249712 - DNA, 120 bp, Artificial Sequence
  ENSG00000123191_4 (sequence is synthesized)
cctgcaacaggtttgccatcaaattggggacatgggcttcgaggccagcattgcagaaggaaaggcagcctcctggccctcaaggtccttgcctgcccaggaggctgtggtcaagctccg

SEQ ID NO: 249713 - DNA, 120 bp, Artificial Sequence
  ENSG00000123191_5 (sequence is synthesized)
ggtggagggcatgacctgccagtcctgtgtcagctccattgaaggcaaggtccggaaactgcaaggagtagtgagagtcaaagtctcactcagcaaccaagaggccgtcatcacttatca

SEQ ID NO: 249714 - DNA, 120 bp, Artificial Sequence
  ENSG00000123191_6 (sequence is synthesized)
gccttatctcattcagcccgaagacctcagggaccatgtaaatgacatgggatttgaagctgccatcaagagcaaagtggctcccttaagcctgggaccaattgatattgagcggttaca

SEQ ID NO: 249715 - DNA, 120 bp, Artificial Sequence
  ENSG00000123191_7 (sequence is synthesized)
aagcactaacccaaagagacctttatcttctgctaaccagaattttaataattctgagaccttggggcaccaaggaagccatgtggtcaccctccaactgagaatagatggaatgcattg

SEQ ID NO: 249716 - DNA, 120 bp, Artificial Sequence
  ENSG00000123191_8 (sequence is synthesized)
taagtcttgcgtcttgaatattgaagaaaatattggccagctcctaggggttcaaagtattcaagtgtccttggagaacaaaactgcccaagtaaagtatgacccttcttgtaccagccc

SEQ ID NO: 249717 - DNA, 120 bp, Artificial Sequence
  ENSG00000123191_9 (sequence is synthesized)
agtggctctgcagagggctatcgaggcacttccacctgggaattttaaagtttctcttcctgatggagccgaagggagtgggacagatcacaggtcttccagttctcattcccctggctc

SEQ ID NO: 249718 - DNA, 120 bp, Artificial Sequence
  ENSG00000123191_10 (sequence is synthesized)
cccaccgagaaaccaggtccagggcacatgcagtaccactctgattgccattgccggcatgacctgtgcatcctgtgtccattccattgaaggcatgatctcccaactggaaggggtgca

SEQ ID NO: 249719 - DNA, 120 bp, Artificial Sequence
  ENSG00000123191_11 (sequence is synthesized)
gcaaatatcggtgtctttggccgaagggactgcaacagttctttataatccctctgtaattagcccagaagaactcagagctgctatagaagacatgggatttgaggcttcagtcgtttc

SEQ ID NO: 249720 - DNA, 120 bp, Artificial Sequence
  ENSG00000123191_12 (sequence is synthesized)
tgaaagctgttctactaaccctcttggaaaccacagtgctgggaattccatggtgcaaactacagatggtacacctacatctgtgcaggaagtggctccccacactgggaggctccctgc

SEQ ID NO: 249721 - DNA, 120 bp, Artificial Sequence
  ENSG00000123191_13 (sequence is synthesized)
aaaccatgccccggacatcttggcaaagtccccacaatcaaccagagcagtggcaccgcagaagtgcttcttacagatcaaaggcatgacctgtgcatcctgtgtgtctaacatagaaag

SEQ ID NO: 249722 - DNA, 120 bp, Artificial Sequence
  ENSG00000123191_14 (sequence is synthesized)
gaatctgcagaaagaagctggtgttctctccgtgttggttgccttgatggcaggaaaggcagagatcaagtatgacccagaggtcatccagcccctcgagatagctcagttcatccagga

SEQ ID NO: 249723 - DNA, 120 bp, Artificial Sequence
  ENSG00000123191_15 (sequence is synthesized)
cctgggttttgaggcagcagtcatggaggactacgcaggctccgatggcaacattgagctgacaatcacagggatgacctgcgcgtcctgtgtccacaacatagagtccaaactcacgag

SEQ ID NO: 249724 - DNA, 120 bp, Artificial Sequence
  ENSG00000123191_16 (sequence is synthesized)
gacaaatggcatcacttatgcctccgttgcccttgccaccagcaaagcccttgttaagtttgacccggaaattatcggtccacgggatattatcaaaattattgaggaaattggctttca

SEQ ID NO: 249725 - DNA, 120 bp, Artificial Sequence
  ENSG00000123191_17 (sequence is synthesized)
tgcttccctggcccagagaaaccccaacgctcatcacttggaccacaagatggaaataaagcagtggaagaagtctttcctgtgcagcctggtgtttggcatccctgtcatggccttaat

SEQ ID NO: 249726 - DNA, 120 bp, Artificial Sequence
  ENSG00000123191_18 (sequence is synthesized)
gatctatatgctgatacccagcaacgagccccaccagtccatggtcctggaccacaacatcattccaggactgtccattctaaatctcatcttctttatcttgtgtacctttgtccagct

SEQ ID NO: 249727 - DNA, 120 bp, Artificial Sequence
  ENSG00000123191_19 (sequence is synthesized)
cctcggtgggtggtacttctacgttcaggcctacaaatctctgagacacaggtcagccaacatggacgtgctcatcgtcctggccacaagcattgcttatgtttattctctggtcatcct

SEQ ID NO: 249728 - DNA, 120 bp, Artificial Sequence
  ENSG00000123191_20 (sequence is synthesized)
ggtggttgctgtggctgagaaggcggagaggagccctgtgacattcttcgacacgccccccatgctctttgtgttcattgccctgggccggtggctggaacacttggcaaagagcaaaac

SEQ ID NO: 249729 - DNA, 120 bp, Artificial Sequence
  ENSG00000123191_21 (sequence is synthesized)
ctcagaagccctggctaaactcatgtctctccaagccacagaagccaccgttgtgacccttggtgaggacaatttaatcatcagggaggagcaagtccccatggagctggtgcagcgggg

SEQ ID NO: 249730 - DNA, 120 bp, Artificial Sequence
  ENSG00000123191_22 (sequence is synthesized)
cgatatcgtcaaggtggtccctgggggaaagtttccagtggatgggaaagtcctggaaggcaataccatggctgatgagtccctcatcacaggagaagccatgccagtcactaagaaacc

SEQ ID NO: 249731 - DNA, 120 bp, Artificial Sequence
  ENSG00000123191_23 (sequence is synthesized)
cggaagcactgtaattgcggggtctataaatgcacatggctctgtgctcattaaagctacccacgtgggcaatgacaccactttggctcagattgtgaaactggtggaagaggctcagat

SEQ ID NO: 249732 - DNA, 120 bp, Artificial Sequence
  ENSG00000123191_24 (sequence is synthesized)
gtcaaaggcacccattcagcagctggctgaccggtttagtggatattttgtcccatttatcatcatcatgtcaactttgacgttggtggtatggattgtaatcggttttatcgattttgg

SEQ ID NO: 249733 - DNA, 120 bp, Artificial Sequence
  ENSG00000123191_25 (sequence is synthesized)
tgttgttcagagatactttcctaaccccaacaagcacatctcccagacagaggtgatcatccggtttgctttccagacgtccatcacggtgctgtgcattgcctgcccctgctccctggg

SEQ ID NO: 249734 - DNA, 120 bp, Artificial Sequence
  ENSG00000123191_26 (sequence is synthesized)
gctggccacgcccacggctgtcatggtgggcaccggggtggccgcgcagaacggcatcctcatcaagggaggcaagcccctggagatggcgcacaagataaagactgtgatgtttgacaa

SEQ ID NO: 249735 - DNA, 120 bp, Artificial Sequence
  ENSG00000123191_27 (sequence is synthesized)
gggtgctcctgctgggggatgtggccacactgcccctcaggaaggttctggctgtggtggggactgcggaggccagcagtgaacaccccttgggcgtggcagtcaccaaatactgtaaag

SEQ ID NO: 249736 - DNA, 120 bp, Artificial Sequence
  ENSG00000123191_28 (sequence is synthesized)
aggaacttggaacagagaccttgggatactgcacggacttccaggcagtgccaggctgtggaattgggtgcaaagtcagcaacgtggaaggcatcctggcccacagtgagcgccctttga

SEQ ID NO: 249737 - DNA, 120 bp, Artificial Sequence
  ENSG00000123191_29 (sequence is synthesized)
gtgcaccggccagtcacctgaatgaggctggcagccttcccgcagaaaaagatgcagtcccccagaccttctctgtgctgattggaaaccgtgagtggctgaggcgcaacggtttaacca

SEQ ID NO: 249738 - DNA, 120 bp, Artificial Sequence
  ENSG00000123191_30 (sequence is synthesized)
tttctagcgatgtcagtgacgctatgacagaccacgagatgaaaggacagacagccatcctggtggctattgacggtgtgctctgtgggatgatcgcaatcgcagacgctgtcaagcagg

SEQ ID NO: 249739 - DNA, 120 bp, Artificial Sequence
  ENSG00000123191_31 (sequence is synthesized)
aggctgccctggctgtgcacacgctgcagagcatgggtgtggacgtggttctgatcacgggggacaaccggaagacagccagagctattgccacccaggttggcatcaacaaagtctttg

SEQ ID NO: 249740 - DNA, 120 bp, Artificial Sequence
  ENSG00000123191_32 (sequence is synthesized)
cagaggtgctgccttcgcacaaggtggccaaggtccaggagctccagaataaagggaagaaagtcgccatggtgggggatggggtcaatgactccccggccttggcccaggcagacatgg

SEQ ID NO: 249741 - DNA, 120 bp, Artificial Sequence
  ENSG00000123191_33 (sequence is synthesized)
gtgtggccattggcaccggcacggatgtggccatcgaggcagccgacgtcgtccttatcagaaatgatttgctggatgtggtggctagcattcacctttccaagaggactgtccgaagga

SEQ ID NO: 249742 - DNA, 120 bp, Artificial Sequence
  ENSG00000123191_34 (sequence is synthesized)
tacgcatcaacctggtcctggcactgatttataacctggttgggatacccattgcagcaggtgtcttcatgcccatcggcattgtgctgcagccctggatgggctcagcggccatggcag

SEQ ID NO: 249743 - DNA, 120 bp, Artificial Sequence
  ENSG00000123191_35 (sequence is synthesized)
cctcctctgtgtctgtggtgctctcatccctgcagctcaagtgctataagaagcctgacctggagaggtatgaggcacaggcgcatggccacatgaagcccctgacggcatcccaggtca

SEQ ID NO: 249744 - DNA, 120 bp, Artificial Sequence
  ENSG00000123191_36 (sequence is synthesized)
gtgtgcacataggcatggatgacaggtggcgggactcccccagggccacaccatgggaccaggtcagctatgtcagccaggtgtcgctgtcctccctgacgtccgacaagccatctcggc

SEQ ID NO: 249745 - DNA, 120 bp, Artificial Sequence
  ENSG00000123191_37 (sequence is synthesized)
acagcgctgcagcagacgatgatggggacaagtggtctctgctcctgaatggcagggatgaggagcagtacatctgatgacttcaggcaggcgggccggggcagggacttgcctccactc

SEQ ID NO: 249746 - DNA, 120 bp, Artificial Sequence
  ENSG00000123191_38 (sequence is synthesized)
accacaagctgagcaggacagccagcagcaggatgggctgagctagcctccagctttggggacttccgctccctggatatgtccagtcatcctgccctgcagcacgcggccttgtctggg

SEQ ID NO: 249747 - DNA, 120 bp, Artificial Sequence
  ENSG00000123191_39 (sequence is synthesized)
tgcagctgggcttggcctggagaggacggccctgcctgcctcttggcctcacgggaccgtcagcatgggctttgtcttggactctagtccttggctggactgtagaaggtgagaggcgag

SEQ ID NO: 249748 - DNA, 120 bp, Artificial Sequence
  ENSG00000123191_40 (sequence is synthesized)
tcaccctcctcacagacctctgcttggagtatttaggatgactgctgtgaaatggagaacagtttcatcaggaccaaaaaacctcactgggcctttccagagaactgcagacctcactgt

SEQ ID NO: 249749 - DNA, 120 bp, Artificial Sequence
  ENSG00000123191_41 (sequence is synthesized)
cagggtctttctgatgacgcctgtctgtgtgcatcatgtttctgagaccacagtttacctcaggtgtgcctgttgctttcttcctgcatagtctgttcctttcttcgtacatagtctgtt

SEQ ID NO: 249750 - DNA, 120 bp, Artificial Sequence
  ENSG00000123191_42 (sequence is synthesized)
ccttttctctcctgtgtgcttgtcagtggggacccctcgcaaccctgcctgtcacctgggagggtgggaccaatgtccttgtggtctttgctgctgctctcaggcgcttctccaatgctc

SEQ ID NO: 249751 - DNA, 120 bp, Artificial Sequence
  ENSG00000123191_43 (sequence is synthesized)
tggagtgtgcatttcagcttgaacctgcttcctggctcacacatccccagccagggagcttgccacactcttcttcaagttgaggagagttcttttttgcttaaagcccccttctccatg

SEQ ID NO: 249752 - DNA, 120 bp, Artificial Sequence
  ENSG00000123191_44 (sequence is synthesized)
gagtgttggcttctcaatagagtgttgttgctgaccagctggagtgagggcctcagagcctgacctgagagtccgtactcggcttcctgtggggtgtaggttctcgcgattcaggacgtc

SEQ ID NO: 249753 - DNA, 120 bp, Artificial Sequence
  ENSG00000123191_45 (sequence is synthesized)
cttccatatccctgcccagcctgtggtgcttgaaacgtttgccccatgggaaacgtatgtgtgcaggagcctccctgcacggcccaaggggcttcgttttcagtcttctgactgtcacct

SEQ ID NO: 249754 - DNA, 120 bp, Artificial Sequence
  ENSG00000123191_46 (sequence is synthesized)
cgtggggttcagtagagaattcatgtgactagcgcctggccttgtgtggcttggaggaaatggtactgcccaaataggaggaaaacacagcctccctgagcctgcattctgcacgctgcc

SEQ ID NO: 249755 - DNA, 120 bp, Artificial Sequence
  ENSG00000123191_47 (sequence is synthesized)
caggggcttcagaaaaggagtggccacagcaccccgaagggagcatctgtttacctggcagtggctctcagagcagcagaacgggttcagttttagactctgaagttggttgtgattgac

SEQ ID NO: 249756 - DNA, 120 bp, Artificial Sequence
  ENSG00000123191_48 (sequence is synthesized)
agaaccctttgggagcaaactagtagagttggattaaattctgggtgaaacccttttctcccacacaaaatagttttagtgatttttttcattgtccattacttgccaggggcagtttta

SEQ ID NO: 249757 - DNA, 120 bp, Artificial Sequence
  ENSG00000123191_49 (sequence is synthesized)
gcagcacttttgatagattacgtctaatcctcccaaccaaccagcagggtagctattactgtccacattttacaggcaaggaaacaggctccaagaggctgaggactttgcccaggatga

SEQ ID NO: 249758 - DNA, 120 bp, Artificial Sequence
  ENSG00000123191_50 (sequence is synthesized)
catagccaatggacaagcagtgtctgtcagctgtgaaggcttcactcttattgtccttctaccttgaatagaagttttcctgataagaataaacgaggaaaaggtccttgcctcctggaa

SEQ ID NO: 249759 - DNA, 120 bp, Artificial Sequence
  ENSG00000123191_51 (sequence is synthesized)
gaacaaatctaccaggtgatctattcattgtttcaactcagaatgcacttgattcaggaggtcatctgaccttcaccttggatggttagtttcactttttacatatagtttttgcagggt

SEQ ID NO: 249760 - DNA, 120 bp, Artificial Sequence
  ENSG00000123191_52 (sequence is synthesized)
tttattttataaaatccaagcgcgctgttgattgtgttttccttgttttcagcccccccactccagcccgcagcacatttccgctgtccgtcagtaattgtgtcctctctttatgcttgc

SEQ ID NO: 249761 - DNA, 120 bp, Artificial Sequence
  ENSG00000123191_53 (sequence is synthesized)
ttggggaatgttgttttctgactaggctgatcattatctaaagaatctaattctgttgatttttaaaacttttaggaccataaacgttgtgttcatatatggacatggaaatatttatat

SEQ ID NO: 249762 - DNA, 120 bp, Artificial Sequence
  ENSG00000123191_54 (sequence is synthesized)
aattttatagaaaataaccttttagatggtcaaagtgtaaggagtttttttgtcagataatcatttctacttcaaaaacatttcatgcaatattagaataaagttcctgtcattcctcta

SEQ ID NO: 249763 - DNA, 120 bp, Artificial Sequence
  ENSG00000123191_55 (sequence is synthesized)
cagttgctgctttttttctctcttaatgaccagtaggtggggcttggggcccccccagtgtgggggactactaagggcctggtttcactgtcagtttcagttgattgcaagtgatcagaa

SEQ ID NO: 249764 - DNA, 120 bp, Artificial Sequence
  ENSG00000123191_56 (sequence is synthesized)
ctggccctggaatagcaacctccttgctgcaaggtgtggtgaactctgtgtctccaatgtgcatattgtttaggttaatttacgtttgttgctggaagcaacaactggatcacccttgag

SEQ ID NO: 249765 - DNA, 120 bp, Artificial Sequence
  ENSG00000123191_57 (sequence is synthesized)
cccatgccactcttgagtgttctatcttaaaaggtggagatatggtccttgtctttcaggaagttataatttaaaagagaaaggcatgaaacgtctgctttggtggtgatattaaggaac

SEQ ID NO: 249766 - DNA, 120 bp, Artificial Sequence
  ENSG00000123191_58 (sequence is synthesized)
tagctgtgtgtctggtgggaagtgtgccctctatgtgtatattttggaatataaaactaaatccctgtcctaatattggaatgtttaggggctatttgggggcaagcattggtaggctgg

SEQ ID NO: 249767 - DNA, 62 bp, Artificial Sequence
  ENSG00000123191_59 (sequence is synthesized)
ttggtaggctgtcagtgatgtgatcatagttcactgtagtcttgaactcctgggctcaagcg

SEQ ID NO: 249768 - DNA, 120 bp, Artificial Sequence
  ENSG00000123191_60 (sequence is synthesized)
cagcctcctgagtagctaggaccacaagcgcctgccaccatgcctggctagatagggtcttgctatgtgcccaggttggtctcaaactcctggccttcaacagtcctccaagctcagtct

SEQ ID NO: 249769 - DNA, 120 bp, Artificial Sequence
  ENSG00000123191_61 (sequence is synthesized)
cccaaagctctgagatgacaggtgtgagccactgcacccagcctgaatttgtgtttttctatattttgtttgattataagtgtaatgtacacttattattaacaattcaaaccgtactga

SEQ ID NO: 249770 - DNA, 120 bp, Artificial Sequence
  ENSG00000123191_62 (sequence is synthesized)
agtataagaagaaaagaggaagatgccctttcactgatcacattctgcctcccgcccaatctcattccccagtgttgctatggtgatattaatagttgggcattaatctctccaaatctt

SEQ ID NO: 249771 - DNA, 120 bp, Artificial Sequence
  ENSG00000123191_63 (sequence is synthesized)
tatatagagaaaatgcacacttgcgtgtatgtgtatgtatatgttcacgtaatacagatacagacttttttaactgaaatgggatcatacaagatagactgatgtgcagctggctttttc

SEQ ID NO: 249772 - DNA, 120 bp, Artificial Sequence
  ENSG00000123191_64 (sequence is synthesized)
acttaactatgtattagacatcttttatgccagtgggttatagatagagcccattctctttagggaatggaatgccttgtgctgtctacagtacaaatgagtcgtgatttttttccccaa

SEQ ID NO: 249773 - DNA, 120 bp, Artificial Sequence
  ENSG00000123191_65 (sequence is synthesized)
cttttcaccattctcttattagaggacatttgtgttgtaagcactgggttttaaaggtctcacatgctcttggtcatccattcctgtggacagtagtcctctgaatgggaaagtatattt

SEQ ID NO: 249774 - DNA, 120 bp, Artificial Sequence
  ENSG00000123191_66 (sequence is synthesized)
cataaacgcccatcacagaggaagaagtactgtcacgactgtgcacaaagctagaggctttgccatccccagggcccttggccctgtgtcgctcattgaactctcctccctacttgctgg

SEQ ID NO: 249775 - DNA, 120 bp, Artificial Sequence
  ENSG00000123191_67 (sequence is synthesized)
actagaagcccccgcctgggcgcctgcgcccccgttcccggcccaaagcccgccgcccgttggaggccattggctggcctttgcgcacagcggatcgattttccaggtgaccttttgctc

SEQ ID NO: 249776 - DNA, 120 bp, Artificial Sequence
  ENSG00000123191_68 (sequence is synthesized)
ctcagcggcgtgtggggagaacgctgaaaggcagctcctgtcaaagtccctgccccgctggatcggacacaggcttaaattaccgcatcgtttgcacccctctgttctaggattaccttg

SEQ ID NO: 249777 - DNA, 120 bp, Artificial Sequence
  ENSG00000123191_69 (sequence is synthesized)
atgtgtgaggaagctgatttggtattggaaagtattgtggagctaggaggaatcaaactgctctattttcttcattttcaaactcaccttgggcaggcacgtaaacaccattgtccaggc

SEQ ID NO: 249778 - DNA, 120 bp, Artificial Sequence
  ENSG00000123191_70 (sequence is synthesized)
tgtttagaattactaattatacacagcatagagacagacttaaagaaataggaaacctccatataattaaggtgctctagtcactaatctccaaattggtcactacttctgaaatcccag

SEQ ID NO: 249779 - DNA, 120 bp, Artificial Sequence
  ENSG00000123191_71 (sequence is synthesized)
ctaatctggttaattattaaaaccatcattcaggtgtattgtgtaaactaaagaaacctggccttcagggcagagcctacattgtctcttggtgcaaaactgaatatgtagttggtctag

SEQ ID NO: 249780 - DNA, 120 bp, Artificial Sequence
  ENSG00000123191_72 (sequence is synthesized)
ctcctcaaggtcatgccatttttaacacccttcattgtccccaacactgaaatgtatcttacaagagaatggaactcaggccctaaaagaaattagattgaacctaaaagaaaatggtca

SEQ ID NO: 249781 - DNA, 120 bp, Artificial Sequence
  ENSG00000123191_73 (sequence is synthesized)
gtgggaagactgatgtttgtttccagtctgaaatgtaattcccggactttagtggcacaggcactgtgcatcactgtggaagtgacatgtggccatgtgtggtggatagcaagtaacgcc

SEQ ID NO: 249782 - DNA, 120 bp, Artificial Sequence
  ENSG00000123191_74 (sequence is synthesized)
cacctgcagagccttttatcgtgccgtgcggctgtttctctcgcaccagctgtctctaacaccacgcttgtgactctcaggctgggtttggacaggtctgctttcgatagctctcatttc

SEQ ID NO: 249783 - DNA, 120 bp, Artificial Sequence
  ENSG00000123191_75 (sequence is synthesized)
aacagcctcatctgagcccctagccggcagcaagcatccacttggcagccatgtgatgaatgaactatcttcttggaagtggaactgccagccccattcaggccacccccagtggtgcta

SEQ ID NO: 249784 - DNA, 120 bp, Artificial Sequence
  ENSG00000123200_0 (sequence is synthesized)
agaggaacagggcaaacctctgacttccggcggcattttgaggcggtcctcctagcggcctgtagtacaaaatgtcaaaaattagaaggaaggtcacagtggaaaataccaagactatat

SEQ ID NO: 249785 - DNA, 120 bp, Artificial Sequence
  ENSG00000123200_1 (sequence is synthesized)
ctgatagcacatcccgaagacccagtgtatttgagaggcttggacccagcactggcagtacagcagagacacagtgccgtaactggctgaagactggcaactgcctctatggaaacacat

SEQ ID NO: 249786 - DNA, 120 bp, Artificial Sequence
  ENSG00000123200_2 (sequence is synthesized)
gtagattcgtacatggcccttcacctcgtggtaaaggttatagcagcaattatagaaggtcaccagaaagacctacaggggatcttagagaaagaatgaagaacaagcgccaagacgtgg

SEQ ID NO: 249787 - DNA, 120 bp, Artificial Sequence
  ENSG00000123200_3 (sequence is synthesized)
acactgagccccagaaacgaaatacagaggagtcatcctcacctgttaggaaagaatcttcaagagggagacatagggaaaaggaagacataaaaatcactaaggaaagaactccagaaa

SEQ ID NO: 249788 - DNA, 120 bp, Artificial Sequence
  ENSG00000123200_4 (sequence is synthesized)
gtgaagaagaaaatgtagaatgggaaactaatagagatgattctgacaatggagatattaattatgattatgttcatgaattgtcattggaaatgaagcgtcagaagatacagagggaat

SEQ ID NO: 249789 - DNA, 120 bp, Artificial Sequence
  ENSG00000123200_5 (sequence is synthesized)
taatgaagctggaacaagaaaacatggagaagagagaagaaattatcattaaaaaggaggtttcaccagaagtggttagatcaaaattgtccccgtcaccttctctaagaaagtctagca

SEQ ID NO: 249790 - DNA, 120 bp, Artificial Sequence
  ENSG00000123200_6 (sequence is synthesized)
aatctccgaagcgaaaatcaagcccgaagtcgtcttcagctagcaagaaagataggaagacatctgcagtatcttctcccctgttggaccagcagagaaattcaaaaaccaaccaaagta

SEQ ID NO: 249791 - DNA, 120 bp, Artificial Sequence
  ENSG00000123200_7 (sequence is synthesized)
aaaagaaaggaccacgtactcctagtccaccccctcctataccagaagatatcgctctggggaaaaaatacaaagaaaaatataaagtaaaagacaggatagaagaaaaaacaagagatg

SEQ ID NO: 249792 - DNA, 120 bp, Artificial Sequence
  ENSG00000123200_8 (sequence is synthesized)
gaaaggacagaggacgagattttgaacgacaaagagaaaagagagacaagccaaggtctacttccccagcaggacagcatcattctcctatatcttctagacatcactcatcttcctcac

SEQ ID NO: 249793 - DNA, 120 bp, Artificial Sequence
  ENSG00000123200_9 (sequence is synthesized)
aatcaggatcatctattcaaagacattctccttctcctcgtcgaaaaagaactccttcaccatcttatcagcggacactaactccacctttacgacgctctgcctctccttatccttcac

SEQ ID NO: 249794 - DNA, 120 bp, Artificial Sequence
  ENSG00000123200_10 (sequence is synthesized)
attctttgtcgtctccccagagaaagcagagtcctccaagacatcgctctccaatgcgagagaaagggagacatgatcatgaacgaacttcacagtctcatgatcgacgccatgaaagga

SEQ ID NO: 249795 - DNA, 120 bp, Artificial Sequence
  ENSG00000123200_11 (sequence is synthesized)
gggaagatactaggggcaaacgagacagagaaaaggactcaagagaagaacgagaatatgaacaggatcagagctcttctagagaccacagagatgacagagaacctcgagatggtcggg

SEQ ID NO: 249796 - DNA, 120 bp, Artificial Sequence
  ENSG00000123200_12 (sequence is synthesized)
atcggagagatgccagagatactagggaccgaagggaactaagagactccagagacatgcgggactcaagggagatgagagattatagcagagataccaaagagagccgtgatcccagag

SEQ ID NO: 249797 - DNA, 120 bp, Artificial Sequence
  ENSG00000123200_13 (sequence is synthesized)
attctcggtccactcgtgatgcccatgactacagggaccgtgaaggtcgagatactcatcgaaaggaggatacatatccagaagaatcccggagttatggccgaaaccatttgagagaag

SEQ ID NO: 249798 - DNA, 120 bp, Artificial Sequence
  ENSG00000123200_14 (sequence is synthesized)
aaagttctcgtacggaaataaggaatgagtccagaaatgagtctcgaagtgaaattagaaatgaccgaatgggccgaagtagggggagggttcctgagttacctgaaaagggaagtcgag

SEQ ID NO: 249799 - DNA, 120 bp, Artificial Sequence
  ENSG00000123200_15 (sequence is synthesized)
gctcaagaggttctcaaattgatagtcacagtagtaatagcaactatcatgacagctgggaaactcgaagtagctatcctgaaagagatagatatcctgaaagagacaacagagatcaag

SEQ ID NO: 249800 - DNA, 120 bp, Artificial Sequence
  ENSG00000123200_16 (sequence is synthesized)
caagggattcttcctttgagagaagacatggagagcgagaccgtcgtgacaacagagagagagatcaaagaccaagctcaccaattcgacatcagggaaggaatgacgagcttgagcgtg

SEQ ID NO: 249801 - DNA, 120 bp, Artificial Sequence
  ENSG00000123200_17 (sequence is synthesized)
atgaaagaagagaggaacgaagagtagacagagtggatgataggagagatgaaagggctagagagagagatcgggaacgagaacgagacagggagcgggagagagagagggaacgtgaac

SEQ ID NO: 249802 - DNA, 120 bp, Artificial Sequence
  ENSG00000123200_18 (sequence is synthesized)
gggatcgggaaagagaaaaagagagagaactagaaagagagcgtgctagggaacgggagagagaaagagaaaaagagagagatcgtgaaagggatagagaccgagaccacgatcgagagc

SEQ ID NO: 249803 - DNA, 120 bp, Artificial Sequence
  ENSG00000123200_19 (sequence is synthesized)
gggaaagagagagggaacgagacagggaaaaagaacgggaacgagaaagagaagagagagagagggagagagagcgagaacgggagagagagcgagagcgagaacgggaacgagaaagag

SEQ ID NO: 249804 - DNA, 120 bp, Artificial Sequence
  ENSG00000123200_20 (sequence is synthesized)
cgagagaaagggataaagaacgagaacgccaaagggattgggaagacaaagacaaaggacgagatgaccgcagagaaaagcgagaagagatccgagaagataggaatccaagagatggac

SEQ ID NO: 249805 - DNA, 120 bp, Artificial Sequence
  ENSG00000123200_21 (sequence is synthesized)
atgatgaaagaaaatcaaagaagcgctatagaaatgaagggagtcccagccctagacagtccccgaagcgccggcgtgaacattctccggacagtgatgcctacaacagtggagatgata

SEQ ID NO: 249806 - DNA, 120 bp, Artificial Sequence
  ENSG00000123200_22 (sequence is synthesized)
aaaatgaaaaacacagactcttgagccaagttgtacgacctcaagaatctcgttctcttagtccctcgcacctcacagaagacagacagggtagatggaaagaggaggatcgtaaaccag

SEQ ID NO: 249807 - DNA, 120 bp, Artificial Sequence
  ENSG00000123200_23 (sequence is synthesized)
aaaggaaagagagttcaaggcgctacgaagaacaggaactcaaggagaaagtttcttctgtagataaacagagagaacagacagaaatcctggaaagctcaagaatgcgtgcacaggaca

SEQ ID NO: 249808 - DNA, 120 bp, Artificial Sequence
  ENSG00000123200_24 (sequence is synthesized)
ttataggacaccaccagtctgaagatcgagagacatctgatcgagctcatgatgaaaacaagaagaaagcaaaaattcaaaagaaaccaattaagaaaaagaaagaggatgatgttggaa

SEQ ID NO: 249809 - DNA, 120 bp, Artificial Sequence
  ENSG00000123200_25 (sequence is synthesized)
tagagaggggtaacatagagacaacatctgaagatggtcaagtattttcaccaaaaaaaggacagaaaaagaaaagcattgaaaaaaaacgtaaaaaatccaaaggtgattctgatattt

SEQ ID NO: 249810 - DNA, 120 bp, Artificial Sequence
  ENSG00000123200_26 (sequence is synthesized)
ccctataacaactaaagaggaattggttgaaatgtgcaatggtaagaatggtattctagaggactcccagaaaaaagaagatacagcattcagtgactggtctgatgaggatgtccctga

SEQ ID NO: 249811 - DNA, 120 bp, Artificial Sequence
  ENSG00000123200_27 (sequence is synthesized)
ccgtacagaggtgacagaagcagagcatactgccaccgccacgactcctggtagtaccccttctcctctatcttctcttcttcctcctccaccgcctgtggctactgccactgctacaac

SEQ ID NO: 249812 - DNA, 120 bp, Artificial Sequence
  ENSG00000123200_28 (sequence is synthesized)
tgtgcctgcaactcttgctgccactactgctgctgccgccacctctttcagcacatctgccatcactatttccacctctgccacccccaccaataccaccaataatacttttgccaatga

SEQ ID NO: 249813 - DNA, 120 bp, Artificial Sequence
  ENSG00000123200_29 (sequence is synthesized)
agactcacacagaaaatgccacagaacacgagtagaaaaagtagagacgcctcacgtgactatagaagatgcacagcatcgcaagcctatggatcaaaagaggagcagcagcctcgggag

SEQ ID NO: 249814 - DNA, 120 bp, Artificial Sequence
  ENSG00000123200_30 (sequence is synthesized)
caatcggagtaaccgtagtcatacgtctggtcgtcttcgctccccatccaatgattcagcccatcgaagtggagatgaccaaagtggtcgaaagagagtactgcacagtggctcaagaga

SEQ ID NO: 249815 - DNA, 120 bp, Artificial Sequence
  ENSG00000123200_31 (sequence is synthesized)
tagagaaaaaacaaaaagcctggaaatcacaggagagagaaaatctaggattgatcagttaaagcgtggagaacccagtcgaagtacttcttcagatcgccaggattcaagaagccatag

SEQ ID NO: 249816 - DNA, 120 bp, Artificial Sequence
  ENSG00000123200_32 (sequence is synthesized)
ttcaagaagaagttctccagagtcagatcgacaggtccattcaagatctgggtcatttgatagcagagacaggcttcaagaacgagatcgatatgaacacgacagagagcgcgagagaga

SEQ ID NO: 249817 - DNA, 120 bp, Artificial Sequence
  ENSG00000123200_33 (sequence is synthesized)
gaggagagatacgaggcagagagaatgggaccgagatgctgataaagattggccacgcaacagggatcgagatagattgcgagaacgagaacgagagagagaacgagacaaaaggagaga

SEQ ID NO: 249818 - DNA, 120 bp, Artificial Sequence
  ENSG00000123200_34 (sequence is synthesized)
cttggatagggaaagagagagactaatttctgattctgttgaaagggacagggacagagacagagacagaacttttgagagttctcaaatagagtctgtgaaacgctgtgaagcaaaact

SEQ ID NO: 249819 - DNA, 120 bp, Artificial Sequence
  ENSG00000123200_35 (sequence is synthesized)
ggaaggtgaacatgaaagggatctagaaagcacttcccgagactctctagccttggataaagagagaatggataaagatctgggatctgtgcagggatttgaagaaacaaataaatccga

SEQ ID NO: 249820 - DNA, 120 bp, Artificial Sequence
  ENSG00000123200_36 (sequence is synthesized)
gagaactgagagtctggaagcaggagatgacgagtccaagttagatgatgcacattcattaggctctggtgctggagaaggatacgagccaatcagtgatgacgaactagatgaaattct

SEQ ID NO: 249821 - DNA, 120 bp, Artificial Sequence
  ENSG00000123200_37 (sequence is synthesized)
ggcaggtgatgcagaaaagagggaggaccaacaggatgaggagaagatgccagatcccttagatgtgatagatgtggattggtctggtcttatgccaaagcatccaaaagaaccacgaga

SEQ ID NO: 249822 - DNA, 120 bp, Artificial Sequence
  ENSG00000123200_38 (sequence is synthesized)
gcctggggctgcactcttaaaattcacacctggagctgttatgctaagagttgggatttctaaaaagttggcaggttctgaactctttgccaaagtcaaagaaacatgtcagagactttt

SEQ ID NO: 249823 - DNA, 120 bp, Artificial Sequence
  ENSG00000123200_39 (sequence is synthesized)
agaaaaacccaaaggtagtttcattttactttaactatataatgtctgttaaccatttaagatgccatctgaaggggattctgatctgttcttatgtagcacttaacactgtgtagaaac

SEQ ID NO: 249824 - DNA, 120 bp, Artificial Sequence
  ENSG00000123200_40 (sequence is synthesized)
tattttttgagaaatcattttataatcattatttaaccctcatggtcaaagtttctctttaaaatttattttgagaagaagagttatcccacagaaaagttgggaaaagagtacaatgac

SEQ ID NO: 249825 - DNA, 120 bp, Artificial Sequence
  ENSG00000123200_41 (sequence is synthesized)
ctttttgtatgaaaattacttattaacaggccaggcgtggtgttgcatgtctgtagtcacagctactcagggaggttgaggcagcaggattgctggagcccaggaaattgaggctgcagt

SEQ ID NO: 249826 - DNA, 120 bp, Artificial Sequence
  ENSG00000123200_42 (sequence is synthesized)
agcaagaccctgtctcaaaaaaaaaaaaacaaattaaccaataagttctaatatcaaagtgctcagtggtttgcccttggctaaatgaagcagagccaggaaaaacagactacatatttt

SEQ ID NO: 249827 - DNA, 120 bp, Artificial Sequence
  ENSG00000123200_43 (sequence is synthesized)
ctaaatgaagcagagccaggaaaaacagactacatatttttcatgtctaaagaaattgggtattttggcagccctttcccctagacatctacccaaatgcaggtgtgtaggttgagtctt

SEQ ID NO: 249828 - DNA, 120 bp, Artificial Sequence
  ENSG00000123200_44 (sequence is synthesized)
taacaaagtgattaagagcttggtctgtaaggccggatgatctggatttcagtaggcacaccacttactggctattacttaatctgtgtgttagtgtcatcatctgtaagtcaggaataa

SEQ ID NO: 249829 - DNA, 120 bp, Artificial Sequence
  ENSG00000123200_45 (sequence is synthesized)
tcataccaccaacttcctatggtaattaggagcaaatgagttattacaggcaaaacacttagaacagttcctggcatatagtaatacccaataaatattaactgctactttgaaaatatc

SEQ ID NO: 249830 - DNA, 120 bp, Artificial Sequence
  ENSG00000123200_46 (sequence is synthesized)
ctatcacgctgatttttgacctcactgcagcaattttcagttattccagattatctagcttatggattctggtggtaggggttgtttggttttggttttcactgtctctgtctcatctag

SEQ ID NO: 249831 - DNA, 120 bp, Artificial Sequence
  ENSG00000123200_47 (sequence is synthesized)
tacctaccttagtttattttgcaacttactaatactttattaatggggagggacgagtagatggtaaaaagaaggaaaaggaggtaaaaggtgaaaggaacaacattaattaacaatttt

SEQ ID NO: 249832 - DNA, 120 bp, Artificial Sequence
  ENSG00000123200_48 (sequence is synthesized)
acgtcatgtccctggacataaaagtttagttagtattaaatttttcactaatacaaaataaaaaaatattgttttatgagttttatgaattcatgcccttcctttactctattagcataa

SEQ ID NO: 249833 - DNA, 120 bp, Artificial Sequence
  ENSG00000123200_49 (sequence is synthesized)
gcagtaaatttttttattttaatatagcccaataaacctagagtatacatgtacaaaatacatataattgttaacgtgtattaaccgaaaaatgacccaagacttagttcttgccctact

SEQ ID NO: 249834 - DNA, 120 bp, Artificial Sequence
  ENSG00000123200_50 (sequence is synthesized)
gtatctgccttgtttggttggttctgtgaccttaagcaaataactcctgtgagcctcaattttatttgtaaagtgatggaataaaacccctaaaatcttacccacctctaaagatatttg

SEQ ID NO: 249835 - DNA, 120 bp, Artificial Sequence
  ENSG00000123200_51 (sequence is synthesized)
tttctgtgaccttttgctagtagcatttcaagttaaaatctggtttgattttgctacccatgaaatacagttcggcccttacttattgatgacttaacctaaacagtgaaaatatgcact

SEQ ID NO: 249836 - DNA, 120 bp, Artificial Sequence
  ENSG00000123200_52 (sequence is synthesized)
gtaaagggtggggtgatgtggcttaacaatcagacttcttctatttttgctgctatggtggttgtattagagaactgatgtattatcttgaataaagactttgtcttgtttactgccata

SEQ ID NO: 249837 - DNA, 120 bp, Artificial Sequence
  ENSG00000123200_53 (sequence is synthesized)
aaacctctgacttccggcggcattttgaggcggtcctcctagcggcctggtagtgtttttgttgccttttcttaatctacaatctcttcgttatttttcttcctgcgacccagtttcgct

SEQ ID NO: 249838 - DNA, 120 bp, Artificial Sequence
  ENSG00000123200_54 (sequence is synthesized)
tgaccctggagaggcggcgggcgggttggttctgcttctcagccatcccgggggctcctcgctagccaagagccggttcccgggagccgcgcgcgcatcgctttctcctcgtcgtcgtcc

SEQ ID NO: 249839 - DNA, 120 bp, Artificial Sequence
  ENSG00000123200_55 (sequence is synthesized)
tcctgggtccaggcgcggggacagagtcgcctcccccgctcctcggagcggcggcggcggtggtgcctccggactgcacttgcgaagggagcttggggaggaatacaaaatgtcaaaaat

SEQ ID NO: 249840 - DNA, 120 bp, Artificial Sequence
  ENSG00000123200_56 (sequence is synthesized)
aagatgcagacaatctctttgaacatgaattgggggctctcaatatggctgcattactacgaaaagaagaaagagcaagtcttcttagtaatcttggcccatgttgtaaggcgttgtgct

SEQ ID NO: 249841 - DNA, 120 bp, Artificial Sequence
  ENSG00000123200_57 (sequence is synthesized)
tcagacgggattctgcaattcgaaagcagcttgttaaaaatgagaagggcaccataaaacaagcttacacgagtgctccaatggtagacaatgaattacttcgattgagtcttcggttat

SEQ ID NO: 249842 - DNA, 120 bp, Artificial Sequence
  ENSG00000123200_58 (sequence is synthesized)
ttaagcggaagactacttgccatgctccaggacatgaaaagactgaagataataaactttcacagtccagtatccaacaggaactgtgtgtgtcttaagaccgaagttcaatatggtatt

SEQ ID NO: 249843 - DNA, 120 bp, Artificial Sequence
  ENSG00000123200_59 (sequence is synthesized)
tttggtactgtcttccttcagcagtgcatattcttttgcaaagttctttggtttgacaagcattagtgacaaaggcagaaaagatttatcagccatgctaaaagagtgaagaattttgat

SEQ ID NO: 249844 - DNA, 120 bp, Artificial Sequence
  ENSG00000123200_60 (sequence is synthesized)
ctttagagacactagttttggccaacttaagattttacgttaatttttacatagtatttgacactcatgcaaaataatgtgaaaacatctagatttagtagtttattctgcgccttttgt

SEQ ID NO: 249845 - DNA, 120 bp, Artificial Sequence
  ENSG00000123200_61 (sequence is synthesized)
taaaactgaagattttggaaaatggttgtcactgctcttccagcctatgaatatttttgtgaaatggaaccatggatttatgtctggatcatccatacagaaccaacaattttattcaaa

SEQ ID NO: 249846 - DNA, 120 bp, Artificial Sequence
  ENSG00000123200_62 (sequence is synthesized)
aacaatgtgttcatcaaagtaattgctcacattgtgcagtactatgttgtacagaccacgtgaaagggaatgctggtctagctggcgtggtatgtttataggcgaatttcagcagaagga

SEQ ID NO: 249847 - DNA, 120 bp, Artificial Sequence
  ENSG00000123200_63 (sequence is synthesized)
agccaaaatagttttttccttttgaaagttttttaaaaattatttcatgggtcttttttttaattaatatgtgtgcattgttacaatgtatgttggatgtcttttgaccctaaatgcttt

SEQ ID NO: 249848 - DNA, 120 bp, Artificial Sequence
  ENSG00000123200_64 (sequence is synthesized)
ttttgttatcagagattgtgtactatttttatttttaataaatgtatcttccctttccttgttttagatttactttgctcttcgttaatcttattcctgatgatctagaacattagtcat

SEQ ID NO: 249849 - DNA, 120 bp, Artificial Sequence
  ENSG00000123200_65 (sequence is synthesized)
caacattacatgtttcatgcttcagatattttactgcttgtgtccttattgttggacagctttaaacagagttgatgtacttcaaatatagctcattgatacttaaggcatcttcttgga

SEQ ID NO: 249850 - DNA, 120 bp, Artificial Sequence
  ENSG00000123200_66 (sequence is synthesized)
atgtggcttttgaagaaaaaaattactcaaagcaaatcaagagttaacaaacctaacgtaacctgaggtttaatattctactatcatattttttagagctataacttttgattatattaa

SEQ ID NO: 249851 - DNA, 120 bp, Artificial Sequence
  ENSG00000123200_67 (sequence is synthesized)
actgcctccagctgtactatgtaaaacagatttacttttaaaaattacagtatacctgctttgttctatatgtatatgtttaactcatgaagtggactcttagaaggatttgaaatggac

SEQ ID NO: 249852 - DNA, 120 bp, Artificial Sequence
  ENSG00000123200_68 (sequence is synthesized)
tctggccacagaatttgtgagcagacagtagtagtgataataataaaagaaggcaatcaaaatttaattttatcatgccctctcacaggtttgtgttataattgtaagcccatattactt

SEQ ID NO: 249853 - DNA, 120 bp, Artificial Sequence
  ENSG00000123200_69 (sequence is synthesized)
gtgttagtagttttgtctctataggtaacataatgacagtggtgtaaagtttctgttcaagaaacatatgttgtaaagttactttatacaagatacctgccaaaggaaatggtcttactt

SEQ ID NO: 249854 - DNA, 120 bp, Artificial Sequence
  ENSG00000123200_70 (sequence is synthesized)
tcaaatgactttgaaagcatgtataattgcaaacagagcaggagaagactttaatcagaatttccttgtgtccttttcctttactaagtgttttgaataaagaaaaaaaaaatgtatgac

SEQ ID NO: 249855 - DNA, 120 bp, Artificial Sequence
  ENSG00000123200_71 (sequence is synthesized)
ctcagagaatgaatacccttcaggaagccacttcctgattttagtggataatattgttctctgtagcacaaagatttaaagtcctagaatttctaatcctagttctcagaattgtagaat

SEQ ID NO: 249856 - DNA, 120 bp, Artificial Sequence
  ENSG00000123200_72 (sequence is synthesized)
atgacaaaaataatggtttccccatttgtccactgacttcagggatatttcacaagttatttatttatagaatgaaaactatgtagttaaatctgtcattcagttaaacctgttgtcttt

SEQ ID NO: 249857 - DNA, 120 bp, Artificial Sequence
  ENSG00000123200_73 (sequence is synthesized)
cagtttgaaatctttttgttatgtatgttgcaaaagaaaatttagaactattcctttgttcactcagtcacagcattcagagctttatgtttccagtggaaatgtactgttcagtctcaa

SEQ ID NO: 249858 - DNA, 120 bp, Artificial Sequence
  ENSG00000123200_74 (sequence is synthesized)
tttcttttaattcaaccattctcagtattagtaacatatacctataaaatttttctaaagcaaaatttttgattgaatttctcataaaagctcttggaccataattaaagtctcagttaa

SEQ ID NO: 249859 - DNA, 120 bp, Artificial Sequence
  ENSG00000123200_75 (sequence is synthesized)
actggtattcccgaaaaacaatcttccagtctataaattgtttgctagtacaattaaaaggtcatctatctcataactgacggctcaggtctgtccagttgccataattgcacaactgga

SEQ ID NO: 249860 - DNA, 120 bp, Artificial Sequence
  ENSG00000123200_76 (sequence is synthesized)
ttccagctgctggtaataaggaattgtgtagatagataaagggcaagagtatgtctgcaatccaaaataaatgagagttaacacataattagccttttgattattttggcagctatcctc

SEQ ID NO: 249861 - DNA, 120 bp, Artificial Sequence
  ENSG00000123200_77 (sequence is synthesized)
accatttagtaaagggtatactaacaatacccaactttatttaacaaagttttgtaagcatacctaagtagtaacttgatatgctgaaaaatctgacctgtcacttcgcttcactctgac

SEQ ID NO: 249862 - DNA, 120 bp, Artificial Sequence
  ENSG00000123200_78 (sequence is synthesized)
cagtaattgcagattgtcgtcaccatcctagcctatgactacattaggattttatgacttattaacttgaaaatctgttctgtaagtggcattggtagaatctcccactttgctcctcac

SEQ ID NO: 249863 - DNA, 120 bp, Artificial Sequence
  ENSG00000123200_79 (sequence is synthesized)
tgtccaattgtgtaaagattaaggtacatactattgttggtgatgcttttacacctcaacttgctattttaaaaggttatatgaacccctcccacttttaaggatattcccttttactga

SEQ ID NO: 249864 - DNA, 120 bp, Artificial Sequence
  ENSG00000123200_80 (sequence is synthesized)
ttttcctagctaaaattatatagccatctttctaaatattgtatttaaatctgatctaggacttgccttattttatcatttttctttaataatctccaataaactttctttattcattaa

SEQ ID NO: 249865 - DNA, 120 bp, Artificial Sequence
  ENSG00000123200_81 (sequence is synthesized)
ggtacttttagtacattttatatttaatgtaagcttttttgttctaaaaagaaatttgaaatgtttcaattaaaaagacaattatagagaacaataaaacaaacatctgtgtaacatcca

SEQ ID NO: 249866 - DNA, 120 bp, Artificial Sequence
  ENSG00000123200_82 (sequence is synthesized)
cactggagttctaaagccatatgtgacaagacattggaaaaagacattttggtttaggaagagttaattaccaaggttcttaggtggggctgttattttcatttgtctccattactctga

SEQ ID NO: 249867 - DNA, 120 bp, Artificial Sequence
  ENSG00000123200_83 (sequence is synthesized)
atgaagaaattacaggcgcaccaattttattgaagctcacagatgttgtgtatttttacaaatggaaggtttgtggcatccctgcattaaacaagcctatcagtgccatttttccaataa

SEQ ID NO: 249868 - DNA, 80 bp, Artificial Sequence
  ENSG00000123213_0 (sequence is synthesized)
aggcgccggcgtggagctgccgcacgtgggagggcgctggccaggcagccactgtggcctctgcggctaggccggctcga

SEQ ID NO: 249869 - DNA, 120 bp, Artificial Sequence
  ENSG00000123213_1 (sequence is synthesized)
ccacgccgaaggaccacgcgcccgccgccgccagcctctcagcgctcccatgatcgcccggtgccttttggctgtgcgaagcctccgcagagttggtggttccaggattttactcagaat

SEQ ID NO: 249870 - DNA, 120 bp, Artificial Sequence
  ENSG00000123213_2 (sequence is synthesized)
gacgttaggaagagaagtgatgtctcctcttcaggcaatgtcttcctatactgtggctggcagaaatgttttaagatgggatctttcaccagagcaaattaaaacaagaactgaggagct

SEQ ID NO: 249871 - DNA, 120 bp, Artificial Sequence
  ENSG00000123213_3 (sequence is synthesized)
cattgtgcagaccaaacaggtgtacgatgctgttggaatgctcggtattgaggaagtaacttacgagaactgtctgcaggcactggcagatgtagaagtaaagtatatagtggaaaggac

SEQ ID NO: 249872 - DNA, 120 bp, Artificial Sequence
  ENSG00000123213_4 (sequence is synthesized)
catgctagactttccccagcatgtatcctctgacaaagaagtacgagcagcaagtacagaagcagacaaaagactttctcgttttgatattgagatgagcatgagaggagatatatttga

SEQ ID NO: 249873 - DNA, 120 bp, Artificial Sequence
  ENSG00000123213_5 (sequence is synthesized)
gagaattgttcatttacaggaaacctgtgatctggggaagataaaacctgaggccagacgatacttggaaaagtcaattaaaatggggaaaagaaatgggctccatcttcctgaacaagt

SEQ ID NO: 249874 - DNA, 120 bp, Artificial Sequence
  ENSG00000123213_6 (sequence is synthesized)
acagaatgaaatcaaatcaatgaagaaaagaatgagtgagctatgtattgattttaacaaaaacctcaatgaggatgataccttccttgtattttccaaggctgaacttggtgctcttcc

SEQ ID NO: 249875 - DNA, 120 bp, Artificial Sequence
  ENSG00000123213_7 (sequence is synthesized)
tgatgatttcattgacagtttagaaaagacagatgatgacaagtataaaattaccttaaaatatccacactatttccctgtcatgaagaaatgttgtatccctgaaaccagaagaaggat

SEQ ID NO: 249876 - DNA, 120 bp, Artificial Sequence
  ENSG00000123213_8 (sequence is synthesized)
ggaaatggcttttaatacaaggtgcaaagaggaaaacaccataattttgcagcagctactcccactgcgaaccaaggtggccaaactactcggttatagcacacatgctgacttcgtcct

SEQ ID NO: 249877 - DNA, 120 bp, Artificial Sequence
  ENSG00000123213_9 (sequence is synthesized)
tgaaatgaacactgcaaagagcacaagccgcgtaacagcctttctagatgatttaagccagaagttaaaacccttgggtgaagcagaacgagagtttattttgaatttgaagaaaaagga

SEQ ID NO: 249878 - DNA, 120 bp, Artificial Sequence
  ENSG00000123213_10 (sequence is synthesized)
atgcaaagacaggggttttgaatatgatgggaaaatcaatgcctgggatctatattactacatgactcagacagaggaactcaagtattccatagaccaagagttcctcaaggaatactt

SEQ ID NO: 249879 - DNA, 120 bp, Artificial Sequence
  ENSG00000123213_11 (sequence is synthesized)
cccaattgaggtggtcactgaaggcttgctgaacacctaccaggagttgttgggactttcatttgaacaaatgacagatgctcatgtttggaacaagagtgttacactttatactgtgaa

SEQ ID NO: 249880 - DNA, 120 bp, Artificial Sequence
  ENSG00000123213_12 (sequence is synthesized)
ggataaagctacaggagaagtattgggacagttctatttggacctctatccaagggaaggaaaatacaatcatgcggcctgcttcggtctccagcctggctgccttctgcctgatggaag

SEQ ID NO: 249881 - DNA, 120 bp, Artificial Sequence
  ENSG00000123213_13 (sequence is synthesized)
ccggatgatggcagtggctgccctcgtggtgaacttctcacagccagtggcaggtcgtccctctctcctgagacacgacgaggtgaggacttactttcatgagtttggtcacgtgatgca

SEQ ID NO: 249882 - DNA, 120 bp, Artificial Sequence
  ENSG00000123213_14 (sequence is synthesized)
tcagatttgtgcacagactgattttgcacgatttagcggaacaaatgtggaaactgactttgtagaggtgccatcgcaaatgcttgaaaattgggtgtgggacgtcgattccctccgaag

SEQ ID NO: 249883 - DNA, 120 bp, Artificial Sequence
  ENSG00000123213_15 (sequence is synthesized)
attgtcaaaacattataaagatggaagccctattgcagacgatctgcttgaaaaacttgttgcttctaggctggtcaacacaggtcttctgaccctgcgccagattgttttgagcaaagt

SEQ ID NO: 249884 - DNA, 120 bp, Artificial Sequence
  ENSG00000123213_16 (sequence is synthesized)
tgatcagtctcttcataccaacacatcgctggatgctgcaagtgaatatgccaaatactgctcagaaatattaggagttgcagctactccaggcacaaatatgccagctacctttggaca

SEQ ID NO: 249885 - DNA, 120 bp, Artificial Sequence
  ENSG00000123213_17 (sequence is synthesized)
tttggcagggggatacgatggccaatattatggatatctttggagtgaagtattttccatggatatgttttacagctgttttaaaaaagaagggataatgaatccagaggttggaatgaa

SEQ ID NO: 249886 - DNA, 120 bp, Artificial Sequence
  ENSG00000123213_18 (sequence is synthesized)
atacagaaacctaatcctgaaacctgggggatctctggacggcatggacatgctccacaatttcttgaaacgtgagccaaaccaaaaagcgttcctaatgagtagaggcctgcatgctcc

SEQ ID NO: 249887 - DNA, 120 bp, Artificial Sequence
  ENSG00000123213_19 (sequence is synthesized)
gtgaactggggatctttggtagccgtccatgtctggaggacaagtcgacatcaccatgtgttactggcctggaaactgaagggagttttgcaagtgaaaatttagatttctattgacatc

SEQ ID NO: 249888 - DNA, 120 bp, Artificial Sequence
  ENSG00000123213_20 (sequence is synthesized)
cttttgttttctaattttaaaaattataaagatgtaaatggaattataaatactgtgacctaagaaaagacccactagaaagtaattgtactataaaatttcataaaactggatttgatt

SEQ ID NO: 249889 - DNA, 120 bp, Artificial Sequence
  ENSG00000123213_21 (sequence is synthesized)
tactattataatctagataatatgatataagagggctaagaatttttaaattgaatcatatatatgatataatttgatccttcttgtatcttgaagttttgtacttgggatttctggact

SEQ ID NO: 249890 - DNA, 120 bp, Artificial Sequence
  ENSG00000123213_22 (sequence is synthesized)
ttcttgtatcttgaagttttgtacttgggatttctggactgataaatgaatcatcacattcttctggtaaatattttcttggagctctgtgtcaactttgatcctttgtctcccaggaag

SEQ ID NO: 249891 - DNA, 120 bp, Artificial Sequence
  ENSG00000123213_23 (sequence is synthesized)
gtgtgacctctcctttgcctgcatacctcaaggccaggggaatatgcctcagtgatgcatttatctttgtatatcaggccgcatgattcccaactttctgccacacttaaattacgttcc

SEQ ID NO: 249892 - DNA, 120 bp, Artificial Sequence
  ENSG00000123213_24 (sequence is synthesized)
tccatttcagttttgtcttttctgtctaaagttcagtcaaagagtatcaaaaaattatgtttcagctagactggtgtaatgtataagtttttgtatcttgtattagaggatttcgtagct

SEQ ID NO: 249893 - DNA, 120 bp, Artificial Sequence
  ENSG00000123213_25 (sequence is synthesized)
tttattagaggctcatttccacctcagcatacaagatcgttagtcttttggcatgtgtgccaattagaatactaaagcaagtccaagcacatttttctcttctcacgtttctaataagtg

SEQ ID NO: 249894 - DNA, 120 bp, Artificial Sequence
  ENSG00000123213_26 (sequence is synthesized)
ttagggactttgcctcttttacttaccacgtccccaaaagtgtcaggtagacatgtcacaaatggctctgtagagagccatgggaagagagaggaggtggatgtggaacataaagggttc

SEQ ID NO: 249895 - DNA, 120 bp, Artificial Sequence
  ENSG00000123213_27 (sequence is synthesized)
agaaactccagaagaggagtgggttttggatagaagcatttgaggacagctgctccaaagccttatgtgtatgatgaaacttaaccacggggaagagactcttcagtagcctgttctgtc

SEQ ID NO: 249896 - DNA, 120 bp, Artificial Sequence
  ENSG00000123213_28 (sequence is synthesized)
tggtgatttttattttaagtgaacctttggatctatctttaactctctttattgtgagtctaaattccaattctgcagcagatcagtaaactcacagtatttttcctgtggaaatctatt

SEQ ID NO: 249897 - DNA, 120 bp, Artificial Sequence
  ENSG00000123213_29 (sequence is synthesized)
caataaggaaaccaagacaggataataaaatttaaaaaaaaaacaactttgaattcccctgcctaggtcttccagttgttttccagcgcatacctcaggtatgactttgctagccgggga

SEQ ID NO: 249898 - DNA, 120 bp, Artificial Sequence
  ENSG00000123213_30 (sequence is synthesized)
caaaattagcaccttccgattctctagtccaaatgaactttgtgctaaataaaaaattattatactacataataaagttacagatagcaggaaatgcaagagctaggagattcctagatt

SEQ ID NO: 249899 - DNA, 120 bp, Artificial Sequence
  ENSG00000123213_31 (sequence is synthesized)
atatctgccaagcaaataccttaaacatccacctgaaatcctactaccccctcttctgagataatttgcccagcccttctcttcccacacactcactcaatgtcacccccttctaatccc

SEQ ID NO: 249900 - DNA, 120 bp, Artificial Sequence
  ENSG00000123213_32 (sequence is synthesized)
caaaactgtttttgtggtctttgtagcctatagtagttttctcacatctttccccctagacttttctgtttttcagtttcagacaaaaaaactcttcagctttttccagtgtgtctcctt

SEQ ID NO: 249901 - DNA, 120 bp, Artificial Sequence
  ENSG00000123213_33 (sequence is synthesized)
aacagtaactttaccacttgaaatcttatttcatagaaaaactaaattggtgtggaaaggctgcacacaataaagttatattattatccatgaaaatgaactcatatttctttcatactt

SEQ ID NO: 249902 - DNA, 120 bp, Artificial Sequence
  ENSG00000123213_34 (sequence is synthesized)
taacgttaaaaccgaaatgcatgagagcaaaagcaccatggtgttctttctatttagggcctacctctaatatttaaaatctaccaaagagcagtcacaaaattaaaactcagcccgggc

SEQ ID NO: 249903 - DNA, 82 bp, Artificial Sequence
  ENSG00000123213_35 (sequence is synthesized)
aaggcaggaggatcacctgaggtcagagttcaagaccagcatggtgctgggcatgatgttgggttcctgtagtcccagctac

SEQ ID NO: 249904 - DNA, 120 bp, Artificial Sequence
  ENSG00000123213_36 (sequence is synthesized)
gagtgagattcagtctcaaaaaaaattaatactcaaagaattatctagcataatttaaaagaaaggactttttaaaaattctctagcataattcaaaagaaaggacttaacttttttttt

SEQ ID NO: 249905 - DNA, 120 bp, Artificial Sequence
  ENSG00000123213_37 (sequence is synthesized)
tttagtgtggtcatccgtctagttgttctttttttccagatcagagcagagaatatcactgacatgcttgaaatggtggataactatgtaaattgtaattggacaaatgtacactttaga

SEQ ID NO: 249906 - DNA, 120 bp, Artificial Sequence
  ENSG00000123213_38 (sequence is synthesized)
tttatggactgagccacatataataaggtctctcctggtaattgatccaggggatttaggcctctttcgggttttttgttttttttttaggcattgttatgttgtgaaggataaaatctt

SEQ ID NO: 249907 - DNA, 120 bp, Artificial Sequence
  ENSG00000123213_39 (sequence is synthesized)
caacatcttatgcaaatggatagtaggcatgatcctaaaggtttagttttacgatgctgcagagaagagaaatgtcttgacgttttgccacctgatgtagactttgtccccctctagtat

SEQ ID NO: 249908 - DNA, 120 bp, Artificial Sequence
  ENSG00000123213_40 (sequence is synthesized)
aaatgttgcatgttacctagataaacaactaaaaattgccttgagttatcacctgagctacttatgccaaggtcttgcctttctaaagctaataaggtgagaggtggatatctgtagctc

SEQ ID NO: 249909 - DNA, 120 bp, Artificial Sequence
  ENSG00000123213_41 (sequence is synthesized)
ttcggatgaaaaattgcattgtgggagataccaaaattgaggaaatagctcttcaaagaaaaattactgatatgatcattgtacttgtaaatgccttaagtagcaggcagtgactcaatt

SEQ ID NO: 249910 - DNA, 120 bp, Artificial Sequence
  ENSG00000123213_42 (sequence is synthesized)
ttctactttaccattttacctttagcttttatgtatgaattataggtctgtggagattctgcctccccactaggccagtgtgtgtttaccatttattcattttctatcatacacaggtgg

SEQ ID NO: 249911 - DNA, 120 bp, Artificial Sequence
  ENSG00000123213_43 (sequence is synthesized)
attaaaatttacattaaaatttacattaaaataccatcatacttcaggcttctataacaaaatatcagactgggtggcttcaaaagcagacatttcttacagttctggaagctgggaagt

SEQ ID NO: 249912 - DNA, 120 bp, Artificial Sequence
  ENSG00000123213_44 (sequence is synthesized)
cccacaatccacatgctggtaaatttggttcgtggtgaggcccctcttcctcttttactgaccacatccccaaaagtgtcaggtagacatgttacaaatagctctgtagagagccatggg

SEQ ID NO: 249913 - DNA, 120 bp, Artificial Sequence
  ENSG00000123213_45 (sequence is synthesized)
aagagacaggaggcagatgtggaacataaagggtttagaaacttctgcaggcagcagtggcagggagcaagccctagagtgtctctttttacgagagcaggaatcccatcatgagagttc

SEQ ID NO: 249914 - DNA, 120 bp, Artificial Sequence
  ENSG00000123213_46 (sequence is synthesized)
cttcctcatgactttatctaaacccagtcacccccaacaaaggccccaccccctaaccccatcacattggctgttacggcttcaatgtaggggatggggcacaaacattcagtccataac

SEQ ID NO: 249915 - DNA, 120 bp, Artificial Sequence
  ENSG00000123213_47 (sequence is synthesized)
gaatactgattcctcaaatagggtttaaacatagttaactgagcccccaaagaatgttaaaagagaaaatccattttatttgaatagatgcagtgaccacagcttcttccctcaaatcaa

SEQ ID NO: 249916 - DNA, 120 bp, Artificial Sequence
  ENSG00000123213_48 (sequence is synthesized)
cacattacagttagatgtctcccatctgaaattggatagcccactgaaattgaacatgccttctcttataaatgtgtggtgagaataaaagcaacaaagaaatgaatgtggtggctcaca

SEQ ID NO: 249917 - DNA, 89 bp, Artificial Sequence
  ENSG00000123213_49 (sequence is synthesized)
ggctcacacctgtaatcctaacactttggaaggttgaggcaggaggatcctttgtgctcaagagtttgagaccagcctgactaaaaaaa

SEQ ID NO: 249918 - DNA, 120 bp, Artificial Sequence
  ENSG00000123213_50 (sequence is synthesized)
tgacagagaccctgtcttaaaataaaataaaaaaaaaaggaaaaggaaagacatacataccctcagttcttcgaaaaacagtcaacgtccaaaaagtttattttttgagtcacctttaat

SEQ ID NO: 249919 - DNA, 120 bp, Artificial Sequence
  ENSG00000123213_51 (sequence is synthesized)
agagaaatttcccactggaaacagatccacctaagtgattatctagtatcagctgtatcaaggcaaaaggtaaaggttataagatgtaaatattagaccaaaatagccttttttaacaaa

SEQ ID NO: 249920 - DNA, 120 bp, Artificial Sequence
  ENSG00000123213_52 (sequence is synthesized)
cacaataatgctgtacgtctgtaacaaaacaaaatttgaaaaattgaggtaatgtacacagcgatgcacacacccccacaccacaccgtgattcctgagttttgatttggttgaattcac

SEQ ID NO: 249921 - DNA, 120 bp, Artificial Sequence
  ENSG00000123213_53 (sequence is synthesized)
cttgtagttccctttcctgagaaaatacaggttcaacacatctagtccacgatgtacgtacaaggggaaggggtgaacaggaaatagactcccttattctgctcacatgagctggaacct

SEQ ID NO: 249922 - DNA, 120 bp, Artificial Sequence
  ENSG00000123213_54 (sequence is synthesized)
gtactagctgcatatttcatagaccccagaggctcacctcaattgtactcctatgataaaatgtctctagcatttgtcatgagagaaactggctagaaatagtttgttcattgcgtccag

SEQ ID NO: 249923 - DNA, 120 bp, Artificial Sequence
  ENSG00000123213_55 (sequence is synthesized)
caagacacgcattgctgttgatatctttgtggctaagatggagaatgtgactggataatagttatccaggtggattactagctattgaaacagtctgagatagttgcatgatgattaacg

SEQ ID NO: 249924 - DNA, 120 bp, Artificial Sequence
  ENSG00000123213_56 (sequence is synthesized)
ttaaactgggagtaatttcaagtcatttggctaaaaatgaaaaaaaagtcccataaaaaggtatcaaatgtacagataatagggctggaattattaagtatgatgatgttattaacatct

SEQ ID NO: 249925 - DNA, 120 bp, Artificial Sequence
  ENSG00000123213_57 (sequence is synthesized)
attaagtatgatgatgttattaacatctaaaattattttggccgggcaaggtgggtcacgcctgtaatctcagcactttgggatgccaagatgggtggatcacctgagttcaggagttca

SEQ ID NO: 249926 - DNA, 120 bp, Artificial Sequence
  ENSG00000123213_58 (sequence is synthesized)
ccgacattgtgccgcttcattccagcctgggcaacagagtgaaactcttgtctcaaaagtaaaaaaataataatgtttaaaaatatttcaatgtggagacaagctcaaaatgaaattaga

SEQ ID NO: 249927 - DNA, 120 bp, Artificial Sequence
  ENSG00000123213_59 (sequence is synthesized)
cacattccattacccaggtaaaagaaggggaagcctgacttgatagtagtattcaggaaaaaagagttggcagttttatttggccaaattccaatatcagctcatggtacagcacaccgg

SEQ ID NO: 249928 - DNA, 120 bp, Artificial Sequence
  ENSG00000123213_60 (sequence is synthesized)
gggagggggacgggaggcgagaactaaggctttttaagaatgtgttgatggaagtatgtgcctagatcaaaagaataatccccccggactccagtgtaagatcaattactgttggaatat

SEQ ID NO: 249929 - DNA, 120 bp, Artificial Sequence
  ENSG00000123213_61 (sequence is synthesized)
tgtgttcctttctagatatcacattttaagcagactttggccaagtagtacagtgtttgcaggagcagtaacaagatggtgataactttgaaaatacttctcaaaagaaaaataaaaaag

SEQ ID NO: 249930 - DNA, 120 bp, Artificial Sequence
  ENSG00000123213_62 (sequence is synthesized)
aattagggaagttcagtctggagataattcagaaatacagatgataattgttttcaaattcttgaaggaaatgggagagagaataggctaattctgtattgcttcagaaaccaaatggaa

SEQ ID NO: 249931 - DNA, 120 bp, Artificial Sequence
  ENSG00000123213_63 (sequence is synthesized)
acaattaaattccattagagaaacggttggaaaatatgaggaggatttagttcagtacgaggaagctgtttctaatactttttgttggttaaaaatacattccgctgctgtggaaagcct

SEQ ID NO: 249932 - DNA, 120 bp, Artificial Sequence
  ENSG00000123213_64 (sequence is synthesized)
gtagctgccaggagtgttacagagggcattcctcccttgagttgacatttgtgccaaaccggcttttagggcttctccagcttttaagatgcgataatgataagatgatcatcgggaaaa

SEQ ID NO: 249933 - DNA, 120 bp, Artificial Sequence
  ENSG00000123213_65 (sequence is synthesized)
catccctcagatgaaacgttcacaggctggctctgaaaactggcattcagatgattgcggctcccccatactgtaggaatattgtttatggcttaaggttgcctcgctcctcatctgtaa

SEQ ID NO: 249934 - DNA, 120 bp, Artificial Sequence
  ENSG00000123213_66 (sequence is synthesized)
tcagtgaaagtttatccagaggttaattaccggttttctggtgggtatctgggaactgaggatgggagattaactgttgtatatgaccatagtaaagcaaaagactgttagagaatgagt

SEQ ID NO: 249935 - DNA, 120 bp, Artificial Sequence
  ENSG00000123213_67 (sequence is synthesized)
aaacgttcgttttcctccctacagaatttacagttactctctgtccattccactcactactgtcttcatcacacacacagaggcaaacgtctgattcagatagccaggtgtgccatgcat

SEQ ID NO: 249936 - DNA, 120 bp, Artificial Sequence
  ENSG00000123213_68 (sequence is synthesized)
gcactccaccatattgtgatctcttcgaggcttgtttctgtcccctgtcctccacagtcctggattgttaatgaatagttcatacatgtttgttaaataaatataccttctttaaaatta

SEQ ID NO: 249937 - DNA, 120 bp, Artificial Sequence
  ENSG00000123213_69 (sequence is synthesized)
ttagtttttttagaaaacttcttgactgctgtcaggtttctgctcctaacaggttttttcagaagctgaatgtgttcaagaattttataggccttctgcaaaaccaaaattttccttatc

SEQ ID NO: 249938 - DNA, 120 bp, Artificial Sequence
  ENSG00000123213_70 (sequence is synthesized)
ctgtcctctttcacaacatatttttacttggaggttcatctaccagtgaaagatgtttgttgaataacagcctatggaaaaagaataagactatctgtaaggaaaggttacaaatacttt

SEQ ID NO: 249939 - DNA, 120 bp, Artificial Sequence
  ENSG00000123213_71 (sequence is synthesized)
gctttttccttttaatcctttaggaatttgatataaatttctcagaaaaactgtgctgtaatctgtctcttctgcttatcaatgctttgtttactttagtggtttttcaatcctcttaga

SEQ ID NO: 249940 - DNA, 120 bp, Artificial Sequence
  ENSG00000123213_72 (sequence is synthesized)
ccctttactcatttttaaataataattttgtaacatttgcctttactaacttcaaattaaaatcatagataatatagtctaaccatgcaaagaatttgccagagtggaggtgtatgtgtg

SEQ ID NO: 249941 - DNA, 120 bp, Artificial Sequence
  ENSG00000123213_73 (sequence is synthesized)
cagtagattaaaactgatttttttatttctgaaaataaaaagtacatttattctcaactttgtaatacagtccatttaattaggcccagactattctagcatgaaccatatgaacttgct

SEQ ID NO: 249942 - DNA, 120 bp, Artificial Sequence
  ENSG00000123213_74 (sequence is synthesized)
atgaaccatatgaacttgctaacatttaaccattattaacatatgaaaatgtctagttcagcaattcaccgtaatagttgaaatatactgttatttggctgggcatggtggctcatgcct

SEQ ID NO: 249943 - DNA, 120 bp, Artificial Sequence
  ENSG00000123213_75 (sequence is synthesized)
ggccaaggtggaaggatcgcttgagtctaggagtttgagaacagcctgggcaacgtggtaaaacaaacaaaaattatccaggcatggtggtatgtgcctgtggtcccagctactcgggag

SEQ ID NO: 249944 - DNA, 120 bp, Artificial Sequence
  ENSG00000123213_76 (sequence is synthesized)
gctgaggtgggaggatcacttgagttcaggaggttgaggttgtagtgagccatgattgtgccactgcaccacagcctgggtgacagagcagaccttgacttaaaaaaaaaaaaaagaaaa

SEQ ID NO: 249945 - DNA, 89 bp, Artificial Sequence
  ENSG00000123213_77 (sequence is synthesized)
cacccaccttggccaccgtgcctggcaaaaaatgagtttctttttattgctaatgccctgtatttttatcttcctttcaggaaatcaaa

SEQ ID NO: 249946 - DNA, 120 bp, Artificial Sequence
  ENSG00000123213_78 (sequence is synthesized)
tttgctataccatgtcaaccagacagaaggcctcagaacataatatgcctttgaggacatcctacttttccttcatttgagagaagtatattgatcacctattaagtgttagatagtgtg

SEQ ID NO: 249947 - DNA, 120 bp, Artificial Sequence
  ENSG00000123213_79 (sequence is synthesized)
tagccagtgttcccttctcctctaggagccatacacttgatggacataaaacattgcagagaaaacagaagccctttcttctaaaaagattacaactcatatttgcttcaaataagacct

SEQ ID NO: 249948 - DNA, 120 bp, Artificial Sequence
  ENSG00000123213_80 (sequence is synthesized)
gaaatagctgctcactcctaaaagagtatctgaactttatgggaaaagaagagcaccatcaagtaggcaaccattcctggggagaagttgatttggctatcaggttaaataaacatcttt

SEQ ID NO: 249949 - DNA, 120 bp, Artificial Sequence
  ENSG00000123213_81 (sequence is synthesized)
ggagctagggagaaattgcttgtttaatggatctcttcatttttaatggaaaattctttaaaaatacttctgctttcaaagcttaaggcttgtttttagcttagactgattgtatttttc

SEQ ID NO: 249950 - DNA, 120 bp, Artificial Sequence
  ENSG00000123213_82 (sequence is synthesized)
agttctggttttctgatgattgttccaactttgtctacaattcaaaggaatgaaattactactgtaatatagagtatttgggggttgtttttcacactgttcagctgctgtgttttattt

SEQ ID NO: 249951 - DNA, 120 bp, Artificial Sequence
  ENSG00000123213_83 (sequence is synthesized)
ggtgagcttgtcaggtgcctgatcgtcatcccccgtccttggctggtcgctctctgccctgatgactgccgctcagtgtaggaaggagacagctctggctgccctccccagagtcatcca

SEQ ID NO: 249952 - DNA, 120 bp, Artificial Sequence
  ENSG00000123213_84 (sequence is synthesized)
tgctgggaaggatggaggaggggtggaaagttagtgagagcctgcatgtgctgctgcagagatgcccaagatagcaggagacccaatctgtttcccatttatatattctcattgctgata

SEQ ID NO: 249953 - DNA, 120 bp, Artificial Sequence
  ENSG00000123219_0 (sequence is synthesized)
taaatattttttgctttagtttttcttataaggctaaaaattcacaaagcatatatcaatgaatcaggaggatctagatccggatagtactacagatgtgggagatgttacaaatactga

SEQ ID NO: 249954 - DNA, 120 bp, Artificial Sequence
  ENSG00000123219_1 (sequence is synthesized)
agaagaacttattagagaatgtgaagaaatgtggaaagatatggaagaatgtcagaataaattatcacttattggaactgaaacactcaccgattcaaatgctcagctatcattgttaat

SEQ ID NO: 249955 - DNA, 120 bp, Artificial Sequence
  ENSG00000123219_2 (sequence is synthesized)
tatgcaagtaaaatgtttaaccgctgaactcagtcaatggcagaaaaaaacacctgaaacaattcccttgactgaagacgttctcataacattaggaaaagaagagttccaaaagctgag

SEQ ID NO: 249956 - DNA, 120 bp, Artificial Sequence
  ENSG00000123219_3 (sequence is synthesized)
acaagatcttgaaatggtactgtccactaaggagtcaaagaatgaaaagttaaaggaagacttagaaagggaacaacggtggttggatgaacagcaacagataatggaatctcttaatgt

SEQ ID NO: 249957 - DNA, 120 bp, Artificial Sequence
  ENSG00000123219_4 (sequence is synthesized)
actacacagtgaattgaaaaataaggttgaaacattttctgaatcaagaatctttaatgaactgaaaactaaaatgcttaatataaaagaatataaggagaaactcttgagtaccttggg

SEQ ID NO: 249958 - DNA, 120 bp, Artificial Sequence
  ENSG00000123219_5 (sequence is synthesized)
cgagtttctagaagaccattttcctctgcctgatagaagtgttaaaaagaaaaagaaaaacattcaagaatcatctgtaaacctgataacactgcatgaaatgttagagattcttataaa

SEQ ID NO: 249959 - DNA, 120 bp, Artificial Sequence
  ENSG00000123219_6 (sequence is synthesized)
ccacatgatccatatgtcaaaattagtgattccttttggccaccttatgttgagctgctgctgcgtaatggaattgccttgagacatccagaagatccaacccgaataagattagaagct

SEQ ID NO: 249960 - DNA, 120 bp, Artificial Sequence
  ENSG00000123219_7 (sequence is synthesized)
ttccatcagtaaaaggatgttttcttttttcacacagtaaaaattcttatcattcaaggatattggaaccacaggactatttggataaaaaacattatttgcaaattaatgcgcataggc

SEQ ID NO: 249961 - DNA, 120 bp, Artificial Sequence
  ENSG00000123219_8 (sequence is synthesized)
catcttacttttattgcaaaatggcatgtgctgccatctattattcatttttaaatggtcatttcttattcagtgagtgctttagtgttttaaactatatggataagaatgcaggtagat

SEQ ID NO: 249962 - DNA, 120 bp, Artificial Sequence
  ENSG00000123219_9 (sequence is synthesized)
ttctaggcataaaacatttaatgtaccttacctcatgcaatattctttggattctttgttgatttatgatattgctaatataatattttcttaaaatatataacaatatcttttatgcat

SEQ ID NO: 249963 - DNA, 120 bp, Artificial Sequence
  ENSG00000123219_10 (sequence is synthesized)
gcattttgagttccagctggtgcttctttatatttagaaattataatgggaaggtcatttaatttacagatggttttaaaattgaggtaatatctgaggtggcataatttaaaaatattt

SEQ ID NO: 249964 - DNA, 120 bp, Artificial Sequence
  ENSG00000123219_11 (sequence is synthesized)
aggtggcataatttaaaaatatttagcaaatttgtttcatatatactgtcttatttctagatttgtttaaaattggaatatgaaaaactaatggataaagctagcataaaattgatattt

SEQ ID NO: 249965 - DNA, 120 bp, Artificial Sequence
  ENSG00000123219_12 (sequence is synthesized)
gttaccttatatattaatctactcttgattctgctaattattaccaacaaaattgtattcatgacattttattaatcctctgtgaattttctgtaaataaaattatttctgaaaatctct

SEQ ID NO: 249966 - DNA, 120 bp, Artificial Sequence
  ENSG00000123219_13 (sequence is synthesized)
gcagaagtccggggctggcaagcgcttcctgcgcagcgcctaggcgacctggagtttgtgacgctgtgatggtctagaggctggagattcaagatctgggtgccatcattttctggttct

SEQ ID NO: 249967 - DNA, 120 bp, Artificial Sequence
  ENSG00000123219_14 (sequence is synthesized)
tacatcttgcatcctcaagcggtagagagcaaactcttaaatgtttctatatgtttttattctactgccacattaaatcgccaagccagataatttgttgaatatttatccctcaccctc

SEQ ID NO: 249968 - DNA, 120 bp, Artificial Sequence
  ENSG00000123219_15 (sequence is synthesized)
tttgcatattgataatgtattttggtggtcagtaaagaaatatttatgtttgactttttcgcttaaaaatattctaaaattcatgatgactgattttggctttgtgaacttaaactgtat

SEQ ID NO: 249969 - DNA, 120 bp, Artificial Sequence
  ENSG00000123219_16 (sequence is synthesized)
cttatgggtatagcaggtgagattttcagccttctactagttgacattcaaattgttaatagctaacactgataaagctctttatatgctagctacagtacttatatatatatatttata

SEQ ID NO: 249970 - DNA, 120 bp, Artificial Sequence
  ENSG00000123219_17 (sequence is synthesized)
tactcatttaattgtcataaccctagggagtatttaatattatcttcattttataggaaaggaaactgaggcatagaaagtttaagtgacttgcccaagtctcatagcttttaaatatca

SEQ ID NO: 249971 - DNA, 120 bp, Artificial Sequence
  ENSG00000123219_18 (sequence is synthesized)
ggagaaactcttgagtaccttgggcgagtttctagaagaccattttcctctgcctgatagaagtgttaaaaagaaaaagatggagtctccctgtgtcacccaggctggaatgcagtggca

SEQ ID NO: 249972 - DNA, 120 bp, Artificial Sequence
  ENSG00000123219_19 (sequence is synthesized)
ttcatgtcttcttactcagttgtcaatttctcagtaaccttatatgaccaccttatttaaaattatattgtccttgccctagcatttcctatgtttcttccttgtcttttctccatggca

SEQ ID NO: 249973 - DNA, 120 bp, Artificial Sequence
  ENSG00000123219_20 (sequence is synthesized)
cttataaatcatttgatatactacagtatatatatgttttattttttattttattgtctgttttccttacttagaataaggttcacggtaggagggatttttgtctattttgttcattgc

SEQ ID NO: 249974 - DNA, 71 bp, Artificial Sequence
  ENSG00000123219_21 (sequence is synthesized)
tcattgcagccccgatctcccagtgtgtgccaccatgcttgcaattcccttgactgaagacgttctcataa

SEQ ID NO: 249975 - DNA, 120 bp, Artificial Sequence
  ENSG00000123219_22 (sequence is synthesized)
ggctcaagggatcctcctgccttggcctctcaaagtgcctggattactggcgtgccagtgatttgtttcttaatgaatgcaatttacctagtggaagagaaaagttataatttattttag

SEQ ID NO: 249976 - DNA, 120 bp, Artificial Sequence
  ENSG00000123219_23 (sequence is synthesized)
tacctagtggaagagaaaagttataatttattttagatacttacacaaaagggacacatagtttgtatgtcttctgtcttgtccagctggtgccaactatgtttttgtcttcagttagga

SEQ ID NO: 249977 - DNA, 120 bp, Artificial Sequence
  ENSG00000123219_24 (sequence is synthesized)
agtagaagacagcataaaaatttataattgtgatactccactagtacatcttttttttttaaatgtgagagcttaagtttctctatgcaatatacatctatacaggcacatctcatttta

SEQ ID NO: 249978 - DNA, 120 bp, Artificial Sequence
  ENSG00000123219_25 (sequence is synthesized)
ttgtgcttcactttattgcactttgcagacactctatgtttaacaaattcagtttgtggcgagcctgtgtcacattttggtaatctcacagtattttagacttttaagtcattattacat

SEQ ID NO: 249979 - DNA, 120 bp, Artificial Sequence
  ENSG00000123219_26 (sequence is synthesized)
ctggttgggggatctgtgatcagtggtctttgatcttactattttaattgttttgaggaaccacaagctgcacctgtgtaagacagtaaatttaaccaataaatgttgtgtgtattctga

SEQ ID NO: 249980 - DNA, 120 bp, Artificial Sequence
  ENSG00000123219_27 (sequence is synthesized)
ttcaatatgatattaaaatttactgctcaaaacctcttgtattttttaatttaaccatagaatattaccacaaatttagcgcctactgtatatttaccttttcaaatgctttctgctagg

SEQ ID NO: 249981 - DNA, 120 bp, Artificial Sequence
  ENSG00000123219_28 (sequence is synthesized)
ctttttcactactgatgtctgaatggaagtatcctggaccactgtgtaaatttgactatcgttcagaaataaaactgggattaaagaccaagcaattaatttgaattattttattctagt

SEQ ID NO: 249982 - DNA, 120 bp, Artificial Sequence
  ENSG00000123219_29 (sequence is synthesized)
gacctggagtttgtgacgctgtgatgatacctgacttcccagccgggctttgagtcccgttcttctcggcttcccgcgcgccaacgcaagctccataacctcaccaatatttagagaaag

SEQ ID NO: 249983 - DNA, 120 bp, Artificial Sequence
  ENSG00000123219_30 (sequence is synthesized)
atggaagggtggggacagaaggaagtggttaactcgcgggtttcctttcagatgcactaaacatgttttctctcctgacctttattctctcacacactctctgaagaaggtggtctagag

SEQ ID NO: 249984 - DNA, 120 bp, Artificial Sequence
  ENSG00000123240_0 (sequence is synthesized)
gccccctccgccaccgccgccgcccgccggcaggttccctggtcagcgtcccatcccggtcgggagttctctccaggcggcacgatgccgaggaaacagtgaccctgagcgaagccaagc

SEQ ID NO: 249985 - DNA, 120 bp, Artificial Sequence
  ENSG00000123240_1 (sequence is synthesized)
cgggcggcaggtgtggctttgatagctggtggtgccacttcctggccttggatgagccgtacgcctctgtaaacccaacttcctcacctttgaaacagctgcctggttcagcattaatga

SEQ ID NO: 249986 - DNA, 120 bp, Artificial Sequence
  ENSG00000123240_2 (sequence is synthesized)
agattagtcagtgacaggcctggtgtgctgagtccgcacatagaagaatcaaaaatgtccaaaatgtaactggagagaaagtgggcaacttttggagaacttctgcaatgtcccatcaac

SEQ ID NO: 249987 - DNA, 120 bp, Artificial Sequence
  ENSG00000123240_3 (sequence is synthesized)
ctctcagctgcctcactgaaaaggaggacagccccagtgaaagcacaggaaatggacccccccacctggcccacccaaacctggacacgtttaccccggaggagctgctgcagcagatga

SEQ ID NO: 249988 - DNA, 120 bp, Artificial Sequence
  ENSG00000123240_4 (sequence is synthesized)
aagagctcctgaccgagaaccaccagctgaaagaagccatgaagctaaataatcaagccatgaaagggagatttgaggagctttcggcctggacagagaaacagaaggaagaacgccagt

SEQ ID NO: 249989 - DNA, 120 bp, Artificial Sequence
  ENSG00000123240_5 (sequence is synthesized)
tttttgagatacagagcaaagaagcaaaagagcgtctaatggccttgagtcatgagaatgagaaattgaaggaagagcttggaaaactaaaagggaaatcagaaaggtcatctgaggacc

SEQ ID NO: 249990 - DNA, 120 bp, Artificial Sequence
  ENSG00000123240_6 (sequence is synthesized)
ccactgatgactccaggcttcccagggccgaagcggagcaggaaaaggaccagctcaggacccaggtggtgaggctacaagcagagaaggcagacctgttgggcatcgtgtctgaactgc

SEQ ID NO: 249991 - DNA, 120 bp, Artificial Sequence
  ENSG00000123240_7 (sequence is synthesized)
agctcaagctgaactccagcggctcctcagaagattcctttgttgaaattaggatggctgaaggagaagcagaagggtcagtaaaagaaatcaagcatagtcctgggcccacgagaacag

SEQ ID NO: 249992 - DNA, 120 bp, Artificial Sequence
  ENSG00000123240_8 (sequence is synthesized)
tctccactggcacgagcagatctgcagatggggccaagaattacttcgaacatgaggagttaactgtgagccagctcctgctgtgcctaagggaagggaatcagaaggtggagagacttg

SEQ ID NO: 249993 - DNA, 120 bp, Artificial Sequence
  ENSG00000123240_9 (sequence is synthesized)
aagttgcactcaaggaggccaaagaaagagtttcagattttgaaaagaaaacaagtaatcgttctgagattgaaacccagacagaggggagcacagagaaagagaatgatgaagagaaag

SEQ ID NO: 249994 - DNA, 120 bp, Artificial Sequence
  ENSG00000123240_10 (sequence is synthesized)
gcccggagactgttggaagcgaagtggaagcactgaacctccaggtgacatctctgtttaaggagcttcaagaggctcatacaaaactcagcgaagctgagctaatgaagaagagacttc

SEQ ID NO: 249995 - DNA, 120 bp, Artificial Sequence
  ENSG00000123240_11 (sequence is synthesized)
aagaaaagtgtcaggcccttgaaaggaaaaattctgcaattccatcagagttgaatgaaaagcaagagcttgtttatactaacaaaaagttagagctacaagtggaaagcatgctatcag

SEQ ID NO: 249996 - DNA, 120 bp, Artificial Sequence
  ENSG00000123240_12 (sequence is synthesized)
aaatcaaaatggaacaggctaaaacagaggatgaaaagtccaaattaactgtgctacagatgacacacaacaagcttcttcaagaacataataatgcattgaaaacaattgaggaactaa

SEQ ID NO: 249997 - DNA, 120 bp, Artificial Sequence
  ENSG00000123240_13 (sequence is synthesized)
caagaaaagagtcagaaaaagtggacagggcagtgctgaaggaactgagtgaaaaactggaactggcagagaaggctctggcttccaaacagctgcaaatggatgaaatgaagcaaacca

SEQ ID NO: 249998 - DNA, 120 bp, Artificial Sequence
  ENSG00000123240_14 (sequence is synthesized)
caggaagaggacctggaaaccatgaccatcctcagggctcagatggaagtttactgttctgattttcatgctgaaagagcagcgagagagaaaattcatgaggaaaaggagcaactggca

SEQ ID NO: 249999 - DNA, 120 bp, Artificial Sequence
  ENSG00000123240_15 (sequence is synthesized)
ttgcagctggcagttctgctgaaagagaatgatgctttcgaagacggaggcaggcagtccttgatggagatgcagagtcgtcatggggcgagaacaagtgactctgaccagcaggcttac

SEQ ID NO: 250000 - DNA, 120 bp, Artificial Sequence
  ENSG00000123240_16 (sequence is synthesized)
cttgttcaaagaggagctgaggacagggactggcggcaacagcggaatattccgattcattcctgccccaagtgtggagaggttctgcctgacatagacacgttacagattcacgtgatg

SEQ ID NO: 250001 - DNA, 120 bp, Artificial Sequence
  ENSG00000123240_17 (sequence is synthesized)
gattgcatcatttaagtgttgatgtatcacctccccaaaactgttggtaaatgtcagattttttcctccaagagttgtgcttttgtgttatttgttttcactcaaatattttgcctcatt

SEQ ID NO: 250002 - DNA, 87 bp, Artificial Sequence
  ENSG00000123240_18 (sequence is synthesized)
accagcctggccaacatggcggaaccctgtctctaccaaaattacagtcgcagctactcgcgaggttgaggcaggagaattgcttga

SEQ ID NO: 250003 - DNA, 120 bp, Artificial Sequence
  ENSG00000123240_19 (sequence is synthesized)
ctgggtgacagagggagactctgtctcgaaagaaagaaagaaaaaaaggaaggaaggagaaggaaggaaggagaagaaaaggtacctgttctacgtagaacacctttggtggagttccat

SEQ ID NO: 250004 - DNA, 120 bp, Artificial Sequence
  ENSG00000123240_20 (sequence is synthesized)
ggtacctgttctacgtagaacacctttggtggagttccatcaactcgcaaagtagaatccttacctactactcttctgataataattttaatattttttatgtttggttgatgcgagcag

SEQ ID NO: 250005 - DNA, 120 bp, Artificial Sequence
  ENSG00000123240_21 (sequence is synthesized)
ctgcactgctcatgcagttagctagcatgtgacatcatgtgacaaagttcatgtaattagatggaagaaacctcactgattaattttaagaaccttttagggatgcaggaacaatgaagt

SEQ ID NO: 250006 - DNA, 120 bp, Artificial Sequence
  ENSG00000123240_22 (sequence is synthesized)
ggccacagtatgtgctgtttttgaagcatttttaaaaacgaattgtagttgtttttcttcatttaaaatggatctgttggaggttatgtgtgtatgttgtagttttattgcagccacaat

SEQ ID NO: 250007 - DNA, 120 bp, Artificial Sequence
  ENSG00000123240_23 (sequence is synthesized)
aattttaccaaagttttcacataggcagttagcctttacttaatatcaagacaagtgaaaaaatattggcatcgatgaaaccgataacattggcctcattggatttctttacccattcac

SEQ ID NO: 250008 - DNA, 120 bp, Artificial Sequence
  ENSG00000123240_24 (sequence is synthesized)
agtgtaaagaagttaccttcatgctttcattgtacctgcaggcctgtgggcttgtacagtagataattaatttctaaaaagaacagctgcctattttcttcctaggttaggttatatctt

SEQ ID NO: 250009 - DNA, 120 bp, Artificial Sequence
  ENSG00000123240_25 (sequence is synthesized)
cataatcacaagaattagtgatggcaaaataaaattttgcttatgaatcttttacattgtttatatatgattaatatcatcatatatattttctgtattaagctcatttggcttcattta

SEQ ID NO: 250010 - DNA, 120 bp, Artificial Sequence
  ENSG00000123240_26 (sequence is synthesized)
agctgtatacttagtcatatatctttcattagttctatggatatgagcagatccctttactggagcccagtatgtgctgtgtgagttagaagtcattcttgctgagaaggtgaataggta

SEQ ID NO: 250011 - DNA, 120 bp, Artificial Sequence
  ENSG00000123240_27 (sequence is synthesized)
gggatttgccttgttttgtaagtctacaatttgccaagagtaaataacactggaccagctgtaaaagtaaacagtgtgtttatgcattgagatactaaagcatttaagaaaaaattaaaa

SEQ ID NO: 250012 - DNA, 120 bp, Artificial Sequence
  ENSG00000123240_28 (sequence is synthesized)
aacaagagcccaagaagcatcctgcaggctttctgctttttgagtgtattttaaagcaaaaacgagtggaaagctatgtatgctcagttaactatgtctagatgttaaccttttttcaaa

SEQ ID NO: 250013 - DNA, 120 bp, Artificial Sequence
  ENSG00000123240_29 (sequence is synthesized)
aaacacagatggaggcctccctccgaggatgcctggcattctcctctttctgtgggcggcagcgaccccctgcggctccagcctccactacgggatctgcgggaagacacggggaagacg

SEQ ID NO: 250014 - DNA, 120 bp, Artificial Sequence
  ENSG00000123240_30 (sequence is synthesized)
aactccgcacactgcatttgattaatgatttattttgattaacgccgtcacagtgacgccttagagcagtccctgttcacccgggtcccagcctcgaccccgcacggacagcgagggtgt

SEQ ID NO: 250015 - DNA, 120 bp, Artificial Sequence
  ENSG00000123240_31 (sequence is synthesized)
atccctgcagcgctacccgggtactctggatgcacatagggcggctctcgctcctaccttgtcatcctgctgtctaatccgggggcagcttccctcctccacaccagcagaggctattct

SEQ ID NO: 250016 - DNA, 120 bp, Artificial Sequence
  ENSG00000123240_32 (sequence is synthesized)
gcccattcaaaaggaaaaagaggctgggcgtggtggctcatgcctgtcattccatcactttgggaggccgaggcagaaggattgcttgagtacaggagttcaagaccagcctgggcaaga

SEQ ID NO: 250017 - DNA, 120 bp, Artificial Sequence
  ENSG00000123240_33 (sequence is synthesized)
acacaggttgggtttattcattgtgggagggaaacatacaaggtgatgaataccaagaggcaaggatcactggagccatcttaggaggctggtgaccacacatgggacatggattgaata

SEQ ID NO: 250018 - DNA, 120 bp, Artificial Sequence
  ENSG00000123240_34 (sequence is synthesized)
tggaaaagttcatgggaaatggtcttctgtctggttcaaatgctgatttggccacttaacaaattttcccaagattaagagccgttaagtttgtaaaatgaggatagccattctttattc

SEQ ID NO: 250019 - DNA, 120 bp, Artificial Sequence
  ENSG00000123240_35 (sequence is synthesized)
gttgtgacctgaggaagtaacttctttatgatttataccaggatctttccagaatatttggtttgaatgctatttaatgttgcagctcaaactggcaaagattaaaaactgtttggttcc

SEQ ID NO: 250020 - DNA, 120 bp, Artificial Sequence
  ENSG00000123240_36 (sequence is synthesized)
gccactgcgcccagctgcaagatgtatttctatcagtattctacaaaacgatttcctatgtctcttcttgactgatttcttctcctcggtccttcaatgaacaagcctactgtaggaaaa

SEQ ID NO: 250021 - DNA, 120 bp, Artificial Sequence
  ENSG00000123240_37 (sequence is synthesized)
ggaatgttgtccactttataatgagatcatttgaggatatgacttagaaacttgagggagaattgaaagatttgggttctatcccattactggtttgaataaagtagtttgaaaggaaaa

SEQ ID NO: 250022 - DNA, 120 bp, Artificial Sequence
  ENSG00000123243_0 (sequence is synthesized)
gcagtggctggagccctgggcgctgcaaagcgtgtcccgccgggtccccgagcgtcccgcgccctcgccccgccatgctcctgctgctggggctgtgcctggggctgtccctgtgtgtgg

SEQ ID NO: 250023 - DNA, 120 bp, Artificial Sequence
  ENSG00000123243_1 (sequence is synthesized)
ggtcgcaggaagaggcgcagagctggggccactcttcggagcaggatggactcagggtcccgaggcaagtcagactgttgcagaggctgaaaaccaaacctttgatgacagaattctcag

SEQ ID NO: 250024 - DNA, 120 bp, Artificial Sequence
  ENSG00000123243_2 (sequence is synthesized)
tgaagtctaccatcatttcccgttatgccttcactacggtttcctgcagaatgctgaacagagcttctgaagaccaggacattgagttccagatgcagattccagctgcagctttcatca

SEQ ID NO: 250025 - DNA, 120 bp, Artificial Sequence
  ENSG00000123243_3 (sequence is synthesized)
ccaacttcactatgcttattggagacaaggtgtatcagggcgaaattacagagagagaaaagaagagtggtgatagggtaaaagagaaaaggaataaaaccacagaagaaaatggagaga

SEQ ID NO: 250026 - DNA, 120 bp, Artificial Sequence
  ENSG00000123243_4 (sequence is synthesized)
aggggactgaaatattcagagcttctgcagtgattcccagcaaggacaaagccgcctttttcctgagttatgaggagcttctgcagaggcgcctgggcaagtacgagcacagcatcagcg

SEQ ID NO: 250027 - DNA, 120 bp, Artificial Sequence
  ENSG00000123243_5 (sequence is synthesized)
tgcggccccagcagctgtccgggaggctgagcgtggacgtgaatatcctggagagcgcgggcatcgcatccctggaggtgctgccgcttcacaacagcaggcagaggggcagtgggcgcg

SEQ ID NO: 250028 - DNA, 120 bp, Artificial Sequence
  ENSG00000123243_6 (sequence is synthesized)
gggaagatgattctgggcctcccccatctactgtcattaaccaaaatgaaacatttgccaacataatttttaaacctactgtagtacaacaagccaggattgcccagaatggaattttgg

SEQ ID NO: 250029 - DNA, 120 bp, Artificial Sequence
  ENSG00000123243_7 (sequence is synthesized)
gagactttatcattagatatgacgtcaatagagaacagagcattggggacatccaggttctaaatggctattttgtgcactactttgctcctaaagaccttcctcctttacccaagaatg

SEQ ID NO: 250030 - DNA, 120 bp, Artificial Sequence
  ENSG00000123243_8 (sequence is synthesized)
tggtattcgtgcttgacagcagtgcttctatggtgggaaccaaactccggcagaccaaggatgccctcttcacaattctccatgacctccgaccccaggaccgtttcagtatcattggat

SEQ ID NO: 250031 - DNA, 120 bp, Artificial Sequence
  ENSG00000123243_9 (sequence is synthesized)
tttccaaccggatcaaagtatggaaggaccacttgatatcagtcactccagacagcatcagggatgggaaagtgtacattcaccatatgtcacccactggaggcacagacatcaacgggg

SEQ ID NO: 250032 - DNA, 120 bp, Artificial Sequence
  ENSG00000123243_10 (sequence is synthesized)
ccctgcagagggccatcaggctcctcaacaagtacgtggcccacagtggcattggagaccggagcgtgtccctcatcgtcttcctgacggatgggaagcccacggtcggggagacgcaca

SEQ ID NO: 250033 - DNA, 120 bp, Artificial Sequence
  ENSG00000123243_11 (sequence is synthesized)
ccctcaagatcctcaacaacacccgagaggccgcccgaggccaagtctgcatcttcaccattggcatcggcaacgacgtggacttcaggctgctggagaaactgtcgctggagaactgtg

SEQ ID NO: 250034 - DNA, 120 bp, Artificial Sequence
  ENSG00000123243_12 (sequence is synthesized)
gcctcacacggcgcgtgcacgaggaggaggacgcaggctcgcagctcatcgggttctacgatgaaatcaggaccccgctcctctctgacatccgcatcgattatccccccagctcagtgg

SEQ ID NO: 250035 - DNA, 120 bp, Artificial Sequence
  ENSG00000123243_13 (sequence is synthesized)
tgcaggccaccaagaccctgttccccaactacttcaacggctcggagatcatcattgcggggaagctggtggacaggaagctggatcacctgcacgtggaggtcaccgccagcaacagta

SEQ ID NO: 250036 - DNA, 120 bp, Artificial Sequence
  ENSG00000123243_14 (sequence is synthesized)
agaaattcatcatcctgaagacagatgtgcctgtgcggcctcagaaggcagggaaagatgtcacaggaagccccaggcctggaggcgatggagagggggacaccaaccacatcgagcgtc

SEQ ID NO: 250037 - DNA, 120 bp, Artificial Sequence
  ENSG00000123243_15 (sequence is synthesized)
tctggagctacctcaccacaaaggagctgctgagctcctggctgcaaagtgacgatgaaccggagaaggagcggctgcggcagcgggcccaggccctggctgtgagctaccgcttcctca

SEQ ID NO: 250038 - DNA, 120 bp, Artificial Sequence
  ENSG00000123243_16 (sequence is synthesized)
ctcccttcacctccatgaagctgagggggccggtcccacgcatggatggcctggaggaggcccacggcatgtcggctgccatgggacccgaaccggtggtgcagagcgtgcgaggagctg

SEQ ID NO: 250039 - DNA, 120 bp, Artificial Sequence
  ENSG00000123243_17 (sequence is synthesized)
gcacgcagccaggacctttgctcaagaagccataccagccaagaattaaaatctctaaaacatcagtggatggtgatccccactttgttgtggatttccccctgagcagactcaccgtgt

SEQ ID NO: 250040 - DNA, 120 bp, Artificial Sequence
  ENSG00000123243_18 (sequence is synthesized)
gcttcaacattgatgggcagcccggggacatcctcaggctggtctctgatcacagggactctggtgtcacagtgaacggagagttaattggggcacccgcccctccaaatggccacaaga

SEQ ID NO: 250041 - DNA, 120 bp, Artificial Sequence
  ENSG00000123243_19 (sequence is synthesized)
aacagcgcacttacttgcgcactatcaccatcctcatcaacaagccagagagatcttatctcgagatcacaccgagcagagtcatcttggatggtggggacagactggtgctcccctgca

SEQ ID NO: 250042 - DNA, 120 bp, Artificial Sequence
  ENSG00000123243_20 (sequence is synthesized)
accagagtgtggtggtggggagctgggggctggaggtgtccgtgtctgccaacgccaatgtcaccgtcaccatccagggctccatagcctttgtcatcctcatccacctctacaaaaagc

SEQ ID NO: 250043 - DNA, 120 bp, Artificial Sequence
  ENSG00000123243_21 (sequence is synthesized)
cggcgcccttccagcgacaccacctgggtttctacattgccaacagcgagggcctttccagcaactgccacggactgctgggtcagttcctgaatcaggatgccagactcacagaagacc

SEQ ID NO: 250044 - DNA, 120 bp, Artificial Sequence
  ENSG00000123243_22 (sequence is synthesized)
ctgcagggcccagccagaacctcactcaccctctgctccttcaggtgggagaggggcctgaggccgtcctaacagtgaaaggccaccaagtcccagtggtctggaagcaaaggaagattt

SEQ ID NO: 250045 - DNA, 120 bp, Artificial Sequence
  ENSG00000123243_23 (sequence is synthesized)
acaacggggaagagcagatagactgctggtttgccaggaacaatgccgccaaactgattgacggggagtacaaggattacctggcatcccatccatttgacacagggatgacacttggcc

SEQ ID NO: 250046 - DNA, 120 bp, Artificial Sequence
  ENSG00000123243_24 (sequence is synthesized)
ggggaatgtccagggagctctgaagctggcagccttaaagatgcaagtgcatgaaggacagtgatgtggggaggccgtggggcagctcttttcatggcttgtacacgcctcagctcctgg

SEQ ID NO: 250047 - DNA, 120 bp, Artificial Sequence
  ENSG00000123243_25 (sequence is synthesized)
caattagctggactccatgacccacccctggtgcagcatagatccgacgtctgtctgggcgaagggtaggggtgggtaggggcgggaagcctgagtgcaaatgtcatttccctctactgc

SEQ ID NO: 250048 - DNA, 120 bp, Artificial Sequence
  ENSG00000123243_26 (sequence is synthesized)
ctcttcctgcctctccccaccctgcccacatccacagaggggagagaagggtcatagctaaatgcaacaaagtctgtatcttgtcccaacctgcttttctgttctgttagcatatcataa

SEQ ID NO: 250049 - DNA, 120 bp, Artificial Sequence
  ENSG00000123243_27 (sequence is synthesized)
gtggtgttgcagcccccagatgtgtggccaacctctgctgcaaaggaatctcttgctgagtccaggccaccaatcaggcaaatagcccatacatttgatcgttgtaaaccatgaagtctt

SEQ ID NO: 250050 - DNA, 120 bp, Artificial Sequence
  ENSG00000123243_28 (sequence is synthesized)
ttcttgcaagacgtttttcttctgctgtggtatcttgcccttaaaaattagttttcattaaaaagaaatttgattgaaaatagaaacatctacagctcagatactgatctctttctaatg

SEQ ID NO: 250051 - DNA, 120 bp, Artificial Sequence
  ENSG00000123243_29 (sequence is synthesized)
ggctttgtaaaccacttgactttgctaatggctattctccaatttgttccaataagctaagggcttttcatacacaggacaactccatgtggttgattttactggcatgtcttggtgacg

SEQ ID NO: 250052 - DNA, 120 bp, Artificial Sequence
  ENSG00000123243_30 (sequence is synthesized)
aagagttggccaagtgaatgatgcatcttttacttggagctctccagcctttgtcatagttcccagaccttttttccttgtggtcatccaggaggtgatcaattacatgtgcacagtgct

SEQ ID NO: 250053 - DNA, 120 bp, Artificial Sequence
  ENSG00000123243_31 (sequence is synthesized)
aggacgggaggcagagccggctcagagcaggtccaccagcccacctatagcaggaagcgtgtcggtgcttaggaaatctaggacttccagcttccctcatgtcagatagaaaaaaagtca

SEQ ID NO: 250054 - DNA, 120 bp, Artificial Sequence
  ENSG00000123243_32 (sequence is synthesized)
ggaaaccagctcgtggacaggggctttggttccaaaacttggacaaacctgatgccttaaggaaaaggttaagatgagaggggacttccagagtcaatgaacgtcacccttcagcggacg

SEQ ID NO: 250055 - DNA, 120 bp, Artificial Sequence
  ENSG00000123243_33 (sequence is synthesized)
gataccgggagcgcttgggcgaaacagcagagaaagaaagactgtggtcggggaagtggaatgcttcgatgcaggccagagttcaaggctctggggctggcctcacaagaggcttcttcc

SEQ ID NO: 250056 - DNA, 120 bp, Artificial Sequence
  ENSG00000123243_34 (sequence is synthesized)
acggggcttgacaccagagcagcccccgcgtgaaatgagaaggcatgcttagcactgggaggaaaagctgagttaagaaaattctttatcatgtttgccttccctggggaaacattcagg

SEQ ID NO: 250057 - DNA, 120 bp, Artificial Sequence
  ENSG00000123243_35 (sequence is synthesized)
cagtaaaatgacatccacgtgttcctgtcggacgcagcggcttcgggaacaagttagcgctgggggactatctgggctcgtctctctctgcttcgtgaacccaccacaccagggcctgtc

SEQ ID NO: 250058 - DNA, 120 bp, Artificial Sequence
  ENSG00000123243_36 (sequence is synthesized)
tgctgtgctatttatttgccttccgtcttcccaacctcagctgcctgtattcatgccagaggtgcaaaggctgccagccagtgctgctgacagatgctttcagactgtagagctcagaga

SEQ ID NO: 250059 - DNA, 120 bp, Artificial Sequence
  ENSG00000123243_37 (sequence is synthesized)
aagggagcggcagctagaggtagccagggagctggccaggctccccggggccttcctattatgtaaatcccagctggacagacagccctggagccaggtggccctgtcccctgtggagca

SEQ ID NO: 250060 - DNA, 120 bp, Artificial Sequence
  ENSG00000123243_38 (sequence is synthesized)
cttggagcagtgatctgttgttccaggtgtaagtctcgacactgcagaaatgaggacgttattaggaaagaccagttcctactgcctgtgttgctactttaagagctgagaaaaacattc

SEQ ID NO: 250061 - DNA, 120 bp, Artificial Sequence
  ENSG00000123243_39 (sequence is synthesized)
caatgagctatccatagctaacttgcttgctcagaaaaacataagtaacaaagttgagctttcatttttaaaaattatattttactttagaaaaatatcaccttttttcttcctcttctt

SEQ ID NO: 250062 - DNA, 120 bp, Artificial Sequence
  ENSG00000123243_40 (sequence is synthesized)
tacgtgtagatcttttttttttttttcaaatggggtcagtacctgaaagcccgaaaccccataccaagcttatagttaggacctttgcatttgataaaaaaaaaatatagtattttctgt

SEQ ID NO: 250063 - DNA, 120 bp, Artificial Sequence
  ENSG00000123243_41 (sequence is synthesized)
tgtccagaaaatcttcccagatagggaaactgaggcagagagtgccgtggagtggtttttgccaagtcatacaacatacttaatgcagggctacactgaacctccagaatcattttgttt

SEQ ID NO: 250064 - DNA, 120 bp, Artificial Sequence
  ENSG00000123243_42 (sequence is synthesized)
gctttgaccctgtttcaccatctgggcaatcatttattttccttgagcatttataaaccagggcgagggttgttccaaaatgagtaattgaatgagatgaagaaatatgtcataattaga

SEQ ID NO: 250065 - DNA, 120 bp, Artificial Sequence
  ENSG00000123243_43 (sequence is synthesized)
ggagataaatctccttgttatcacaatagttaatgtgtcatgatcactgactaactgggaccttgaacaagtcagcatctctgcctttcaaaatgaaggaacattgttctctatcctccc

SEQ ID NO: 250066 - DNA, 120 bp, Artificial Sequence
  ENSG00000123243_44 (sequence is synthesized)
ctgacccccgacggccccatgctaggtgcaccatcttcctccatttgactttttaatgctttacaacttcaggctaaagggaggggatgttgggaggagaaaccatcacaagattccctc

SEQ ID NO: 250067 - DNA, 120 bp, Artificial Sequence
  ENSG00000123243_45 (sequence is synthesized)
ggtgccacagctgtgctgaggaggccggggactgggaatcggagtgggcacctctgtgtttctctagggagtaacattcaacatttaattgaatcgtgtgtcctgataggtggattagga

SEQ ID NO: 250068 - DNA, 120 bp, Artificial Sequence
  ENSG00000123243_46 (sequence is synthesized)
acaggattcattcctttaactttaacttttggctaaacgacatgccttggattgagtgtatatgtcttccccaaattcatatgttgaagcttaaatcctgaatgtgatggttcttggaat

SEQ ID NO: 250069 - DNA, 120 bp, Artificial Sequence
  ENSG00000123243_47 (sequence is synthesized)
tgatggttcttggaattgggacctttggaaggttattgggtcttgagggcagagccctcacgaatgggattaaggcccttataagaagagacatggggccaggtgcagtggctcacacct

SEQ ID NO: 250070 - DNA, 83 bp, Artificial Sequence
  ENSG00000123243_48 (sequence is synthesized)
gcaggagaatcgcttgaaccaggcagtcggaacggagtgacagagccaaactccgtcaaaaaaaaacaaaacaaaacaaaaaa

SEQ ID NO: 250071 - DNA, 120 bp, Artificial Sequence
  ENSG00000123243_49 (sequence is synthesized)
aaacaaaacaaaacaaaaaaaagacatgggagagatggtgtttttcctctccaccacctggggatacgatgagaagatggccacctgcaagccaggaagacggccctcaccagacaccat

SEQ ID NO: 250072 - DNA, 120 bp, Artificial Sequence
  ENSG00000123243_50 (sequence is synthesized)
cctccagaactgtgagaaataaatgtgttttgtttaagctactcaagtctgtggtattcttgttaaggcagcccaagctgactaagacaccaaatcattcaaaacgttaattctttttct

SEQ ID NO: 250073 - DNA, 120 bp, Artificial Sequence
  ENSG00000123243_51 (sequence is synthesized)
agacaccaaatcattcaaaacgttaattctttttctgttctttaagcttcccagaatgtacacaaacaatgctgttattaaaatttaaaggactcttggaactgtaggacatgatccagc

SEQ ID NO: 250074 - DNA, 120 bp, Artificial Sequence
  ENSG00000123243_52 (sequence is synthesized)
taaaataaataacaaataacacagctaagcaaatacttataaatgtagctttaaatatttattttagttttaaataattagtggggtacgagacagttcacattcaagagacattttact

SEQ ID NO: 250075 - DNA, 120 bp, Artificial Sequence
  ENSG00000123243_53 (sequence is synthesized)
tagacaaaaaatttataagagaacgatgcataaaaacaaacaacatattggtctgtttatttttctaagggaaaatggaattggagctgttgagaataaaacttgaagaatctaactgca

SEQ ID NO: 250076 - DNA, 120 bp, Artificial Sequence
  ENSG00000123243_54 (sequence is synthesized)
tgcttctatggtgggaaccaaactccggcaggacattggtttctccctcgctgtccaaaattgggttcccaagggctatttggatatttcatgtgtaaccttacaggtgcacgtgtaact

SEQ ID NO: 250077 - DNA, 120 bp, Artificial Sequence
  ENSG00000123243_55 (sequence is synthesized)
ggaggggtttccgccagcaccctgactgtgcgcctggccgcctactcgcattttgcttcccttgcctctgcatctaagctgggcatggctctcagtgcctgcgtgcaggggtggcgtaca

SEQ ID NO: 250078 - DNA, 120 bp, Artificial Sequence
  ENSG00000123243_56 (sequence is synthesized)
gctgacgctgcgaatgagcctggggtagcccatggcttcctgggagaagaagcaccatagatctcccatcatagggaggaaagtcctctgcatctgtgccattaaaggagaaagcaaata

SEQ ID NO: 250079 - DNA, 120 bp, Artificial Sequence
  ENSG00000123243_57 (sequence is synthesized)
cgctcctggacttatgcatccgactccctgctttatgacaagtgccgtgtgaccttgggcacatgccttgggagttgtttcccttgtaaaatggagataggaacactctcttggcctcac

SEQ ID NO: 250080 - DNA, 120 bp, Artificial Sequence
  ENSG00000123243_58 (sequence is synthesized)
tcttggcctcacagagctaatataaaatggatcaaatgaaactggttatgaagttgttttttaaatgctgaagtgctttagaaatccgctatgtaggctgggcgcggtggctcatgcctg

SEQ ID NO: 250081 - DNA, 120 bp, Artificial Sequence
  ENSG00000123243_59 (sequence is synthesized)
aaatgtcatgaaatttccttttgccagcatcctggaactataataaaaattcagaggaaagaacaacctatgactgggttttgttctgctgtgtccagatcatcctctggaagtcttgat

SEQ ID NO: 250082 - DNA, 120 bp, Artificial Sequence
  ENSG00000123243_60 (sequence is synthesized)
tgttgcctttctgctgctgtgctgtacgtgcaagttcctaaagccagggacatcccggagatgagctgtggatatagagtccgcacagcctgcgggagacagaatgtaattccttccaac

SEQ ID NO: 250083 - DNA, 120 bp, Artificial Sequence
  ENSG00000123243_61 (sequence is synthesized)
acacacacacaggctttatggaatgccagaaaagcttcctcttggatgctgcctggagtaatgactttttgaccctcccctcttttttggagcaagcactatctttccttgtaaagaaat

SEQ ID NO: 250084 - DNA, 120 bp, Artificial Sequence
  ENSG00000123243_62 (sequence is synthesized)
ttggacaatttgagtagaaatggtgtggtatgtgcacatagaaactctcagaaaactgtcagatgagctagacagttgtcctctatctccatgggtcccgcatcccaaggatcgaaccaa

SEQ ID NO: 250085 - DNA, 120 bp, Artificial Sequence
  ENSG00000123243_63 (sequence is synthesized)
caacagatcaaaaatacgtgaaaaaggaattgcatctgtattgaatgtgtacggactttttttcttgtctttgttccttaaacaatgtagtgtaacaactatttacatcgcatctccttt

SEQ ID NO: 250086 - DNA, 120 bp, Artificial Sequence
  ENSG00000123243_64 (sequence is synthesized)
taacaactatttacatcgcatctcctttgcattcattattataagtaaactagagatgatttaaagtgtatagaaaggctgcgtgcagtggctaatgtctgtaatcccagcactttgaga

SEQ ID NO: 250087 - DNA, 120 bp, Artificial Sequence
  ENSG00000123243_65 (sequence is synthesized)
aagaggatggagctagtatgtattgagcacctactgtctgccaggcaccacacggggtaccttacatatgagatctcactacatctcaacaatgattctgtgactgtggaattgtttcca

SEQ ID NO: 250088 - DNA, 120 bp, Artificial Sequence
  ENSG00000123243_66 (sequence is synthesized)
tgtaacagatgtgggactgaagctcaggaatattaagtcagtcgttttgattcagtcacactctagaacccactctctttggtattctgtagtttgcaaagataacacaaaacttcttgc

SEQ ID NO: 250089 - DNA, 120 bp, Artificial Sequence
  ENSG00000123243_67 (sequence is synthesized)
tctaaaatactgggctttagaaaagaagagagccccctgggagtcctggtggcctgagaggcagggaagagtcagtgagtggaggaagagcatgaatgaattttcccgagggcaggagag

SEQ ID NO: 250090 - DNA, 120 bp, Artificial Sequence
  ENSG00000123243_68 (sequence is synthesized)
gcagttgtgtgtccctggggttgtcttgcatgggatcaccaatgcctgcatgaagacaggaagatgggattagaagacttggcctccctcaaatcggagcagctgctccagctcaccata

SEQ ID NO: 250091 - DNA, 120 bp, Artificial Sequence
  ENSG00000123243_69 (sequence is synthesized)
gaagtgggcaagaaggagagaacacgaaggaggaaagagacatgggttctcattagacaagtgggtcagattcttcctcttttttgttctgcaccaatgtctttccttgcggtcttcatt

SEQ ID NO: 250092 - DNA, 120 bp, Artificial Sequence
  ENSG00000123243_70 (sequence is synthesized)
aacctgtgactctgatgaccctgcgggtgacactcatttttgtgcttaggaaatatctgtggcggtaagcagggtgagcccccattcacagcaaggaaaaacggagtcatgttcttctgc

SEQ ID NO: 250093 - DNA, 120 bp, Artificial Sequence
  ENSG00000123243_71 (sequence is synthesized)
tctgggattttggtcagtaacggtggaacagcccatatgaacctacttaacagatttttttcccccttaataaaaagatgattctattttctagagatgctcctctggaattgctcccag

SEQ ID NO: 250094 - DNA, 120 bp, Artificial Sequence
  ENSG00000123243_72 (sequence is synthesized)
taaacttaaaaaaaaagtagtgaaaaatttattgggtcacatttactgtctgcttcttcctgggtggtggttggcctcaggaaccaggctccttggtgagtaaccaaactgagaatcaac

SEQ ID NO: 250095 - DNA, 120 bp, Artificial Sequence
  ENSG00000123243_73 (sequence is synthesized)
ccattctttgggtgtgtaaaataatcccatttagttgaatctcatgaattttcatcatgagctagtaaaaccagaggtcactaggaagccaaaataatcatacagtatccttcctcatgg

SEQ ID NO: 250096 - DNA, 120 bp, Artificial Sequence
  ENSG00000123243_74 (sequence is synthesized)
tccatatcaaagagcctagtcgagtgaatgatggacagagaaattatactttctaatccccagtgcttttactcagccatgaatggtattaattcagggagcttgtaaaaagcattttca

SEQ ID NO: 250097 - DNA, 120 bp, Artificial Sequence
  ENSG00000123243_75 (sequence is synthesized)
cgagattggaagcaagactaagtaggtacatgctggcagcataaagagagtctaatctaattattgtagaatcttagagataatctaagtgctgcctaattgcatacaacacattttatt

SEQ ID NO: 250098 - DNA, 120 bp, Artificial Sequence
  ENSG00000123243_76 (sequence is synthesized)
gacacttttctatgtgtaaggcacacagaccatgtgtaagctacatgcctattttctatgggcaaaaaccggaatcacccagagggctcgttaaaacacaaatggcggagtcccatcccc

SEQ ID NO: 250099 - DNA, 120 bp, Artificial Sequence
  ENSG00000123243_77 (sequence is synthesized)
agagtttctgactccgagtttctggggtgggcctgagaattggcatttctagcaagttcccaggagctgctgatgctgctggttcaagatcacactgtgagaactgctctacaccctcgt

SEQ ID NO: 250100 - DNA, 120 bp, Artificial Sequence
  ENSG00000123243_78 (sequence is synthesized)
gggggggattattccagggttcacttgagcccttctaatgggatgggttgtgaaggcggccgatcccaacaggacagctttcttagggttcaccgacactgcgctgaaaagtgcctcccg

SEQ ID NO: 250101 - DNA, 120 bp, Artificial Sequence
  ENSG00000123243_79 (sequence is synthesized)
gaaactctctccctggtcctaattctgccggctggaattgctctggacacacctaatcctcatttaataaatgcccatgcacattcatcctaaggagaaggacagagaggggtctgtttg

SEQ ID NO: 250102 - DNA, 120 bp, Artificial Sequence
  ENSG00000123243_80 (sequence is synthesized)
gcaaataacattgttatgttccatgccggggaatgcctgtttaatctactttgctaacaataaatttaaatgttaataactggggtgtacatacaccataaacggtacaaatgtcatgtg

SEQ ID NO: 250103 - DNA, 120 bp, Artificial Sequence
  ENSG00000123243_81 (sequence is synthesized)
tacagcttgataaaattttacataggtataccctcattcaactgccttccacctcaagacatggaatattttcacccttcctcaaaattaccacgtgctctttcctggtcctgagcaggc

SEQ ID NO: 250104 - DNA, 120 bp, Artificial Sequence
  ENSG00000123243_82 (sequence is synthesized)
cttcaaaggtcagcagtgttctactccagttgccatgggtatttcatgctcctcttgaactttatgcagatggaagcagagagaacatgcgcttttgtatctgatattttcactcaagaa

SEQ ID NO: 250105 - DNA, 120 bp, Artificial Sequence
  ENSG00000123243_83 (sequence is synthesized)
gactgtgaggttcaaccatgttctaaatagcaatattagttcttttgtttttattgccttgtggtatcccaagtttgacttgtgtttatagttgtatatgtaattgctccttctattttt

SEQ ID NO: 250106 - DNA, 78 bp, Artificial Sequence
  ENSG00000123243_84 (sequence is synthesized)
tgtgtttatagttgtatatgtaattgctccttctatttttttttttgcgggggtagggggtggtggactatctcagct

SEQ ID NO: 250107 - DNA, 120 bp, Artificial Sequence
  ENSG00000123243_85 (sequence is synthesized)
tacaggcgtgagccaccgggcctggcccctccttctattttatatagttaaggttggaaattgatatggtttggctctgtgtccccacggaaatagcatttcgaattgtaatccccatgt

SEQ ID NO: 250108 - DNA, 120 bp, Artificial Sequence
  ENSG00000123243_86 (sequence is synthesized)
ggctctgtgtccccacggaaatagcatttcgaattgtaatccccatgtgtcggaggagtggcctggtgggaggtgattggaccatggaggtgaatttcccccttgctgttctcgtgatag

SEQ ID NO: 250109 - DNA, 120 bp, Artificial Sequence
  ENSG00000123243_87 (sequence is synthesized)
cacgagatctcatggtttaaaagtccggcgcttcccagttctgtctctcgctcctgccgccttgtagacgtgttcgctttgcgtttgccttctgcgtgattgtaagtttcccgaggcttc

SEQ ID NO: 250110 - DNA, 120 bp, Artificial Sequence
  ENSG00000123243_88 (sequence is synthesized)
gaactgtgagtcaattaaacctcttttctgtataaactacccagtctcaggtacttcttgataacagtgtgaaaatggactgatacagtaatgatataagctagcatgactgctgactgt

SEQ ID NO: 250111 - DNA, 120 bp, Artificial Sequence
  ENSG00000123243_89 (sequence is synthesized)
actgctgactgtgaactggaaaatggtgctaagtacgtgacatcacttgatcttttcaatactgtgagattggtactatcattaatccattttacagatgagataaccaaggccgagtaa

SEQ ID NO: 250112 - DNA, 120 bp, Artificial Sequence
  ENSG00000123243_90 (sequence is synthesized)
cttgctcaaagtctcacagctgttaagaagtgaaaccaatatttgaatgcaggtttctgaccatgatcgtgcgttcttagctgatatattatgatgcctgtcactctgggtgctttaaca

SEQ ID NO: 250113 - DNA, 120 bp, Artificial Sequence
  ENSG00000123243_91 (sequence is synthesized)
atgaccaccaatgagagattgaccctggacagcatgcagtttcctttaatttcaaggacttttcctttttcagcacccgtttctttgtcctgtctaatgggtctaaggcatcttcaacca

SEQ ID NO: 250114 - DNA, 120 bp, Artificial Sequence
  ENSG00000123243_92 (sequence is synthesized)
gtctccctacaaaaataaccttttctctttgctggctctctgatcacttccaaaatccctgtccttgataagtgcaaataatagaagaatctgttctaccttgtggttcctgttaaggtt

SEQ ID NO: 250115 - DNA, 120 bp, Artificial Sequence
  ENSG00000123243_93 (sequence is synthesized)
acacctaaattgtctctgaaaaataattgcctattttgttaaaggaaatgtttaaacttcctttgacttgtgtgtctaataaaccctcagcagaaggaagtttatttttaaatacaaatt

SEQ ID NO: 250116 - DNA, 120 bp, Artificial Sequence
  ENSG00000123243_94 (sequence is synthesized)
actgtggccacttaacgcctcatttcctttttcattctgctaattggagatgggaaatggctggtcagcctatttcatgctatcaacttgagtacatttaaaaagataatcagaggcttt

SEQ ID NO: 250117 - DNA, 120 bp, Artificial Sequence
  ENSG00000123243_95 (sequence is synthesized)
gcagcagttttaagtctggctttgattcaatatctggataaaaagcctccacatgcccttatgattaagaattcttgtttatgttttcatgttctccagggtgcatgcagacctcatctt

SEQ ID NO: 250118 - DNA, 120 bp, Artificial Sequence
  ENSG00000123243_96 (sequence is synthesized)
ttggggttttattgctaagtacatagatatggtgttgtttgggtttataaacgtgagtagtttgctaaataattctctgtgttctaacaggaaatgaaggtcaggactaaaagatgggat

SEQ ID NO: 250119 - DNA, 120 bp, Artificial Sequence
  ENSG00000123243_97 (sequence is synthesized)
gctctttgcttaatctgtcatcacactaggttttcataaattacataatatccatttatctgtttatctttctgtaattctaatttatatcctaaatttcatgtgaaaaagctttgagaa

SEQ ID NO: 250120 - DNA, 120 bp, Artificial Sequence
  ENSG00000123243_98 (sequence is synthesized)
tttttttttttttaatgagccgtaagccgggcatggtggctcacgcctgtactcctagaactttgggagtccgaggcaggaggatggcttgagcctaggagttcaagaccagtctgagca

SEQ ID NO: 250121 - DNA, 80 bp, Artificial Sequence
  ENSG00000123243_99 (sequence is synthesized)
aatgatccaggtatgctgagagaatcacttgagtccaaaagtgagctgtgattgcaccattgcgctctgggtgacagatt

SEQ ID NO: 250122 - DNA, 120 bp, Artificial Sequence
  ENSG00000123243_100 (sequence is synthesized)
gtgagctgtgattgcaccattgcgctctgggtgacagattgagacgctgtctcaaaaaaaaaaaggaatacagaaaaagagaaatcccataggacaaatgaccagcgatttatcacatat

SEQ ID NO: 250123 - DNA, 120 bp, Artificial Sequence
  ENSG00000123243_101 (sequence is synthesized)
atgcagcatcacaaaagaggtggaggcagacactggagattaaaagaagcaagaaataaaaatggaatgtgattggggactcttctaatcttcattcaagcaaatcaaccataccaagac

SEQ ID NO: 250124 - DNA, 120 bp, Artificial Sequence
  ENSG00000123243_102 (sequence is synthesized)
cctttctttagggaatcagataaatttaaatacaaactgagaattagataataatagggcattgagcattaattttgttacttgtgataatggttttgtggttatgttagtaaaagagtt

SEQ ID NO: 250125 - DNA, 120 bp, Artificial Sequence
  ENSG00000123243_103 (sequence is synthesized)
cttacaggtaaagacatactggagtatttatggatgaaatatggtgtctggaatttgttttaaaatgctctaggaaaaaatggggaatagataaaaacatacaaaaggttggtaacatgc

SEQ ID NO: 250126 - DNA, 120 bp, Artificial Sequence
  ENSG00000123243_104 (sequence is synthesized)
tgatgtttgttaaagttgggtgatgggtacaggggttcattttactattctctctacttttgtgtgttttaaaaatgttcataagaaaaggttcaaaaagaggcataagaggaaactata

SEQ ID NO: 250127 - DNA, 120 bp, Artificial Sequence
  ENSG00000123243_105 (sequence is synthesized)
tgatgacataactctcgcattgtgatatatgagtacagtcttagaagttcctgtgaaatacaagcctgtaataaaatgaaatctaaaactctgtgtctgccaaacagtttttatttcttt

SEQ ID NO: 250128 - DNA, 120 bp, Artificial Sequence
  ENSG00000123243_106 (sequence is synthesized)
aaatctctaaaacatcaggtaaagcaaaggatgcggttgtgtgtggattgagagtaagagatgtttaaaaagtgtaaaaccaggccaggtgtactggctcacgcctgtaatcccagcact

SEQ ID NO: 250129 - DNA, 76 bp, Artificial Sequence
  ENSG00000123243_107 (sequence is synthesized)
gcaggagaatcacttgaacctgggaagttgaggttacagtgagccgagattgtgccaccacactctagcctggact

SEQ ID NO: 250130 - DNA, 120 bp, Artificial Sequence
  ENSG00000123243_108 (sequence is synthesized)
gtttgggtagatttataggtgtttaatagccatagtcaaagcacatttattaatgataaatggaaatggagacacctaaggtgtgcagtaaagacaggtcctcggtttgggattcgccac

SEQ ID NO: 250131 - DNA, 120 bp, Artificial Sequence
  ENSG00000123243_109 (sequence is synthesized)
cgtttcctcccacgcattttaatgaaagatttaaatgaaaacacagatttgctttccacattttaaaaattattcaaaactagagtcaaaggggagaatctgatacactggataacagaa

SEQ ID NO: 250132 - DNA, 120 bp, Artificial Sequence
  ENSG00000123243_110 (sequence is synthesized)
ttgaaattcaataaggcattcagaagcaaaagcagttatgctgtaacaagtcagctgcactgccatcccactgaaactatgatcgatacctggcatttatgagaacttatgatacaccag

SEQ ID NO: 250133 - DNA, 120 bp, Artificial Sequence
  ENSG00000123268_0 (sequence is synthesized)
agtagcggccctgactgccgaggaaacggtagcttaggacagttggctgttaagtgacactgattctccccgccccgcctgacccccgagaaggaggcttgtcccccgctgcgtgagggg

SEQ ID NO: 250134 - DNA, 120 bp, Artificial Sequence
  ENSG00000123268_1 (sequence is synthesized)
gtggggaagtgggtagtgaattcggatctacctgggaggggggagtggaagttcccgccccggagagcggcgaggcggcagccacagttgattatggaagattcccacaagagtaccacg

SEQ ID NO: 250135 - DNA, 120 bp, Artificial Sequence
  ENSG00000123268_2 (sequence is synthesized)
tcagagacagcacctcaacctggttcagcagttcagggagctcacatttctcatattgctcaacaggtatcatctttatcagaaagtgaggagtcccaggactcatccgacagcataggc

SEQ ID NO: 250136 - DNA, 120 bp, Artificial Sequence
  ENSG00000123268_3 (sequence is synthesized)
tcctcacagaaagcccacgggatcctagcacggcgcccatcttacagaaaaattttgaaagacttatcttctgaagatacacggggcagaaaaggagacggagaaaattctggagtttct

SEQ ID NO: 250137 - DNA, 120 bp, Artificial Sequence
  ENSG00000123268_4 (sequence is synthesized)
gctgctgtcacttctatgtctgttccaactcccatctatcagactagcagcggacagtacattgccattgccccaaatggagccttacagttggcaagtccaggcacagatggagtacag

SEQ ID NO: 250138 - DNA, 120 bp, Artificial Sequence
  ENSG00000123268_5 (sequence is synthesized)
ggacttcagacattaaccatgacaaattcaggcagtactcagcaaggtacaactattcttcagtatgcacagacctctgatggacagcagatacttgtgcccagcaatcaggtggtcgta

SEQ ID NO: 250139 - DNA, 120 bp, Artificial Sequence
  ENSG00000123268_6 (sequence is synthesized)
caaactgcatcaggagatatgcaaacatatcagatccgaactacaccttcagctacttctctgccacaaactgtggtgatgacatctcctgtgactctcacctctcagacaactaagaca

SEQ ID NO: 250140 - DNA, 120 bp, Artificial Sequence
  ENSG00000123268_7 (sequence is synthesized)
gatgacccccaattgaaaagagaaataaggttaatgaaaaacagagaagctgctcgagaatgtcgcagaaagaagaaagaatatgtgaaatgcctggaaaaccgagttgcagtcctggaa

SEQ ID NO: 250141 - DNA, 120 bp, Artificial Sequence
  ENSG00000123268_8 (sequence is synthesized)
aatcaaaataaaactctaatagaagagttaaaaactttgaaggatctttattccaataaaagtgtttgattcctaagaaagaaaatatttttgtggacatgcataaaaattaaatggatt

SEQ ID NO: 250142 - DNA, 120 bp, Artificial Sequence
  ENSG00000123268_9 (sequence is synthesized)
tcctagtggagttttataaattaaaaggtcaaaactgaagctttttatttaggcttttccaaatcaaggataaatatcttacgcacgatatctagtgacagaggagaaagtggaaaatga

SEQ ID NO: 250143 - DNA, 120 bp, Artificial Sequence
  ENSG00000123268_10 (sequence is synthesized)
tacgggcacaactggaagctttgtagaaattaaacatattcaaggagcaagaaatgaactttcagcagtctaaattttctaaataaccaatagttgccaatctaaaatggcagagaagat

SEQ ID NO: 250144 - DNA, 120 bp, Artificial Sequence
  ENSG00000123268_11 (sequence is synthesized)
gaaatttgataaactgaattttttttaaaaatccatttaccctacaggtttgcatttgtttgctgaaatttacctttttttagttatatatatgtgtgtgtgtgtgtgtaatttctgcca

SEQ ID NO: 250145 - DNA, 120 bp, Artificial Sequence
  ENSG00000123268_12 (sequence is synthesized)
ataaattctaaattacaaaggtaagagaaaacctagtacattactaaatatataaagtatatgttctgattatgtatacttgttctagtgtcaagtctttttaagtgggtttttaaaagt

SEQ ID NO: 250146 - DNA, 120 bp, Artificial Sequence
  ENSG00000123268_13 (sequence is synthesized)
ttgttattggacttgaatggatttttgagactaggttaattatttttgaggtcttatcctaaaaggcatctaaggtacatgaatggagtatggtgattttataacattttttatcagaat

SEQ ID NO: 250147 - DNA, 120 bp, Artificial Sequence
  ENSG00000123268_14 (sequence is synthesized)
ggaaaaagaactgtttaaaagtttgatacttttaaatagttggtttttttgcttactctggtaatgattttctacaaatacataataaattgtttttttgagtctatattctgtatgcag

SEQ ID NO: 250148 - DNA, 120 bp, Artificial Sequence
  ENSG00000123268_15 (sequence is synthesized)
ttgaatatccattacttattctgctgtgctttaatagaatggaatgtttacaggcccttaaaatattatttttaaaaaaccttctgaagatacataccaaagtttttccaagaagatttt

SEQ ID NO: 250149 - DNA, 120 bp, Artificial Sequence
  ENSG00000123268_16 (sequence is synthesized)
ataatcaatttaataatgtaaggtttatcagattctataatagtatagttattaaggcaattttatgttagagactattttgtaatgtagtgagtggtacctttataagaaaagtgactg

SEQ ID NO: 250150 - DNA, 120 bp, Artificial Sequence
  ENSG00000123268_17 (sequence is synthesized)
gctgatctttataaattctaatgttgagtttttaatgattattttaaatgtttatatagtttagtaaaatttgcatctcaaagtatcatttttatattatgggacgttttcagattggct

SEQ ID NO: 250151 - DNA, 120 bp, Artificial Sequence
  ENSG00000123268_18 (sequence is synthesized)
cgttttcagattggctaatatttgcattgtaaattttgtatgcagtttatctaaaattcaaaaatactgtcagtacaccagcgtttaacatctatattccaatttgtatacagtttaaaa

SEQ ID NO: 250152 - DNA, 120 bp, Artificial Sequence
  ENSG00000123268_19 (sequence is synthesized)
ttgtactgcaaaactattgtgtgctcttacacagtatgcatcatattgttgtctgtgaaattaaaggacatttgatagtctactgaatgtaaaatataatgcttggtatatgaatgataa

SEQ ID NO: 250153 - DNA, 120 bp, Artificial Sequence
  ENSG00000123268_20 (sequence is synthesized)
gggtctcactctgtcacccagactggtgtgcagtagtgtgaacatagctcactgcagccttgacctcctgtgctcaagcaatcctcctgcctcagctccccaagtagcagggaccacagg

SEQ ID NO: 250154 - DNA, 120 bp, Artificial Sequence
  ENSG00000123268_21 (sequence is synthesized)
cccttccagtcgtgcgtctcctcctttccctcgcccccaaataaaagtaaagcccgaaaccgcccgccgcggggtggctttcgcctcagaagccgccctttgcagtcgcaggcgctagct

SEQ ID NO: 250155 - DNA, 120 bp, Artificial Sequence
  ENSG00000123268_22 (sequence is synthesized)
tccgcgcctcggtgcagagctgcgctgcgcccttccagtcgtgcgtctcctcctttccctcgcccccaaataaaaagacgaggtcttgctacattgtccaggatggagaagtaggaattc

SEQ ID NO: 250156 - DNA, 120 bp, Artificial Sequence
  ENSG00000123268_23 (sequence is synthesized)
ttaaggatattgttatggagggaaaaaaatcattgattatggaagattcccacaagagtaccacgtcagagacagcacctcaacctggttcagcagttcagggagctcacatttctcata

SEQ ID NO: 250157 - DNA, 120 bp, Artificial Sequence
  ENSG00000123297_0 (sequence is synthesized)
atcgcggctagagagatgtcgctgctgcggtcgctgcgcgtgtttctggtcgcgcggaccgggagctacccggctgggtctcttctgcgtcagtcgccccagccaaggcacacattttat

SEQ ID NO: 250158 - DNA, 120 bp, Artificial Sequence
  ENSG00000123297_1 (sequence is synthesized)
gctgggccccgtctgtctgcctcggcctccagcaaggagctcctcatgaagctgcggcggaaaacaggctactcctttgtaaattgcaagaaagctctggagacttgtggcggggacctc

SEQ ID NO: 250159 - DNA, 120 bp, Artificial Sequence
  ENSG00000123297_2 (sequence is synthesized)
aaacaggcagagatctggctccacaaggaggcccagaaggagggctggagcaaagctgccaagctccaagggaggaagaccaaagaaggcctgattgggctgttgcaggaaggaaacaca

SEQ ID NO: 250160 - DNA, 120 bp, Artificial Sequence
  ENSG00000123297_3 (sequence is synthesized)
actgtattagtagaggtaaactgtgagacagattttgtttctagaaatttaaaatttcaactgttggtccagcaagtagcccttggaaccatgatgcattgtcagaccctaaaggatcaa

SEQ ID NO: 250161 - DNA, 120 bp, Artificial Sequence
  ENSG00000123297_4 (sequence is synthesized)
ccctctgcatacagtaaaggtttcttgaattcctctgagctttctggacttccagctgggcctgacagagaaggctcactcaaggatcagttggctttagcaattggaaaactgggagaa

SEQ ID NO: 250162 - DNA, 120 bp, Artificial Sequence
  ENSG00000123297_5 (sequence is synthesized)
aacatgattcttaaacgagctgcatgggtgaaggtgccatctgggttctacgttggctcttatgtccacggagcaatgcagagtccctcacttcacaagctggtgctggggaagtatggg

SEQ ID NO: 250163 - DNA, 120 bp, Artificial Sequence
  ENSG00000123297_6 (sequence is synthesized)
gccctggtcatctgtgagacgtctgaacagaaaacaaaccttgaagacgttggccgccgccttgggcagcatgtggtgggcatggcccccctctctgttggctccctggacgatgagcct

SEQ ID NO: 250164 - DNA, 120 bp, Artificial Sequence
  ENSG00000123297_7 (sequence is synthesized)
gggggagaggcagagactaagatgctgtcccagccgtatttgctggatccctccattaccttggggcagtatgtgcagcctcagggggtgtcggtagtagactttgtgcggtttgaatgt

SEQ ID NO: 250165 - DNA, 120 bp, Artificial Sequence
  ENSG00000123297_8 (sequence is synthesized)
tggacatcattacaaaaaggaatatttcccaaacctcttcagaccgagaatgcatgggtaaaattattaaatagttgtataataaaaataattttttccttgtttgcgtaatactggatt

SEQ ID NO: 250166 - DNA, 120 bp, Artificial Sequence
  ENSG00000123297_9 (sequence is synthesized)
tagcttttctgtgcctttcaaaaacaacaggtgggccttattgacgtgatagtgtcgtggagaacaggcatcaacaatactgctgctcccttcaacatagatttattatggtatttctga

SEQ ID NO: 250167 - DNA, 120 bp, Artificial Sequence
  ENSG00000123297_10 (sequence is synthesized)
aatttctaacttatatgttctgtcttacaccttttatgacatagaactcttttgttctgtttttgctttgcgacactgtgaaccgtgcttctgcctcggaacctccctagttatattact

SEQ ID NO: 250168 - DNA, 120 bp, Artificial Sequence
  ENSG00000123297_11 (sequence is synthesized)
tgtgccacatggatttctttaggattattgattcaaacctagagttgtctggaaaatgtgggttctcttctttgtgattgtctgtagtatgctttgaaggtgctctgcagtggtagacac

SEQ ID NO: 250169 - DNA, 120 bp, Artificial Sequence
  ENSG00000123297_12 (sequence is synthesized)
actggttctggcctcatttaatgaaattaataacacatgcccctatttctcttttggatgatgtgtgggtgggtgggtactgaggtttcctggccagctgtaaggcagattttgacattc

SEQ ID NO: 250170 - DNA, 120 bp, Artificial Sequence
  ENSG00000123297_13 (sequence is synthesized)
ttgtgccagaaacagaaattagagtagtccagttacccagagagctcacttaacattgcctctttacttccccagtactgaaacatttcttcaagtataacataaaattaccgtaacaag

SEQ ID NO: 250171 - DNA, 120 bp, Artificial Sequence
  ENSG00000123297_14 (sequence is synthesized)
cagacccagaatactgaaaataactccatttgttcattataggtatctttatttgaaaagtgaaaaatgctttgacacattacagatctgggtatttggattttgcctatggagtgcata

SEQ ID NO: 250172 - DNA, 120 bp, Artificial Sequence
  ENSG00000123297_15 (sequence is synthesized)
tatgatttcaatgatttacaggctaaatagattttagaaataatcatcttaaaattgaaaacaaaggtaggtcctggtataatattaaacataaagttattaaacattttaagcattgtt

SEQ ID NO: 250173 - DNA, 120 bp, Artificial Sequence
  ENSG00000123297_16 (sequence is synthesized)
tcgggatctcggccgctggggtctgcctttccaaattggagctgtctctgaacttcagcttcctgaatccaacttcttgcagaacacctcctcttgactgctctaagcaccttaaaaata

SEQ ID NO: 250174 - DNA, 120 bp, Artificial Sequence
  ENSG00000123297_17 (sequence is synthesized)
acaccttcaggatgtagctcttctttactaaacttgtatctgagtctccacttttgataggtggtatctatctagtcacctaaggcagaagcctgagagtttcctagaaaccccccatat

SEQ ID NO: 250175 - DNA, 120 bp, Artificial Sequence
  ENSG00000123297_18 (sequence is synthesized)
cgctgcgcgtgtttctggtcgcgcggaccgggagctacccggtgagaagtcctggtgctggtaccgacctgctgtccctgcagctctcctgctgggtctcttctgcgtcagtcgccccag

SEQ ID NO: 250176 - DNA, 120 bp, Artificial Sequence
  ENSG00000123297_19 (sequence is synthesized)
tgtcgctgctgcggtcgctgcgcgtgtttctggtcgcgcggaccgggagctacccggtgagaagtcctggtgctggctgggtctcttctgcgtcagtcgccccagccaaggcacacattt

SEQ ID NO: 250177 - DNA, 85 bp, Artificial Sequence
  ENSG00000123297_20 (sequence is synthesized)
ttgcaagaaagctctggagacttgtggcggggacctcaaacagacggagtcttgctctgtggcccaggccggcgtgcaatggcac

SEQ ID NO: 250178 - DNA, 120 bp, Artificial Sequence
  ENSG00000123297_21 (sequence is synthesized)
ttacaggagtgagccaccgcgcccggctgactttagacatcttaatctttcagagttgtgtagtttttgcctgtacggtcatgcgtctcttaataggaagatacattctgagaaatggcg

SEQ ID NO: 250179 - DNA, 120 bp, Artificial Sequence
  ENSG00000123297_22 (sequence is synthesized)
gtctcttaataggaagatacattctgagaaatggcgtcgttaggagattttggcttatgcacatcatagagtacctacacaaacctagatggtatattgtactacaacctgggctatatg

SEQ ID NO: 250180 - DNA, 120 bp, Artificial Sequence
  ENSG00000123297_23 (sequence is synthesized)
tgcaaggctgagcaatgatttgaatatatcttccaggtgagatattgatagcacatttgaggatgtgcctttcactaccctgaaaactctacagactcacaagactcttaaagaagactc

SEQ ID NO: 250181 - DNA, 120 bp, Artificial Sequence
  ENSG00000123307_0 (sequence is synthesized)
agagagcaggagctgcccagaggcttgtggtcctgaaagctcctctccggggagctaaccagggagaggaggtactgaagagcgactaaactggctgcagcggagagatcagcccgaagg

SEQ ID NO: 250182 - DNA, 120 bp, Artificial Sequence
  ENSG00000123307_1 (sequence is synthesized)
cgtccttgaggagcatacggaactccaaggaaggagtagaataaggagcaggcagagaaaccagacccggtggaatctctaagaggtaacaaccgggtttgacatggatcgctgaaagcg

SEQ ID NO: 250183 - DNA, 120 bp, Artificial Sequence
  ENSG00000123307_2 (sequence is synthesized)
tctcttctaccatctggatggtcagggagacttggcttctctgactgtcctctaagacgcagattcacagagttcactccaggaacggccagtgaccgagagtctggaaatgtcaaaaac

SEQ ID NO: 250184 - DNA, 120 bp, Artificial Sequence
  ENSG00000123307_3 (sequence is synthesized)
ttttgtaaaatccaaggagatgggagagctagtcaacacaccatcctggatggataaaggtctgggctcccaaaatgaggtgaaggaggaagagagcagaccaggtacttatgggatgct

SEQ ID NO: 250185 - DNA, 120 bp, Artificial Sequence
  ENSG00000123307_4 (sequence is synthesized)
cagcagcttaactgaagagcatgacagtattgaggaagaagaagaagaggaagaagatggggagaaacctaagagaaggggtcccaagaaaaagaagatgaccaaagctcgccttgagag

SEQ ID NO: 250186 - DNA, 120 bp, Artificial Sequence
  ENSG00000123307_5 (sequence is synthesized)
attcagggctcgaagagtcaaggctaatgccagagaacggacccggatgcatggcctgaatgacgccctggataacctgaggcgagtcatgccatgctactctaaaacccaaaaactttc

SEQ ID NO: 250187 - DNA, 120 bp, Artificial Sequence
  ENSG00000123307_6 (sequence is synthesized)
caagatagagactcttagactggccaggaactatatttgggctttatctgaagtcctggagactggccagacacctgaagggaaaggctttgtggagatgctgtgtaaagggctctctca

SEQ ID NO: 250188 - DNA, 120 bp, Artificial Sequence
  ENSG00000123307_7 (sequence is synthesized)
gcccacaagcaacctggtggctggatgtctccaactgggccctcagtctgtcctcctggagaagcacgaggataaatctcctatttgtgactctgccatctctgtccacaacttcaacta

SEQ ID NO: 250189 - DNA, 120 bp, Artificial Sequence
  ENSG00000123307_8 (sequence is synthesized)
tcagtctccggggcttcctagccctccttatggtcatatggaaacacatctccttcatctcaagccccaagtattcaagagtttgggagaatcgtcctttgggagccatctgcctgactg

SEQ ID NO: 250190 - DNA, 120 bp, Artificial Sequence
  ENSG00000123307_9 (sequence is synthesized)
cagtacacccccttatgagggcccactcactccacccctgagcatcagtgggaacttctccttgaagcaagatgggtctcctgacctagaaaaatcctacagcttcatgccacattaccc

SEQ ID NO: 250191 - DNA, 120 bp, Artificial Sequence
  ENSG00000123307_10 (sequence is synthesized)
ttcttcaagtctaagctcagggcatgtgcattcaactccttttcaggctggtaccccccgttatgatgttcctatagacatgtcctatgattcctacccccatcatggtattgggaccca

SEQ ID NO: 250192 - DNA, 120 bp, Artificial Sequence
  ENSG00000123307_11 (sequence is synthesized)
actcaatacagtcttcactgagtgaggcagttaagttcaatgtttcagagaatgacgtggagacattttccataattcaagtggttgagctaaagattcaatgaccttaaaggatcccta

SEQ ID NO: 250193 - DNA, 120 bp, Artificial Sequence
  ENSG00000123307_12 (sequence is synthesized)
tggatatatatcaaacaatagttcaagtccatttaggctttccttcacctatcacctcttttctcatcaccttctcacattgcattgatttctttatagagtcctcaagtgaaaatattt

SEQ ID NO: 250194 - DNA, 120 bp, Artificial Sequence
  ENSG00000123307_13 (sequence is synthesized)
gatgatttaacaaccatgtgaaaatagaacagaagacctgggccctattccagtggtgccaaaaactcattgcataatctgtgccaattaattttccatttctggcctttgtttatttac

SEQ ID NO: 250195 - DNA, 120 bp, Artificial Sequence
  ENSG00000123307_14 (sequence is synthesized)
tagcaattgtaaataaacaaattgtatttatatgaggcaactattctaagtccagatgatttctaaagtccttcacagttctgaaatgctataactgtggtgatcactcttgacaatttc

SEQ ID NO: 250196 - DNA, 120 bp, Artificial Sequence
  ENSG00000123307_15 (sequence is synthesized)
ttgaaactgaaagaatagagaaataataggaaagggatgctatgcatagaatgatcaaattgaattatcagagggatcacaaggtacatgtctcttggctcacagaatgcaaagcttgtt

SEQ ID NO: 250197 - DNA, 120 bp, Artificial Sequence
  ENSG00000123307_16 (sequence is synthesized)
aaacatgttcgttaagagactaactctatttgttattagactaaaagttgaacatatcttccttatgatttgaagaaccataatagagaaccataatagaggcctcatgccaactttatt

SEQ ID NO: 250198 - DNA, 120 bp, Artificial Sequence
  ENSG00000123307_17 (sequence is synthesized)
cttgataatatttcaaaaccatttttctcagtactagaggtagggcaaacaagtcactgaagcctcagactcctataactaatgggacatagagaagtcttttagaccatgacctccata

SEQ ID NO: 250199 - DNA, 120 bp, Artificial Sequence
  ENSG00000123307_18 (sequence is synthesized)
accagagggctctggaacttctgatgaagctcaggtgctgctgttagaatcagcacacaacacaggtttatattaaagagcaataaaatagctattggctataataactactatagttca

SEQ ID NO: 250200 - DNA, 120 bp, Artificial Sequence
  ENSG00000123307_19 (sequence is synthesized)
gggactctctccagctcacagttgcccatgggaaaaaccaatggatttttttttaagcaagatgaatttcatttggttaaacgtgattaaaaccatccacctctgtccacaccaatatat

SEQ ID NO: 250201 - DNA, 120 bp, Artificial Sequence
  ENSG00000123307_20 (sequence is synthesized)
tttccagaagcacaagcaccaatcaatttattgatcaaggttaaatttttccaacatatatgtagttccttatctctccccctacactaattgttacctcttcctcacttctaagataga

SEQ ID NO: 250202 - DNA, 120 bp, Artificial Sequence
  ENSG00000123307_21 (sequence is synthesized)
atatgttattatatattgtaaataacatttcaggtgaccaaacttaaggatgcagaaatgaaatccaaggttggtgaatatttttaccaactatgtcttcatcacaggtttaacccaatt

SEQ ID NO: 250203 - DNA, 120 bp, Artificial Sequence
  ENSG00000123307_22 (sequence is synthesized)
tgcagagtgtttatttttctttatgtaactcctttttcctttatatcaatgctaacttcatcaaatttgtattttttttcagaaaatgggacctgagaaattttcctatcttgttcaatc

SEQ ID NO: 250204 - DNA, 120 bp, Artificial Sequence
  ENSG00000123307_23 (sequence is synthesized)
agccaggacagttatttaagtcaaaccagagcctgaatggcttatttgatagtagattaggtcctgctcctgccagaaaggataagtttaacatgcagggtacatcaatagggccaattt

SEQ ID NO: 250205 - DNA, 120 bp, Artificial Sequence
  ENSG00000123307_24 (sequence is synthesized)
aaaaaatgataacacatattagtatgtcattttctatagctcagctatcccctaaaatctgccaactatatgtgtatcttgtctgtttacctctcttatttattatctccatacagtata

SEQ ID NO: 250206 - DNA, 120 bp, Artificial Sequence
  ENSG00000123307_25 (sequence is synthesized)
agttattttttttccattttgctctcagcacttaccctgctgtattttgcacccttggtttgtaaattcacttgaaagtagccttgcagagagatcttaagccccatcagtcaccaaagt

SEQ ID NO: 250207 - DNA, 120 bp, Artificial Sequence
  ENSG00000123307_26 (sequence is synthesized)
ggttcccttcatcacaatctgccctagaggaaataggcaagtaaaatgatatataaagccatactatgtgctttctgagtatatactgcacttacctttgtgagcggctgtaggagggtc

SEQ ID NO: 250208 - DNA, 120 bp, Artificial Sequence
  ENSG00000123307_27 (sequence is synthesized)
tatcctcgaagctagcattttctggcatttaagtttgtagataatcactgttgtttgagttatttattagatattatttatttaatttatttctctcttcctttcacgaaaattccttta

SEQ ID NO: 250209 - DNA, 120 bp, Artificial Sequence
  ENSG00000123307_28 (sequence is synthesized)
gccccatagatgtgcttgcaaacccttcctaaaattttatttggaaagtagctcataattttgctaagaactgctgagttttggagtgaggggaaaggaaaaaatagagaattacctctg

SEQ ID NO: 250210 - DNA, 120 bp, Artificial Sequence
  ENSG00000123307_29 (sequence is synthesized)
tgataatttttataaaaagcagcaataattcgaatggctatgcaagttaatgtttttagagtcttttcttcagtctaaaatgagccagagttattctttaataatctgctgtttatgcct

SEQ ID NO: 250211 - DNA, 120 bp, Artificial Sequence
  ENSG00000123307_30 (sequence is synthesized)
ttggggagtatggtacccatgagccaagcctccctgaaattgtacagagggattttataattgaattaaaatttaggaatgcaatagcttgtaaagagcctgctctccaacatagggtgg

SEQ ID NO: 250212 - DNA, 120 bp, Artificial Sequence
  ENSG00000123307_31 (sequence is synthesized)
tctcattcttctggagacttttttagataaagtaaaataattgtttaaatattttgtttaaaatatgactgtttttcctccctttttcctagcagaaataaagctgtaagtcttattaga

SEQ ID NO: 250213 - DNA, 120 bp, Artificial Sequence
  ENSG00000123329_0 (sequence is synthesized)
gtcattaaccttgtgtctccctgtttctgtcttgaacctgattctttcttcttatctccttcctgtgtccacctcaagactcccaccactacccaggaccaactcctgctcctgaatctt

SEQ ID NO: 250214 - DNA, 120 bp, Artificial Sequence
  ENSG00000123329_1 (sequence is synthesized)
ctgatgggccccacaaggtgacagtgctggctacaatgctatccagccggtggtggccaagttcctgggggatcctagggctgggcccccgaagccctcctcggggatcccagctctgtg

SEQ ID NO: 250215 - DNA, 120 bp, Artificial Sequence
  ENSG00000123329_2 (sequence is synthesized)
ccctctatgcctttacttatactggggcagatggccagcaggtgtctctggctgaaggggataggttcctactgcttcgaaagaccaactccgactggtggttggcaagacgcctagaag

SEQ ID NO: 250216 - DNA, 120 bp, Artificial Sequence
  ENSG00000123329_3 (sequence is synthesized)
ctccctccacctctcgacccatcttcgtcccagcagcctatatgatagaggaatccatcccttcccagagtccaactaccgtcatccccggccaattgctctggactcctgggccgaagt

SEQ ID NO: 250217 - DNA, 120 bp, Artificial Sequence
  ENSG00000123329_4 (sequence is synthesized)
tgtttcatggttccctggaggagttgtctcaggccctcccaagcagggctcaggctagctcggagcagcctcctccacttccccgcaaaatgtgtaggagcgtcagcactgacaatctga

SEQ ID NO: 250218 - DNA, 120 bp, Artificial Sequence
  ENSG00000123329_5 (sequence is synthesized)
gccccagccttctgaagcctttccaggaaggaccaagcggaagatccctctcccaggaagacttgccgtcagaagccagtgccagcacagcaggcccccagcccctcatgtcagagcccc

SEQ ID NO: 250219 - DNA, 120 bp, Artificial Sequence
  ENSG00000123329_6 (sequence is synthesized)
ctgtgtactgtaacctggtggaccttcgccgctgtcctcggtccccacccccaggccctgcatgccccctgctgcagaggctggatgcctgggagcagcacctggaccccaactctggac

SEQ ID NO: 250220 - DNA, 120 bp, Artificial Sequence
  ENSG00000123329_7 (sequence is synthesized)
gctgcttctacataaattcactgactggctgcaagtcctggaagcccccgcgccgcagtcgcagcgagacgaaccctggctccatggaggggacacagaccctgaagaggaacaatgatg

SEQ ID NO: 250221 - DNA, 120 bp, Artificial Sequence
  ENSG00000123329_8 (sequence is synthesized)
tcctgcaacctcaggcaaagggcttcagatctgacacagggaccccagaaccgcttgacccacagggttcactcagcctcagccaacgcacctcgcagcttgaccctccagccttgcagg

SEQ ID NO: 250222 - DNA, 120 bp, Artificial Sequence
  ENSG00000123329_9 (sequence is synthesized)
cccctcgacctctgccgcagctcctggacgacccccatgaggtggaaaagtcgggtctgctcaacatgaccaagattgcccaaggggggcgcaagctcaggaagaactggggcccgtctt

SEQ ID NO: 250223 - DNA, 120 bp, Artificial Sequence
  ENSG00000123329_10 (sequence is synthesized)
gggtagccggcccgaaagtagcgtggacctgcgcggggcggccctggcgcacggccgccacctgtccagccgccgcaacgtcctgcacatccgcacgatccctggccacgagttcctgct

SEQ ID NO: 250224 - DNA, 120 bp, Artificial Sequence
  ENSG00000123329_11 (sequence is synthesized)
gcagtcggaccacgagacagagctgcgagcctggcaccgcgcgctgcggactgtcatcgagcggctggatcgggagaaccccctggagctgcgtctgtcgggctctggacccgcggagct

SEQ ID NO: 250225 - DNA, 120 bp, Artificial Sequence
  ENSG00000123329_12 (sequence is synthesized)
gagcgccggggaggacgaagaagaggagtcggagctggtgtccaagccgctgctgcgcctcagcagccgccggagctccattcgggggcccgaaggcaccgagcagaaccgcgtgcgcaa

SEQ ID NO: 250226 - DNA, 120 bp, Artificial Sequence
  ENSG00000123329_13 (sequence is synthesized)
caaactaaagcggctcatcgcgaagagaccgcccttacaaagcctgcaggagcggggtctgctccgagaccaggtgttcggctgccagttggaatcactctgccagcgggaaggagacac

SEQ ID NO: 250227 - DNA, 120 bp, Artificial Sequence
  ENSG00000123329_14 (sequence is synthesized)
ggtgcccagctttttgcggctctgcattgctgctgtggataaaagaggtctagatgtggatggcatttatcgggtgagcgggaacttggcagtggtccagaagcttcgctttctggtgga

SEQ ID NO: 250228 - DNA, 120 bp, Artificial Sequence
  ENSG00000123329_15 (sequence is synthesized)
cagagagcgtgcggtcacctccgatgggaggtatgtgttcccagaacagccaggacaagaaggtcggttagatttggacagtactgagtgggatgacattcatgtggtcaccggagccct

SEQ ID NO: 250229 - DNA, 120 bp, Artificial Sequence
  ENSG00000123329_16 (sequence is synthesized)
gaagctttttctccgggagctgccccagcctctggtgccaccactgctgctgccccatttccgtgctgcccttgcactctccgaatcagagcagtgcctctctcagatacaagaattaat

SEQ ID NO: 250230 - DNA, 120 bp, Artificial Sequence
  ENSG00000123329_17 (sequence is synthesized)
aggctcaatgccaaagcccaaccatgacactctacggtacctcctggagcatttatgcagggtgatagcacactcagataagaatcgcatgacaccccacaacctgggaattgtgtttgg

SEQ ID NO: 250231 - DNA, 120 bp, Artificial Sequence
  ENSG00000123329_18 (sequence is synthesized)
accaaccctgtttcggccagagcaggagacatctgacccagcagcccatgctctctacccagggcagctggtccagctgatgctcaccaacttcaccagcctcttcccctgatgcaggga

SEQ ID NO: 250232 - DNA, 120 bp, Artificial Sequence
  ENSG00000123329_19 (sequence is synthesized)
aggaagaagagaaaacatatttccggtcatctctggtggtgagaggctggtgttctgttttgaggatatccctttaaatctcccaaatgactgtctctatcttcatgagtgtgacttgag

SEQ ID NO: 250233 - DNA, 120 bp, Artificial Sequence
  ENSG00000123329_20 (sequence is synthesized)
gtgttgggatgggtgagggagcttctctaaagaggaaagtgagtggattaacccctgcttctcttcttgttccctgttatcattcctccccaacataataatacataaagtggcatggta

SEQ ID NO: 250234 - DNA, 120 bp, Artificial Sequence
  ENSG00000123329_21 (sequence is synthesized)
gctggaagcaacagatggggactgcagaggaggtggtggtattgggatagtgctgcagccaagaacttaacgactgaaagtaactgggatatcttcataattatctgaaggtcacagtgg

SEQ ID NO: 250235 - DNA, 120 bp, Artificial Sequence
  ENSG00000123329_22 (sequence is synthesized)
gagaacaaaattaaaagaactgagaagacttacaagagaacctcctaagagtcacccaaacaatcggctgagaatgagaagaggttcaagtgattcttgtgcctcaggctcccaagtagc

SEQ ID NO: 250236 - DNA, 120 bp, Artificial Sequence
  ENSG00000123329_23 (sequence is synthesized)
tgggactacagtagctgggccagcacacccagaaagcctcacattgtgcagtggagaagctgagagaagaggaaaagaggagtggccagactcccaccactacccaggaccaactcctgc

SEQ ID NO: 250237 - DNA, 120 bp, Artificial Sequence
  ENSG00000123329_24 (sequence is synthesized)
gtgctcttccttcctccagactcctagcccagggcagggtttttctgtgttctgcttgcctgataggctacagcaggtctcctctagagatgtgacttgcccagcccttccctctctttc

SEQ ID NO: 250238 - DNA, 120 bp, Artificial Sequence
  ENSG00000123329_25 (sequence is synthesized)
ttaaccgtgggtggaaaggggctcctcttcccttctgtagacccttctctgtcttcttttaccttgcaggatgtgagggtggggcacccccttcaacattccccccaccccacaaaaagc

SEQ ID NO: 250239 - DNA, 120 bp, Artificial Sequence
  ENSG00000123329_26 (sequence is synthesized)
ctgttcccctttcctgtggccctgaggtgggggtggggtgggggaggcgggaagttggcaacaggaagtgaggagaagagcaaagaaaactgtgagagagagaatttttaaaaagcagct

SEQ ID NO: 250240 - DNA, 120 bp, Artificial Sequence
  ENSG00000123329_27 (sequence is synthesized)
gctcctggacgacccccatgtgaatctcccatttctttgtgaaggccaagatcctccctgccccccctccccccttttcctgctccacataaacatcttcctctttctgaatatcctcct

SEQ ID NO: 250241 - DNA, 120 bp, Artificial Sequence
  ENSG00000123329_28 (sequence is synthesized)
acccagccctcccccagcaactttaagggacttcactcctgggagaccccctagggaaagccgtggccactatggagggcgagggtgacttacagatcccattccctccacttcccagga

SEQ ID NO: 250242 - DNA, 120 bp, Artificial Sequence
  ENSG00000123329_29 (sequence is synthesized)
atatcttcataattatctgaaggtcacagtgggagaacaaaattaaaagaactgagaagacttacaagagaacctcctaagagtcacccaaacaatcggctgagaatgagaagagggtct

SEQ ID NO: 250243 - DNA, 120 bp, Artificial Sequence
  ENSG00000123329_30 (sequence is synthesized)
actgtcatcgagcggctggttagatgggtggaggcccggagggaggctccgaccggccgggaccaagggagtggggatcgggagaaccccctggagctgcgtctgtcgggctctggaccc

SEQ ID NO: 250244 - DNA, 120 bp, Artificial Sequence
  ENSG00000123329_31 (sequence is synthesized)
cgacagcgccctcctcaggctgggtgagtgtgagcgagaggcgcaggatgggtgcgggcgctgcctaccgcctcacgccaatgtgggggcggcagcggggagggcggtgcagaggaaagt

SEQ ID NO: 250245 - DNA, 120 bp, Artificial Sequence
  ENSG00000123329_32 (sequence is synthesized)
accttacctcctgcttctccactgtcccctcaagctcttccttcccctgatgaacctcaaggtagtgtgttttctctccggggctctcagaagatcagaagaatcagccaagtataagaa

SEQ ID NO: 250246 - DNA, 120 bp, Artificial Sequence
  ENSG00000123329_33 (sequence is synthesized)
gtaagacattctccattccccaccacaccccccacctctcacccgtatcccacccctcttcctccttcagccagggatccctgagtcgagcgtttccccacctgtttctccaatcctctc

SEQ ID NO: 250247 - DNA, 120 bp, Artificial Sequence
  ENSG00000123329_34 (sequence is synthesized)
acatacttcctcaccagacaccaccaggagttctcagcccccaaaacctgtcaccgatcctcaccaggctgtttgctctaccctctcccccaactcaagggctcccgtcctcacctccct

SEQ ID NO: 250248 - DNA, 120 bp, Artificial Sequence
  ENSG00000123329_35 (sequence is synthesized)
gtgagaagacaatgggggagggagcaggaggtgggaaggccaagagaagcatgggaagggcaacaggcagaatgaccacctccttcttcccccttttctggcaggcaggcccccagcccc

SEQ ID NO: 250249 - DNA, 120 bp, Artificial Sequence
  ENSG00000123329_36 (sequence is synthesized)
ctttccaggaaggaccaagcggaagatccctctcccaggaagacttgccgtcagaagccagtgccagcacagtgagtcacagctcttctgagctgggccctgttctaggcacaggacaga

SEQ ID NO: 250250 - DNA, 120 bp, Artificial Sequence
  ENSG00000123329_37 (sequence is synthesized)
cagcacctctgtcttcaggggactcccctggggatgacaaacacaaaaacaaataaataagataacgcttggtactactgataagtctaaaggcaggcccccagcccctcatgtcagagc

SEQ ID NO: 250251 - DNA, 120 bp, Artificial Sequence
  ENSG00000123329_38 (sequence is synthesized)
tgccagattgtttgaagcaggggaagggaggtggagtgtatttccttgcccaggcctggcacaggcagccaggaggaccagcctcacttaaggataaagacctatgctgagaagagctcc

SEQ ID NO: 250252 - DNA, 120 bp, Artificial Sequence
  ENSG00000123329_39 (sequence is synthesized)
cttccacatatcctctttgcttcccgtggaaacccccatgtactattcctgggagggttgtcctcatccccaccttagctaccttgccccactgcagaccctctaggcattcctatagtc

SEQ ID NO: 250253 - DNA, 120 bp, Artificial Sequence
  ENSG00000123338_0 (sequence is synthesized)
agacattgctgtctggtgctcctctctcagtggccatcatgtctttgacatctgcttaccagcataaattagcagagaagctcactatcctgaatgatcgcggtcagggggttctcatcc

SEQ ID NO: 250254 - DNA, 120 bp, Artificial Sequence
  ENSG00000123338_1 (sequence is synthesized)
gtatgtataacatcaagaagacttgttcagaccccaaatctaagccacctttcttactggaaaagtccatggaaccatctctcaagtatatcaacaagaaatttcccaacatagatgtcc

SEQ ID NO: 250255 - DNA, 120 bp, Artificial Sequence
  ENSG00000123338_2 (sequence is synthesized)
gaaacagcacgcaacatttaggaccagtacatcgtgaaaaagccgagataattagattcctcaccaactactaccagtcatttgtggatgtcatggaatttcgggatcatgtatatgaac

SEQ ID NO: 250256 - DNA, 120 bp, Artificial Sequence
  ENSG00000123338_3 (sequence is synthesized)
ttctcaacaccattgatgcctgccagtgccattttgatatcaatctcaactttgatttcactcggagttacctggacttgattgtaacttacacctcagtcattttacttctgtcacgga

SEQ ID NO: 250257 - DNA, 120 bp, Artificial Sequence
  ENSG00000123338_4 (sequence is synthesized)
ttgaagatcggcggatactcattggcatgtacaattgtgcccatgagatgctgcatgggcatggtgaccccagttttgcccgtctgggtcagatggtcttggagtatgaccaccctctga

SEQ ID NO: 250258 - DNA, 120 bp, Artificial Sequence
  ENSG00000123338_5 (sequence is synthesized)
agaagctgacagaagagtttgggcctcacacaaaggctgtgagtggagccctcctctctttgcatttcctctttgtccgaagaaaccagggggctgagcagtggcgcagtgcccaacttc

SEQ ID NO: 250259 - DNA, 120 bp, Artificial Sequence
  ENSG00000123338_6 (sequence is synthesized)
taagcctcatcagcaaccccccagccatgattaaccctgctaattcagatacaatggcctgtgagtatctgtctgtggaagtaatggagcgctggattatcattgggtttcttctttgtc

SEQ ID NO: 250260 - DNA, 120 bp, Artificial Sequence
  ENSG00000123338_7 (sequence is synthesized)
atgggtgcctcaactccaatagccagtgccagaagctgtggaagctgtgtctgcagggctccctctacatcacccttatccgtgaggatgtgctgcaggtgcacaaagtcaccgaggacc

SEQ ID NO: 250261 - DNA, 120 bp, Artificial Sequence
  ENSG00000123338_8 (sequence is synthesized)
tgtttagcagtttgaaagggtatggcaagagagtggcagacataaaggagagcaaggaacatgtaattgcaaacagtggccagtttcattgtcaacggcggcaatttctgcggatggcag

SEQ ID NO: 250262 - DNA, 120 bp, Artificial Sequence
  ENSG00000123338_9 (sequence is synthesized)
tgaaggagctggagactgtgttggctgatgaaccgggactactgggtcctaaggctctttttgctttcatggccctgtccttcattcgtgatgaggtcacctggctggttcgccacacag

SEQ ID NO: 250263 - DNA, 120 bp, Artificial Sequence
  ENSG00000123338_10 (sequence is synthesized)
agaatgtcaccaagacaaagacacctgaggactatgctgactcgagcattgcagagctacttttcttgttggaggggattaggtctctggtccgaagacacatcaaagtgatacagcaat

SEQ ID NO: 250264 - DNA, 120 bp, Artificial Sequence
  ENSG00000123338_11 (sequence is synthesized)
accaccttcagtacttggcaagatttgatgctcttgtgctcagtgacatcattcagaacttgtctgtgtgtccagaggaggagtccatcatcatgtcctcattcgtcagtatcctctcct

SEQ ID NO: 250265 - DNA, 120 bp, Artificial Sequence
  ENSG00000123338_12 (sequence is synthesized)
ctctgaatctcaaacaagttgataatggagaaaaatttgaattctcaggattgaggctggactggttccgcctacaggcatacactagcgtggctaaggcccctctgcacctgcatgaga

SEQ ID NO: 250266 - DNA, 120 bp, Artificial Sequence
  ENSG00000123338_13 (sequence is synthesized)
accctgacttagccaaggtgatgaacctcattgtcttccactcccgaatgctggactccgtagaaaaattgctggtggaaacttctgatctgtctactttctgctttcatcttcgtatct

SEQ ID NO: 250267 - DNA, 120 bp, Artificial Sequence
  ENSG00000123338_14 (sequence is synthesized)
ttgagaagatgtttgccatgaccttggaggaatctgccatgttgcgttatgccattgctttccccctgatttgtgctcactttgtccactgcactcatgagatgtgcccagaggagtacc

SEQ ID NO: 250268 - DNA, 120 bp, Artificial Sequence
  ENSG00000123338_15 (sequence is synthesized)
cccacctcaagaaccatggtcttcaccactgcaactccttcctggaagagttggccaagcagaccagcaattgcgtcctggagatctgtgctgagcagcgaaacctgagcgagcagcttc

SEQ ID NO: 250269 - DNA, 120 bp, Artificial Sequence
  ENSG00000123338_16 (sequence is synthesized)
tacctaagcactgtgccactacaatcagcaaagccaagaacaagaaaaccaggaagcagaggcagactcccagaaaaggagagcccgagagggacaagccaggagctgagagtcaccgga

SEQ ID NO: 250270 - DNA, 120 bp, Artificial Sequence
  ENSG00000123338_17 (sequence is synthesized)
agaaccgcagcattgtcaccaacatggacaagctacacctaaacttgacagaactggcactgacaatgaatcatgtatacagtttctccgtgtttgaacatactatcttcccttctgagt

SEQ ID NO: 250271 - DNA, 120 bp, Artificial Sequence
  ENSG00000123338_18 (sequence is synthesized)
acctcagcagccacctggaggccagactcaacagagccattgtgtggctggctggctacaatgccacgacccaggagatcgtacggccttctgagctgttggcaggagtcaaagcataca

SEQ ID NO: 250272 - DNA, 120 bp, Artificial Sequence
  ENSG00000123338_19 (sequence is synthesized)
ttggtttcatacagtcactggcccagtttttgggtgcagatgcttccagagtcatccgcaacgccctcctgcagcagacacaaccactggattcctgtggggaacagacaatcaccacac

SEQ ID NO: 250273 - DNA, 120 bp, Artificial Sequence
  ENSG00000123338_20 (sequence is synthesized)
tctacacaaactggtacctggaaagtctgcttagacaggcaagcagtgggaccatcatcctctccccagccatgcaggccttcgtcagcctgcccagagaaggggagcagaacttcagtg

SEQ ID NO: 250274 - DNA, 120 bp, Artificial Sequence
  ENSG00000123338_21 (sequence is synthesized)
cagaggagttctctgacatctctgagatgcgggccttggcagaactcctgggcccctatggcatgaagttcctgagtgaaaacctgatgtggcatgtgacctctcagattgtggagctga

SEQ ID NO: 250275 - DNA, 120 bp, Artificial Sequence
  ENSG00000123338_22 (sequence is synthesized)
agaagctggtggtggaaaacatggacatacttgttcagatcagatccaactttagcaagccggacttgatggcttccctgctgccccagctgacaggggctgaaaatgtgctaaagcgca

SEQ ID NO: 250276 - DNA, 120 bp, Artificial Sequence
  ENSG00000123338_23 (sequence is synthesized)
tgaccatcattggggttatcctcagtttcagggccatggcccaagagggacttcgggaggttttctcctcccactgcccatttcttatgggtcccattgagtgcttgaaggagtttgtca

SEQ ID NO: 250277 - DNA, 120 bp, Artificial Sequence
  ENSG00000123338_24 (sequence is synthesized)
ctccagacacagacatcaaggtgaccttgagtatctttgagctggcatctgctgcaggtgtgggctgtgacattgacccagccttggtggctgccattgctaatctgaaagctgatactt

SEQ ID NO: 250278 - DNA, 120 bp, Artificial Sequence
  ENSG00000123338_25 (sequence is synthesized)
catctcctgaggaggaatataaggtggcctgcctgctcttgatctttctggcagtttccctcccactccttgccactgacccttcttccttttatagcattgagaaggatggttacaaca

SEQ ID NO: 250279 - DNA, 120 bp, Artificial Sequence
  ENSG00000123338_26 (sequence is synthesized)
acaatattcattgcttgaccaaagccatcatccaggtgtctgctgccctcttcacgctctacaacaagaacattgaaactcacctcaaggaatttctggtggtggcctctgtcagcctct

SEQ ID NO: 250280 - DNA, 120 bp, Artificial Sequence
  ENSG00000123338_27 (sequence is synthesized)
tgcagctgggccaggagactgacaagcttaaaaccagaaatcgagaatccatttctctgctcatgcgcttggtggtggaggagtcatccttcctgaccctggacatgctggagtcctgtt

SEQ ID NO: 250281 - DNA, 120 bp, Artificial Sequence
  ENSG00000123338_28 (sequence is synthesized)
tcccttatgtcctgcttcgaaatgcctatcgggaggtgtctcgggccttccacctaaactgaatgcctgccagtacccactgaagagccctttggaccttcctaaacccttgccatagtg

SEQ ID NO: 250282 - DNA, 120 bp, Artificial Sequence
  ENSG00000123338_29 (sequence is synthesized)
gaagctgtggtcactttcgcagggggtgggaatggggtggggtcactaaggagagagggtcaggagccagagttgatgagcagatctgtggaagaacaatccagggctgagaaatcgtag

SEQ ID NO: 250283 - DNA, 120 bp, Artificial Sequence
  ENSG00000123338_30 (sequence is synthesized)
agcagtgaggcaggctgggagcatggaggacagcttatggaaaaagttagggcgtggggccacatgtgtgaattttacaatgaaaaaaggagtaacgtacaagtatattttctatcttct

SEQ ID NO: 250284 - DNA, 120 bp, Artificial Sequence
  ENSG00000123338_31 (sequence is synthesized)
ggtgacttgagcttgagctctgacaggcatgggcctctccgaccttcatcactattcttaggataatgctggcgggcagagatgatcaatcatcatattaaatcataatgagcttataat

SEQ ID NO: 250285 - DNA, 120 bp, Artificial Sequence
  ENSG00000123338_32 (sequence is synthesized)
cctcccactggagctgctattgtctcctgcacattcattaggaccattatcttctctcttcctttttcaaatgtgttcagcaaacattcaacctgctcctactgcagagtagcagcaaag

SEQ ID NO: 250286 - DNA, 120 bp, Artificial Sequence
  ENSG00000123338_33 (sequence is synthesized)
gagcccctcttttcctttgtggggctcttcgaggggtcattgggtctcttcctttgcccccagcttgactgcgtttcctactggggcaaggaggaagtgcccttcagagatgttcactgc

SEQ ID NO: 250287 - DNA, 120 bp, Artificial Sequence
  ENSG00000123338_34 (sequence is synthesized)
ccacctactctactacattgtttgttacaagttctctcttgctttaacccctcctgctttgatatctccacaacccagagcagagggtcagttagtctccgtcaattctaggttacatga

SEQ ID NO: 250288 - DNA, 120 bp, Artificial Sequence
  ENSG00000123338_35 (sequence is synthesized)
caactgattggcccagacttaggtgggttttccctcctgtaccatttgggggtactctgccttttattgggagggactaatttaaccccaaatccttttgtcagcctgggtatagctgtt

SEQ ID NO: 250289 - DNA, 120 bp, Artificial Sequence
  ENSG00000123338_36 (sequence is synthesized)
gctccaggaagggatttctcttctggatcttaaatttcacagacctcattaggttgtatggccctgagagtgggtatccttgagggagtacaagctgtttcaacttagcccttttctgcg

SEQ ID NO: 250290 - DNA, 120 bp, Artificial Sequence
  ENSG00000123338_37 (sequence is synthesized)
cacttctgtgaatccactgccagggagaagtggagaaacagatcatatatgtcacaggtctagagtggttggaattgacaaatataattagctagttggttaattagggtcatgtccata

SEQ ID NO: 250291 - DNA, 120 bp, Artificial Sequence
  ENSG00000123338_38 (sequence is synthesized)
ctttcatgatgaaagggaagcagttgtcggttttcagcaaaaacgattcagccttcctgaagcctatttgatagctgttttggggttttgtacatgtgtttgctttttatttcttgagac

SEQ ID NO: 250292 - DNA, 120 bp, Artificial Sequence
  ENSG00000123338_39 (sequence is synthesized)
ccaggcttagtcaatactttcttaacttggcacccataatcaacatacagatttttcttagcaacagttgtctgctctttagggtggaagcgatagagaatcctgcttcgtgcatcagca

SEQ ID NO: 250293 - DNA, 120 bp, Artificial Sequence
  ENSG00000123338_40 (sequence is synthesized)
aatcctccttccttgctatgggaagggcttatgttctaaagggtgattcagtgtcaggcttatgagactgagagtaaagttgatgaggaagaggaggctcagaagtatctgaacaactac

SEQ ID NO: 250294 - DNA, 120 bp, Artificial Sequence
  ENSG00000123338_41 (sequence is synthesized)
tctatatgtttatatttttctgcttgaggggatagagatccctcctccatctgcatctgcatatagaactgcttaagaggacagcaagacaagttgctgcagggggatggagggtagaca

SEQ ID NO: 250295 - DNA, 120 bp, Artificial Sequence
  ENSG00000123338_42 (sequence is synthesized)
gaatgcctttttttaaaactgaaaattttattgagatacttaatccacctgcacttgtaagaaatcatacagagaaattctattttcctttacacagtttccctgaatgctaacatctag

SEQ ID NO: 250296 - DNA, 120 bp, Artificial Sequence
  ENSG00000123338_43 (sequence is synthesized)
caaaactgtagtacactgccacaaccaggataactgacattgatataatctactgatcttgttcagatttccttccccagttttgcttatgttcatttctctctgtgtgtgcacgtgtgt

SEQ ID NO: 250297 - DNA, 120 bp, Artificial Sequence
  ENSG00000123338_44 (sequence is synthesized)
ttctctctgtgtgtgcacgtgtgtgtgttatctatttctatacagctttatcatgtgtaggtttgtgtatctgccactgcagtcaacatacagaacaggccgggcgcagtggctcacgcc

SEQ ID NO: 250298 - DNA, 86 bp, Artificial Sequence
  ENSG00000123338_45 (sequence is synthesized)
gtggatcacctgaggtcaggggtttgagagcagcctggccaatatagtgaaacaccgtctctactaaaaataccaaaacctactca

SEQ ID NO: 250299 - DNA, 120 bp, Artificial Sequence
  ENSG00000123338_46 (sequence is synthesized)
tcccactactcaggaggctgaggcagcagaataacttgatcccgggaggcggaggttgcagtaagctaagatcctgccacagcattccaggctgagtgacagagcgagactctgtctcaa

SEQ ID NO: 250300 - DNA, 120 bp, Artificial Sequence
  ENSG00000123338_47 (sequence is synthesized)
taaataataatttaaaaaaagatacagaacagttccatcaccacaaggatccctcgcattgctcttttatagcaattttatagcaattttctcctcccacaacccccttccccatctcta

SEQ ID NO: 250301 - DNA, 120 bp, Artificial Sequence
  ENSG00000123338_48 (sequence is synthesized)
gctcctggtaacacagatatattctctatttctaaaattttgtcatttgatatatctttttgtaaacatataattatacacacatatttctctaccacttatactttttcaaagtgcttt

SEQ ID NO: 250302 - DNA, 120 bp, Artificial Sequence
  ENSG00000123338_49 (sequence is synthesized)
cacatccttatagcaattctgcaaggtagccagggaaggctttcctatttcaggtcagaaaacagatttagaaatattaaatgacttaatgaaggtcacatgtttagcagtagaactaga

SEQ ID NO: 250303 - DNA, 120 bp, Artificial Sequence
  ENSG00000123338_50 (sequence is synthesized)
actgggacccaagtctgatgttcagtcctagaccttttctacttgcccggtctgcctcttcacaagggaagacttgggttttagaatccagagaccttagaaggagcaaattggagaagg

SEQ ID NO: 250304 - DNA, 120 bp, Artificial Sequence
  ENSG00000123338_51 (sequence is synthesized)
tgaggacatgatggcctttactaccggaagcaaaaagtgaatgtccagaggtgaagggacagagaagtaacaggacccatcagcatttcaggcaatttgcttcctttaccaggagggtct

SEQ ID NO: 250305 - DNA, 120 bp, Artificial Sequence
  ENSG00000123338_52 (sequence is synthesized)
ctgtcctcttacaacctgggaaaaaataagttgtgtcccaggttgtaagtttgctttacttaggcccaaaggaactaaagaatggatatcagaaatctcaccccaattgttttgtcttac

SEQ ID NO: 250306 - DNA, 120 bp, Artificial Sequence
  ENSG00000123338_53 (sequence is synthesized)
aggcacagaataggttctagcctcagcattttcattaatgtagtgtttttattaacatctccattaacttgcttgcagcaatgagatggaattatgcctcccacaaggcctggggcaaga

SEQ ID NO: 250307 - DNA, 120 bp, Artificial Sequence
  ENSG00000123338_54 (sequence is synthesized)
tacttgcataggtgcccccttttgtttggacagtagaaacactgcctcccctgccatggtgttcaatccagttggcaggtgggccagcttcaaagtgcagaaggaactgggtgtggtggc

SEQ ID NO: 250308 - DNA, 85 bp, Artificial Sequence
  ENSG00000123338_55 (sequence is synthesized)
cgcttgaactcaggagtttgagaccactctgggcaacacagtgaaaccctgtctctccaaaaatacaaaaaattagctgggcatg

SEQ ID NO: 250309 - DNA, 120 bp, Artificial Sequence
  ENSG00000123338_56 (sequence is synthesized)
atcccaacactttgggaggctgaggccagtggatctcttgagctaaggaggttaagaccagcctggtcaacatggcgaactccgtctctacaaaaaaatacgaaaattagctgggcgtag

SEQ ID NO: 250310 - DNA, 120 bp, Artificial Sequence
  ENSG00000123338_57 (sequence is synthesized)
cgaaaattagctgggcgtagtagttcctgcctgtagtcctagctacttggaaggctgaggtggggaggatcgcttgagtccgggaggcagaggttgcagtgagcgaagatgatgccattg

SEQ ID NO: 250311 - DNA, 120 bp, Artificial Sequence
  ENSG00000123338_58 (sequence is synthesized)
aaaaaaaaaaaaaaaaaaatgcagaaggtccagggcctggccaaggggatgatgccctgtagcactttgctttgcaggaagggaacaactgtgctgtgaataccaggatccaggagggag

SEQ ID NO: 250312 - DNA, 120 bp, Artificial Sequence
  ENSG00000123338_59 (sequence is synthesized)
gggaacaactgtgctgtgaataccaggatccaggagggagggagggtatatctgtgtcccccagctagggacaaggcttccttaaccttaggtcctcatgcttatattagttcttctcca

SEQ ID NO: 250313 - DNA, 120 bp, Artificial Sequence
  ENSG00000123338_60 (sequence is synthesized)
acaaagtttgactttgagaagaagctggcacatggctgaaatgcactcacgcggttgggggaagagtgttcttccagtcctcctccccacagggcctcctgcttctcctaagtacctgtc

SEQ ID NO: 250314 - DNA, 120 bp, Artificial Sequence
  ENSG00000123338_61 (sequence is synthesized)
atcaaaggagatgaagatgaatcccccttcagcccccacacctcaatgagttgtcaagtactctccctcccacttgaataggaagcaggagcagcaggccaggttgcaggttgaggaagt

SEQ ID NO: 250315 - DNA, 120 bp, Artificial Sequence
  ENSG00000123338_62 (sequence is synthesized)
cagaagttaacttgagctgagtttgcagctctggagagattgaggagcagacttttctcttgtcactttggaaggagaggattgtgaggctgcccctttaaatagcattcccgtaggagg

SEQ ID NO: 250316 - DNA, 120 bp, Artificial Sequence
  ENSG00000123338_63 (sequence is synthesized)
cagatcacatccatccgtcacctactgccaaagcatcatttttggtttctatcaaactcaaagcttgttggaaaggattgtggggttaggggagtgaggaggcagagcctcctaggggta

SEQ ID NO: 250317 - DNA, 120 bp, Artificial Sequence
  ENSG00000123338_64 (sequence is synthesized)
gggggcagtttagaagctgaaaaggagaggaatgagaaggagcctgggaaaggtgggggatgaggacaagaggaaaagacagggagagaatagttgtcttttgagcctcagagtggaaca

SEQ ID NO: 250318 - DNA, 120 bp, Artificial Sequence
  ENSG00000123338_65 (sequence is synthesized)
agtatacccaattcttatctgtttagagacgcagcaaggtagaaatgggattgtattgcaacaagaggaatgaggttgagactaaacaccaggactggtgactaaagaaagtgaaaggag

SEQ ID NO: 250319 - DNA, 120 bp, Artificial Sequence
  ENSG00000123338_66 (sequence is synthesized)
ccacagagtgaaaaaggctgatagacttggctctggttttatcacttactctctgtgagaccctataatttttctgggttagtttagttctcatttatttttatttttactttttccatc

SEQ ID NO: 250320 - DNA, 120 bp, Artificial Sequence
  ENSG00000123338_67 (sequence is synthesized)
catcaaactgtgttgtctatgaagttttcccatttattaaatgaagggaattagagtggatgaactctaatgtctctttcacgaataactttgtgtgtgtgtgcgtgtgtgtgtgtgtgt

SEQ ID NO: 250321 - DNA, 120 bp, Artificial Sequence
  ENSG00000123338_68 (sequence is synthesized)
gtgtgtgtgtgaattagccttaaaatgaatcaggagcagggggtcttgggagagcaggatgtgacactgtgttaacaagaaatgttgagagagccctctggatgtatgtcttgcctcttt

SEQ ID NO: 250322 - DNA, 120 bp, Artificial Sequence
  ENSG00000123338_69 (sequence is synthesized)
cccacctattctagtttaaagacctgcctaaatttggaaactccttagctctaatcctaatttactaattagagctctttagcaccatcctaatttgcaattcttttgtagtttccagcc

SEQ ID NO: 250323 - DNA, 120 bp, Artificial Sequence
  ENSG00000123338_70 (sequence is synthesized)
catttcattttcagttgataaggaggagattgctcccaaattttcagaaatggactgtgtaggagtgtgactagggtctcagatgcagccatttcttggctgggtctggggaaaagccaa

SEQ ID NO: 250324 - DNA, 120 bp, Artificial Sequence
  ENSG00000123338_71 (sequence is synthesized)
gggatgtgtgctaaaggtagatggacagagggtgggaagtcccttattatttccacttttttctccatctctgactctgccatctctttctgcctctgtactttctgggagctggttctg

SEQ ID NO: 250325 - DNA, 120 bp, Artificial Sequence
  ENSG00000123338_72 (sequence is synthesized)
ctgatacttctgctgaatctaaatgctgacctaacttggcaattcttttatgttaggagtcttagctgtgacagttcatccgcttcttcgcccttccatttcacttcttttctccttctc

SEQ ID NO: 250326 - DNA, 120 bp, Artificial Sequence
  ENSG00000123338_73 (sequence is synthesized)
tgactgggagaggaggagcctccactcagtatttagaacagagtaaataccttctcctgatcactcctccttccaacctccagaattttttgaaattaaaattcacattctgggatcctg

SEQ ID NO: 250327 - DNA, 120 bp, Artificial Sequence
  ENSG00000123338_74 (sequence is synthesized)
gaggatctaccattctatgtagttggatattggtgtgctgtttattgtttccttttatacttccgtttttcttgcagttgataatggagaaaaatttgaattctcaggattgaggctgga

SEQ ID NO: 250328 - DNA, 120 bp, Artificial Sequence
  ENSG00000123338_75 (sequence is synthesized)
ctggttccgcctacaggtaatgatctgttcctgttaaagattctcatcctcagattcttcctcccccacaatcccttctctttttatctcctaaatttgctttatggagtgagtcaactt

SEQ ID NO: 250329 - DNA, 120 bp, Artificial Sequence
  ENSG00000123338_76 (sequence is synthesized)
caggccaaactgtaattccaaggctgggggcctttttcattcatcttatttttctccacactttcccaactccaaccgcaggcatacactagcgtggctaaggcccctctgcacctgcat

SEQ ID NO: 250330 - DNA, 120 bp, Artificial Sequence
  ENSG00000123338_77 (sequence is synthesized)
aggtggtaacgattaattctaactattgaagaaatatacattaaatacctactattagctaagtgcttcactgggttttagggacacaataatgaataagacaacatggaggttaagagc

SEQ ID NO: 250331 - DNA, 120 bp, Artificial Sequence
  ENSG00000123338_78 (sequence is synthesized)
acagactctgaaactagattgcttgggtttgaattcaggctctaccactagttgtgtggccttgggcaagttgctcaaatttcccatgccattacctcaatttcctcatctataaaatgt

SEQ ID NO: 250332 - DNA, 120 bp, Artificial Sequence
  ENSG00000123338_79 (sequence is synthesized)
ggataatagtagtacctccctatggcctacctcatagggttgttgtgaagaataaaagtgttattatttgtaaagcaggtagaaaagttcctggtacattgtaagtgctatgtgcttgtt

SEQ ID NO: 250333 - DNA, 120 bp, Artificial Sequence
  ENSG00000123338_80 (sequence is synthesized)
cctggggtagagagaggagacagagatactggaaaatatagacttctgacttgggtgtaaagttctgtttcaaaaagcacttgaaggctggacaccgtggctcatgcctgtaatcctagc

SEQ ID NO: 250334 - DNA, 120 bp, Artificial Sequence
  ENSG00000123338_81 (sequence is synthesized)
ggtgggtagatcacttgagcccatgagttccagaccagcctaggcaacgtggtgaaaccctgtttctacaaaaataaataaactagctgggcagggtggcctgtagtcccagctacctgg

SEQ ID NO: 250335 - DNA, 120 bp, Artificial Sequence
  ENSG00000123338_82 (sequence is synthesized)
ttcagtacttggcaagatttgatgctcttgtgctcagtgacatcattcagtttctgtcctagggaacctgtgcccacttgacagtaactgcagctccttttttagaacttgtctgtgtgt

SEQ ID NO: 250336 - DNA, 120 bp, Artificial Sequence
  ENSG00000123338_83 (sequence is synthesized)
tgcatttcctctttgtccgaagaaaccagggggctgagcagtggcgcagtgcccaacttctaagcctcatcagcaaccccccagccatgattaaccctgctaattcagatacatgtctta

SEQ ID NO: 250337 - DNA, 120 bp, Artificial Sequence
  ENSG00000123338_84 (sequence is synthesized)
tcatgtatttgcttaaaacaagttcttgaaaaaatgagagagatgtactaatatggaaggatatctaagttgtattgttaaatgaaagcaaatttcaaaatagtatatgatacatcacat

SEQ ID NO: 250338 - DNA, 120 bp, Artificial Sequence
  ENSG00000123338_85 (sequence is synthesized)
ttctattttaaaagagtatgtatgtatatgtatttagtaaatatctaggaaagatctggactattttacattaaactgttaaaaataactacctttggggactgattatgactggcttca

SEQ ID NO: 250339 - DNA, 120 bp, Artificial Sequence
  ENSG00000123342_0 (sequence is synthesized)
agaactgggggtaagagcccctctgcctagcactgctcccccaaggctcccagaaatctcaggtcagaggcacggacagcctctggagctctcgtctggtgggaccatgaactgccagca

SEQ ID NO: 250340 - DNA, 120 bp, Artificial Sequence
  ENSG00000123342_1 (sequence is synthesized)
gctgtggctgggcttcctactccccatgacagtctcaggccgggtcctggggcttgcagaggtggcgcctgtggactacctgtcacaatatgggtacctacagaagcctctagaaggatc

SEQ ID NO: 250341 - DNA, 120 bp, Artificial Sequence
  ENSG00000123342_2 (sequence is synthesized)
taataacttcaagccagaagatatcaccgaggctctgagagcttttcaggaagcatctgaacttccagtctcaggtcagctggatgatgccacaagggcccgcatgaggcagcctcgttg

SEQ ID NO: 250342 - DNA, 120 bp, Artificial Sequence
  ENSG00000123342_3 (sequence is synthesized)
tggcctagaggatcccttcaaccagaagacccttaaatacctgttgctgggccgctggagaaagaagcacctgactttccgcatcttgaacctgccctccacccttccaccccacacagc

SEQ ID NO: 250343 - DNA, 120 bp, Artificial Sequence
  ENSG00000123342_4 (sequence is synthesized)
ccgggcagccctgcgtcaagccttccaggactggagcaatgtggctcccttgaccttccaagaggtgcaggctggtgcggctgacatccgcctctccttccatggccgccaaagctcgta

SEQ ID NO: 250344 - DNA, 120 bp, Artificial Sequence
  ENSG00000123342_5 (sequence is synthesized)
ctgttccaatacttttgatgggcctgggagagtcctggcccatgccgacatcccagagctgggcagtgtgcacttcgacgaagacgagttctggactgaggggacctaccgtggggtgaa

SEQ ID NO: 250345 - DNA, 120 bp, Artificial Sequence
  ENSG00000123342_6 (sequence is synthesized)
cctgcgcatcattgcagcccatgaagtgggccatgctctggggcttgggcactcccgatattcccaggccctcatggccccagtctacgagggctaccggccccactttaagctgcaccc

SEQ ID NO: 250346 - DNA, 120 bp, Artificial Sequence
  ENSG00000123342_7 (sequence is synthesized)
agatgatgtggcagggatccaggctctctatggcaagaagagtccagtgataagggatgaggaagaagaagagacagagctgcccactgtgcccccagtgcccacagaacccagtcccat

SEQ ID NO: 250347 - DNA, 120 bp, Artificial Sequence
  ENSG00000123342_8 (sequence is synthesized)
gccagacccttgcagtagtgaactggatgccatgatgctggggccccgtgggaagacctatgctttcaagggggactatgtgtggactgtatcagattcaggaccgggccccttgttccg

SEQ ID NO: 250348 - DNA, 120 bp, Artificial Sequence
  ENSG00000123342_9 (sequence is synthesized)
agtgtctgccctttgggaggggctccccggaaacctggatgctgctgtctactcgcctcgaacacaatggattcacttctttaagggagacaaggtgtggcgctacattaatttcaagat

SEQ ID NO: 250349 - DNA, 120 bp, Artificial Sequence
  ENSG00000123342_10 (sequence is synthesized)
gtctcctggcttccccaagaagctgaatagggtagaacctaacctggatgcagctctctattggcctctcaaccaaaaggtgttcctctttaagggctccgggtactggcagtgggacga

SEQ ID NO: 250350 - DNA, 120 bp, Artificial Sequence
  ENSG00000123342_11 (sequence is synthesized)
gctagcccgaactgacttcagcagctaccccaaaccaatcaagggtttgtttacgggagtgccaaaccagccctcggctgctatgagttggcaagatggccgagtctacttcttcaaggg

SEQ ID NO: 250351 - DNA, 120 bp, Artificial Sequence
  ENSG00000123342_12 (sequence is synthesized)
caaagtctactggcgcctcaaccagcagcttcgagtagagaaaggctatcccagaaatatttcccacaactggatgcactgtcgtccccggactatagacactaccccatcaggtgggaa

SEQ ID NO: 250352 - DNA, 120 bp, Artificial Sequence
  ENSG00000123342_13 (sequence is synthesized)
tccaccacccaccctttcatttcccccccagaagcctaaggcctaatagctgaatgaaatacctgtctgctcagtagaaccttgcaggtgctgtagcaggcgcaagaccgtagatctcag

SEQ ID NO: 250353 - DNA, 120 bp, Artificial Sequence
  ENSG00000123342_14 (sequence is synthesized)
gcctctaacacttccaactccagccaccactttcctgtgcattttcactcctgagaagtgctcccctaactcagatcccctaacttagatttggcccccaactccatttcctgtctgtct

SEQ ID NO: 250354 - DNA, 120 bp, Artificial Sequence
  ENSG00000123342_15 (sequence is synthesized)
tagacagcccttccaactgtgtcatctcttctctggaggtcaatggtggagggagatgcctgggtcctgttcttcctacataaaatgcaagaaaacagcatggccagtaaactgagcaag

SEQ ID NO: 250355 - DNA, 120 bp, Artificial Sequence
  ENSG00000123342_16 (sequence is synthesized)
ggccttggaatccttgagaatcacatttatgtgcttatgattacgggcaagctaattaaccttgttgaatctcagattccccatttgcaacattaggttaagaccagtactgcaggattg

SEQ ID NO: 250356 - DNA, 120 bp, Artificial Sequence
  ENSG00000123342_17 (sequence is synthesized)
ttgcactaaatgaaatactgtatgtgaagtgcctggcacagtgtctggtacatttgtgtttaataaaagctaactccatgttcataagagaggactgaacagctcttcctctagctgtct

SEQ ID NO: 250357 - DNA, 120 bp, Artificial Sequence
  ENSG00000123342_18 (sequence is synthesized)
ggctgtataactcttacagtagtctgtataataagggcatctctattagatctttaggggacagaggatttgtcaagatggttagctctttgttttggggtgcagagaaagaaaagagca

SEQ ID NO: 250358 - DNA, 120 bp, Artificial Sequence
  ENSG00000123342_19 (sequence is synthesized)
gcaacagcagaggctggactccctggttcagtatttaatgccattttattcacatgctcccatgttctccctccctcccattgtagccttgctgcccaggggagggatatgtcttccttt

SEQ ID NO: 250359 - DNA, 120 bp, Artificial Sequence
  ENSG00000123342_20 (sequence is synthesized)
atgcatctgggaaaccaggaacagaccctgcgcaggagagtcagagggggaagagttagaatgggtcagtggctggaacaaagttctggttaaggaggaaattagtgccacccacggtga

SEQ ID NO: 250360 - DNA, 120 bp, Artificial Sequence
  ENSG00000123342_21 (sequence is synthesized)
gaagcagagaaggcacttgcatcctatgcagccctgaagaccaggctcctttgggcaaaaggcaagactctggcaggtgggtcaatgctctctccttggagcaagaagccagcttttggg

SEQ ID NO: 250361 - DNA, 120 bp, Artificial Sequence
  ENSG00000123342_22 (sequence is synthesized)
gaaggcaggtcctgaggcaggcactgccctgtggtcttccccaggttgaggagagaagtggaagccccatggaagacagtgctcccagctgaggtaggaggcggaggtgggggtgggggt

SEQ ID NO: 250362 - DNA, 120 bp, Artificial Sequence
  ENSG00000123342_23 (sequence is synthesized)
agtttaagcctatggggcccagggggaaaggccaaacagaaacccaactaccccctaatgaagggcctggaggttggggtatcttggagctcctcagagcccttcttcccatcaaaaagg

SEQ ID NO: 250363 - DNA, 120 bp, Artificial Sequence
  ENSG00000123342_24 (sequence is synthesized)
tatcaaatgccttggaagctccctgatcctacaaaacaaaaaaatgcttatttttaccactgtgaggcaagctgaggtgaacatttaaaaggctatttcaagacgaggtgcggtggctat

SEQ ID NO: 250364 - DNA, 120 bp, Artificial Sequence
  ENSG00000123342_25 (sequence is synthesized)
ccctgtcagcttcagggattctgtgctattcttggccatgaacttgggcagcaggaagtcaaagagcaatcatctcccagtcatttcagattttcctgtcctggtagacccatccctctc

SEQ ID NO: 250365 - DNA, 120 bp, Artificial Sequence
  ENSG00000123342_26 (sequence is synthesized)
cctccttcagagcttttcaggaagcatctgaacttccagtctcaggtcagctggatgatgccacaagggcccgcatgaggcagcctcgttgtggcctagaggatcccttcaaccagaaga

SEQ ID NO: 250366 - DNA, 120 bp, Artificial Sequence
  ENSG00000123342_27 (sequence is synthesized)
cctgaggcctggacaaatgggagtgacatgggacttcagcatgagcaatggaggttagaccccaggcattaatgaccatggaaggagacatgtgacatggggagggagagttcggagcca

SEQ ID NO: 250367 - DNA, 120 bp, Artificial Sequence
  ENSG00000123342_28 (sequence is synthesized)
aattaaaggtggcttaggcaggcacttaccaaggctgccacgctctaagggccactagaacacatctggaaatgcagcaagatggagaaaactatattacccagattgcctgttagagag

SEQ ID NO: 250368 - DNA, 120 bp, Artificial Sequence
  ENSG00000123342_29 (sequence is synthesized)
ggtgcacctggttggaaggacaactaggaagccacttggaggggagggtgaggttcctaaggaggaatagctatctgcagggcttttgttttgttgagtggaccaaagctgaaacgctct

SEQ ID NO: 250369 - DNA, 120 bp, Artificial Sequence
  ENSG00000123342_30 (sequence is synthesized)
gagcaacaaagcattctgagtcctctttgtctgcctttaattttctctttgaattaaagttgaatgaatttttgaagaatcagcctgcagggagagggcaaattgttagtcagcctgaga

SEQ ID NO: 250370 - DNA, 120 bp, Artificial Sequence
  ENSG00000123342_31 (sequence is synthesized)
tagttacagtgtcttacttgaggagggcctaatcttaaagaaactataaaagggagggagatgagaagtttctgaataggtggaccggaggagaccaaaagctatcacctgaggacagag

SEQ ID NO: 250371 - DNA, 120 bp, Artificial Sequence
  ENSG00000123342_32 (sequence is synthesized)
ggagatgttctgcagctgcagtgggctgggggtggacccctgggggtcctaagctctctcctcttcctctcccctctccccacccatcccatatccagggctccgggtactggcagtggg

SEQ ID NO: 250372 - DNA, 120 bp, Artificial Sequence
  ENSG00000123342_33 (sequence is synthesized)
tctttttctcccttaagttcccctgttcaaggcataccttagaggtatgggccagagaggactgggtcagagagcagggagtggctgggaaggtaagggacagtgatgggcattcctgag

SEQ ID NO: 250373 - DNA, 120 bp, Artificial Sequence
  ENSG00000123342_34 (sequence is synthesized)
agaactgggtgatgacaggggaatctgaaaggggagaaagaagcatccaagagacagtgaacatagctgggggaattttaaaggtatgcattaattagagtttataataggcagggtgtg

SEQ ID NO: 250374 - DNA, 120 bp, Artificial Sequence
  ENSG00000123349_0 (sequence is synthesized)
ctcttcgttaagtcggccttcccaacatggcgcagtctattaacatcacggagctgaatctgccgcagctagaaatgctcaagaaccagctggaccaggaagtggagttcttgtccacgt

SEQ ID NO: 250375 - DNA, 120 bp, Artificial Sequence
  ENSG00000123349_1 (sequence is synthesized)
ccattgctcagctcaaagtggtacagaccaagtatgtggaagccaaggactgtctgaacgtgctgaacaagagcaacgaggggaaagaattactcgtcccactgacgagttctatgtatg

SEQ ID NO: 250376 - DNA, 120 bp, Artificial Sequence
  ENSG00000123349_2 (sequence is synthesized)
accaagcagatggagaaaatccaaccagctcttcaggagaagcacgccatgaaacaggccgtcatggaaatgatgagtcagaagattcagcagctcacagccctgggggcagctcaggct

SEQ ID NO: 250377 - DNA, 120 bp, Artificial Sequence
  ENSG00000123349_3 (sequence is synthesized)
actgctaaggcctgagagtttttgcagaaatggggcagagggacaccctttgggcgtggcttcctggtgatgggaagggtcttgtgttttaatgccaataaatgtgccagctgggcagaa

SEQ ID NO: 250378 - DNA, 120 bp, Artificial Sequence
  ENSG00000123349_4 (sequence is synthesized)
atatcgtggttgtgtcgtgagaactttaagattttgcagttccttgtaggcaggagtcctgtttgctgctactttacaatactaggcttaagacattttatgaaatgaactcacacaaca

SEQ ID NO: 250379 - DNA, 120 bp, Artificial Sequence
  ENSG00000123349_5 (sequence is synthesized)
gtctctgagaggctcaagcccctccttcccttccgggacggaggatcatagagctgtctggcgcagcgaggcctcccggcgccaccgagacgcgcagaggacggctagagcgttgctcgc

SEQ ID NO: 250380 - DNA, 120 bp, Artificial Sequence
  ENSG00000123349_6 (sequence is synthesized)
acattcctctgctcctattgcccctgtttccgttcttttcacactgtctgtgggtgctgtgccctgttggaactctctttaacgtcttacgttggagccgctaaccttccccaggtgttt

SEQ ID NO: 250381 - DNA, 120 bp, Artificial Sequence
  ENSG00000123349_7 (sequence is synthesized)
gtcttcattgctttcacagggaaagaattactcgtcccactgacgagttctttataggtattgttctaaggcctccagattattcagtccttatgccttgtagctttttggaaaaagagg

SEQ ID NO: 250382 - DNA, 120 bp, Artificial Sequence
  ENSG00000123349_8 (sequence is synthesized)
gacttcctcttcgttaagtcggccttcccaacatggcgcagtctattaacatcacggagctgaatctgccgcagctagaaatgctcaagaaccagctggaccagacagctgaggatgcca

SEQ ID NO: 250383 - DNA, 89 bp, Artificial Sequence
  ENSG00000123349_9 (sequence is synthesized)
cgcagctagaaatgctcaagaaccagctggaccagacggaatttcgctctgtcgcccaggctggagcgcaatggtgaagttcaagagat

SEQ ID NO: 250384 - DNA, 120 bp, Artificial Sequence
  ENSG00000123349_10 (sequence is synthesized)
ggatgaggcaggacaagagggtgttccagcatacatcattttctccttaaagaaccaacttctctgtcttctttccatttggagttataggtattgttctaaggcctccagattattcag

SEQ ID NO: 250385 - DNA, 120 bp, Artificial Sequence
  ENSG00000123349_11 (sequence is synthesized)
tccttatgccttgtagctttttggaaaaagagggtctttggaggccaagcaggctggctggcggaatcatggctcatgctgggctggctagtttttcccttaattcttgcttctcagatg

SEQ ID NO: 250386 - DNA, 120 bp, Artificial Sequence
  ENSG00000123349_12 (sequence is synthesized)
ggtactatgtagagaaggtgagtgagagcatgtggatgcccctctaaacagggaagggaaattcaggggaagctctagagcgcagcatggccagagggagtctccttttagccccttatt

SEQ ID NO: 250387 - DNA, 120 bp, Artificial Sequence
  ENSG00000123349_13 (sequence is synthesized)
cttcccaacatggcgcagtctattaacatcacggagctgaatctgccgcagctagaaatgctcaagaaccagctggaccaggtggggacgggccccagaggcacctctttcctgctctac

SEQ ID NO: 250388 - DNA, 120 bp, Artificial Sequence
  ENSG00000123349_14 (sequence is synthesized)
atcccccttgcccacgcgtacttctcgcgcccggttccaagttggcagcctacctttcccaggcgaaacctctatccgatcccaggacctgccccctccccggccgcgctcctttctccc

SEQ ID NO: 250389 - DNA, 64 bp, Artificial Sequence
  ENSG00000123349_15 (sequence is synthesized)
ttacaggcgtgagccactgcccccggccaagaatactcttattacacactttgtagctctttta

SEQ ID NO: 250390 - DNA, 120 bp, Artificial Sequence
  ENSG00000123349_16 (sequence is synthesized)
ggccaagaatactcttattacacactttgtagctcttttatctgacttcacaccaacatccagctaatgtcttgtgaacaccaaggagtatgtatagttgagatgtaatatttccctttg

SEQ ID NO: 250391 - DNA, 120 bp, Artificial Sequence
  ENSG00000123349_17 (sequence is synthesized)
ctgtttgagaacattaatatggagataaagctggtggtttacactttgctaatatcttagaagatacaggcaatagacaaaaataggaggatatagaaacagggagcttggctctgttaa

SEQ ID NO: 250392 - DNA, 120 bp, Artificial Sequence
  ENSG00000123349_18 (sequence is synthesized)
tcttcaacttcagcttaattgtggctcatttctaaactgtcactaagaaacctggattgtgttcacttgttcagtgttttatttgaatgagcaagttatggcagtagggcatctttaatc

SEQ ID NO: 250393 - DNA, 120 bp, Artificial Sequence
  ENSG00000123349_19 (sequence is synthesized)
tagggcatctttaatctgtagtctcagaactgacaggctaaaaggaacacaggaatagtagtgtgtagtagggaatggtttaaaaaaaaaaattagccaggcacagtggttcacgcctgt

SEQ ID NO: 250394 - DNA, 61 bp, Artificial Sequence
  ENSG00000123349_20 (sequence is synthesized)
tgtcttcggcgactgagacaggagaattgctttaacccgagaggcagaggttgcagtgagc

SEQ ID NO: 250395 - DNA, 120 bp, Artificial Sequence
  ENSG00000123349_21 (sequence is synthesized)
cagtgagccgatagcgggcaattgcactccaacctgggcgatagagcgagactctgtctcagaaagcaaaaaacaaacaaaacattgactttgtcaggaattagctacttcatgattgag

SEQ ID NO: 250396 - DNA, 120 bp, Artificial Sequence
  ENSG00000123349_22 (sequence is synthesized)
ggcattaagggaaatgaggctggctttttacttgtagtactctacaacagtaggaaaacatgtctagtctttctggaggggctaatgggaagaattgcaagaactgcttagagagtgaga

SEQ ID NO: 250397 - DNA, 120 bp, Artificial Sequence
  ENSG00000123349_23 (sequence is synthesized)
gctcgccgagagacttcctcttcgttaagtcggccttcccaacatggcgcagtctattaacatcacggagctgaatctgccgcagctagaaatgctcaagaaccagctggaccagatgta

SEQ ID NO: 250398 - DNA, 120 bp, Artificial Sequence
  ENSG00000123349_24 (sequence is synthesized)
tcaggagaagcacgccatgaaacagggtaagtttttcctggggcacctcttgaccctatctccataataaggaacatggattgcagtgtgaaccacgggggtgtcccctttgctggagta

SEQ ID NO: 250399 - DNA, 120 bp, Artificial Sequence
  ENSG00000123349_25 (sequence is synthesized)
tatgtcttagtttctctttggcatctttagaatctgtgtattgcataatcactatctgtagattcctgggttgagcgtttgagaaatttagaggaaggaaatcatgtttgtgctttggtg

SEQ ID NO: 250400 - DNA, 120 bp, Artificial Sequence
  ENSG00000123349_26 (sequence is synthesized)
gagctcctatttaatgacgatggaatgggggaatgagatgaacacacaggaaggaatcatgatccaaacgaactaaataccagcaattataaccccgactgcacatgagaatcactcagg

SEQ ID NO: 250401 - DNA, 120 bp, Artificial Sequence
  ENSG00000123349_27 (sequence is synthesized)
ccactgacgagttctgtatcctttccacaggaacggctacctgctgccttctccctttctccttcactcccccaaaaagcggggagggggattgttttgattacttcagattaccctctc

SEQ ID NO: 250402 - DNA, 120 bp, Artificial Sequence
  ENSG00000123349_28 (sequence is synthesized)
ctcacaatgattttgaggataccctttttttttttctttcttttttgagacggaatttcgctctgtcgcccaggctggagcgcaatgtgagccgatagcgggcaattgcactccaacctg

SEQ ID NO: 250403 - DNA, 120 bp, Artificial Sequence
  ENSG00000123352_0 (sequence is synthesized)
gtggctctagaaggggaggtggaggatctcctttcctcttctcagacccgggagcgtccgggacgcggagcccggagctggggcgacgaggcgattgcgggggcctgggctagaatctcc

SEQ ID NO: 250404 - DNA, 120 bp, Artificial Sequence
  ENSG00000123352_1 (sequence is synthesized)
ctggaaaaggagacatgaatgtctgcaatgatacttcctgacaagaagttgatacaagaaaaggaaaggagattaacagctagtgagcagaatttcgaacagcaggatttcgtatttttt

SEQ ID NO: 250405 - DNA, 120 bp, Artificial Sequence
  ENSG00000123352_2 (sequence is synthesized)
gcttccaactgcacacttccgttgcccacttttaaatcagagatacctacactcaaaacccagacaaggcaaaaggatacttttcttgtatattttttgagatcgaagaaacgacaatgt

SEQ ID NO: 250406 - DNA, 120 bp, Artificial Sequence
  ENSG00000123352_3 (sequence is synthesized)
ccaggaaacagaaccagaaggattcatcaggattcatttttgatttgcagtccaataccgtactggcccagggaggagcttttgagaacatgaaagagaagataaatgcggtacgtgcaa

SEQ ID NO: 250407 - DNA, 120 bp, Artificial Sequence
  ENSG00000123352_4 (sequence is synthesized)
tagttcctaataagagcaacaatgaaattatcctggttttgcagcactttgataactgtgtggacaaaacagtacaagcattcatggaaggtagtgccagtgaagtactcaaagaatgga

SEQ ID NO: 250408 - DNA, 120 bp, Artificial Sequence
  ENSG00000123352_5 (sequence is synthesized)
cagtaacaggcaagaaaaagaacaaaaagaagaaaaacaaaccgaaacctgccgcagaaccaagtaacggcatcccagattccagtaaatcagtttccattcaagaggaacagtctgcgc

SEQ ID NO: 250409 - DNA, 120 bp, Artificial Sequence
  ENSG00000123352_6 (sequence is synthesized)
cttcctcagagaaaggtggtatgaatggctaccatgtcaatggtgccatcaatgacactgagtctgtggactcactcagtgaaggtttggagacactttcaatagatgccagagaattgg

SEQ ID NO: 250410 - DNA, 120 bp, Artificial Sequence
  ENSG00000123352_7 (sequence is synthesized)
aggatcccgagtctgccatgctagatacgctggatagaacaggatccatgctgcagaatggtgtctctgattttgagaccaagtctttgactatgcactctattcacaattctcaacaac

SEQ ID NO: 250411 - DNA, 120 bp, Artificial Sequence
  ENSG00000123352_8 (sequence is synthesized)
ccaggaatgctgccaaatctctctcaagacctaccacagaaactcagttttcaaatatggggatggaagatgttcccctcgccaccagtaaaaagctaagttccaatattgaaaaatctg

SEQ ID NO: 250412 - DNA, 120 bp, Artificial Sequence
  ENSG00000123352_9 (sequence is synthesized)
taaaagacctccagcgctgcacagtgtctcttgcacggtatcgagttgtagttaaagaagagatggatgcctccattaagaaaatgaaacaagcctttgctgaattggagagctgtttaa

SEQ ID NO: 250413 - DNA, 120 bp, Artificial Sequence
  ENSG00000123352_10 (sequence is synthesized)
tggatcgagaagtggcgttgcttgctgaaatggacaaagtgaaagctgaagcaatggaaattttgctcagccgacaaaagaaggctgaacttctaaagaagatgactcatgtggctgttc

SEQ ID NO: 250414 - DNA, 120 bp, Artificial Sequence
  ENSG00000123352_11 (sequence is synthesized)
aaatgtcagagcagcaattggttgagctcagagctgatatcaagcactttgttagtgaacgtaaatatgatgaggatctgggacgagtagcccggttcacctgtgatgtagagaccctaa

SEQ ID NO: 250415 - DNA, 120 bp, Artificial Sequence
  ENSG00000123352_12 (sequence is synthesized)
agaagagcattgattcatttggacaagtgtctcatccaaagaacagctattcgaccagatcccgatgtagctcagttacatctgtgtccttgagtagcccaagtgatgcctctgctgctt

SEQ ID NO: 250416 - DNA, 120 bp, Artificial Sequence
  ENSG00000123352_13 (sequence is synthesized)
gctaacaagaaaaactttgcaccgggagagactcctgcagccatagcaaactccagtggccagccctaccagccacttcgggaggtattgccagggaacagacgaggaggacagggctat

SEQ ID NO: 250417 - DNA, 120 bp, Artificial Sequence
  ENSG00000123352_14 (sequence is synthesized)
aggccacaaggccaaaagtccaatgaccccatgaaccaagggcggcatgacagtatgggtcgttacagaaacagctcgtggtattcatctggttccaggtatcagagtgctccatctcag

SEQ ID NO: 250418 - DNA, 120 bp, Artificial Sequence
  ENSG00000123352_15 (sequence is synthesized)
gcaccaggaaacaccattgaaagaggccagactcactctgcagggaccaatggaactggagtcagcatggagcccagccctcccacgccttcattcaaaaaggggctcccccagcgcaaa

SEQ ID NO: 250419 - DNA, 120 bp, Artificial Sequence
  ENSG00000123352_16 (sequence is synthesized)
cccaggacctctcagactgaagccgtgaactcttgagagaaaatccagttggcctctctcctctatccacacaattcaacttgataactggactttaggaaacttacagttagatgtaat

SEQ ID NO: 250420 - DNA, 120 bp, Artificial Sequence
  ENSG00000123352_17 (sequence is synthesized)
aacaaaaagaagtttatgcgtatcactttttgtgccattctaagtatttttggtttcttgtctccttatttcctctttaccatttttggaggggaagctattttttttccttgatctttc

SEQ ID NO: 250421 - DNA, 120 bp, Artificial Sequence
  ENSG00000123352_18 (sequence is synthesized)
ccagtgatatggattgaatctggttggtcatttccaccaggaatcagaggcagctgttaccaggtttcggccttccagttgatccctccactgtccaggctgtctcaggaggaggtgaat

SEQ ID NO: 250422 - DNA, 120 bp, Artificial Sequence
  ENSG00000123352_19 (sequence is synthesized)
cagagctagtctgtcacctttccaatctaagccgaagccacaggtgcctgacaggttcccttctaacaactatttgaccaagagaggcaatcagggggttgtatactgcactggattcgc

SEQ ID NO: 250423 - DNA, 120 bp, Artificial Sequence
  ENSG00000123352_20 (sequence is synthesized)
cagagaagggaaaatttaattagtgaaaaggaaagaacactaggaaacatttgagaacctgcctctatcccagaatgtgctggagatttgacactcaaatcagtgtttagtcttctgctt

SEQ ID NO: 250424 - DNA, 120 bp, Artificial Sequence
  ENSG00000123352_21 (sequence is synthesized)
ggcaccatagcttaacctgcagtttcttcaaaatgcccaatgccttgtttcctattaccttagattgcaaaccagtctagggaagtctatgagaaagtagcatttaattaaagtttaaaa

SEQ ID NO: 250425 - DNA, 120 bp, Artificial Sequence
  ENSG00000123352_22 (sequence is synthesized)
gactcagtctcaaaaaaaaaaaaaaaagcatttttctgttttaatgtttggagacttttttttttgttctctccctttcctgaaccctattctgatcctgaaccaaatttatagcaatat

SEQ ID NO: 250426 - DNA, 120 bp, Artificial Sequence
  ENSG00000123352_23 (sequence is synthesized)
ccctattctgatcctgaaccaaatttatagcaatataattagtgttaatctaaggcattactcatcaaaaaaattgctgcagtctttacagttgaataaataaaaacaactgcataaata

SEQ ID NO: 250427 - DNA, 120 bp, Artificial Sequence
  ENSG00000123352_24 (sequence is synthesized)
tagctgctggctaccaatattctactttctgtctctatgaatgtgactaccctggttacctcatatggaataaggagggagactgatttggaaacatctgtgaggagcaaagaggacact

SEQ ID NO: 250428 - DNA, 120 bp, Artificial Sequence
  ENSG00000123352_25 (sequence is synthesized)
aaccgatgccgccgggtacgagctgtgctgcacgcggacgcgagctcgcgtcccacccgttttccccttccatctactttgtccccaaccctctccccgagtctcttcctttccccgctg

SEQ ID NO: 250429 - DNA, 120 bp, Artificial Sequence
  ENSG00000123352_26 (sequence is synthesized)
aggaaggaactggagggcatgagtgctggaaccggctggctgcttcagtaccagcaggggtgaactctgtgtgggccccgtggcagcatccaggctgtggggtgcctgtgacccccgaag

SEQ ID NO: 250430 - DNA, 120 bp, Artificial Sequence
  ENSG00000123352_27 (sequence is synthesized)
ctccagagggcatgttacagtgctcttctggctctgccatttgtggacggcttaagtgttaacagctcagtgggccctttccccccgtgtgtggggtggctgccctctgccagcaagggc

SEQ ID NO: 250431 - DNA, 120 bp, Artificial Sequence
  ENSG00000123352_28 (sequence is synthesized)
aaagggccagtgtgacagccttttgtatctgcactcgtggctcctgagctcttgtctggtgtccaggaaaaatgaggtcacacgaatgaattgaaggatggtaaatgcgggagattttat

SEQ ID NO: 250432 - DNA, 120 bp, Artificial Sequence
  ENSG00000123352_29 (sequence is synthesized)
agtggcttttagcaggaaggggagctgaaaaggggttggtggggtgcgggtagataatctttccctgaagtccagctgtctccagctagttttttctccaaagttacaccatcaagctgt

SEQ ID NO: 250433 - DNA, 120 bp, Artificial Sequence
  ENSG00000123352_30 (sequence is synthesized)
ccctctaaagtcaacccacttctctccgacatcctgacgtccagctagttctcctctctgccagctgagtctggggtctttataggcacagaatggggcagggtggggccatgggtggtt

SEQ ID NO: 250434 - DNA, 120 bp, Artificial Sequence
  ENSG00000123352_31 (sequence is synthesized)
taggaaaaggcaacaaacaggaaaacagagatataagttctcacattgggccaaggtttcaggcattttggcttgagggtggcgttttaaccggtgacccacccttttctgcctagaatt

SEQ ID NO: 250435 - DNA, 120 bp, Artificial Sequence
  ENSG00000123352_32 (sequence is synthesized)
tctctgcctcctgtccccatcagttgcttttttctaattactataaaatgaatttaaatattaactataaaagaatttaaattttagactacaacataggccgggtctggtggctcacgc

SEQ ID NO: 250436 - DNA, 120 bp, Artificial Sequence
  ENSG00000123352_33 (sequence is synthesized)
aaaaaaaaaaaaaaaaaaatagactacaacatagacactaagtgcttaccagttttggttgaacttagcctagatttacacttagttggaaacaaagtaaagcttatgtgttgttgggac

SEQ ID NO: 250437 - DNA, 120 bp, Artificial Sequence
  ENSG00000123352_34 (sequence is synthesized)
caaagtaaagcttatgtgttgttgggactttctctgaaacaaatctatgcatgtaattcatttgcatgtctgatatttggtcccatgacatataaaatattacaacatttcatttattca

SEQ ID NO: 250438 - DNA, 120 bp, Artificial Sequence
  ENSG00000123352_35 (sequence is synthesized)
aaccgatgccgccgggtacgagctgtgctgcacgcggacgcgagctcgcgtcccacccgttttccccttccatctactttgtccccaaccctctccccgagtctcttcctttccccggta

SEQ ID NO: 250439 - DNA, 120 bp, Artificial Sequence
  ENSG00000123352_36 (sequence is synthesized)
attcccagtctccggtggcgcgcgagcctgcggacggtgcgagacgcgagggaccgggccccgagaagagcggtaacccgactggtcggagcccgcctctcgccgccccgcgcctctccc

SEQ ID NO: 250440 - DNA, 120 bp, Artificial Sequence
  ENSG00000123352_37 (sequence is synthesized)
cgatcttctcggtctccggtgcgcgggccgtctcgccgctcgagccgcgctcgcgcacccgttggctgccacagcctcgagcttggcgcgccggattcgcgccggcgcgagtacgcgccc

SEQ ID NO: 250441 - DNA, 120 bp, Artificial Sequence
  ENSG00000123352_38 (sequence is synthesized)
tgagctctggctggctggctggcgcgcacgcgcccgagagggctccggggcggggcgagccgctgcctgggcgagggtcggggtgatctgctggatctccggcagcatcctgcagtccgg

SEQ ID NO: 250442 - DNA, 120 bp, Artificial Sequence
  ENSG00000123352_39 (sequence is synthesized)
aggtcactagtgaactctgcttccaagtactcctgcaaagtacaccacaagcctgtctatattctcaagccatccgcttcagttcatatgaccacacttgcatgtcagcaacagaagaga

SEQ ID NO: 250443 - DNA, 120 bp, Artificial Sequence
  ENSG00000123352_40 (sequence is synthesized)
atattatttttaaaaatttaggctctgcaaaaatatttgaaagaaaaggttcacatacatatcttctgtttacctggttaaaaaacatctttggccaggtgcaggggctcacacctgtaa

SEQ ID NO: 250444 - DNA, 60 bp, Artificial Sequence
  ENSG00000123352_41 (sequence is synthesized)
aaggcaggtggatcacttgaggtcagtggttcaagactagcccggccaacatggtgaagt

SEQ ID NO: 250445 - DNA, 120 bp, Artificial Sequence
  ENSG00000123352_42 (sequence is synthesized)
agacccgggagcgtccgggacgcggagcccggagctggggcgacgaggcgattgcgggggcctgggctagagatggagtctcactatggtgcctactctgattttgaactcctggcttca

SEQ ID NO: 250446 - DNA, 120 bp, Artificial Sequence
  ENSG00000123352_43 (sequence is synthesized)
gcgctctctcaggaggcagagcgaccgcgcggtccggaggccccagcgtttcccgtcgttggcgactctgaaattgccttttggaacaaaacttgggtcgggaaggaggcgaaggggaaa

SEQ ID NO: 250447 - DNA, 120 bp, Artificial Sequence
  ENSG00000123352_44 (sequence is synthesized)
gatgccgccgggtacgagctgtgctgcacgcggacgcgagctcgcgtcccacccgttttccccttccatctactttgtccccaaccctctccccgagtctcttcctttccccgaatctcc

SEQ ID NO: 250448 - DNA, 120 bp, Artificial Sequence
  ENSG00000123352_45 (sequence is synthesized)
gtgctgcacgcggacgcgagctcgcgtcccacccgttttccccttccatctactttgtccccaaccctctccccgagtctcttcctttccccgacccgggagcgtccgggacgcggagcc

SEQ ID NO: 250449 - DNA, 120 bp, Artificial Sequence
  ENSG00000123352_46 (sequence is synthesized)
tccgtcagttcagctcgggccctccgttcccggcgcgcgccgggtccctaaccgatgccgccggctgctggctaccaatattctactttctgtctctatgaatgtgactaccctggttac

SEQ ID NO: 250450 - DNA, 120 bp, Artificial Sequence
  ENSG00000123352_47 (sequence is synthesized)
aaactgtccttctaatgtgttttgaatggttttacaagtatttatggatattagattatcgctttgtgtattactagtctgggaattaattcatataacaatagcttttctactcacaca

SEQ ID NO: 250451 - DNA, 120 bp, Artificial Sequence
  ENSG00000123352_48 (sequence is synthesized)
ttagtatgcttttagcaaacaaactcactggtctttctttactattaataatgtgctaattttgtatttgagtttctgatcaaactttttattcctttgtcatcttttcctagtttaatg

SEQ ID NO: 250452 - DNA, 120 bp, Artificial Sequence
  ENSG00000123352_49 (sequence is synthesized)
agtgaaagctgaagcaacactttgttagtgaacgtaaatatgatgaggatctgggacgagtagcccggttcacctgtgatgtagagaccctaaagaagagcattgattcatttggacaag

SEQ ID NO: 250453 - DNA, 120 bp, Artificial Sequence
  ENSG00000123352_50 (sequence is synthesized)
atctgaagctattgcgtctttgaatagcaacatgaggttaggtctccctgtttttattttcctgaatctgccaacataggatgcacaagtttgaatgttgtaaagtttttctttatcttc

SEQ ID NO: 250454 - DNA, 120 bp, Artificial Sequence
  ENSG00000123353_0 (sequence is synthesized)
gttacttcctggagacttcaggtgtggtagccggcgccgcgcccatagccggacggggatctgagctggcaggatgaatgtgggggtggcacacagcgaagtaaaccccaacacccgagt

SEQ ID NO: 250455 - DNA, 120 bp, Artificial Sequence
  ENSG00000123353_1 (sequence is synthesized)
gatgaatagccgaggcatctggctggcctacatcatcttggtaggattgctgcatatggttctactcagcatccccttcttcagcattcctgttgtctggaccctgaccaacgtcatcca

SEQ ID NO: 250456 - DNA, 120 bp, Artificial Sequence
  ENSG00000123353_2 (sequence is synthesized)
taacctggctacgtatgtcttccttcatacggtgaaagggacaccctttgagactcctgaccaaggaaaggctcggctactgacacactgggagcaaatggactatgggctccagtttac

SEQ ID NO: 250457 - DNA, 120 bp, Artificial Sequence
  ENSG00000123353_3 (sequence is synthesized)
ctcttcccgcaagttcctcagcatctctcctattgtgctctatctcctggccagcttctataccaagtatgatgctgcgcacttcctcatcaacacagcctcattgctaagtgtactgct

SEQ ID NO: 250458 - DNA, 120 bp, Artificial Sequence
  ENSG00000123353_4 (sequence is synthesized)
gccgaagttgccccagttccatggggttcgtgtctttggcatcaacaaatactgagggatgggttttgggacagctccatgggcatggggaaggcactgaaacagaggactataaaacat

SEQ ID NO: 250459 - DNA, 120 bp, Artificial Sequence
  ENSG00000123353_5 (sequence is synthesized)
ccttctcttattctccatactgtcttctacacctttaaagcctgagaactatacaacctttcccagactcccaagaagagaagagattggcaaatggggctcctgggcccagtcctgcta

SEQ ID NO: 250460 - DNA, 120 bp, Artificial Sequence
  ENSG00000123353_6 (sequence is synthesized)
gtggcaagtttctttgaatcaggaaggcaggtgaggtaagggccaaatcactctcctccatagcaggaagccatttgggcagcttctttggtgattacatctttccatatcttttacact

SEQ ID NO: 250461 - DNA, 120 bp, Artificial Sequence
  ENSG00000123353_7 (sequence is synthesized)
taccaccttccagctctgttttgctgtgtatttttcttacaataatttttttcagctatagctgcagtttaatcaggatgggtagagagctgtcctcataaggctgggggtgggaagatg

SEQ ID NO: 250462 - DNA, 120 bp, Artificial Sequence
  ENSG00000123353_8 (sequence is synthesized)
ggaagagattctcaaatgagaaaaagggctccggctatatgggcaacaaagagggaagatacaggttgccagttatacatttatagaaagataatcccctggctttaaatagtcatgtac

SEQ ID NO: 250463 - DNA, 120 bp, Artificial Sequence
  ENSG00000123353_9 (sequence is synthesized)
atacaaatatgaacaaacttaaaaaaaaaatacaaacccttggatcacatgggggcttctgggaacccccgtattcttccccctcacccaagggcagtgggcatgaatctactttttaaa

SEQ ID NO: 250464 - DNA, 120 bp, Artificial Sequence
  ENSG00000123353_10 (sequence is synthesized)
aatgattaattttggccatccttgcagaaaagagcctaaaattgggtgatttacccacaaagtgaaagtcgagggaaaattcagtttccagtctctgaactctatgcgataatctcctat

SEQ ID NO: 250465 - DNA, 120 bp, Artificial Sequence
  ENSG00000123353_11 (sequence is synthesized)
cattagggctacatgctttcttgttctcttttaaatattatatcaggataaaggagagggctccctcctgaaatgggtcaagaaagaagatagacttgtagctttaaaagggtgggaaaa

SEQ ID NO: 250466 - DNA, 120 bp, Artificial Sequence
  ENSG00000123353_12 (sequence is synthesized)
agtgtcatctgccctaaaagcaaatgacaagacaaaggcatacagaccccagggaaatacccagttcccacacctaaagggatacactgtccagcccaggtccaggccctaggttcttta

SEQ ID NO: 250467 - DNA, 88 bp, Artificial Sequence
  ENSG00000123353_13 (sequence is synthesized)
gatacactgtccagcccaggtccaggccctaggttctttactctagctaccccctatttctttggtattgtcaaaagacaagattcag

SEQ ID NO: 250468 - DNA, 120 bp, Artificial Sequence
  ENSG00000123353_14 (sequence is synthesized)
atcagctttagagctaccacaattttaaagatccgagttcagataatcactgctgcccctggagtcagagccaaggctccacctttcgaggatgaatgtgggggtggcacacagcgaagt

SEQ ID NO: 250469 - DNA, 120 bp, Artificial Sequence
  ENSG00000123353_15 (sequence is synthesized)
aaagatccgagttcagataatcactgctgcccctggagtcagagccaaggctccacctttcgaggtattgagctcaggtcccttcctaacccagtccagaagccgtgggcaagttgttgt

SEQ ID NO: 250470 - DNA, 120 bp, Artificial Sequence
  ENSG00000123353_16 (sequence is synthesized)
cgtgccccacgcttgagagaagtaatggggatgcagactgtttacatgccacggaggtgagagagagggtggacaagccccagagaacaaagtggggaccagagtgagctttactctgtc

SEQ ID NO: 250471 - DNA, 120 bp, Artificial Sequence
  ENSG00000123353_17 (sequence is synthesized)
atcccttcttagtggttctttgatgattccatgactttcgcctggaattctgggtgtacgtgacctcttcatggttattaacttcttcagcaaagtcagatactcctatttcccttgctc

SEQ ID NO: 250472 - DNA, 120 bp, Artificial Sequence
  ENSG00000123353_18 (sequence is synthesized)
agatcagagcaataatgactatgtctctgaaatgtagtgaggactcttcttgtcttttaaagttttccccaagtcttcagtttttattttctgcgtgatgggtaagttcttcattcccaa

SEQ ID NO: 250473 - DNA, 120 bp, Artificial Sequence
  ENSG00000123353_19 (sequence is synthesized)
tagagttcaggggattggggctatctgagagacaactgggagatagctcaagaggggttgagaaaaaactgagctggactcctgcctgatcccccattacggctaggatgaatgtggggg

SEQ ID NO: 250474 - DNA, 120 bp, Artificial Sequence
  ENSG00000123358_0 (sequence is synthesized)
gtcacggagcgcttaagaggagggtcgggctcggccggggagtcccagtggcggaggctacgaaacttgggggagtgcacagaagaacttcgggagcgcacgcgggaccagggaccaggc

SEQ ID NO: 250475 - DNA, 120 bp, Artificial Sequence
  ENSG00000123358_1 (sequence is synthesized)
tgagactcggggcgccagtccgggcaggggcagcgggagccggccgggtagggtgcagcctgaggcttgttcagcagaacaggtgcaagccacattgttgccaagacctgcctgaagccg

SEQ ID NO: 250476 - DNA, 120 bp, Artificial Sequence
  ENSG00000123358_2 (sequence is synthesized)
gattctccccactgcctccttcaaccccgcctcttcctcctcctgtgggactgctcccccctcctgtgaggctagatagatgccctgtatccaagcccaatatgggacaccagcaccgag

SEQ ID NO: 250477 - DNA, 120 bp, Artificial Sequence
  ENSG00000123358_3 (sequence is synthesized)
tccgggaccccgtgaccacctggcaagcgaccccctgacccctgagttcatcaagcccaccatggacctggccagccccgaggcagcccccgctgcccccactgccctgcccagcttcag

SEQ ID NO: 250478 - DNA, 120 bp, Artificial Sequence
  ENSG00000123358_4 (sequence is synthesized)
caccttcatggacggctacacaggagagtttgacaccttcctctaccagctgccaggaacagtccagccatgctcctcagcctcctcctcggcctcctccacatcctcgtcctcagccac

SEQ ID NO: 250479 - DNA, 120 bp, Artificial Sequence
  ENSG00000123358_5 (sequence is synthesized)
ctcccctgcctctgcctccttcaagttcgaggacttccaggtgtacggctgctaccccggccccctgagcggcccagtggatgaggccctgtcctccagtggctctgactactatggcag

SEQ ID NO: 250480 - DNA, 120 bp, Artificial Sequence
  ENSG00000123358_6 (sequence is synthesized)
cccctgctcggccccgtcgccctccacgcccagcttccagccgccccagctctctccctgggatggctccttcggccacttctcgcccagccagacttacgaaggcctgcgggcatggac

SEQ ID NO: 250481 - DNA, 120 bp, Artificial Sequence
  ENSG00000123358_7 (sequence is synthesized)
agagcagctgcccaaagcctctgggcccccacagcctccagccttcttttccttcagtcctcccaccggccccagccccagcctggcccagagccccctgaagttgttcccctcacaggc

SEQ ID NO: 250482 - DNA, 120 bp, Artificial Sequence
  ENSG00000123358_8 (sequence is synthesized)
cacccaccagctgggggagggagagagctattccatgcctacggccttcccaggtttggcacccacttctccacaccttgagggctcggggatactggatacacccgtgacctcaaccaa

SEQ ID NO: 250483 - DNA, 120 bp, Artificial Sequence
  ENSG00000123358_9 (sequence is synthesized)
ggcccggagcggggccccaggtggaagtgaaggccgctgtgctgtgtgtggggacaacgcttcatgccagcattatggtgtccgcacatgtgagggctgcaagggcttcttcaagcgcac

SEQ ID NO: 250484 - DNA, 120 bp, Artificial Sequence
  ENSG00000123358_10 (sequence is synthesized)
agtgcagaaaaacgccaagtacatctgcctggctaacaaggactgccctgtggacaagaggcggcgaaaccgctgccagttctgccgcttccagaagtgcctggcggtgggcatggtgaa

SEQ ID NO: 250485 - DNA, 120 bp, Artificial Sequence
  ENSG00000123358_11 (sequence is synthesized)
gccggctaccttcaaaacccaagcagcccccagatgcctcccctgccaatctcctcacttccctggtccgtgcacacctggactcagggcccagcactgccaaactggactactccaagt

SEQ ID NO: 250486 - DNA, 120 bp, Artificial Sequence
  ENSG00000123358_12 (sequence is synthesized)
tccaggagctggtgctgccccactttgggaaggaagatgctggggatgtacagcagttctacgacctgctctccggttctctggaggtcatccgcaagtgggcggagaagatccctggct

SEQ ID NO: 250487 - DNA, 120 bp, Artificial Sequence
  ENSG00000123358_13 (sequence is synthesized)
ttgctgagctgtcaccggctgaccaggacctgttgctggagtcggccttcctggagctcttcatcctccgcctggcgtacaggtctaagccaggcgagggcaagctcatcttctgctcag

SEQ ID NO: 250488 - DNA, 120 bp, Artificial Sequence
  ENSG00000123358_14 (sequence is synthesized)
gcctggtgctacaccggctgcagtgtgcccgtggcttcggggactggattgacagtatcctggccttctcaaggtccctgcacagcttgcttgtcgatgtccctgccttcgcctgcctct

SEQ ID NO: 250489 - DNA, 120 bp, Artificial Sequence
  ENSG00000123358_15 (sequence is synthesized)
ctgcccttgtcctcatcaccgaccggcatgggctgcaggagccgcggcgggtggaggagctgcagaaccgcatcgccagctgcctgaaggagcacgtggcagctgtggcgggcgagcccc

SEQ ID NO: 250490 - DNA, 120 bp, Artificial Sequence
  ENSG00000123358_16 (sequence is synthesized)
agccagccagctgcctgtcacgtctgttgggcaaactgcccgagctgcggaccctgtgcacccagggcctgcagcgcatcttctacctcaagctggaggacttggtgccccctccaccca

SEQ ID NO: 250491 - DNA, 120 bp, Artificial Sequence
  ENSG00000123358_17 (sequence is synthesized)
tcattgacaagatcttcatggacacgctgcccttctgacccctgcctgggaacacgtgtgcacatgcgcactctcatatgccaccccatgtgcctttagtccacggacccccagagcacc

SEQ ID NO: 250492 - DNA, 120 bp, Artificial Sequence
  ENSG00000123358_18 (sequence is synthesized)
cccaagcctgggcttgagctgcagaatgactccaccttctcacctgctccaggaggtttgcagggagctcaagcccttggggagggggatgccttcatgggggtgaccccacgatttgtc

SEQ ID NO: 250493 - DNA, 120 bp, Artificial Sequence
  ENSG00000123358_19 (sequence is synthesized)
ttatcccccccagcctggccccggcctttatgttttttgtaagataaaccgtttttaacacatagcgccgtgctgtaaataagcccagtgctgctgtaaatacaggaagaaagagcttga

SEQ ID NO: 250494 - DNA, 120 bp, Artificial Sequence
  ENSG00000123358_20 (sequence is synthesized)
ggtgggagcggggctgggaggaagggatgggccccgccttcctgggcagcctttccagcctcctgctggctctctcttcctaccctccttccacatgtacataaactgtcactctaggaa

SEQ ID NO: 250495 - DNA, 120 bp, Artificial Sequence
  ENSG00000123358_21 (sequence is synthesized)
gaagacaaatgacagattctgacatttatatttgtgtattttcctggatttatagtatgtgacttttctgattaatatatttaatatattgaataaaaaatagacatgtagttggaactg

SEQ ID NO: 250496 - DNA, 120 bp, Artificial Sequence
  ENSG00000123358_22 (sequence is synthesized)
tttctccgccggctgcgggaaccggttccaggagcgcgggagctcgtctgccaggagacccagccgggagggaccgatgctgcgtgatgcaaccccttcgagggactgagtcaagaaacc

SEQ ID NO: 250497 - DNA, 120 bp, Artificial Sequence
  ENSG00000123358_23 (sequence is synthesized)
aaggctgggggtctcgtggagtcaggcggagctggggattaggactcggggcttgtgtctcccaggcgtgtttttttgttgttgttttgtttttttgccgcaacatcttccttatactgg

SEQ ID NO: 250498 - DNA, 120 bp, Artificial Sequence
  ENSG00000123358_24 (sequence is synthesized)
gtggggtgggggcgggggtggtctgtatttccagacctcctccatggtggtctggctgtgtggagggcagggcacagttccttgacttggctcattcccccccaacgccccccctttctt

SEQ ID NO: 250499 - DNA, 120 bp, Artificial Sequence
  ENSG00000123358_25 (sequence is synthesized)
ttacaggcgtgagccaccgcgcctggcaggctcattccctttttatgccttcgtttttgatagatgacctggggatgggagaaatgctgcagaggtggtttatttacagtgaattgttaa

SEQ ID NO: 250500 - DNA, 120 bp, Artificial Sequence
  ENSG00000123358_26 (sequence is synthesized)
tatttacagtgaattgttaatttggttgtggggctagtattaggggcacattgggaaaacacaggctgggcagaggttggtaggttcacaacagttatgcccactgggtgctgatggatt

SEQ ID NO: 250501 - DNA, 120 bp, Artificial Sequence
  ENSG00000123358_27 (sequence is synthesized)
tgggggctgtcgtcggcctggcttggggccctagtggtggggctacaaggcttgctcctagatctactccaagtgaacatttaagatcagtgacttggatggagacttaaaaaggaagtc

SEQ ID NO: 250502 - DNA, 120 bp, Artificial Sequence
  ENSG00000123358_28 (sequence is synthesized)
agctgactccgtgtagtcatccagagctgtgaggaatgacaagtgcacagtataaaatcaagattctaattgaaggcctccaccatggacagaggccaggccctgcccctcccaggcagc

SEQ ID NO: 250503 - DNA, 120 bp, Artificial Sequence
  ENSG00000123358_29 (sequence is synthesized)
gtggaactcccatgccagatatactgccaaggccaccctgaggggctgccaaccggggccccatgagtgctagagctgctggtcttgtgacgtgggcacctgtctgccaggcctgggcac

SEQ ID NO: 250504 - DNA, 120 bp, Artificial Sequence
  ENSG00000123358_30 (sequence is synthesized)
gggcccagggtcacgctcatgctggggctcccgtcagctgactattttgggctcttgctgacctgggccaaagtcaggtccagtcaagagggcccaaagtggctccccccatccccagag

SEQ ID NO: 250505 - DNA, 120 bp, Artificial Sequence
  ENSG00000123358_31 (sequence is synthesized)
gccggctctggtttctgctatataaacagaggaggacacgccggcttggaggcagcaccacatccagagctcgctcagctgctgcccagcctcggctgtgaggataggctggctgggcag

SEQ ID NO: 250506 - DNA, 120 bp, Artificial Sequence
  ENSG00000123358_32 (sequence is synthesized)
cacgtctctccccacagggctccctgagaccaccaggaagagcccccaaccaatcttgggattctcccttcgtgcggttgtctgggacctttttccagggtcaaagcagatcgtgaggag

SEQ ID NO: 250507 - DNA, 120 bp, Artificial Sequence
  ENSG00000123358_33 (sequence is synthesized)
ctggactcagggcccagcactgccaaactggactactccaagctgcagccctgggttaatatgtgagacttggcaagtgagagcctgggcaggatctcagatccactcccactcccggga

SEQ ID NO: 250508 - DNA, 120 bp, Artificial Sequence
  ENSG00000123358_34 (sequence is synthesized)
gaaacttgggggagtgcacagaagaacttcgggagcgcacgcgggaccagggaccaggctgagactcggggcgccagtccgggcaggggcagcgggagccggccggttgtccgaacagac

SEQ ID NO: 250509 - DNA, 120 bp, Artificial Sequence
  ENSG00000123358_35 (sequence is synthesized)
actgaatgagaaaggaggtttaaaaaagaaagaaagaaaagcgactccctccagttcgacagatcaaagagaggatccccctctcggctgaccagatgggaaaatgcaccccctcaggca

SEQ ID NO: 250510 - DNA, 120 bp, Artificial Sequence
  ENSG00000123358_36 (sequence is synthesized)
gaaggcaggtggacaagggcccatgaaaaaatacaggtgtctagactgccagggagaccctggcccccagtagtgtgtcctggggacttcctcagagcgagaaacctcccccaatgtctt

SEQ ID NO: 250511 - DNA, 120 bp, Artificial Sequence
  ENSG00000123358_37 (sequence is synthesized)
caagacttttctctccccccgcccaaccccgtctctccctcccttgccacccaaatgttagaaaaatagctgtgaacagagagcgcttttgtctgcaatggcagcaggatctggacggtc

SEQ ID NO: 250512 - DNA, 120 bp, Artificial Sequence
  ENSG00000123358_38 (sequence is synthesized)
agagttctcttattaagataactgggggcagcagaacattctttttaggtactgttgtccattctcctgagagtccagggggctgtggtctccttcctccccccttgccctgtccccagc

SEQ ID NO: 250513 - DNA, 120 bp, Artificial Sequence
  ENSG00000123358_39 (sequence is synthesized)
aaatggcctttaaaggtctggagccaggttaccgatgaggaggcctaggttcccttcctctttgcttctgggagcatctcgagcagtgcagagtggcttcccagccccagatggcaggat

SEQ ID NO: 250514 - DNA, 120 bp, Artificial Sequence
  ENSG00000123358_40 (sequence is synthesized)
tggggtgggtttgggatctgctgcctttgctcagtgtgcagggttggggtggaaatgggggacaggctagggcctctgcattaggctgccttcttaggcaggtgggctttcacttccagc

SEQ ID NO: 250515 - DNA, 120 bp, Artificial Sequence
  ENSG00000123358_41 (sequence is synthesized)
tcctcttccattttcacgatgtccttcttcctaggcactgcgaggggaggagaaaaggggctttgcagaggcctgggagtattcccaggaagtgcctggttggcgaaacaaccagggagc

SEQ ID NO: 250516 - DNA, 120 bp, Artificial Sequence
  ENSG00000123358_42 (sequence is synthesized)
tgctcctgggagctgggctgaggctttgctgggctgcctctcccactcacccttctcccggcccccaccatgccttccccatgggggaggggcagggggctggaggaacacagcttcccc

SEQ ID NO: 250517 - DNA, 120 bp, Artificial Sequence
  ENSG00000123358_43 (sequence is synthesized)
ctgttctagcagagaaatgctggctgtatgcctcccctagggttcccaggctgactagggtgtggctggccttctgatggagcccactcatgctgggccgctgcccaggggctttgtggc

SEQ ID NO: 250518 - DNA, 120 bp, Artificial Sequence
  ENSG00000123358_44 (sequence is synthesized)
acctaggtcgagatggtactcaggccaggggtcaggattcctgggtgctctggtcccggtgcctctgtctcatctttaggctgggattcctgccaccttgctgctctggggcccaaatac

SEQ ID NO: 250519 - DNA, 120 bp, Artificial Sequence
  ENSG00000123358_45 (sequence is synthesized)
ccaggtggggccttttgttggaaatggagagaggctggcctcatcccattgggacctgtggtctccccctgggttctcctcctagctaagtcctgtcctgcagggtgggatcagccctgc

SEQ ID NO: 250520 - DNA, 120 bp, Artificial Sequence
  ENSG00000123358_46 (sequence is synthesized)
caggtgggccgccttcctggagacccgtagatgccagggctggaagctttcatttgccgggacactcgggcccatgggattgcacagagctggagggaggggtgagataggggcagatag

SEQ ID NO: 250521 - DNA, 120 bp, Artificial Sequence
  ENSG00000123358_47 (sequence is synthesized)
gagctgcaggggtgcctggcgagcctctggttttcctctgctcctctgcctgtcctctcccaactcaaggttctagtgggaaggggtgcccccaggctctcatgttcctggcgtgagatg

SEQ ID NO: 250522 - DNA, 120 bp, Artificial Sequence
  ENSG00000123358_48 (sequence is synthesized)
aaaggatccctgcggagggtttggttcttgagggctgggggtggacttgggaacaggctgtgtgtttgtcccagcgatggtgcctgcttagcttcccgtccccaccccccagccccttgg

SEQ ID NO: 250523 - DNA, 120 bp, Artificial Sequence
  ENSG00000123358_49 (sequence is synthesized)
ccagcagggcccccaggcttctgccctggaggacccagaggagggcacgtcttatttccaccccacctctgaaccccaggccttggagggaggcagcctacacctgcctggattgtgagg

SEQ ID NO: 250524 - DNA, 120 bp, Artificial Sequence
  ENSG00000123358_50 (sequence is synthesized)
gtggtggcagggggaggttcctatagggtaccttggatctcagggactctgggtcctagggactcggtggggcgcgtctcagcagtggtgtgcacggcttgggctgagaggcccttcctc

SEQ ID NO: 250525 - DNA, 80 bp, Artificial Sequence
  ENSG00000123358_51 (sequence is synthesized)
ggcgctgagcggctgcggcgcggctgcaggagcgcgaggaggaggtggcggcggcggcggaactggcgggggtcccctcg

SEQ ID NO: 250526 - DNA, 120 bp, Artificial Sequence
  ENSG00000123358_52 (sequence is synthesized)
gcggtgcagagcagctcagggccggctggtgcgcgaccccggaaagcgggggtggagaggcgagcggagcccgcggggccaggcctccaccatggacagaggccaggccctgcccctccc

SEQ ID NO: 250527 - DNA, 120 bp, Artificial Sequence
  ENSG00000123358_53 (sequence is synthesized)
gataatgtggttggccaaggcctgttggtccatccagagtgggctccctgagaccaccaggaagagcccccaaccaatcttgggattctcccttcgtgcggttgtctgggacctttttcc

SEQ ID NO: 250528 - DNA, 120 bp, Artificial Sequence
  ENSG00000123358_54 (sequence is synthesized)
agggtcaaagcagatcgtgaggaggaagctggtttcccatgacagtgggggagcccaggccccaggcagtgctacatttggatgtggagcctctcctttccattgtgaactgaattctac

SEQ ID NO: 250529 - DNA, 120 bp, Artificial Sequence
  ENSG00000123358_55 (sequence is synthesized)
ctacgaaacttgggggagtgcacagaagaacttcgggagcgcacgcgggaccagggaccaggctgagactcggggcgccagtccgggcaggggcagcgggagccggccggtagtctctgt

SEQ ID NO: 250530 - DNA, 120 bp, Artificial Sequence
  ENSG00000123358_56 (sequence is synthesized)
ttcctggtgtaagctttggtatggatggtggccgtctccctacagactgggagctgttagagggcagggatcctagctgacacatctatgtcctcgccttggttggaggcctccaccatg

SEQ ID NO: 250531 - DNA, 120 bp, Artificial Sequence
  ENSG00000123360_0 (sequence is synthesized)
agcgcgcggcggcggcggcggtagcggcagcagcagcggcggtgcggagagcttggactgggagcccaaagctcggctgggcagcgggagaggaggagccgcaggagctgcagctctgcc

SEQ ID NO: 250532 - DNA, 120 bp, Artificial Sequence
  ENSG00000123360_1 (sequence is synthesized)
agcttgggccgagcctagagacaccggcctggctggtccacgccagccgcagaccgtggctgagcatggagctgtccccccgcagtcctccggagatgctggaggagtcggattgcccgt

SEQ ID NO: 250533 - DNA, 120 bp, Artificial Sequence
  ENSG00000123360_2 (sequence is synthesized)
cacccctggagctgaagtcagcccccagcaagaagatgtggattaagcttcggtctctgctgcgctacatggtgaagcagttggagaatggggagataaacattgaggagctgaagaaaa

SEQ ID NO: 250534 - DNA, 120 bp, Artificial Sequence
  ENSG00000123360_3 (sequence is synthesized)
atctggagtacacagcttctctgctggaagccgtctacatagatgagacacggcaaatcttggacacggaggacgagctgcaggagctgcggtcagatgccgtgccttcggaggtgcggg

SEQ ID NO: 250535 - DNA, 120 bp, Artificial Sequence
  ENSG00000123360_4 (sequence is synthesized)
actggctggcctccaccttcacccagcaggcccgggccaaaggccgccgagcagaggagaagcccaagttccgaagcattgtgcacgctgtgcaggctgggatcttcgtggaacggatgt

SEQ ID NO: 250536 - DNA, 120 bp, Artificial Sequence
  ENSG00000123360_5 (sequence is synthesized)
tccggagaacatacacctctgtgggccccacttactctactgcggttctcaactgtctcaagaacctggatctctggtgctttgatgtcttttccttgaaccaggcagcagatgaccatg

SEQ ID NO: 250537 - DNA, 120 bp, Artificial Sequence
  ENSG00000123360_6 (sequence is synthesized)
ccctgaggaccattgtttttgagttgctgactcggcataacctcatcagccgcttcaagattcccactgtgtttttgatgagtttcctggatgccttggagacaggctatgggaagtaca

SEQ ID NO: 250538 - DNA, 120 bp, Artificial Sequence
  ENSG00000123360_7 (sequence is synthesized)
agaatccttaccacaaccagatccacgcagccgatgttacccagacagtccattgcttcttgctccgcacagggatggtgcactgcctgtcggagattgagctcctggccatcatctttg

SEQ ID NO: 250539 - DNA, 120 bp, Artificial Sequence
  ENSG00000123360_8 (sequence is synthesized)
ctgcagctatccatgattatgagcacacgggcactaccaacagcttccacatccagaccaagtcagaatgtgccatcgtgtacaatgatcgttcagtgctggagaatcaccacatcagct

SEQ ID NO: 250540 - DNA, 120 bp, Artificial Sequence
  ENSG00000123360_9 (sequence is synthesized)
ctgttttccgattgatgcaggatgatgagatgaacattttcatcaacctcaccaaggatgagtttgtagaactccgagccctggtcattgagatggtgttggccacagacatgtcctgcc

SEQ ID NO: 250541 - DNA, 120 bp, Artificial Sequence
  ENSG00000123360_10 (sequence is synthesized)
atttccagcaagtgaagaccatgaagacagccttgcaacagctggagaggattgacaagcccaaggccctgtctctactgctccatgctgctgacatcagccacccaaccaagcagtggt

SEQ ID NO: 250542 - DNA, 120 bp, Artificial Sequence
  ENSG00000123360_11 (sequence is synthesized)
tggtccacagccgttggaccaaggccctcatggaggaattcttccgtcagggtgacaaggaggcagagttgggcctgcccttttctccactctgtgaccgcacttccactctagtggcac

SEQ ID NO: 250543 - DNA, 120 bp, Artificial Sequence
  ENSG00000123360_12 (sequence is synthesized)
agtctcagatagggttcatcgacttcattgtggagcccacattctctgtgctgactgacgtggcagagaagagtgttcagcccctggcggatgaggactccaagtctaaaaaccagccca

SEQ ID NO: 250544 - DNA, 120 bp, Artificial Sequence
  ENSG00000123360_13 (sequence is synthesized)
cacctgggtcaagcgcattcaggagaataagcagaaatggaaggaacgggcagcaagtggcatcaccaaccagatgtccattgacgagctgtccccctgtgaagaagaggcccccccatc

SEQ ID NO: 250545 - DNA, 120 bp, Artificial Sequence
  ENSG00000123360_14 (sequence is synthesized)
ccctgccgaagatgaacacaaccagaatgggaatctggattagccctggggctggcccaggtcttcattgagtccaaagtgtttgatgtcatcagcaccatccatcaggactggctcccc

SEQ ID NO: 250546 - DNA, 120 bp, Artificial Sequence
  ENSG00000123360_15 (sequence is synthesized)
catctgctccaagggagcgtggtcgtggaagaaacaacccacctgaaggccaaatgccagagatttggggttggggaaagggcccctccccacctgacacccactggggtgcactttaat

SEQ ID NO: 250547 - DNA, 120 bp, Artificial Sequence
  ENSG00000123360_16 (sequence is synthesized)
gttccggcagcaagactggggaacttcaggctcccagtggtcactgtgcccatccctcagcctctggattctcttcatggccaggtggctgccagggagcggggagcttcctggaggctt

SEQ ID NO: 250548 - DNA, 120 bp, Artificial Sequence
  ENSG00000123360_17 (sequence is synthesized)
cccagggccttggggaagggtcagagatgccagccccctgggacctcccccatcctttttgcctccaagtttctaagcaatacattttgggggttccctcagccccccaccccagatctt

SEQ ID NO: 250549 - DNA, 120 bp, Artificial Sequence
  ENSG00000123360_18 (sequence is synthesized)
agctggcaggtctgggtgccccttttcctcccctgggaagggctggaataggatagaaagctgggggttttcagagccctatgtgtggggaggggagtggattccttcagggcatggtac

SEQ ID NO: 250550 - DNA, 120 bp, Artificial Sequence
  ENSG00000123360_19 (sequence is synthesized)
ctttctaggacctgggaatggggtggagaggacatcctcttcaccccagaattgcgctgcttcagccccatctccagcctgatcctctgaatcttccttccctccctttctgatacagtg

SEQ ID NO: 250551 - DNA, 120 bp, Artificial Sequence
  ENSG00000123360_20 (sequence is synthesized)
actggggcaaaaggagccattgtgaccaggggctgcgggaggcctttcctgggaccttccttgggactggtctgggcccctggggcttgtcgcctgccctgagtccggagccctttgcct

SEQ ID NO: 250552 - DNA, 120 bp, Artificial Sequence
  ENSG00000123360_21 (sequence is synthesized)
ccttcctctcccctggggctgggaggctccatccgaccaatgtctgtaaagtgctttgaggatctccccagcaaagcaccttcagaatgtatcgacaccagctgggttagggtcaagggt

SEQ ID NO: 250553 - DNA, 120 bp, Artificial Sequence
  ENSG00000123360_22 (sequence is synthesized)
gcctggggagggtgagtaatcctgcattgctaaaagagagggtctgtcccctcctctccacgtcccagaactggcccagctgcaggcactaagaagctcctcccctgagacaagtgaggg

SEQ ID NO: 250554 - DNA, 120 bp, Artificial Sequence
  ENSG00000123360_23 (sequence is synthesized)
gtagtcggtgaaaggcagatggacaaggggctcagggctgctgccttcctgtcctctggagagaacccagccaggcgcggtgccccttcctctcctcaggctcctccttgcccccacctt

SEQ ID NO: 250555 - DNA, 120 bp, Artificial Sequence
  ENSG00000123360_24 (sequence is synthesized)
gccccaggaaaggccaaagtccaggtgactgccctccttctttcttgtaaataccaaccatgcatttgtacagtgggccctgttcatgcgaaatccacatccatggtctcctagacctgc

SEQ ID NO: 250556 - DNA, 120 bp, Artificial Sequence
  ENSG00000123360_25 (sequence is synthesized)
taccctggtacttccaccctaccccaccccgagaagggcagagacgcatgtgactcacccctgcccttggtttcccagacccctgctatagccagagaacaataaagaagggagaccagg

SEQ ID NO: 250557 - DNA, 120 bp, Artificial Sequence
  ENSG00000123360_26 (sequence is synthesized)
agttgctcagttctactgggacctggaggaggaaggcaggggccaaagaggaagttgtcccctcttgggggccctggggctcctggggtcaggattttgatactctgaagcaggaaactt

SEQ ID NO: 250558 - DNA, 120 bp, Artificial Sequence
  ENSG00000123360_27 (sequence is synthesized)
gattctctttggcacagatgttggcaggtgcgaggaagcacggccctgacacgcgtggccaggccacatgtgcaaggcatgtgcggagcaagctggccagttggagcgggcttaggagtt

SEQ ID NO: 250559 - DNA, 120 bp, Artificial Sequence
  ENSG00000123360_28 (sequence is synthesized)
ttgctgactcggcataacctcatcagccgcttcaaggttgggcagcatcctacctctacctccaggcaggattctccactcctctcatgcctgttctaaaagcctcccaacaaacagatt

SEQ ID NO: 250560 - DNA, 120 bp, Artificial Sequence
  ENSG00000123360_29 (sequence is synthesized)
ccatagatcccctcactcagtctcaacatcagggaagtctccccatgcccacgcccagcctagcctttctttcacttgctgcagtcttagttccagacttcattaattgatttctagggg

SEQ ID NO: 250561 - DNA, 120 bp, Artificial Sequence
  ENSG00000123360_30 (sequence is synthesized)
gagattctcggtctgcaaccatctagcctgggattctgctctctcccgctttgcttttttcccccaacttgtcctctctaggctgacttgcagtgtggacactggaggcctggagttcag

SEQ ID NO: 250562 - DNA, 120 bp, Artificial Sequence
  ENSG00000123360_31 (sequence is synthesized)
atgctgtcagccagtgccctttgggactagaaaccatgtttcctggataaaattggccactccctcccccgtcccccagttctggtctctgtgcaaggaattatatagagaaggtcagct

SEQ ID NO: 250563 - DNA, 120 bp, Artificial Sequence
  ENSG00000123360_32 (sequence is synthesized)
cttgacagggctcggggcgggggcttgtatgacagggggacggtgtgtgaacttcatttgctcttcagcttgtctggatgggaagaattatatgagattaagtccttcctagatcctgta

SEQ ID NO: 250564 - DNA, 120 bp, Artificial Sequence
  ENSG00000123360_33 (sequence is synthesized)
ccaggagggagcatcttttgggagggaaaaagtgccaggaaaaaaacaaaacactttcacatggacaaatcacatttggaagtagagggtgagggaggttgaagagccgtaatggggata

SEQ ID NO: 250565 - DNA, 120 bp, Artificial Sequence
  ENSG00000123360_34 (sequence is synthesized)
ttgggtcagcactttggggagcagtagatgttaaaggtgaagggaaacgtggatgatctgaagggccatagagaggggcggtcaaaggagtccaggtggagggtcccctcccaggccggc

SEQ ID NO: 250566 - DNA, 120 bp, Artificial Sequence
  ENSG00000123360_35 (sequence is synthesized)
ttcgggaggtcattccatccatcctctgcctccacttcactagaacaaattatctgtgcatgtaagcccttccttcacccttgactcctccttttacaacaactccctagggagtttcca

SEQ ID NO: 250567 - DNA, 120 bp, Artificial Sequence
  ENSG00000123360_36 (sequence is synthesized)
aaactttcctgagatgctcagctgaaattttcttaagtgccttccggaagcctgttctgcaattttactttcttctttccaatcctgccctctccaggacagagaatagtagggctctct

SEQ ID NO: 250568 - DNA, 120 bp, Artificial Sequence
  ENSG00000123360_37 (sequence is synthesized)
ttttcctaagacttttcccagctcatgtttccccaaactggctctcagacttcagtcactagattctcctaaactctgcctccttacctggaaggactgggtctgggggacctcaagagt

SEQ ID NO: 250569 - DNA, 120 bp, Artificial Sequence
  ENSG00000123360_38 (sequence is synthesized)
agctgttttgggttaggtttggcccagtcccagtctgctttgctccaaggcagttagaggaaggagggggtgcttcttgttttagttttctctgatgatagggccagcagcagctgccct

SEQ ID NO: 250570 - DNA, 120 bp, Artificial Sequence
  ENSG00000123360_39 (sequence is synthesized)
tctcaaactccacattcttttcctgggcacctagcccctcccctactcctccctttttcttcccttccctccagggacgccatggcaacgcaaaagcaagggcagttgtcatggaaacag

SEQ ID NO: 250571 - DNA, 120 bp, Artificial Sequence
  ENSG00000123360_40 (sequence is synthesized)
tcctttaaaatttcctgaatttggggcacagccctccaggggtgcgggtgggggatgttagggtctgactgactagtggtgcttcttctgtgtctctgtcactatattgctcatctctac

SEQ ID NO: 250572 - DNA, 120 bp, Artificial Sequence
  ENSG00000123360_41 (sequence is synthesized)
gacagatcaccagtcctgtcctctgggagccttgagccttttgaaggaggcagacataccctaagggcgtacacagagacagggcccggattcagagtagctggacagagctctggctgc

SEQ ID NO: 250573 - DNA, 120 bp, Artificial Sequence
  ENSG00000123360_42 (sequence is synthesized)
tggtgcttttgtgtgtgttctgtgggactgagggcgcgggtactggtgcatgtagagggtaagtggtcagggagggcaacccacatctggctggaagagtcctctctaggtcatcttctt

SEQ ID NO: 250574 - DNA, 120 bp, Artificial Sequence
  ENSG00000123360_43 (sequence is synthesized)
cattcccttacttccgagcccttcttcatggttttggatgtggggatggagtgggatgtttggaaggtaggagggaagctttctttcattttctttgaaatctccagggaaataataata

SEQ ID NO: 250575 - DNA, 120 bp, Artificial Sequence
  ENSG00000123360_44 (sequence is synthesized)
attatagctattctttagagagcatttactaaatgccttgtacttatctcattaatttccaggtaggtggtattatctttcattctgcaattaagtatctgaggcacagagaggcatgtg

SEQ ID NO: 250576 - DNA, 120 bp, Artificial Sequence
  ENSG00000123360_45 (sequence is synthesized)
acttacccaaggttgcacagccagcaggtggtagaggcaggatatgagccaggttcacctaactaggttctgtgctctctccctatgccacactgccttctaaagaaagttgttgatctc

SEQ ID NO: 250577 - DNA, 120 bp, Artificial Sequence
  ENSG00000123360_46 (sequence is synthesized)
ggtccgtaatcaccaccattcctgtggatccttgatatatctccatttcccctaactccccgcagattcccactgtgtttttgatgagtttcctggatgccttggagacaggctatggga

SEQ ID NO: 250578 - DNA, 120 bp, Artificial Sequence
  ENSG00000123360_47 (sequence is synthesized)
ctgggggggtatacacaagggtagttggtgtgccaggtctttacctcgctgtagagactccactggcttcaggtatcagactgcatctctatgtgagagagagagagagtgtgtgtgtgt

SEQ ID NO: 250579 - DNA, 120 bp, Artificial Sequence
  ENSG00000123360_48 (sequence is synthesized)
gtgtgtgtgtgtgtgtgtccttacgtttactcacagccttggcagctgatccactggagagtgctttgggctgggaatctaagatgggggttctcatcgtagctctgggacaggcttact

SEQ ID NO: 250580 - DNA, 120 bp, Artificial Sequence
  ENSG00000123360_49 (sequence is synthesized)
ctggaatgttggaaaattcattcaacccttctgccccagttttattacctctgaaatggtgaaaatgatacgcctccccccacaacagcttgcccctagttcctagtctcatagggctat

SEQ ID NO: 250581 - DNA, 120 bp, Artificial Sequence
  ENSG00000123360_50 (sequence is synthesized)
tgggagagtcatacgaggtttaaaaaaatgcatagaacaaatgccataattacatctaatgttgcttagaagtgagtgggaatgtataaatgtgtgtgagagtggactgtgtgtgtgtgt

SEQ ID NO: 250582 - DNA, 120 bp, Artificial Sequence
  ENSG00000123360_51 (sequence is synthesized)
gtcctgaaggtgtgtgttaatctctgtgtaaggtgtttatgtgtgggatgcagtgtcacagcgggtcattgttgagggtataataataattattactattctagataatatctactgagc

SEQ ID NO: 250583 - DNA, 120 bp, Artificial Sequence
  ENSG00000123360_52 (sequence is synthesized)
acttattatgtgctagacactctcctgaatacttatttgttgtttgtcacttaattctcagaaccactcgatatgtggtagggttgttatttccattttagagttgaagaaaatgaaata

SEQ ID NO: 250584 - DNA, 120 bp, Artificial Sequence
  ENSG00000123360_53 (sequence is synthesized)
tggaaattttaagtaacttgctcagtgtcacgcggctaacatgtggtaggtatagacgtgaacccaggccctttgattctaagagcctgggctctcagctactaacccgtgctgctacct

SEQ ID NO: 250585 - DNA, 120 bp, Artificial Sequence
  ENSG00000123360_54 (sequence is synthesized)
acccgtgctgctacctaaacatatataagtgtgtgtgtgtctgtgtgtggggtgtgtgtgtagctttggagggtgtttgaagttatgtgaggccgggcgtggtggctcatgcctataatt

SEQ ID NO: 250586 - DNA, 120 bp, Artificial Sequence
  ENSG00000123360_55 (sequence is synthesized)
gaagatgtggattaagcttcggtctctgccccatggagtgatcttctatggttcttaccagttttgaaaatcatgctgccattctcctttttctgtctatggatgtggagctgctgtgaa

SEQ ID NO: 250587 - DNA, 120 bp, Artificial Sequence
  ENSG00000123360_56 (sequence is synthesized)
gattgcagcataaactatggttccctggacctctggagaaaaaggagtgtcatttttctcatgccttggctgcgctacatggtgaagcagttggagaatggggagataaacattgaggag

SEQ ID NO: 250588 - DNA, 120 bp, Artificial Sequence
  ENSG00000123360_57 (sequence is synthesized)
agaagttatgtgatagggtgtgcgtgggaagttagggaatggtcctaacttccttttcctaaaagatcagtctcccttcccttgccatctgccccaaccaggattgacaagcccaaggcc

SEQ ID NO: 250589 - DNA, 120 bp, Artificial Sequence
  ENSG00000123364_0 (sequence is synthesized)
aaacaggagcgaggtgtctccctagctcgctgcctctggcaagtggagtttttaaaaagctccagcagatcatgtcatgacgacttcgctgctcctgcatccacgctggccggagagcct

SEQ ID NO: 250590 - DNA, 120 bp, Artificial Sequence
  ENSG00000123364_1 (sequence is synthesized)
tatgtacgtctatgaggacagcgcggcggagagcggcatcggcggcggcggcggaggaggaggcggcggcacgggcggagcggggggtggctgcagcggagcgagccccggcaaagcccc

SEQ ID NO: 250591 - DNA, 120 bp, Artificial Sequence
  ENSG00000123364_2 (sequence is synthesized)
gagcatggatggtctgggcagcagctgcccggccagccactgccgcgacctgcttccgcaccccgtgctgggccgcccgccggctcccctgggcgcccctcagggcgccgtctatacgga

SEQ ID NO: 250592 - DNA, 120 bp, Artificial Sequence
  ENSG00000123364_3 (sequence is synthesized)
catcccggccccggaggcggcgcgccagtgtgccccgccgcccgcaccccccacctcgtccagcgccaccctgggctacggctaccccttcgggggcagctactacggctgccgcctgtc

SEQ ID NO: 250593 - DNA, 120 bp, Artificial Sequence
  ENSG00000123364_4 (sequence is synthesized)
gcacaacgtgaacctgcagcagaagccttgcgcctaccacccgggcgataaatacccggagccgtcgggcgccctgcccggtgacgacctgtcctctagggccaaggagttcgccttcta

SEQ ID NO: 250594 - DNA, 120 bp, Artificial Sequence
  ENSG00000123364_5 (sequence is synthesized)
ccccagcttcgccagctcctaccaggcgatgcccggctacctggacgtgtcggtggtgcccgggatcagcgggcacccggagccgcgtcacgacgccctcatccccgtcgaaggctacca

SEQ ID NO: 250595 - DNA, 120 bp, Artificial Sequence
  ENSG00000123364_6 (sequence is synthesized)
gcactgggctctctccaatggctgggacagtcaggtgtactgctccaaggagcagtcgcagtccgcccacctctggaagtctcccttcccagacgtggttcccctgcagcccgaggtgag

SEQ ID NO: 250596 - DNA, 120 bp, Artificial Sequence
  ENSG00000123364_7 (sequence is synthesized)
cagctaccggcgcgggcgcaagaaacgcgtgccctacactaaggtgcagctgaaggagctagagaaggaatacgcggctagcaagttcatcaccaaagagaagcgccggcgcatctccgc

SEQ ID NO: 250597 - DNA, 120 bp, Artificial Sequence
  ENSG00000123364_8 (sequence is synthesized)
caccacgaacctctctgagcgccaggtaaccatctggttccagaaccggcgggtcaaagagaagaaggtggtcagcaaatcgaaagcgcctcatctccactccacctgaccacccacccg

SEQ ID NO: 250598 - DNA, 120 bp, Artificial Sequence
  ENSG00000123364_9 (sequence is synthesized)
agtatttaatgttaaggaaagagaagaaccgcgccgcccggaggcagagaggctccatggccgtgctgctgggccatccccaactccctatcccatccccagcctccacccccatccaga

SEQ ID NO: 250599 - DNA, 120 bp, Artificial Sequence
  ENSG00000123364_10 (sequence is synthesized)
tgggactcacgtggcttcaacagctttggaaatgggtcccgagtgggccgtgcgaggaaggctgtcgacctctactcctccttgcgctcaccttgccagaaagtctggtggcagcgcaga

SEQ ID NO: 250600 - DNA, 120 bp, Artificial Sequence
  ENSG00000123364_11 (sequence is synthesized)
gcccaatcattccaaccaaagcagggttggggaatcccgaatggccccaattcttgcctcatcctatgaccaggcttttagaggaccttccctaagggcgcagcttcggagcaggatctg

SEQ ID NO: 250601 - DNA, 120 bp, Artificial Sequence
  ENSG00000123364_12 (sequence is synthesized)
tccagctcatactttccttcgctgtccctcccgcactccttaggcaagatttcccagtaaagattttctgtgcgtattttaaaagtcgtgttaatactcatgataattattagggacctg

SEQ ID NO: 250602 - DNA, 120 bp, Artificial Sequence
  ENSG00000123364_13 (sequence is synthesized)
gcagcgtgattggagtatggatgtttccgtaaaagctggaattccgtaaaagcattgacgcagcccctacactccatcccaaccaagaaactgcatttcctggggccaggtgggagctgc

SEQ ID NO: 250603 - DNA, 120 bp, Artificial Sequence
  ENSG00000123364_14 (sequence is synthesized)
ctttgccccactgcctcccctgttctgctctctcagtcaacatgtggaaatccaaggaggacaaagactccagccacgctgctaaatagggctcctctctcctctctctctctctaggtg

SEQ ID NO: 250604 - DNA, 120 bp, Artificial Sequence
  ENSG00000123364_15 (sequence is synthesized)
gtaaggttggggattagtccaggtacagaagcagaacttttttctaaggataaacatctcttccaaggggatggagagtgggtccctcaacaaagtccctgtccagtcacctttccatca

SEQ ID NO: 250605 - DNA, 120 bp, Artificial Sequence
  ENSG00000123364_16 (sequence is synthesized)
gggcactagcccaggaatgactcctcacactttcacctttactgatttccagaggaaagctagaggatctagttcaagaggcaagaagatctggccctcaattagctagatgtagatgct

SEQ ID NO: 250606 - DNA, 120 bp, Artificial Sequence
  ENSG00000123364_17 (sequence is synthesized)
gcctaacagttccctcctcaaaggccaccttggtgctgtgggggccccttgcctcttcccttcccactggtgcattacaaaacagtgttcttttgaaatgttcatcaggaataggctttt

SEQ ID NO: 250607 - DNA, 120 bp, Artificial Sequence
  ENSG00000123364_18 (sequence is synthesized)
ttaaaaaatgttgtgtatctgtatatagtattgtgatgtctgaatgacaatgtactgaatgcaaaaaggaaaaaaacccacaaacatgtttttaaaataaaatatctttttttgccttga

SEQ ID NO: 250608 - DNA, 120 bp, Artificial Sequence
  ENSG00000123374_0 (sequence is synthesized)
attgtttcaagttggccaaattgacaagagcgagaggtatactgcgttccatcccgacccggggccacggtactgggccctgtttccccctcctcggcccccgagagccagggtccgcct

SEQ ID NO: 250609 - DNA, 120 bp, Artificial Sequence
  ENSG00000123374_1 (sequence is synthesized)
tctgcagggttcccaggcccccgctccagggccgggctgacccgactcgctggcgcttcatggagaacttccaaaaggtggaaaagatcggagagggcacgtacggagttgtgtacaaag

SEQ ID NO: 250610 - DNA, 120 bp, Artificial Sequence
  ENSG00000123374_2 (sequence is synthesized)
ccagaaacaagttgacgggagaggtggtggcgcttaagaaaatccgcctggacactgagactgagggtgtgcccagtactgccatccgagagatctctctgcttaaggagcttaaccatc

SEQ ID NO: 250611 - DNA, 120 bp, Artificial Sequence
  ENSG00000123374_3 (sequence is synthesized)
ctaatattgtcaagctgctggatgtcattcacacagaaaataaactctacctggtttttgaatttctgcaccaagatctcaagaaattcatggatgcctctgctctcactggcattcctc

SEQ ID NO: 250612 - DNA, 120 bp, Artificial Sequence
  ENSG00000123374_4 (sequence is synthesized)
ttcccctcatcaagagctatctgttccagctgctccagggcctagctttctgccattctcatcgggtcctccaccgagaccttaaacctcagaatctgcttattaacacagagggggcca

SEQ ID NO: 250613 - DNA, 120 bp, Artificial Sequence
  ENSG00000123374_5 (sequence is synthesized)
tcaagctagcagactttggactagccagagcttttggagtccctgttcgtacttacacccatgaggtggtgaccctgtggtaccgagctcctgaaatcctcctgggctgcaaatattatt

SEQ ID NO: 250614 - DNA, 120 bp, Artificial Sequence
  ENSG00000123374_6 (sequence is synthesized)
ccacagctgtggacatctggagcctgggctgcatctttgctgagatggtgactcgccgggccctattccctggagattctgagattgaccagctcttccggatctttcggactctgggga

SEQ ID NO: 250615 - DNA, 120 bp, Artificial Sequence
  ENSG00000123374_7 (sequence is synthesized)
ccccagatgaggtggtgtggccaggagttacttctatgcctgattacaagccaagtttccccaagtgggcccggcaagattttagtaaagttgtacctcccctggatgaagatggacgga

SEQ ID NO: 250616 - DNA, 120 bp, Artificial Sequence
  ENSG00000123374_8 (sequence is synthesized)
gcttgttatcgcaaatgctgcactacgaccctaacaagcggatttcggccaaggcagccctggctcaccctttcttccaggatgtgaccaagccagtaccccatcttcgactctgatagc

SEQ ID NO: 250617 - DNA, 120 bp, Artificial Sequence
  ENSG00000123374_9 (sequence is synthesized)
caggtgggccctctgaacttgccttaaacactcaccttctagtcttggccagccaactctgggaatacaggggtgaaaggggggaaccagtgaaaatgaaaggaagtttcagtattagat

SEQ ID NO: 250618 - DNA, 120 bp, Artificial Sequence
  ENSG00000123374_10 (sequence is synthesized)
gcacttaagttagcctccaccaccctttcccccttctcttagttattgctgaagagggttggtataaaaataattttaaaaaagccttcctacacgttagatttgccgtaccaatctctg

SEQ ID NO: 250619 - DNA, 120 bp, Artificial Sequence
  ENSG00000123374_11 (sequence is synthesized)
aatgccccataattattatttccagtgtttgggatgaccaggatcccaagcctcctgctgccacaatgtttataaaggccaaatgatagcgggggctaagttggtgcttttgagaaccaa

SEQ ID NO: 250620 - DNA, 120 bp, Artificial Sequence
  ENSG00000123374_12 (sequence is synthesized)
gtaaaacaaaaccactgggaggagtctattttaaagaattcggttgaaaaaatagatccaatcagtttataccctagttagtgttttgcctcacctaataggctgggagactgaagactc

SEQ ID NO: 250621 - DNA, 120 bp, Artificial Sequence
  ENSG00000123374_13 (sequence is synthesized)
agcccgggtggggctgcagaaaaatgattggccccagtccccttgtttgtcccttctacaggcatgaggaatctgggaggccctgagacagggattgtgcttcattccaatctattgctt

SEQ ID NO: 250622 - DNA, 120 bp, Artificial Sequence
  ENSG00000123374_14 (sequence is synthesized)
caccatggccttatgaggcaggtgagagatgtttgaatttttctcttccttttagtattcttagttgttcagttgccaaggatccctgatcccattttcctctgacgtccacctcctacc

SEQ ID NO: 250623 - DNA, 120 bp, Artificial Sequence
  ENSG00000123374_15 (sequence is synthesized)
ccataggagttagaagttagggtttaggcatcattttgagaatgctgacactttttcagggctgtgattgagtgagggcatgggtaaaaatatttctttaaaagaaggatgaacaattat

SEQ ID NO: 250624 - DNA, 120 bp, Artificial Sequence
  ENSG00000123374_16 (sequence is synthesized)
atttatatttcaggttatatccaatagtagagttggctttttttttttttttttggtcatagtgggtggatttgttgccatgtgcaccttggggttttgtaatgacagtgctaaaaaaaa

SEQ ID NO: 250625 - DNA, 120 bp, Artificial Sequence
  ENSG00000123374_17 (sequence is synthesized)
aaagcattttttttttatgatttgtctctgtcacccttgtccttgagtgctcttgctattaacgttatttgtaatttagtttgtagctcattaaaaaaatgtgcctagttttatagttca

SEQ ID NO: 250626 - DNA, 120 bp, Artificial Sequence
  ENSG00000123374_18 (sequence is synthesized)
atcgcctttctgaatgaagagccctcttcactgccccaccctcaccttagaattctctcctctttccaaagaatggcagttgaacctcactggcccctctggggaggctgggggctactc

SEQ ID NO: 250627 - DNA, 120 bp, Artificial Sequence
  ENSG00000123374_19 (sequence is synthesized)
ctgcattttttcccctccattacagtctccctgcttcaccttcaccaggcggctttacttacctacccctgggaaaagaggagataatggccttaatatatccaaaaaccacaccctgac

SEQ ID NO: 250628 - DNA, 120 bp, Artificial Sequence
  ENSG00000123374_20 (sequence is synthesized)
tacccaagaattagctcttaccatcaccctttctcttctctcactttcctagggggtgctgggtggtgtctccttgggggaaagaaatgactaggtgggggggaaaggaatatttgtaac

SEQ ID NO: 250629 - DNA, 120 bp, Artificial Sequence
  ENSG00000123374_21 (sequence is synthesized)
aggggcggggcctctggtggcggtcgggaactcggtgggaggcggcaacattgtttcaagttggccaaattgacaagagcgagaggtggaaaagatcggagagggcacgtacggagttgt

SEQ ID NO: 250630 - DNA, 120 bp, Artificial Sequence
  ENSG00000123374_22 (sequence is synthesized)
gagtatacttatactccctggggagagtatagggtggtgtggaatccatggaaaactttcttcccaaactgagccggatcgtgcccccaaatgtgcgactacagactcggggagagaaag

SEQ ID NO: 250631 - DNA, 120 bp, Artificial Sequence
  ENSG00000123374_23 (sequence is synthesized)
aaacaagttgacgggagaggtggtggcgcttaagaaaatccgcctggacacgtgagtggcctctgtacccgggactcctaactggggacctccttgattgtcccccccaaccccccacgg

SEQ ID NO: 250632 - DNA, 120 bp, Artificial Sequence
  ENSG00000123374_24 (sequence is synthesized)
ctgcttcttggcccagacctatggcccttctatcacagggttctctctctaaagtagcaccaaggggaatggtgggaaaggatgcaactgttgccctgatatcaaccacagtgttaggat

SEQ ID NO: 250633 - DNA, 120 bp, Artificial Sequence
  ENSG00000123374_25 (sequence is synthesized)
atcctcaaacagccttagtacctggtatacatctcttatccctgaaataagttaaagcatttctgcagctgttttagctgtagtctgcatatatttgggagaatgattccatttagtgcc

SEQ ID NO: 250634 - DNA, 120 bp, Artificial Sequence
  ENSG00000123374_26 (sequence is synthesized)
gaatccatggaaaactttcttcccaaactgagccggatcgtgcccccaaatgtgcgactacagactcggggagagaaaggagtgagactgagggtgtgcccagtactgccatccgagaga

SEQ ID NO: 250635 - DNA, 120 bp, Artificial Sequence
  ENSG00000123374_27 (sequence is synthesized)
tttccctcattcatttctcccagggaagggcttttccaggatgaaggaaggatgagaccctgaaatctgggcctcagtgtttcatttccctggttcctgctctccctgttggcacactga

SEQ ID NO: 250636 - DNA, 120 bp, Artificial Sequence
  ENSG00000123374_28 (sequence is synthesized)
ttcagctatgggaggatggaagtgagaattctgccttgggtagaaggagttctggtttcctgatttctgggaacacctgctgcccatttagtccactatcacatcattgaagtcaacatg

SEQ ID NO: 250637 - DNA, 120 bp, Artificial Sequence
  ENSG00000123374_29 (sequence is synthesized)
catctctccctctagcaaatgctgcactacgaccctaacaagcggatttcggccaaggcagccctggctcaccctttcttccaggatgtgaccaagccagtaccccatcttcgactctga

SEQ ID NO: 250638 - DNA, 120 bp, Artificial Sequence
  ENSG00000123374_30 (sequence is synthesized)
ctcatcatgggcatgtcttgggggactggtggcaggcaattcagggtgatattttatgattttggcctccttctgagccctcatctcctatacacacacactccccttctttttgtgtct

SEQ ID NO: 250639 - DNA, 120 bp, Artificial Sequence
  ENSG00000123384_0 (sequence is synthesized)
acttcagtccggggaacagcggtgcgagctccaggcccatgcactgaggaggcggaaacaaggggagcccccagagctccatcaagccccctccaaaggctcccctacccggtccacgcc

SEQ ID NO: 250640 - DNA, 120 bp, Artificial Sequence
  ENSG00000123384_1 (sequence is synthesized)
ccccaccccccctccccgcctcctcccaattgtgcatttttgcagccggaggcggctccgagatggggctgtgagcttcgcccggggagggggaaagagcagcgaggagtgaagcggggg

SEQ ID NO: 250641 - DNA, 120 bp, Artificial Sequence
  ENSG00000123384_2 (sequence is synthesized)
ggtggggtgaagggtttggatttcggggcagggggcgcacccccgtcagcaggccctccccaaggggctcggaactctacctcttcacccacgcccctggtgcgctttgccgaaggaaag

SEQ ID NO: 250642 - DNA, 120 bp, Artificial Sequence
  ENSG00000123384_3 (sequence is synthesized)
aataagaacagagaaggaggagggggaaaggaggaaaagggggaccccccaactggggggggtgaaggagagaagtagcaggaccagaggggaaggggctgctgcttgcatcagcccaca

SEQ ID NO: 250643 - DNA, 120 bp, Artificial Sequence
  ENSG00000123384_4 (sequence is synthesized)
ccatgctgaccccgccgttgctcctgctgctgcccctgctctcagctctggtcgcggcggctatcgacgcccctaagacttgcagccccaagcagtttgcctgcagagatcaaataacct

SEQ ID NO: 250644 - DNA, 120 bp, Artificial Sequence
  ENSG00000123384_5 (sequence is synthesized)
gtatctcaaagggctggcggtgcgacggtgagagggactgcccagacggatctgacgaggcccctgagatttgtccacagagtaaggcccagcgatgccagccaaacgagcataactgcc

SEQ ID NO: 250645 - DNA, 120 bp, Artificial Sequence
  ENSG00000123384_6 (sequence is synthesized)
tgggtactgagctgtgtgttcccatgtcccgcctctgcaatggggtccaggactgcatggacggctcagatgaggggccccactgccgagagctccaaggcaactgctctcgcctgggct

SEQ ID NO: 250646 - DNA, 120 bp, Artificial Sequence
  ENSG00000123384_7 (sequence is synthesized)
gccagcaccattgtgtccccacactcgatgggcccacctgctactgcaacagcagctttcagcttcaggcagatggcaagacctgcaaagattttgatgagtgctcagtgtacggcacct

SEQ ID NO: 250647 - DNA, 120 bp, Artificial Sequence
  ENSG00000123384_8 (sequence is synthesized)
gcagccagctatgcaccaacacagacggctccttcatatgtggctgtgttgaaggatacctcctgcagccggataaccgctcctgcaaggccaagaacgagccagtagaccggccccctg

SEQ ID NO: 250648 - DNA, 120 bp, Artificial Sequence
  ENSG00000123384_9 (sequence is synthesized)
tgctgttgatagccaactcccagaacatcttggccacgtacctgagtggggcccaggtgtctaccatcacacctacgagcacgcggcagaccacagccatggacttcagctatgccaacg

SEQ ID NO: 250649 - DNA, 120 bp, Artificial Sequence
  ENSG00000123384_10 (sequence is synthesized)
agaccgtatgctgggtgcatgttggggacagtgctgctcagacgcagctcaagtgtgcccgcatgcctggcctaaagggcttcgtggatgagcacaccatcaacatctccctcagtctgc

SEQ ID NO: 250650 - DNA, 120 bp, Artificial Sequence
  ENSG00000123384_11 (sequence is synthesized)
accacgtggaacagatggccatcgactggctgacaggcaacttctactttgtggatgacatcgatgataggatctttgtctgcaacagaaatggggacacatgtgtcacattgctagacc

SEQ ID NO: 250651 - DNA, 120 bp, Artificial Sequence
  ENSG00000123384_12 (sequence is synthesized)
tggaactctacaaccccaagggcattgccctggaccctgccatggggaaggtgtttttcactgactatgggcagatcccaaaggtggaacgctgtgacatggatgggcagaaccgcacca

SEQ ID NO: 250652 - DNA, 120 bp, Artificial Sequence
  ENSG00000123384_13 (sequence is synthesized)
agctcgtcgacagcaagattgtgtttcctcatggcatcacgctggacctggtcagccgccttgtctactgggcagatgcctatctggactatattgaagtggtggactatgagggcaagg

SEQ ID NO: 250653 - DNA, 120 bp, Artificial Sequence
  ENSG00000123384_14 (sequence is synthesized)
gccgccagaccatcatccagggcatcctgattgagcacctgtacggcctgactgtgtttgagaattatctctatgccaccaactcggacaatgccaatgcccagcagaagacgagtgtga

SEQ ID NO: 250654 - DNA, 120 bp, Artificial Sequence
  ENSG00000123384_15 (sequence is synthesized)
tccgtgtgaaccgctttaacagcaccgagtaccaggttgtcacccgggtggacaagggtggtgccctccacatctaccaccagaggcgtcagccccgagtgaggagccatgcctgtgaaa

SEQ ID NO: 250655 - DNA, 120 bp, Artificial Sequence
  ENSG00000123384_16 (sequence is synthesized)
acgaccagtatgggaagccgggtggctgctctgacatctgcctgctggccaacagccacaaggcgcggacctgccgctgccgttccggcttcagcctgggcagtgacgggaagtcatgca

SEQ ID NO: 250656 - DNA, 120 bp, Artificial Sequence
  ENSG00000123384_17 (sequence is synthesized)
agaagccggagcatgagctgttcctcgtgtatggcaagggccggccaggcatcatccggggcatggatatgggggccaaggtcccggatgagcacatgatccccattgaaaacctcatga

SEQ ID NO: 250657 - DNA, 120 bp, Artificial Sequence
  ENSG00000123384_18 (sequence is synthesized)
acccccgagccctggacttccacgctgagaccggcttcatctactttgccgacaccaccagctacctcattggccgccagaagattgatggcactgagcgggagaccatcctgaaggacg

SEQ ID NO: 250658 - DNA, 120 bp, Artificial Sequence
  ENSG00000123384_19 (sequence is synthesized)
gcatccacaatgtggagggtgtggccgtggactggatgggagacaatctgtactggacggacgatgggcccaaaaagacaatcagcgtggccaggctggagaaagctgctcagacccgca

SEQ ID NO: 250659 - DNA, 120 bp, Artificial Sequence
  ENSG00000123384_20 (sequence is synthesized)
agactttaatcgagggcaaaatgacacaccccagggctattgtggtggatccactcaatgggtggatgtactggacagactgggaggaggaccccaaggacagtcggcgtgggcggctgg

SEQ ID NO: 250660 - DNA, 120 bp, Artificial Sequence
  ENSG00000123384_21 (sequence is synthesized)
agagggcgtggatggatggctcacaccgagacatctttgtcacctccaagacagtgctttggcccaatgggctaagcctggacatcccggctgggcgcctctactgggtggatgccttct

SEQ ID NO: 250661 - DNA, 120 bp, Artificial Sequence
  ENSG00000123384_22 (sequence is synthesized)
acgaccgcatcgagacgatactgctcaatggcacagaccggaagattgtgtatgaaggtcctgagctgaaccacgcctttggcctgtgtcaccatggcaactacctcttctggactgagt

SEQ ID NO: 250662 - DNA, 120 bp, Artificial Sequence
  ENSG00000123384_23 (sequence is synthesized)
atcggagtggcagtgtctaccgcttggaacggggtgtaggaggcgcaccccccactgtgacccttctgcgcagtgagcggccccccatctttgagatccgaatgtatgatgcccagcagc

SEQ ID NO: 250663 - DNA, 120 bp, Artificial Sequence
  ENSG00000123384_24 (sequence is synthesized)
agcaagttggcaccaacaaatgccgggtgaacaatggcggctgcagcagcctgtgcttggccacccctgggagccgccagtgcgcctgtgctgaggaccaggtgttggacgcagacggcg

SEQ ID NO: 250664 - DNA, 120 bp, Artificial Sequence
  ENSG00000123384_25 (sequence is synthesized)
tcacttgcttggcgaacccatcctacgtgcctccaccccagtgccagccaggcgagtttgcctgtgccaacagccgctgcatccaggagcgctggaagtgtgacggagacaacgattgcc

SEQ ID NO: 250665 - DNA, 120 bp, Artificial Sequence
  ENSG00000123384_26 (sequence is synthesized)
tggacaacagtgatgaggccccagccctctgccatcagcacacctgcccctcggaccgattcaagtgcgagaacaaccggtgcatccccaaccgctggctctgcgacggggacaatgact

SEQ ID NO: 250666 - DNA, 120 bp, Artificial Sequence
  ENSG00000123384_27 (sequence is synthesized)
gtgggaacagtgaagatgagtccaatgccacttgttcagcccgcacctgcccccccaaccagttctcctgtgccagtggccgctgcatccccatctcctggacgtgtgatctggatgacg

SEQ ID NO: 250667 - DNA, 120 bp, Artificial Sequence
  ENSG00000123384_28 (sequence is synthesized)
actgtggggaccgctctgatgagtctgcttcgtgtgcctatcccacctgcttccccctgactcagtttacctgcaacaatggcagatgtatcaacatcaactggagatgcgacaatgaca

SEQ ID NO: 250668 - DNA, 120 bp, Artificial Sequence
  ENSG00000123384_29 (sequence is synthesized)
atgactgtggggacaacagtgacgaagccggctgcagccactcctgttctagcacccagttcaagtgcaacagcgggcgttgcatccccgagcactggacctgcgatggggacaatgact

SEQ ID NO: 250669 - DNA, 120 bp, Artificial Sequence
  ENSG00000123384_30 (sequence is synthesized)
gcggagactacagtgatgagacacacgccaactgcaccaaccaggccacgaggccccctggtggctgccacactgatgagttccagtgccggctggatggactatgcatccccctgcggt

SEQ ID NO: 250670 - DNA, 120 bp, Artificial Sequence
  ENSG00000123384_31 (sequence is synthesized)
ggcgctgcgatggggacactgactgcatggactccagcgatgagaagagctgtgagggagtgacccacgtctgcgatcccagtgtcaagtttggctgcaaggactcagctcggtgcatca

SEQ ID NO: 250671 - DNA, 120 bp, Artificial Sequence
  ENSG00000123384_32 (sequence is synthesized)
gcaaagcgtgggtgtgtgatggcgacaatgactgtgaggataactcggacgaggagaactgcgagtccctggcctgcaggccaccctcgcacccttgtgccaacaacacctcagtctgcc

SEQ ID NO: 250672 - DNA, 120 bp, Artificial Sequence
  ENSG00000123384_33 (sequence is synthesized)
tgccccctgacaagctgtgtgatggcaacgacgactgtggcgacggctcagatgagggcgagctctgcgaccagtgctctctgaataacggtggctgcagccacaactgctcagtggcac

SEQ ID NO: 250673 - DNA, 120 bp, Artificial Sequence
  ENSG00000123384_34 (sequence is synthesized)
ctggcgaaggcattgtgtgttcctgccctctgggcatggagctggggcccgacaaccacacctgccagatccagagctactgtgccaagcatctcaaatgcagccaaaagtgcgaccaga

SEQ ID NO: 250674 - DNA, 120 bp, Artificial Sequence
  ENSG00000123384_35 (sequence is synthesized)
acaagttcagcgtgaagtgctcctgctacgagggctgggtcctggaacctgacggcgagagctgccgcagcctggaccccttcaagccgttcatcattttctccaaccgccatgaaatcc

SEQ ID NO: 250675 - DNA, 120 bp, Artificial Sequence
  ENSG00000123384_36 (sequence is synthesized)
ggcgcatcgatcttcacaaaggagactacagcgtcctggtgcccggcctgcgcaacaccatcgccctggacttccacctcagccagagcgccctctactggaccgacgtggtggaggaca

SEQ ID NO: 250676 - DNA, 120 bp, Artificial Sequence
  ENSG00000123384_37 (sequence is synthesized)
agatctaccgcgggaagctgctggacaacggagccctgactagtttcgaggtggtgattcagtatggcctggccacacccgagggcctggctgtagactggattgcaggcaacatctact

SEQ ID NO: 250677 - DNA, 120 bp, Artificial Sequence
  ENSG00000123384_38 (sequence is synthesized)
gggtggagagtaacctggatcagatcgaggtggccaagctggatgggaccctccggaccaccctgctggccggtgacattgagcacccaagggcaatcgcactggatccccgggatggga

SEQ ID NO: 250678 - DNA, 120 bp, Artificial Sequence
  ENSG00000123384_39 (sequence is synthesized)
tcctgttttggacagactgggatgccagcctgccccgcattgaggcagcctccatgagtggggctgggcgccgcaccgtgcaccgggagaccggctctgggggctggcccaacgggctca

SEQ ID NO: 250679 - DNA, 120 bp, Artificial Sequence
  ENSG00000123384_40 (sequence is synthesized)
ccgtggactacctggagaagcgcatcctttggattgacgccaggtcagatgccatttactcagcccgttacgacggctctggccacatggaggtgcttcggggacacgagttcctgtcgc

SEQ ID NO: 250680 - DNA, 120 bp, Artificial Sequence
  ENSG00000123384_41 (sequence is synthesized)
acccgtttgcagtgacgctgtacgggggggaggtctactggactgactggcgaacaaacacactggctaaggccaacaagtggaccggccacaatgtcaccgtggtacagaggaccaaca

SEQ ID NO: 250681 - DNA, 120 bp, Artificial Sequence
  ENSG00000123384_42 (sequence is synthesized)
cccagccctttgacctgcaggtgtaccacccctcccgccagcccatggctcccaatccctgtgaggccaatgggggccagggcccctgctcccacctgtgtctcatcaactacaaccgga

SEQ ID NO: 250682 - DNA, 120 bp, Artificial Sequence
  ENSG00000123384_43 (sequence is synthesized)
ccgtgtcctgcgcctgcccccacctcatgaagctccacaaggacaacaccacctgctatgagtttaagaagttcctgctgtacgcacgtcagatggagatccgaggtgtggacctggatg

SEQ ID NO: 250683 - DNA, 120 bp, Artificial Sequence
  ENSG00000123384_44 (sequence is synthesized)
ctccctactacaactacatcatctccttcacggtgcccgacatcgacaacgtcacagtgctagactacgatgcccgcgagcagcgtgtgtactggtctgacgtgcggacacaggccatca

SEQ ID NO: 250684 - DNA, 120 bp, Artificial Sequence
  ENSG00000123384_45 (sequence is synthesized)
agcgggccttcatcaacggcacaggcgtggagacagtcgtctctgcagacttgccaaatgcccacgggctggctgtggactgggtctcccgaaacctgttctggacaagctatgacacca

SEQ ID NO: 250685 - DNA, 120 bp, Artificial Sequence
  ENSG00000123384_46 (sequence is synthesized)
ataagaagcagatcaatgtggcccggctggatggctccttcaagaacgcagtggtgcagggcctggagcagccccatggccttgtcgtccaccctctgcgtgggaagctctactggaccg

SEQ ID NO: 250686 - DNA, 120 bp, Artificial Sequence
  ENSG00000123384_47 (sequence is synthesized)
atggtgacaacatcagcatggccaacatggatggcagcaatcgcaccctgctcttcagtggccagaagggccccgtgggcctggctattgacttccctgaaagcaaactctactggatca

SEQ ID NO: 250687 - DNA, 120 bp, Artificial Sequence
  ENSG00000123384_48 (sequence is synthesized)
gctccgggaaccataccatcaaccgctgcaacctggatgggagtgggctggaggtcatcgatgccatgcggagccagctgggcaaggccaccgccctggccatcatgggggacaagctgt

SEQ ID NO: 250688 - DNA, 120 bp, Artificial Sequence
  ENSG00000123384_49 (sequence is synthesized)
ggtgggctgatcaggtgtcggaaaagatgggcacatgcagcaaggctgacggctcgggctccgtggtccttcggaacagcaccaccctggtgatgcacatgaaggtctatgacgagagca

SEQ ID NO: 250689 - DNA, 120 bp, Artificial Sequence
  ENSG00000123384_50 (sequence is synthesized)
tccagctggaccataagggcaccaacccctgcagtgtcaacaacggtgactgctcccagctctgcctgcccacgtcagagacgacccgctcctgcatgtgcacagccggctatagcctcc

SEQ ID NO: 250690 - DNA, 120 bp, Artificial Sequence
  ENSG00000123384_51 (sequence is synthesized)
ggagtggccagcaggcctgcgagggcgtaggttcctttctcctgtactctgtgcatgagggaatcaggggaattcccctggatcccaatgacaagtcagatgccctggtcccagtgtccg

SEQ ID NO: 250691 - DNA, 120 bp, Artificial Sequence
  ENSG00000123384_52 (sequence is synthesized)
ggacctcgctggctgtcggcatcgacttccacgctgaaaatgacaccatctactgggtggacatgggcctgagcacgatcagccgggccaagcgggaccagacgtggcgtgaagacgtgg

SEQ ID NO: 250692 - DNA, 120 bp, Artificial Sequence
  ENSG00000123384_53 (sequence is synthesized)
tgaccaatggcattggccgtgtggagggcattgcagtggactggatcgcaggcaacatctactggacagaccagggctttgatgtcatcgaggtcgcccggctcaatggctccttccgct

SEQ ID NO: 250693 - DNA, 120 bp, Artificial Sequence
  ENSG00000123384_54 (sequence is synthesized)
acgtggtgatctcccagggtctagacaagccccgggccatcaccgtccacccggagaaagggtacttgttctggactgagtggggtcagtatccgcgtattgagcggtctcggctagatg

SEQ ID NO: 250694 - DNA, 120 bp, Artificial Sequence
  ENSG00000123384_55 (sequence is synthesized)
gcacggagcgtgtggtgctggtcaacgtcagcatcagctggcccaacggcatctcagtggactaccaggatgggaagctgtactggtgcgatgcacggacagacaagattgaacggatcg

SEQ ID NO: 250695 - DNA, 120 bp, Artificial Sequence
  ENSG00000123384_56 (sequence is synthesized)
acctggagacaggtgagaaccgcgaggtggttctgtccagcaacaacatggacatgttttcagtgtctgtgtttgaggatttcatctactggagtgacaggactcatgccaacggctcta

SEQ ID NO: 250696 - DNA, 120 bp, Artificial Sequence
  ENSG00000123384_57 (sequence is synthesized)
tcaagcgcgggagcaaagacaatgccacagactccgtgcccctgcgaaccggcatcggcgtccagcttaaagacatcaaagtcttcaaccgggaccggcagaaaggcaccaacgtgtgcg

SEQ ID NO: 250697 - DNA, 120 bp, Artificial Sequence
  ENSG00000123384_58 (sequence is synthesized)
cggtggccaatggcgggtgccagcagctgtgcctgtaccggggccgtgggcagcgggcctgcgcctgtgcccacgggatgctggctgaagacggagcatcgtgccgcgagtatgccggct

SEQ ID NO: 250698 - DNA, 120 bp, Artificial Sequence
  ENSG00000123384_59 (sequence is synthesized)
acctgctctactcagagcgcaccattctcaagagtatccacctgtcggatgagcgcaacctcaatgcgcccgtgcagcccttcgaggaccctgagcacatgaagaacgtcatcgccctgg

SEQ ID NO: 250699 - DNA, 120 bp, Artificial Sequence
  ENSG00000123384_60 (sequence is synthesized)
cctttgactaccgggcaggcacctctccgggcacccccaatcgcatcttcttcagcgacatccactttgggaacatccaacagatcaacgacgatggctccaggaggatcaccattgtgg

SEQ ID NO: 250700 - DNA, 120 bp, Artificial Sequence
  ENSG00000123384_61 (sequence is synthesized)
aaaacgtgggctccgtggaaggcctggcctatcaccgtggctgggacactctctattggacaagctacacgacatccaccatcacgcgccacacagtggaccagacccgcccaggggcct

SEQ ID NO: 250701 - DNA, 120 bp, Artificial Sequence
  ENSG00000123384_62 (sequence is synthesized)
acgggccttcgttttggacgagtgccagaacctcatgttctggaccaactggaatgagcagcatcccagcatcatgcgggcggcgctctcgggagccaatgtcctgacccttatcgagaa

SEQ ID NO: 250702 - DNA, 120 bp, Artificial Sequence
  ENSG00000123384_63 (sequence is synthesized)
ggacatccgtacccccaatggcctggccatcgaccaccgtgccgagaagctctacttctctgacgccaccctggacaagatcgagcggtgcgagtatgacggctcccaccgctatgtgat

SEQ ID NO: 250703 - DNA, 120 bp, Artificial Sequence
  ENSG00000123384_64 (sequence is synthesized)
cctaaagtcagagcctgtccaccccttcgggctggccgtgtatggggagcacattttctggactgactgggtgcggcgggcagtgcagcgggccaacaagcacgtgggcagcaacatgaa

SEQ ID NO: 250704 - DNA, 120 bp, Artificial Sequence
  ENSG00000123384_65 (sequence is synthesized)
gctgctgcgcgtggacatcccccagcagcccatgggcatcatcgccgtggccaacgacaccaacagctgtgaactctctccatgccgaatcaacaacggtggctgccaggacctgtgtct

SEQ ID NO: 250705 - DNA, 120 bp, Artificial Sequence
  ENSG00000123384_66 (sequence is synthesized)
gctcactcaccagggccatgtcaactgctcatgccgagggggccgaatcctccaggatgacctcacctgccgagcggtgaattcctcttgccgagcacaagatgagtttgagtgtgccaa

SEQ ID NO: 250706 - DNA, 120 bp, Artificial Sequence
  ENSG00000123384_67 (sequence is synthesized)
tggcgagtgcatcaacttcagcctgacctgcgacggcgtcccccactgcaaggacaagtccgatgagaagccatcctactgcaactcccgccgctgcaagaagactttccggcagtgcag

SEQ ID NO: 250707 - DNA, 120 bp, Artificial Sequence
  ENSG00000123384_68 (sequence is synthesized)
caatgggcgctgtgtgtccaacatgctgtggtgcaacggggccgacgactgtggggatggctctgacgagatcccttgcaacaagacagcctgtggtgtgggcgagttccgctgccggga

SEQ ID NO: 250708 - DNA, 120 bp, Artificial Sequence
  ENSG00000123384_69 (sequence is synthesized)
cgggacctgcatcgggaactccagccgctgcaaccagtttgtggattgtgaggacgcctcagatgagatgaactgcagtgccaccgactgcagcagctacttccgcctgggcgtgaaggg

SEQ ID NO: 250709 - DNA, 120 bp, Artificial Sequence
  ENSG00000123384_70 (sequence is synthesized)
cgtgctcttccagccctgcgagcggacctcactctgctacgcacccagctgggtgtgtgatggcgccaatgactgtggggactacagtgatgagcgcgactgcccaggtgtgaaacgccc

SEQ ID NO: 250710 - DNA, 120 bp, Artificial Sequence
  ENSG00000123384_71 (sequence is synthesized)
cagatgccctctgaattacttcgcctgccctagtgggcgctgcatccccatgagctggacgtgtgacaaagaggatgactgtgaacatggcgaggacgagacccactgcaacaagttctg

SEQ ID NO: 250711 - DNA, 120 bp, Artificial Sequence
  ENSG00000123384_72 (sequence is synthesized)
ctcagaggcccagtttgagtgccagaaccatcgctgcatctccaagcagtggctgtgtgacggcagcgatgactgtggggatggctcagacgaggctgctcactgtgaaggcaagacgtg

SEQ ID NO: 250712 - DNA, 120 bp, Artificial Sequence
  ENSG00000123384_73 (sequence is synthesized)
cggcccctcctccttctcctgccctggcacccacgtgtgcgtccccgagcgctggctctgtgacggtgacaaagactgtgctgatggtgcagacgagagcatcgcagctggttgcttgta

SEQ ID NO: 250713 - DNA, 120 bp, Artificial Sequence
  ENSG00000123384_74 (sequence is synthesized)
caacagcacttgtgacgaccgtgagttcatgtgccagaaccgccagtgcatccccaagcacttcgtgtgtgaccacgaccgtgactgtgcagatggctctgatgagtcccccgagtgtga

SEQ ID NO: 250714 - DNA, 120 bp, Artificial Sequence
  ENSG00000123384_75 (sequence is synthesized)
gtacccgacctgcggccccagtgagttccgctgtgccaatgggcgctgtctgagctcccgccagtgggagtgtgatggcgagaatgactgccacgaccagagtgacgaggctcccaagaa

SEQ ID NO: 250715 - DNA, 120 bp, Artificial Sequence
  ENSG00000123384_76 (sequence is synthesized)
cccacactgcaccagccaagagcacaagtgcaatgcctcgtcacagttcctgtgcagcagtgggcgctgtgtggctgaggcactgctctgcaacggccaggatgactgtggcgacagctc

SEQ ID NO: 250716 - DNA, 120 bp, Artificial Sequence
  ENSG00000123384_77 (sequence is synthesized)
ggacgagcgtggctgccacatcaatgagtgtctcagccgcaagctcagtggctgcagccaggactgtgaggacctcaagatcggcttcaagtgccgctgtcgccctggcttccggctgaa

SEQ ID NO: 250717 - DNA, 120 bp, Artificial Sequence
  ENSG00000123384_78 (sequence is synthesized)
ggacgacggccggacgtgtgctgatgtggacgagtgcagcaccaccttcccctgcagccagcgctgcatcaacactcatggcagctataagtgtctgtgtgtggagggctatgcaccccg

SEQ ID NO: 250718 - DNA, 120 bp, Artificial Sequence
  ENSG00000123384_79 (sequence is synthesized)
cggcggcgacccccacagctgcaaggctgtgactgacgaggaaccgtttctgatcttcgccaaccggtactacctgcgcaagctcaacctggacgggtccaactacacgttacttaagca

SEQ ID NO: 250719 - DNA, 120 bp, Artificial Sequence
  ENSG00000123384_80 (sequence is synthesized)
gggcctgaacaacgccgttgccttggattttgactaccgagagcagatgatctactggacagatgtgaccacccagggcagcatgatccgaaggatgcaccttaacgggagcaatgtgca

SEQ ID NO: 250720 - DNA, 120 bp, Artificial Sequence
  ENSG00000123384_81 (sequence is synthesized)
ggtcctacaccgtacaggcctcagcaaccccgatgggctggctgtggactgggtgggtggcaacctgtactggtgcgacaaaggccgggacaccatcgaggtgtccaagctcaatggggc

SEQ ID NO: 250721 - DNA, 120 bp, Artificial Sequence
  ENSG00000123384_82 (sequence is synthesized)
ctatcggacggtgctggtcagctctggcctccgtgagcccagggctctggtggtggatgtgcagaatgggtacctgtactggacagactggggtgaccattcactgatcggccgcatcgg

SEQ ID NO: 250722 - DNA, 120 bp, Artificial Sequence
  ENSG00000123384_83 (sequence is synthesized)
catggatgggtccagccgcagcgtcatcgtggacaccaagatcacatggcccaatggcctgacgctggactatgtcactgagcgcatctactgggccgacgcccgcgaggactacattga

SEQ ID NO: 250723 - DNA, 120 bp, Artificial Sequence
  ENSG00000123384_84 (sequence is synthesized)
atttgccagcctggatggctccaatcgccacgttgtgctgagccaggacatcccgcacatctttgcactgaccctgtttgaggactacgtctactggaccgactgggaaacaaagtccat

SEQ ID NO: 250724 - DNA, 120 bp, Artificial Sequence
  ENSG00000123384_85 (sequence is synthesized)
taaccgagcccacaagaccacgggcaccaacaaaacgctcctcatcagcacgctgcaccggcccatggacctgcatgtcttccatgccctgcgccagccagacgtgcccaatcacccctg

SEQ ID NO: 250725 - DNA, 120 bp, Artificial Sequence
  ENSG00000123384_86 (sequence is synthesized)
caaggtcaacaatggtggctgcagcaacctgtgcctgctgtcccccgggggagggcacaaatgtgcctgccccaccaacttctacctgggcagcgatgggcgcacctgtgtgtccaactg

SEQ ID NO: 250726 - DNA, 120 bp, Artificial Sequence
  ENSG00000123384_87 (sequence is synthesized)
cacggctagccagtttgtatgcaagaacgacaagtgcatccccttctggtggaagtgtgacaccgaggacgactgcggggaccactcagacgagcccccggactgccctgagttcaagtg

SEQ ID NO: 250727 - DNA, 120 bp, Artificial Sequence
  ENSG00000123384_88 (sequence is synthesized)
ccggcccggacagttccagtgctccacaggtatctgcacaaaccctgccttcatctgcgatggcgacaatgactgccaggacaacagtgacgaggccaactgtgacatccacgtctgctt

SEQ ID NO: 250728 - DNA, 120 bp, Artificial Sequence
  ENSG00000123384_89 (sequence is synthesized)
gcccagtcagttcaaatgcaccaacaccaaccgctgtattcccggcatcttccgctgcaatgggcaggacaactgcggagatggggaggatgagagggactgccccgaggtgacctgcgc

SEQ ID NO: 250729 - DNA, 120 bp, Artificial Sequence
  ENSG00000123384_90 (sequence is synthesized)
ccccaaccagttccagtgctccattaccaaacggtgcatcccccgggtctgggtctgcgaccgggacaatgactgtgtggatggcagtgatgagcccgccaactgcacccagatgacctg

SEQ ID NO: 250730 - DNA, 120 bp, Artificial Sequence
  ENSG00000123384_91 (sequence is synthesized)
tggtgtggacgagttccgctgcaaggattcgggccgctgcatcccagcgcgttggaagtgtgacggagaggatgactgtggggatggctcggatgagcccaaggaagagtgtgatgaacg

SEQ ID NO: 250731 - DNA, 120 bp, Artificial Sequence
  ENSG00000123384_92 (sequence is synthesized)
cacctgtgagccataccagttccgctgcaagaacaaccgctgcgtgcccggccgctggcagtgcgactacgacaacgattgcggtgacaactccgatgaagagagctgcacccctcggcc

SEQ ID NO: 250732 - DNA, 120 bp, Artificial Sequence
  ENSG00000123384_93 (sequence is synthesized)
ctgctccgagagtgagttctcctgtgccaacggccgctgcatcgcggggcgctggaaatgcgatggagaccacgactgcgcggacggctcggacgagaaagactgcaccccccgctgtga

SEQ ID NO: 250733 - DNA, 120 bp, Artificial Sequence
  ENSG00000123384_94 (sequence is synthesized)
catggaccagttccagtgcaagagcggccactgcatccccctgcgctggcgctgtgacgcagacgccgactgcatggacggcagcgacgaggaggcctgcggcactggcgtgcggacctg

SEQ ID NO: 250734 - DNA, 120 bp, Artificial Sequence
  ENSG00000123384_95 (sequence is synthesized)
ccccctggacgagttccagtgcaacaacaccttgtgcaagccgctggcctggaagtgcgatggcgaggatgactgtggggacaactcagatgagaaccccgaggagtgtgcccggttcgt

SEQ ID NO: 250735 - DNA, 120 bp, Artificial Sequence
  ENSG00000123384_96 (sequence is synthesized)
gtgccctcccaaccggcccttccgttgcaagaatgaccgcgtctgtctgtggatcgggcgccaatgcgatggcacggacaactgtggggatgggactgatgaagaggactgtgagccccc

SEQ ID NO: 250736 - DNA, 120 bp, Artificial Sequence
  ENSG00000123384_97 (sequence is synthesized)
cacagcccacaccacccactgcaaagacaagaaggagtttctgtgccggaaccagcgctgcctctcctcctccctgcgctgcaacatgttcgatgactgcggggacggctctgacgagga

SEQ ID NO: 250737 - DNA, 120 bp, Artificial Sequence
  ENSG00000123384_98 (sequence is synthesized)
ggactgcagcatcgaccccaagctgaccagctgcgccaccaatgccagcatctgtggggacgaggcacgctgcgtgcgcaccgagaaagcggcctactgtgcctgccgctcgggcttcca

SEQ ID NO: 250738 - DNA, 120 bp, Artificial Sequence
  ENSG00000123384_99 (sequence is synthesized)
caccgtgcccggccagcccggatgccaagacatcaacgagtgcctgcgcttcggcacctgctcccagctctgcaacaacaccaagggcggccacctctgcagctgcgctcggaacttcat

SEQ ID NO: 250739 - DNA, 120 bp, Artificial Sequence
  ENSG00000123384_100 (sequence is synthesized)
gaagacgcacaacacctgcaaggccgaaggctctgagtaccaggtcctgtacatcgctgatgacaatgagatccgcagcctgttccccggccacccccattcggcttacgagcaggcatt

SEQ ID NO: 250740 - DNA, 120 bp, Artificial Sequence
  ENSG00000123384_101 (sequence is synthesized)
ccagggtgacgagagtgtccgcattgatgctatggatgtccatgtcaaggctggccgtgtctattggaccaactggcacacgggcaccatctcctaccgcagcctgccacctgctgcgcc

SEQ ID NO: 250741 - DNA, 120 bp, Artificial Sequence
  ENSG00000123384_102 (sequence is synthesized)
tcctaccacttccaaccgccaccggcgacagattgaccggggtgtcacccacctcaacatttcagggctgaagatgcccagaggcatcgccatcgactgggtggccggaaacgtgtactg

SEQ ID NO: 250742 - DNA, 120 bp, Artificial Sequence
  ENSG00000123384_103 (sequence is synthesized)
gaccgactcgggccgagatgtgattgaggtggcgcagatgaagggcgagaaccgcaagacgctcatctcgggcatgattgacgagccccacgccattgtggtggacccactgagggggac

SEQ ID NO: 250743 - DNA, 120 bp, Artificial Sequence
  ENSG00000123384_104 (sequence is synthesized)
catgtactggtcagactggggcaaccaccccaagattgagacggcagcgatggatgggacgcttcgggagacactggtgcaggacaacattcagtggcccacaggcctggccgtggatta

SEQ ID NO: 250744 - DNA, 120 bp, Artificial Sequence
  ENSG00000123384_105 (sequence is synthesized)
tcacaatgagcggctgtactgggcagacgccaagctttcagtcatcggcagcatccggctcaatggcacggaccccattgtggctgctgacagcaaacgaggcctaagtcaccccttcag

SEQ ID NO: 250745 - DNA, 120 bp, Artificial Sequence
  ENSG00000123384_106 (sequence is synthesized)
catcgacgtctttgaggattacatctatggtgtcacctacatcaataatcgtgtcttcaagatccataagtttggccacagccccttggtcaacctgacagggggcctgagccacgcctc

SEQ ID NO: 250746 - DNA, 120 bp, Artificial Sequence
  ENSG00000123384_107 (sequence is synthesized)
tgacgtggtcctttaccatcagcacaagcagcccgaagtgaccaacccatgtgaccgcaagaaatgcgagtggctctgcctgctgagccccagtgggcctgtctgcacctgtcccaatgg

SEQ ID NO: 250747 - DNA, 120 bp, Artificial Sequence
  ENSG00000123384_108 (sequence is synthesized)
gaagcggctggacaacggcacatgcgtgcctgtgccctctccaacgccccccccagatgctccccggcctggaacctgtaacctgcagtgcttcaacggtggcagctgtttcctcaatgc

SEQ ID NO: 250748 - DNA, 120 bp, Artificial Sequence
  ENSG00000123384_109 (sequence is synthesized)
acggaggcagcccaagtgccgctgccaaccccgctacacgggtgacaagtgtgaactggaccagtgctgggagcactgtcgcaatgggggcacctgtgctgcctccccctctggcatgcc

SEQ ID NO: 250749 - DNA, 120 bp, Artificial Sequence
  ENSG00000123384_110 (sequence is synthesized)
cacgtgccggtgccccacgggcttcacgggccccaaatgcacccagcaggtgtgtgcgggctactgtgccaacaacagcacctgcactgtcaaccagggcaaccagccccagtgccgatg

SEQ ID NO: 250750 - DNA, 120 bp, Artificial Sequence
  ENSG00000123384_111 (sequence is synthesized)
cctacccggcttcctgggcgaccgctgccagtaccggcagtgctctggctactgtgagaactttggcacatgccagatggctgctgatggctcccgacaatgccgctgcactgcctactt

SEQ ID NO: 250751 - DNA, 120 bp, Artificial Sequence
  ENSG00000123384_112 (sequence is synthesized)
tgagggatcgaggtgtgaggtgaacaagtgcagccgctgtctcgaaggggcctgtgtggtcaacaagcagagtggggatgtcacctgcaactgcacggatggccgggtggcccccagctg

SEQ ID NO: 250752 - DNA, 120 bp, Artificial Sequence
  ENSG00000123384_113 (sequence is synthesized)
tctgacctgcgtcggccactgcagcaatggcggctcctgtaccatgaacagcaaaatgatgcctgagtgccagtgcccaccccacatgacagggccccggtgtgaggagcacgtcttcag

SEQ ID NO: 250753 - DNA, 120 bp, Artificial Sequence
  ENSG00000123384_114 (sequence is synthesized)
ccagcagcagccaggacatatagcctccatcctaatccctctgctgttgctgctgctgctggttctggtggccggagtggtattctggtataagcggcgagtccaaggggctaagggctt

SEQ ID NO: 250754 - DNA, 120 bp, Artificial Sequence
  ENSG00000123384_115 (sequence is synthesized)
ccagcaccaacggatgaccaacggggccatgaacgtggagattggaaaccccacctacaagatgtacgaaggcggagagcctgatgatgtgggaggcctactggacgctgactttgccct

SEQ ID NO: 250755 - DNA, 120 bp, Artificial Sequence
  ENSG00000123384_116 (sequence is synthesized)
ggaccctgacaagcccaccaacttcaccaaccccgtgtatgccacactctacatggggggccatggcagtcgccactccctggccagcacggacgagaagcgagaactcctgggccgggg

SEQ ID NO: 250756 - DNA, 120 bp, Artificial Sequence
  ENSG00000123384_117 (sequence is synthesized)
ccctgaggacgagataggggaccccttggcatagggccctgccccgtcggactgcccccagaaagcctcctgccccctgccagtgaagtccttcagtgagcccctccccagccagccctt

SEQ ID NO: 250757 - DNA, 120 bp, Artificial Sequence
  ENSG00000123384_118 (sequence is synthesized)
ccctggccccgccggatgtataaatgtaaaaatgaaggaattacattttatatgtgagcgagcaagccggcaagcgagcacagtattatttctccatcccctccctgcctgctccttggc

SEQ ID NO: 250758 - DNA, 120 bp, Artificial Sequence
  ENSG00000123384_119 (sequence is synthesized)
acccccatgctgccttcagggagacaggcagggagggcttggggctgcacctcctaccctcccaccagaacgcaccccactgggagagctggtggtgcagccttcccctccctgtataag

SEQ ID NO: 250759 - DNA, 120 bp, Artificial Sequence
  ENSG00000123384_120 (sequence is synthesized)
acactttgccaaggctctcccctctcgccccatccctgcttgcccgctcccacagcttcctgagggctaattctgggaagggagagttctttgctgcccctgtctggaagacgtggctct

SEQ ID NO: 250760 - DNA, 120 bp, Artificial Sequence
  ENSG00000123384_121 (sequence is synthesized)
gggtgaggtaggcgggaaaggatggagtgttttagttcttgggggaggccaccccaaaccccagccccaactccaggggcacctatgagatggccatgctcaacccccctcccagacagg

SEQ ID NO: 250761 - DNA, 120 bp, Artificial Sequence
  ENSG00000123384_122 (sequence is synthesized)
ccctccctgtctccagggcccccaccgaggttcccagggctggagacttcctctggtaaacattcctccagcctcccctcccctggggacgccaaggaggtgggccacacccaggaaggg

SEQ ID NO: 250762 - DNA, 120 bp, Artificial Sequence
  ENSG00000123384_123 (sequence is synthesized)
agggaaagcgggcagccccgttttggggacgtgaacgttttaataatttttgctgaattcctttacaactaaataacacagatattgttataaataaaattgtaaaaaaaaaaaaaaaaa

SEQ ID NO: 250763 - DNA, 120 bp, Artificial Sequence
  ENSG00000123384_124 (sequence is synthesized)
cccccatccctgtgctgtgcctctacccatcatccttgattgacctctccccaaaccctggtgcttgtctcagtggtcttgcccccgctcccctccccaaacacagtctgttctgagggc

SEQ ID NO: 250764 - DNA, 120 bp, Artificial Sequence
  ENSG00000123384_125 (sequence is synthesized)
aaggccagggacctgtgtcctctctggtgtctgtcccatggggtaagtgcgagcccgcctgtgcccagctgttccataggagcagccagtgggctctgccaggactggctcggcctctgg

SEQ ID NO: 250765 - DNA, 120 bp, Artificial Sequence
  ENSG00000123384_126 (sequence is synthesized)
gtggccttcagagacacggggatgggccttgggctcgggactgtggcactactgaggcctggagtccttgtgcccaccctcctgggcctgtctccccctgtccttcccagcccctcggcc

SEQ ID NO: 250766 - DNA, 120 bp, Artificial Sequence
  ENSG00000123384_127 (sequence is synthesized)
caggagaacgaggtgacacaacacggctaagctccagactggctggtggaaggaagagctgaagtcgggacccagcaggaaacaaggagcatgaggccacatcgtttagcagagcttctg

SEQ ID NO: 250767 - DNA, 120 bp, Artificial Sequence
  ENSG00000123384_128 (sequence is synthesized)
ccaggctcgccaggaggtctccttcccaccttcgaagtcctcagactctccgccatctctcccaggcccaggcgagatccctgagtaggattactagacagactgtcctctcccactgtc

SEQ ID NO: 250768 - DNA, 120 bp, Artificial Sequence
  ENSG00000123384_129 (sequence is synthesized)
ttggagtgtcccaaggccagagaggcaggatcctggcagtagaagagagggggaaaatgatgtcccagctctagaacaacagactcagtcttcaataaatatttgttcaatggatcaata

SEQ ID NO: 250769 - DNA, 120 bp, Artificial Sequence
  ENSG00000123384_130 (sequence is synthesized)
ttgataaatttcacgtaatttactcaaccgtttctctactgttggatgtttaggttgtttccagttttttgatataatcacaacccatgtttgttgagcatggactgtgtgctcagcact

SEQ ID NO: 250770 - DNA, 120 bp, Artificial Sequence
  ENSG00000123384_131 (sequence is synthesized)
gtcatggacatttcccttgcagtaatttgtttacccctaaaaacatcctggtgggaaaagtggttttattatccccattttacagatgaaaaaactgaggcccaaagttagagcaggatt

SEQ ID NO: 250771 - DNA, 120 bp, Artificial Sequence
  ENSG00000123384_132 (sequence is synthesized)
taaacccatgaagtttgacccagagcctgttttgtaatcatgcctctgctatttgtcacatcatcatgcctgcccatattctggatggtttccttaggatagaatcccggaagtgaaaat

SEQ ID NO: 250772 - DNA, 120 bp, Artificial Sequence
  ENSG00000123384_133 (sequence is synthesized)
gggtcagtgcagccatagtgtacacctaggagggagtggctggggtcaggagagggcgttggctgagagggttaaggaatggaggggccaaggtaatgggaggatcatccacatggaagt

SEQ ID NO: 250773 - DNA, 120 bp, Artificial Sequence
  ENSG00000123384_134 (sequence is synthesized)
tgaagtcaccaagaactgaaccaggagtgattttggagaaagtgctggtgagccaggagctaaaaacccttacagatgacagggtgcagcctgggagccttccagaagtagaggttggta

SEQ ID NO: 250774 - DNA, 120 bp, Artificial Sequence
  ENSG00000123384_135 (sequence is synthesized)
cagaagcatgatgtaaggggaagaacagtccagggaacagcagtgaggagcaaggaggacacataccagcctccaggtccatggtccatgggatacgggaggggaaatcgccacccatgg

SEQ ID NO: 250775 - DNA, 120 bp, Artificial Sequence
  ENSG00000123384_136 (sequence is synthesized)
ggccatgggaagtttcagagattagagaggggtgggagatgagtcagaccaggcaagcgcccagctgtgaggtctggagaccgggctcacacaggagcctgcacttgtggaggttaccaa

SEQ ID NO: 250776 - DNA, 120 bp, Artificial Sequence
  ENSG00000123384_137 (sequence is synthesized)
gatagtgatggtgaggcatacgttctggggacaggatgggtggagcctgcgcggatgtggtgccatcttcacttctgctggtgggaccgatgaaactgtgaaataaaaagtccagggacc

SEQ ID NO: 250777 - DNA, 120 bp, Artificial Sequence
  ENSG00000123384_138 (sequence is synthesized)
ggggcagggccctggggttcccggagatgacttccaaggggaagttcatggagaagtcagggaaggagtggggagagcctgttcggtggtgacagaggtatagaggccatgggctctctt

SEQ ID NO: 250778 - DNA, 120 bp, Artificial Sequence
  ENSG00000123384_139 (sequence is synthesized)
ggacaccatttgattctcaggtcacactgaagtacagtaagcattaagtagagtaaacatcactattgttgcttgggaaagaattgcagtttccatccagataatttgtttcatgaggaa

SEQ ID NO: 250779 - DNA, 120 bp, Artificial Sequence
  ENSG00000123384_140 (sequence is synthesized)
ttttgtactagaaaaaattactttgtattattaaaaaatagtaaaacaaacaaaaatggtgcaaagggcttagtacttgtcccacgaccggggtctgactttccccctcacgatcctgtg

SEQ ID NO: 250780 - DNA, 120 bp, Artificial Sequence
  ENSG00000123384_141 (sequence is synthesized)
gggaacagtgaagatgagtccaatgccacttgttcaggtgtggagcggggctcagatcacacgaggcacccctcagtcaaggaggcaggggagacgagggggccaggttcagtggctcat

SEQ ID NO: 250781 - DNA, 120 bp, Artificial Sequence
  ENSG00000123384_142 (sequence is synthesized)
tcttcatgcaacaaatatttattaagcatttaccatgtaccaggcactgccataggtgttagggacgtagtagtaaacaagacacagggcccctgaatacacatttttgtgcgggttgtg

SEQ ID NO: 250782 - DNA, 120 bp, Artificial Sequence
  ENSG00000123384_143 (sequence is synthesized)
cccagctcaatgccccctagtctaggggaccagttgagctgaaatccagcaaaccctgagggctgtgcccatctaggccccaccccacaagtccctccgagacagtctgctgccacaaga

SEQ ID NO: 250783 - DNA, 120 bp, Artificial Sequence
  ENSG00000123384_144 (sequence is synthesized)
agaaaagccctgcctattttcccttcctgggggcagtgagacagtgcctgtccctcgctgacctgcctgggctctgcagtacagagggggcaggtgaagcccgggatgagaaaagactgg

SEQ ID NO: 250784 - DNA, 120 bp, Artificial Sequence
  ENSG00000123384_145 (sequence is synthesized)
gccttggagcggaaatcccaactgtgcgggcagatgtcttggctctgccttggtaggccaggcacagggatgggaacccggtcttccattcccagcccagtgctgttcccgcgtccccgc

SEQ ID NO: 250785 - DNA, 120 bp, Artificial Sequence
  ENSG00000123384_146 (sequence is synthesized)
tgtggaactacacagcccagtgctgttcccacgtccccgctgtggaactacacagcacagtgccctgccacataccagagaaggagtgccctctgaactcctccagacacccctgaaaaa

SEQ ID NO: 250786 - DNA, 120 bp, Artificial Sequence
  ENSG00000123384_147 (sequence is synthesized)
tggcctcttctcccctaaataccagagggggcagtttggccccaccaagtagaaatttaagagacctggttccaatttggctgtgccactgcttgcctggtgacccctctgagcctggaa

SEQ ID NO: 250787 - DNA, 120 bp, Artificial Sequence
  ENSG00000123384_148 (sequence is synthesized)
cagtggggtgagtctggtcctcgtgggagctgcactggggttagggttaaccaggaggactcgcccaggaaggggaggatccattgctaggagcctgggggcttttcgttaggaaagaga

SEQ ID NO: 250788 - DNA, 120 bp, Artificial Sequence
  ENSG00000123384_149 (sequence is synthesized)
agcccctggggaaggctctgggggctgcctgatgccttaggtcttggaggtggggctgggaacccaaatgtttgacctgctccccctgcaagccttgtcacttaggaattgggagccact

SEQ ID NO: 250789 - DNA, 120 bp, Artificial Sequence
  ENSG00000123384_150 (sequence is synthesized)
gaagcccccgggacagggttgggggctgcacccacatgcgtgcccttccctcccaggccagcctgaggacagagtccttttcagtcccttgggtcttctcggccacccctgcctggccct

SEQ ID NO: 250790 - DNA, 120 bp, Artificial Sequence
  ENSG00000123384_151 (sequence is synthesized)
ccccatgctgcctctgcccagggcccccagctgggcctgcttgggcagggatctgacctctgcttggccggctgtcatgcacagccacactctgccctggggaacagctctgccagcgtc

SEQ ID NO: 250791 - DNA, 120 bp, Artificial Sequence
  ENSG00000123384_152 (sequence is synthesized)
cttctctgtagaaggacagaatgccctcctcccagtccccagcagtccctgtccccagaccaagaagctggtgtcctgcctgggcctgcctcctctggccctccggcctgcccacactca

SEQ ID NO: 250792 - DNA, 120 bp, Artificial Sequence
  ENSG00000123384_153 (sequence is synthesized)
ctgtgtgtgttttcgaaatcacaacaggaaatggggtagtgatttgtctagaggggaggcaaagaaggggcagacagcagtccctctgagtctaatgaactggctgctgctgctggaagg

SEQ ID NO: 250793 - DNA, 120 bp, Artificial Sequence
  ENSG00000123384_154 (sequence is synthesized)
ggtgctacctccccactgtgctgggcacccctggaccctctcagcctcccaccctgcctacaaagcacttccagacttcacatgtgaaagctaaccatgcccatccttggcctttctgac

SEQ ID NO: 250794 - DNA, 120 bp, Artificial Sequence
  ENSG00000123384_155 (sequence is synthesized)
ccatgggatgccaggctgtttggggaggggtggctctagccaccccactctttggccttaggccccctgcatcctggcacttttgcttcccattcctgttctgagtttcctaatcattta

SEQ ID NO: 250795 - DNA, 120 bp, Artificial Sequence
  ENSG00000123384_156 (sequence is synthesized)
acagctcactcttgctcctcctctctcctggcccgggccagccctgtgtctcccggcccagatccagccctgtcctctcctcccccgctgtctccttgaaattgcctctccacccagact

SEQ ID NO: 250796 - DNA, 120 bp, Artificial Sequence
  ENSG00000123384_157 (sequence is synthesized)
gctcccagcactccccttgctgttttcaagccaaaggaagtaacttaagcaagagagatgtgttttagagcccggcaaggatttctcaatagagggaagaccctaagatgggctgagtgg

SEQ ID NO: 250797 - DNA, 120 bp, Artificial Sequence
  ENSG00000123384_158 (sequence is synthesized)
aatccaggcatcatccctgggatctaggtcgaaatgcctcttggggacctaagccaggcaggggaaggtagcaggacataaccacaggctggaatcacaggcaggagcaggaagagagcc

SEQ ID NO: 250798 - DNA, 120 bp, Artificial Sequence
  ENSG00000123384_159 (sequence is synthesized)
ctggtgaggggggaagcctctgtaggggaaccgttctctgagtctcctggtaaagagcgtggatgccccaggcctctagtgggagtggggtgggcttgaatactgcagagaaaggacaag

SEQ ID NO: 250799 - DNA, 120 bp, Artificial Sequence
  ENSG00000123384_160 (sequence is synthesized)
atacgggttccactgtgatgggaacagtcattttagaaacaccacttctgtttacttcctgtttctcatttgacccttataataacccctagctgatgaacagggaggtggttcagttcc

SEQ ID NO: 250800 - DNA, 120 bp, Artificial Sequence
  ENSG00000123384_161 (sequence is synthesized)
ctttcagcagatgaaaaagcaggatcaaagaggttaggtgatttgcctgtgtttacaaagccgggtgatagcactggaacttgttctagaagccttgctggctcagaggtggcatctcca

SEQ ID NO: 250801 - DNA, 120 bp, Artificial Sequence
  ENSG00000123384_162 (sequence is synthesized)
ttgtgggataattagtgtgagcaaccagcccagtttgcctaggactgtcccagttttagccctgaaagtctggtaagccagcaaacccttacctttgtcttaggcaaactaggacagttg

SEQ ID NO: 250802 - DNA, 120 bp, Artificial Sequence
  ENSG00000123384_163 (sequence is synthesized)
gccaccgcagataagctatgtgggtagtcaggggtgttacaggacttgcttggggcaagtgtgtcctcttagccctcataacagactaagaatgtcctctgtggacagagtttagagccc

SEQ ID NO: 250803 - DNA, 120 bp, Artificial Sequence
  ENSG00000123384_164 (sequence is synthesized)
atctctaattcagtctaaaatcactaaagtgtctaacgagtgcctaattctgtgaaggacagggtttctgccctcaaggggtctgagtagagtgggtgagataagtccacaaatcactgt

SEQ ID NO: 250804 - DNA, 120 bp, Artificial Sequence
  ENSG00000123384_165 (sequence is synthesized)
gccagacacggatagatagcagtgtcacggaggatgtatagaaggagaaaacatctctggttagaagattccataaattctttaaagacatgctctgtagaggatgagtgggatcttggt

SEQ ID NO: 250805 - DNA, 120 bp, Artificial Sequence
  ENSG00000123384_166 (sequence is synthesized)
gcaaggccgaaggtgccggagccaccagagggcagaaaggctgggtggggcagggcgaccaggatatcaaacggggccgacttggaatggaatgtcttcctgcggacatcttgcccagac

SEQ ID NO: 250806 - DNA, 120 bp, Artificial Sequence
  ENSG00000123384_167 (sequence is synthesized)
ctatcccacctgcttccccctgactcagtttacctgcaacaatggcagatgtatcaacatcaactggagatgcgacaatgagaaggattgtggggacggctctgacgaacagacctgtcc

SEQ ID NO: 250807 - DNA, 120 bp, Artificial Sequence
  ENSG00000123384_168 (sequence is synthesized)
tcccacgcagccccatacctggcctttccgaactcaccatagcccaacctgccccataacaccctgacccctgcctcaacttctttgaaacatccaagcccctcaaaagaaagacttctg

SEQ ID NO: 250808 - DNA, 120 bp, Artificial Sequence
  ENSG00000123388_0 (sequence is synthesized)
gtgctcagagagagagagactaagacggataacgcgtcatctcgccttcccaaattttcccccctcgctagaccgggtccaaaacctccatccggagccggcaggagaggagaacgatgt

SEQ ID NO: 250809 - DNA, 120 bp, Artificial Sequence
  ENSG00000123388_1 (sequence is synthesized)
ttaactcggtcaacctgggcaacttctgctctccgtcgcgcaaggagaggggcgcagatttcggcgagcgagggagctgcgcctccaacctctatctgcccagttgcacttactacatgc

SEQ ID NO: 250810 - DNA, 120 bp, Artificial Sequence
  ENSG00000123388_2 (sequence is synthesized)
ccgagttctccacggtctcctccttcctgccccaggccccctctcgtcagatctcctatccctactcggcccaagtgcccccggtccgggaggtctcctacggcctggagccatccggca

SEQ ID NO: 250811 - DNA, 120 bp, Artificial Sequence
  ENSG00000123388_3 (sequence is synthesized)
agtggcaccatcggaacagctactcctcctgctatgcggcggccgacgagcttatgcaccgggagtgcctgcctccttccaccgtcaccgagatcctcatgaaaaacgaaggctcctacg

SEQ ID NO: 250812 - DNA, 120 bp, Artificial Sequence
  ENSG00000123388_4 (sequence is synthesized)
gcggccaccaccaccccagcgccccgcacgcaacccccgccggcttctactcctcagtcaacaagaacagcgtcctgcctcaagccttcgaccgtttcttcgacaacgcctactgcggtg

SEQ ID NO: 250813 - DNA, 120 bp, Artificial Sequence
  ENSG00000123388_5 (sequence is synthesized)
cgagcccccctgctccggcaagggcgaggccaagggggagcccgaggcacccccggcctcgggactggcgtcccgggctgaggcgggtgccgaggcggaggctgaggaggagaacacaaa

SEQ ID NO: 250814 - DNA, 120 bp, Artificial Sequence
  ENSG00000123388_6 (sequence is synthesized)
aggaggagaacacaaatcccagctcgtccggttcagcccactccgtggccaaggagccggccaaaggagccgcccccaacgccccccgcacccgcaagaagcgctgcccttattcgaaat

SEQ ID NO: 250815 - DNA, 120 bp, Artificial Sequence
  ENSG00000123388_7 (sequence is synthesized)
tccagatccgggaactggagcgagagtttttcttcaacgtgtatatcaacaaagagaagcggctgcagctgtcccggatgctgaacctgacggaccgacaagtgaaaatttggtttcaga

SEQ ID NO: 250816 - DNA, 120 bp, Artificial Sequence
  ENSG00000123388_8 (sequence is synthesized)
acagaaggatgaaagaaaagaaactgagcagagaccggctgcagtatttctcgggaaatcctctgctgtaacctgcagaccgggcccttttgggggcggggggaggggaaaattatttta

SEQ ID NO: 250817 - DNA, 120 bp, Artificial Sequence
  ENSG00000123388_9 (sequence is synthesized)
ttttatttttattttttattttctaactcgtcttctttccgccggtggaaaactggactgtggccagggctggcccccaccgctgtggccggcactccattccggaacctcctggaccct

SEQ ID NO: 250818 - DNA, 120 bp, Artificial Sequence
  ENSG00000123388_10 (sequence is synthesized)
ctatctgactctcgctgtgggacagggaccgggcctggaaagggggtgaagggaagtgtctgatgcacggcgagtgaacaccgttggcgccgaggccaagactttgatttaaaagaaaac

SEQ ID NO: 250819 - DNA, 120 bp, Artificial Sequence
  ENSG00000123388_11 (sequence is synthesized)
acacctcggcgacaatgtcttgctgctcggattaggtgggggaggggcgacagtagtgagcgcctgagccgaacaatcctcgaactaaaagccttcccttgcccatgtgaaaagatccgc

SEQ ID NO: 250820 - DNA, 120 bp, Artificial Sequence
  ENSG00000123388_12 (sequence is synthesized)
taagacagcatgtctgccagcggaaacttctcgagctcccccctctaccccgccccaccttgcagctaaatgtgatcctgccttgctgtgaaatttctgtaccttcaacctggtgttagg

SEQ ID NO: 250821 - DNA, 120 bp, Artificial Sequence
  ENSG00000123388_13 (sequence is synthesized)
ctccgtcttcgccaaggccccgcccgagcctagttgttctccccctgaatgtgtagaaccttcctttgaaatttcttaatcggtgcattgaggtttccacatctttttccaagcagtgcc

SEQ ID NO: 250822 - DNA, 120 bp, Artificial Sequence
  ENSG00000123388_14 (sequence is synthesized)
ccacttcatggatttatagctatagtctatgcagtcgttacctcttttttttttttttttaagaaaattgaagattggggtggtggaggcagtagggagatgggattgggcacctccccc

SEQ ID NO: 250823 - DNA, 120 bp, Artificial Sequence
  ENSG00000123388_15 (sequence is synthesized)
gtgctggggcctggatttttgtaaataaatttcccaagcgtttctttccacctggagggaaagggggggacgcccccagtgagattcaaatcacgcatctctactcctctgcgtgagtgc

SEQ ID NO: 250824 - DNA, 120 bp, Artificial Sequence
  ENSG00000123388_16 (sequence is synthesized)
gtgtgtacatgtgcactccccaccctgctcccttcccagagggattgctgtgaaatttttttggtggcaaataaagataaatttcattctgttcaatattatgattttatttgacccttt

SEQ ID NO: 250825 - DNA, 120 bp, Artificial Sequence
  ENSG00000123388_17 (sequence is synthesized)
tattaacccctctcctcttaaaatcctccatgctcccatggcagcggcggaggaggaggaggcaggcaggcagagcccagcgggtgaggacaggcaggcagaggtgagataggccggtgc

SEQ ID NO: 250826 - DNA, 120 bp, Artificial Sequence
  ENSG00000123388_18 (sequence is synthesized)
tagccggcctggagctcctctccgctggcagggccaagagtatggccgtagtctcctcacattctcaagctgaggacattccatagctactctgaagctctcctttctcacgtgcagctc

SEQ ID NO: 250827 - DNA, 120 bp, Artificial Sequence
  ENSG00000123388_19 (sequence is synthesized)
gagctgtgtccaaacgcccagcaacggctttctgtttaagtacacgtttgttgtggagttaattgtaaccatcatcgaatttaaatttataggaatttttttggctccaccgcccttctg

SEQ ID NO: 250828 - DNA, 120 bp, Artificial Sequence
  ENSG00000123388_20 (sequence is synthesized)
ccagatgtctccgtctgtcgcagttaaatgtgtagtgtggaggttagggcttttttttttttttctctaggagaaatctgtattggaatttttatacactgtttttaaggaaggagggga

SEQ ID NO: 250829 - DNA, 120 bp, Artificial Sequence
  ENSG00000123388_21 (sequence is synthesized)
cagaaggagaaaccagccccctccctctcctctccacagctcctgggggtgggaaggtggggcctggctgctttccctctggcacaaatggccaggctcttccagacacaacaagacgcc

SEQ ID NO: 250830 - DNA, 120 bp, Artificial Sequence
  ENSG00000123388_22 (sequence is synthesized)
tatactggggccaccctgatgtttatacattgggtgtcccacagtagaaagccccagaggtttgttttgtaggggttggcactggggatggagatgacctgcggggacagtcaccatacc

SEQ ID NO: 250831 - DNA, 120 bp, Artificial Sequence
  ENSG00000123388_23 (sequence is synthesized)
catctatatttgctgcatgtttcttctgtataaagataatcatggcccttgcagtgctttcagtgagggcacttcgttggtctctgtttcaaattcgttatttgggggcagaggttcagg

SEQ ID NO: 250832 - DNA, 120 bp, Artificial Sequence
  ENSG00000123388_24 (sequence is synthesized)
acaactcatctcatctttccctcctctttctgtctttgtataattcaaagaaaatatttttgtcaatacaattctgttggatgaaaggaaaaagcatcatgactatcaaatctaggttct

SEQ ID NO: 250833 - DNA, 120 bp, Artificial Sequence
  ENSG00000123388_25 (sequence is synthesized)
gtcatttttgatggtaggaatccctgcagcttaggtatctaaatttctaatttgtaaacgtgggtcgggtcgtgagacaagatttgcaaactagggtgtatatgcagcccacaattccct

SEQ ID NO: 250834 - DNA, 120 bp, Artificial Sequence
  ENSG00000123388_26 (sequence is synthesized)
catgtgcccacacacaaacgttttatttaactcggtgtgcctatgggtgcacataagaaggaatattatttatatgcttttgtctgttgcatggagtaaacctgaccacatacacatcta

SEQ ID NO: 250835 - DNA, 120 bp, Artificial Sequence
  ENSG00000123395_0 (sequence is synthesized)
gcggcttccggtcccggctcagcctccgacccaggtggtctggagcctgccgggagagtggtggcatctgagaggctggtcgtggactgtggttgggggaggtgggagctgttttaaccg

SEQ ID NO: 250836 - DNA, 120 bp, Artificial Sequence
  ENSG00000123395_1 (sequence is synthesized)
tgtgccccctctcctgtgccggcgtgggcatcccccggggcagtggaacgcgggcgctcctccagcttccgagtccagccagcctgggcgcggggcgccgcccccgagacacccgaggag

SEQ ID NO: 250837 - DNA, 120 bp, Artificial Sequence
  ENSG00000123395_2 (sequence is synthesized)
tccgttcctccctggttacgtggactgtggagctggtctcttgtggctcagcgccgtgcggaggttgaagcgtacctgcggaggtcgcaccagggcgtgaggaggaggaggaagggcatg

SEQ ID NO: 250838 - DNA, 120 bp, Artificial Sequence
  ENSG00000123395_3 (sequence is synthesized)
agccgagcttgaggaatccgtgctccaaactctacactcaagggtggcccttgggtagggtgaagatcccctgtctttatcctagttccacaccttggtgtgggttactgggtgcaggat

SEQ ID NO: 250839 - DNA, 120 bp, Artificial Sequence
  ENSG00000123395_4 (sequence is synthesized)
gaactgtcgctcggaggtgctggaggtgtcggtggaggggcggcaggtggaggaggccatgctggctgtgctgcacacggtgcttctgcaccgcagcacaggcaagttccactacaagaa

SEQ ID NO: 250840 - DNA, 120 bp, Artificial Sequence
  ENSG00000123395_5 (sequence is synthesized)
gggagttcaaggatgcactgcgcaactctggtggcgatgggctggggcagatgtccttggagttctaccagaagaagaagtctcgctggccattctcagacgagtgcatcccatgggaag

SEQ ID NO: 250841 - DNA, 120 bp, Artificial Sequence
  ENSG00000123395_6 (sequence is synthesized)
tgtggacggtcaaggtgcatgtggtagccctggccacggagcaggagcggcagatctgccgggagaaggtgggtgagaaactctgcgagaagatcatcaacatcgtggaggtgatgaatc

SEQ ID NO: 250842 - DNA, 120 bp, Artificial Sequence
  ENSG00000123395_7 (sequence is synthesized)
ggcatgagtacttgcccaagatgcccacacagtcggaggtggataacgtgtttgacacaggcttgcgggacgtgcagccctacctgtacaagatctccttccagatcactgatgccctgg

SEQ ID NO: 250843 - DNA, 120 bp, Artificial Sequence
  ENSG00000123395_8 (sequence is synthesized)
gcacctcagtcaccaccaccatgcgcaggctcatcaaagacacccttgccctctgagcgtcgctggatctctgggagctccttgatggctcccagaccttggcttttgggaattgcactt

SEQ ID NO: 250844 - DNA, 120 bp, Artificial Sequence
  ENSG00000123395_9 (sequence is synthesized)
ttgggcctttgggctctggaacctgctctgggtcattggtgagacttggaaggggcagcccccgctggcttcttggttttgtggttgccagcctcaggtcatccttttaatctttgctga

SEQ ID NO: 250845 - DNA, 120 bp, Artificial Sequence
  ENSG00000123395_10 (sequence is synthesized)
cggttcagtcctgcctctactgtctctccatagccctggtggggtcccccttctttctccactgtacagaagagccaccactgggatggggaataaagttgagaacatgagtttgggctg

SEQ ID NO: 250846 - DNA, 120 bp, Artificial Sequence
  ENSG00000123395_11 (sequence is synthesized)
tcctccctggttacgtggactgtggaggttcgcgcgtagtggcggcgggggatacgggacccgggcgggaattccttcctgcgtccgtcccgagtctcttgatatggagccaagtaagtt

SEQ ID NO: 250847 - DNA, 120 bp, Artificial Sequence
  ENSG00000123395_12 (sequence is synthesized)
atgagtgatgttgagggtcacgcagagaagcaatggccgaattactagcctccgaaggactgtcaccagattggtcaccatggggtatcaagtagtgctgctgcataaaggcaacactga

SEQ ID NO: 250848 - DNA, 120 bp, Artificial Sequence
  ENSG00000123395_13 (sequence is synthesized)
gagatgaagcccctttctccagcatctgtgtgggtggagggccagggatcccgtctgttacgcacattcaacaaactcaagttttgccatccactgggcgtcctgcagtacagcggtgtg

SEQ ID NO: 250849 - DNA, 120 bp, Artificial Sequence
  ENSG00000123395_14 (sequence is synthesized)
ggctcatctccaggacctctctctacggggtacgcccctcatcttgcggtgatcagtgttccttccagacctctcagtccggactgagttgggcaccgcgtcagcgtctcccggccaggc

SEQ ID NO: 250850 - DNA, 120 bp, Artificial Sequence
  ENSG00000123395_15 (sequence is synthesized)
agagcccgtagggctcctccttccctccagtctctatggcggaagtgagttgtacgggccgaaacaccacagcgttctcggtggtgggctgaatggactcgtccacatgagggggatctt

SEQ ID NO: 250851 - DNA, 120 bp, Artificial Sequence
  ENSG00000123395_16 (sequence is synthesized)
catcaccatcaactcttaaaatccgagacataaccacgaaaggagcagcccccagatcagagagcaacgcatgactatctgcgtgtgcttctgtgactacgcggatgttgtgggcggcta

SEQ ID NO: 250852 - DNA, 120 bp, Artificial Sequence
  ENSG00000123395_17 (sequence is synthesized)
catgcgtgcgggggcccggcgagctgggcaggtgccccctccggggccgtgggatctgctggtctcttgtggctcagcgccgtgcggaggttgaagcgtacctgcggaggtcgcaccagg

SEQ ID NO: 250853 - DNA, 120 bp, Artificial Sequence
  ENSG00000123395_18 (sequence is synthesized)
ggtgggaatgggcgcaccctgtgctccagccaggcttgagaaggcggctgttagcctctgccactcggggggacaagagggacgagactttccagaccctactctggtgggccctgcttg

SEQ ID NO: 250854 - DNA, 120 bp, Artificial Sequence
  ENSG00000123395_19 (sequence is synthesized)
ctcactgctcactgtgtggggcaggggacaacaaggttttcacagaccaaatgtggcagctgtgggaaggagaatggggttggtcaggactgacttcttggaggagtggatcctaaaata

SEQ ID NO: 250855 - DNA, 120 bp, Artificial Sequence
  ENSG00000123395_20 (sequence is synthesized)
ccagagccgggagtctctagatgggaagaaaactgctggatggagtaaaactggagggcaaaacgagcaagagagcccttctccttcttgatccaagcatgtaggagaaactaatccagc

SEQ ID NO: 250856 - DNA, 120 bp, Artificial Sequence
  ENSG00000123395_21 (sequence is synthesized)
aacccctggaagaacctggaattcctgggttgggctcaattgagcagttgttttgtagaaggtactaggaattaccattatagtgatgaatggaatatagtctctgccctataagcagaa

SEQ ID NO: 250857 - DNA, 120 bp, Artificial Sequence
  ENSG00000123395_22 (sequence is synthesized)
tataggaattgtttgcctagtggtagagacaaaaacaaaacgtgatggtgcttgatagtacaggtagacgcgagctgatcgccagctgagaggcagagctggcctgatctctgtgcggtc

SEQ ID NO: 250858 - DNA, 120 bp, Artificial Sequence
  ENSG00000123395_23 (sequence is synthesized)
cacagaccgttgccctgtatcctgtgctgagcaacagtttaaaaggggcagacacaaactgaaatatactttttatattcaccatctgtcaaccagatgagtgaaatatacttagaggag

SEQ ID NO: 250859 - DNA, 120 bp, Artificial Sequence
  ENSG00000123395_24 (sequence is synthesized)
agctgctaggattccatgcagataagatgtgatgtggaacagacatgtttttgaggactggggaccttcagcctgtagaaggggtgagggggtggtggaatagctgcccctaaataaaaa

SEQ ID NO: 250860 - DNA, 120 bp, Artificial Sequence
  ENSG00000123405_0 (sequence is synthesized)
gcatatactgtcatcatcttggaaagaaaaggctgagaacgtaaaactgaggacagaggaggaaagcagggtgacccctgatgttgccctagaaaatggaaaacaaaacacagcaaaaca

SEQ ID NO: 250861 - DNA, 120 bp, Artificial Sequence
  ENSG00000123405_1 (sequence is synthesized)
gaaaaacagaagatctgactctgcctttagccaggaaaacagtttgggggagtaaaaagtattagggaaaagagtgggcattttgcctggaaaaaaggtttctagagccatctgggcttt

SEQ ID NO: 250862 - DNA, 120 bp, Artificial Sequence
  ENSG00000123405_2 (sequence is synthesized)
ccgggaacctggaccagactctggcccagtaggatgtccccgtgtcctccccagcagagcaggaacagggtgatacagctgtccacttcagagctaggagagatggaactgacttggcag

SEQ ID NO: 250863 - DNA, 120 bp, Artificial Sequence
  ENSG00000123405_3 (sequence is synthesized)
gagatcatgtccatcaccgagctgcagggtctgaatgctccaagtgagccatcatttgagccccaagccccagctccataccttggacctccaccacccacaacttactgcccctgctca

SEQ ID NO: 250864 - DNA, 120 bp, Artificial Sequence
  ENSG00000123405_4 (sequence is synthesized)
atccacccagattctggcttcccacttcctccaccaccttatgagctcccagcatccacatcccatgtcccagatcccccatactcctatggcaacatggccataccagtctccaagcca

SEQ ID NO: 250865 - DNA, 120 bp, Artificial Sequence
  ENSG00000123405_5 (sequence is synthesized)
ctgagcctctcaggcctgctcagtgagccgctccaagaccccttagccctcctggacattgggctgccagcagggccacctaagccccaagaagacccagaatccgactcaggattatcc

SEQ ID NO: 250866 - DNA, 120 bp, Artificial Sequence
  ENSG00000123405_6 (sequence is synthesized)
ctcactcatgcccaactccttggcccactccaactataccttgccagctgctgagacccccttggccttagagccctcctcaggccctgtgcgggctaagcccactgcacggggggaggc

SEQ ID NO: 250867 - DNA, 120 bp, Artificial Sequence
  ENSG00000123405_7 (sequence is synthesized)
agggagtcgggatgaacgtcgggccttggccatgaagattccttttcctacggacaagattgtcaacttgccggtagatgactttaatgagctattggcaaggtacccgctgacagagag

SEQ ID NO: 250868 - DNA, 120 bp, Artificial Sequence
  ENSG00000123405_8 (sequence is synthesized)
ccagctagcgctagtccgggacatccgacgacggggcaaaaacaaggtggcagcccagaactgccgcaagaggaagctggaaaccattgtgcagctggagcgggagctggagcggctgac

SEQ ID NO: 250869 - DNA, 120 bp, Artificial Sequence
  ENSG00000123405_9 (sequence is synthesized)
caatgaacgggagcggcttctcagggcccgcggggaggcagaccggaccctggaggtcatgcgccaacagctgacagagctgtaccgtgacattttccagcaccttcgggatgaatcagg

SEQ ID NO: 250870 - DNA, 120 bp, Artificial Sequence
  ENSG00000123405_10 (sequence is synthesized)
caacagctactctcctgaagagtacgcgctgcaacaggctgccgatgggaccatcttccttgtgccccgggggaccaagatggaggccacagactgagctggcccagaggggtggaactg

SEQ ID NO: 250871 - DNA, 120 bp, Artificial Sequence
  ENSG00000123405_11 (sequence is synthesized)
ctgatgggatttccttcattcccttctgataaaggtactccccaaccctgagtcccagaaggagctgagttctctagaccagaagaggatgacaatggcaacaagtgtttggaagttcca

SEQ ID NO: 250872 - DNA, 120 bp, Artificial Sequence
  ENSG00000123405_12 (sequence is synthesized)
aggtgtgttcaaagaggcttgccttgagggagggctggaatctgtcttccctgactcggctcctcaggtctttagcctccaccttgtctaagctttggtctataaagtgcgctacagaaa

SEQ ID NO: 250873 - DNA, 120 bp, Artificial Sequence
  ENSG00000123405_13 (sequence is synthesized)
agacgctggtgcgcctgcttggggctcctgtgctcagctcagcctgagcttccacactcagcgctcagcaatggcccgggggcggggcgcggtcctcgcagattctcaaaggtagccggg

SEQ ID NO: 250874 - DNA, 120 bp, Artificial Sequence
  ENSG00000123405_14 (sequence is synthesized)
gaactgactgtggccatagttggcgaggtggagatcacaacacaggaaaagactttccatcttaagggattgatgaatccagcatgagtgaggatggggaggaggcggtctctccttccc

SEQ ID NO: 250875 - DNA, 120 bp, Artificial Sequence
  ENSG00000123405_15 (sequence is synthesized)
atcctcgtccagcagtgtcagctcaggctcagcctccccagagacaacaccgggagcctcatctctctcctcaccctgctgtgactccaccacaggggcagtagagatcagctggacctg

SEQ ID NO: 250876 - DNA, 120 bp, Artificial Sequence
  ENSG00000123405_16 (sequence is synthesized)
gagggagaaggaagacatcccaaccccagcatagttgcttctaactggaactcttggctgcttgggaaataggggcttgggaagcagtggaagagaagagaggaggtttctagagccatc

SEQ ID NO: 250877 - DNA, 120 bp, Artificial Sequence
  ENSG00000123405_17 (sequence is synthesized)
ggatggaggcaagggctaggggagatactctttcaaaaggatcatttgtagttcctactaattttgtggtaagtcgaagagaagattccatattaaattgctgtgatgggccatccttgt

SEQ ID NO: 250878 - DNA, 120 bp, Artificial Sequence
  ENSG00000123407_0 (sequence is synthesized)
agaagctgccggtcgggccccgcggaaatgggcgagcataatctcctgaatcccgggtttgtggggccgctggtaaacatccacacgggagacaccttctacttccccaacttccgcgcg

SEQ ID NO: 250879 - DNA, 120 bp, Artificial Sequence
  ENSG00000123407_1 (sequence is synthesized)
tccggggcgcagcttcccgggctgccttcgctgtcctacccacgccgcgacaacgtgtgctccctgtcctggccgtcggcggagccgtgcaatggctacccgcagccctacctcggcagc

SEQ ID NO: 250880 - DNA, 120 bp, Artificial Sequence
  ENSG00000123407_2 (sequence is synthesized)
ccagtgtctctcaaccctcccttcggccgcacgtgcgagctggcgcgcgtggaggacggcaagggttactaccgcgagccgtgcgccgagggtggcggcgggggcctgaagcgtgaggag

SEQ ID NO: 250881 - DNA, 80 bp, Artificial Sequence
  ENSG00000123407_3 (sequence is synthesized)
tcccgctggagccgtcggggccgcctgcgctcggcttcaagtacgactacgcggcgggcggcggcggtggcgacggcggc

SEQ ID NO: 250882 - DNA, 120 bp, Artificial Sequence
  ENSG00000123407_4 (sequence is synthesized)
ggcggcgcaggacctccgcacgacccgccctcctgccagtcgctggaatccgactccagttcgtccctgctcaacgagggcaacaagggcgccggcgcaggcgaccccggcagcttggta

SEQ ID NO: 250883 - DNA, 120 bp, Artificial Sequence
  ENSG00000123407_5 (sequence is synthesized)
tcgccgttgaaccccggcggcgggctctcggccagcggcgcgccctggtacccgatcaacagccgctctcggaagaagcgcaagccctattcgaagttgcaactggcagagctggagggc

SEQ ID NO: 250884 - DNA, 120 bp, Artificial Sequence
  ENSG00000123407_6 (sequence is synthesized)
gagtttctggtcaacgagttcatcacacgccagcgccggagggaactctcagaccgcttgaatcttagtgaccagcaggtcaagatctggtttcagaaccggagaatgaaaaagaaaaga

SEQ ID NO: 250885 - DNA, 120 bp, Artificial Sequence
  ENSG00000123407_7 (sequence is synthesized)
cttctgttgagggagcaagctctctccttcttttaaggtgcaggacacgggcgccagccccagactgagcctgtccctggcagagagcaaaagagggcgccgcctagaacacagtcccca

SEQ ID NO: 250886 - DNA, 120 bp, Artificial Sequence
  ENSG00000123407_8 (sequence is synthesized)
cttagaacgccaggcgtctctggcaggccctccctggatatcctcttgtctgttttgttcgtggttccctcccatacacacccaaaacaccctgccaggtcccagagagaagggaagaaa

SEQ ID NO: 250887 - DNA, 120 bp, Artificial Sequence
  ENSG00000123407_9 (sequence is synthesized)
cctagccagggagagcagaagccggcagctgcctgcggttggcaggggcaggaaggctgaggtgctgcgggctggtttatttgaggcaggactggggcactgcacctccgctgaggatct

SEQ ID NO: 250888 - DNA, 120 bp, Artificial Sequence
  ENSG00000123407_10 (sequence is synthesized)
ggagaagcagcggcccagatgtccccttcctctacttcccttccatggtcttaattctctttgccgtcaggagcaaagagcagggccagtggaaccaaggcacctcaacctcacagttcc

SEQ ID NO: 250889 - DNA, 120 bp, Artificial Sequence
  ENSG00000123407_11 (sequence is synthesized)
tggggttagaagaggctgggaagagagaggagggtggagggtcagcggagagagctgagggagtcaggtgtctctggtagggctggaggaagtggggaaccaaggaggaagtgtggtttg

SEQ ID NO: 250890 - DNA, 120 bp, Artificial Sequence
  ENSG00000123407_12 (sequence is synthesized)
tgagaaaatgattagcaagaaccagagtctgcttgggtctgggtcccccaggacacccagtgggcagaagcttgggcatttggctggccgggctgtggacaaggactatcagcctcatgt

SEQ ID NO: 250891 - DNA, 120 bp, Artificial Sequence
  ENSG00000123407_13 (sequence is synthesized)
ggtccccagccctctcctgatcccgctgcccgcaccgggcgaatgtctgttcataggtgtgctgccatccactcctccgttgcctgcggtggctgcaggcctgatgcagcaagcagggac

SEQ ID NO: 250892 - DNA, 120 bp, Artificial Sequence
  ENSG00000123407_14 (sequence is synthesized)
ctgagagcccaggggacacagcctcaggttcagtagccaccccagaggtccccagctggctctccagaaagaaagtgcaagaggctgtagatggggctacggagcaccacactgattggc

SEQ ID NO: 250893 - DNA, 120 bp, Artificial Sequence
  ENSG00000123407_15 (sequence is synthesized)
cgggagaatttctgacagccacagccgaggcctctgattctcccttccccgctggcgttcacggtcactgcctcacgggccggccagagggtggaccagcgtaatttacgaggcgggagg

SEQ ID NO: 250894 - DNA, 120 bp, Artificial Sequence
  ENSG00000123407_16 (sequence is synthesized)
agaattcacccttaaaggggctaccagccattgaggtcccactcagccccagtttcccaggcccgtgagaatgaaggaggggggcgctccagccccccacccaactcccttctctcttcc

SEQ ID NO: 250895 - DNA, 120 bp, Artificial Sequence
  ENSG00000123407_17 (sequence is synthesized)
tcgcccgccccccaacattgccctttgtcttcagaagggctgcctccgcctcctggcctgcaaacctccacagcctagcacatggaccagagcagagggaggggcacagccctagaaccc

SEQ ID NO: 250896 - DNA, 120 bp, Artificial Sequence
  ENSG00000123407_18 (sequence is synthesized)
attggaggtctgagaatggcttctctgagtgggaaggactttcatccagactccttcagaccccagccccagcccagtagacgctgggctggcttggaagagaggagcagtgagagaacc

SEQ ID NO: 250897 - DNA, 120 bp, Artificial Sequence
  ENSG00000123407_19 (sequence is synthesized)
atcaacctttctgtacttcatttttatccttctccccaagagtcccccagcctcccatctgctgtccggccctttccaggagcaagaggggtgagaagcagggcactgatgggagttaac

SEQ ID NO: 250898 - DNA, 120 bp, Artificial Sequence
  ENSG00000123407_20 (sequence is synthesized)
tgcagcctggacagtgtgaaactggcctgctggcttggagtgtttcccatatggggagagtctcccctaacaaactctccaaaggcaatccaccgagctttttactctcccaccagcaca

SEQ ID NO: 250899 - DNA, 120 bp, Artificial Sequence
  ENSG00000123407_21 (sequence is synthesized)
cagcttctgtacaggcagaggcaaaggcaaacacatacacacagctgagcccagcacagcactgggcccaccccactctccctagtgcactcgcaagcaggcagcctcataatccccaca

SEQ ID NO: 250900 - DNA, 120 bp, Artificial Sequence
  ENSG00000123407_22 (sequence is synthesized)
tggcccagcagaatggagataaaatcacatgcctccatcccccgctgggtatctgacacctgacaattccccatccacacatacttgcttcacccatgtacaagttcccccaaattacca

SEQ ID NO: 250901 - DNA, 120 bp, Artificial Sequence
  ENSG00000123407_23 (sequence is synthesized)
ccattccagctgtctgcagtctcctgtggtcttcccctgggcatgaagcactccccaccttgactggtcacccactgtaccccctttatgcagcccttcctgtgacctctgggctctagg

SEQ ID NO: 250902 - DNA, 120 bp, Artificial Sequence
  ENSG00000123407_24 (sequence is synthesized)
gtgctggatttgagctctaccactccagactaacctgattcccaatctaataatgaagagggaccagaacactctaaaaggagtgaggggacaaagatatgcaatattctctttccattt

SEQ ID NO: 250903 - DNA, 120 bp, Artificial Sequence
  ENSG00000123407_25 (sequence is synthesized)
gctttaaacttgacttctgtgaggttctctgtcaatctgtgtcttgttctctgtgtctgtcgctggtacctagtgtagtccctgtggatagttgcccttcccctagctgcctccccagct

SEQ ID NO: 250904 - DNA, 120 bp, Artificial Sequence
  ENSG00000123407_26 (sequence is synthesized)
ctctgtagtgtaattctcctattccaacgtctgtctttagcacgttttccctttatatagtccttgtacagagttgcttcatcatattaatattgataataataataattaaaacatgaa

SEQ ID NO: 250905 - DNA, 120 bp, Artificial Sequence
  ENSG00000123411_0 (sequence is synthesized)
cctcgcctccctctcccccaacactgtcccctctccccaacccctcacagcctgcgcgcgcgcggagacacctcagtctacatggggaggacagagaagcgcaaagaacaagagaaaaga

SEQ ID NO: 250906 - DNA, 120 bp, Artificial Sequence
  ENSG00000123411_1 (sequence is synthesized)
tgcatccatctgagatctaaaaggagacaatgagaatctctttaaaatggacatagaagactgcaatggccgctcctatgtgtctgtaggaccaatgaaggaattattggcatgcactaa

SEQ ID NO: 250907 - DNA, 120 bp, Artificial Sequence
  ENSG00000123411_2 (sequence is synthesized)
aggagatagcaagatgggtcagacacacatatgagagtcattggcaacacccgggtaatgtaaggaatccacgcttcctggaaggtgagtggctgggctcacccctgcctgccactgaga

SEQ ID NO: 250908 - DNA, 120 bp, Artificial Sequence
  ENSG00000123411_3 (sequence is synthesized)
cgcagacatgcatacaccacccgcactccctcgccgtttccaaggcggcggccgcgttcgcaccccagggtctcaccggcaagggaaggataatctggagagggatccctcaggagggtg

SEQ ID NO: 250909 - DNA, 120 bp, Artificial Sequence
  ENSG00000123411_4 (sequence is synthesized)
tgttccggatttcttgcctcaggcccaagactccaaccattttataatggaatctttattttgtgaaagtagcggggactcatctctggagaaggagttcctcggggccccagtggggcc

SEQ ID NO: 250910 - DNA, 120 bp, Artificial Sequence
  ENSG00000123411_5 (sequence is synthesized)
ctcggtgagcacccccaacagccagcactcttctcctagccgctcactcagtgccaactccatcaaggtggagatgtacagcgatgaggagtcaagcagactgctggggccagatgagcg

SEQ ID NO: 250911 - DNA, 120 bp, Artificial Sequence
  ENSG00000123411_6 (sequence is synthesized)
gctcctggaaaaggacgacagcgtgattgtggaagattcattgtctgagcccctgggctactgtgatgggagtgggccagagcctcactcccctgggggcatccggctgcccaatggcaa

SEQ ID NO: 250912 - DNA, 120 bp, Artificial Sequence
  ENSG00000123411_7 (sequence is synthesized)
gctcaagtgtgacgtctgcggcatggtctgtattggacccaacgtgctcatggtgcacaagcgcagtcacactggtgaaaggcccttccattgcaaccagtgtggtgcctccttcaccca

SEQ ID NO: 250913 - DNA, 120 bp, Artificial Sequence
  ENSG00000123411_8 (sequence is synthesized)
gaaggggaacctgctgcgccacatcaagctgcactctggggagaagccctttaaatgtcccttctgcaactatgcctgccgccggcgtgatgcactcactggtcacctccgcacacactc

SEQ ID NO: 250914 - DNA, 120 bp, Artificial Sequence
  ENSG00000123411_9 (sequence is synthesized)
agtctcctctcccacagtgggcaagccctacaagtgtaactactgtggccggagctacaaacagcagagtaccctggaggagcacaaggagcggtgccataactacctacagagtctcag

SEQ ID NO: 250915 - DNA, 120 bp, Artificial Sequence
  ENSG00000123411_10 (sequence is synthesized)
cactgaagcccaagctttggctggccaaccaggtgacgaaatacgtgacctggagatggtgccagactccatgctgcactcatcctctgagcggccaactttcatcgatcgtctggccaa

SEQ ID NO: 250916 - DNA, 120 bp, Artificial Sequence
  ENSG00000123411_11 (sequence is synthesized)
tagcctcaccaaacgcaagcgttccacaccccagaagtttgtaggcgaaaagcagatgcgcttcagcctctcagacctcccctatgatgtgaactcgggtggctatgaaaaggatgtgga

SEQ ID NO: 250917 - DNA, 120 bp, Artificial Sequence
  ENSG00000123411_12 (sequence is synthesized)
gttggtggcacaccacagcctagagcctggctttggaagttccctggcctttgtgggtgcagagcatctgcgtcccctccgccttccacccaccaattgcatctcagaactcacgcctgt

SEQ ID NO: 250918 - DNA, 120 bp, Artificial Sequence
  ENSG00000123411_13 (sequence is synthesized)
catcagctctgtctacacccagatgcagcccctccctggtcgactggagcttccaggatcccgagaagcaggtgagggacctgaggacctggctgatggaggtcccctcctctaccggcc

SEQ ID NO: 250919 - DNA, 120 bp, Artificial Sequence
  ENSG00000123411_14 (sequence is synthesized)
ccgaggccccctgactgaccctggggcatcccccagcaatggctgccaggactccacagacacagaaagcaaccacgaagatcgggttgcgggggtggtatccctccctcagggtccccc

SEQ ID NO: 250920 - DNA, 120 bp, Artificial Sequence
  ENSG00000123411_15 (sequence is synthesized)
accccagccacctcccaccattgtggtgggccggcacagtcctgcctacgccaaagaggaccccaagccacaggaggggttattgcggggcaccccaggcccctccaaggaagtgcttcg

SEQ ID NO: 250921 - DNA, 120 bp, Artificial Sequence
  ENSG00000123411_16 (sequence is synthesized)
ggtggtgggcgagagtggtgagcctgtgaaggccttcaagtgtgagcactgccgtatcctcttcctggaccacgtcatgttcactatccacatgggctgccatggcttcagagacccttt

SEQ ID NO: 250922 - DNA, 120 bp, Artificial Sequence
  ENSG00000123411_17 (sequence is synthesized)
tgagtgcaacatctgtggttatcacagccaggaccggtacgaattctcttcccacattgtccggggggagcataaggtgggctagcaacctctccctctctcctcagtccaccactccac

SEQ ID NO: 250923 - DNA, 120 bp, Artificial Sequence
  ENSG00000123411_18 (sequence is synthesized)
tgccctgactacaggcattgatccctgtccccaccatttcccaaggagttttgctttgtagccctcactactggccacctgacctcacacctgaccctgacccctcctcacctattctct

SEQ ID NO: 250924 - DNA, 120 bp, Artificial Sequence
  ENSG00000123411_19 (sequence is synthesized)
tcctctatcctgaccgatgtaagcattgtgatgaaacagatcttttgcttatgtttttcctttttatcttctctcatcccagcatactgagttatttattaattagttgatttatttttg

SEQ ID NO: 250925 - DNA, 120 bp, Artificial Sequence
  ENSG00000123411_20 (sequence is synthesized)
cctttttaaattttaacttatatcagtcacttgccactcccccaccctcctgtccacaactcctttccactttaggccaatttttctctcttagatcttccagcagccccaggggtagga

SEQ ID NO: 250926 - DNA, 120 bp, Artificial Sequence
  ENSG00000123411_21 (sequence is synthesized)
ttcagttttgatgctgatacctgcccccggccctaccttagctctgtggcattatatctcctctctgggactcttcaacctggtactccatacctcttgtgccctctcactttaggcagc

SEQ ID NO: 250927 - DNA, 120 bp, Artificial Sequence
  ENSG00000123411_22 (sequence is synthesized)
ttgcactattcttgaatgaatgaagaattatttcctcatttggaagtaggagggactgaagaaattctccccaggcactgtgggactgagagtcctattcccctagtaataggtcatatt

SEQ ID NO: 250928 - DNA, 120 bp, Artificial Sequence
  ENSG00000123411_23 (sequence is synthesized)
cccctagtaatatgagttctcaaagcctacattcaggatctccctctaggatgtgatagatctggtccctctccttgaactacccctccacacgctctagtcccttcaacctaccggtct

SEQ ID NO: 250929 - DNA, 120 bp, Artificial Sequence
  ENSG00000123411_24 (sequence is synthesized)
attaagtggtggcttttctctccttggagtgccccaattttatattctcaggggccaaggctaggtctgcaaccctctgtctctgacagattgggagccacaggtgcctaattgggaacc

SEQ ID NO: 250930 - DNA, 120 bp, Artificial Sequence
  ENSG00000123411_25 (sequence is synthesized)
agggcatgggaaaggagtgggtcaaaattcttctctttctcctccacctctcaaacttcttcactatagtgaccttcctaggctctcaggggctccttcagtccccatcctatgagaaac

SEQ ID NO: 250931 - DNA, 120 bp, Artificial Sequence
  ENSG00000123411_26 (sequence is synthesized)
tagtgggttgctgcctgatgacaaggggttgtttcagcccctcagtcatgctgccttctgctgctccctcccagcaggattcaccctctcattcccgggctcctgggccctgttcttagg

SEQ ID NO: 250932 - DNA, 120 bp, Artificial Sequence
  ENSG00000123411_27 (sequence is synthesized)
atcagtggcagggagaaacgggtatctcttttctctcttctaattttcagtataaccaaaaattatcccagcatgagcacgggcacgtgcccttcaccccattccacccttgttccagca

SEQ ID NO: 250933 - DNA, 120 bp, Artificial Sequence
  ENSG00000123411_28 (sequence is synthesized)
agactgggatgggtacaactgaactggggtcttcctttactacccccttctacactcagctcccagacacagggtaggaggggggactgctggctactgcagagacccttggctatttga

SEQ ID NO: 250934 - DNA, 120 bp, Artificial Sequence
  ENSG00000123411_29 (sequence is synthesized)
gtaacctaggattagtgagaaggggcagaaggagatacaactccactgcaagtggaggtttctttctacaagagttttctgcccaaggccacagccatcccactctctgcttccttgaga

SEQ ID NO: 250935 - DNA, 120 bp, Artificial Sequence
  ENSG00000123411_30 (sequence is synthesized)
ttcaaaccaaaggctgtttttctatgtttaaagaaaaaaaaaagtaaaaaccaaacacaacacctcacaagttgtaactcttggtccttctctctctccttttctcttcccttccttccc

SEQ ID NO: 250936 - DNA, 120 bp, Artificial Sequence
  ENSG00000123411_31 (sequence is synthesized)
cttccatctttctttccacatgtcctttccttattggctcttttacctcctacttttctcactccctatcagggatattttggggggggatggtaaagggtgggctaaggaacagaccct

SEQ ID NO: 250937 - DNA, 120 bp, Artificial Sequence
  ENSG00000123411_32 (sequence is synthesized)
gggattagggccttaagggctctgagaggagtctaccttgccttcttatgggaagggagaccctaaaaaactttctcctctttgtcctcctttttctcccccactctgaggtttccccaa

SEQ ID NO: 250938 - DNA, 120 bp, Artificial Sequence
  ENSG00000123411_33 (sequence is synthesized)
gagaaccagattggcagggagaagcattgtggggcaattgttcctccttgacaatgtagcaataaatagatgctgccaagggcagaaaatggggaggttagctcagagcagagtagtctc

SEQ ID NO: 250939 - DNA, 120 bp, Artificial Sequence
  ENSG00000123411_34 (sequence is synthesized)
tagagaaaggaagaatcctcaacggcaccctggggtgctagctcctttttagaatgtcagcagagctgagattaatatctgggcttttcctgaactattctggttattgagcccttcctg

SEQ ID NO: 250940 - DNA, 120 bp, Artificial Sequence
  ENSG00000123411_35 (sequence is synthesized)
ttagacctaccgcctcccacctcttctgtgtctgctgtgtatttggtgacacttcataaggactagtcccttctggggtatcagagccttagggtgcccccatccccttccccagtcaac

SEQ ID NO: 250941 - DNA, 120 bp, Artificial Sequence
  ENSG00000123411_36 (sequence is synthesized)
tgtggcacctgtaacctcccggaacatgaaggactatgctctgaggctatactctgtgcccatgagagcagagactggaagggcaagaccaggtgctaaggaggggagagggggcatcct

SEQ ID NO: 250942 - DNA, 120 bp, Artificial Sequence
  ENSG00000123411_37 (sequence is synthesized)
gtctctctccagaccatcactgcactttaaccagggtcttaggtacaaaatcctacttttcagagccttccagctctggaacctcaaacatcctcatgctctctcccagctccttttgca

SEQ ID NO: 250943 - DNA, 120 bp, Artificial Sequence
  ENSG00000123411_38 (sequence is synthesized)
aaagtaaagaaaaagaaaaaaaaatacacacacactgaaacccacatggagaaaagaggtgtttccttttatattgctattcaaaatcaataccaccaacaaaatatttctaagtagaca

SEQ ID NO: 250944 - DNA, 120 bp, Artificial Sequence
  ENSG00000123411_39 (sequence is synthesized)
agtagacacttttccagacctttgtttttttgtgtcagtgtccaagctgcagataggattttgtaatacttctggcagcttctttccttgtgtacataatatatatatatacatatatat

SEQ ID NO: 250945 - DNA, 120 bp, Artificial Sequence
  ENSG00000123411_40 (sequence is synthesized)
atatatttttaatcagaagttatgaagaacaaaaagaaaaaataaacacagaagcaagtgcaataccacctctcttctccctctctcctagggtttcctttgtagcctatgtttggtgtc

SEQ ID NO: 250946 - DNA, 120 bp, Artificial Sequence
  ENSG00000123411_41 (sequence is synthesized)
tcttttgacctttaccccttcacctcctcctctcttcttctgattcccctcccccccttttttaaagagtttttctcctttctcaaggggagttaaactagcttttgagacttattgcaa

SEQ ID NO: 250947 - DNA, 120 bp, Artificial Sequence
  ENSG00000123411_42 (sequence is synthesized)
agcattttgtatatgtaatatattgtaagtaaatatttgtgtaacggagatatactactgtaagttttgtactgtactggctgaaagtctgttataaataaacatgagtaatttaacacc

SEQ ID NO: 250948 - DNA, 120 bp, Artificial Sequence
  ENSG00000123411_43 (sequence is synthesized)
acactcttgcctctctcaggcatttgttgtgcagttcctctttgtctgctgggcacgaggggcaacagcatctgcctttccctccctgtgcacacacccaccacccacccccttcactgt

SEQ ID NO: 250949 - DNA, 120 bp, Artificial Sequence
  ENSG00000123411_44 (sequence is synthesized)
cttggaaaagggatgctgtagcctagcatctcccccactatatacacatatacattctctccagccccctccccaagcacatccaagcgtgctctcccctctccttctctccctctctct

SEQ ID NO: 250950 - DNA, 120 bp, Artificial Sequence
  ENSG00000123411_45 (sequence is synthesized)
ctctcacacacacacacacacacacactcaacacacatacaccctgggctgagctgctcttgctggctgcagccgtgggcctctgctcaccgtgccgctgctgctgcctgcgaaatgacg

SEQ ID NO: 250951 - DNA, 120 bp, Artificial Sequence
  ENSG00000123411_46 (sequence is synthesized)
ggaccaatgaaggaattattggcatgcactaaaggagatagcaagatgggtcagacacacatatgagagtcattggcaacacccgggtaatgtaagatcctgaaccggctgggggctcca

SEQ ID NO: 250952 - DNA, 120 bp, Artificial Sequence
  ENSG00000123411_47 (sequence is synthesized)
gagaggaacagtagggaagaatgtctgtcctgaacatctgtcccttctgcagcccccattttcctctccgccctggcgcacccagcctcagccctgcttcctgtggacgtcaggcagtga

SEQ ID NO: 250953 - DNA, 120 bp, Artificial Sequence
  ENSG00000123411_48 (sequence is synthesized)
caggcctagataaaggtagggtaggcaaggcccagccactgagctcacagaaggcagcaccaggcatccagactggcgggggcacaaggtagcggggactcatctctggagaaggagttc

SEQ ID NO: 250954 - DNA, 120 bp, Artificial Sequence
  ENSG00000123411_49 (sequence is synthesized)
tttaaaagattaggcaatggacagtagatatctccagctccagctttacctgccctcttgttctctcctccaaggtagcggggactcatctctggagaaggagttcctcggggccccagt

SEQ ID NO: 250955 - DNA, 120 bp, Artificial Sequence
  ENSG00000123411_50 (sequence is synthesized)
ctctcccccaacactgtcccctctccccaacccctcacagcctgcgcgcgcgcggagacacctcagaatctctttaaaatggacatagaagactgcaatggccgctcctatgtgtctggt

SEQ ID NO: 250956 - DNA, 120 bp, Artificial Sequence
  ENSG00000123411_51 (sequence is synthesized)
tggccattcctaggatgacctgggaatttatcccctctgcactgctccccaagcacttggataatgaagctgagctgtcttcaactgtattatatgtagacagaaggtcaccatctacag

SEQ ID NO: 250957 - DNA, 120 bp, Artificial Sequence
  ENSG00000123411_52 (sequence is synthesized)
taaaactcaaattgaatttccctgctctactttctccacccctgccaaacataccactgaacagcagtgattttgtgaggcctttctataaacagagagctatacttgggggtacaccca

SEQ ID NO: 250958 - DNA, 120 bp, Artificial Sequence
  ENSG00000123411_53 (sequence is synthesized)
aaaaccccaaaaagtatcatctcctatgtatcatatctagtgatttaaagtgtttagtttggcccttttccttagttccttatgtcctgaaatgagacatgggagggataggatcgtttc

SEQ ID NO: 250959 - DNA, 120 bp, Artificial Sequence
  ENSG00000123411_54 (sequence is synthesized)
aagcaacaatttggccatcttgaacaaacccaccaccagtctgaagccacatgccctaggattcccttgcccccataactgcacattatccttcatcatcaaatattgttcatctgtccg

SEQ ID NO: 250960 - DNA, 120 bp, Artificial Sequence
  ENSG00000123411_55 (sequence is synthesized)
cggttgcagttgaagttgggaaatgaaagacaagtagaagaactcaatttagcaacatcctttccttcccatgccagtgtatacttgctcttggctgaatctgcagagccagggcacagc

SEQ ID NO: 250961 - DNA, 120 bp, Artificial Sequence
  ENSG00000123415_0 (sequence is synthesized)
aaacgggatggggagctggaccagcagattatgagcttacagaaagcctggcctacattttactctttttggatttcttcctcatcaagagactgctgcagtgcctgtcatgtgacagcg

SEQ ID NO: 250962 - DNA, 120 bp, Artificial Sequence
  ENSG00000123415_1 (sequence is synthesized)
gcatggacatatgccccaggctttcctgctggggtccatccatgagcctgcaggtgccctcatggagccccagccctgccctggaagcttggctgagagcttcctggaggaggagcttcg

SEQ ID NO: 250963 - DNA, 120 bp, Artificial Sequence
  ENSG00000123415_2 (sequence is synthesized)
gctcaatgctgagctgagccagctgcagttttcggagcctgtgggcatcatctacaatcccgtggagtatgcatgggagccacatcgcaactacgtgactcgctactgccagggccccaa

SEQ ID NO: 250964 - DNA, 120 bp, Artificial Sequence
  ENSG00000123415_3 (sequence is synthesized)
ggaagtactcttcctgggcatgaaccctggaccttttggcatggcccagactggggtgccctttggggaagtaagcatggtccgggactggttgggcattgtggggcctgtgctgacccc

SEQ ID NO: 250965 - DNA, 120 bp, Artificial Sequence
  ENSG00000123415_4 (sequence is synthesized)
tccccaagagcatcctaaacgaccagtgctgggactggagtgcccacagtcagaagtgagtggtgcccgattctggggctttttccggaacctctgtggacagcctgaggtcttcttcca

SEQ ID NO: 250966 - DNA, 120 bp, Artificial Sequence
  ENSG00000123415_5 (sequence is synthesized)
tcactgttttgtccacaatctatgccctctgcttttcctggctcccagcgggcgcaaccttactcctgctgagctgcctgccaagcagcgagaacagcttcttgggatctgtgatgcagc

SEQ ID NO: 250967 - DNA, 120 bp, Artificial Sequence
  ENSG00000123415_6 (sequence is synthesized)
aggtgcagctgctgggggtgcggctggtggtgggagttgggcgactggcagagcagcgggcacgacgggctctggcaggcctgatgccagaggtccaggtggaagggctcctgcatccct

SEQ ID NO: 250968 - DNA, 120 bp, Artificial Sequence
  ENSG00000123415_7 (sequence is synthesized)
ctccccgtaacccacaggccaacaagggctgggaggcagtggccaaggaaagattgaatgagctggggctgctgccactgctgttgaaatgagtgcccttggggccttgcatgggacaca

SEQ ID NO: 250969 - DNA, 120 bp, Artificial Sequence
  ENSG00000123415_8 (sequence is synthesized)
ttcaagacctcgaagtcattcttggccaagcagatgacaacacatctcctggactggagcaaaaggtccttctgtgcaccctggtcgctgggaaacgtattctttgatctgttgaactgt

SEQ ID NO: 250970 - DNA, 120 bp, Artificial Sequence
  ENSG00000123415_9 (sequence is synthesized)
cttccaacctgccatggcagttttgacactactcctgtttgccctcctgattcctgctttctttaccttttaacattgcccctttcaggggaccccactttgtagggaatctgcagaagg

SEQ ID NO: 250971 - DNA, 120 bp, Artificial Sequence
  ENSG00000123415_10 (sequence is synthesized)
tgtgcttttgcacttgcagactgctctacctcagtgtttccttgggagactttattcagctgagagtgccctagacagtaacttctaaggtcacgtttactatttcagaggaaatatctt

SEQ ID NO: 250972 - DNA, 120 bp, Artificial Sequence
  ENSG00000123415_11 (sequence is synthesized)
gccaggatacctacccatccttatagaacagttacctttagctgacccctttcctcacagggaccaagacaaagcatgggacatgaaattaagagtgaacttcttatgggaggctgcagc

SEQ ID NO: 250973 - DNA, 120 bp, Artificial Sequence
  ENSG00000123415_12 (sequence is synthesized)
tggatcagaggaaaaatccagtgtgacagagtgcaagtcagaagacctggcttttcatcccagctttgaaacttggaactttttgattgacaaattaataaacctctctatgcctcaggc

SEQ ID NO: 250974 - DNA, 120 bp, Artificial Sequence
  ENSG00000123415_13 (sequence is synthesized)
gccttgcatgggcttggcatgtgggtgctcattacatagtcttcttgttttcttgcctctgggttgaggattcacagcactgcactacaagggtagcccctctccattctggataccttg

SEQ ID NO: 250975 - DNA, 120 bp, Artificial Sequence
  ENSG00000123415_14 (sequence is synthesized)
tttattgaaaacctactatgtgctcggcatagcccaggaactagtgacctatgcctgatggaaaggagatttggagtgggagatgtttggtggctatggcttatcctcaccaggtgccat

SEQ ID NO: 250976 - DNA, 120 bp, Artificial Sequence
  ENSG00000123415_15 (sequence is synthesized)
gtgaagaggacagataatggaagtggggagggaaagggcccttcattaccaagaactgagatgagttcagtcctacttggtggttggtagatgactgacatggtctcttagggtcccttc

SEQ ID NO: 250977 - DNA, 120 bp, Artificial Sequence
  ENSG00000123415_16 (sequence is synthesized)
ctggagtgcccacagtcagaagccaacaagggctgggaggcagtggccaaggaaagattgaatgagctggggctgctgccactgctgttgaaatgagtgcccttggggccttgcatggga

SEQ ID NO: 250978 - DNA, 64 bp, Artificial Sequence
  ENSG00000123415_17 (sequence is synthesized)
cctcaagcaattctcagaaggtagttttaaacaaaagtgaaaaagaagatggacattgctgagc

SEQ ID NO: 250979 - DNA, 120 bp, Artificial Sequence
  ENSG00000123415_18 (sequence is synthesized)
ggaccaggtgaggaagtagggggctgggaatccgggactgtgggggcaagttgacggctcccagggtcgtcggggctgagccgagagggtggttagaatttctatattttggggtccctc

SEQ ID NO: 250980 - DNA, 120 bp, Artificial Sequence
  ENSG00000123415_19 (sequence is synthesized)
gagccagcgggcgcccccggaggttttgtatggtgccttagtagtcggcccctttggaaccagatgaaatgcagattatgagcttacagaaagcctggcctacattttactctttttgga

SEQ ID NO: 250981 - DNA, 120 bp, Artificial Sequence
  ENSG00000123415_20 (sequence is synthesized)
tttcttcctcatcaagagactgctgcagtgcctgtcatgctagggtgagaaaataggtttatcgagctgttgtgtcaaccttgagttcttatcttggagaagtcactcctgacccaggca

SEQ ID NO: 250982 - DNA, 120 bp, Artificial Sequence
  ENSG00000123415_21 (sequence is synthesized)
agtgcccacagtcagaaaaaattcttgctgctgtattgagaacagattgagaaaacaagggcagaagcagggagaccagtcaggagctgattgcagtatcaggctggtctggaactcctg

SEQ ID NO: 250983 - DNA, 120 bp, Artificial Sequence
  ENSG00000123415_22 (sequence is synthesized)
ggctgaagctatcctcttgccttggcctccctaaatgttggaattacagacatgggccactacacctggcgatctgtgtcttatacgccactgtcctgtcttcatgcggatgaaggggga

SEQ ID NO: 250984 - DNA, 120 bp, Artificial Sequence
  ENSG00000123415_23 (sequence is synthesized)
ggtaaagggtttggcttccccagtgggtggagtggggggttctaggtggatgcttggctgggtgtgctgtggagaaggagcatgtgcatggctgtagacatgtgtaggtcctcccgcccc

SEQ ID NO: 250985 - DNA, 120 bp, Artificial Sequence
  ENSG00000123415_24 (sequence is synthesized)
attctgtctcaacacatatactggctcctgtggtccgaggccctctcccagcgtctctgcccgtaattaaccaagcacattaatggtagtttcgttttccctgtgagctggccagtaatt

SEQ ID NO: 250986 - DNA, 120 bp, Artificial Sequence
  ENSG00000123415_25 (sequence is synthesized)
tcaggcctttgggtgaaggtaggggtagggggtgcaggctggatcctcatgtaaggtataaagaagtcagttggtccagagcccgggcctcaggtctccagtttgaagcctttcatgtct

SEQ ID NO: 250987 - DNA, 120 bp, Artificial Sequence
  ENSG00000123415_26 (sequence is synthesized)
ccccaagagcatcctaaacgaccagtgctgggactggagtgcccacagtcagaagaggatatagggcagctgtttcctcttcttccctggtgccccagagaagtaaagaacttcaactgg

SEQ ID NO: 250988 - DNA, 120 bp, Artificial Sequence
  ENSG00000123415_27 (sequence is synthesized)
agcatgagacattgaggttagacacatggataaacttcccagctgtgaccatcaggcgccccaacatatggagctgcagtttagcagatgctacgtggcatacagatttccggaaaattc

SEQ ID NO: 250989 - DNA, 120 bp, Artificial Sequence
  ENSG00000123415_28 (sequence is synthesized)
gaagacaaagcaaaggtatgaaaggaacacacgtccctgactgactaggaggaacagagctgcctgctgtctggaaccgcttcctcccagactaagtgagaaataaacttctgttttcta

SEQ ID NO: 250990 - DNA, 120 bp, Artificial Sequence
  ENSG00000123415_29 (sequence is synthesized)
ggggtcagaagagggactaggactgctgggtcctcagaagagactggttgacaggggtgggtatgtaagagatgcagggcgttctgggaacctgggttctgtttcctagctaaggcgagg

SEQ ID NO: 250991 - DNA, 120 bp, Artificial Sequence
  ENSG00000123415_30 (sequence is synthesized)
ttcaaaacagagcctggctccagtgcctgcccgcttttctttcagggctcaggatgagtgactgcccccagtgggggtgcttggcaggtgggggaggggaagaggcttcagggcagaagg

SEQ ID NO: 250992 - DNA, 120 bp, Artificial Sequence
  ENSG00000123415_31 (sequence is synthesized)
ctcaatcgcttttattgaccccaactgggtgatgaaaggtgatcaatgatgatcgatggaaatgacagcctgaggcttggggctgagagggcatccagacagcagtggtcagcccatcct

SEQ ID NO: 250993 - DNA, 120 bp, Artificial Sequence
  ENSG00000123415_32 (sequence is synthesized)
tgtgcctcctttaaccctggctgcctttctgtctcagaccatctgtctgtccccagtactaaccatcaaaccctgtgtagggctagatatctcaatgtagtccctgtacttagtcccaaa

SEQ ID NO: 250994 - DNA, 120 bp, Artificial Sequence
  ENSG00000123415_33 (sequence is synthesized)
cttgcgctgcctgtctgtggcttctgccatctgtcagcttttgcttttctcgctgctgtttctgcctctgactttgaccccttgttctggccgatgctgcctccacttctctctgtatca

SEQ ID NO: 250995 - DNA, 120 bp, Artificial Sequence
  ENSG00000123415_34 (sequence is synthesized)
ccgtatcatcacagcttctggctgtctttgctcccgtcttcttgtctctggccttctgcatccttccaccttcaaacccttcccttcaagccgccttgccttctccccatgacttagaga

SEQ ID NO: 250996 - DNA, 120 bp, Artificial Sequence
  ENSG00000123415_35 (sequence is synthesized)
ccccaccacaccaggctgtccgctgagtcctcagcctttctccacctgtgtgcccgtggggaaggcctgcagactgggaacagctagaaagggccgaggaggaaaggaagggaagctaag

SEQ ID NO: 250997 - DNA, 120 bp, Artificial Sequence
  ENSG00000123415_36 (sequence is synthesized)
ttaagaagagtgggagcaggtggtgggcttaccctggctgggcctaggcccagcgggagacgggaggaatacatatgtggcgccccaacatatggagctgcagtttagcagatgctacgt

SEQ ID NO: 250998 - DNA, 120 bp, Artificial Sequence
  ENSG00000123415_37 (sequence is synthesized)
ggcgtgctgtgtcgggggcaggtagggctgcaggaagaactccagctcgctcagctgcttcgagaagagaagcccgtatgcaggcagccagcccctgcctctacctcccacggttcacag

SEQ ID NO: 250999 - DNA, 120 bp, Artificial Sequence
  ENSG00000123415_38 (sequence is synthesized)
tcggcccctttggaaccagatgaaatggtctttttgagtttatgctttattattattattgtttatttatttatttttctgagacggaattttgctctgaattccaggctggagtgcaat

SEQ ID NO: 251000 - DNA, 120 bp, Artificial Sequence
  ENSG00000123415_39 (sequence is synthesized)
tatgaaaaaactagcctgtgattttttttcactctaagcattaagagctcctaaagccttttgtcttgttacttttttccccctcttgcatgctagaggtggaaggtagtcatttagatt

SEQ ID NO: 251001 - DNA, 120 bp, Artificial Sequence
  ENSG00000123415_40 (sequence is synthesized)
aggtggaaggtagtcatttagatttcccccctcttccctcttcattgttggccaggggttctcttgggcagctgggggaaggatgtagtagatctctcttttttttttttttttgagatg

SEQ ID NO: 251002 - DNA, 60 bp, Artificial Sequence
  ENSG00000123415_41 (sequence is synthesized)
actgcctggctggatgtagcagatctccaattgccttaccaaacctgcagggtctctgtt

SEQ ID NO: 251003 - DNA, 120 bp, Artificial Sequence
  ENSG00000123415_42 (sequence is synthesized)
agatctccaattgccttaccaaacctgcagggtctctgttaagtgtctgttaggggtcttatatgatactctggacaccgtgagaaacaggtgatggggcagatgggaacctggtatcca

SEQ ID NO: 251004 - DNA, 120 bp, Artificial Sequence
  ENSG00000123415_43 (sequence is synthesized)
actcattttttatgtctgctgaatggttgactgggtgcccctttggtaagggctgggaaagtgaaccaagttgggagcagagcaggtcttgagaccaccttaatgaggaacacatggtct

SEQ ID NO: 251005 - DNA, 120 bp, Artificial Sequence
  ENSG00000123415_44 (sequence is synthesized)
acttcctatctcctgggacacaggtcatttccagcttccagaattagtaagatttttcatataaatcctcccctacttcattgtataataaagaatttggcctttgtcttcagttcctga

SEQ ID NO: 251006 - DNA, 120 bp, Artificial Sequence
  ENSG00000123416_0 (sequence is synthesized)
agtgcgttacttacctcgactcttagcttgtcggggacggtaaccgggacccggtgtctgctcctgtcgccttcgcctcctaatccctagccactatgcgtgagtgcatctccatccacg

SEQ ID NO: 251007 - DNA, 120 bp, Artificial Sequence
  ENSG00000123416_1 (sequence is synthesized)
ttggccaggctggtgtccagattggcaatgcctgctgggagctctactgcctggaacacggcatccagcccgatggccagatgccaagtgacaagaccattgggggaggagatgactcct

SEQ ID NO: 251008 - DNA, 120 bp, Artificial Sequence
  ENSG00000123416_2 (sequence is synthesized)
tcaacaccttcttcagtgagacgggcgctggcaagcacgtgccccgggctgtgtttgtagacttggaacccacagtcattgatgaagttcgcactggcacctaccgccagctcttccacc

SEQ ID NO: 251009 - DNA, 120 bp, Artificial Sequence
  ENSG00000123416_3 (sequence is synthesized)
ctgagcagctcatcacaggcaaggaagatgctgccaataactatgcccgagggcactacaccattggcaaggagatcattgaccttgtgttggaccgaattcgcaagctggctgaccagt

SEQ ID NO: 251010 - DNA, 120 bp, Artificial Sequence
  ENSG00000123416_4 (sequence is synthesized)
gcaccggtcttcagggcttcttggttttccacagctttggtgggggaactggttctgggttcacctccctgctcatggaacgtctctcagttgattatggcaagaagtccaagctggagt

SEQ ID NO: 251011 - DNA, 120 bp, Artificial Sequence
  ENSG00000123416_5 (sequence is synthesized)
tctccatttacccagcaccccaggtttccacagctgtagttgagccctacaactccatcctcaccacccacaccaccctggagcactctgattgtgccttcatggtagacaatgaggcca

SEQ ID NO: 251012 - DNA, 120 bp, Artificial Sequence
  ENSG00000123416_6 (sequence is synthesized)
tagccagattgtgtcctccatcactgcttccctgagatttgatggagccctgaatgttgacctgacagaattccagaccaacctggtgccctacccccgcatccacttccctctggccac

SEQ ID NO: 251013 - DNA, 120 bp, Artificial Sequence
  ENSG00000123416_7 (sequence is synthesized)
atatgcccctgtcatctctgctgagaaagcctaccatgaacagctttctgtagcagagatcaccaatgcttgctttgagccagccaaccagatggtgaaatgtgaccctcgccatggtaa

SEQ ID NO: 251014 - DNA, 120 bp, Artificial Sequence
  ENSG00000123416_8 (sequence is synthesized)
atacatggcttgctgcctgttgtaccgtggtgacgtggttcccaaagatgtcaatgctgccattgccaccatcaaaaccaagcgcagcatccagtttgtggattggtgccccactggctt

SEQ ID NO: 251015 - DNA, 120 bp, Artificial Sequence
  ENSG00000123416_9 (sequence is synthesized)
caaggttggcatcaactaccagcctcccactgtggtgcctggtggagacctggccaaggtacagagagctgtgtgcatgctgagcaacaccacagccattgctgaggcctgggctcgcct

SEQ ID NO: 251016 - DNA, 120 bp, Artificial Sequence
  ENSG00000123416_10 (sequence is synthesized)
ggaccacaagtttgacctgatgtatgccaagcgtgcctttgttcactggtacgtgggtgaggggatggaggaaggcgagttttcagaggcccgtgaagatatggctgcccttgagaagga

SEQ ID NO: 251017 - DNA, 120 bp, Artificial Sequence
  ENSG00000123416_11 (sequence is synthesized)
ttatgaggaggttggtgtggattctgttgaaggagagggtgaggaagaaggagaggaatactaattatccattccttttggccctgcagcatgtcatgctcccagaatttcagcttcagc

SEQ ID NO: 251018 - DNA, 120 bp, Artificial Sequence
  ENSG00000123416_12 (sequence is synthesized)
ttaactgacagacgttaaagctttctggttagattgttttcacttggtgatcatgtcttttccatgtgtacctgtaatatttttccatcatatctcaaagtaaagtcattaacatcaaaa

SEQ ID NO: 251019 - DNA, 120 bp, Artificial Sequence
  ENSG00000123416_13 (sequence is synthesized)
agtgcgttacttacctcgactcttagcttgtcggggacggtaaccgggacccggtgtctgctcctgtcgccttcgcctcctaatccctagccactatggtgagtaagccgtgcggctccc

SEQ ID NO: 251020 - DNA, 120 bp, Artificial Sequence
  ENSG00000123416_14 (sequence is synthesized)
ggctgctttcagggaagcagggaaaagcgagccggcggggcgctggggccctgtatacagccgggaagggctggcctcagagccgtccgtttggagggcggaaaacgaggcgagaggcca

SEQ ID NO: 251021 - DNA, 120 bp, Artificial Sequence
  ENSG00000123416_15 (sequence is synthesized)
gggcgggagtggtgagacctcggtgtgtgtaaatagcgggggcccggaaaggtcgaggggcgccaggatttcttctcggactctggaagggatggggggctcgggctgccctccgccgta

SEQ ID NO: 251022 - DNA, 120 bp, Artificial Sequence
  ENSG00000123416_16 (sequence is synthesized)
tccggagctctcttttgtcgcgtaactgtgtcctgggtgcggtccctcgagtccccgcagtcctttccagcgcatgcccttactccgccttgggtggacgcgcgcgcggactcttccagc

SEQ ID NO: 251023 - DNA, 120 bp, Artificial Sequence
  ENSG00000123416_17 (sequence is synthesized)
cctcacttcctcttgagcgcgaaaagcgggggtgggaagcagctggagacaaaagcgcgcacgcgcgaccgttaccttcccgccgctcctgggcgggaaaccgccactgcgctttgcgca

SEQ ID NO: 251024 - DNA, 120 bp, Artificial Sequence
  ENSG00000123416_18 (sequence is synthesized)
tgcgctctgggtcgcgacgcgactagggctacagggcgtgtctcctgttaacctgagtgttctttttttgatgaaagcaataagaggactgcggaagagctccctgtcaatgtaccgctc

SEQ ID NO: 251025 - DNA, 120 bp, Artificial Sequence
  ENSG00000123416_19 (sequence is synthesized)
tacaccagtgtattacgacagttcgtacacaacagtctgtagaggccacctgtctctccctgctgcgttaggaattcaggggagcaggtggtggcagtaagggattttgagggaacggaa

SEQ ID NO: 251026 - DNA, 120 bp, Artificial Sequence
  ENSG00000123416_20 (sequence is synthesized)
atcggatcttgacccagatctgggccgccgataatctcctactgcgctcagactgctgtggaggtgttaggctgagcccgatgccggcaggcaagggaggatgggcggcttgggcagcgc

SEQ ID NO: 251027 - DNA, 120 bp, Artificial Sequence
  ENSG00000123416_21 (sequence is synthesized)
ctttgcagacgtggccatttcgtgcctctgcagcaccgccggggggcgcaagagcgcgcgcccggaattgctcattcatcctgtgccgcagagccccgccccttgtccctgcggacagac

SEQ ID NO: 251028 - DNA, 120 bp, Artificial Sequence
  ENSG00000123416_22 (sequence is synthesized)
atttcttctgcgctggtctggccacgtgcttcctgtgctaggagctgcccggaaatgtgaccacctagtctaaagtgggcttctggggcctgagcgctggatggatgcccaccttcctgt

SEQ ID NO: 251029 - DNA, 120 bp, Artificial Sequence
  ENSG00000123416_23 (sequence is synthesized)
cttggtcctccaaaggaggaagctgtgactgagctgtcttggtctggaaggaggccttcccggtttaggatgggaaggtaacattcattaaaagcaacgtagactatagtgtagctgttc

SEQ ID NO: 251030 - DNA, 120 bp, Artificial Sequence
  ENSG00000123416_24 (sequence is synthesized)
tcaaaagtagtacatcttagaaaaggatctttagaaaagatcgctttagaaaaggaaattcgttttcagattacgtgagtagcctaggtaacacagccagacctcatctccacaaaaaaa

SEQ ID NO: 251031 - DNA, 120 bp, Artificial Sequence
  ENSG00000123416_25 (sequence is synthesized)
atgaaaaaattagccagcttggtggtctgtgcctgtggtcccagctgctccagaggctgaggtggggggatgactggagcctaggctgcagtgagcctagatggcatcactgcactcaag

SEQ ID NO: 251032 - DNA, 120 bp, Artificial Sequence
  ENSG00000123416_26 (sequence is synthesized)
agtgcgttacttacctcgactcttagcttgtcggggacggtaaccgggacccggtgtctgctcctgtcgccttcgcctcctaatccctagccactatgcaccgccggggggcgcaagagc

SEQ ID NO: 251033 - DNA, 120 bp, Artificial Sequence
  ENSG00000123416_27 (sequence is synthesized)
ctagtgcgttacttacctcgactcttagcttgtcggggacggtaaccgggacccggtgtctgctcctgtcgccttcgcctcctaatccctagccactatggagctgcccggaaatgtgac

SEQ ID NO: 251034 - DNA, 120 bp, Artificial Sequence
  ENSG00000123416_28 (sequence is synthesized)
agtgcgttacttacctcgactcttagcttgtcggggacggtaaccgggacccggtgtctgctcctgtcgccttcgcctcctaatccctagccactatgagccccgccccttgtccctgcg

SEQ ID NO: 251035 - DNA, 120 bp, Artificial Sequence
  ENSG00000123416_29 (sequence is synthesized)
gcatttaatgtggtgtgatagttccagtgcaagttgggtggagtgactgacatcattcattctttggcacctaccaaaatgtggaataggctgcttgctatattaattggacttctaaat

SEQ ID NO: 251036 - DNA, 120 bp, Artificial Sequence
  ENSG00000123416_30 (sequence is synthesized)
cagatagtccctaggttatggacagtttgtggatatgtctgttttgccaattccttgtgcttacatcagtgagatatggttcgtaatctaaaaagttgaaatagaaattctaagataatg

SEQ ID NO: 251037 - DNA, 120 bp, Artificial Sequence
  ENSG00000123427_0 (sequence is synthesized)
gctcgttccacagggacaccacgacggctcgcggcccccagcctctaccccgctccggatccgggatctgagcgccggccgcggtgcccaggcactcccttggcgggccggatggcggac

SEQ ID NO: 251038 - DNA, 120 bp, Artificial Sequence
  ENSG00000123427_1 (sequence is synthesized)
cccggcccagatcccgaatctgagtcggaatcggtgttcccgcgggaggtcgggctctttgcagactcttactcggagaagagccagttctgtttctgtgggcatgtgctgaccatcacg

SEQ ID NO: 251039 - DNA, 120 bp, Artificial Sequence
  ENSG00000123427_2 (sequence is synthesized)
cagaactttgggtcccgcctcggggtggcggcgcgcgtgtgggacgcggccctgagcctgtgcaattatttcgagagtcaaaatgtggatttccgaggcaagaaggtgatcgaactgggt

SEQ ID NO: 251040 - DNA, 120 bp, Artificial Sequence
  ENSG00000123427_3 (sequence is synthesized)
gcggggacaggcatcgtggggatcttggcagcgctgcaggggggggatgttaccatcactgacctgcccctggccctagaacagatccagggcaacgtccaggccaatgtgccagctgga

SEQ ID NO: 251041 - DNA, 120 bp, Artificial Sequence
  ENSG00000123427_4 (sequence is synthesized)
ggccaggcccaggtgcgtgccttgtcctgggggattgaccatcatgtcttccctgcaaactatgacctggtgctgggggctgatatcgtgtacctggaacccaccttccctctgctgctg

SEQ ID NO: 251042 - DNA, 120 bp, Artificial Sequence
  ENSG00000123427_5 (sequence is synthesized)
gggaccctccaacacctgtgcaggccccatggcaccatctatctggcctccaagatgagaaaggagcatgggacagagagcttctttcagcacctcctgccccagcatttccaactggag

SEQ ID NO: 251043 - DNA, 120 bp, Artificial Sequence
  ENSG00000123427_6 (sequence is synthesized)
ctggctcagcgggatgaggatgaaaatgtcaacatctatagggccaggcacagggaaccaagacctgcttgacatcacccttgctgttcttctcaatctcttgctctaatgaaggaactg

SEQ ID NO: 251044 - DNA, 120 bp, Artificial Sequence
  ENSG00000123427_7 (sequence is synthesized)
tgtatctcaaaaaccatatttccagagccacaaacatgaggaccaaaaaggatggatttccctggcctctctcactttcctccttccctctttgttaccccagatactcttgggcaggtg

SEQ ID NO: 251045 - DNA, 120 bp, Artificial Sequence
  ENSG00000123427_8 (sequence is synthesized)
cagtgaggtgcctgcttacaaggaatcccagagttctggcagcactagtgttagaacaccaaggaggttcctggctcctgttctcagagaaggaggatggtaaggtatccaggattttta

SEQ ID NO: 251046 - DNA, 120 bp, Artificial Sequence
  ENSG00000123427_9 (sequence is synthesized)
gggggtaagggagatatatgggatgtgagagcagtgattgtagacagactgtcactgatcacttccattcctgttgctgtttacacagaatggactttaaaaaaattctgtgggattttt

SEQ ID NO: 251047 - DNA, 65 bp, Artificial Sequence
  ENSG00000123427_10 (sequence is synthesized)
tgaaggcccagatgatcttcctgcctcagctccccaagtagctgggactagaggcatgcgccacc

SEQ ID NO: 251048 - DNA, 120 bp, Artificial Sequence
  ENSG00000123427_11 (sequence is synthesized)
gcccactgtgctagcctaggatttttttttttttttaagaaagaattaagccttaaaaatctattgtgcaagaacccaacttttactcaggagctgagaaggaagaagcctcaaaccacc

SEQ ID NO: 251049 - DNA, 120 bp, Artificial Sequence
  ENSG00000123427_12 (sequence is synthesized)
catttcctgctttttagagatagagtctagtggaaccatggctctaactgggtcaagtcctcctagctctgaagctaaggctgcagagctgtcctttggactgtatttcttcatgctttc

SEQ ID NO: 251050 - DNA, 120 bp, Artificial Sequence
  ENSG00000123427_13 (sequence is synthesized)
cagagttagagccttgatcacggaacatcattgtgtgcagaagaatactgtacctagtactaagttcttttcatctttgatttttctttagcttcatcagtccttccttcctaatctcta

SEQ ID NO: 251051 - DNA, 120 bp, Artificial Sequence
  ENSG00000123427_14 (sequence is synthesized)
atcccctgaagcctaacacagttcctaatgtgttttgccttaacctcttttctcttcccacattggtacttctggttggggctctctttacttactgcttaggcacatagtcaccttctc

SEQ ID NO: 251052 - DNA, 120 bp, Artificial Sequence
  ENSG00000123427_15 (sequence is synthesized)
tggactccctgcttccatgctttctccttcagtccattccgcaaactcttgtgatcttccaaaattagctctgattagctttcacttcctgtagaagcaagaacaagctcctctgcttgg

SEQ ID NO: 251053 - DNA, 120 bp, Artificial Sequence
  ENSG00000123427_16 (sequence is synthesized)
tacttagtctgtgtccatgtgatccaaaattaccttcctattgcatttcctactcctttgctacgtgtattggacctctggccaaattacaaaagatgtactctttgttctctaaaacca

SEQ ID NO: 251054 - DNA, 120 bp, Artificial Sequence
  ENSG00000123427_17 (sequence is synthesized)
cactaaagttttctgacttctttcacactctttatgataatcctctgcctgaaaggctattgccacctgtcaaaatcttcattattctttgcctctttcctgagcctcttgcttgaatgt

SEQ ID NO: 251055 - DNA, 120 bp, Artificial Sequence
  ENSG00000123427_18 (sequence is synthesized)
gatttctttctccctgagacccataaggttcatcttatgggaccttaatttgtcttgcatggacatttgtgattctcattttctcaccattaaattaccttggagggtagggctgtggtt

SEQ ID NO: 251056 - DNA, 120 bp, Artificial Sequence
  ENSG00000123427_19 (sequence is synthesized)
tactcctgtctaaacccctgaagcctaacacagttcctggcacacaacaggtgttcaacagatattgtgctcattcaataaatatttactcgctttgtttaatggattccacccctgcct

SEQ ID NO: 251057 - DNA, 120 bp, Artificial Sequence
  ENSG00000123427_20 (sequence is synthesized)
tcctaggtgaccttggacaaattctcgaacccattcaccaaccacacaagtttgttgtgagtcataaatggataatgaatataaatgcgcattgaaaataaacataaaatgttacccaca

SEQ ID NO: 251058 - DNA, 120 bp, Artificial Sequence
  ENSG00000123427_21 (sequence is synthesized)
aaattcagctgggctgggctgggctgggctgggctaggtggggagggctgtaaggagcgagtgctggagggaacctccgcaccgttagcctccaactgggagggcgaggccaggcccagg

SEQ ID NO: 251059 - DNA, 120 bp, Artificial Sequence
  ENSG00000123427_22 (sequence is synthesized)
gacccaacgttttctcttagcttgcttctgcctggtctgggttaccatcctggttgcaggcacctgtgcaccccacaggccctgagcctgtgcaattatttcgagagtcaaaatgtggat

SEQ ID NO: 251060 - DNA, 120 bp, Artificial Sequence
  ENSG00000123427_23 (sequence is synthesized)
ggagacagaggacgatgtcatagaacaagaactctggcgaggtatgcgtggagcctgtggacatgctctatccatgtctaccatgactccctgggaatccatcaagggaagctctgtcag

SEQ ID NO: 251061 - DNA, 120 bp, Artificial Sequence
  ENSG00000123427_24 (sequence is synthesized)
acttctggcggttgatgtgaccctggccgggtaactgccctttctggggcacaagttccccttctcccgagactggctgcctaatgcactgggatcctactttgtgtttgtgctctgcgg

SEQ ID NO: 251062 - DNA, 120 bp, Artificial Sequence
  ENSG00000123444_0 (sequence is synthesized)
gaggttccgggctccgggatgaaaggagggaacgcaggtgagaaagcgagacaggcaggtagggaaatcgtgaggtgagcgtggtcctagctccttgtggcagagcctagagagaaggcg

SEQ ID NO: 251063 - DNA, 120 bp, Artificial Sequence
  ENSG00000123444_1 (sequence is synthesized)
aggacgctgaagaaccaggcggacagctggcagagagagaagttggctagcatggaatcaccagaggagcctggagcatccatggatgagaactactttgtgaactacactttcaaagat

SEQ ID NO: 251064 - DNA, 120 bp, Artificial Sequence
  ENSG00000123444_2 (sequence is synthesized)
cggtcacattcaggccgtgtggctcaaggcatcatgaaactgtgtctagaggaggagctctttgctgatgtcaccatttcggtggaaggccgggagtttcagctccatcggctggtcctc

SEQ ID NO: 251065 - DNA, 120 bp, Artificial Sequence
  ENSG00000123444_3 (sequence is synthesized)
tcagctcagagctgcttcttccgatccatgttcacttccaacctgaaggaggcccacaaccgggtgattgtgctgcaggatgtcagcgagtctgttttccagctcctggttgattatatc

SEQ ID NO: 251066 - DNA, 120 bp, Artificial Sequence
  ENSG00000123444_4 (sequence is synthesized)
taccatgggactgtgaaacttcgagctgaggagttgcaggaaatttatgaggtgtcagacatgtatcagctgacatctctctttgaggaatgctctcggtttttggcccgcacagtgcaa

SEQ ID NO: 251067 - DNA, 120 bp, Artificial Sequence
  ENSG00000123444_5 (sequence is synthesized)
gtgggaaactgccttcaggtgatgtggctggcagatcggcacagtgatcctgagctctatacggctgccaagcactgtgccaagacccacctggcccagctgcagaatacagaggaattt

SEQ ID NO: 251068 - DNA, 120 bp, Artificial Sequence
  ENSG00000123444_6 (sequence is synthesized)
ctccacttgccccaccgcttactcacagatatcatctcggatggagttccgtgttctcagaacccaacagaggcaatagaagcctggatcaactttaataaagaggaaagagaggctttt

SEQ ID NO: 251069 - DNA, 120 bp, Artificial Sequence
  ENSG00000123444_7 (sequence is synthesized)
gcagagtcactcaggacaagcttgaaggaaattggggagaatgtgcacatttacctgattgggaaagagtcatctcgtacccactcgttggctgtgtccttgcactgtgcagaagatgac

SEQ ID NO: 251070 - DNA, 120 bp, Artificial Sequence
  ENSG00000123444_8 (sequence is synthesized)
tccatcagtgtaagtggccaaaacagtttgtgccaccagatcactgcggcctgcaagcatggtggagacttgtatgtggtgggagggtccatcccacggcgcatgtggaagtgcaacaat

SEQ ID NO: 251071 - DNA, 120 bp, Artificial Sequence
  ENSG00000123444_9 (sequence is synthesized)
gccaccgttgactgggagtggtgtgctcctttgcctcgggaccggctccagcacaccctggtgtctgtgcccgggaaagatgccatatattcactgggtggcaagacactgcaagatacc

SEQ ID NO: 251072 - DNA, 120 bp, Artificial Sequence
  ENSG00000123444_10 (sequence is synthesized)
ctagaggtggctgtgtcaggggctgctggtgccaacctcaacgggatcatctacttactagggggggaggagaatgatctggacttctttaccaaaccttcccgactcatccagtgcttt

SEQ ID NO: 251073 - DNA, 120 bp, Artificial Sequence
  ENSG00000123444_11 (sequence is synthesized)
gacacagagacagacaaatgccatgtgaagccctatgtgctgccctttgcaggccgcatgcacgcagctgtgcataaagatctggtgttcatcgtggctgaaggggactccctggtgtgc

SEQ ID NO: 251074 - DNA, 120 bp, Artificial Sequence
  ENSG00000123444_12 (sequence is synthesized)
tacaatcccttgctagacagcttcacccggctttgccttcctgaggcctggagctctgccccatccctctggaagattgccagctgtaacgggagcatctatgtcttccgggaccgatat

SEQ ID NO: 251075 - DNA, 120 bp, Artificial Sequence
  ENSG00000123444_13 (sequence is synthesized)
aaaaagggggatgccaacacctacaagcttgaccctgccacttcagccgtaactgtcacaagaggtattaaggtgctgcttaccaatttgcagtttgtgttggcctaaggctgtggggag

SEQ ID NO: 251076 - DNA, 120 bp, Artificial Sequence
  ENSG00000123444_14 (sequence is synthesized)
gggaggagaactgctcactccttttccctccccatacaaactcaaagtcccctgggccccaattcagagttatgttttttttggcacatactagaaaggcagtgcctcagcccttccctg

SEQ ID NO: 251077 - DNA, 120 bp, Artificial Sequence
  ENSG00000123444_15 (sequence is synthesized)
aatccatggaggtgttctgtttggggctttttagactgctgctgctcagctggttgcttgaactgacagtaggccagcctgttctctgccattccctagtcatcctgtgcctcaccacag

SEQ ID NO: 251078 - DNA, 120 bp, Artificial Sequence
  ENSG00000123444_16 (sequence is synthesized)
cttgcttagagcaagccttttctcagaccttaggcacagcctctcctctttacctgatcaatgttaaatgtaagcacccctgatcccaggacataaggaaagatgcccaattgtactttt

SEQ ID NO: 251079 - DNA, 120 bp, Artificial Sequence
  ENSG00000123444_17 (sequence is synthesized)
gttctatagcctgtgaaatggctagttgatcatttttccacaaagaattaggtgttaagagttttccttcaggctttacttaggagaatggactaagctgaaggtgtacttcaccagcaa

SEQ ID NO: 251080 - DNA, 120 bp, Artificial Sequence
  ENSG00000123444_18 (sequence is synthesized)
gagtcaactctagaattcaggatgttccttctattgttttcttatccatctgtcaggaaatgtaactttggttttatttttggcttattccaaggggtaagccagaaaatagaaatgatt

SEQ ID NO: 251081 - DNA, 120 bp, Artificial Sequence
  ENSG00000123444_19 (sequence is synthesized)
atttctgattaatagcagaaactttttcaatctcaaatatataaggtgtctgctcttttaaaagctctaagctaagtcaagagctaggaactgttgatacaaataaaagtttttgaaggg

SEQ ID NO: 251082 - DNA, 120 bp, Artificial Sequence
  ENSG00000123444_20 (sequence is synthesized)
aacgcaggtgagaaagcgagacaggcaggtagggaaatcgtgaggtgagcgtggtcctagctccttgtggcagagcctagagagaaggcgaggacgctgaagaaccaggcgggttactca

SEQ ID NO: 251083 - DNA, 120 bp, Artificial Sequence
  ENSG00000123444_21 (sequence is synthesized)
gctacacacccctcccccgctctctgagccaagcttttgacgagggcgggcgggcctgagcgggaagaacggtttccctggcgaccgtttccaagacgactcaaggtggagcggggacat

SEQ ID NO: 251084 - DNA, 120 bp, Artificial Sequence
  ENSG00000123444_22 (sequence is synthesized)
tgcacagggtgatgggcctcccagtgccccggcctgggggcggatggactcaagttctgggacgcagccatagggagtctttcgagcgagcggggaagtgtgggggaagcagctcagaag

SEQ ID NO: 251085 - DNA, 120 bp, Artificial Sequence
  ENSG00000123444_23 (sequence is synthesized)
agagcaaatgtaagacccacggatatcccaggctaggcttcatatggagcgtcttaactccatgcgctgggaaggagaggacctggccactaggccggggccaggggtcctttttgtctg

SEQ ID NO: 251086 - DNA, 120 bp, Artificial Sequence
  ENSG00000123444_24 (sequence is synthesized)
attctactgcccctgagcttcactagttttatgccccagttatttggttagtaaggcttttacgatcacaggcctctcccagccctttgctttcatatattgacctaaatcccaagtctt

SEQ ID NO: 251087 - DNA, 120 bp, Artificial Sequence
  ENSG00000123444_25 (sequence is synthesized)
ttgttaacattatggaaaggaattattccgtgttttctcaggaaaacacccagagttggaacttttatttatatcattagcggaggggcgccactggggataacgaacccagatttggtt

SEQ ID NO: 251088 - DNA, 120 bp, Artificial Sequence
  ENSG00000123444_26 (sequence is synthesized)
aaaggatagcgtcagggacatcatggacagggccaggactaaggccaatctggacccactttgctctcacttcttccttttccctccctgagttggacagttggattcacagactatggc

SEQ ID NO: 251089 - DNA, 120 bp, Artificial Sequence
  ENSG00000123453_0 (sequence is synthesized)
agtgtgggctacccggccactgccctggagctgtggtgactgctgcgtttttctcccatgcacttgcacgtccaggactcctgggagaacttgggccacactccttccttgccctcttga

SEQ ID NO: 251090 - DNA, 120 bp, Artificial Sequence
  ENSG00000123453_1 (sequence is synthesized)
gctcattcgtcaccctgttgggtgagcacagccctagctcaggccactgggcaagccacaccatccaaagaggaggtcctctgccccaggacccccacaccaccccagctccctgtttcg

SEQ ID NO: 251091 - DNA, 120 bp, Artificial Sequence
  ENSG00000123453_2 (sequence is synthesized)
ctgaggcctggagcccccatggcctcactgagccgagccctacgtgtggctgctgcccaccctcgccagagccctacccggggcatggggccatgcaacctgtccagcgcagctggcccc

SEQ ID NO: 251092 - DNA, 120 bp, Artificial Sequence
  ENSG00000123453_3 (sequence is synthesized)
acagccgagaagagtgtgccatatcagcggaccctgaaggagggacagggcacctcggtggtggcccaaggcccaagccggcccctgcccagcacggccaacgtggtggtcattggtgga

SEQ ID NO: 251093 - DNA, 120 bp, Artificial Sequence
  ENSG00000123453_4 (sequence is synthesized)
ggcagcttgggctgccagaccctgtaccacctggccaagctgggcatgagtggggcggtgctgctggagcgggagcggctgacctccgggaccacctggcacacggcaggcctgctgtgg

SEQ ID NO: 251094 - DNA, 120 bp, Artificial Sequence
  ENSG00000123453_5 (sequence is synthesized)
cagctgcggcccagtgacgtggaggtggagcttctggcccacactcggcgggtggtgagccgggagctggaggaggagacgggactacacacgggctggatccagaatgggggcctcttc

SEQ ID NO: 251095 - DNA, 120 bp, Artificial Sequence
  ENSG00000123453_6 (sequence is synthesized)
atcgcgtccaaccggcagcgcctggacgagtacaagaggctcatgtcgctgggcaaggcgtatggtgtggaatcccatgtgctgagcccggcagagaccaagactctgtacccgctgatg

SEQ ID NO: 251096 - DNA, 120 bp, Artificial Sequence
  ENSG00000123453_7 (sequence is synthesized)
aatgtggacgacctctacgggaccctgtatgtgccgcacgacggtaccatggaccccgctggcacctgtaccaccctcgccagggcagcttctgcccgaggagcacaggtcattgagaac

SEQ ID NO: 251097 - DNA, 120 bp, Artificial Sequence
  ENSG00000123453_8 (sequence is synthesized)
tgcccagtgaccggcattcgtgtgtggacggatgattttggggtgcggcgggtcgcgggtgtggagactcagcatggttccatccagacaccctgcgtggtcaactgtgcaggagtgtgg

SEQ ID NO: 251098 - DNA, 120 bp, Artificial Sequence
  ENSG00000123453_9 (sequence is synthesized)
gcaagtgctgtgggccggatggctggagtcaaggtcccgctggtggccatgcaccatgcctatgtcgtcaccgagcgcatcgaggggattcagaacatgcccaatgtccgtgatcatgat

SEQ ID NO: 251099 - DNA, 120 bp, Artificial Sequence
  ENSG00000123453_10 (sequence is synthesized)
gcctctgtctacctccgcctccaaggggatgccttgtctgtgggtggctatgaggccaaccccatcttttgggaggaggtgtcagacaagtttgccttcggcctctttgacctggactgg

SEQ ID NO: 251100 - DNA, 120 bp, Artificial Sequence
  ENSG00000123453_11 (sequence is synthesized)
gaggtgttcacccagcacattgaaggcgccatcaacagggtccccgtgctggagaagacaggaatcaagtccacggtctgcggccctgaatccttcacgcccgaccacaagcccctgatg

SEQ ID NO: 251101 - DNA, 120 bp, Artificial Sequence
  ENSG00000123453_12 (sequence is synthesized)
ggggaggcacctgagctccgagggttcttcctgggctgtggcttcaacagcgcaggaatgatgctgggtggtggctgtgggcaggagctggcccactggatcatccatgggcgcccggag

SEQ ID NO: 251102 - DNA, 120 bp, Artificial Sequence
  ENSG00000123453_13 (sequence is synthesized)
cgtcgtcttcccccacgatgagccgctggccgggcgcaacatgaggagagacccgctgcacgaggaactccttggacaaggctgcgtgttccaggagcggcatggctgggagcgaccggg

SEQ ID NO: 251103 - DNA, 120 bp, Artificial Sequence
  ENSG00000123453_14 (sequence is synthesized)
atggtttcatccccgaggcccagctccggtcctcgagtacgactactacggggcttacgggagccgcgcgcacgaggactacgcctaccgcaggctgctggcagacgagtacaccttcgc

SEQ ID NO: 251104 - DNA, 120 bp, Artificial Sequence
  ENSG00000123453_15 (sequence is synthesized)
cttcccgccccaccacgacacgatcaagaaggagtgcctggcctgcagaggggccgccgctgtgtttgacatgtcctacttcgggaagttctacctggtggggctggatgcaaggaaggc

SEQ ID NO: 251105 - DNA, 120 bp, Artificial Sequence
  ENSG00000123453_16 (sequence is synthesized)
tgccgactggctcttctccgcagatgtcagccgacccccaggctccaccgtgtacacgtgcatgctcaaccaccgtgggggcaccgagagtgacctgactgtcagccgcctggcacccag

SEQ ID NO: 251106 - DNA, 120 bp, Artificial Sequence
  ENSG00000123453_17 (sequence is synthesized)
ccaccaggcctccccgctggcccccgcctttgaaggggacggttactacctggccatgggcggggccgtggcccagcacaactggtcccacatcaccaccgtgctgcaggaccagaagtc

SEQ ID NO: 251107 - DNA, 120 bp, Artificial Sequence
  ENSG00000123453_18 (sequence is synthesized)
ccagtgccagctcatcgacagctccgaggacctgggtatgatcagtatccagggcccagccagccgagccattttgcaggaggtgctggacgcagacctgagcaacgaggccttcccgtt

SEQ ID NO: 251108 - DNA, 120 bp, Artificial Sequence
  ENSG00000123453_19 (sequence is synthesized)
ctccacccacaagctactgagagccgcagggcacctggtccgagccatgcggctgtcctttgtgggggagctgggctgggagctgcacattccaaaggcgtcctgcgtgcctgtgtaccg

SEQ ID NO: 251109 - DNA, 120 bp, Artificial Sequence
  ENSG00000123453_20 (sequence is synthesized)
ggctgtgatggccgcgggtgccaagcacggcctcatcaacgcagggtaccgcgccatcgactccctgagcattgagaaaggctaccggcactggcacgcggacctgcggccagacgacag

SEQ ID NO: 251110 - DNA, 120 bp, Artificial Sequence
  ENSG00000123453_21 (sequence is synthesized)
ccccctggaggcaggcctggccttcacctgcaagctcaagtcgccggtgcccttcctggggagggaggccctggagcagcagcgggccgcaggcctccgccggcgcctggtgtgcttcac

SEQ ID NO: 251111 - DNA, 120 bp, Artificial Sequence
  ENSG00000123453_22 (sequence is synthesized)
catggaggacaaagtacccatgtttggcctggaggccatctggaggaacggccaagtggtgggccatgtccggagggctgactttgggttcgccatcgacaagaccatcgcctacggtta

SEQ ID NO: 251112 - DNA, 120 bp, Artificial Sequence
  ENSG00000123453_23 (sequence is synthesized)
catccatgaccccagcggtgggccggtctcgctggactttgtgaagagcggggactatgccctggagagaatgggggtgacctatggtgcccaggctcacctgaagtcgcccttcgaccc

SEQ ID NO: 251113 - DNA, 120 bp, Artificial Sequence
  ENSG00000123453_24 (sequence is synthesized)
caacaacaagagggtgaagggaatctactgagggctcagaccacatgccccatcccatgctgtccatccattctcacaggtcccaaatggccctgggtcccaggaccctggacccagcca

SEQ ID NO: 251114 - DNA, 120 bp, Artificial Sequence
  ENSG00000123453_25 (sequence is synthesized)
gaacttgtgccctccctgtccttagcctaggcctagtcctgcgaaaacccccaaaccagatacggacagagaccaagatggcccatcctgtggtcactgactggaaggcagtctctaatc

SEQ ID NO: 251115 - DNA, 120 bp, Artificial Sequence
  ENSG00000123453_26 (sequence is synthesized)
caccccaatcctcccagaaagcaaacctgtaagtgtcttgggctcagggaccatggcttgtagccctttccaagcttctagaaggtgcttagtaaatacttgataagccccacgtgaaaa

SEQ ID NO: 251116 - DNA, 120 bp, Artificial Sequence
  ENSG00000123453_27 (sequence is synthesized)
aacagcaaagtccactcctggttttgatgttttctattcatcccttttactcactcgaagcccgagccctgctgtccaggccaggtgctgggctggctctggggaccagcgtagtcctag

SEQ ID NO: 251117 - DNA, 78 bp, Artificial Sequence
  ENSG00000123453_28 (sequence is synthesized)
tcaagcaattctcgtgcctcagcctcccatgtagctgggattaaatgtgcccgtcaccacacccggctgattaaggct

SEQ ID NO: 251118 - DNA, 120 bp, Artificial Sequence
  ENSG00000123453_29 (sequence is synthesized)
gtgccgtgtcggcagttaggagggcaggtggcggggtggggggttgtctgcaggagcagcggccagggaggggcatggggctgtggggctgtggggtgtctgatgggggcagatcccagg

SEQ ID NO: 251119 - DNA, 120 bp, Artificial Sequence
  ENSG00000123453_30 (sequence is synthesized)
gaggccaaggcagtggcagaaaagctggactctggagcccacgcacctgcctggcttcgtgccactgccaggtccaggacttgtctgtgcccttgggcgagatataacttctctgcgcct

SEQ ID NO: 251120 - DNA, 120 bp, Artificial Sequence
  ENSG00000123453_31 (sequence is synthesized)
cactttcctcatctgtagaaaggggcacacctggtaggagtgtaagacgcttcccgcaggggctggcccagagcaggagctgggcctgggattgccgtggctccagggagcagccctggc

SEQ ID NO: 251121 - DNA, 120 bp, Artificial Sequence
  ENSG00000123453_32 (sequence is synthesized)
tgaggtcctgggtaaccacctctccctgtcgttccccaccttgggtgcatccagctcctcctccagcctcctgggccctggctgggctctcagacccaccaggcaaccctgcggcctcct

SEQ ID NO: 251122 - DNA, 120 bp, Artificial Sequence
  ENSG00000123453_33 (sequence is synthesized)
ttgtgcctctgttttgcctggacctcatgggggccccctgcccgcgtccacaacacacgggcactcagtgcagggctctccgagggcagggccaggcctgaccccatcacagcctcagcg

SEQ ID NO: 251123 - DNA, 120 bp, Artificial Sequence
  ENSG00000123453_34 (sequence is synthesized)
gtgatgacctcagaagggcatgagagcacacaagtcctacgtccttcagcaaatgacactgccctcccaaccagctgctgcagcggcatttcccctggcctgggctgtttcccgggcagc

SEQ ID NO: 251124 - DNA, 120 bp, Artificial Sequence
  ENSG00000123453_35 (sequence is synthesized)
ttctggggttagggcagccctgcagccctgttctatgtgtatatgcatttagtccacacatggaacgactgagtggctactttgggctaaaaactgctttaatttctggagaaagaggga

SEQ ID NO: 251125 - DNA, 120 bp, Artificial Sequence
  ENSG00000123453_36 (sequence is synthesized)
actgctttaatttctggagaaagagggaaactaagataaaagtccctgactctgggtgcctatattttggtggagagacatacaataaacaaacaaatggctgggcacggtggctcacac

SEQ ID NO: 251126 - DNA, 120 bp, Artificial Sequence
  ENSG00000123454_0 (sequence is synthesized)
accccagccatgcccgccctcagtcgctgggccagcctgcccggccccagcatgcgggaggcagccttcatgtacagcacagcagtggccatcttcctggtcatcctggtggccgcactg

SEQ ID NO: 251127 - DNA, 120 bp, Artificial Sequence
  ENSG00000123454_1 (sequence is synthesized)
cagggctcggctccccgtgagagccccctcccctatcacatccccctggacccggaggggtccctggagctctcatggaatgtcagctacacccaggaggccatccatttccagctcctg

SEQ ID NO: 251128 - DNA, 120 bp, Artificial Sequence
  ENSG00000123454_2 (sequence is synthesized)
gtgcggaggctcaaggctggcgtcctgtttgggatgtccgaccgtggcgagcttgagaacgcagatctcgtggtgctctggaccgatggggacactgcctattttgcggacgcctggagt

SEQ ID NO: 251129 - DNA, 120 bp, Artificial Sequence
  ENSG00000123454_3 (sequence is synthesized)
gaccagaaggggcagatccacctggatccccagcaggactaccagctgctgcaggtgcagaggaccccagaaggcctgaccctgcttttcaagaggccctttggcacctgcgaccccaag

SEQ ID NO: 251130 - DNA, 120 bp, Artificial Sequence
  ENSG00000123454_4 (sequence is synthesized)
gattacctcattgaagacggcactgtccacttggtctacgggatcctggaggagccgttccggtcactggaggccatcaacggctcgggcctgcagatggggctgcagagggtgcagctc

SEQ ID NO: 251131 - DNA, 120 bp, Artificial Sequence
  ENSG00000123454_5 (sequence is synthesized)
ctgaagcccaatatccccgaaccggagttgccctcagacgcgtgcaccatggaggtccaagctcccaatatccagatccccagccaggagaccacgtactggtgctacattaaggagctt

SEQ ID NO: 251132 - DNA, 120 bp, Artificial Sequence
  ENSG00000123454_6 (sequence is synthesized)
ccaaagggcttctctcggcaccacattatcaagtacgagcccatcgtcaccaagggcaatgaggcccttgtccaccacatggaagtcttccagtgcgcccccgagatggacagcgtcccc

SEQ ID NO: 251133 - DNA, 120 bp, Artificial Sequence
  ENSG00000123454_7 (sequence is synthesized)
cacttcagcgggccctgcgactccaagatgaaacccgaccgcctcaactactgccgccacgtgctggccgcctgggccctgggtgccaaggcattttactacccagaggaagccggcctt

SEQ ID NO: 251134 - DNA, 120 bp, Artificial Sequence
  ENSG00000123454_8 (sequence is synthesized)
gccttcgggggtccagggtcctccagatatctccgcctggaagttcactaccacaacccactggtgatagaaggacgaaacgactcctcaggcatccgcttgtactacacagccaagctg

SEQ ID NO: 251135 - DNA, 120 bp, Artificial Sequence
  ENSG00000123454_9 (sequence is synthesized)
cggcgcttcaacgcggggatcatggagctgggactggtgtacacgccagtgatggccattccaccacgggagaccgccttcatcctcactggctactgcacggacaagtgcacccagctg

SEQ ID NO: 251136 - DNA, 120 bp, Artificial Sequence
  ENSG00000123454_10 (sequence is synthesized)
gcactgcctccctccgggatccacatcttcgcctctcagctccacacacacctgactgggagaaaggtggtcacagtgctggtccgggacggccgggagtgggagatcgtgaaccaggac

SEQ ID NO: 251137 - DNA, 120 bp, Artificial Sequence
  ENSG00000123454_11 (sequence is synthesized)
cgggagctggccacagtggggggcttcgggatcctggaggagatgtgtgtcaactacgtgcactactacccccagacgcagctggagctctgcaagagcgctgtggacgccggcttcctg

SEQ ID NO: 251138 - DNA, 120 bp, Artificial Sequence
  ENSG00000123454_12 (sequence is synthesized)
cagaagtacttccacctcatcaacaggttcaacaacgaggatgtctgcacctgccctcaggcgtccgtgtctcagcagttcacctctgttccctggaactccttcaaccgcgacgtactg

SEQ ID NO: 251139 - DNA, 120 bp, Artificial Sequence
  ENSG00000123454_13 (sequence is synthesized)
aaggccctgtacagcttcgcgcccatctccatgcactgcaacaagtcctcagccgtccgcttccagggtgaatggaacctgcagcccctgcccaaggtcatctccacactggaagagccc

SEQ ID NO: 251140 - DNA, 120 bp, Artificial Sequence
  ENSG00000123454_14 (sequence is synthesized)
accccacagtgccccaccagccagggccgaagccctgctggccccaccgttgtcagcattggtgggggcaaaggctgaggggggacctactcctccccctcctccatgctgtccctgtgg

SEQ ID NO: 251141 - DNA, 120 bp, Artificial Sequence
  ENSG00000123454_15 (sequence is synthesized)
gctcacaccggcactgtgcactctactctgcgacgatccccatggaacagccctgcacgcccaggatgaaggggccagaccacgcccctgcctgagaccacggtccaatccagccttctt

SEQ ID NO: 251142 - DNA, 120 bp, Artificial Sequence
  ENSG00000123454_16 (sequence is synthesized)
cccccagggtcccctgcatggctgagagggtgtgggtgccctgttgacctaccctggaccgagtggaccacgacctcgtccatttaaacccggctgactcagtgcagggacagcctgcac

SEQ ID NO: 251143 - DNA, 120 bp, Artificial Sequence
  ENSG00000123454_17 (sequence is synthesized)
agtggtccagggtccagccctccgccagccctgttccgcctcactgggtgtggcctggcttctgggacaggcaccatgctgggccggggtgtggaatcaccgggaacgcccccgcccccg

SEQ ID NO: 251144 - DNA, 120 bp, Artificial Sequence
  ENSG00000123454_18 (sequence is synthesized)
ccccgctgctcccggtgtgcagcgggtgcgggtgccgcttaaacatttccctgctgagtggctcgtgtttcacagtgggcggcttccctgcgacggaggcaggaccaggcatttagctag

SEQ ID NO: 251145 - DNA, 120 bp, Artificial Sequence
  ENSG00000123454_19 (sequence is synthesized)
ttagagactcgcctgggaaattgctccattcctgagtaaacagatattttcgcccacctaaagggaagccctgacaacaactatcaccaaaagacgaggcggcaaagatccagcggggct

SEQ ID NO: 251146 - DNA, 120 bp, Artificial Sequence
  ENSG00000123454_20 (sequence is synthesized)
tctgggcgccggttccacgtggggtggaattattagcaccagcttgcttctctgccggtggggccagcgctgaacagaccggggtggagtcagggctgtgctttccgcgtggttctgcca

SEQ ID NO: 251147 - DNA, 120 bp, Artificial Sequence
  ENSG00000123454_21 (sequence is synthesized)
cttagggagtgtgccttgggcgggccatttcacattcctgaccctcacttttctcatctgtaaaaccaggctgatgccgtgcgggctaatgagccaataaagctcacacttgggctggca

SEQ ID NO: 251148 - DNA, 80 bp, Artificial Sequence
  ENSG00000123472_0 (sequence is synthesized)
ggcgcgcgggccgcgggccgaggccgacgcgcctgaggaggaggaggaggcgggggcggccatggctgctgtggtggtgg

SEQ ID NO: 251149 - DNA, 120 bp, Artificial Sequence
  ENSG00000123472_1 (sequence is synthesized)
ggtggcgcgggaccggcggtcctgcaggtggccggtctctaccggggcctgtgcgcggtgcgcagccgcgccctgggcctggggctcgtgtcacccgcgcagctgcgcgtcttcccagtg

SEQ ID NO: 251150 - DNA, 120 bp, Artificial Sequence
  ENSG00000123472_2 (sequence is synthesized)
gtcttcccagtgcgccccggctcgggccggcccgaggggggcgccgacagcagcggggtcggggccgaggccgagctccaggccaaccctttctacgaccgctaccgcgacaagatccag

SEQ ID NO: 251151 - DNA, 120 bp, Artificial Sequence
  ENSG00000123472_3 (sequence is synthesized)
ctgctgcgcaggtcagacccagctgcttttgagtcccgcctggagaaacgcagtgaatttcggaagcagccagtggggcattccaggcaaggtgattttatcaaatgtgtggaacagaag

SEQ ID NO: 251152 - DNA, 120 bp, Artificial Sequence
  ENSG00000123472_4 (sequence is synthesized)
acagatgccttggggaaacagtctgtgaacagaggattcactaaggacaagactctcagttcaatctttaacattgagatggtaaaagaaaaaactgcagaagaaataaaacagatttgg

SEQ ID NO: 251153 - DNA, 120 bp, Artificial Sequence
  ENSG00000123472_5 (sequence is synthesized)
cagcaatattttgcagcaaaagatacagtctacgcagttattcctgcagaaaagtttgatttgatctggaaccgggctcagtcctgtccaacatttctatgtgctctgccaagaagggaa

SEQ ID NO: 251154 - DNA, 120 bp, Artificial Sequence
  ENSG00000123472_6 (sequence is synthesized)
ggttatgagttttttgtaggacaatggacaggtactgaactccacttcactgcacttataaatattcagacccgaggggaagctgcagccagccagctgattttatatcactatcctgaa

SEQ ID NO: 251155 - DNA, 120 bp, Artificial Sequence
  ENSG00000123472_7 (sequence is synthesized)
atgactgcagaaatggattccacatttctgaatgttgctgaggcacagtgcatcgccaaccaagttcagctcttctacgctactgatcggaaagagacctacgggttagtggagaccttt

SEQ ID NO: 251156 - DNA, 120 bp, Artificial Sequence
  ENSG00000123472_8 (sequence is synthesized)
aacctcagaccaaatgagttcaaatatatgtctgtcatcgctgaattggagcaaagcggacttggagcagaactgaaatgtgcccagaaccaaaataagacttagaactgtacaggttgg

SEQ ID NO: 251157 - DNA, 120 bp, Artificial Sequence
  ENSG00000123472_9 (sequence is synthesized)
cccttcacctagttgactcagccctcgatagtctagagcccaccccctcctcaggaactcaagagctcagcatttataatgagcagttggtaatgagttgccctatgtgcttgtcgcaag

SEQ ID NO: 251158 - DNA, 120 bp, Artificial Sequence
  ENSG00000123472_10 (sequence is synthesized)
cagtcacagagatgagccctattacttgatattcaggaacaaaggtacctgaacattctgataattatctcagcatacttgaggtttccttttttaagtgttcgaggttataacaagaga

SEQ ID NO: 251159 - DNA, 120 bp, Artificial Sequence
  ENSG00000123472_11 (sequence is synthesized)
cagccaaggacctacaagacagttgacttgattttgcacagtgtaacagcgcagttgcattctggccactttgaccttatagctcccaaatgatgagtttgtcatctttatgaactcatg

SEQ ID NO: 251160 - DNA, 120 bp, Artificial Sequence
  ENSG00000123472_12 (sequence is synthesized)
acaggataataagcttgaagacctgctgtagttagatatgggctttaatccttcccaggcaccagtcagctgaacaaaagcataagccaaacatcctgtttaaactgtagaataaccaga

SEQ ID NO: 251161 - DNA, 120 bp, Artificial Sequence
  ENSG00000123472_13 (sequence is synthesized)
tattcccatcaggttaaagacttcatctagatgatgccccccagagatgcctttagtgtaagtagctggcttggggtatcagcaaatttcaggtatagttagataaacaggtacagggcc

SEQ ID NO: 251162 - DNA, 120 bp, Artificial Sequence
  ENSG00000123472_14 (sequence is synthesized)
tgcatactattaaaccatagtttgtggcacccgcttttctaactccacctgttagaagctatgtgtttgaaggaatgaatcagtgcagtataaataaaattcttttgtaaggagaagatt

SEQ ID NO: 251163 - DNA, 120 bp, Artificial Sequence
  ENSG00000123472_15 (sequence is synthesized)
aatgttcccagattggatgtggggaaaatatagcaataattttttttttaagtctggcttacaatgtttgttatacaaaataatgaaatctgagttatgtactgtccattgtgtcagggc

SEQ ID NO: 251164 - DNA, 120 bp, Artificial Sequence
  ENSG00000123472_16 (sequence is synthesized)
gagctggaaacccatctttcgtttgtagtgtcactgttgtggctccaagctcagtgataggaaaggacggtggttacacaccagccttctgaacccaaggcccccagtattgttgtcagc

SEQ ID NO: 251165 - DNA, 120 bp, Artificial Sequence
  ENSG00000123472_17 (sequence is synthesized)
tgcctttaccatggcatttctttctctttctttttttcctgagatgaagtcttgctctgtcttgcccaggctggagtacagtagcgtgatctcagctcgctgcaacctctacctccctgg

SEQ ID NO: 251166 - DNA, 120 bp, Artificial Sequence
  ENSG00000123472_18 (sequence is synthesized)
ttcaagtgattctgctgcgtcagcctcctgaggagctaggattacaggcgcatgccaccatacctggcttatttttgtattgttgtagagacagggtttcactttgttggccaggctggc

SEQ ID NO: 251167 - DNA, 71 bp, Artificial Sequence
  ENSG00000123472_19 (sequence is synthesized)
catttctttattgatctaacatgctccactctgctgctcctgcctaagatctggttatatgacactgaatg

SEQ ID NO: 251168 - DNA, 120 bp, Artificial Sequence
  ENSG00000123472_20 (sequence is synthesized)
tgctgctcctgcctaagatctggttatatgacactgaatgtggtgagtgggaatttaagcagtattcgcagtttgtgtgtgtgtgttttcttccttccagaagaatttttataggttggg

SEQ ID NO: 251169 - DNA, 120 bp, Artificial Sequence
  ENSG00000123472_21 (sequence is synthesized)
cctgtccctaagctctttaaatagggtggacatcccactattctctgagccgtgtctattttgttgcacctttgagtctatgtattgagagagacagatagtatttttttaaactgggga

SEQ ID NO: 251170 - DNA, 120 bp, Artificial Sequence
  ENSG00000123472_22 (sequence is synthesized)
agctgctatcctttcactatttctctaaaggttgagctgttaactaatgtaaattctggacctgcttctggtcctggcagtttatcttttgagaaacttgagtcttatctgccctgccat

SEQ ID NO: 251171 - DNA, 120 bp, Artificial Sequence
  ENSG00000123472_23 (sequence is synthesized)
tttcattaaatgccttctgaccttctgaatgttttgggtcccaagaatttttgacatcagatggggttgtttttattggtatccagttatgtttgcttgtctttccagatgggcccagtt

SEQ ID NO: 251172 - DNA, 120 bp, Artificial Sequence
  ENSG00000123472_24 (sequence is synthesized)
attagccatacatagtacattgatacacctccaccagcgggtgaggaaatgatggaaaaaggagtaagaagtggccattcgttttaatcattcctcctggatttgtcctcagtccccaac

SEQ ID NO: 251173 - DNA, 120 bp, Artificial Sequence
  ENSG00000123472_25 (sequence is synthesized)
tgccaagtaggatgtgtccatggataaatgtgtggggcatgactaaagtaccacgtagctgttctttatatttatttacctagaaagatctggcaaagaactcaaagaaaattgtaccat

SEQ ID NO: 251174 - DNA, 120 bp, Artificial Sequence
  ENSG00000123472_26 (sequence is synthesized)
ttaatcagtaaatttgtcccctggtgctagcatggtgttatagaaagtggacaggctttagagttaagtgaatctgggttcatatgttagtgttgctattcattagctctatactgttga

SEQ ID NO: 251175 - DNA, 120 bp, Artificial Sequence
  ENSG00000123472_27 (sequence is synthesized)
acaaattgcttaaactatctaattttggggttttttttccatctaaaatagggataataatatctacctcataggattattgtgagaattaaattaacttcactatagtagaaaatatca

SEQ ID NO: 251176 - DNA, 120 bp, Artificial Sequence
  ENSG00000123472_28 (sequence is synthesized)
actaccatccttttctctacttcccttgcccctcattaaagactaatacaagttagcatttcagatgtgtagatcattctttattccagttaaaagaacaaactttatctcatcagttct

SEQ ID NO: 251177 - DNA, 120 bp, Artificial Sequence
  ENSG00000123472_29 (sequence is synthesized)
gaaactttaagatgcagtagcatcacctaaagtgcttttaaaatgcagattctcaggcctcaaccgtacaccacccccccacacacgtactaaatcaagaatatgtgcagaaggtactgg

SEQ ID NO: 251178 - DNA, 120 bp, Artificial Sequence
  ENSG00000123472_30 (sequence is synthesized)
gaatctacttgttaatatgtgctccaaatgattctgatgtaggtaattagccagccacactttgagaaccactgccttatctattctttacaaaaatgtacattgccaggtctttctttc

SEQ ID NO: 251179 - DNA, 120 bp, Artificial Sequence
  ENSG00000123472_31 (sequence is synthesized)
ctgtggatgctaactataggatatttaggttcctctgttctttgtctcccatagtggccccctttgcaaactccaaatacattatatttatttattcttgtgtcttttttcccccactag

SEQ ID NO: 251180 - DNA, 120 bp, Artificial Sequence
  ENSG00000123472_32 (sequence is synthesized)
actgtgagctccttgagggccaggacttatctctgttcgcagtgccaaggacatggcctggaccatagaagatactcagttttttgttgaataaataggtaatatggatttcaaccaaaa

SEQ ID NO: 251181 - DNA, 120 bp, Artificial Sequence
  ENSG00000123472_33 (sequence is synthesized)
agatgctaaatcttctgcaaaataggctacctaaagcctctgaatcaccaggatctgaataaagcagatgtttaacctggttggggggacatattttcaagaactggatgtattcaagta

SEQ ID NO: 251182 - DNA, 120 bp, Artificial Sequence
  ENSG00000123472_34 (sequence is synthesized)
actctggtggcagctgtgcttcacatcccacagaacaccagtgccttggggtacctaggccagggcctggcacacatttttgttttaaatactgaacagagggatattgagtccatccac

SEQ ID NO: 251183 - DNA, 120 bp, Artificial Sequence
  ENSG00000123472_35 (sequence is synthesized)
aagtactggttcagtgtgtctccccacagccaaccaccagtgccagttcatattggtgagactcagcaaccaacttggtttgcaaagtgaccccatcagacaggaaggacattgccttcc

SEQ ID NO: 251184 - DNA, 120 bp, Artificial Sequence
  ENSG00000123472_36 (sequence is synthesized)
ttgatgggtcagctgggtgaactgaacatagtctctcccaactccatttccatccataaatgtttatcctgctctttctaggcaaagtactgtggtcatggtggagatatagaagtatga

SEQ ID NO: 251185 - DNA, 120 bp, Artificial Sequence
  ENSG00000123472_37 (sequence is synthesized)
agtctggtggtcaaggcaaggcacacatggtagtaggctagaggtatcagagaaaatttcccatgggagatggaacctgacctaggctaggaacgttgtgggggatttaaattaagtaga

SEQ ID NO: 251186 - DNA, 120 bp, Artificial Sequence
  ENSG00000123472_38 (sequence is synthesized)
gaggaaggaatgggactttgatgtagagcaggggtcatcaaattttttctgtaaagaactagatgttaaatattttaggcattgtgggccgtatggtcttctttgtgactactcagctct

SEQ ID NO: 251187 - DNA, 120 bp, Artificial Sequence
  ENSG00000123472_39 (sequence is synthesized)
gccatcatagtgcaaaagcaggcctagaccgtacgtaaatgaataggtatggttctgtcccagtaaaacttaatctacaaaaatatttggcagactagatttagtttcctgacaaccagc

SEQ ID NO: 251188 - DNA, 120 bp, Artificial Sequence
  ENSG00000123472_40 (sequence is synthesized)
caaccctgccaacccacccccatccattcccatgttgaggaattagcttaaacagaggaagagctttgaaagtaaaaggggtttcaggagacagcaaggtactatgcccagttaaaatgg

SEQ ID NO: 251189 - DNA, 120 bp, Artificial Sequence
  ENSG00000123472_41 (sequence is synthesized)
tgccaaacaagtattttccagcccatcacgtcatattccatactgtctcacatgttatagtgctctgtttacttaataaagatgctcacatgttgattgtactaataagttatagtgctc

SEQ ID NO: 251190 - DNA, 120 bp, Artificial Sequence
  ENSG00000123472_42 (sequence is synthesized)
tggggaaacagtctgtgaacagaggattcactaaggacaagactctcagttcaatctttaacattgagatggtaaaagaaaaaactgcagaagaaataaaacaggcagaaaagtttgatt

SEQ ID NO: 251191 - DNA, 120 bp, Artificial Sequence
  ENSG00000123473_0 (sequence is synthesized)
agttcccgcgaccccaacgtcccagaggcggggccggagtcggcggtggcgctccttggagccggctcccgctcctaccctgcaaacagacctcagctccgcggaagttgcgagacgggg

SEQ ID NO: 251192 - DNA, 61 bp, Artificial Sequence
  ENSG00000123473_1 (sequence is synthesized)
ccctgacatgagccattgacttttaaagcaggagaataatttgatcagatttatatggaaa

SEQ ID NO: 251193 - DNA, 120 bp, Artificial Sequence
  ENSG00000123473_2 (sequence is synthesized)
tttaaagcaggagaataatttgatcagatttatatggaaacactcttctagcagcattatggggacttttccataagtctggatactgaggatttggaattaaagaaatcattcaccaga

SEQ ID NO: 251194 - DNA, 120 bp, Artificial Sequence
  ENSG00000123473_3 (sequence is synthesized)
catcatggagcctatatatccttttgcacggccccagatgaataccaggtttccttcaagcaggatggtacctttccactttcctccatcaaaatgtgcactttggaacccaacgccaac

SEQ ID NO: 251195 - DNA, 120 bp, Artificial Sequence
  ENSG00000123473_4 (sequence is synthesized)
tggagatttcatctacttacatctcagttactacagaaatccaaagcttgtggtgactgagaagaccatccgacttgcttatcgtcatgctaagcagaataaaaaaaattcgtcatgctt

SEQ ID NO: 251196 - DNA, 120 bp, Artificial Sequence
  ENSG00000123473_5 (sequence is synthesized)
tttacttggttctctgacagcagacgaagatgaagaaggtgtaacattgacagtagatcgctttgatcctggtcgagaagtacctgaatgcctagaaataacccctactgcttctcttcc

SEQ ID NO: 251197 - DNA, 120 bp, Artificial Sequence
  ENSG00000123473_6 (sequence is synthesized)
tggggactttttgattccatgcaaagttcatactcaagaactttgttcaagagaaatgatagttcacagtgtagatgacttcagttcagctttaaaggctctacagtgccatatatgtag

SEQ ID NO: 251198 - DNA, 120 bp, Artificial Sequence
  ENSG00000123473_7 (sequence is synthesized)
caaagattccttggactgtggtaagctgctttccctaagagttcatatcacttccagggagagtttggacagtgtggaatttgacttgcattgggcagcagtaactctagcaaataactt

SEQ ID NO: 251199 - DNA, 120 bp, Artificial Sequence
  ENSG00000123473_8 (sequence is synthesized)
taaatgcacacctgtgaagcccatccccattattccaacagctctggcaagaaacttgagcagtaatctgaatatttctcaagttcaagggacttataaatatggatatcttaccatgga

SEQ ID NO: 251200 - DNA, 120 bp, Artificial Sequence
  ENSG00000123473_9 (sequence is synthesized)
tgaaacacgcaaattgttacttttgttggaatctgatcccaaggtttattctctaccattggtgggaatttggctgtctggaattacacatatctatagtcctcaggtatgggcttgctg

SEQ ID NO: 251201 - DNA, 120 bp, Artificial Sequence
  ENSG00000123473_10 (sequence is synthesized)
tttgcgatacatattcaattcttctgttcaagaaagggttttttcagaatctggaaatttcatcatagttctctattctatgacacataaggaacctgagttttatgaatgcttcccttg

SEQ ID NO: 251202 - DNA, 120 bp, Artificial Sequence
  ENSG00000123473_11 (sequence is synthesized)
tgatggcaagatacctgactttcggtttcagttgctaaccagtaaggaaacattacatcttttcaaaaatgttgaacctcctgacaaaaatccaatccgttgtgaactgagcgctgaaag

SEQ ID NO: 251203 - DNA, 120 bp, Artificial Sequence
  ENSG00000123473_12 (sequence is synthesized)
ccaaaatgcagaaacagagtttttcagtaaggcttccaagaatttttcaattaagaggtcttcccaaaagttatcttctgggaagatgccaatacatgatcacgactctggtgttgaaga

SEQ ID NO: 251204 - DNA, 120 bp, Artificial Sequence
  ENSG00000123473_13 (sequence is synthesized)
tgaagatttttctccaagaccaattcctagtcctcatccagtgagtcagaagatttctaagatccaaccatcagttcctgaactttcacttgtgttggatggcaatttcatagaatcaaa

SEQ ID NO: 251205 - DNA, 120 bp, Artificial Sequence
  ENSG00000123473_14 (sequence is synthesized)
ccctctgcctactccattggaaatggtgaataatgaaaatcctcctttgattaaccacttggaacacttgaagccattgcaaccccagctttatgatgagaaacacagtccagaagttga

SEQ ID NO: 251206 - DNA, 120 bp, Artificial Sequence
  ENSG00000123473_15 (sequence is synthesized)
agctggagagccttccttgagaggaataccaaatcagttaaaccaggataaaccagctcttttgagacactgcaaagtaagacagccacctgcctataagaaagggaacccccataccag

SEQ ID NO: 251207 - DNA, 120 bp, Artificial Sequence
  ENSG00000123473_16 (sequence is synthesized)
gaacagtattaaaccatcttctcataatgggccatctcatgatatatttgaaaagctccaaacagtttctgctggaaatgtacaaaacgaagagtatcctataagaccctccacacttaa

SEQ ID NO: 251208 - DNA, 120 bp, Artificial Sequence
  ENSG00000123473_17 (sequence is synthesized)
ttctaggcagtcttctcttgccccgcagtcccaaccacacgattttgttttttcaccccataattcaggaagaccaatggaacttcagatacctactcccccactgccatcttactgttc

SEQ ID NO: 251209 - DNA, 120 bp, Artificial Sequence
  ENSG00000123473_18 (sequence is synthesized)
cacaaacgtttgcaggtgttgtcagcatcatagtcatattcaatatagtccgctaaattcttggcaaggagcaaacacagttggatccattcaagatgtccagtctgaagcccttcaaaa

SEQ ID NO: 251210 - DNA, 120 bp, Artificial Sequence
  ENSG00000123473_19 (sequence is synthesized)
gcattcattatttcacccaagtggatgtccagccctgtactgtaatgcattctgttcttcaagtagtcctatagccttgagacctcagggagatatgggcagttgttctccccacagcaa

SEQ ID NO: 251211 - DNA, 120 bp, Artificial Sequence
  ENSG00000123473_20 (sequence is synthesized)
tattgaaccatcgcctgtggcaagaccgccttcacatatggacttatgtaacccacagccttgcacagtgtgcatgcacacacccaagactgagtcagataatggaatgatgggactatc

SEQ ID NO: 251212 - DNA, 120 bp, Artificial Sequence
  ENSG00000123473_21 (sequence is synthesized)
agcgtttgttggaagcacagtctctgatgccctgttcccctaagacaactgctgttgaagacacagtgcaagctggaagacaaatggagttggtttctgtggaagcacagtcttcccctg

SEQ ID NO: 251213 - DNA, 120 bp, Artificial Sequence
  ENSG00000123473_22 (sequence is synthesized)
gcttgcacatgagaaaaggtgtaagcattgctgtgagcacaggtgctagcttgttttggaatgcagcaggtgaggatcaagagcctgactctcaaatgaagcaagatgataccaaaattt

SEQ ID NO: 251214 - DNA, 120 bp, Artificial Sequence
  ENSG00000123473_23 (sequence is synthesized)
ccagtgaggacatgaatttttctgtcgatattaataatgaagtcacaagtcttccaggtagtgcatcttcattaaaagcagttgatattcccagttttgaagagagcaacattgctgtgg

SEQ ID NO: 251215 - DNA, 120 bp, Artificial Sequence
  ENSG00000123473_24 (sequence is synthesized)
aagaagaatttaaccagccactttctgtatccaactcttctctagttgtgagaaaagaacctgatgtacctgtgttctttccaagtggccagctggcagaaagtgtaagcatgtgtttac

SEQ ID NO: 251216 - DNA, 120 bp, Artificial Sequence
  ENSG00000123473_25 (sequence is synthesized)
agactggaccaacagggggtgccagtaacaattctgaaacatcagaggaaccaaaaattgagcatgtaatgcaacccttgcttcatcaaccatcagataaccagaaaatttaccaggatt

SEQ ID NO: 251217 - DNA, 120 bp, Artificial Sequence
  ENSG00000123473_26 (sequence is synthesized)
tattgggtcaagtaaaccacctattaaatagttcctccaaggaaactgagcagccgtctaccaaagcagtaattatcagtcatgaatgcaccagaacccaaaacgtttaccatacaaaga

SEQ ID NO: 251218 - DNA, 120 bp, Artificial Sequence
  ENSG00000123473_27 (sequence is synthesized)
aaaaaacacatcattcaagactggtggacaaagattgtgtccttaatgcaactcttaagcaactaagaagccttggagtaaaaattgattctcccactaaagtgaagaaaaatgcacata

SEQ ID NO: 251219 - DNA, 120 bp, Artificial Sequence
  ENSG00000123473_28 (sequence is synthesized)
acgtggatcacgccagtgtgttggcatgcatcagcccagaagcagtgatctctggattaaactgcatgtcatttgctaatgttggcatgagcggcttaagccccaatggtgtggatttga

SEQ ID NO: 251220 - DNA, 120 bp, Artificial Sequence
  ENSG00000123473_29 (sequence is synthesized)
gcatggaggcaaatgctatagctctgaaatatttaaatgaaaatcagctgtcacaactgtctgtcactcgatcgaaccaaaataattgtgacccattcagccttctccatattaatacag

SEQ ID NO: 251221 - DNA, 120 bp, Artificial Sequence
  ENSG00000123473_30 (sequence is synthesized)
acagaagcacagtggggcttagtttaatttcaccaaacaacatgtcatttgcaaccaaaaaatatatgaagagatatggactcctacaaagcagtgacaatagtgaagatgaagaggaac

SEQ ID NO: 251222 - DNA, 120 bp, Artificial Sequence
  ENSG00000123473_31 (sequence is synthesized)
ctcccgacaatgcagatagcaagagtgaatatttattgaatcagaaccttaggtccatacctgaacagcttggtggtcagaaagagccttctaagaatgaccatgaaataattaattgtt

SEQ ID NO: 251223 - DNA, 120 bp, Artificial Sequence
  ENSG00000123473_32 (sequence is synthesized)
ctaactgtgaatctgtggggaccaacgcagatacgccagtattgagaaatattacaaatgaagttttgcagacaaaagcaaaacagcagttgactgaaaagccagctttcttagtaaaga

SEQ ID NO: 251224 - DNA, 120 bp, Artificial Sequence
  ENSG00000123473_33 (sequence is synthesized)
accttaaaccaagtcctgcagtgaaccttcgaaccgggaaagcagagttcactcaacatcctgagaaagaaaatgaaggggacattacaatttttcctgaaagtttgcaaccttctgaaa

SEQ ID NO: 251225 - DNA, 120 bp, Artificial Sequence
  ENSG00000123473_34 (sequence is synthesized)
cgctaaagcagatgaatagcatgaattcagtaggcaccttcttagatgtaaaacgtctcagacagttaccaaaattattttaaccttttaactccctgcccttttaatacagggacaggg

SEQ ID NO: 251226 - DNA, 120 bp, Artificial Sequence
  ENSG00000123473_35 (sequence is synthesized)
tgtctcctgaagatacttagggaaaacaggagcctaccacaaggctcctgatcattctggagtcactgtttcttggtagcagccaattgggaagagtgacttctgtgagatggctggctg

SEQ ID NO: 251227 - DNA, 120 bp, Artificial Sequence
  ENSG00000123473_36 (sequence is synthesized)
gtgataggactaagttctcattgttcaaatagagctgttcaacatcactgaaacctttaagaaaagccctgagatcagttattcctacaagtttaagtagtagacagatactatccagct

SEQ ID NO: 251228 - DNA, 69 bp, Artificial Sequence
  ENSG00000123473_37 (sequence is synthesized)
attcctacaagtttaagtagtagacagatactatccagctctaagtctcaactgctcttttatactgta

SEQ ID NO: 251229 - DNA, 77 bp, Artificial Sequence
  ENSG00000123473_38 (sequence is synthesized)
actgtatattttaagaagttccagcatgttgcatctctgcatttatcctatatcattaaaagaacataagttatcat

SEQ ID NO: 251230 - DNA, 120 bp, Artificial Sequence
  ENSG00000123473_39 (sequence is synthesized)
tgcatttatcctatatcattaaaagaacataagttatcatggtgttgggtaaattagcgaaatcaacccttcctaagtttaagggaaaagttatttttaaaaacaacttaataaaaactt

SEQ ID NO: 251231 - DNA, 120 bp, Artificial Sequence
  ENSG00000123473_40 (sequence is synthesized)
acactcttttatacaagagtgtatttccccttaattaggatgcatgttgattaaactcgagatacagctttttgcagtatggtgggttggttttggtgtaacatcttcaacatgtcacac

SEQ ID NO: 251232 - DNA, 120 bp, Artificial Sequence
  ENSG00000123473_41 (sequence is synthesized)
tggctatcaaagaataagaaaattattgagtatgagtgtgttttataaactttctgagtttttcagatgtcttaatattttttaatagaacttaataaaatgtctagattgactattttc

SEQ ID NO: 251233 - DNA, 120 bp, Artificial Sequence
  ENSG00000123473_42 (sequence is synthesized)
gcgaccccaacgtcccagaggcggggccggagtcggcggtggcgctccttggagccggctcccgctcctaccctgcaaacagacctcagctccgcggaagttgcggatactgaggatttg

SEQ ID NO: 251234 - DNA, 120 bp, Artificial Sequence
  ENSG00000123473_43 (sequence is synthesized)
ctccagcctgggtgatggagtgagactttgtctcaaaaaaaatatatatatataaactctttgaaaattacaaaagtagtctgaaaataccatcaccttaaagatagttagttgtttcct

SEQ ID NO: 251235 - DNA, 120 bp, Artificial Sequence
  ENSG00000123473_44 (sequence is synthesized)
ccagctttatgatgagaaacacagtccagaagttgaagctggagagccttccttgagaggaataccaaatcagttaaaccaggataaaccagctcttttgagacactgcaaaccttgcac

SEQ ID NO: 251236 - DNA, 120 bp, Artificial Sequence
  ENSG00000123473_45 (sequence is synthesized)
atataaaaattagctgggcgtgctggcacatgcctgtagtctgagctcctcggacgctgaggctcaagaatcacttgaaccttggaggcggaggttgctgtgaactgaagtcatgctact

SEQ ID NO: 251237 - DNA, 120 bp, Artificial Sequence
  ENSG00000123473_46 (sequence is synthesized)
tccagcctgggcgacagagggagactctatccaccccccacccccccgcaaaaaaaaaagctaagaaatgggttttattgctcagtgtcaacggttttgtgtgtatattcatcttaagta

SEQ ID NO: 251238 - DNA, 120 bp, Artificial Sequence
  ENSG00000123473_47 (sequence is synthesized)
agtacaaaacagatattaattccatgccacaactcaggtatacaaaagaatgtaacttaaaaaagttagtaattgaacttaatatctattttaagcccctatttgttctactgaattata

SEQ ID NO: 251239 - DNA, 120 bp, Artificial Sequence
  ENSG00000123473_48 (sequence is synthesized)
gacaccaaatttcacctaattcaaggtttctttattcccttttctctggggttatatgtaatgtagaggggactaatggtatgccagtactggtgatatggggtgacgtgattctcatcc

SEQ ID NO: 251240 - DNA, 120 bp, Artificial Sequence
  ENSG00000123473_49 (sequence is synthesized)
atctgtgctacaatctgctgaggtgttttcatttgcatctggtctttgtcagatttgtgcaagttcctgctgcaacttttgaccctgttcaggccactggctctcttgtttcctgtccat

SEQ ID NO: 251241 - DNA, 120 bp, Artificial Sequence
  ENSG00000123473_50 (sequence is synthesized)
gctgcactgagcgctttggaatatcattatgtatctcaagctgccttgggtgttggagaagagctttgtgggactgaagacccatttctgcttaaacataatcatgcagacattctgatt

SEQ ID NO: 251242 - DNA, 120 bp, Artificial Sequence
  ENSG00000123473_51 (sequence is synthesized)
gcttcattgtaataccttgtacagaaagaactctgtgaaggtctacctcttcagacaatcagggtttagggcaaaaggtctcttctgctgtttgattttcaaacctgccttggagtttct

SEQ ID NO: 251243 - DNA, 120 bp, Artificial Sequence
  ENSG00000123473_52 (sequence is synthesized)
tttgttcttcctgctagggaggattcaacttgcatgaaacagaatgcagggtgcttttttagggatcccattaatcctgagcgctgttagctttcattctggcttttcttttccctaatg

SEQ ID NO: 251244 - DNA, 120 bp, Artificial Sequence
  ENSG00000123473_53 (sequence is synthesized)
catcctattgagactttgtctagtgtaggatgtaaaaaagcctgatgcatatagtattccaaatctttagtcttaaacactaatttcagcttttaaaacttggtaccagcactcagaaat

SEQ ID NO: 251245 - DNA, 120 bp, Artificial Sequence
  ENSG00000123473_54 (sequence is synthesized)
tttctgttttgctgggcatgccatctgtgatacaatgagtattcctgactaaatgggagggtagtactttgatttttcaaagtattttcccatcatagatataagtacataggaaaatat

SEQ ID NO: 251246 - DNA, 120 bp, Artificial Sequence
  ENSG00000123473_55 (sequence is synthesized)
aattccttatttggttttcctttttaatacagagggtttgtaatatagtgtgtttaataacctttaatactagattataaattttttgacagcaagtactaagtcttacttgtttctata

SEQ ID NO: 251247 - DNA, 120 bp, Artificial Sequence
  ENSG00000123473_56 (sequence is synthesized)
tttatcgaagtgatcaactagagggtgcccagtgacttgatttattgtgacattaacaatacaaggttaaacttgctatcatcaggtaaatagggtagtttattaaggctggctggtcca

SEQ ID NO: 251248 - DNA, 120 bp, Artificial Sequence
  ENSG00000123473_57 (sequence is synthesized)
gcttccctggtcaactaacactggcctgaaaaataaaataatttgtggttgtcagatactaaattaaatgatctgagtactactgcaacttattaaaggactttattcaatttctagaag

SEQ ID NO: 251249 - DNA, 120 bp, Artificial Sequence
  ENSG00000123473_58 (sequence is synthesized)
aagatacattaatctaaatgttagttgcattagtatattttcagaatgtccatgtaatgtgaaagaattgtccagtcaatttatatgccagagatatggtggcttggttaataaccaggg

SEQ ID NO: 251250 - DNA, 120 bp, Artificial Sequence
  ENSG00000123485_0 (sequence is synthesized)
agtccgggttggcgcttgggtactggctgggtccgatgctgggtacgctgcgcgccatggagggcgaggacgtggaagacgaccagctgctgcagaagctcagggccagtcgccgccgct

SEQ ID NO: 251251 - DNA, 120 bp, Artificial Sequence
  ENSG00000123485_1 (sequence is synthesized)
tccagaggcgcatgcagcggctgatagagaagtacaaccagcccttcgaggacaccccggtggtgcaaatggccacgctgacctacgagacgccacagggattgagaatttggggtggaa

SEQ ID NO: 251252 - DNA, 120 bp, Artificial Sequence
  ENSG00000123485_2 (sequence is synthesized)
gactaataaaggaaagaaacgaaggagagatccaggactcctccatgaagcccgcggacaggacagatggctccgtgcaagctgcagcctggggtcctgagcttccctcgcaccgcacag

SEQ ID NO: 251253 - DNA, 120 bp, Artificial Sequence
  ENSG00000123485_3 (sequence is synthesized)
tcctgggagccgattcaaaaagcggtgaggtcgatgccacgtcagaccaggaagagtcagttgcttgggccttagcacctgcagtgcctcaaagccctttgaaaaatgaattaagaagga

SEQ ID NO: 251254 - DNA, 120 bp, Artificial Sequence
  ENSG00000123485_4 (sequence is synthesized)
aatacttgacccaagtggatatactgctacaaggtgcagagtattttgagtgtgcaggtaacagagctggaagggatgtacgtgtgactccgctgccttcactggcctcacctgccgtgc

SEQ ID NO: 251255 - DNA, 120 bp, Artificial Sequence
  ENSG00000123485_5 (sequence is synthesized)
ctgcccccggatactgcagtcgtatctccagaaagagtcctggtgacccagcgaaaccagcttcatctcccagagaatgggatcctttgcatccttcctccacagacatggccttagtac

SEQ ID NO: 251256 - DNA, 120 bp, Artificial Sequence
  ENSG00000123485_6 (sequence is synthesized)
ctagaaatgacagcctctccctacaagagaccagtagcagcagcttcttaagcagccagccctttgaagatgatgacatttgcaatgtgaccatcagtgacctgtacgcagggatgctgc

SEQ ID NO: 251257 - DNA, 120 bp, Artificial Sequence
  ENSG00000123485_7 (sequence is synthesized)
actccatgagccggctgttgagcacaaagccatcaagcatcatctccaccaaaacgttcatcatgcaaaactggaactccaggaggaggcacagatataagagcaggatgaacaaaacat

SEQ ID NO: 251258 - DNA, 120 bp, Artificial Sequence
  ENSG00000123485_8 (sequence is synthesized)
attgcaaaggagccagacgttctcagaggagctccaaggagaacttcataccctgctctgagcctgtgaaagggacaggggcattaagagattgcaagaacgtattagatgtttcttgcc

SEQ ID NO: 251259 - DNA, 120 bp, Artificial Sequence
  ENSG00000123485_9 (sequence is synthesized)
gtaagacaggtttaaaattggaaaaagcttttcttgaagtcaacagaccccaaatccataagttagatccaagttggaaggagcgcaaagtgacaccctcgaagtattcttccttgattt

SEQ ID NO: 251260 - DNA, 120 bp, Artificial Sequence
  ENSG00000123485_10 (sequence is synthesized)
acttcgactccagtgcaacatataatcttgatgaggaaaatagatttaggacattaaaatggttaatttctcctgtaaaaatagtttccagaccaacaatacgacagggccatggagaga

SEQ ID NO: 251261 - DNA, 120 bp, Artificial Sequence
  ENSG00000123485_11 (sequence is synthesized)
accgtcagagggagattgaaatccgatttgatcagcttcatcgggaatattgcctgagtcccaggaaccagcctcgccggatgtgcctcccggactcctgggccatgaacatgtacagag

SEQ ID NO: 251262 - DNA, 120 bp, Artificial Sequence
  ENSG00000123485_12 (sequence is synthesized)
ggggtcctgcgagtcctggtggccttcagggcttagaaacccgcaggctgagtttaccttccagcaaagcaaaagcaaaaagtttaagtgaggcttttgaaaacctaggcaaaagatctc

SEQ ID NO: 251263 - DNA, 120 bp, Artificial Sequence
  ENSG00000123485_13 (sequence is synthesized)
ttcatcacttccaaagaccaaccccacacacagcgcaactcgcccgcagcagacatctgaccttcacgttcagggaaatagttctggaatatttagaaagtcagtgtcacccagcaaaac

SEQ ID NO: 251264 - DNA, 120 bp, Artificial Sequence
  ENSG00000123485_14 (sequence is synthesized)
tctttcagtcccagataaagaagtgccaggccacggaaggaatcgttacgatgaaattaaagaagaatttgacaagcttcatcaaaagtattgcctcaaatctcctgggcagatgacagt

SEQ ID NO: 251265 - DNA, 120 bp, Artificial Sequence
  ENSG00000123485_15 (sequence is synthesized)
gcctttatgtattggagtgtctacagataaagcaagtatggaagttcgatatcaaacagaaggcttcttaggaaaattaaatccagaccctcacttccagggtttccagaagttgccatc

SEQ ID NO: 251266 - DNA, 120 bp, Artificial Sequence
  ENSG00000123485_16 (sequence is synthesized)
atcacccctggggtgcagaaaaagtctactgggctcaactgcaattgaggctccttcatctacatgtgttgctcgtgccatcacgagggatggcacgagggaccatcagttccctgcaaa

SEQ ID NO: 251267 - DNA, 120 bp, Artificial Sequence
  ENSG00000123485_17 (sequence is synthesized)
aagacccaggctatcagaaccccagggctccggacgccagggcaattccctgggtgcctcagatggggtggacaacaccgtcagaccgggagaccagggcagctcttcacagcccaactc

SEQ ID NO: 251268 - DNA, 120 bp, Artificial Sequence
  ENSG00000123485_18 (sequence is synthesized)
agaagagagaggagagaacacgtcttacaggatggaagagaaaagtgatttcatgctagaaaaattggaaactaaaagtgtgtagctaggttatttcggagtgttatttatcttcccact

SEQ ID NO: 251269 - DNA, 120 bp, Artificial Sequence
  ENSG00000123485_19 (sequence is synthesized)
tgctctctgtttgtatttttgttttgtttttgattcttgagactgtgaggacttggttgacttctctgcccttaaagtaaatattagtgaaattggttccatcagagataacctcgagtt

SEQ ID NO: 251270 - DNA, 120 bp, Artificial Sequence
  ENSG00000123485_20 (sequence is synthesized)
cttggtgtagaaattatgtgaataaagttgctcaattagaatttttagggttctctttgataggcctgtttttctgatgtgtgtgttttttttgggggggggttatttgtttgtttgttt

SEQ ID NO: 251271 - DNA, 120 bp, Artificial Sequence
  ENSG00000123485_21 (sequence is synthesized)
ttataggcgtgagccactgctcccagccgtgtgttcttttttaaatttagatatgtccagagaatcctctctcctgtttcccatttcattcgagaatattgtttgcttgtgagacgtaag

SEQ ID NO: 251272 - DNA, 120 bp, Artificial Sequence
  ENSG00000123485_22 (sequence is synthesized)
agaatattgtttgcttgtgagacgtaagttcgagccctgcatgcaatgacccttgaaggaaaataaacagtcctggtggtcccagacgctcctgcagccacagcgcctgtgactcctcat

SEQ ID NO: 251273 - DNA, 120 bp, Artificial Sequence
  ENSG00000123485_23 (sequence is synthesized)
gattcttactgaagctgttgatgacaggatatcatggtgacgtttttgtaatgaaatatttcacatattcagaatacattggtgaaactcatgctggagtaaatagttaatatatggcca

SEQ ID NO: 251274 - DNA, 120 bp, Artificial Sequence
  ENSG00000123485_24 (sequence is synthesized)
ctctaggcctcccctcaccgcttggcacagtgcctggccttaggcacgctgtcagcatgcgtgtggatgaactccgagtgaagacacaaagctagtttccgaccctttgggccagtgggc

SEQ ID NO: 251275 - DNA, 120 bp, Artificial Sequence
  ENSG00000123485_25 (sequence is synthesized)
tgtcagacaaacgtacttggggggaaatcggaaatgaagtggctcattaaggccaaagttccctttgcctcattgtcttggttctgggctgtcaccaccttacagtcacaagtctactcc

SEQ ID NO: 251276 - DNA, 120 bp, Artificial Sequence
  ENSG00000123485_26 (sequence is synthesized)
aagttattaccagtagttgagtcctgaactcacctatgaatattcagattttttttttcctggtctagcaatgctgtcataaacttctctagacatggtttttttgtgtgtgtgtgtctt

SEQ ID NO: 251277 - DNA, 120 bp, Artificial Sequence
  ENSG00000123485_27 (sequence is synthesized)
ttaatgagcttgccagtttgttccagaagccaaaaggtcagctatactcagaagctcttaaaaattctgacttctcttttttgatcagcctgcagtgcctcaaagccctttgaaaaatga

SEQ ID NO: 251278 - DNA, 120 bp, Artificial Sequence
  ENSG00000123496_0 (sequence is synthesized)
cttccggatgaaggctatttgaagtcgccataacctggtcagaagtgtgcctgtcggcggggagagaggcaatatcaaggttttaaatctcggagaaatggctttcgtttgcttggctat

SEQ ID NO: 251279 - DNA, 120 bp, Artificial Sequence
  ENSG00000123496_1 (sequence is synthesized)
cggatgcttatatacctttctgataagcacaacatttggctgtacttcatcttcagacaccgagataaaagttaaccctcctcaggattttgagatagtggatcccggatacttaggtta

SEQ ID NO: 251280 - DNA, 120 bp, Artificial Sequence
  ENSG00000123496_2 (sequence is synthesized)
tctctatttgcaatggcaacccccactgtctctggatcattttaaggaatgcacagtggaatatgaactaaaataccgaaacattggtagtgaaacatggaagaccatcattactaagaa

SEQ ID NO: 251281 - DNA, 120 bp, Artificial Sequence
  ENSG00000123496_3 (sequence is synthesized)
tctacattacaaagatgggtttgatcttaacaagggcattgaagcgaagatacacacgcttttaccatggcaatgcacaaatggatcagaagttcaaagttcctgggcagaaactactta

SEQ ID NO: 251282 - DNA, 120 bp, Artificial Sequence
  ENSG00000123496_4 (sequence is synthesized)
ttggatatcaccacaaggaattccagaaactaaagttcaggatatggattgcgtatattacaattggcaatatttactctgttcttggaaacctggcataggtgtacttcttgataccaa

SEQ ID NO: 251283 - DNA, 120 bp, Artificial Sequence
  ENSG00000123496_5 (sequence is synthesized)
gtatgagggcttggatcatgcattacagtgtgttgattacatcaaggctgatggacaaaatataggatgcagatttccctatttggaggcatcagactataaagatttctatatttgtgt

SEQ ID NO: 251284 - DNA, 120 bp, Artificial Sequence
  ENSG00000123496_6 (sequence is synthesized)
taatggatcatcagagaacaagcctatcagatccagttatttcacttttcagcttcaaaatatagttaaacctttgccgccagtctatcttacttttactcgggagagttcatgtgaaat

SEQ ID NO: 251285 - DNA, 120 bp, Artificial Sequence
  ENSG00000123496_7 (sequence is synthesized)
taagctgaaatggagcatacctttgggacctattccagcaaggtgttttgattatgaaattgagatcagagaagatgatactaccttggtgactgctacagttgaaaatgaaacatacac

SEQ ID NO: 251286 - DNA, 120 bp, Artificial Sequence
  ENSG00000123496_8 (sequence is synthesized)
cttgaaaacaacaaatgaaacccgacaattatgctttgtagtaagaagcaaagtgaatatttattgctcagatgacggaatttggagtgagtggagtgataaacaatgctgggaaggtga

SEQ ID NO: 251287 - DNA, 120 bp, Artificial Sequence
  ENSG00000123496_9 (sequence is synthesized)
agacctatcgaagaaaactttgctacgtttctggctaccatttggtttcatcttaatattagttatatttgtaaccggtctgcttttgcgtaagccaaacacctacccaaaaatgattcc

SEQ ID NO: 251288 - DNA, 120 bp, Artificial Sequence
  ENSG00000123496_10 (sequence is synthesized)
agaatttttctgtgatacatgaagactttccatatcaagagacatggtattgactcaacagtttccagtcatggccaaatgttcaatatgagtctcaataaactgaatttttcttgcgaa

SEQ ID NO: 251289 - DNA, 120 bp, Artificial Sequence
  ENSG00000123496_11 (sequence is synthesized)
taaaaatttgatcctaagattctataaagtagccattgaggcttaccaaagttacaatattacagatggatcaggggagacggttgctatggagatggatgatatcataactccattgtg

SEQ ID NO: 251290 - DNA, 120 bp, Artificial Sequence
  ENSG00000123496_12 (sequence is synthesized)
gtccccctggtccttgtgaaaaactccggtgttcctggtaaccacatagtgtataaagcccctcattgcactagtgacaatcctgtaacccagaagcaaaggagagaattgtctttgtgt

SEQ ID NO: 251291 - DNA, 120 bp, Artificial Sequence
  ENSG00000123500_0 (sequence is synthesized)
caccttctgcactgctcatctgggcagaggaagcttcagaaagctgccaaggcaccatctccaggaactcccagcacgcagaatccatctgagaatatgctgccacaaataccctttttg

SEQ ID NO: 251292 - DNA, 120 bp, Artificial Sequence
  ENSG00000123500_1 (sequence is synthesized)
ctgctagtatccttgaacttggttcatggagtgttttacgctgaacgataccaaatgcccacaggcataaaaggcccactacccaacaccaagacacagttcttcattccctacaccata

SEQ ID NO: 251293 - DNA, 120 bp, Artificial Sequence
  ENSG00000123500_2 (sequence is synthesized)
aagagtaaaggtatagcagtaagaggagagcaaggtactcctggtccaccaggccctgctggacctcgagggcacccaggtccttctggaccaccaggaaaaccaggctacggaagtcct

SEQ ID NO: 251294 - DNA, 120 bp, Artificial Sequence
  ENSG00000123500_3 (sequence is synthesized)
ggactccaaggagagccagggttgccaggaccaccgggaccatcagctgtagggaaaccaggtgtgccaggactcccaggaaaaccaggagagagaggaccatatggaccaaaaggagat

SEQ ID NO: 251295 - DNA, 120 bp, Artificial Sequence
  ENSG00000123500_4 (sequence is synthesized)
gttggaccagctggcctaccaggaccccggggcccaccaggaccacctggaatccctggaccggctggaatttctgtgccaggaaaacctggacaacagggacccacaggagccccagga

SEQ ID NO: 251296 - DNA, 120 bp, Artificial Sequence
  ENSG00000123500_5 (sequence is synthesized)
cccaggggctttcctggagaaaagggtgcaccaggagtccctggtatgaatggacagaaaggggaaatgggatatggtgctcctggtcgtccaggtgagaggggtcttccaggccctcag

SEQ ID NO: 251297 - DNA, 120 bp, Artificial Sequence
  ENSG00000123500_6 (sequence is synthesized)
ggtcccacaggaccatctggccctcctggagtgggaaaaagaggtgaaaatggggttccaggacagccaggcatcaaaggtgatagaggttttccgggagaaatgggaccaattggccca

SEQ ID NO: 251298 - DNA, 120 bp, Artificial Sequence
  ENSG00000123500_7 (sequence is synthesized)
ccaggtccccaaggccctcctggggaacgagggccagaaggcattggaaagccaggagctgctggagccccaggccagccagggattccaggaacaaaaggtctccctggggctccagga

SEQ ID NO: 251299 - DNA, 120 bp, Artificial Sequence
  ENSG00000123500_8 (sequence is synthesized)
atagctgggcccccagggcctcctggctttgggaaaccaggcttgccaggcctgaagggagaaagaggacctgctggccttcctgggggtccaggtgccaaaggggaacaagggccagca

SEQ ID NO: 251300 - DNA, 120 bp, Artificial Sequence
  ENSG00000123500_9 (sequence is synthesized)
ggtcttcctgggaagccaggtctgactggaccccctgggaatatgggaccccaaggaccaaaaggcatcccgggtagccatggtctcccaggccctaaaggtgagacagggccagctggg

SEQ ID NO: 251301 - DNA, 120 bp, Artificial Sequence
  ENSG00000123500_10 (sequence is synthesized)
cctgcaggataccctggggctaagggtgaaaggggttcccctgggtcagatggaaaaccagggtacccaggaaaaccaggtctcgatggtcctaagggtaacccagggttaccaggtcca

SEQ ID NO: 251302 - DNA, 120 bp, Artificial Sequence
  ENSG00000123500_11 (sequence is synthesized)
aaaggtgatcctggagttggaggacctcctggtctcccaggccctgtgggcccagcaggagcaaagggaatgcccggacacaatggagaggctggcccaagaggtgcccctggaatacca

SEQ ID NO: 251303 - DNA, 120 bp, Artificial Sequence
  ENSG00000123500_12 (sequence is synthesized)
ggtactagaggccctattgggccaccaggcattccaggattccctgggtctaaaggggatccaggaagtcccggtcctcctggcccagctggcatagcaactaagggcctcaatggaccc

SEQ ID NO: 251304 - DNA, 120 bp, Artificial Sequence
  ENSG00000123500_13 (sequence is synthesized)
gtcttccagggccccctgggcctccaggcccaccaggtcaagcagtcatgcctgagggttttataaaggcaggccaaaggcccagtctttctgggacccctcttgttagtgccaaccagg

SEQ ID NO: 251305 - DNA, 120 bp, Artificial Sequence
  ENSG00000123500_14 (sequence is synthesized)
gggtaacaggaatgcctgtgtctgcttttactgttattctctccaaagcttacccagcaataggaactcccataccatttgataaaattttgtataacaggcaacagcattatgacccaa

SEQ ID NO: 251306 - DNA, 120 bp, Artificial Sequence
  ENSG00000123500_15 (sequence is synthesized)
ggactggaatctttacttgtcagataccaggaatatactatttttcataccacgtgcatgtgaaagggactcatgtttgggtaggcctgtataagaatggcacccctgtaatgtacacct

SEQ ID NO: 251307 - DNA, 120 bp, Artificial Sequence
  ENSG00000123500_16 (sequence is synthesized)
atgatgaatacaccaaaggctacctggatcaggcttcagggagtgccatcatcgatctcacagaaaatgaccaggtgtggctccagcttcccaatgccgagtcaaatggcctatactcct

SEQ ID NO: 251308 - DNA, 120 bp, Artificial Sequence
  ENSG00000123500_17 (sequence is synthesized)
ctgagtatgtccactcctctttctcaggattcctagtggctccaatgtgagtacacacagagctaatctaaatcttgtgctagaaaaagcattctctaactctaccccaccctacaaaat

SEQ ID NO: 251309 - DNA, 120 bp, Artificial Sequence
  ENSG00000123500_18 (sequence is synthesized)
gcatatggaggtaggctgaaaagaatgtaatttttattttctgaaatacagatttgagctatcagaccaacaaaccttccccctgaaaagtgagcagcaacgtaaaaacgtatgtgaagc

SEQ ID NO: 251310 - DNA, 120 bp, Artificial Sequence
  ENSG00000123500_19 (sequence is synthesized)
ctctcttgaatttctagttagcaatcttaaggctctttaaggttttctccaatattaaaaaatatcaccaaagaagtcctgctatgttaaaaacaaacaacaaaaaacaaacaacaaaaa

SEQ ID NO: 251311 - DNA, 120 bp, Artificial Sequence
  ENSG00000123500_20 (sequence is synthesized)
aaaaattaaaaaaaaaaacagaaatagagctctaagttatgtgaaatttgatttgagaaactcggcatttcctttttaaaaaagcctgtttctaactatgaatatgagaacttctaggaa

SEQ ID NO: 251312 - DNA, 120 bp, Artificial Sequence
  ENSG00000123500_21 (sequence is synthesized)
acatccaggaggtatcatataactttgtagaacttaaatacttgaatattcaaatttaaaagacactgtatcccctaaaatatttctgatggtgcactactctgaggcctgtatggcccc

SEQ ID NO: 251313 - DNA, 120 bp, Artificial Sequence
  ENSG00000123500_22 (sequence is synthesized)
tttcatcaatatctattcaaatatacaggtgcatatatacttgttaaagctcttatataaaaaagccccaaaatattgaagttcatctgaaatgcaaggtgctttcatcaatgaaccttt

SEQ ID NO: 251314 - DNA, 120 bp, Artificial Sequence
  ENSG00000123500_23 (sequence is synthesized)
tcaaacttttctatgattgcagagaagctttttatatacccagcataacttggaaacaggtatctgacctattcttatttagttaacacaagtgtgattaatttgatttctttaattcct

SEQ ID NO: 251315 - DNA, 120 bp, Artificial Sequence
  ENSG00000123500_24 (sequence is synthesized)
tattgaatcttatgtgatatgattttctggatttacagaacattagcacatgtaccttgtgcctcccattcaagtgaagttataatttacactgagggtttcaaaattcgactagaagtg

SEQ ID NO: 251316 - DNA, 120 bp, Artificial Sequence
  ENSG00000123500_25 (sequence is synthesized)
gagatatattatttatttatgcactgtactgtatttttatattgctgtttaaaacttttaagctgtgcctcacttattaaagcacaaaatgttttacctactccttatttacgacgcaat

SEQ ID NO: 251317 - DNA, 120 bp, Artificial Sequence
  ENSG00000123500_26 (sequence is synthesized)
aaaataacatcaatagatttttaggctgaattaatttgaaagcagcaatttgctgttctcaaccattctttcaaggcttttcattgttcaaagttaataaaaaagtaggacaataaagtg

SEQ ID NO: 251318 - DNA, 120 bp, Artificial Sequence
  ENSG00000123500_27 (sequence is synthesized)
atcagtctgtggatgatagtcccaataaaaccatattgtaaaaatttgccctaatccgaatttcagtgtattttgaaactattagatatttcaggctatgtcaaagatcctagattattt

SEQ ID NO: 251319 - DNA, 120 bp, Artificial Sequence
  ENSG00000123500_28 (sequence is synthesized)
aatacagacatccaatcctaatttctgtttcttttcctttaggtaaatcattttattttcacttgattacctgagtatagcttccaaaaataactaagacatatattcacataactaaaa

SEQ ID NO: 251320 - DNA, 120 bp, Artificial Sequence
  ENSG00000123500_29 (sequence is synthesized)
aatgatctctcatttatttatggcacatattaaaaatatataggataggttaaaaaagtagataactgtataaagaactcatctgtgaaacatgagaataaaaaaataggttaataacaa

SEQ ID NO: 251321 - DNA, 120 bp, Artificial Sequence
  ENSG00000123500_30 (sequence is synthesized)
gtttttacccctcctgggatcaccactgacagcatccatgaagttctgacagaagaacacaccaggatgacaaagtagtgacttttaaagagcagccaacaacaagcatatagggaatct

SEQ ID NO: 251322 - DNA, 120 bp, Artificial Sequence
  ENSG00000123505_0 (sequence is synthesized)
gcttacacagtatggccggcgacattagctagcgctcgctctactctctctaacgggaaagcagcggaatacaagagactgaactgtatctgcctctatttccaaaagactcacgttcaa

SEQ ID NO: 251323 - DNA, 120 bp, Artificial Sequence
  ENSG00000123505_1 (sequence is synthesized)
ctttcgctcacacaaagccgggaaaattttattagtcctttttttaaaaaaagttaatataaaattatagcaaaaaaaaaaaggaacctgaactttagtaacacagctggaacaatccgc

SEQ ID NO: 251324 - DNA, 120 bp, Artificial Sequence
  ENSG00000123505_2 (sequence is synthesized)
agcggcggcggcagcggcgggagaagaggtttaatttagttgattttctgtggttgttggttgttcgctagtctcacggtgatggaagctgcacattttttcgaagggaccgagaagctg

SEQ ID NO: 251325 - DNA, 120 bp, Artificial Sequence
  ENSG00000123505_3 (sequence is synthesized)
ctggaggtttggttctcccggcagcagcccgacgcaaaccaaggatctggggatcttcgcactatcccaagatctgagtgggacatacttttgaaggatgtgcaatgttcaatcataagt

SEQ ID NO: 251326 - DNA, 120 bp, Artificial Sequence
  ENSG00000123505_4 (sequence is synthesized)
gtgacaaaaactgacaagcaggaagcttatgtactcagtgagagtagcatgtttgtctccaagagacgtttcattttgaagacatgtggtaccaccctcttgctgaaagcactggttccc

SEQ ID NO: 251327 - DNA, 120 bp, Artificial Sequence
  ENSG00000123505_5 (sequence is synthesized)
ctgttgaagcttgctagggattacagtgggtttgactcaattcaaagcttcttttattctcgtaagaatttcatgaagccttctcaccaagggtacccacaccggaatttccaggaagaa

SEQ ID NO: 251328 - DNA, 120 bp, Artificial Sequence
  ENSG00000123505_6 (sequence is synthesized)
atagagtttcttaatgcaattttcccaaatggagcagcatattgtatgggacgtatgaattctgactgttggtacttatatactctggatttcccagagagtcgggtaatcagtcagcca

SEQ ID NO: 251329 - DNA, 120 bp, Artificial Sequence
  ENSG00000123505_7 (sequence is synthesized)
gatcaaaccttggaaattctgatgagtgagcttgacccagcagttatggaccagttctacatgaaagatggtgttactgcaaaggatgtcactcgtgagagtggaattcgtgacctgata

SEQ ID NO: 251330 - DNA, 120 bp, Artificial Sequence
  ENSG00000123505_8 (sequence is synthesized)
ccaggttctgtcattgatgccacaatgttcaatccttgtgggtattcgatgaatggaatgaaatcggatggaacttattggactattcacatcactccagaaccagaattttcttatgtt

SEQ ID NO: 251331 - DNA, 120 bp, Artificial Sequence
  ENSG00000123505_9 (sequence is synthesized)
agctttgaaacaaacttaagtcagacctcctatgatgacctgatcaggaaagttgtagaagtcttcaagccaggaaaatttgtgaccaccttgtttgttaatcagagttctaaatgtcgc

SEQ ID NO: 251332 - DNA, 120 bp, Artificial Sequence
  ENSG00000123505_10 (sequence is synthesized)
acagtgcttgcttcgccccagaagattgaaggttttaagcgtcttgattgccagagtgctatgttcaatgattacaattttgtttttaccagttttgctaagaagcagcaacaacagcag

SEQ ID NO: 251333 - DNA, 120 bp, Artificial Sequence
  ENSG00000123505_11 (sequence is synthesized)
agttgattaagaaaaatgaagaaaaaacgcaaaaagagaacacatgtagaaggtggtggatgctttctagatgtcgatgctgggggcagtgctttccataaccaccactgtgtagttgca

SEQ ID NO: 251334 - DNA, 120 bp, Artificial Sequence
  ENSG00000123505_12 (sequence is synthesized)
gaaagccctagatgtaatgatagtgtaatcattttgaattgtatgcattattatatcaaggagttagatatcttgcatgaatgctctcttctgtgtttaggtattctctgccactcttgc

SEQ ID NO: 251335 - DNA, 120 bp, Artificial Sequence
  ENSG00000123505_13 (sequence is synthesized)
tgtgaaattgaagtgcatgtagaaaaaaccttttactatatgaaactttacaacacttgtgaaagcaactcaatttggtttatgcacagtgtaatatttctccaagtatcatccaaaatt

SEQ ID NO: 251336 - DNA, 120 bp, Artificial Sequence
  ENSG00000123505_14 (sequence is synthesized)
ctattaaattgctgccagaattttacatccagttacctccactttctagaacatattctttactaatgttattgaaaccaatttctacttcatactgatgtttttggaaacagcaattaa

SEQ ID NO: 251337 - DNA, 120 bp, Artificial Sequence
  ENSG00000123505_15 (sequence is synthesized)
agtttttcttccatgagttgagtccttaagaaaatgattccagttactcattttgcatatttgctattttaacattattggaccctgcatttatagtcctttgatttcttccctctccct

SEQ ID NO: 251338 - DNA, 120 bp, Artificial Sequence
  ENSG00000123505_16 (sequence is synthesized)
ggtgtctcccccaagaccccaaataaagcaatacactgttaacactgtgggtttatatactaattctataccccagatggggaatgggggagatggtccctgggcttaatattctttaaa

SEQ ID NO: 251339 - DNA, 120 bp, Artificial Sequence
  ENSG00000123505_17 (sequence is synthesized)
gggcatgggaatttagcctctcttttattgtaatgtgctcttttggaaaatagttggttagcagggaagacccagagttgtagattgagattagggtgtactggctgaactgtggaaaac

SEQ ID NO: 251340 - DNA, 120 bp, Artificial Sequence
  ENSG00000123505_18 (sequence is synthesized)
atacaattctgtgttcctcagtaaatgagattagcgtctaatgagtagcacccctttactaacttagtagtagtataaaatcatttttatttagttaattaccagagagatttagcataa

SEQ ID NO: 251341 - DNA, 120 bp, Artificial Sequence
  ENSG00000123505_19 (sequence is synthesized)
ttttgttctggattcagtaaatcaagtcagcttggatcattcaccttaacttttcctttagcagccatttccactagtttccattaagtagtgttctataaactttgatccaaagcagaa

SEQ ID NO: 251342 - DNA, 120 bp, Artificial Sequence
  ENSG00000123505_20 (sequence is synthesized)
tcaatgtcttttccatctcgtgacttaaagttctgtgactgtgatgcatgtgagtgttccgacttcatctgttcctcttaactacggtgtttcccttaccatggcattcataggatgaaa

SEQ ID NO: 251343 - DNA, 120 bp, Artificial Sequence
  ENSG00000123505_21 (sequence is synthesized)
tgaatgactgcccagaatgagaatttgtccagattattcagataaacatcataaagcagaatacattataaataagtagaatatgaataaatagaataataaaattccaaaatactcaat

SEQ ID NO: 251344 - DNA, 120 bp, Artificial Sequence
  ENSG00000123505_22 (sequence is synthesized)
gggaaatgactagtaatataggctttcaagagttggtaccttttagctatatttgcagattctctgggattttaaggaactgagaaaacagcaaagttgactaaattttatatttcttgt

SEQ ID NO: 251345 - DNA, 120 bp, Artificial Sequence
  ENSG00000123505_23 (sequence is synthesized)
cctctaaatattttgataatttctggattgatgcagtgatgtttttgttccttccgtatttataaatgaaacacctttttttagtgtttctaaacctaaaatctacttggtttgaaatca

SEQ ID NO: 251346 - DNA, 120 bp, Artificial Sequence
  ENSG00000123505_24 (sequence is synthesized)
agtggttggaacactgtttgacttttatttgaagcatgttgttgattgaaaatttcattgaggaagttttcaatcagtgtgatcagtttgattctgtaatgagcacagcacctaatattt

SEQ ID NO: 251347 - DNA, 120 bp, Artificial Sequence
  ENSG00000123505_25 (sequence is synthesized)
tgaggagctctgttttgaggaccaatgcttaaggtggactttgttcgtaaacaatatcccaatagatttgttgacttgaggtctggtttggttttgtttttgttttgttttgttttgttt

SEQ ID NO: 251348 - DNA, 120 bp, Artificial Sequence
  ENSG00000123505_26 (sequence is synthesized)
tgtttccaatagaattaagaattctaatgttgaaaaactgcacaaatttttatgggacaaagcctagaaaagagaaatgtagtttgaatcataatctaaatcatcgtatgatagaagagg

SEQ ID NO: 251349 - DNA, 120 bp, Artificial Sequence
  ENSG00000123505_27 (sequence is synthesized)
gaaagttttggtgccataatttctcctttcactggtgttggacttaaatcagttgaaatgtatttctgtaccacaatttacgcttcaataaaagtttaattgtctagtgacattcagaaa

SEQ ID NO: 251350 - DNA, 120 bp, Artificial Sequence
  ENSG00000123505_28 (sequence is synthesized)
tttactttgacttagatgttttgggagtacagtagtgatctttatatagcttgtaattcaaaatatgcagaatttataaagaacattaaaatatcagataaaatatttttagttaagatt

SEQ ID NO: 251351 - DNA, 120 bp, Artificial Sequence
  ENSG00000123505_29 (sequence is synthesized)
gattaatagcttattgcaaattatgtatacacatgtaaaaataattgtgtatcataaatcagtgctgtttaaatgatggaattttaaaatgtagaattgatcacctgccacctctgattt

SEQ ID NO: 251352 - DNA, 120 bp, Artificial Sequence
  ENSG00000123505_30 (sequence is synthesized)
ttcatacagcatagagagagttcatcttcatctggccattcactctactttatgtctcactcagtggttctttttgcgtttttgtttgagacaagtttcactttgtctcccaggctggag

SEQ ID NO: 251353 - DNA, 120 bp, Artificial Sequence
  ENSG00000123505_31 (sequence is synthesized)
ggagagcagtggcatcattatagctcactgcattgtcaaactcttgagttcaagcacccagctaatttttattttatttttagtagagatggaatcttgctgtgttgcccaggctggtct

SEQ ID NO: 251354 - DNA, 120 bp, Artificial Sequence
  ENSG00000123505_32 (sequence is synthesized)
ctcctgccctctagcagtcctccagcctcagtggttcttaacatacagatcataatgtcctttgacaatatgaagaaggatatgattcccttcagaaaaatgcctagtgctctgctccag

SEQ ID NO: 251355 - DNA, 120 bp, Artificial Sequence
  ENSG00000123505_33 (sequence is synthesized)
cattttatataataattgacctggctttttaaaattgcacagtgtaaattagtgtttcttgaatgaaattcgtaagggtttctttcatccatttactaagcttttatttatagaggtcag

SEQ ID NO: 251356 - DNA, 120 bp, Artificial Sequence
  ENSG00000123505_34 (sequence is synthesized)
ggaacaaaggttatctgataacatccttacttcctagataaggctgaaaacctaagataatttagtaactttgcacaaagtcgctcataagcatgaaaattgaacttagcacatctacta

SEQ ID NO: 251357 - DNA, 120 bp, Artificial Sequence
  ENSG00000123505_35 (sequence is synthesized)
atatgaaaccaaaccaggctaatcagagtgttgggtatttactgcaaatacccgccaagtcagtcgatcctgcttatctgggaatttacctactgtttccattcctttcactgatgacat

SEQ ID NO: 251358 - DNA, 88 bp, Artificial Sequence
  ENSG00000123505_36 (sequence is synthesized)
ggaatttacctactgtttccattcctttcactgatgacatttcttttttcttgagatggcgtctcgctttgtcacccaggctggagtg

SEQ ID NO: 251359 - DNA, 89 bp, Artificial Sequence
  ENSG00000123505_37 (sequence is synthesized)
ctcatgttggccaggctcgaactcttgacctcaagcccacctctgcctccctgccaaaaggggtgggattatagacatgagctactatg

SEQ ID NO: 251360 - DNA, 120 bp, Artificial Sequence
  ENSG00000123505_38 (sequence is synthesized)
cctgccaaaaggggtgggattatagacatgagctactatgcccagtccactgatggatgacatttctaataagtggcaaatagtatcattctgcttattgtggaagggtagtaacaaacc

SEQ ID NO: 251361 - DNA, 120 bp, Artificial Sequence
  ENSG00000123505_39 (sequence is synthesized)
gtaagcatttttagtaataattgttgctggactcttctgcgtggggactaaattttatttttcattctgtaacttttaagttcagggtaacaagtgctagtttgttacataggtaaactt

SEQ ID NO: 251362 - DNA, 88 bp, Artificial Sequence
  ENSG00000123505_40 (sequence is synthesized)
ggtggtcctctcccttctcccaccctgggactaaattttggactcaattgaagtttatttgtcaaacccttgttaaactcggtctttt

SEQ ID NO: 251363 - DNA, 120 bp, Artificial Sequence
  ENSG00000123505_41 (sequence is synthesized)
acatgtctgaagtttaaaatcaatacaacaatgtgtatttatgagtttggagttagacagaagtttaaaagtgttaggtcccaacctttattatagactagactcttaaaacattggttg

SEQ ID NO: 251364 - DNA, 120 bp, Artificial Sequence
  ENSG00000123505_42 (sequence is synthesized)
aggatgatcaaactcaaataagtttccttatttcattcatggttatttctattaagtagaaaaaaatttataaccttgatcattttctttattttttttaatttaggatcttgttctgtt

SEQ ID NO: 251365 - DNA, 120 bp, Artificial Sequence
  ENSG00000123505_43 (sequence is synthesized)
gtctaggctggagtgccgtggctgttaacaggtgcgatcatagcatactgcttccttgaactcctaggctcaagcagtcttgctgcagcttcccaagtagctgggaatgcagggttctgc

SEQ ID NO: 251366 - DNA, 120 bp, Artificial Sequence
  ENSG00000123505_44 (sequence is synthesized)
catcacacttggctttgtcattttctttatttggcaacattttagttccacagtcaaatatgtaataagctgaaaaatcttatgaaaatgtatattctgatctttctcagaatatgcttc

SEQ ID NO: 251367 - DNA, 120 bp, Artificial Sequence
  ENSG00000123505_45 (sequence is synthesized)
cgttagaaaatatttcctcaattttcattaaaaacagatggtgttcctagaaaagcaaaatattacatatctgtgcaatatgtaattcacaagattcatttgccaaaaacaggtgagtga

SEQ ID NO: 251368 - DNA, 120 bp, Artificial Sequence
  ENSG00000123505_46 (sequence is synthesized)
atttgggggttcattagtaagcagtcaccaagtttctgtcacagacacataactggaaatgtgattttattctcctggatggacaattgtgatggattttttgggttccgggcttcaggc

SEQ ID NO: 251369 - DNA, 120 bp, Artificial Sequence
  ENSG00000123505_47 (sequence is synthesized)
tttgcaatctcatcttctttgcccttcctcttgtcataatggaagaggtgctgctaatttgggttccatcctttcctgctttcagagactgtcctgtgatttcctaaaacatttccatta

SEQ ID NO: 251370 - DNA, 120 bp, Artificial Sequence
  ENSG00000123505_48 (sequence is synthesized)
gtttgtttgaattttctgattttcttcccttagggccctccacaggcctctgtgctagtgccttgaatgatggcaagtgtacaaaaaaaattttttttctttttaagacgtttttgttct

SEQ ID NO: 251371 - DNA, 63 bp, Artificial Sequence
  ENSG00000123505_49 (sequence is synthesized)
tcctcaagcaatacgcccacctttgcctcccagcatgttggaattacaggcatgagccactgc

SEQ ID NO: 251372 - DNA, 86 bp, Artificial Sequence
  ENSG00000123505_50 (sequence is synthesized)
cccacctttgcctcccagcatcaagtgtccaaattcttactccaaaactgaactttgggctgggcgccatggctcacacctgtaat

SEQ ID NO: 251373 - DNA, 120 bp, Artificial Sequence
  ENSG00000123505_51 (sequence is synthesized)
tgcttgagcctaggagtttgaggccagtctgagcaacatagtgagaccctgtctctacaataaataaaaggaaattgaggctgtaatgagctgtgattgtaccactgtactctagcccga

SEQ ID NO: 251374 - DNA, 120 bp, Artificial Sequence
  ENSG00000123505_52 (sequence is synthesized)
gcaaaagtgaaaccctgtctcaaaaacaaaaatcttgacttgtgcaatagccacagttttcctggattctcaatagaaccctatggtgacatttgaaacacaaagctagaggtatgtgac

SEQ ID NO: 251375 - DNA, 120 bp, Artificial Sequence
  ENSG00000123505_53 (sequence is synthesized)
ttcaagatggtaagaaaaccatgaaacagacttgtcaagggatgtctgataaattgttggatatctggcctaggggcccagacaatagattttagatttgtaaacatcttaatatggagg

SEQ ID NO: 251376 - DNA, 78 bp, Artificial Sequence
  ENSG00000123505_54 (sequence is synthesized)
gacaatagattttagatttgtaaacatcttaatatggagggttttgtgtgtgtgtgtataggcgccatcttggctcac

SEQ ID NO: 251377 - DNA, 90 bp, Artificial Sequence
  ENSG00000123505_55 (sequence is synthesized)
gtcaacctcctaagtagctgggataacaggcacgcaccaccacgcctggatgattttttgtaattttagtaaagatggggtttcatcatg

SEQ ID NO: 251378 - DNA, 120 bp, Artificial Sequence
  ENSG00000123505_56 (sequence is synthesized)
attacaggcatgagtcactgcgcccagttttaacatggagaattttcaaacttacaaagtaaacaaaatggtacactaaacctttatatacagtttcaacaacaccattctagttaggca

SEQ ID NO: 251379 - DNA, 120 bp, Artificial Sequence
  ENSG00000123505_57 (sequence is synthesized)
tatatacagtttcaacaacaccattctagttaggcatatctgtctactaactacatgccctttttagataaaatttatttaaattgaaatatgtaaatccagctgggcacagtggctcac

SEQ ID NO: 251380 - DNA, 61 bp, Artificial Sequence
  ENSG00000123505_58 (sequence is synthesized)
ggtgagtcgagattgccactgcactccagcttaggcgacagagtgagacttcatctcaaaa

SEQ ID NO: 251381 - DNA, 120 bp, Artificial Sequence
  ENSG00000123505_59 (sequence is synthesized)
tatatatatatatatatacacacacacatctaagttataattttggtaagtggttctcctttgcccacaccttaccaggacaaaaggagcttactctacccaggcaattaagcaatctcc

SEQ ID NO: 251382 - DNA, 120 bp, Artificial Sequence
  ENSG00000123505_60 (sequence is synthesized)
caaaaggagcttactctacccaggcaattaagcaatctcccaccaccaccaagctcaaatgttttcatcatagactagggttcatttttatttccttccctggagctttgtaattctttc

SEQ ID NO: 251383 - DNA, 120 bp, Artificial Sequence
  ENSG00000123505_61 (sequence is synthesized)
agcgtaaacattgttgaggttcaacagtccttattgctgagtaggactcgattgtatgaatatactataatttgttaatctgttttcctgttagtgaacattttattggtttctagtttt

SEQ ID NO: 251384 - DNA, 120 bp, Artificial Sequence
  ENSG00000123505_62 (sequence is synthesized)
tggcaagtgtgagtaaagctgctatgaacatttgcacacaaatattgtgacttctgggcatgtagtggtatcttgtggtttcagtctgcatttctctgactaatgaacacgttctcgtgt

SEQ ID NO: 251385 - DNA, 120 bp, Artificial Sequence
  ENSG00000123505_63 (sequence is synthesized)
ttattggccattaatatgtctttgagtgtgtatttttaaattaggttcgtttttattaccaagttataggaactctatgtattttgaataaaattccttgtcagttattttgcaaatatt

SEQ ID NO: 251386 - DNA, 120 bp, Artificial Sequence
  ENSG00000123505_64 (sequence is synthesized)
ttccccattgtgtgtcttgactcttgattttttttatagtgttttgagcagaagtttccactggagtcttaatttatcaatttttaaatggactttttctaaataaatctgcctacctcc

SEQ ID NO: 251387 - DNA, 120 bp, Artificial Sequence
  ENSG00000123505_65 (sequence is synthesized)
gctgggggatactggactaaacagcccctccccccctttttttttctgaggcggagtctcagtctgtccaggctggagtgcattggcgcaatctcctctcactgcaacctctgccgccca

SEQ ID NO: 251388 - DNA, 69 bp, Artificial Sequence
  ENSG00000123505_66 (sequence is synthesized)
cattggcgcaatctcctctcactgcaacctctgccgcccagcctgccactgtgcccggctaatttttgt

SEQ ID NO: 251389 - DNA, 77 bp, Artificial Sequence
  ENSG00000123505_67 (sequence is synthesized)
ctcttttttttttttaaactaagtttatattatgaatatacgaatgtttatcaaaatgcttaccatgtgccaagccc

SEQ ID NO: 251390 - DNA, 120 bp, Artificial Sequence
  ENSG00000123505_68 (sequence is synthesized)
atacgaatgtttatcaaaatgcttaccatgtgccaagccctggggatgttttgtatactagaaaaggaaaagaataatgtgttacttgcttccttgagatcctaatatttaaaagtacta

SEQ ID NO: 251391 - DNA, 120 bp, Artificial Sequence
  ENSG00000123505_69 (sequence is synthesized)
gccaaaattgtaaatgataattaaattggttgattgcaccctcagtagtacattagtattgttataatattgtgacttttttcaactgcagtgagagtagcatgtttgtctccaagagac

SEQ ID NO: 251392 - DNA, 120 bp, Artificial Sequence
  ENSG00000123505_70 (sequence is synthesized)
atttttcaggcataaatgttagcgttcttatcctgtaatatgcgaagtaaataaatttatatacttactgcctttgttacaatgcatgcaaacacgtggtaaggtgttcataccttagga

SEQ ID NO: 251393 - DNA, 120 bp, Artificial Sequence
  ENSG00000123505_71 (sequence is synthesized)
agagatctgattctcaagaacagcagaaaataggaagcagagaatgagttaggatgaaattcaaatgggagaaagaaatgaagaagccagacacttccagtagttaatttcttaacatgg

SEQ ID NO: 251394 - DNA, 120 bp, Artificial Sequence
  ENSG00000123505_72 (sequence is synthesized)
ctacttataataatagagaaatggtaagaaaagaaggaaaagcaagaaaaatgtcgttactgaaattgtccagtctttataatgaagagttaggatgaagagcaacagtcagtattgagt

SEQ ID NO: 251395 - DNA, 120 bp, Artificial Sequence
  ENSG00000123505_73 (sequence is synthesized)
tcagtattgagttaaattcttatacttttcaagaactaaggtgtttttacctagggtataattttctgattagcagttgttacattttatttattttttatttttttgagatggagtttc

SEQ ID NO: 251396 - DNA, 120 bp, Artificial Sequence
  ENSG00000123505_74 (sequence is synthesized)
gcgtgagccactgcacccggcctgaattttaatctttaacttcataaggaaaggatggattgtcattagtactcaatacagtttttgttgttatgaattgatccttgtaagaaatctaaa

SEQ ID NO: 251397 - DNA, 120 bp, Artificial Sequence
  ENSG00000123505_75 (sequence is synthesized)
gcaatgtgtgcttaaccgatgcttaaaactaatatgttattccccccaaatttttgcttatatgactattaataagctcagtttagaaactactgttctagaaaggaatatacttggtgt

SEQ ID NO: 251398 - DNA, 120 bp, Artificial Sequence
  ENSG00000123505_76 (sequence is synthesized)
taatagttgttatgacccatcatcactagactgggctttttaaaaaaaagagagagagagagagatggggcctcagtatgttgcccaggctggactcctgggccaagtgatcctcctgcc

SEQ ID NO: 251399 - DNA, 120 bp, Artificial Sequence
  ENSG00000123505_77 (sequence is synthesized)
tcctaatagcgagactacaggcatatgctaccatgccaagctaaaatatttgagttttgattttgccgagtttttgatatgtggacaatagttgattagcttcgaaaagtgatagaattc

SEQ ID NO: 251400 - DNA, 120 bp, Artificial Sequence
  ENSG00000123545_0 (sequence is synthesized)
acttgtgcgcatgctccgggtgtcccggagttgtcctgcgccggtgttcccacgtgcggcctgaacctgagcgcataatgttatgaggagatgggagcactagtgattcgcggtatcagg

SEQ ID NO: 251401 - DNA, 120 bp, Artificial Sequence
  ENSG00000123545_1 (sequence is synthesized)
aatttcaacctagagaaccgagcggaacgggaaatcagcaagatgaagccctctgtcgctcccagacacccctctaccaacagcctcctgcgagagcagattagtctctatccagaagtt

SEQ ID NO: 251402 - DNA, 120 bp, Artificial Sequence
  ENSG00000123545_2 (sequence is synthesized)
aaaggagagattgctcgtaaagatgaaaagctgctgtcgtttctaaaagatgtgtatgttgattccaaagatcctgtgtcttccttgcaggtaaaagctgctgaaacatgtcaagagccg

SEQ ID NO: 251403 - DNA, 120 bp, Artificial Sequence
  ENSG00000123545_3 (sequence is synthesized)
aaggaattcagattgccgaaagaccatcattttgatatgataaatattaagagcattcccaaaggcaaaatttccattgtagaagcattgacacttctcaataatcataagcttttccca

SEQ ID NO: 251404 - DNA, 120 bp, Artificial Sequence
  ENSG00000123545_4 (sequence is synthesized)
gaaacctggactgctgagaaaataatgcaggaataccagttagaacagaaagatgtgaattctcttcttaaatattttgttacttttgaagtcgaaatcttccctcctgaagacaagaaa

SEQ ID NO: 251405 - DNA, 120 bp, Artificial Sequence
  ENSG00000123545_5 (sequence is synthesized)
gcaatacgatcaaaatgaagaaaatcacagaaatttcctatgtgtactcctcatccctcctgctgtatattttctcattttttgcgtaataaattatgttaattaccaaatatttaatgc

SEQ ID NO: 251406 - DNA, 120 bp, Artificial Sequence
  ENSG00000123545_6 (sequence is synthesized)
tctcattgtgagggcatactcttaatatttattgagctccctgacttttcaagattgccatagaatatcttttgttttattttaatttggtttaggcatatttcataagtgcatgtcagc

SEQ ID NO: 251407 - DNA, 120 bp, Artificial Sequence
  ENSG00000123545_7 (sequence is synthesized)
atgactgagcacatctgtacctttattatggtgaaagagttaatttgttattttaggcacatataccaacttttaaattggtcatattaccccttgggaaatgtcctgaatccctcaact

SEQ ID NO: 251408 - DNA, 120 bp, Artificial Sequence
  ENSG00000123545_8 (sequence is synthesized)
gagttttactttccaagttaggtgtttagttcattcttctcatgcgatagtgaaagtaaaagctttcctgacccttaagactgacattttctcgttagggaaagagactcgatagcaggg

SEQ ID NO: 251409 - DNA, 120 bp, Artificial Sequence
  ENSG00000123545_9 (sequence is synthesized)
tagactaacagtagttcccaaataaaggcacacaggagaaaatgaatcaatagaatctaattaaaattactactccagggaataagaagtattgaggatttattttattttgaattggtt

SEQ ID NO: 251410 - DNA, 120 bp, Artificial Sequence
  ENSG00000123545_10 (sequence is synthesized)
tggaataattgtctttacagttataaaaagtaattagtggtgtttacaaaatgttgggaatttctgctttgacagataggtaagtcccatgggaatttctgctttgacaaatagttaagt

SEQ ID NO: 251411 - DNA, 120 bp, Artificial Sequence
  ENSG00000123545_11 (sequence is synthesized)
cccatggccttcagagaggcaggaagcagaaactttcaaaaaagtaacatttctctggatttaatgtggaaatagagaaaaatttaaagaataattaaaaaaccatggtagatgaaattt

SEQ ID NO: 251412 - DNA, 120 bp, Artificial Sequence
  ENSG00000123545_12 (sequence is synthesized)
ggtgattacatatagtttcggatgttaatgctagttgagagaagagaaaaagatagcaagtagaagcagagaacaggatcattggaagggacctgagaaattgccatttcatccatttta

SEQ ID NO: 251413 - DNA, 120 bp, Artificial Sequence
  ENSG00000123545_13 (sequence is synthesized)
gcaaatttaattagcatagcatgtaccagtactaggatcttgagtgagtgtgtgagtttagctctgcctaatatattactacttgggggatctttgggagactatatcttcttggagatt

SEQ ID NO: 251414 - DNA, 120 bp, Artificial Sequence
  ENSG00000123545_14 (sequence is synthesized)
gagtttcttctataaaataagcataatgctaccctaaatgtaagggttatcatgaagataaataataaaggactacaaaggaccaagcaaataggaattattttttgcggtggagaaaca

SEQ ID NO: 251415 - DNA, 120 bp, Artificial Sequence
  ENSG00000123545_15 (sequence is synthesized)
agtgcctggggagaatatatgaccgaagattctgtagtttatgacttaaacaggcccagaatttagtttttcaaatcctagtagtgtgttttttctgtcttgccaaaaagcagcacacct

SEQ ID NO: 251416 - DNA, 120 bp, Artificial Sequence
  ENSG00000123545_16 (sequence is synthesized)
caaagaagggaaaaggtgtgaattgtgggtatattagggttattagtgcttccgagggaagataggcatcactacttcccagagatgcccctggaaatgatatagaggatgttgaagaat

SEQ ID NO: 251417 - DNA, 120 bp, Artificial Sequence
  ENSG00000123545_17 (sequence is synthesized)
tcaatgtgatgacggaatgaggcatttgtagtaatgctgagaacagaaaaatggactaagtggaaaatttgtaagcatgactttgaatgtagatttgttatgtgaacaaactacctagtt

SEQ ID NO: 251418 - DNA, 120 bp, Artificial Sequence
  ENSG00000123545_18 (sequence is synthesized)
tttagttcaatacaataattgttttaagaaaacatgaaataactactcaatataaaatgcattttaaaactgtaaataagtcaaaactttattctttttatcataatggtcactagctga

SEQ ID NO: 251419 - DNA, 120 bp, Artificial Sequence
  ENSG00000123545_19 (sequence is synthesized)
ctgagtcacaaatactagtacactcttctgagccatcttctttattcatatctacattgtgtggttaggcatctgttatgtggtgtcacatgataaaataaagaacttcttcccatacca

SEQ ID NO: 251420 - DNA, 120 bp, Artificial Sequence
  ENSG00000123552_0 (sequence is synthesized)
ggcgctttggtcgcagcggcggtatggtcgccgcagtttctcggtcttcgcttcggcgaccttgacccccttgtgggtgggcgaggctggaagagaggctccccaccccactcggcttcc

SEQ ID NO: 251421 - DNA, 120 bp, Artificial Sequence
  ENSG00000123552_1 (sequence is synthesized)
cggcttcctgatccctgggggcgccgggcggtcaccgagggccgtgtgagcgccgctctgccggctccgggtccatgcggctgcgggagaagccctgggcgtcggggctggcctgggagg

SEQ ID NO: 251422 - DNA, 120 bp, Artificial Sequence
  ENSG00000123552_2 (sequence is synthesized)
tcccctggtgacctgggcgcgcggcggccccacacctttccgtccgcctcatcgcggcgcatttctcttcacatcctcggggtgtgtgtgtgttggtgaccggaggaagcctgtctaatg

SEQ ID NO: 251423 - DNA, 120 bp, Artificial Sequence
  ENSG00000123552_3 (sequence is synthesized)
acttttctggaagcgtcgtgtattaggagctccggggccggactgcttgggtccgcatctccatccaccgcttactggctttgggacctctgcaagtcacttcacttctctttctcagtt

SEQ ID NO: 251424 - DNA, 120 bp, Artificial Sequence
  ENSG00000123552_4 (sequence is synthesized)
tcaagtgtaaaatgcggaaaataatagcaacttatctcctaagtaaataacagatgcgggtgaaagatccaactaaagctttacctgagaaagccaaaagaagtaaaaggcctactgtac

SEQ ID NO: 251425 - DNA, 120 bp, Artificial Sequence
  ENSG00000123552_5 (sequence is synthesized)
ctcatgatgaagactcttcagatgatattgctgtaggtttaacttgccaacatgtaagtcatgctatcagcgtgaatcatgtaaagagagcaatagctgagaatctgtggtcagtttgct

SEQ ID NO: 251426 - DNA, 120 bp, Artificial Sequence
  ENSG00000123552_6 (sequence is synthesized)
cagaatgtttaaaagaaagaagattctatgatgggcagctagtacttacttctgatatttggttgtgcctcaagtgtggcttccagggatgtggtaaaaactcagaaagccaacattcat

SEQ ID NO: 251427 - DNA, 120 bp, Artificial Sequence
  ENSG00000123552_7 (sequence is synthesized)
tgaagcactttaagagttccagaacagagccccattgtattataattaatctgagcacatggattatatggtgttatgaatgtgatgaaaaattatcaacgcattgtaataagaaggttt

SEQ ID NO: 251428 - DNA, 120 bp, Artificial Sequence
  ENSG00000123552_8 (sequence is synthesized)
tggctcagatagttgattttctccagaaacatgcttctaaaacacaaacaagtgcattttctagaatcatgaaactttgtgaagaaaaatgtgaaacagatgaaatacagaagggaggaa

SEQ ID NO: 251429 - DNA, 120 bp, Artificial Sequence
  ENSG00000123552_9 (sequence is synthesized)
aatgcagaaatttatctgtaagaggaattacaaatttaggaaatacttgcttttttaatgcagtcatgcagaacttggcacagacttatactcttactgatctgatgaatgagatcaaag

SEQ ID NO: 251430 - DNA, 120 bp, Artificial Sequence
  ENSG00000123552_10 (sequence is synthesized)
aaagtagtacaaaactcaagatttttccttcctcagactctcagctggacccattggtggtggaactttcaaggcctggaccactgacctcagccttgttcctgtttcttcacagcatga

SEQ ID NO: 251431 - DNA, 120 bp, Artificial Sequence
  ENSG00000123552_11 (sequence is synthesized)
aggagactgaaaaaggaccactttctcctaaagttctttttaatcagctttgtcagaaggcacctcgatttaaagatttccagcaacaggacagtcaggagcttcttcattatcttctgg

SEQ ID NO: 251432 - DNA, 120 bp, Artificial Sequence
  ENSG00000123552_12 (sequence is synthesized)
atgcagtgaggacagaagaaacaaagcgaatacaagctagcattctaaaagcatttaacaacccaactactaaaactgctgatgatgaaactagaaaaaaagtcaaagcatatggaaaag

SEQ ID NO: 251433 - DNA, 120 bp, Artificial Sequence
  ENSG00000123552_13 (sequence is synthesized)
aaggtgtgaaaatgaacttcatagatcggatctttattggtgaattaactagcacggtcatgtgtgaagaatgtgcaaatatctccacggtgaaagatccattcattgatatttcacttc

SEQ ID NO: 251434 - DNA, 120 bp, Artificial Sequence
  ENSG00000123552_14 (sequence is synthesized)
ctataatagaagaaagggtttcaaaacctttactttggggaagaatgaataaatatagaagtttacgggagacagatcatgatcgatacagtggcaatgttactatagaaaatattcatc

SEQ ID NO: 251435 - DNA, 120 bp, Artificial Sequence
  ENSG00000123552_15 (sequence is synthesized)
aacctagagctgccaagaagcattcttcatctaaagataagagtcaactaattcatgaccgaaaatgtattagaaaattgtcatctggagaaactgtcacataccagaaaaatgaaaacc

SEQ ID NO: 251436 - DNA, 120 bp, Artificial Sequence
  ENSG00000123552_16 (sequence is synthesized)
ttgaaatgaatggggattctttaatgtttgccagcctcatgaattctgagtcacgtctgaatgaaagccctactgatgacagtgaaaaagaagccagccattctgaaagcaatgttgatg

SEQ ID NO: 251437 - DNA, 120 bp, Artificial Sequence
  ENSG00000123552_17 (sequence is synthesized)
ctgacagtgagccttcagaatctgaaagtgcttcaaagcagactgggctgttcagatccagtagtggatccggtgtgcagccagatggacccctttaccctctgtcagcaggtaaactgc

SEQ ID NO: 251438 - DNA, 120 bp, Artificial Sequence
  ENSG00000123552_18 (sequence is synthesized)
tgtacaccaaggagactgacagtggtgataaggaaatggcagaagctatttctgaacttcgtttgagcagcactgtaactggagatcaagattttgacagagaaaatcagccactaaata

SEQ ID NO: 251439 - DNA, 120 bp, Artificial Sequence
  ENSG00000123552_19 (sequence is synthesized)
tttcaaataatttatgttttttagaggggaagcatttgaggtcttatagtccccaaaatgcttttcagaccctttctcagagctatataactacttctaaagaatgttcaattcagtcct

SEQ ID NO: 251440 - DNA, 120 bp, Artificial Sequence
  ENSG00000123552_20 (sequence is synthesized)
gtctctaccagtttacatctatggaattactaatggggaataataagcttctatgtgagaattgtactaaaaacaaacagaagtaccaagaagaaaccagttttgcagaaaagaaagtag

SEQ ID NO: 251441 - DNA, 120 bp, Artificial Sequence
  ENSG00000123552_21 (sequence is synthesized)
aaggagtttatactaatgccaggaagcaattgctcatttctgctgttccagctgtcctaattctccacctgaaaagatttcatcaggctggcttgagtcttcgtaaagtaaacagacatg

SEQ ID NO: 251442 - DNA, 120 bp, Artificial Sequence
  ENSG00000123552_22 (sequence is synthesized)
tagattttccacttatgctcgatttagcaccattctgctctgctacttgtaagaatgcaagtgtgggagataaagttctctacggtctctatggcatagtggaacatagtggctcgatga

SEQ ID NO: 251443 - DNA, 120 bp, Artificial Sequence
  ENSG00000123552_23 (sequence is synthesized)
gagaaggccactacactgcttatgtgaaagtgagaacaccctccaggaaattatcggaacataacactaaaaagaaaaatgtgcctggtttgaaagcggctgataatgaatcagcaggcc

SEQ ID NO: 251444 - DNA, 120 bp, Artificial Sequence
  ENSG00000123552_24 (sequence is synthesized)
agtgggtccatgttagtgacacttacttacaggtggttccagaatcaagagcacttagtgcacaagcctaccttcttttctatgaaagagtattataactattaatggtaatgattattt

SEQ ID NO: 251445 - DNA, 120 bp, Artificial Sequence
  ENSG00000123552_25 (sequence is synthesized)
aggtcatttgtttttgaatgccacagtgataactataatatataatgtgcctttctagtcttccctcttctgtaggaatagcatgttcctcaaatggtcctgaactttttcaccattttg

SEQ ID NO: 251446 - DNA, 120 bp, Artificial Sequence
  ENSG00000123552_26 (sequence is synthesized)
gtaaatttactcaatgctttaaaattcatagtcttaaaataaatgtgaattttgtttccaggtatttattctggggtacaaaaacttcccagaatttacagtaggaaaggaaaccccttt

SEQ ID NO: 251447 - DNA, 120 bp, Artificial Sequence
  ENSG00000123552_27 (sequence is synthesized)
atgatgtggcttattattacaagcattcagaaatgatgctggctaagtcaaatcattccttgagacagtgattcctaaatgtaatgccaccttcctgaactctcacatattctatatcat

SEQ ID NO: 251448 - DNA, 120 bp, Artificial Sequence
  ENSG00000123552_28 (sequence is synthesized)
tcatggttattttaaaaaatatatttttagccttttgtaaccttagtcttgttttgagcaatcatattccgtgttttatgtgcttttatatttttataataaatattaaagtaaaactat

SEQ ID NO: 251449 - DNA, 120 bp, Artificial Sequence
  ENSG00000123552_29 (sequence is synthesized)
aattgtttatccacgtaccacttaacttaaaatcatctcagggccatctagtggtatatatgtgtactaccatttaggaaactgctataacacataatttcatgaagtaacacctaatac

SEQ ID NO: 251450 - DNA, 120 bp, Artificial Sequence
  ENSG00000123552_30 (sequence is synthesized)
ggtgtagttccctggtcatattttatacaattcaaccatataaaagggtgtcactgtaatttcagtagtgtgggtttacaaataatctgctggttagcttattaccttgaggttttgaaa

SEQ ID NO: 251451 - DNA, 120 bp, Artificial Sequence
  ENSG00000123552_31 (sequence is synthesized)
aactagaattatattgaggcatttcataaacatatctcttgcaccctcttcatggtggagttaaggataacttgcaggtggttggccaaggcccaatatagatgattataacatttagaa

SEQ ID NO: 251452 - DNA, 120 bp, Artificial Sequence
  ENSG00000123552_32 (sequence is synthesized)
ttggcaattagaagttgataatccatataggaccataggatagctttgaaatataaattaccaaattatatttgtaaatgatagagaattatattcttaacagaaaaatatatacttttt

SEQ ID NO: 251453 - DNA, 120 bp, Artificial Sequence
  ENSG00000123552_33 (sequence is synthesized)
ctacttcttgtaaatactaaacacagttttggggttttgaaatcactttgtcttcagcaagcatcattaataagttcaggtgaatttagcttttaatggggcattaagctggcatttttg

SEQ ID NO: 251454 - DNA, 120 bp, Artificial Sequence
  ENSG00000123552_34 (sequence is synthesized)
attttctttttaaataatagcaaaaatatcatttttcccctctagaatacaaattattgagctgtcaaaacttggcatgaagaatatactattacttaggcttaaatatcaaaagataat

SEQ ID NO: 251455 - DNA, 120 bp, Artificial Sequence
  ENSG00000123552_35 (sequence is synthesized)
ggctacttcagtgtcatattgttgaaatagaaacaaaactgcatggttcaagcatcctaatcattagtgccaatgaatgatagtgcaggcaagtgccaggtaaatgcctagtcccacttc

SEQ ID NO: 251456 - DNA, 120 bp, Artificial Sequence
  ENSG00000123552_36 (sequence is synthesized)
attctcctcctgggaagaaaggataagaatagtggctgcagataaggtatggaaatatttaatcaagactgtcttaaacacataagcatatataatgttatcaaggttaccagtgctgcc

SEQ ID NO: 251457 - DNA, 120 bp, Artificial Sequence
  ENSG00000123552_37 (sequence is synthesized)
ttttgatatatggatgaacataactgtaattaaagacggtaatagtatacaaaatgcagagcttaaaaatgtcattgcataaattctatttttaagatgttgaaatgttagtagtgtttt

SEQ ID NO: 251458 - DNA, 120 bp, Artificial Sequence
  ENSG00000123552_38 (sequence is synthesized)
tcttgatttttaacagtgaaataatcaagaaatatatctttaagttaatctgcaaagtcaggctgtgttctgtaaaaggtatttcacagcattttctgtttaactgtaatctgttatcat

SEQ ID NO: 251459 - DNA, 120 bp, Artificial Sequence
  ENSG00000123552_39 (sequence is synthesized)
ggagatctcagtaccagagcagtgaattttttgaaaaatattgactgtctttattcaagtcagccatcttggtaagagcagttttcatccccccactgcccaaatgtaaatatagatcac

SEQ ID NO: 251460 - DNA, 120 bp, Artificial Sequence
  ENSG00000123552_40 (sequence is synthesized)
ctaatttttcttacagaaagatactgttaagaggcatgcacttttcatcggatggtcacttgtttcttgtttcaaagacaaatatttggatagatacccatacttgctatgagtcagtca

SEQ ID NO: 251461 - DNA, 120 bp, Artificial Sequence
  ENSG00000123552_41 (sequence is synthesized)
cagtgctgacactattttaacatcatttaaaatggaaagatctacatagatttttgacattattccagaagtaacatgcaagtaagatatttttattgtcattttcttcatgttaaagga

SEQ ID NO: 251462 - DNA, 120 bp, Artificial Sequence
  ENSG00000123552_42 (sequence is synthesized)
gctacttatgaaacctatttttttatggcctagagtttatgagtgctttttccttgtcttctgaaaatggaataaattggatttttgatacttaagaatttcctaaagatagcttttgta

SEQ ID NO: 251463 - DNA, 120 bp, Artificial Sequence
  ENSG00000123552_43 (sequence is synthesized)
acagagaaagcatgttaaattacacatgggtctaccttaaaatttttgttattatttccaaagcacatttgcagggatagtaaatgtatatagtagcaagtctactataataacagtagt

SEQ ID NO: 251464 - DNA, 120 bp, Artificial Sequence
  ENSG00000123552_44 (sequence is synthesized)
ttctggatcacctcaggaaacagtataaataaataataatgtttacttatcatcaacataactaccatagtgtttgaatgaattaaagtttcattagctttatttagaaactggtttacc

SEQ ID NO: 251465 - DNA, 120 bp, Artificial Sequence
  ENSG00000123552_45 (sequence is synthesized)
ccagcttcccgtttttttccaaatataaaatgataaaatattgattatgtgccaatattgtcatttaatgttcttaaaacttgtgaagaccacctttttaggtagctgagaagagtgata

SEQ ID NO: 251466 - DNA, 120 bp, Artificial Sequence
  ENSG00000123552_46 (sequence is synthesized)
gttggtatcaatttgttagccaggcatggtggctcatgctgttgggaggctgagtggggaagatgcttgagcccaggaggtcaaggtgcagtgaaccatgatcacaccactgcattcctg

SEQ ID NO: 251467 - DNA, 120 bp, Artificial Sequence
  ENSG00000123552_47 (sequence is synthesized)
gtgagaccctgtctcaaaaataaataaaaagaagacagttggtatcaattcaaagaatagttgatgcctgttctcttattttaaatgtaccaacagagctattttactgtatttaatagt

SEQ ID NO: 251468 - DNA, 120 bp, Artificial Sequence
  ENSG00000123552_48 (sequence is synthesized)
gtatttaatagttcttagcttccatgtgtgatgattttaatcagtgattttatgcaatagctgaagaaaattttctgaagattaagctgtgaaatgtatcaaccctcatctaatttttgt

SEQ ID NO: 251469 - DNA, 120 bp, Artificial Sequence
  ENSG00000123552_49 (sequence is synthesized)
agtacaaaatgacatcctgattccttttaaaaattcacgtttgtaatttatttttctgcatgtattgatcaaataagcctaaaccaaatatgtgcaataaaattgagcctttagatagta

SEQ ID NO: 251470 - DNA, 120 bp, Artificial Sequence
  ENSG00000123552_50 (sequence is synthesized)
tctagtgcattgttaaaaaagattatttctagatatttatgatgtttttgtttacgtagaaatcatgaattcaaatgtttaaaagatgaccatattttcaattttgagtaatacatatta

SEQ ID NO: 251471 - DNA, 120 bp, Artificial Sequence
  ENSG00000123552_51 (sequence is synthesized)
ttcctactgttttttttcttttgccatgtttctagaaaacagctgtgtaacttattgagcgttattttggtgttactgtataaaacatgcataataaatattcttatttatctcatgtta

SEQ ID NO: 251472 - DNA, 120 bp, Artificial Sequence
  ENSG00000123552_52 (sequence is synthesized)
tcagcataaactgtctaggggcccacagtgagtcagtttgttgatataaactgtcaaatgtggcctgagggacccatcatgaataacagacactcttgtcgctctggaaattccgaggat

SEQ ID NO: 251473 - DNA, 120 bp, Artificial Sequence
  ENSG00000123552_53 (sequence is synthesized)
ttagagggtacttcccaggaacctggggagaaaagccagccagatcctttattatataacagtaatgtattatgtattttgttattgtatactttgttacctaacaaataaataatacat

SEQ ID NO: 251474 - DNA, 120 bp, Artificial Sequence
  ENSG00000123552_54 (sequence is synthesized)
gtttttattctcaaggaatttaaactcttaaacactttttattttgataatttgttaattttttgtatttcaagtcagtcaaaaattttaagatgaggacatccagaatttatttactaa

SEQ ID NO: 251475 - DNA, 120 bp, Artificial Sequence
  ENSG00000123552_55 (sequence is synthesized)
tgttggctgggctggtctcaaactcctgatgacctcaagtgatctacctgccttggtctcccaaagtgctggaattgcaggtgtgagccacagcgctgggcctgaatttaacttactctg

SEQ ID NO: 251476 - DNA, 120 bp, Artificial Sequence
  ENSG00000123552_56 (sequence is synthesized)
gagccacagcgctgggcctgaatttaacttactctgttagaagacttatgttagaagtcacaagacttcagaaaggacaacatgttttctataaataaaagctaattttgcttcataaga

SEQ ID NO: 251477 - DNA, 120 bp, Artificial Sequence
  ENSG00000123552_57 (sequence is synthesized)
gataaaagttggtgctggagaggcagcatgcaaagcgaaaagaagggactgctttgagttctagacccaacgcctccgggaccaccaagctcaccgcagagcgcagcctccgcggacccg

SEQ ID NO: 251478 - DNA, 120 bp, Artificial Sequence
  ENSG00000123552_58 (sequence is synthesized)
agtgggtgcatctacatttaatataaataattatgagttacaaaatactaatgtattcatcatttaacatgaatagtcgtttttactgtaactttgctcttattgccctgactatgaaga

SEQ ID NO: 251479 - DNA, 120 bp, Artificial Sequence
  ENSG00000123552_59 (sequence is synthesized)
gaactaaaatttgttacagctctatgctttatgaaaattatatctcagtcctcagaagaagcagcttatcctcatatataaggaaatggagacacagaaattaaatggctcacctagtct

SEQ ID NO: 251480 - DNA, 120 bp, Artificial Sequence
  ENSG00000123552_60 (sequence is synthesized)
ttaaattcaatttgagcatatgctttattctaatggtataaaacaaagcatcttacagagtttgaaaaggttaaagcattaattgtgttgctattcccctaaaaagcactggttattaaa

SEQ ID NO: 251481 - DNA, 120 bp, Artificial Sequence
  ENSG00000123552_61 (sequence is synthesized)
tgggggcgggcgaacgaggccccacctctgccgggagcgggacgagcgcgcaggcgcagtctccccaggttgtagacgctgcggcccggcccggcgggtaaataacagatgcgggtgaaa

SEQ ID NO: 251482 - DNA, 120 bp, Artificial Sequence
  ENSG00000123552_62 (sequence is synthesized)
gagaatcaaatggagatctgtcctgacttggatgcctatgttgtaataccataaagtgagaaaaccatagagttgtaaaatctagaaagtaccgtaagataacatctaatctagctttct

SEQ ID NO: 251483 - DNA, 120 bp, Artificial Sequence
  ENSG00000123552_63 (sequence is synthesized)
tattttaaaagatgagctgtgaggcaaatagagtttaagtgaatttctcaaggtattacagtatgtttaaaaaccaaatccttatgtgcctggaaataaacacataaaggatctgacttg

SEQ ID NO: 251484 - DNA, 120 bp, Artificial Sequence
  ENSG00000123560_0 (sequence is synthesized)
atggcttctcacgcttgtgctgcatatcccacaccaattagacccaaggatcagttggaagtttccaggacatcttcattttatttccaccctcaatccacatttccagatgtctctgca

SEQ ID NO: 251485 - DNA, 120 bp, Artificial Sequence
  ENSG00000123560_1 (sequence is synthesized)
gcaaagcgaaattccaggagaagaggacaaagatactcagagagaaaaagtaaaagaccgaagaaggaggctggagagaccaggatccttccagctgaacaaagtcagccacaaagcaga

SEQ ID NO: 251486 - DNA, 120 bp, Artificial Sequence
  ENSG00000123560_2 (sequence is synthesized)
ctagccagccggctacaattggagtcagagtcccaaagacatgggcttgttagagtgctgtgcaagatgtctggtaggggccccctttgcttccctggtggccactggattgtgtttctt

SEQ ID NO: 251487 - DNA, 120 bp, Artificial Sequence
  ENSG00000123560_3 (sequence is synthesized)
tggggtggcactgttctgtggctgtggacatgaagccctcactggcacagaaaagctaattgagacctatttctccaaaaactaccaagactatgagtatctcatcaatgtgatccatgc

SEQ ID NO: 251488 - DNA, 120 bp, Artificial Sequence
  ENSG00000123560_4 (sequence is synthesized)
cttccagtatgtcatctatggaactgcctctttcttcttcctttatggggccctcctgctggctgagggcttctacaccaccggcgcagtcaggcagatctttggcgactacaagaccac

SEQ ID NO: 251489 - DNA, 120 bp, Artificial Sequence
  ENSG00000123560_5 (sequence is synthesized)
catctgcggcaagggcctgagcgcaacggtaacagggggccagaaggggaggggttccagaggccaacatcaagctcattctttggagcgggtgtgtcattgtttgggaaaatggctagg

SEQ ID NO: 251490 - DNA, 120 bp, Artificial Sequence
  ENSG00000123560_6 (sequence is synthesized)
acatcccgacaagtttgtgggcatcacctatgccctgaccgttgtgtggctcctggtgtttgcctgctctgctgtgcctgtgtacatttacttcaacacctggaccacctgccagtctat

SEQ ID NO: 251491 - DNA, 120 bp, Artificial Sequence
  ENSG00000123560_7 (sequence is synthesized)
tgccttccccagcaagacctctgccagtataggcagtctctgtgctgatgccagaatgtatggtgttctcccatggaatgctttccctggcaaggtttgtggctccaaccttctgtccat

SEQ ID NO: 251492 - DNA, 120 bp, Artificial Sequence
  ENSG00000123560_8 (sequence is synthesized)
ctgcaaaacagctgagttccaaatgaccttccacctgtttattgctgcatttgtgggggctgcagctacactggtttccctgctcaccttcatgattgctgccacttacaactttgccgt

SEQ ID NO: 251493 - DNA, 120 bp, Artificial Sequence
  ENSG00000123560_9 (sequence is synthesized)
ccttaaactcatgggccgaggcaccaagttctgatcccccgtagaaatccccctttctctaatagcgaggctctaaccacacagcctacaatgctgcgtctcccatcttaactctttgcc

SEQ ID NO: 251494 - DNA, 120 bp, Artificial Sequence
  ENSG00000123560_10 (sequence is synthesized)
tttgccaccaactggccctcttcttacttgatgagtgtaacaagaaaggagagtcttgcagtgattaaggtctctctttggactctcccctcttatgtacctcttttagtcattttgctt

SEQ ID NO: 251495 - DNA, 120 bp, Artificial Sequence
  ENSG00000123560_11 (sequence is synthesized)
catagctggttcctgctagaaatgggaaatgcctaagaagatgacttcccaactgcaagtcacaaaggaatggaggctctaattgaattttcaagcatctcctgaggatcagaaagtaat

SEQ ID NO: 251496 - DNA, 120 bp, Artificial Sequence
  ENSG00000123560_12 (sequence is synthesized)
ttcttctcaaagggtacttccactgatggaaacaaagtggaaggaaagatgctcaggtacagagaaggaatgtctttggtcctcttgccatctataggggccaaatatattctctttggt

SEQ ID NO: 251497 - DNA, 120 bp, Artificial Sequence
  ENSG00000123560_13 (sequence is synthesized)
attcattctggtctctctattaccactgaagatagaagaaaaaagaatgtcagaaaaacaataagagcgtttgcccaaatctgcctattgcagctgggagaagggggtcaaagcaaggat

SEQ ID NO: 251498 - DNA, 120 bp, Artificial Sequence
  ENSG00000123560_14 (sequence is synthesized)
ctttcacccacagaaagagagcactgaccccgatggcgatggactactgaagccctaactcagccaaccttacttacagcataagggagcgtagaatctgtgtagacgaagggggcatct

SEQ ID NO: 251499 - DNA, 120 bp, Artificial Sequence
  ENSG00000123560_15 (sequence is synthesized)
ggccttacacctcgttagggaagagaaacagggtgttgtcagcatcttctcactcccttctccttgataacagctaccatgacaaccctgtggtttccaaggagctgagaatagaaggaa

SEQ ID NO: 251500 - DNA, 120 bp, Artificial Sequence
  ENSG00000123560_16 (sequence is synthesized)
actagcttacatgagaacagactggcctgaggagcagcagttgctggtggctaatggtgtaacctgagatggccctctggtagacacaggatagataactctttggatagcatgtctttt

SEQ ID NO: 251501 - DNA, 120 bp, Artificial Sequence
  ENSG00000123560_17 (sequence is synthesized)
tttctgttaattagttgtgtactctggcctctgtcatatcttcacaatggtgctcatttcatggggtattatccattcagtcatcgtaggtgatttgaaggtcttgatttgttttagaat

SEQ ID NO: 251502 - DNA, 120 bp, Artificial Sequence
  ENSG00000123560_18 (sequence is synthesized)
gatgcacatttcatgtattccagtttgtttattacttatttggggttgcatcagaaatgtctggagaataattctttgattatgactgttttttaaactaggaaaattggacattaagca

SEQ ID NO: 251503 - DNA, 120 bp, Artificial Sequence
  ENSG00000123560_19 (sequence is synthesized)
tcacaaatgatattaaaaattggctagttgaatctattgggattttctacaagtattctgcctttgcagaaacagatttggtgaatttgaatctcaatttgagtaatctgatcgttcttt

SEQ ID NO: 251504 - DNA, 120 bp, Artificial Sequence
  ENSG00000123560_20 (sequence is synthesized)
ctagctaatggaaaatgattttacttagcaatgttatcttggtgtgttaagagttaggtttaacataaaggttattttctcctgatatagatcacataacagaatgcaccagtcatcagc

SEQ ID NO: 251505 - DNA, 120 bp, Artificial Sequence
  ENSG00000123560_21 (sequence is synthesized)
tattcagttggtaagcttccaggaaaaaggacaggcagaaagagtttgagacctgaatagctcccagatttcagtcttttcctgtttttgttaactttgggttaaaaaaaaaaaaagtct

SEQ ID NO: 251506 - DNA, 120 bp, Artificial Sequence
  ENSG00000123560_22 (sequence is synthesized)
gattggttttaattgaaggaaagatttgtactacagttcttttgttgtaaagagttgtgttgttcttttcccccaaagtggtttcagcaatatttaaggagatgtaagagctttacaaaa

SEQ ID NO: 251507 - DNA, 120 bp, Artificial Sequence
  ENSG00000123560_23 (sequence is synthesized)
agacacttgatacttgttttcaaaccagtatacaagataagcttccaggctgcatagaaggaggagagggaaaatgttttgtaagaaaccaatcaagataaaggacagtgaagtaatccg

SEQ ID NO: 251508 - DNA, 120 bp, Artificial Sequence
  ENSG00000123560_24 (sequence is synthesized)
taccttgtgttttgttttgatttaataacataacaaataaccaacccttccctgaaaacctcacatgcatacatacacatatatacacacacaaagagagttaatcaactgaaagtgttt

SEQ ID NO: 251509 - DNA, 120 bp, Artificial Sequence
  ENSG00000123560_25 (sequence is synthesized)
aagtgtttccttcatttctgatatagaattgcaattttaacacacataaaggataaacttttagaaacttatcttacaaagtgtattttataaaattaaagaaaataaaattaagaatgt

SEQ ID NO: 251510 - DNA, 120 bp, Artificial Sequence
  ENSG00000123560_26 (sequence is synthesized)
gatcaggaagggtcacagcagccatggtaggtgaatggagcagcttttccttcctttcctgctttcagagcctactcagtgccaaacttacatcaaaagctcagcaagtactgattgatt

SEQ ID NO: 251511 - DNA, 120 bp, Artificial Sequence
  ENSG00000123560_27 (sequence is synthesized)
aatccctcttgcctacggcaaaatggccctgagggctatctctcagctctgcactggcctctgagctgtctgccaggcagggctctagaaaagagtcccaaggaagagaataaggttccc

SEQ ID NO: 251512 - DNA, 120 bp, Artificial Sequence
  ENSG00000123560_28 (sequence is synthesized)
agtaggtatggagaagccaagggaggcactaagcctctcctgttcctagaacaagttaggctcctgttccttcacccacctttcttcttgtctagctccctactcctgtgagttagcatg

SEQ ID NO: 251513 - DNA, 120 bp, Artificial Sequence
  ENSG00000123560_29 (sequence is synthesized)
cccgacaaggtgatcatcctcaggattttgtggcaataacaaggggtgggggaaaattgggcgcgagtctgtggcctcgtccccacccaaggctgggtcctctctaggggcctggcattt

SEQ ID NO: 251514 - DNA, 120 bp, Artificial Sequence
  ENSG00000123560_30 (sequence is synthesized)
aaatgagaggtaaaataagtacatttgaaagggaaagcactgtattgagaacagatattatatacaaatgaggcaggggaataaaagtaaatccgggggagacaggcagtaaattatttc

SEQ ID NO: 251515 - DNA, 120 bp, Artificial Sequence
  ENSG00000123560_31 (sequence is synthesized)
tttgacagcaaaatgttgactttaaattttgggcccctgggcacaactgtagggaaccagttaattattttggagtactgtactatttcatgactattctgtgatctgggtgttaatggg

SEQ ID NO: 251516 - DNA, 120 bp, Artificial Sequence
  ENSG00000123560_32 (sequence is synthesized)
tgtggaattagcacacaagaaagatatcaacacattcagaaagctgtattcatgatttacagtggagcatattactgctgttgcaagaaacagttcttcctctttcattttcctgcagtt

SEQ ID NO: 251517 - DNA, 120 bp, Artificial Sequence
  ENSG00000123560_33 (sequence is synthesized)
aagtttccctttgctggattttgaattagccgattgccttctacaacatgttggctaagtgtgcctgagccaatgagcatagaaggtaaaacacctgttttctctagagttgcatagaaa

SEQ ID NO: 251518 - DNA, 120 bp, Artificial Sequence
  ENSG00000123560_34 (sequence is synthesized)
gacttcctttccaacccttcccctcttaaaagagaagtttgtagctttaggtaaagatagagcctaatggcaaaatcccccacatgaaaattttcattcctttagttaaaaaccatatca

SEQ ID NO: 251519 - DNA, 120 bp, Artificial Sequence
  ENSG00000123560_35 (sequence is synthesized)
acatggaacccacccactgatccccatccatccctagtaccagtcacggctgctctagcatttcggccttgtcaactactgcaggccctgatcaaggaggcctctgttcatggggcttgt

SEQ ID NO: 251520 - DNA, 120 bp, Artificial Sequence
  ENSG00000123560_36 (sequence is synthesized)
agatgtctctgcagcaaagcgaaattccaggcaagccttagggaaaaaaggaaaaacaaagaaaatgaaacaattggcagtgaaaggcagaaagagaagatggagcccttagagaaggga

SEQ ID NO: 251521 - DNA, 120 bp, Artificial Sequence
  ENSG00000123560_37 (sequence is synthesized)
acatggccttgaaagccatcccctgggtacaggtctttgtcttgaaagaaagcaacagtagaaatgccttccctgcccacagcacttcaggtctaaagaagaccaagtgaggacagtgac

SEQ ID NO: 251522 - DNA, 120 bp, Artificial Sequence
  ENSG00000123560_38 (sequence is synthesized)
agttcccagattcacactgaatttccatcatggagctggtccttgaggcgggcccagggcatgggaaaggagggagggagggttgggagctcttggtgcctgcttaaagagacagcatca

SEQ ID NO: 251523 - DNA, 120 bp, Artificial Sequence
  ENSG00000123560_39 (sequence is synthesized)
caggggactggggtggagccagaccggattcccgagtcttccctctgtgcagatctctcctgctccacattcgaagcccattcagaaaggaggggtctgcctgcctgcctgtcagcccct

SEQ ID NO: 251524 - DNA, 120 bp, Artificial Sequence
  ENSG00000123560_40 (sequence is synthesized)
aggtcaggaagaacgtggtgcccagctggcttagcctcacctttcaaaggttccctaagcaaatttcttctcaaaacagaaagcatgagttttgtgggatgctttgtacaatcagaccat

SEQ ID NO: 251525 - DNA, 120 bp, Artificial Sequence
  ENSG00000123560_41 (sequence is synthesized)
tttacaccttatctgcccaaaaacatcctctgaagcctctctaacccagggatcctcctcactcttcccctacccattccccccaccctccgttatactggggccagttatctagtagat

SEQ ID NO: 251526 - DNA, 120 bp, Artificial Sequence
  ENSG00000123560_42 (sequence is synthesized)
actgccaattacccttggcagaggtgccctgctcactaatttcatttgaaggagagccctggaacctggttttaatgtctggcacacgccactccaggatctcccagtttgtgtttctac

SEQ ID NO: 251527 - DNA, 120 bp, Artificial Sequence
  ENSG00000123560_43 (sequence is synthesized)
agtcttctatgccagggctaggaaagctgccttccaaaatttggtctgggaagacattatcctgggaatgagaagcaaagcctcagctctagaagcccaaataatagcagatgacccagg

SEQ ID NO: 251528 - DNA, 120 bp, Artificial Sequence
  ENSG00000123560_44 (sequence is synthesized)
ctttcactggcacccagtacaggcagcaggctgcaccaagaaggctggcagtgcctcttgaggaatcccttggcagtgcaggagcctagctggactcaagaatattttgccaagggcacc

SEQ ID NO: 251529 - DNA, 120 bp, Artificial Sequence
  ENSG00000123561_0 (sequence is synthesized)
ttcagaaaaaaagtgattcaatttccataaatttaatttactcacagcgttttcataatgttgctataacatctgaatgacagtccatggcattatttccgtggttgcagcaagccactt

SEQ ID NO: 251530 - DNA, 120 bp, Artificial Sequence
  ENSG00000123561_1 (sequence is synthesized)
ctcctactccctgtccatattagatgcatctcctgtttttcaagggagagaaacccctgctcagcccctgatgagcacatcatcaaatatttactattgttttattaatcaatgtgggtg

SEQ ID NO: 251531 - DNA, 120 bp, Artificial Sequence
  ENSG00000123561_2 (sequence is synthesized)
gttattatgtgtctctggctcagggagtgtttcatccaactaagctccctcagtggttgtctcacttcatctcttatagattaacttccttccaaaatgtcaccattcctgtatctggtt

SEQ ID NO: 251532 - DNA, 120 bp, Artificial Sequence
  ENSG00000123561_3 (sequence is synthesized)
ctcttggtacttgggcttcatgctacaatccactgtgcatcacctgaaggcaaagtaacagcctgccattcatcccaaccaaatgccactctctacaagatgtcatccattaatgctgac

SEQ ID NO: 251533 - DNA, 120 bp, Artificial Sequence
  ENSG00000123561_4 (sequence is synthesized)
tttgcattcaatctgtaccggaggttcactgtggagaccccagataagaacatcttcttttcccctgtgagcatttctgcagctttggttatgctttcctttggggcctgctgcagcacc

SEQ ID NO: 251534 - DNA, 120 bp, Artificial Sequence
  ENSG00000123561_5 (sequence is synthesized)
caaactgagattgtggagaccttggggttcaacctcacagacactccaatggtagagatccagcatggcttccagcatctgatctgttcactgaattttccaaagaaggaactggaattg

SEQ ID NO: 251535 - DNA, 120 bp, Artificial Sequence
  ENSG00000123561_6 (sequence is synthesized)
cagataggaaatgccctcttcattggcaagcatctgaaaccactggcaaagttcttgaatgatgtcaagaccctctatgagactgaagtcttttctaccgacttctccaacatttctgca

SEQ ID NO: 251536 - DNA, 120 bp, Artificial Sequence
  ENSG00000123561_7 (sequence is synthesized)
gccaagcaggagattaacagtcatgtggagatgcaaaccaaagggaaagttgtgggtctaattcaagacctcaagccaaacaccatcatggtcttagtgaactatattcactttaaagcc

SEQ ID NO: 251537 - DNA, 120 bp, Artificial Sequence
  ENSG00000123561_8 (sequence is synthesized)
cagtgggcaaatccttttgatccatccaagacagaagacagttccagcttcttaatagacaagaccaccactgttcaagtgcccatgatgcaccagatggaacaatactatcacctagtg

SEQ ID NO: 251538 - DNA, 120 bp, Artificial Sequence
  ENSG00000123561_9 (sequence is synthesized)
gatatggaattgaactgcacagttctgcaaatggactacagcaagaatgctctggcactctttgttcttcccaaggagggacagatggagtcagtggaagctgccatgtcatctaaaaca

SEQ ID NO: 251539 - DNA, 120 bp, Artificial Sequence
  ENSG00000123561_10 (sequence is synthesized)
ctgaagaagtggaaccgcttactacagaagggatgggttgacttgtttgttccaaagttttccatttctgccacatatgaccttggagccacacttttgaagatgggcattcagcatgcc

SEQ ID NO: 251540 - DNA, 120 bp, Artificial Sequence
  ENSG00000123561_11 (sequence is synthesized)
ttctgaaaatgctgatttttctggactcacagaggacaatggtctgaaactttccaatgctgcccataaggctgtgctgcacattggtgaaaagggaactgaagctgcagctgtccctga

SEQ ID NO: 251541 - DNA, 120 bp, Artificial Sequence
  ENSG00000123561_12 (sequence is synthesized)
agttgaactttcggatcagcctgaaaacactttcctacaccctattatccaaattgatagatctttcatgttgttgattttggagagaagcacaaggagtattctctttctagggaaagt

SEQ ID NO: 251542 - DNA, 120 bp, Artificial Sequence
  ENSG00000123561_13 (sequence is synthesized)
tgtgaacccaacggaagcgtagttgggaaaaaggccattggctaattgcacgtgtgtattgcaatgggaaataaataaataatatagcctggtgtgattgatgtgagcttggacttgcat

SEQ ID NO: 251543 - DNA, 120 bp, Artificial Sequence
  ENSG00000123561_14 (sequence is synthesized)
tcccttatgatgggatgaagattgaaccctggctgaactttgttggctgtggaagaggccaatcctatggcagagcattcagaatgtcaatgagtaattcattattatccaaagcatagg

SEQ ID NO: 251544 - DNA, 120 bp, Artificial Sequence
  ENSG00000123561_15 (sequence is synthesized)
aaggctctatgtttgtatatttctctttgtcagaatacccctcaactcatttgctctaataaatttgactgggttgaaaaattttcccttttctgtcttctggggaatagctaaaaagca

SEQ ID NO: 251545 - DNA, 120 bp, Artificial Sequence
  ENSG00000123561_16 (sequence is synthesized)
ggtcaggtcttcgtatcccagtactccaataagatcaatggacataaaacaatgcagatgcattgtcttatatgtgaacttctcaacccccttcccactgtcccattagtaggattctct

SEQ ID NO: 251546 - DNA, 120 bp, Artificial Sequence
  ENSG00000123561_17 (sequence is synthesized)
gagttcttgccagatctgacactggtaggttgaataaaggaactcccactatggggatgagttacagactgagacaactgaacaagttactgaacaagcatgggacaatacagcaagaga

SEQ ID NO: 251547 - DNA, 120 bp, Artificial Sequence
  ENSG00000123561_18 (sequence is synthesized)
taaacttgcctgtccaaccccaccttccccccaagaaaacatacttccaccttgccaatgtataagctgggagtggagaaagaaagtaattcattcatgtcatatctcatagaccctctt

SEQ ID NO: 251548 - DNA, 120 bp, Artificial Sequence
  ENSG00000123561_19 (sequence is synthesized)
tttctgtatcccaatcagactcctttccatatatagcacccctgtcccacttgtttaagtaggaatctcctttttggctctaatttcactgaatattggtacttttgtatccccagatcc

SEQ ID NO: 251549 - DNA, 120 bp, Artificial Sequence
  ENSG00000123561_20 (sequence is synthesized)
ttcaacaaccttccctctacctgtacatgccaactcattaccacctaccaaactagattttatttcagacactatgtatttaaagcttgagtataaatggcacagtgagtggtaatgatg

SEQ ID NO: 251550 - DNA, 120 bp, Artificial Sequence
  ENSG00000123561_21 (sequence is synthesized)
tagtatctgaaattctagccctgaggtaaaacacttcagtgacaggaaaatagtaaaaaaaatgcataagtactgttgcagatgttgtacttccatattgaaataaatatttatgtttag

SEQ ID NO: 251551 - DNA, 120 bp, Artificial Sequence
  ENSG00000123561_22 (sequence is synthesized)
ttttctggactcacagaggacaatggtctgaaactttccaataccttcccaaagactgttcctgtttcttcagagacccgcaggatttgttctccccacacaggctgcccataaggctgt

SEQ ID NO: 251552 - DNA, 120 bp, Artificial Sequence
  ENSG00000123562_0 (sequence is synthesized)
gaactttctggaaaattaacagtgcgtatttgcctgaagaaggtcagtgtgcttgcttggagatcaggacgcaaaggtcaccatcagaaaagctaagtttgctgtatagtgaggatcagg

SEQ ID NO: 251553 - DNA, 120 bp, Artificial Sequence
  ENSG00000123562_1 (sequence is synthesized)
agatctgatcctgattgcagaaccttccctgattacagaatcttgggttgtatctcccacttcacccttctagaccatcccagaagatctataagatttcatctgggaaatcactaggag

SEQ ID NO: 251554 - DNA, 120 bp, Artificial Sequence
  ENSG00000123562_2 (sequence is synthesized)
ttcttggaagggaaagaaggaagattgttggttggaataaaaacagggttgaatgagttccagaaagcagggttctcaacctcgtggacagcaatctgcagaagaagagaacttcaaaaa

SEQ ID NO: 251555 - DNA, 120 bp, Artificial Sequence
  ENSG00000123562_3 (sequence is synthesized)
accaactagaagcaacatgcagagaagtaaaatgagaggggcctcctcaggaaagaagacagctggtccacagcagaaaaatcttgaaccagctctcccaggaagatggggtggtcgctc

SEQ ID NO: 251556 - DNA, 120 bp, Artificial Sequence
  ENSG00000123562_4 (sequence is synthesized)
tgcagagaaccccccttcaggatccgtgaggaagaccagaaagaacaagcagaagactcctggaaacggagatggtggcagtaccagcgaagcacctcagccccctcggaagaaaagggc

SEQ ID NO: 251557 - DNA, 120 bp, Artificial Sequence
  ENSG00000123562_5 (sequence is synthesized)
ccgggcagaccccactgttgaaagtgaggaggcgtttaagaatagaatggaggttaaagtgaagattcctgaagaattaaaaccatggcttgttgaggactgggacttagttaccaggca

SEQ ID NO: 251558 - DNA, 120 bp, Artificial Sequence
  ENSG00000123562_6 (sequence is synthesized)
gaagcagctgtttcaactccctgccaagaaaaatgtagatgcaattctggaggagtatgcaaattgcaagaaatcgcagggaaatgttgataataaggaatatgcggttaatgaagttgt

SEQ ID NO: 251559 - DNA, 120 bp, Artificial Sequence
  ENSG00000123562_7 (sequence is synthesized)
tgtgatgttgggcactcagctgctctacaaatttgagaggccccagtatgctgaaatcctcttggctcaccctgatgctccaatgtcccaggtttatggagcaccacacctactgagatt

SEQ ID NO: 251560 - DNA, 120 bp, Artificial Sequence
  ENSG00000123562_8 (sequence is synthesized)
atttgtaagaattggagcaatgttggcctatacgccccttgatgagaaaagccttgcattattgttgggctatttgcatgatttcctaaaatatctggcaaagaattctgcatctctctt

SEQ ID NO: 251561 - DNA, 120 bp, Artificial Sequence
  ENSG00000123562_9 (sequence is synthesized)
tactgccagtgattacaaagtggcttctgctgagtaccaccgcaaagccctgtgagcgtctacagacagctcaccatttttgtcctgtatctgtaaacactttttgttcttagtcttttt

SEQ ID NO: 251562 - DNA, 120 bp, Artificial Sequence
  ENSG00000123562_10 (sequence is synthesized)
cttgtaaaattgatgttctttaaaatcgttaatgtataacagggcttatgtttcagtttgttttccgttctgttttaaacagaaaataaaaggagtgtaagctccttttctcatttcaaa

SEQ ID NO: 251563 - DNA, 120 bp, Artificial Sequence
  ENSG00000123562_11 (sequence is synthesized)
gttgctaccagtgtatgcagtaattagaacaaagaagaaacattcagtagaacattttattgcctagttgacaacattgcttgaatgctggtggttcctatccctttgacactacacaat

SEQ ID NO: 251564 - DNA, 120 bp, Artificial Sequence
  ENSG00000123562_12 (sequence is synthesized)
tttctaatatgtgttaatgctatgtgacaaaacgccctgattcctagtgccaaaggttcaacttaatgtatatacctgaaaacccatgcatttgtgctctttttttttttttatggtgct

SEQ ID NO: 251565 - DNA, 120 bp, Artificial Sequence
  ENSG00000123562_13 (sequence is synthesized)
tgaagtaaaacagcccatcctctgcaagtccatctatgttgttcttaggcattctatctttgctcaaattgttgaaggatggtgatttgtttcatggtttttgtatttgagtctaatgca

SEQ ID NO: 251566 - DNA, 120 bp, Artificial Sequence
  ENSG00000123562_14 (sequence is synthesized)
cgttctaacatgatagaggcaatgcattattgtgtagccacggttttctggaaaagttgatattttaggaattgtatttcagatcttaaataaaatttgtttctaaatttcaaagcaagt

SEQ ID NO: 251567 - DNA, 120 bp, Artificial Sequence
  ENSG00000123562_15 (sequence is synthesized)
ttgattatggaacattctaaaacttagacaagacgattgtgattggctgaagggcatacgccctcctccagggtgacgtgtctgcctatggatatcagttgccagagaaacctggcttta

SEQ ID NO: 251568 - DNA, 120 bp, Artificial Sequence
  ENSG00000123562_16 (sequence is synthesized)
tcctgattgcagaaccttccctgattacagaatcttggatgatttcacaaaagttcatcttcattgcagatacctgcctttctttctaggttgtatctcccacttcacccttctagacca

SEQ ID NO: 251569 - DNA, 120 bp, Artificial Sequence
  ENSG00000123562_17 (sequence is synthesized)
gatctgatcctgattgcagaaccttccctgattacagaatcttgggattgttgagaggattacatgtaaagtaccaggacagtgcatggcacatatacctgcctttctttctaggttgta

SEQ ID NO: 251570 - DNA, 120 bp, Artificial Sequence
  ENSG00000123562_18 (sequence is synthesized)
gaaaattaataagctcctatctgggaaagtagtctaaattctgagaagggaagggtggagctaagtccattgatagttccagtatagaaagtgcataagcaacagagggctttgtaatct

SEQ ID NO: 251571 - DNA, 120 bp, Artificial Sequence
  ENSG00000123562_19 (sequence is synthesized)
tttcatccatttgaaattatatttaaggaaagttaaaaaacaaatttgtcagaaattatacaaatgtacaataaattaaatttgaaaatgtggccacaagaaaggaaaaagaaacacttg

SEQ ID NO: 251572 - DNA, 120 bp, Artificial Sequence
  ENSG00000123562_20 (sequence is synthesized)
tacattatttatcagctttggtgtcctttgtgtgtgatgaaattgcattggctgatgtagaagaaagccatatctcatatctttttattttatgttctttcttgtccttttgtttgacct

SEQ ID NO: 251573 - DNA, 120 bp, Artificial Sequence
  ENSG00000123562_21 (sequence is synthesized)
ggaacggcagtgatcacacgtcggctgctgggaagatctggattctcgtttcaggtcaccatcagaaaagctaagtttgctgtatagtgaggatcaggagatctgatcctgattgcagaa

SEQ ID NO: 251574 - DNA, 120 bp, Artificial Sequence
  ENSG00000123569_0 (sequence is synthesized)
cgtgaagctggcccgagacgtggagccatgctgcgtaccgaagtgccccggcttccccggtccacaaccgccattgtctggtcgtgccatctaatggccactgcctccgccatggctgga

SEQ ID NO: 251575 - DNA, 120 bp, Artificial Sequence
  ENSG00000123569_1 (sequence is synthesized)
ccttcctctgagacgacctctgaggaacagctgatcacccaggagcccaaagaggccaactccactacgtcccagaagcagagcaagcagaggaagcgagggcgccatgggccccgcagg

SEQ ID NO: 251576 - DNA, 120 bp, Artificial Sequence
  ENSG00000123569_2 (sequence is synthesized)
tgccactccaactgccgcggggacagcttcgccacctatttccgccgggtgctgaagcaggttcaccagggcctcagcctttcccgggaggccgtgagtgtcatggattctttggttcat

SEQ ID NO: 251577 - DNA, 120 bp, Artificial Sequence
  ENSG00000123569_3 (sequence is synthesized)
cgccagaccatcactgcctgggagacccggatggctgtgcgcctgctgctgccggggcagatgggcaagctcgccgagtccgaaggcacgaaggctgtcctcagaacttcactgtatgcc

SEQ ID NO: 251578 - DNA, 120 bp, Artificial Sequence
  ENSG00000123569_4 (sequence is synthesized)
atacagcaacagagaaagtgaatacgctgatacaagaagcaagaatattagaaaaatgtcatgaaaatagttgaagagaaatgctcactgcacaaggagaccaagaaaaaccccccacga

SEQ ID NO: 251579 - DNA, 120 bp, Artificial Sequence
  ENSG00000123569_5 (sequence is synthesized)
aatcagccacaactaaatcgctctggacggtgccgccaggtgaccctacatgtccggagcaacactttgaaaaccaaagacgcttggcagaaccctgttcctttccagagacagagctgt

SEQ ID NO: 251580 - DNA, 120 bp, Artificial Sequence
  ENSG00000123569_6 (sequence is synthesized)
gtaccttgtctaaaacaccgcatctcactcagtgacttatttctcattatgctaattgttttcgctttaaagcgccagtctttctgtcaaatgggacatacaaataaatttctaaaatta

SEQ ID NO: 251581 - DNA, 120 bp, Artificial Sequence
  ENSG00000123570_0 (sequence is synthesized)
gagacgctgcgcggcggcagcggcgggcgcgagcggcagctgtcaggccaccgaggtccaagccgcacttgctgccccattgaggacgaggaggcagcaggagcagtgacggtgactcta

SEQ ID NO: 251582 - DNA, 120 bp, Artificial Sequence
  ENSG00000123570_1 (sequence is synthesized)
aggagccggattcccggcacgcagagctgacctgcctggcacccgcggccctctcctgtttccttcccattgtgttggcaccctaaaaagaaagaataaaacaacaacaggaaaaaaagg

SEQ ID NO: 251583 - DNA, 120 bp, Artificial Sequence
  ENSG00000123570_2 (sequence is synthesized)
aaaatatttaaattgtgacaaaaacccactgggttctcttggttacaaactccttcccttctggtgctgcaaaaatgagtgggaaatccctgctcttaaaggtcattctcttgggtgatg

SEQ ID NO: 251584 - DNA, 120 bp, Artificial Sequence
  ENSG00000123570_3 (sequence is synthesized)
gtggagttgggaaaagttcgcttatgaaccgttacgtaaccaacaaatttgactcccaggcttttcacaccataggggtagagttcttaaatcgagatctggaggtagatggacgctttg

SEQ ID NO: 251585 - DNA, 120 bp, Artificial Sequence
  ENSG00000123570_4 (sequence is synthesized)
taaccctccagatctgggacactgcagggcaggaacgtttcaagagccttaggacacccttctacaggggagcagactgctgcctcttgaccttcagcgtggatgatcggcagagcttcg

SEQ ID NO: 251586 - DNA, 120 bp, Artificial Sequence
  ENSG00000123570_5 (sequence is synthesized)
agaatcttggtaactggcagaaagaatttatttactatgcggatgtgaaggaccctgagcatttcccctttgtagttctgggtaacaaggtagacaaagaggataggcaagtgactactg

SEQ ID NO: 251587 - DNA, 120 bp, Artificial Sequence
  ENSG00000123570_6 (sequence is synthesized)
aggaggcacaaacctggtgcatggagaatggggattacccttatttagaaactagtgccaaagatgatactaatgtgacagtggcctttgaagaagctgtcaggcaggtgctggctgtag

SEQ ID NO: 251588 - DNA, 120 bp, Artificial Sequence
  ENSG00000123570_7 (sequence is synthesized)
aggaacagctggagcattgcatgttgggtcacaccattgacttgaacagtggctccaaagcagggtcttcgtgctgttaaagatagggagccttttaaaaatgtgccccaaattgatcag

SEQ ID NO: 251589 - DNA, 120 bp, Artificial Sequence
  ENSG00000123570_8 (sequence is synthesized)
tcagtagtgtaagaataactgtgcccctctaagagtgcacacacacgcacacaagagggtaagagacaaggttctgattgtgaaacagagcctttcaaattgaagtgtagattgatttaa

SEQ ID NO: 251590 - DNA, 120 bp, Artificial Sequence
  ENSG00000123570_9 (sequence is synthesized)
aaaaattaaaaattaaaaaaaatgaagctctatcaagccaagtgtattttgcgtgatttctgctatttccccttcttgtgtgtctcaggacatatcagaaaattttagtcctgagacagt

SEQ ID NO: 251591 - DNA, 120 bp, Artificial Sequence
  ENSG00000123570_10 (sequence is synthesized)
taaatattttttaaatcacagtttaaacctagaacccagctgcatgaaggagttaaagagctacaactatttcttaaagtgttccattaatcaactaacaaatgtcactatcagactctt

SEQ ID NO: 251592 - DNA, 120 bp, Artificial Sequence
  ENSG00000123570_11 (sequence is synthesized)
gccaagcagtttctgacatttctgccaaaggggaaaaaaatcagactttgagctgtattacaataaaaataataatgcaaataaggattcctaggcttgaattaaagaagttgtaatgat

SEQ ID NO: 251593 - DNA, 120 bp, Artificial Sequence
  ENSG00000123570_12 (sequence is synthesized)
taggagtgcaaaagtataatgatatacactgacttgtttaaatccttatgtatggttcgctcccatctgagcttttcaaaaaatcccatctcaataagagatactctaatgacactggca

SEQ ID NO: 251594 - DNA, 120 bp, Artificial Sequence
  ENSG00000123570_13 (sequence is synthesized)
attgattatacttcttgtgtttgaagtcataggatactagtgaatggattatgcttaaatatgccaaccacctttgcaaataaatggttggtctgcttttaattcctaagtctacttttg

SEQ ID NO: 251595 - DNA, 120 bp, Artificial Sequence
  ENSG00000123570_14 (sequence is synthesized)
ctgcatagagatgttgcttctctgacaacctcttaccaatttagcaatgctgcttagtatatgaatttggatgcagtgctctctgctcatcatttagatggtcctttgatccaacatgct

SEQ ID NO: 251596 - DNA, 120 bp, Artificial Sequence
  ENSG00000123570_15 (sequence is synthesized)
caaggctccttaactcaaatatttattgcagaagaaggaactggtttcttatatgttgcactgtatgttcaactagcctaattaggacattgaaagtgacagaagagcagatcttaaccc

SEQ ID NO: 251597 - DNA, 120 bp, Artificial Sequence
  ENSG00000123570_16 (sequence is synthesized)
agtgttagaatgaatttcccataaacagagttgtccaacagtggaatggactgccttaatagtgagctccctgcctctgaaaatattcactggatgaccatctgttagaataccataaaa

SEQ ID NO: 251598 - DNA, 120 bp, Artificial Sequence
  ENSG00000123570_17 (sequence is synthesized)
agattttctgtgctggctacatgttcaatataaagtcctttctggctctaagttctatgaatatataaactacatcagtgccatgctgtggttagatttatctgatgataacagctaaga

SEQ ID NO: 251599 - DNA, 120 bp, Artificial Sequence
  ENSG00000123570_18 (sequence is synthesized)
ctatggagagggactttaaaaattctcaaaccattctgtgatcaatctttaacagcaactacatagctcttccttttgcttttgcactgtggcaggaaaaattcttgagctctgagtaat

SEQ ID NO: 251600 - DNA, 120 bp, Artificial Sequence
  ENSG00000123570_19 (sequence is synthesized)
ctttatgtgactgataaaaaacatcttaaagctcccatgttaaaatataaaaatggtttgacaatttttgattaccatgactgtcagttatatactatattatgaatatgcagtgtggtt

SEQ ID NO: 251601 - DNA, 120 bp, Artificial Sequence
  ENSG00000123570_20 (sequence is synthesized)
cttgttggttgatctgtttaccctgcatagattttaatctgtactttaaaacatctatgataaaaatagtgacagacagaaattaccccaaaaagagacctaggccaggaagggggtggg

SEQ ID NO: 251602 - DNA, 120 bp, Artificial Sequence
  ENSG00000123570_21 (sequence is synthesized)
agctttcataggaatacagcctagaactctccattgtagccacgtatggaatcagccttacttacatgtaggacctttgtgctttaagagctctgggacatattggccaaatagaaaaga

SEQ ID NO: 251603 - DNA, 120 bp, Artificial Sequence
  ENSG00000123570_22 (sequence is synthesized)
agaggacagtatttcaactcagtcatactcaatatttccaattaagatataatcctgacaccattgttcaattaactttgacgccagaagtcaaagccagaactgggaccccacagctct

SEQ ID NO: 251604 - DNA, 120 bp, Artificial Sequence
  ENSG00000123570_23 (sequence is synthesized)
taagtactggtccctatcctgcctatgcctatagccagccacactggtttccaagttctgtgatcattttgctacaatcatgttagggtgaaaatctgtacgtcagaactgttaaatgct

SEQ ID NO: 251605 - DNA, 120 bp, Artificial Sequence
  ENSG00000123570_24 (sequence is synthesized)
aattatttttaagtgcatgagacctggggccttctctttctacttgcactctgcttatactagtttctatttgtagatctcaggccttcatcataaagacctctatcaactcacaaaagt

SEQ ID NO: 251606 - DNA, 120 bp, Artificial Sequence
  ENSG00000123570_25 (sequence is synthesized)
atttgtctctattagagtggcatgtggtcatttgagtaaaaaaaaaaaaattacatgggtatcggattcataggcatcctgtccatctaagacaagtgttaattttattggcccatcagc

SEQ ID NO: 251607 - DNA, 120 bp, Artificial Sequence
  ENSG00000123570_26 (sequence is synthesized)
tggagcccctttcctcttagccataccattgttttctaccaaattaccactcaatatcttaatgaaagcactcaacattaagtgacataaacagtggcatttgggtaagcaacactcagt

SEQ ID NO: 251608 - DNA, 120 bp, Artificial Sequence
  ENSG00000123570_27 (sequence is synthesized)
ggggtgctgacatacagtttgggtaagattaaaaaacaccaaaggctgaaatctgtgagtaccaagaactgtgcatataggtttagaaattgactgtgtaccctagaatgtgcagtgtaa

SEQ ID NO: 251609 - DNA, 120 bp, Artificial Sequence
  ENSG00000123570_28 (sequence is synthesized)
ttcaataggtgtttttttaaagaacactagatttttggaataatatatttctaattaggactatactgtttttcaatggtctgttaaaacatcatacagaatatttatttagtttattgt

SEQ ID NO: 251610 - DNA, 120 bp, Artificial Sequence
  ENSG00000123570_29 (sequence is synthesized)
ttgtcatgtattggctaactttcaggggcctcagattccatatgtcttcagtggattgatgaatatcaggttaatttgtgcctgccccagccatctctactttattctgaggtattccac

SEQ ID NO: 251611 - DNA, 120 bp, Artificial Sequence
  ENSG00000123570_30 (sequence is synthesized)
aatcctcttgttgcaggtgctgctaaaaaaaactcaaaattgtgtatcaaatattttctttcaactgtaaaaaatcatctgtgttaaagtgaataaaaagtgcattttgaataaccagca

SEQ ID NO: 251612 - DNA, 120 bp, Artificial Sequence
  ENSG00000123572_0 (sequence is synthesized)
agacacagcgctctcgacacggagcacccttctagcttcttcgtctccaggactgacgctcaggctcctctctcgccttagcccaacttgctttcccgcctcgcaaactccggtttccct

SEQ ID NO: 251613 - DNA, 120 bp, Artificial Sequence
  ENSG00000123572_1 (sequence is synthesized)
ccactcccaactcttttcactacacgtttcccctcctctatctcccacgccacgaaccccgatccccagactcctctctcccgccctcctccttcctctctcctcccttcaactcttcat

SEQ ID NO: 251614 - DNA, 120 bp, Artificial Sequence
  ENSG00000123572_2 (sequence is synthesized)
ccgcttccacctcagactctgcgcgcacccaattcagtcgcccgctcccgttcggctcctcgaagccatggcgggacctgggggctggagggacagggaggtcacggatctgggccacct

SEQ ID NO: 251615 - DNA, 120 bp, Artificial Sequence
  ENSG00000123572_3 (sequence is synthesized)
gccggatccaactggaatattctcactagataaaaccattggccttggtacttatggcagaatctatttgggacttcatgagaagactggtgcatttacagctgttaaagtgatgaacgc

SEQ ID NO: 251616 - DNA, 120 bp, Artificial Sequence
  ENSG00000123572_4 (sequence is synthesized)
tcgtaagacccctttacctgaaataggaaggcgagtgagagtgaataaatatcaaaaatctgttgggtggagatacagtgatgaggaagaggatctcaggactgaactcaaccttctgag

SEQ ID NO: 251617 - DNA, 120 bp, Artificial Sequence
  ENSG00000123572_5 (sequence is synthesized)
gaagtactctttccacaaaaacattgtgtccttctatggagcatttttcaagctgagtccccctggtcagcggcaccaactttggatggtgatggagttatgtgcagcaggttcggtcac

SEQ ID NO: 251618 - DNA, 120 bp, Artificial Sequence
  ENSG00000123572_6 (sequence is synthesized)
tgatgtagtgagaatgaccagtaatcagagtttaaaagaagattggattgcttatatctgccgagaaatccttcagggcttagctcaccttcacgcacaccgagtaattcaccgggacat

SEQ ID NO: 251619 - DNA, 120 bp, Artificial Sequence
  ENSG00000123572_7 (sequence is synthesized)
caaaggtcagaatgtgctgctgactcataatgctgaagtaaaactggttgattttggagtgagtgcccaggtgagcagaactaatggaagaaggaatagtttcattgggacaccatactg

SEQ ID NO: 251620 - DNA, 120 bp, Artificial Sequence
  ENSG00000123572_8 (sequence is synthesized)
gatggcacctgaggtgattgactgtgatgaggacccaagacgctcctatgattacagaagtgatgtgtggtctgtgggaattactgccattgaaatggctgaaggagcccctcctctgtg

SEQ ID NO: 251621 - DNA, 120 bp, Artificial Sequence
  ENSG00000123572_9 (sequence is synthesized)
taaccttcaacccttggaagctctcttcgttattttgcgggaatctgctcccacagtcaaatccagcggatggtcccgtaagttccacaatttcatggaaaagtgtacgataaaaaattt

SEQ ID NO: 251622 - DNA, 120 bp, Artificial Sequence
  ENSG00000123572_10 (sequence is synthesized)
cctgtttcgtcctacttctgcaaacatgcttcaacacccatttgttcgggatataaaaaatgaacgacatgttgttgagtcattaacaaggcatcttactggaatcattaaaaaaagaca

SEQ ID NO: 251623 - DNA, 120 bp, Artificial Sequence
  ENSG00000123572_11 (sequence is synthesized)
gaaaaaaggaatacctttgatctttgaaagagaagaagctattaaggaacagtacaccgtgagaagattcagaggaccctcttgcactcacgagcttctgagattgccaaccagcagcag

SEQ ID NO: 251624 - DNA, 120 bp, Artificial Sequence
  ENSG00000123572_12 (sequence is synthesized)
atgcagaccacttagagtcctgcatggggaaccctctcagccaaggtggctacctgatcgagaagagccacaggtccaggcacttcagcagctacagggagcagccagggtattcatgcc

SEQ ID NO: 251625 - DNA, 120 bp, Artificial Sequence
  ENSG00000123572_13 (sequence is synthesized)
actgcaggctctggacagtgcacctaagcctctaaaggggcaggctcaggcacctcaacgactacaaggggcagctcgggtgttcatgccactacaggctcaggtgaaggctaaggcctc

SEQ ID NO: 251626 - DNA, 120 bp, Artificial Sequence
  ENSG00000123572_14 (sequence is synthesized)
taaacctctacaaatgcagattaaggcacctccacgactacggagggcagccagggtgctcatgccactacaggcacaggttagggcacctaggcttctgcaggtacagtcccaggtatc

SEQ ID NO: 251627 - DNA, 120 bp, Artificial Sequence
  ENSG00000123572_15 (sequence is synthesized)
caaaaagcagcaggcccagacccagacatcagaaccacaagatttggaccaggtaccagaggaatttcagggtcaagatcaggtacccgaacaacaaaggcagggccaggcccctgaaca

SEQ ID NO: 251628 - DNA, 120 bp, Artificial Sequence
  ENSG00000123572_16 (sequence is synthesized)
acagcagaggcacaaccaggtgcctgaacaagagctggagcagaaccaggcacctgaacagccagaggtacaggaacaggctgccgagcctgcacaggcagagactgaggcagaggaacc

SEQ ID NO: 251629 - DNA, 120 bp, Artificial Sequence
  ENSG00000123572_17 (sequence is synthesized)
tgagtcattacgagtaaatgcccaggtatttctgcccctgctatcacaagatcaccatgtgctgttgccactacatttggatactcaggtgctcattccagtagaggggcaaactgaagg

SEQ ID NO: 251630 - DNA, 120 bp, Artificial Sequence
  ENSG00000123572_18 (sequence is synthesized)
atcacctcaggcacaggcttggacactagaacccccacaggcaattggctcagttcaagcactgatagagggactatcaagagacttgcttcgggcaccaaactcaaataactcaaagcc

SEQ ID NO: 251631 - DNA, 120 bp, Artificial Sequence
  ENSG00000123572_19 (sequence is synthesized)
acttggtccgttgcaaaccctgatggaaaatctgtcatcaaataggttttactcacaaccagaacaggcacgggagaaaaaatcaaaagtttctactctgaggcaagcactggcaaaaag

SEQ ID NO: 251632 - DNA, 120 bp, Artificial Sequence
  ENSG00000123572_20 (sequence is synthesized)
actatcaccaaagaggttcagggcaaagtcatcatggagacctgaaaagcttgaactctcggatttagaagcccgcaggcaaaggcgccaacgcagatgggaagatatctttaatcagca

SEQ ID NO: 251633 - DNA, 120 bp, Artificial Sequence
  ENSG00000123572_21 (sequence is synthesized)
tgaggaagaattgagacaagttgataaagacaaagaagatgaatcatcagacaatgatgaagtatttcattcgattcaggctgaagtccagatagagccattgaagccatacatttcaaa

SEQ ID NO: 251634 - DNA, 120 bp, Artificial Sequence
  ENSG00000123572_22 (sequence is synthesized)
tcctaaaaaaattgaggttcaagagagatctccttctgtgcctaacaaccaggatcatgcacatcatgtcaagttctcttcaagcgttcctcagcggtctcttttggaacaagctcagaa

SEQ ID NO: 251635 - DNA, 120 bp, Artificial Sequence
  ENSG00000123572_23 (sequence is synthesized)
gcccattgacatcagacaaaggagttcgcaaaatcgtcaaaattggctggcagcatcagaatcttcttctgaggaagaaagtcctgtgactggaaggaggtctcagtcatcaccacctta

SEQ ID NO: 251636 - DNA, 120 bp, Artificial Sequence
  ENSG00000123572_24 (sequence is synthesized)
ttctactattgatcagaagttgctggttgacatccatgttccagatggatttaaagtaggaaaaatatcaccccctgtatacttgacaaacgaatgggtaggctataatgcactctctga

SEQ ID NO: 251637 - DNA, 120 bp, Artificial Sequence
  ENSG00000123572_25 (sequence is synthesized)
aatcttccggaatgattggttaactccggcacctgtcattcagccacctgaagaggatggtgattatgttgaactctatgatgccagtgctgatactgatggtgatgatgatgatgagtc

SEQ ID NO: 251638 - DNA, 120 bp, Artificial Sequence
  ENSG00000123572_26 (sequence is synthesized)
taatgatacttttgaagatacctatgatcatgccaatggcaatgatgacttggataaccaggttgatcaggctaatgatgtttgtaaagaccatgatgatgacaacaataagtttgttga

SEQ ID NO: 251639 - DNA, 120 bp, Artificial Sequence
  ENSG00000123572_27 (sequence is synthesized)
tgatgtaaataataattattatgaggcgcctagttgtccaagggcaagctatggcagagatggaagctgcaagcaagatggttatgatggaagtcgtggaaaagaggaagcctacagagg

SEQ ID NO: 251640 - DNA, 120 bp, Artificial Sequence
  ENSG00000123572_28 (sequence is synthesized)
ctatggaagccatacagccaatagaagccatggaggaagtgcagccagtgaggacaatgcagccattggagatcaggaagaacatgcagccaatataggcagtgaaagaagaggcagtga

SEQ ID NO: 251641 - DNA, 120 bp, Artificial Sequence
  ENSG00000123572_29 (sequence is synthesized)
gggtgatggaggtaagggagtcgttcgaaccagtgaagagagtggagcccttggactcaatggagaagaaaattgctcagagacagatggtccaggattgaagagacctgcgtctcagga

SEQ ID NO: 251642 - DNA, 120 bp, Artificial Sequence
  ENSG00000123572_30 (sequence is synthesized)
ctttgaatatctacaggaggagccaggtggtggaaatgaggcctcaaatgccattgactcaggtgctgcaccgtcagcacctgatcatgagagtgacaataaggacatatcagaatcatc

SEQ ID NO: 251643 - DNA, 120 bp, Artificial Sequence
  ENSG00000123572_31 (sequence is synthesized)
aacacaatcagatttttctgccaatcactcatctccttccaaaggttctgggatgtctgctgatgctaactttgccagtgccatcttatacgctggattcgtagaagtacctgaggaatc

SEQ ID NO: 251644 - DNA, 120 bp, Artificial Sequence
  ENSG00000123572_32 (sequence is synthesized)
acctaagcaaccctctgaagtcaatgttaacccactctatgtctctcctgcatgtaaaaaaccactaatccacatgtatgaaaaggagttcacttctgagatctgctgtggttctttgtg

SEQ ID NO: 251645 - DNA, 120 bp, Artificial Sequence
  ENSG00000123572_33 (sequence is synthesized)
gatctaatctatatctgatggacagaagtggaaaggctgacattactaaacttataaggcgaagaccattccgccagattcaagtcttagagccactcaatttgctgattaccatctcag

SEQ ID NO: 251646 - DNA, 120 bp, Artificial Sequence
  ENSG00000123572_34 (sequence is synthesized)
gtcataagaacagacttcgggtgtatcatctgacctggttgaggaacaagattttgaataatgatccagaaagtaaaagaaggcaagaagaaatgctgaagacagaggaagcctgcaaag

SEQ ID NO: 251647 - DNA, 120 bp, Artificial Sequence
  ENSG00000123572_35 (sequence is synthesized)
ctattgataagttaacaggctgtgaacacttcagtgtcctccaacatgaagaaacaacatatattgcaattgctttgaaatcatcaattcacctttatgcatgggcaccaaagtcctttg

SEQ ID NO: 251648 - DNA, 120 bp, Artificial Sequence
  ENSG00000123572_36 (sequence is synthesized)
atgaaagcactgctattaaagtatgcattgatcaatcagcagactctgaaggagactacatgtcctatcaagcctatatacgaatactggcaaaaatacaggcagctgatccagtgaacc

SEQ ID NO: 251649 - DNA, 120 bp, Artificial Sequence
  ENSG00000123572_37 (sequence is synthesized)
ggtttaagagaccagatgagctccttcatttgctgaagctcaaggtatttccaacacttgatcataagccagtgacagttgacctggctattggttctgaaaaaagactaaagattttct

SEQ ID NO: 251650 - DNA, 120 bp, Artificial Sequence
  ENSG00000123572_38 (sequence is synthesized)
tcagctcagcagatggatatcacctcatcgatgcagaatctgaggttatgtctgatgtgaccctgccaaagaatcccctggaaatcattataccacagaatatcatcattttacctgatt

SEQ ID NO: 251651 - DNA, 120 bp, Artificial Sequence
  ENSG00000123572_39 (sequence is synthesized)
gcttgggaattggcatgatgctcaccttcaatgctgaagccctctctgtggaagcaaatgaacaactcttcaagaagatccttgaaatgtggaaagacataccatcttctatagcttttg

SEQ ID NO: 251652 - DNA, 120 bp, Artificial Sequence
  ENSG00000123572_40 (sequence is synthesized)
aatgtacacagcgaaccacaggatggggccaaaaggccattgaagtgcgctctttgcaatccagggttctggaaagtgagctgaagcgcaggtcaattaagaagctgagattcctgtgca

SEQ ID NO: 251653 - DNA, 120 bp, Artificial Sequence
  ENSG00000123572_41 (sequence is synthesized)
cccggggtgacaagctgttctttacctctaccctgcgcaatcaccacagccgggtttacttcatgacacttggaaaacttgaagagctccaaagcaattatgatgtctaaaagtttccag

SEQ ID NO: 251654 - DNA, 120 bp, Artificial Sequence
  ENSG00000123572_42 (sequence is synthesized)
tgatttattaccacattataaacatcatgtataggcagtctgcatcttcagatttcagagattaaatgagtattcagttttatttttagtaaagattaaatccaaaactttacttttaat

SEQ ID NO: 251655 - DNA, 120 bp, Artificial Sequence
  ENSG00000123572_43 (sequence is synthesized)
gtagcacagaatagttttaatgagaaatgcagctttatgtataaaattaactatagcaagctctaggtactccaatggtgtacaatgtcttttgcacaaactttgtaacttttgttactg

SEQ ID NO: 251656 - DNA, 120 bp, Artificial Sequence
  ENSG00000123572_44 (sequence is synthesized)
tgaattcaaacattactctttggacagtttggacagtatctgtattcagattttacaacatggagtaaagaaacctgttatgaattagattacaagcagccttcaaaagaattggcactg

SEQ ID NO: 251657 - DNA, 120 bp, Artificial Sequence
  ENSG00000123572_45 (sequence is synthesized)
ggataagatttttcagaaaaagaaaaacatcggcaaactgtgtgtgatttttccaaagctatataaagaaccaaaggtttagtcaagaaacaaaaatcttaaagattattataacccaga

SEQ ID NO: 251658 - DNA, 120 bp, Artificial Sequence
  ENSG00000123572_46 (sequence is synthesized)
ctaaggttgaacaacctgcatgcccagagaaaactatggcgacaaaggggaaaaggccaccactcgttttctcactgattcatgccaattaagcctacagttaaagaccagttttgttct

SEQ ID NO: 251659 - DNA, 120 bp, Artificial Sequence
  ENSG00000123572_47 (sequence is synthesized)
tttcacccatttttaagctggttttctcctgataagaagaaaggaagaaagccccagacgcttggtttttctcagaacccccaaaagatgtgcaatagctgttgttacaaaccaccaaat

SEQ ID NO: 251660 - DNA, 120 bp, Artificial Sequence
  ENSG00000123572_48 (sequence is synthesized)
aatacagttgtgagcctgaatacaggactgaactcctatacacgtgtactgtagaatgagtattttttaataccttaaggtaggcgtcaaattctactccccaaagcagagatagattga

SEQ ID NO: 251661 - DNA, 120 bp, Artificial Sequence
  ENSG00000123572_49 (sequence is synthesized)
tttatcaaaattattatctggccaacagtgtgactatcagacagcatcaaatatttgcccaatccaagattagactacacaaaagcttccttccagtattaaacaaaaagaattaaacat

SEQ ID NO: 251662 - DNA, 120 bp, Artificial Sequence
  ENSG00000123572_50 (sequence is synthesized)
aactatgaaaaaactttgctaatatctgtgtttttcagatttcattttttgtaaaatcagaaattaatctaaacatattcagtgataagttcatgtgtaacgacttaatgttaaaggtta

SEQ ID NO: 251663 - DNA, 120 bp, Artificial Sequence
  ENSG00000123572_51 (sequence is synthesized)
aaaaaaagatttcacaaaatatacaactttcaccatatatataagcctgcaaaattagagtagtgaaagtcatgctagtccatcacccaaatatgttatagacgccatagacaggtgatg

SEQ ID NO: 251664 - DNA, 120 bp, Artificial Sequence
  ENSG00000123572_52 (sequence is synthesized)
tttggtcacctatggtaactgctacctgatgaagagcataatttctgcatatccatcctcaataccatggtaaattctggggcaatagagaagcaacagaactgccacaaagtatacctc

SEQ ID NO: 251665 - DNA, 120 bp, Artificial Sequence
  ENSG00000123572_53 (sequence is synthesized)
aatataattcctctagttctgcttctaaaatctgaggacagtgctagtgggaaaataattttcaaactacctggttaaccaaaatacaaaagcagctgactatgtgtgatttcataatag

SEQ ID NO: 251666 - DNA, 120 bp, Artificial Sequence
  ENSG00000123572_54 (sequence is synthesized)
cacatttcttgacacttagtgctagaaatgaagatttggattttcctaacaacttacatcaagaatgtagtgtagctcattattgagaatttaggaaagcctgaatccattaattaagga

SEQ ID NO: 251667 - DNA, 120 bp, Artificial Sequence
  ENSG00000123572_55 (sequence is synthesized)
aataaatgtgactcacatttcttttactgtgacacaataatgtgatcctaaaactggcttatccttgagtgtttacaactcaaacaactttttgaatgcagtagttttttttttttaaaa

SEQ ID NO: 251668 - DNA, 120 bp, Artificial Sequence
  ENSG00000123572_56 (sequence is synthesized)
acaaacttttatgtcaaattttttttcttagaagtagtcttcattattataaatttgtacaccaaaaggccatggggaactttgtgcaagtacctcatcgctgagcaaatggagcttgct

SEQ ID NO: 251669 - DNA, 120 bp, Artificial Sequence
  ENSG00000123572_57 (sequence is synthesized)
tgctatgttttaatttcagaaaatttcctcatatacgtagtgtgtagaatcaagtcttttaataattcattttttcttcataatatttactcaaagttaagcttaaaaataagttttatc

SEQ ID NO: 251670 - DNA, 120 bp, Artificial Sequence
  ENSG00000123572_58 (sequence is synthesized)
aatcatatttgaagacagtaagacagtaaactattttaggaagtcaacccccattgcactctgtggcagttattctggtaaaaataggcaaaagtgacctgaatctacaatgatgtccca

SEQ ID NO: 251671 - DNA, 120 bp, Artificial Sequence
  ENSG00000123572_59 (sequence is synthesized)
aagtaaccaagtaagagagattgtaaatgataaaccgagctttaaaggataaagtgttaataaagaaaggaagctgggcacatgtcaaaaagggagatcgaaatgttaggtaatcattta

SEQ ID NO: 251672 - DNA, 120 bp, Artificial Sequence
  ENSG00000123572_60 (sequence is synthesized)
gaaaggacagaaaatatttaaagtggctcataggtaatgaatatttctgacttagatgtaaatccatctggaatctttacatcctttgccagctgaaacaagaaagtgaagggacaatga

SEQ ID NO: 251673 - DNA, 120 bp, Artificial Sequence
  ENSG00000123572_61 (sequence is synthesized)
tatttcatggtcagtttattttgtaagagacagaagaaattatatctatacattaccttgtagcagcagtacctggaagccccagcccgtcacagaagtgtggaggggggctcctgacta

SEQ ID NO: 251674 - DNA, 120 bp, Artificial Sequence
  ENSG00000123572_62 (sequence is synthesized)
gacaatttccctagcccttgtgatttgaagcatgaaagttctggcaggttatgagcagcactagggataaagtatggttttattttggtgtaatttaggtttttcaacaaagcccttgtc

SEQ ID NO: 251675 - DNA, 120 bp, Artificial Sequence
  ENSG00000123572_63 (sequence is synthesized)
taaaataaaaggcattattggaaatatttgaaaactagaaaatgatggataaaagggctgataagaaaatttctgactgtcagtagaagtgagataagatcctcagaggaaacagtaaga

SEQ ID NO: 251676 - DNA, 120 bp, Artificial Sequence
  ENSG00000123572_64 (sequence is synthesized)
agggataatcattaagatagtaaaacaggcaaagcagaatcacatgtgcacacacacatacacatgtaaacattggaatgcataagttttaatattttagcgctatcagtttctaaatgc

SEQ ID NO: 251677 - DNA, 120 bp, Artificial Sequence
  ENSG00000123572_65 (sequence is synthesized)
attaattactaactgccctctcccaagattcatttagttcaaacagtatccgtaaactaggaataatgccacatgcattcaatgggatcttttaagtactcttcagtttgttccaagaaa

SEQ ID NO: 251678 - DNA, 120 bp, Artificial Sequence
  ENSG00000123572_66 (sequence is synthesized)
tgtgcctactgaaatcaaattaatttgtattcaatgtgtacttcaagactgctaattgtttcatctgaaagcctacaatgaatcattgttcaaccttgaaaaataaaattttgtaaaaca

SEQ ID NO: 251679 - DNA, 120 bp, Artificial Sequence
  ENSG00000123572_67 (sequence is synthesized)
gtcatatttctgggaacgggttgtagtgattccagcctaaagaaagaattgtgtctgaaacatcaaaattaagctgtttctcttatcaaaagtttttccaaaaatactaagaactgtacc

SEQ ID NO: 251680 - DNA, 120 bp, Artificial Sequence
  ENSG00000123572_68 (sequence is synthesized)
ccagcccgggtgacagaacaagacgctgcctcaaaaaaataaaaataaaagtaccaggatggattttcaccaagtccagaagaagcccctgggaagtcctaactttatatattatattac

SEQ ID NO: 251681 - DNA, 120 bp, Artificial Sequence
  ENSG00000123572_69 (sequence is synthesized)
atattccacatttgattttgcggaccataggcagagttgagagtaacaatggaatgtaaaagggaaaacttgaaaaagcaggcatcctcagatcagctgtgggattgattgtagtggggc

SEQ ID NO: 251682 - DNA, 120 bp, Artificial Sequence
  ENSG00000123572_70 (sequence is synthesized)
ttgttgtatctatacatgtatcatgttttgaggcaaggagcagcaagaattaatttatttacctatggtaatgaagttattcagccaactttacagaggccagccagtttcaaatgggtt

SEQ ID NO: 251683 - DNA, 120 bp, Artificial Sequence
  ENSG00000123572_71 (sequence is synthesized)
caggaaaaccacacatctatatggtaatttgctaatttccagaattgcaaaatttccaaaatgttacctgtaggaaaagttccatttatatggaagttacactaaagatataaatatagt

SEQ ID NO: 251684 - DNA, 120 bp, Artificial Sequence
  ENSG00000123572_72 (sequence is synthesized)
tgccctgaacattttaatataggaaattcaaaataaaactcttgtttgtaatcttctatatttcagtagtcacagtacagctgatgataggaaagaagctgaatgttttcaatgtgttta

SEQ ID NO: 251685 - DNA, 120 bp, Artificial Sequence
  ENSG00000123572_73 (sequence is synthesized)
gtgtaaaacacagaattaagaatttgccttctcattgaaaagaccaaatatcaacctcaagccataaagtccttacatctagagcccacagctgtaagccatgctcaccactatttagag

SEQ ID NO: 251686 - DNA, 120 bp, Artificial Sequence
  ENSG00000123572_74 (sequence is synthesized)
tttctcttgtctcattctccctttgtcccattctctcttcttcctctttagaattgcagaaatcaagttgctaaattttctctgttcagagaaattaatctgcatgcaatagctatattg

SEQ ID NO: 251687 - DNA, 120 bp, Artificial Sequence
  ENSG00000123572_75 (sequence is synthesized)
tgctgcaaaagtgggcctagaaactagaatatggtctacatcacaaaccaagtacttttgaagggctaccttcttgcccttgtaattcactccacatcctaagaagcagagggaacaagg

SEQ ID NO: 251688 - DNA, 120 bp, Artificial Sequence
  ENSG00000123572_76 (sequence is synthesized)
attacaaaagctgtaatgatacaagggaaccatgtgtgctaaagaatatctagttacttcaggaatcatctgagaagcatctgaggctgtatggatttgcagcagtccagtttttttcta

SEQ ID NO: 251689 - DNA, 120 bp, Artificial Sequence
  ENSG00000123572_77 (sequence is synthesized)
aacagattttattaagacaaccttctttcctgcaatttcttttactctcttcctttatcttttttttctgattcaattgctcatgcaagtgcccagggaacgcattaaaattgcttttcg

SEQ ID NO: 251690 - DNA, 120 bp, Artificial Sequence
  ENSG00000123575_0 (sequence is synthesized)
cgggccgggcggcggcgctgcgctgacgggctgagtctggcggcggcggaagctgcagaggccaccggggcgctaactgggtggccggtgggccgctgtggcctcgagcagcctcttcgc

SEQ ID NO: 251691 - DNA, 120 bp, Artificial Sequence
  ENSG00000123575_1 (sequence is synthesized)
ctaactgggtggccggtgggccgctgtggcctcgagcagcctcttcgcgcggccccgcaccccggcaagcagcagcgggccgcgacgcccagcctgccagtgagctgcgacgggcacacc

SEQ ID NO: 251692 - DNA, 120 bp, Artificial Sequence
  ENSG00000123575_2 (sequence is synthesized)
tcggcgactgcggacaggttagagtgggggcaggggcgggcgcgggagcagcccagggccagagagggagcccgagccaggccatctccaaccatgtccgacgaggcctcggccatcact

SEQ ID NO: 251693 - DNA, 120 bp, Artificial Sequence
  ENSG00000123575_3 (sequence is synthesized)
tcctacgagaagtttctaacccccgaggagcccttcccactcctgggacctcctcgcggggtgggcacctgcccgagcgaggagccgggctgcctggacatcagcgacttcggctgccag

SEQ ID NO: 251694 - DNA, 120 bp, Artificial Sequence
  ENSG00000123575_4 (sequence is synthesized)
ctgtcctcctgccatcgcaccgacccgctccaccgcttccacaccaacaggtggaacctaacttcttgtggaacaagtgttgccagctcagaaggcagtgaggagctgttttcatctgtg

SEQ ID NO: 251695 - DNA, 120 bp, Artificial Sequence
  ENSG00000123575_5 (sequence is synthesized)
tctgttggagatcaagatgattgctattccctgttagatgatcaggacttcacttcttttgatttatttcctgaggggagtgtctgcagtgatgtctcttcttctattagcacttactgg

SEQ ID NO: 251696 - DNA, 120 bp, Artificial Sequence
  ENSG00000123575_6 (sequence is synthesized)
gattggtcagatagcgagtttgaatggcagttaccaggcagtgacattgccagtgggagtgatgtactttctgatgtcatacccagtattccaagttcaccttgcctgcttcctaaaaag

SEQ ID NO: 251697 - DNA, 120 bp, Artificial Sequence
  ENSG00000123575_7 (sequence is synthesized)
aaaaacaagcaccggaatttagatgaactcccttggagtgcaatgacaaatgatgagcaggtggaatatattgagtatctgagtcggaaagtgagtactgagatgggtcttcgggagcaa

SEQ ID NO: 251698 - DNA, 120 bp, Artificial Sequence
  ENSG00000123575_8 (sequence is synthesized)
cttgatattattaagatcattgatccttctgctcaaatctcccctacagacagtgagtttattattgaacttaactgtctcacagatgaaaaactgaagcaggtcagaaactatatcaag

SEQ ID NO: 251699 - DNA, 120 bp, Artificial Sequence
  ENSG00000123575_9 (sequence is synthesized)
gaacatagccctcgccaacggcctgcaagagaggcctggaagagaagcaactttagttgtgcaagcaccagtggagtgagcggtgccagtgccagcgccagcagcagcagtgccagcatg

SEQ ID NO: 251700 - DNA, 120 bp, Artificial Sequence
  ENSG00000123575_10 (sequence is synthesized)
gtcagttctgcaagcagcagtgggtccagtgttggaaactctgcttcaaactccagtgccaacatgagtcgagcacacagtgacagcaacctgtctgcaagtgcagcagagcggattcgg

SEQ ID NO: 251701 - DNA, 120 bp, Artificial Sequence
  ENSG00000123575_11 (sequence is synthesized)
gattcaaaaaagcgatccaagcagcggaagttacagcagaaggccttccgcaagaggcagctgaaggagcagaggcaggcccggaaggagaggctcagtgggctcttccttaacgaagag

SEQ ID NO: 251702 - DNA, 120 bp, Artificial Sequence
  ENSG00000123575_12 (sequence is synthesized)
gtgctgtccttgaaagtgactgaggaagaccatgaagcagatgttgatgttttgatgtaataagggtgaatttatcaacgttctttgtgagcattaaaatactccatccttatgggttta

SEQ ID NO: 251703 - DNA, 120 bp, Artificial Sequence
  ENSG00000123575_13 (sequence is synthesized)
catgcatcttgaccaaaattttggttagggctgtgctgatgtaccattaataatttaagccagtggttcttggcaggtgatcccaagacctgcagcttcagcatcacttgagaagttgtt

SEQ ID NO: 251704 - DNA, 120 bp, Artificial Sequence
  ENSG00000123575_14 (sequence is synthesized)
aggaatgcatactagtgggccccgcccccagacatagtgaatcagaaaccaacagggaggcgcctagcattgtttttttaacaagtgctgggttattctgatgcacagtctagtttaaga

SEQ ID NO: 251705 - DNA, 120 bp, Artificial Sequence
  ENSG00000123575_15 (sequence is synthesized)
accactactttgggtaaacgttttgactgtttaaagtttatggcggtgaagtgggcgtcttcaaagactagtacttacacagtttagaagatttcaaggtactgctgacagtagtttatt

SEQ ID NO: 251706 - DNA, 120 bp, Artificial Sequence
  ENSG00000123575_16 (sequence is synthesized)
atgtcagtatacatacatgtgtagagatcataatttagttcccttcttaatgttacaatttcttagtttacttttcctaaagggccatagcataattcttgattcctggtggaaatcttt

SEQ ID NO: 251707 - DNA, 120 bp, Artificial Sequence
  ENSG00000123575_17 (sequence is synthesized)
tctgaggtgtgggggtgggcaaggtgtggattgctgtttacgatagtgccttcattagttttagttctgtctgttttcattcattattgactcaaaggtattagaacaggcccttatctt

SEQ ID NO: 251708 - DNA, 120 bp, Artificial Sequence
  ENSG00000123575_18 (sequence is synthesized)
tttcctattagatttatttttgttttttactttatgtaagttcagaatccttttttaagtgatgactactgatgaaataatgttactagtagctgaattttagacttgatgctatgttga

SEQ ID NO: 251709 - DNA, 120 bp, Artificial Sequence
  ENSG00000123575_19 (sequence is synthesized)
ttaatatttaaatggtgaaagtaattaggcaaaataagcaattctgcttttctgttgctttcagaatttttaggctgtaaaattgtctcaggcaggaagtcagtctatatctctctcaag

SEQ ID NO: 251710 - DNA, 120 bp, Artificial Sequence
  ENSG00000123575_20 (sequence is synthesized)
ttcttattgtaggtcatttttttttcagcacagctctaatttttaaatatttggtataacagcttctggcatgtgacctagttaatgttgaaaattaactgatgaaaacccttgtagatc

SEQ ID NO: 251711 - DNA, 120 bp, Artificial Sequence
  ENSG00000123575_21 (sequence is synthesized)
tgctaaacttctctataaattgctagaaatatacagagcaatgagatatagaaaacaccttagcttgttggttattaatagagctctaattttaactgtgaaatcatggagtttctttaa

SEQ ID NO: 251712 - DNA, 120 bp, Artificial Sequence
  ENSG00000123575_22 (sequence is synthesized)
atgttttcctagagtgtttgttatcatgaacattagaaatagcattattccttttcttctaccacatgtcttgaacattcacatgggttaaagaagatggaaactgatactactgacaat

SEQ ID NO: 251713 - DNA, 120 bp, Artificial Sequence
  ENSG00000123575_23 (sequence is synthesized)
caagctgctttctgactttcataattttctttatattgtggatagcattttgaaggtgaccgtgattctgtaggaagagctgtaatcaatatttttcaaactctaagagtacagaggtta

SEQ ID NO: 251714 - DNA, 120 bp, Artificial Sequence
  ENSG00000123575_24 (sequence is synthesized)
gtaagatttcttttttttttactttttgttacgtcaagtagcttattaagaaaaagattcatgacttaaattcttaattctcagttgatacaaaggcttataatcatgtgttttaaaatt

SEQ ID NO: 251715 - DNA, 120 bp, Artificial Sequence
  ENSG00000123575_25 (sequence is synthesized)
ttgatttcattttcgttccttgaaggttaaagaatggaaactggggataaaaattaatacactgcagctttgccaaggtctgtgatatggttgtaaccttttaaagactactaaagtcat

SEQ ID NO: 251716 - DNA, 120 bp, Artificial Sequence
  ENSG00000123575_26 (sequence is synthesized)
aatttgaaatttttactaaaataaaacatatgtgtctatggttttcaattggagtagtctttcttactttcccccttcccctctttggttctcctaaccagcttagaggacccaaagaga

SEQ ID NO: 251717 - DNA, 120 bp, Artificial Sequence
  ENSG00000123575_27 (sequence is synthesized)
gcttagggatagacaccagaatactctgtggaggtggaacaacttaacctcactgttttcccttccaagtataggaagagcaaatagagcatagtaactgtatctaaattctctacctgc

SEQ ID NO: 251718 - DNA, 120 bp, Artificial Sequence
  ENSG00000123575_28 (sequence is synthesized)
tcttagcaaaagcaaaatcccacagaatgattgcctgctgtctttacctattcttcaaggaaaacaggccacttttggagaccatagagcaccatttatctgtcaaatacttggaaacta

SEQ ID NO: 251719 - DNA, 120 bp, Artificial Sequence
  ENSG00000123575_29 (sequence is synthesized)
tttacttaacggtcatcagtaaaaaaccctaaacaaggtcatgatataatttaagaccaattcccctactctcccaataatcacatagtcttattactttcaatttaacttgagtcacta

SEQ ID NO: 251720 - DNA, 120 bp, Artificial Sequence
  ENSG00000123575_30 (sequence is synthesized)
ttaagcaagtttaccaaagtgccacaaagttgatttttaacgtttgtaaaggtttgaatgtttatagaagtgcatcatgaaattttgtgtaaatccagatgaactgtcattatagtacta

SEQ ID NO: 251721 - DNA, 120 bp, Artificial Sequence
  ENSG00000123575_31 (sequence is synthesized)
aaaataattaactaacttgggcttgcttgtgattgaagagggagattagatagtcctctgtccccccaaaaaagaaactagcagagaaagacataaaaagctctttggtgtctgttcatg

SEQ ID NO: 251722 - DNA, 120 bp, Artificial Sequence
  ENSG00000123575_32 (sequence is synthesized)
tgctgtacattttttccgttttaatgtcttgtgtagataattcaaagtttgaactatttctttcttggaataagtaataatttattcaatatggtgtatctctgagttcaatttaaaaca

SEQ ID NO: 251723 - DNA, 120 bp, Artificial Sequence
  ENSG00000123575_33 (sequence is synthesized)
atccaactcagtaatatttatttttaaatacaaatcctaactaaccaattaattaataaaaaggcaagacttacttgctgtagtattggttctcatctgtagagaactgacattggagca

SEQ ID NO: 251724 - DNA, 120 bp, Artificial Sequence
  ENSG00000123575_34 (sequence is synthesized)
aattttaagtctcccctttgaaaataagccttgttaactgagggcgtaatacatttcccacagatttatccagaaacattttattagagatcttatagtagtatctcagttcctactaca

SEQ ID NO: 251725 - DNA, 120 bp, Artificial Sequence
  ENSG00000123575_35 (sequence is synthesized)
gctttctaaaggatgagacttgcatttaacaaaatgacatatataatatttttctatagttttgcaactgaattaaaggaaggtgatgtattataatgtgtagtgaggtataaagggcta

SEQ ID NO: 251726 - DNA, 120 bp, Artificial Sequence
  ENSG00000123575_36 (sequence is synthesized)
gttcattctctcccaacaagaacttagaataaaataacacttttttttcatgagacttacctcatttttgttaggctatggcagttttgtccagttcctctgtcccttgagtgaattaga

SEQ ID NO: 251727 - DNA, 120 bp, Artificial Sequence
  ENSG00000123575_37 (sequence is synthesized)
tattggtgaattaatctcagaaactgacctataaaataatgactcattatagattgggtgaacttctcattttatttagcttttaaaagtgctaaatcctctcataaaggaaaaattata

SEQ ID NO: 251728 - DNA, 120 bp, Artificial Sequence
  ENSG00000123575_38 (sequence is synthesized)
ggaaactatagcggtatccagattctgatgagctttaaaaattataaaatatagcaaatgtcttcatattttagccagaaatattagtacacaaccaatatagaagtcttgtttgtttct

SEQ ID NO: 251729 - DNA, 120 bp, Artificial Sequence
  ENSG00000123575_39 (sequence is synthesized)
gggttctccagcagagactttttgtttgtggcttactctgtatagcctcatgtgccttaaaggtggtgaactctagtttttgtcaatatcaggcttttcaaaactcaaaaacaatccaaa

SEQ ID NO: 251730 - DNA, 120 bp, Artificial Sequence
  ENSG00000123575_40 (sequence is synthesized)
tgttgtaatttgttttgcataatgcccatggaattggatatcagtaagcaaagccattaaatcgaaccaatcaatgctaatagagtataaaaacaaaaaccttcaaattttaagtttcat

SEQ ID NO: 251731 - DNA, 120 bp, Artificial Sequence
  ENSG00000123575_41 (sequence is synthesized)
ttgtgtaactttattttcggcctagctagatcattgaagagccttgaaagttatctaaagtatggcttaatgtatttttttccctctgaaaaagatcatatgccaggatacttcttcaaa

SEQ ID NO: 251732 - DNA, 120 bp, Artificial Sequence
  ENSG00000123575_42 (sequence is synthesized)
ccagatcacttttaatatctagaaagataattttcaaggtataggcaaaagcacttcaaggacagagattatgtagcaagttgattctctaggaattctttgaactcatttgtgtaatag

SEQ ID NO: 251733 - DNA, 120 bp, Artificial Sequence
  ENSG00000123575_43 (sequence is synthesized)
ctggaacacactcctcttctttcctttaacaaatgaacttttagcacttctgtcttcaaggaaaaacatttgtttggaattgaagggtactcgcagtccgtttatagtttgggacaatta

SEQ ID NO: 251734 - DNA, 120 bp, Artificial Sequence
  ENSG00000123575_44 (sequence is synthesized)
ataggaaaatccccagttgcattcaaataatagtgttgatgttgagggcactgactcattcagcatgtctgaactagaagtaaatttaattctgaaaggactgttagttaggaaataagt

SEQ ID NO: 251735 - DNA, 120 bp, Artificial Sequence
  ENSG00000123575_45 (sequence is synthesized)
atttgtatacatatgtactgtggtaactttggattcattttaagtctgataaagtaagataaactttgtcttaaaaataaaattatgctaagtgaataaaaactgagatattttaagcta

SEQ ID NO: 251736 - DNA, 120 bp, Artificial Sequence
  ENSG00000123575_46 (sequence is synthesized)
ggcatctttgttagcatagtatccggaacataactacttataatgcttaggtcttatttctttggaaaataagttacttattccagaagccttagaaggaattctgaaaattcttctaac

SEQ ID NO: 251737 - DNA, 120 bp, Artificial Sequence
  ENSG00000123575_47 (sequence is synthesized)
tggccattaagagtaaggaagttgaatggtactgctgaagatctgagttgactcactgaaattttattttcttatttttttaacattaaaattatttctttttggctctccctctagtta

SEQ ID NO: 251738 - DNA, 120 bp, Artificial Sequence
  ENSG00000123575_48 (sequence is synthesized)
ttttttaaattaaggtaattactgttttaacctagagcatataatggcaaattaaattttaatttgacactcataccgaactcagaaaagcttgtttgatcttctctaaattctgtatgt

SEQ ID NO: 251739 - DNA, 120 bp, Artificial Sequence
  ENSG00000123575_49 (sequence is synthesized)
agtactttttttaattgtcacatttctttgttacatctttgtgtccaacaaaacctgtggaaatctgtgttcatttttgtggtgagggatgggggtgaaaaaggggagacttgctctaat

SEQ ID NO: 251740 - DNA, 120 bp, Artificial Sequence
  ENSG00000123575_50 (sequence is synthesized)
tatgcatatacatttgactatgtaaaggtagttgtagactatatgtataaataacaagttaacacttaatattctaaattgttctaaggaacagtggcctgaagccatgactagttttgt

SEQ ID NO: 251741 - DNA, 120 bp, Artificial Sequence
  ENSG00000123575_51 (sequence is synthesized)
ggagctgctggctcttttaacagtagctgacctattggatttaaactgagactgaaattgacatttgtggttaggttatctagctgaggcttttaacaatggagcagataatgtctgttc

SEQ ID NO: 251742 - DNA, 120 bp, Artificial Sequence
  ENSG00000123575_52 (sequence is synthesized)
ctgtagtggatccatttaatttcctatttgagtactctcacttaacaagtattatctattctgaacctttgtgttgggaatttaaggactattgtcaaaggctattaatggtaaacaagt

SEQ ID NO: 251743 - DNA, 120 bp, Artificial Sequence
  ENSG00000123575_53 (sequence is synthesized)
atatgcaaaacaattcacatatgggtaaaaatttcaaattgtgggtttttgtttttgctttttagtttcaaagattagttatgtagcagcaatatcataaccaaagcaagtaggaagttg

SEQ ID NO: 251744 - DNA, 120 bp, Artificial Sequence
  ENSG00000123575_54 (sequence is synthesized)
actggtttggagaatcttcaagtagttttaaatactgtaatgtatcagattgttaaccaggatttttttttcctgtattactgctaaatatattactatattaatgcacttttgtatata

SEQ ID NO: 251745 - DNA, 120 bp, Artificial Sequence
  ENSG00000123575_55 (sequence is synthesized)
taactgtcttctgtacattctgtacttactacagtgtatataaagcctgttttccctgaagctgtgagggaataacaatagttgtatcataagtcgtttctattttgagttccttcttgt

SEQ ID NO: 251746 - DNA, 120 bp, Artificial Sequence
  ENSG00000123575_56 (sequence is synthesized)
acttgaaagtagttcagtagtgaaatctaaatgagtgtgtatggttgtaattaaaactggcaatgtggcagagctgtcttttgaaactgaataccagaatgaaaagtgttgttttggtta

SEQ ID NO: 251747 - DNA, 120 bp, Artificial Sequence
  ENSG00000123575_57 (sequence is synthesized)
agaactcttataatatattatttcttttgatgtaccctgagttgttacacagcccactcactgctgcttactactttatacttctgagtcagctcctttcatgctctatcccagaatatt

SEQ ID NO: 251748 - DNA, 120 bp, Artificial Sequence
  ENSG00000123575_58 (sequence is synthesized)
taccaacagaggagaactgctcccttttctgtttctcacagtttggttatggctttataaacttttatttggtgaaagccccagatacccaaatgtcattggcaaaacttattttttttt

SEQ ID NO: 251749 - DNA, 120 bp, Artificial Sequence
  ENSG00000123575_59 (sequence is synthesized)
ctggacagatcagatttctagagagagcagatttctagagagattagcattcatagtaagtgaaaattgtctaatttttttaatccatgctattactgggcagtaggtctaatttttttt

SEQ ID NO: 251750 - DNA, 120 bp, Artificial Sequence
  ENSG00000123575_60 (sequence is synthesized)
gacaaaaaatagatctattttccttatatattgatttagaatcttaagttagaattttatagaagaaatgtctgagcagttctatgtatggaggagcaattcagcttttcagcagcaact

SEQ ID NO: 251751 - DNA, 120 bp, Artificial Sequence
  ENSG00000123575_61 (sequence is synthesized)
ttatcttttgccactagagggagatctgtggttgctttctcctttggagaatagctgctttgcttttatttttaatttctaaggttggaatagaacttattctcaaaattcctttagtgt

SEQ ID NO: 251752 - DNA, 120 bp, Artificial Sequence
  ENSG00000123575_62 (sequence is synthesized)
tattaaatattttcatttattagtcaaaggtaagttaattaagcttgtttaatgatgccaatcttatgcttttctgtaatcttcaatttttaataaatgtgagttagatactaagtgaaa

SEQ ID NO: 251753 - DNA, 120 bp, Artificial Sequence
  ENSG00000123576_0 (sequence is synthesized)
agagccagttccaaccccgggatcgccgcggaaccacgcacagagtctgcagaagtgcacagctttatcgacagcgcttgaagcatggagtctcttcgcgggtacacccacagtgatatt

SEQ ID NO: 251754 - DNA, 120 bp, Artificial Sequence
  ENSG00000123576_1 (sequence is synthesized)
ggctaccgcagcctggcagtcggcgaggacatcgaggaagtgaatgatgagaaacttaccgtgacctcgctgatggcaaggggaggagaggacgaggagaatacacggtccaaacctgag

SEQ ID NO: 251755 - DNA, 120 bp, Artificial Sequence
  ENSG00000123576_2 (sequence is synthesized)
tacggaacagaagcggaaaacaacgttggcacggaagggtccgtcccctcggacgaccaagaccgtgagggtggcggcggccacgagccggagcaacagcaggaggagccgcccctgacc

SEQ ID NO: 251756 - DNA, 120 bp, Artificial Sequence
  ENSG00000123576_3 (sequence is synthesized)
aagccggagcaacagcaggaggagccgcccctgctcgagctgaagcaagagcaggaggagccgccccagacgaccgtggaggggccacagccggcggaggggccacaaaccgctgaggga

SEQ ID NO: 251757 - DNA, 120 bp, Artificial Sequence
  ENSG00000123576_4 (sequence is synthesized)
ccacagcccccagagaggaaacgccgccgccgcaccgcgttcacgcagtttcagctgcaggagctagagaactttttcgatgaatctcaatatcccgacgttgtggcgcgagagagactt

SEQ ID NO: 251758 - DNA, 120 bp, Artificial Sequence
  ENSG00000123576_5 (sequence is synthesized)
gcagcacgcctgaatttgactgaagacagagtgcaggtttggtttcagaacagaagagccaagtggaaacgaaatcagagggtgctaatgttgagaaacactgctactgctgacctggcc

SEQ ID NO: 251759 - DNA, 120 bp, Artificial Sequence
  ENSG00000123576_6 (sequence is synthesized)
ctgctttgtgtgttcatctggtgccacaactacctagaccacctgtgctgcctgtgccacctatgccacccaggccacccatggtccctatgccacccaggccacccatagcacctatgc

SEQ ID NO: 251760 - DNA, 120 bp, Artificial Sequence
  ENSG00000123576_7 (sequence is synthesized)
acctatgccacccatggcgcctgtgccacccggctcacgcatggcgcctgtgccacccgggccacgcatggcgcctgtgccaccctggccgcccatggcgcctgtgccaccctggccgcc

SEQ ID NO: 251761 - DNA, 80 bp, Artificial Sequence
  ENSG00000123576_8 (sequence is synthesized)
cctgtgccaccctggccgcccatggcgcctgtgccaaccgggccgcccatggcgcctgtgccacccgggccgcccatggc

SEQ ID NO: 251762 - DNA, 120 bp, Artificial Sequence
  ENSG00000123576_9 (sequence is synthesized)
ggccgcccatggcgcctctgccacccgggccgcccatggcgcctctgccacccgggccgcccatggcgcctctgccacccaggtcacatgtgcctcacactggcctggctcctgtacaca

SEQ ID NO: 251763 - DNA, 120 bp, Artificial Sequence
  ENSG00000123576_10 (sequence is synthesized)
tcacatgggcccctgtcatcaacagttattatgcatgtccctttttctaaagtaaggtattcataacagtttttccaaagttctttcctgccagatagaaattgtgcacagcacagcatc

SEQ ID NO: 251764 - DNA, 120 bp, Artificial Sequence
  ENSG00000123576_11 (sequence is synthesized)
aagtaattcgttagatgcttgttaaatgaagtgggtaggtgaacaaagttaacgaatgccctgttatttttgtaggccacataattgtagtattttcaataaagatgtgacttaatagta

SEQ ID NO: 251765 - DNA, 120 bp, Artificial Sequence
  ENSG00000123584_0 (sequence is synthesized)
gtgcgcactgggggtcagagagaagggagaggcctccttctgaggggcggcttgataccggtggaggagctccaggaagcaggcaggccttggtctgagacagtgtcctcaggtcgcaga

SEQ ID NO: 251766 - DNA, 120 bp, Artificial Sequence
  ENSG00000123584_1 (sequence is synthesized)
gcagaggagacccaggcagtgtcagcagtgaaggttctcgggacaggctaaccaggaggacaggagccccaagaggccccagagcagcactgacgaagacctgcctgtgggtctccatcg

SEQ ID NO: 251767 - DNA, 120 bp, Artificial Sequence
  ENSG00000123584_2 (sequence is synthesized)
cccagctcctgcccacgctcctgactgctgccctgaccagagtcatcatgtctctcgagcagaggagtccgcactgcaagcctgatgaagaccttgaagcccaaggagaggacttgggcc

SEQ ID NO: 251768 - DNA, 120 bp, Artificial Sequence
  ENSG00000123584_3 (sequence is synthesized)
tgatgggtgcacaggaacccacaggcgaggaggaggagactacctcctcctctgacagcaaggaggaggaggtgtctgctgctgggtcatcaagtcctccccagagtcctcagggaggcg

SEQ ID NO: 251769 - DNA, 120 bp, Artificial Sequence
  ENSG00000123584_4 (sequence is synthesized)
cttcctcctccatttccgtctactacactttatggagccaattcgatgagggctccagcagtcaagaagaggaagagccaagctcctcggtcgacccagctcagctggagttcatgttcc

SEQ ID NO: 251770 - DNA, 120 bp, Artificial Sequence
  ENSG00000123584_5 (sequence is synthesized)
aagaagcactgaaattgaaggtggctgagttggttcatttcctgctccacaaatatcgagtcaaggagccggtcacaaaggcagaaatgctggagagcgtcatcaaaaattacaagcgct

SEQ ID NO: 251771 - DNA, 120 bp, Artificial Sequence
  ENSG00000123584_6 (sequence is synthesized)
actttcctgtgatcttcggcaaagcctccgagttcatgcaggtgatctttggcactgatgtgaaggaggtggaccccgccggccactcctacatccttgtcactgctcttggcctctcgt

SEQ ID NO: 251772 - DNA, 120 bp, Artificial Sequence
  ENSG00000123584_7 (sequence is synthesized)
ggtgatggtcatagcatgcccaaggccgccctcctgatcattgtcctgggtgtgatcctaaccaaagacaactgcgcccctgaagaggttatctgggaagcgttgagtgtgatgggggtg

SEQ ID NO: 251773 - DNA, 120 bp, Artificial Sequence
  ENSG00000123584_8 (sequence is synthesized)
tatgttgggaaggagcacatgttctacggggagcccaggaagctgctcacccaagattgggtgcaggaaaactacctggagtaccggcaggtgcccggcagtgatcctgcgcactacgag

SEQ ID NO: 251774 - DNA, 120 bp, Artificial Sequence
  ENSG00000123584_9 (sequence is synthesized)
ttcctgtggggttccaaggcccacgctgaaaccagctatgagaaggtcataaattatttggtcatgctcaatgcaagagagcccatctgctacccatccctttatgaagaggttttggga

SEQ ID NO: 251775 - DNA, 120 bp, Artificial Sequence
  ENSG00000123584_10 (sequence is synthesized)
gaggagcaagagggagtctgagcaccagccgcagccggggccaaagtttgtggggtcagggccccatccagcagctgccctgccccatgtgacatgaggcccattcttcgctctgtgttt

SEQ ID NO: 251776 - DNA, 120 bp, Artificial Sequence
  ENSG00000123584_11 (sequence is synthesized)
gaagagagcaatcagtgttctcagtggcagtgggtggaagtgagcacactgtatgtcatctctgggttccttgtctattgggtgatttggagatttatccttgctcccttttggaattgt

SEQ ID NO: 251777 - DNA, 120 bp, Artificial Sequence
  ENSG00000123584_12 (sequence is synthesized)
tcaaatgttcttttaatggtcagtttaatgaacttcaccatcgaagttaatgaatgacagtagtcacacatattgctgtttatgttatttaggagtaagattcttgcttttgagtcacat

SEQ ID NO: 251778 - DNA, 120 bp, Artificial Sequence
  ENSG00000123584_13 (sequence is synthesized)
ggggaaatccctgttattttgtgaattgggacaagataacatagcagaggaattaataatttttttgaaacttgaacttagcagcaaaatagagctcataaagaaatagtgaaatgaaaa

SEQ ID NO: 251779 - DNA, 120 bp, Artificial Sequence
  ENSG00000123584_14 (sequence is synthesized)
tgtagttaattcttgccttatacctctttctctctcctgtaaaattaaaacatatacatgtatacctggatttgcttggcttctttgagcatgtaagagaaataaaaattgaaagaataa

SEQ ID NO: 251780 - DNA, 120 bp, Artificial Sequence
  ENSG00000123594_0 (sequence is synthesized)
aaaatcccatggtgtccattcggttaaagcccatgttatttctctcccagttacctgccaaatcttctgtttagtgctgtggtaaatttcacctttatttacttactaaaaccatgctga

SEQ ID NO: 251781 - DNA, 120 bp, Artificial Sequence
  ENSG00000123594_1 (sequence is synthesized)
caagcataattagagagacattatttttataggacatctgaaattccaacgggcactactatggtgcaagtcaccattatcatctatgggataactccaaaatcccatattcactttagg

SEQ ID NO: 251782 - DNA, 120 bp, Artificial Sequence
  ENSG00000123594_2 (sequence is synthesized)
tttaccatcagcttttgactggatactggcaaaaccaccttggtcacaatagtgctttgtgacataccatctcttacctgaatacctgcaaaaacccatggtcttcataaggtttgaaaa

SEQ ID NO: 251783 - DNA, 120 bp, Artificial Sequence
  ENSG00000123594_3 (sequence is synthesized)
cctaacatctgttacatggctatccacaaactgcccaggtaactgccatagctgggcatacaacatcttccggcatacctacagaaactcacggatacaattaacatggatttcatcttt

SEQ ID NO: 251784 - DNA, 120 bp, Artificial Sequence
  ENSG00000123594_4 (sequence is synthesized)
catgagaaacaggaaggtttcctgtgtgctcagcactgtctgaacaatctattgcaaggagaatattttagccctgtggaattagcctcaattgcacatcagctagatgaagaagagagg

SEQ ID NO: 251785 - DNA, 120 bp, Artificial Sequence
  ENSG00000123594_5 (sequence is synthesized)
atgagaatggcagaaggaggagtcaccagtgaagagtatcttgcatttttacagcagccttcagaaaacatggatgataccggtttcttctccattcaggtaataagcaatgccttgaag

SEQ ID NO: 251786 - DNA, 120 bp, Artificial Sequence
  ENSG00000123594_6 (sequence is synthesized)
ttctggggtttagagatcatccatttcaataatcctgaatatcagaagctcggcattgatcctataaatgaaagatcttttatatgtaattataaacaacactggtttactattagaaaa

SEQ ID NO: 251787 - DNA, 120 bp, Artificial Sequence
  ENSG00000123594_7 (sequence is synthesized)
tttggaaaacactggtttaacttgaattctctcttggcgggtccagaattaatatcagatacatgccttgcaaatttcttggctcgattacaacaacaagcatattctgtatttgttgtc

SEQ ID NO: 251788 - DNA, 120 bp, Artificial Sequence
  ENSG00000123594_8 (sequence is synthesized)
aagggtgatctgccagactgtgaagctgaccaactcctgcagatcatcagtgtcgaagagatggatacaccaaaacttaatggaaaaaaattagtaaaacaaaaagagcatagagtctat

SEQ ID NO: 251789 - DNA, 120 bp, Artificial Sequence
  ENSG00000123594_9 (sequence is synthesized)
cagtccttgaaaaagtatcagaagaaagtgatgagtctggaacatcagaccaagatgaggaggattttcagagggcccttgaactaagccgccaagaaaccaatagagaagatgaacatc

SEQ ID NO: 251790 - DNA, 120 bp, Artificial Sequence
  ENSG00000123594_10 (sequence is synthesized)
tccgcagtactattgagttaagcatgcaaggtagttccggaaacacatcgcaagatcttccaaagacatcatgtgtaactcctgcttcagaacagccgaagaaaataaaagaagactatt

SEQ ID NO: 251791 - DNA, 120 bp, Artificial Sequence
  ENSG00000123594_11 (sequence is synthesized)
ttgaaaagcatcagcaggaacagaagcagcagcaacaacagtcagatctgccgggccacagttcatacctacacgaaaggccaacaacaagttcgagagcaattgagagtgatctcagtg

SEQ ID NO: 251792 - DNA, 120 bp, Artificial Sequence
  ENSG00000123594_12 (sequence is synthesized)
atgacatcagtgaaggcacagtacaggccgctgtcgacaccattttagaaattatgagaaagaatttgaaaatcaaaggggaaaaataatgcctttaaaaataatttagatagtcatact

SEQ ID NO: 251793 - DNA, 120 bp, Artificial Sequence
  ENSG00000123594_13 (sequence is synthesized)
ttccaacattatcctgtgtgattatactgtaggatccattttggtcatctgtcaaagagatgaggaaataaggcttttagacagtttgcaaacaaaatgacgagagagatgtgggactaa

SEQ ID NO: 251794 - DNA, 120 bp, Artificial Sequence
  ENSG00000123594_14 (sequence is synthesized)
ataatgatcgttcaactactagccaaggagacattcagcaattaattaaatttaaattagctttcaaaatgttcctttgatttttgagcctgcaatatctaatgtgtctaaaattgggtc

SEQ ID NO: 251795 - DNA, 120 bp, Artificial Sequence
  ENSG00000123594_15 (sequence is synthesized)
atttttcatggatctttttgtataccaacgaattagctcttgccatagaactttttccatatagtctcttctattgtagataatgtggctcattttggttgcttttatttctcatgaaac

SEQ ID NO: 251796 - DNA, 120 bp, Artificial Sequence
  ENSG00000123594_16 (sequence is synthesized)
aatttaacctttcagggaagtgtctcttgtctgtgttgatcatagtaacggttttagaaggataaacagttctccctccaactatgtactgtgcgcttaagtatattcttatgttatttc

SEQ ID NO: 251797 - DNA, 120 bp, Artificial Sequence
  ENSG00000123594_17 (sequence is synthesized)
ctctgatcacaatttctgctacctggtccttaattattttccacaagtctttcgaaatatggtaatattttctgaggttttgttttttacgccctctgtggtaagatcattatttcatga

SEQ ID NO: 251798 - DNA, 120 bp, Artificial Sequence
  ENSG00000123595_0 (sequence is synthesized)
atgttgttccctccgcgctggacgggagcagctggagcgggagcctggctgcgctaccgcggctgcctcctgctgtgcaggtccccgaccctctctctgtcctcattgcgcccagacggg

SEQ ID NO: 251799 - DNA, 120 bp, Artificial Sequence
  ENSG00000123595_1 (sequence is synthesized)
ccggcccagagctcccgggtcgtctttcgtgtggccgcgagacactcttgcactcctgtaatgagcctggcactgtgatgaaacacttttcccgtgtcgtttgagtgcatcttctcaaca

SEQ ID NO: 251800 - DNA, 120 bp, Artificial Sequence
  ENSG00000123595_2 (sequence is synthesized)
accctaggagggttcttgaagcttttgagattaacaatggcaggaaaatcatcactttttaaagtaattctccttggagatggtggagttgggaagagttcacttatgaacagatatgta

SEQ ID NO: 251801 - DNA, 120 bp, Artificial Sequence
  ENSG00000123595_3 (sequence is synthesized)
actaataagtttgatacccagctcttccatacaataggtgtggaatttttaaataaagatttggaagtggatggacattttgttaccatgcagatttgggacacggcaggtcaggagcga

SEQ ID NO: 251802 - DNA, 120 bp, Artificial Sequence
  ENSG00000123595_4 (sequence is synthesized)
ttccgaagcctgaggacaccattttacagaggttctgactgctgcctgcttacttttagtgtcgatgattcacaaagcttccagaacttaagtaactggaagaaagaattcatatattat

SEQ ID NO: 251803 - DNA, 120 bp, Artificial Sequence
  ENSG00000123595_5 (sequence is synthesized)
gcagatgtgaaagagcctgagagctttccttttgtgattctgggtaacaagattgacataagcgaacggcaggtgtctacagaagaagcccaagcttggtgcagggacaacggcgactat

SEQ ID NO: 251804 - DNA, 120 bp, Artificial Sequence
  ENSG00000123595_6 (sequence is synthesized)
ccttattttgaaacaagtgcaaaagatgccacaaatgtggcagcagcctttgaggaagcggttcgaagagttcttgctaccgaggataggtcagatcatttgattcagacagacacagtc

SEQ ID NO: 251805 - DNA, 120 bp, Artificial Sequence
  ENSG00000123595_7 (sequence is synthesized)
aatcttcaccgaaagcccaagcctagctcatcttgctgttgattgttagattgttgatgcattctaaccaactcacacatatacacaaaatcaacatggggatggagaagagaattagcg

SEQ ID NO: 251806 - DNA, 120 bp, Artificial Sequence
  ENSG00000123595_8 (sequence is synthesized)
cttacatttataaattgtaacagttgtctaataacgtttctttaatttaaatatgtaagttgcagagctaataaatgaaatgaccaagactttaattataataaaaataagaaacttgac

SEQ ID NO: 251807 - DNA, 120 bp, Artificial Sequence
  ENSG00000123595_9 (sequence is synthesized)
tattctagaagttatacttggattttttcctgggaaaatggagaactactttttatatgtgtatgtttttatgcaattagcattgtattcttggttcagggaaatactttcctaaagcaa

SEQ ID NO: 251808 - DNA, 120 bp, Artificial Sequence
  ENSG00000123595_10 (sequence is synthesized)
taatgttagatattaaagattaaaatctaatgtatttgcaatgcattgttaatttacttcttcattctcttcaaaatgatttaaccattcctgttttcattctacatactagaattactc

SEQ ID NO: 251809 - DNA, 120 bp, Artificial Sequence
  ENSG00000123595_11 (sequence is synthesized)
tcactagtaattactcatcatttgtgtgccattcatgcacccccacccccataaatcatgttccacagtctcaggcggagggtgggcccccagtggtacaagagttgcttcatacagtct

SEQ ID NO: 251810 - DNA, 120 bp, Artificial Sequence
  ENSG00000123595_12 (sequence is synthesized)
gtaatacatccagctaaattcaagttgtctatgaatggaaagcctttccatagatagagttcagttttaagaaaaaggctaactactgaacttggagaacagacaaatgtgcatttgata

SEQ ID NO: 251811 - DNA, 120 bp, Artificial Sequence
  ENSG00000123595_13 (sequence is synthesized)
actgatgtaataattacaatgtactgtgtggaagatacaaaattacaattcgattaatggactaaatatttttgttactttcttgacccttggggaaagtttcttaattgaagttaaaac

SEQ ID NO: 251812 - DNA, 120 bp, Artificial Sequence
  ENSG00000123595_14 (sequence is synthesized)
attcctttataacacaagacacaagctgactttatcactctcagaagaaatactaagaaggattgtactttgtgagagggtaaacgaagacatctttattcggcaatgtatttacttagt

SEQ ID NO: 251813 - DNA, 120 bp, Artificial Sequence
  ENSG00000123595_15 (sequence is synthesized)
gtcttctctattactgaacatttagtgatttgctctcaaggagattttttgttagaaaaagacttgttgcagtgatcagacttgataaagcaaattgtggtcttttgtggatgaagttca

SEQ ID NO: 251814 - DNA, 120 bp, Artificial Sequence
  ENSG00000123600_0 (sequence is synthesized)
cgcgttaaaaccgcatccccgcaggaggctcggccgccgcgcgcccgcggccctccgtcccgccccggccggctggcggtcacctggcacaccagcgcccgcaggatgcccaggtactgc

SEQ ID NO: 251815 - DNA, 120 bp, Artificial Sequence
  ENSG00000123600_1 (sequence is synthesized)
gatgcccaggtactgcttaggatgaatatgatttggagaaattccatttcttgtctaaggctaggaaaggtgccacacagataccaaagtggttaccacccagtggcccctctgggatca

SEQ ID NO: 251816 - DNA, 120 bp, Artificial Sequence
  ENSG00000123600_2 (sequence is synthesized)
aggattttaactgacccagccaaagtttttgaacacaacatgtgggatcacatgcagtggtctaaggaagaagaagcagcagccagaaaaaaagtaaaagaaaactcagctgtgcgagtc

SEQ ID NO: 251817 - DNA, 120 bp, Artificial Sequence
  ENSG00000123600_3 (sequence is synthesized)
cttctggaagagcaagttaagtatgagagagaagctagtaaatactgggacacattttacaagattcataagaataagtttttcaaggatcgtaattggctgttgagggaatttcctgaa

SEQ ID NO: 251818 - DNA, 120 bp, Artificial Sequence
  ENSG00000123600_4 (sequence is synthesized)
attcttccagttgatcaaaaacctgaagagaaggcgagagaatcatcatgggatcatgtaaaaactagtgctacaaatcgtttctcaagaatgcactgtcctactgtgcctgatgaaaaa

SEQ ID NO: 251819 - DNA, 120 bp, Artificial Sequence
  ENSG00000123600_5 (sequence is synthesized)
aatcattatgagaaaagttctggttcttcagaaggtcaaagcaaaacagaatctgatttttccaacctagactctgaaaaacacaaaaaaggacctatggagactggattgtttcctggt

SEQ ID NO: 251820 - DNA, 120 bp, Artificial Sequence
  ENSG00000123600_6 (sequence is synthesized)
agcaatgccactttcaggatactagaggttggttgtggagctggaaatagtgtgtttccaattttgaacactttggagaactctccggagtcctttctgtattgttgtgattttgcttct

SEQ ID NO: 251821 - DNA, 120 bp, Artificial Sequence
  ENSG00000123600_7 (sequence is synthesized)
ggagctgtggagctcgtaaagtcacactcgtcctacagagcaacccagtgttttgcctttgttcatgatgtatgtgatgatggcttaccttacccttttccagatgggatcctggatgtc

SEQ ID NO: 251822 - DNA, 120 bp, Artificial Sequence
  ENSG00000123600_8 (sequence is synthesized)
attctccttgtctttgtgctctcttctattcatcctgacaggatgcaaggtgttgtaaaccgactgtccaagttactgaaacctgggggaatgctgttatttcgagactatggaagatat

SEQ ID NO: 251823 - DNA, 120 bp, Artificial Sequence
  ENSG00000123600_9 (sequence is synthesized)
gataagactcagcttcgttttaaaaagggacattgtttatctgaaaatttttatgttcgaggagatggtaccagagcatatttctttacaaaaggggaagtccacagtatgttctgcaaa

SEQ ID NO: 251824 - DNA, 120 bp, Artificial Sequence
  ENSG00000123600_10 (sequence is synthesized)
gccagtttagatgaaaagcaaaatctggttgatcgccgcttacaagttaataggaaaaaacaagtgaaaatgcaccgagtgtggattcaaggcaaattccagaaaccattgcaccagact

SEQ ID NO: 251825 - DNA, 120 bp, Artificial Sequence
  ENSG00000123600_11 (sequence is synthesized)
cagaatagctccaatatggtatctacactcctttcacaagactgaactttgtaacatgttaaggtacaaagccagaggactgtgctattcaaggactactgtaagtctattgtttctcaa

SEQ ID NO: 251826 - DNA, 120 bp, Artificial Sequence
  ENSG00000123600_12 (sequence is synthesized)
aagacaatgagaaaaaaagaagagaatttgtatttcctgccgttttgtcataggtgagctcctttgtgcattttaagcacatgtaagtggttcagcacagtatgcctttttctgtgcttt

SEQ ID NO: 251827 - DNA, 120 bp, Artificial Sequence
  ENSG00000123600_13 (sequence is synthesized)
gaaaacttgatatgctcaagcttgtttgaatttattacatctaaccattttgcttgttccttgatttttataagcattcaattaagttagtattatgtcaagtaattttgagaaaatgta

SEQ ID NO: 251828 - DNA, 120 bp, Artificial Sequence
  ENSG00000123600_14 (sequence is synthesized)
acttgacattttttgcaagtaaaaaaaattgtttatttgtttaggcttagtaaaccagttcccaaacacagtcagactcttcccattgtcatctgattgcagagagaaagcacaccttat

SEQ ID NO: 251829 - DNA, 120 bp, Artificial Sequence
  ENSG00000123600_15 (sequence is synthesized)
ttccagggaaagctacaacaagcccaaggtcaaagtgtattattttttgtcttgttgttgtctattttctcccaatttttttttgaaattcagaggctcatatctgaaatagaattttag

SEQ ID NO: 251830 - DNA, 120 bp, Artificial Sequence
  ENSG00000123600_16 (sequence is synthesized)
ttcctctttcctttcctaaaattggggaagtacagcccatgctgacattattttcaggctattcttagatatacaagttgttaggccaggtgcaatggctcgcacctgtaatcccagcac

SEQ ID NO: 251831 - DNA, 120 bp, Artificial Sequence
  ENSG00000123600_17 (sequence is synthesized)
aaaaaaaaaaaaaaaaaaaaaaggtatgtaagctgacaagctcttgtatcaagggcttttgaaccagagcaacttcatcttgaatagggactgtgtaaaatgaagctgagacctactagg

SEQ ID NO: 251832 - DNA, 120 bp, Artificial Sequence
  ENSG00000123600_18 (sequence is synthesized)
tgaagctgagacctactaggctgcaatcccaggaggttaagacattcttagtcacaggatgagataggaagtcagtacaagatacaggtcatacagaccttgctgataaaacaggttgca

SEQ ID NO: 251833 - DNA, 87 bp, Artificial Sequence
  ENSG00000123600_19 (sequence is synthesized)
tgctgataaaacaggttgcagtgaagaagccggccaaatgccaccaaaaccaagatggcaatgagagtgtcctctggcttagtttac

SEQ ID NO: 251834 - DNA, 120 bp, Artificial Sequence
  ENSG00000123600_20 (sequence is synthesized)
ttacccatatggtctacaaaggggaggcctgaataatccaccccttgtgtagcatataatcaagaaataaccttaaaaatgggcaaccagtagcccttggggctgctctgcctatggagt

SEQ ID NO: 251835 - DNA, 74 bp, Artificial Sequence
  ENSG00000123600_21 (sequence is synthesized)
ctttacttaaacttgttttcactttgctgtatggactcaattctttcttgcacaagatccaagaatcctctctt

SEQ ID NO: 251836 - DNA, 120 bp, Artificial Sequence
  ENSG00000123600_22 (sequence is synthesized)
actcaattctttcttgcacaagatccaagaatcctctcttggcgtctggatccagaccctttctggtatcagtggtaagctctgtttaagacaactgtcatacccaagagaattcttaaa

SEQ ID NO: 251837 - DNA, 120 bp, Artificial Sequence
  ENSG00000123600_23 (sequence is synthesized)
tctgtttaagacaactgtcatacccaagagaattcttaaattgtggcagttaaaaatgtatttatcccctcgagggccgggcgcagtcgctcaagcccgtaatcccagcactttgggagg

SEQ ID NO: 251838 - DNA, 120 bp, Artificial Sequence
  ENSG00000123600_24 (sequence is synthesized)
gttgcagtgagccgagatgacaccactgccctccagcctgggtgacagttgttagactgcgtatcaaaaaaaaaaaaaaaaatttatttactcccttgcttcaaaaaggacataagttgg

SEQ ID NO: 251839 - DNA, 120 bp, Artificial Sequence
  ENSG00000123600_25 (sequence is synthesized)
gacataagttggcttgcaaatcacattttgtagaaatgaagtttttaagattagtctcatactcattacataatatttattgactacttacatattgagtgctaaattcagtggaataat

SEQ ID NO: 251840 - DNA, 120 bp, Artificial Sequence
  ENSG00000123600_26 (sequence is synthesized)
atgaacaataaagacccagccttgtttatgctcttcagggagcataaatagagtacagctggcaaaacaaaatgtgcatatcccaaacctgtaaatcatgatctaagacaatatacaaac

SEQ ID NO: 251841 - DNA, 120 bp, Artificial Sequence
  ENSG00000123600_27 (sequence is synthesized)
actcaaatagggaacttaccagctagcagactttgattatgaaccacagaacctagaataaataaatactctcttgaaagaaccatcattggaataattaagttccaactgttttttctt

SEQ ID NO: 251842 - DNA, 89 bp, Artificial Sequence
  ENSG00000123600_28 (sequence is synthesized)
agtcattggttcatctcttaacaggctggggcagggcagcttaattgatgatgccaccagaatgggcaacatgggaaaaaccctgatgg

SEQ ID NO: 251843 - DNA, 88 bp, Artificial Sequence
  ENSG00000123600_29 (sequence is synthesized)
agtggaaggaaatttcacttcctggaatggaagaaagttcttcaaaggaaaatcaagacactgctgtcaaaaaacaccaggggaggga

SEQ ID NO: 251844 - DNA, 120 bp, Artificial Sequence
  ENSG00000123600_30 (sequence is synthesized)
aaaatcaagacactgctgtcaaaaaacaccaggggagggatgctgtccagtcacagccaacacatcatatagcagtggtagcagtagtaatagtatttccagagagagagagagagatta

SEQ ID NO: 251845 - DNA, 120 bp, Artificial Sequence
  ENSG00000123600_31 (sequence is synthesized)
gctctgaaaaagaatggagaagaatcaggtttcttgggggaggtaggtctcaggctagttcttgaatgtacattctcagcagatggtgagaagacaagtgtggtgtgggacattaatgat

SEQ ID NO: 251846 - DNA, 120 bp, Artificial Sequence
  ENSG00000123600_32 (sequence is synthesized)
gagggataggtagaaaagatgggaagggggtcagcttgtagataacctagactagcaggtgtatgacttctagtctctgaactggagccatctgagatcagtttgagatatggtgtctta

SEQ ID NO: 251847 - DNA, 120 bp, Artificial Sequence
  ENSG00000123600_33 (sequence is synthesized)
taaatgtattgagagaggttgaggagttgtctatagaatggaatggagtgaggtcagagatcagtggcaaggaagaccacataaaggtttttgcacaaacttgccttgatggcaagtcct

SEQ ID NO: 251848 - DNA, 120 bp, Artificial Sequence
  ENSG00000123600_34 (sequence is synthesized)
caaaagtacaattatcaagctttctgtttaaacatgcataagtcagtaaatataaacattaaaatttgcccaagactcttaactcagttgtatttcataattaaagtgtacattaaaaag

SEQ ID NO: 251849 - DNA, 120 bp, Artificial Sequence
  ENSG00000123600_35 (sequence is synthesized)
ccaaactagtcatgaaagtattacatacagcaagggcagtttagataagttaatgttgctatgggaaccccagcagatctccttgtgtctccgtttaaaaatcatggcccaaggtggttt

SEQ ID NO: 251850 - DNA, 120 bp, Artificial Sequence
  ENSG00000123600_36 (sequence is synthesized)
caaaaacaacagaaggtaaaattattctcacattctcacacatgtaaattgtactgtctctctcagttctaaatagcggattcaagccagcctcttgactggcacagtaaaattcggctt

SEQ ID NO: 251851 - DNA, 120 bp, Artificial Sequence
  ENSG00000123600_37 (sequence is synthesized)
cgtgtctttctataatgtattacagcatgtgagttaacctttagaagcttcaaaaatacatcaaccaaatttggactgtgagacacaaactggtctcttttgggctctgtccagcatagc

SEQ ID NO: 251852 - DNA, 120 bp, Artificial Sequence
  ENSG00000123600_38 (sequence is synthesized)
cttcctattccacatggctgcgcagcagggccatttccaccagtgtcttctgcttgcctggtcagtctttctgtctcttaacctacctacaacaacttccttctcggggtttgctgctag

SEQ ID NO: 251853 - DNA, 120 bp, Artificial Sequence
  ENSG00000123600_39 (sequence is synthesized)
atagaaatgtagattttggcacagaaagaaaagggaaagacctatttggaattttgtctatagatgttaagaaatcatgaagcgttgcaaatgtaactgcttgggtattagtttaaaata

SEQ ID NO: 251854 - DNA, 120 bp, Artificial Sequence
  ENSG00000123600_40 (sequence is synthesized)
tttgataactgcatgaaattctaatttacccctcacatccataaagctaggaccagttggttaggcagagtttgatatttaaaaattcatcttctgagagagctgaatttcaaaaggacc

SEQ ID NO: 251855 - DNA, 120 bp, Artificial Sequence
  ENSG00000123600_41 (sequence is synthesized)
attttctttccaggagtaaaaggtatattctttcatcttcttacagtacagaaacaatggaatatattgtttaaatgcacccttcatttttttctccatttctaaaaattcacttttgag

SEQ ID NO: 251856 - DNA, 120 bp, Artificial Sequence
  ENSG00000123600_42 (sequence is synthesized)
catcgtccaaatgtaaaaattctcacacatgaggaactgtttccgaaggttgtgagaaagtcaagataacagtttctattattaaaagttttgcattcggtatgacacatttgcctgtat

SEQ ID NO: 251857 - DNA, 120 bp, Artificial Sequence
  ENSG00000123600_43 (sequence is synthesized)
tgaaacacccatttaacattgacttctgagaacttatttgctttgcctctctcgattccatatgctttgtctacaaattgtgaacacgtcccggtttctacccgtgtgtgattctaagtc

SEQ ID NO: 251858 - DNA, 120 bp, Artificial Sequence
  ENSG00000123600_44 (sequence is synthesized)
gttgctgtactctagcttgtacgtgaaaattcacccatatgcagatagctgccctcttggaggcaaaacttaaagctatcagaaccatctggattgttaaaccccaaaacttccaactca

SEQ ID NO: 251859 - DNA, 120 bp, Artificial Sequence
  ENSG00000123600_45 (sequence is synthesized)
tcaaagtcctgaagcctgaatagatcacacattgttacttctaattggttttgatgtttgttatgctcctcacaagtgcagataacttcacatttgcatcactaatcgacctctttcaaa

SEQ ID NO: 251860 - DNA, 120 bp, Artificial Sequence
  ENSG00000123600_46 (sequence is synthesized)
gcctctgctcctcctgcttcctgcctctgttagtcatcaggagacttagtgttggcgtgggtattttccccgcttgtgaaagtgcattgtcaattctagagcattaaatatatgtgaggt

SEQ ID NO: 251861 - DNA, 120 bp, Artificial Sequence
  ENSG00000123600_47 (sequence is synthesized)
attgttattaatctacaaggcagtacacacagtattccagcaacagtgactttttcaaaggttttatgagacattgtaagaaagacagtatctttccatggaaaaaagtgttgcctcaga

SEQ ID NO: 251862 - DNA, 120 bp, Artificial Sequence
  ENSG00000123600_48 (sequence is synthesized)
gtcaaacaggaagcatgggtcctagttcctattgaactgcttagctactcttaatttagctctgaatgctagattttgtgtatactatacacattatttaatcctcaaactcctaggaat

SEQ ID NO: 251863 - DNA, 120 bp, Artificial Sequence
  ENSG00000123600_49 (sequence is synthesized)
tcattttgatgataaccatttacagaagagatgttgggtaacttgctcaggataccacatctagtaagtagcagagtcacaactcggacccagaactctctgattccaaaacctctactt

SEQ ID NO: 251864 - DNA, 120 bp, Artificial Sequence
  ENSG00000123600_50 (sequence is synthesized)
gctgctcttgtaatggatgggcccaaatgctgctgggaaaggcaccagggaagaaagagctttctgagtcaagcagaaaacgatagcagtggagaggagtttgtttcagacgaccttcaa

SEQ ID NO: 251865 - DNA, 120 bp, Artificial Sequence
  ENSG00000123600_51 (sequence is synthesized)
ggttatggctcattctagatccaatcattctagcaaataagtaggttacacttgtccacaattacaaattggaaaagaagagaaggaaaggaactgagaggaatgacaaagcaaaaagct

SEQ ID NO: 251866 - DNA, 120 bp, Artificial Sequence
  ENSG00000123600_52 (sequence is synthesized)
ttcaatcagttcttttcagcattctgcttctgcctagttctgcactcgccccaccccctcaggcttcagccttccacttggcatccctcctcgcagagcactctcacttgcatactcctc

SEQ ID NO: 251867 - DNA, 120 bp, Artificial Sequence
  ENSG00000123600_53 (sequence is synthesized)
gcttaaagaaaaaaagcattctgtactgcagtggggaaaaaaaacccttaaaatgtcttcaaaaggattcagctctagggtaatgtaaaatatgtgaaatcaggaggtgtccataataaa

SEQ ID NO: 251868 - DNA, 120 bp, Artificial Sequence
  ENSG00000123600_54 (sequence is synthesized)
atatgagtgaaaacatcgttatttaaaacattgtatgtacattaatgccacattaataccaattcaggcatgaaatgttgagcatttcttggaatacggtttcttggaatatggttgggg

SEQ ID NO: 251869 - DNA, 120 bp, Artificial Sequence
  ENSG00000123600_55 (sequence is synthesized)
atttgagaggcgcaaaggtacccgcaagatggctttggtgtagttataaatataaatagaagtaaaataacagttgcatcttcatttataatgaatctatattgtggcctcaaagctaca

SEQ ID NO: 251870 - DNA, 120 bp, Artificial Sequence
  ENSG00000123600_56 (sequence is synthesized)
gagaaaagtggatgccaaaatctgtctttcattaacatatgtcttaaatgacaaggaagaggtgttgaagataaaattactttttcctatgagtatgaatcagcaacatgcagtaacaag

SEQ ID NO: 251871 - DNA, 120 bp, Artificial Sequence
  ENSG00000123600_57 (sequence is synthesized)
caagtaataatagttctgcgtgtgagtgcctacagagggtaagaaaaatagcatcagattgaaaaagcaagtgcacctgcagaagggacccaggaggctgcagagcacagctcccttgag

SEQ ID NO: 251872 - DNA, 120 bp, Artificial Sequence
  ENSG00000123600_58 (sequence is synthesized)
catcatctcaaagtgtctcagagcacagtgaccctaattctggcaagtcaggttggcatgagatggatggagcacactgaaatctccagatggtcagacagcccaccctcagctgcccct

SEQ ID NO: 251873 - DNA, 120 bp, Artificial Sequence
  ENSG00000123600_59 (sequence is synthesized)
ggagctcggcaaaggcaagctacaaggcactgctacttggccaagagtttaaaacaacagcttctgattctacagtgtctgtggtttcacaaccacttaaccttaagtaaggaacagcta

SEQ ID NO: 251874 - DNA, 120 bp, Artificial Sequence
  ENSG00000123600_60 (sequence is synthesized)
gagttagctgaatgaataaatacacgttaacgttacataaagagggaaaaaaagcaatacttgagcacatagacttcaaatagtgtccagctagctgtgtccttggcatcccagtgatct

SEQ ID NO: 251875 - DNA, 120 bp, Artificial Sequence
  ENSG00000123600_61 (sequence is synthesized)
gggtctttatctttgattttctccagcaggtaggcactgagtagatccagggcccagggcgggaaatgcttctgtatcagatgttacctatcaaataaaatgagcctttgattgcctcct

SEQ ID NO: 251876 - DNA, 120 bp, Artificial Sequence
  ENSG00000123600_62 (sequence is synthesized)
actcacaagcttctcggccccgaccttcgccctgggaggttctggccaggtgccgggaggggcgctgtgtcgagggcgatccccccaaagcagcgtcccgtgctaaaggtaccccagggt

SEQ ID NO: 251877 - DNA, 120 bp, Artificial Sequence
  ENSG00000123600_63 (sequence is synthesized)
actgcctcccacatctcagtgcaggctggatgaattggccttgtctgtgtttcctgtctgagtgtgagtgtgagtgctccctgcgatggaatgtcgtcgtgtccaagggttggttcccac

SEQ ID NO: 251878 - DNA, 120 bp, Artificial Sequence
  ENSG00000123600_64 (sequence is synthesized)
ttatacctcagggtgctgaccctcttgacacccctgtagaagttgtataaaaccaattatgtccccaactagactataaaacccatgagagccaggaccatccttactgtttaatgacat

SEQ ID NO: 251879 - DNA, 120 bp, Artificial Sequence
  ENSG00000123600_65 (sequence is synthesized)
gctgacctctttctgtagttcagacatggtactaagcaacatgatgcaaggattatttgataccagcatacacagtataatcaagaggagtattagtctacaaatttcagagtatatggc

SEQ ID NO: 251880 - DNA, 120 bp, Artificial Sequence
  ENSG00000123600_66 (sequence is synthesized)
tgccttaagtaaccatggtccagccatcattactgaatttcagataaaggccaaacagaacatatttaagttaagaagagtccaattaaaaatcataccacctattggccaggcacagtg

SEQ ID NO: 251881 - DNA, 120 bp, Artificial Sequence
  ENSG00000123600_67 (sequence is synthesized)
agtggcatacatctgtatgtagttccagctactcgggagattgaggcgggagaatcacttgagccccagaggtcgaggctgtagtgacccgtgattgtgccactatactccagcctgggt

SEQ ID NO: 251882 - DNA, 120 bp, Artificial Sequence
  ENSG00000123600_68 (sequence is synthesized)
gagcgagaccctgtctcaaaaaaaaagctgaggggcgggggtggaaataacttattaacaagtcagacctacagtttcctttcttctctagtttgagtatttctagactccagatataaa

SEQ ID NO: 251883 - DNA, 120 bp, Artificial Sequence
  ENSG00000123600_69 (sequence is synthesized)
gatataaatatttcttctggccgagcacagtggctcacacctataatcctgacagtttgagaggctgaggcaggaggatcatttgagaacaatagttcaagaccagcctgggcaacatag

SEQ ID NO: 251884 - DNA, 120 bp, Artificial Sequence
  ENSG00000123600_70 (sequence is synthesized)
catctctacaaaaaaatctaaaattagctgggcatggtgaggcacatctgtagtcctagctactcagaaggctgaggaagcaagatcgctagagtccaggagctcaaggttatagtgagc

SEQ ID NO: 251885 - DNA, 120 bp, Artificial Sequence
  ENSG00000123600_71 (sequence is synthesized)
ttagggatccctccctcactgccccggtactcacaagcttctcggccccgaccttcgccctgggaggttctggccaggtgccgggaggggcgctgtgtcgagggcgatccccccaaagca

SEQ ID NO: 251886 - DNA, 120 bp, Artificial Sequence
  ENSG00000123600_72 (sequence is synthesized)
tgcagtggtgcaattatggctcactgcagtttcaacctcccagattccagtcatcctcctgcctcagccacccaagaagctgggaccacagggatcacatgcagtggtctaaggaagaag

SEQ ID NO: 251887 - DNA, 120 bp, Artificial Sequence
  ENSG00000123600_73 (sequence is synthesized)
tcatttgggtgatttcttgatactctaggacttttgaatctagtcatttagcaagttggttttggttttttcttctttacaaaatatttttatttttgttacccttatgtttatggttta

SEQ ID NO: 251888 - DNA, 120 bp, Artificial Sequence
  ENSG00000123600_74 (sequence is synthesized)
gatttctttggccttatcaagcttttcttattttgtcttcaacaaagttaaatccagcatataaaacaagatttctacaaactgggtatctttttaatactttgtttccaaaggatgcaa

SEQ ID NO: 251889 - DNA, 120 bp, Artificial Sequence
  ENSG00000123600_75 (sequence is synthesized)
caaaggatgcaaggtgttgtaaaccgactgtccaagttactgaaacctgggggaatgctgttatttcgagactatggaagatatgataagactcagcttcgttttaaaaagggtaatagt

SEQ ID NO: 251890 - DNA, 120 bp, Artificial Sequence
  ENSG00000123600_76 (sequence is synthesized)
atattcagtttgaggttatttttaaatgttctaaagaatgccttgtttatatttcacatcaaagtatttagttgtttttttttaaaggaatacccttaagagtttctcttttcacaattt

SEQ ID NO: 251891 - DNA, 120 bp, Artificial Sequence
  ENSG00000123600_77 (sequence is synthesized)
aaaaccgcatccccgcaggaggctcggccgccgcgcgcccgcggccctccgtcccgccccggccggctggcggtcacctggcacaccagcgcccgcaggatgcccagaaacagagcctca

SEQ ID NO: 251892 - DNA, 120 bp, Artificial Sequence
  ENSG00000123607_0 (sequence is synthesized)
gaattctgcgtcttcctttaggctgcggcgagacaatccccagagccccgcggcccggcctcggggcagccatggactcgcaggaattgaagactttgattaattactattgtcaagaga

SEQ ID NO: 251893 - DNA, 120 bp, Artificial Sequence
  ENSG00000123607_1 (sequence is synthesized)
gatatttccatcatgtattactggttgccagtgaaggaattaagaggtatggaagtgatccagtcttcaggttttatcatgcctatggcacattaatggaaggtaaaactcaagaagctc

SEQ ID NO: 251894 - DNA, 120 bp, Artificial Sequence
  ENSG00000123607_2 (sequence is synthesized)
ttcgagaatttgaggctattaaaaataaacaagatgtatcactttgttctctacttgcactgatatatgcccataaaatgagtcctaatccagatagagaagctattctggaatcagatg

SEQ ID NO: 251895 - DNA, 120 bp, Artificial Sequence
  ENSG00000123607_3 (sequence is synthesized)
ccagagtgaaggaacaacgtaaaggagctggagagaaagccttataccatgcaggcttatttttatggcacattggtcgccatgataaagcaagggaatatattgacagaatgatcaaaa

SEQ ID NO: 251896 - DNA, 120 bp, Artificial Sequence
  ENSG00000123607_4 (sequence is synthesized)
tatcagatggtagtaaacagggacacgttttgaaagcatggcttgatattacaagaggaaaagagccttacactaaaaaagcactgaagtattttgaagagggactccaagatgggaatg

SEQ ID NO: 251897 - DNA, 120 bp, Artificial Sequence
  ENSG00000123607_5 (sequence is synthesized)
atacttttgctctgctgggtaaggcacaatgccttgagatgcgccagaattattcaggtgccctggagactgtgaaccagataatcgtgaattttccgagcttccttcctgcttttgtta

SEQ ID NO: 251898 - DNA, 120 bp, Artificial Sequence
  ENSG00000123607_6 (sequence is synthesized)
agaaaatgaaattacaactagccttgcaggattgggaccagacagttgagacagcacaaaggttgctgctccaagatagccaaaatgtggaagcactgagaatgcaggcactctactatg

SEQ ID NO: 251899 - DNA, 120 bp, Artificial Sequence
  ENSG00000123607_7 (sequence is synthesized)
tgtgtagagagggggatatagagaaggcttccaccaagctggaaaacttgggaaatacattggatgccatggaaccacagaatgctcaacttttctataacattacactcgccttcagca

SEQ ID NO: 251900 - DNA, 120 bp, Artificial Sequence
  ENSG00000123607_8 (sequence is synthesized)
gaacttgtggacgtagtcaacttattcttcaaaaaattcaaacgttacttgagagagcttttagtttaaaccctcagcaatcagaatttgctacagaacttggataccaaatgattttac

SEQ ID NO: 251901 - DNA, 120 bp, Artificial Sequence
  ENSG00000123607_9 (sequence is synthesized)
aaggaagagttaaagaggcactgaagtggtataagaccgccatgacacttgatgagactagtgtgtctgccctagttggatttatccaatgtcagttgatagaagggcaattacaggatg

SEQ ID NO: 251902 - DNA, 120 bp, Artificial Sequence
  ENSG00000123607_10 (sequence is synthesized)
cagatcagcagctagaatttttaaatgaaatccagcaatccattggaaaatctgcggaattaatctatttacatgcagttcttgccatgaagaaaaataaacgacaagaagaagttatta

SEQ ID NO: 251903 - DNA, 120 bp, Artificial Sequence
  ENSG00000123607_11 (sequence is synthesized)
atttgttaaatgatgtcctggacactcacttttcacaattagaaggtttgcctcttggcatacagtattttgaaaagctaaatcctgatttcttgttagaaattgttatggagtatctga

SEQ ID NO: 251904 - DNA, 120 bp, Artificial Sequence
  ENSG00000123607_12 (sequence is synthesized)
gcttctgtccaatgcagcctgcaagtcctgggcaacctctttgtccacttctcaggcgttgcatctcagtcctggagactgtagtaagaactgttccaggtcttctgcaaacagtcttcc

SEQ ID NO: 251905 - DNA, 120 bp, Artificial Sequence
  ENSG00000123607_13 (sequence is synthesized)
taatagcaaaagtgaaatatttgtcaggtgatattgaagcagctttcaataaccttcagcactgcttagaacacaatccctcttatgctgatgctcatctgctgctagctcaggtttact

SEQ ID NO: 251906 - DNA, 120 bp, Artificial Sequence
  ENSG00000123607_14 (sequence is synthesized)
tgtctcaagaaaaagtcaaattgtgttctcagtctcttgaactttgtctgagctatgattttaaggtgagagactatcctttataccatttgataaaagctcagtcacaaaagaaaatgg

SEQ ID NO: 251907 - DNA, 120 bp, Artificial Sequence
  ENSG00000123607_15 (sequence is synthesized)
gagaaatagcagacgcaattaaaacactgcatatggcaatgagtttaccaggaatgaaaagaattggagcttccacaaaatcaaaagacagaaaaactgaagttgatacaagccatcgtt

SEQ ID NO: 251908 - DNA, 120 bp, Artificial Sequence
  ENSG00000123607_16 (sequence is synthesized)
tatcgatctttcttgaattgatagacgttcaccgcttaaatggagagcagcatgaggcaaccaaagttttacaagatgccatccatgaattttctggaacatctgaagaagtgcgggtta

SEQ ID NO: 251909 - DNA, 120 bp, Artificial Sequence
  ENSG00000123607_17 (sequence is synthesized)
ccattgctaatgcagaccttgctctagcccaaggagatattgaacgggctttaagcatccttcagaatgttacagccgaacagccttattttatagaggccagagaaaaaatggcagata

SEQ ID NO: 251910 - DNA, 120 bp, Artificial Sequence
  ENSG00000123607_18 (sequence is synthesized)
tttatctgaagcacagaaaagataaaatgttatatatcacttgttttagagaaattgctgaaagaatggctaaccctcggtcttttcttctccttggtgatgcatacatgaatattctag

SEQ ID NO: 251911 - DNA, 120 bp, Artificial Sequence
  ENSG00000123607_19 (sequence is synthesized)
agcctgaagaagccatagtagcatatgagcaagcattaaatcagaacccgaaagatggaacattggcaagcaaaatgggcaaagcacttatcaaaactcataactactcaatggcaatca

SEQ ID NO: 251912 - DNA, 120 bp, Artificial Sequence
  ENSG00000123607_20 (sequence is synthesized)
cttactatgaagctgctctgaaaactggacaaaagaattatctttgctatgacctggctgagctcttattaaaattgaaatggtatgacaaagcagaaaaagttcttcagcatgctctgg

SEQ ID NO: 251913 - DNA, 120 bp, Artificial Sequence
  ENSG00000123607_21 (sequence is synthesized)
ctcatgaacctgtaaatgaactgtcagctctcatggaggatggacgttgtcaagttcttctagcaaaagtttatagtaaaatggaaaaacttggtgatgcgatcactgcattacaacagg

SEQ ID NO: 251914 - DNA, 120 bp, Artificial Sequence
  ENSG00000123607_22 (sequence is synthesized)
ctcgggtactaaaacgtgttcagatggaacagccagatgcagttcctgcacagaaacatttagcagctgaaatttgtgcagagattgcaaaacattctgttgctcagcgagactatgaaa

SEQ ID NO: 251915 - DNA, 120 bp, Artificial Sequence
  ENSG00000123607_23 (sequence is synthesized)
aagcaattaagttttatagagaggctctggttcactgcgaaacagataataagattatgttggaactggcacgattatacctggcacaagatgaccctgattcctgcctgcggcagtgtg

SEQ ID NO: 251916 - DNA, 120 bp, Artificial Sequence
  ENSG00000123607_24 (sequence is synthesized)
ctctactgcttcagagtgaccaggataacgaagctgctaccatgatgatggctgatctcatgttcagaaaacaagactatgaacaagcagtgtttcatttacagcagcttttagaacgta

SEQ ID NO: 251917 - DNA, 120 bp, Artificial Sequence
  ENSG00000123607_25 (sequence is synthesized)
agccagataattatatgacattatctcgtttgattgatctcctaagaagatgtggaaaactcgaggatgtcccaagatttttctcaatggctgagaaacgtaactccagagcaaaattgg

SEQ ID NO: 251918 - DNA, 120 bp, Artificial Sequence
  ENSG00000123607_26 (sequence is synthesized)
aaccaggatttcagtattgtaaaggactgtatctttggtacactggagaaccaaatgatgcccttcgacattttaataaagctcggaaagatcgtgactggggccaaaatgccctttata

SEQ ID NO: 251919 - DNA, 120 bp, Artificial Sequence
  ENSG00000123607_27 (sequence is synthesized)
atatgatagagatctgtttgaatccagataatgaaactgttggaggtgaagtatttgaaaacctggatggagacctgggtaattcaactgagaagcaagaatctgtgcaactggcagtaa

SEQ ID NO: 251920 - DNA, 120 bp, Artificial Sequence
  ENSG00000123607_28 (sequence is synthesized)
gaacagcagaaaaacttcttaaggaactaaaacctcagactgttcagggtcacgtacagcttcgcataatggaaaactattgcttaatggctaccaaacagaaatctaatgttgaacaag

SEQ ID NO: 251921 - DNA, 120 bp, Artificial Sequence
  ENSG00000123607_29 (sequence is synthesized)
cattaaataccttcactgaaatagcagcatctgagaaggagcatatcccagcgctcttgggaatggcaacggcttatatgatcttgaaacagactccacgagccagaaaccagctgaagc

SEQ ID NO: 251922 - DNA, 120 bp, Artificial Sequence
  ENSG00000123607_30 (sequence is synthesized)
gtattgcgaaaatgaattggaatgctattgatgctgaagagtttgagaagagttggctgctacttgctgatatttacattcaatcagcaaaatatgacatggcagaagacctgttaaaac

SEQ ID NO: 251923 - DNA, 120 bp, Artificial Sequence
  ENSG00000123607_31 (sequence is synthesized)
ggtgcctgcgtcataatagatcttgctgcaaagcttatgaatatatgggatacattatggaaaaagagcaagcatatacagatgctgccttgaactatgagatggcatggaaatatagca

SEQ ID NO: 251924 - DNA, 120 bp, Artificial Sequence
  ENSG00000123607_32 (sequence is synthesized)
atcggacaaatccggcagtaggatacaaactggcatttaattacttaaaagcaaaaagatatgtggattcaattgacatatgtcaccaggttcttgaagcacatccaacttatccaaaaa

SEQ ID NO: 251925 - DNA, 120 bp, Artificial Sequence
  ENSG00000123607_33 (sequence is synthesized)
tcagaaaggatatacttgataaggcccgtgcgtctttaagaccttgaaaataattttaacttaggtgttggtttaacaggaaatgaaagaaatctaactttcagttcttcctgttcaaaa

SEQ ID NO: 251926 - DNA, 120 bp, Artificial Sequence
  ENSG00000123607_34 (sequence is synthesized)
caggtttgagctcagtgctttgttattagaagtatacccttttttctccagcagaggttgctgctgtacatcaagagaagtactatgtgaaattggtgtttcctaatggagttgaatgag

SEQ ID NO: 251927 - DNA, 120 bp, Artificial Sequence
  ENSG00000123607_35 (sequence is synthesized)
agctggtctatttgactctgttttgattgggtacagatttggtgactctgtggtaaagactataattatttctataaagaatattttgttaaaatctaggtaattaaataccctgtatct

SEQ ID NO: 251928 - DNA, 120 bp, Artificial Sequence
  ENSG00000123607_36 (sequence is synthesized)
tttctaaggaatattatttcaggaaatatatttaaaatgcattgttctcttttaaagtgtttttgttatattcttttatttatttatttatttttaaagacagagccttgatctgccgcc

SEQ ID NO: 251929 - DNA, 120 bp, Artificial Sequence
  ENSG00000123607_37 (sequence is synthesized)
agccaccgcacccagcctgtttttgttgtattctgtgttgtttcaaaaattggaataaatctccctgtaaataactcatgaaaaagacaatatatatattttaaatatatattttaataa

SEQ ID NO: 251930 - DNA, 120 bp, Artificial Sequence
  ENSG00000123607_38 (sequence is synthesized)
aggttttataaatagatgatttatattcctcttggaactcaaaagatgtggtaagttttgcaaatcagggtaagctccccctgcattctgtaatgttaatgggtggtggtatagtacaga

SEQ ID NO: 251931 - DNA, 120 bp, Artificial Sequence
  ENSG00000123607_39 (sequence is synthesized)
aaatgtaactttcattgaaaaatcttttttagaaaagggtagagtgtgtgtttccctttcctttcttgagctcattcttcctgctttcaaggccattgtggtcttaagaaataatcaggt

SEQ ID NO: 251932 - DNA, 120 bp, Artificial Sequence
  ENSG00000123607_40 (sequence is synthesized)
cctgaaacctcaatttaaataggtcccttattagggatatttaaccttagcctagaagacttggtctgcaggtataatttcagacactgtaacatttgatggtaaagggtgaccaaatac

SEQ ID NO: 251933 - DNA, 120 bp, Artificial Sequence
  ENSG00000123607_41 (sequence is synthesized)
ttttggtcagcagggagtcacaaagcacaccatgtgaaggcaacggtttacccagctctgtttaacagcaccctggcatagaagctttcactctcttacactaaatttaacctaatctaa

SEQ ID NO: 251934 - DNA, 120 bp, Artificial Sequence
  ENSG00000123607_42 (sequence is synthesized)
acttaatccttagcattatttttaatttctcatctacatctttttcaattttccttaaaattgtagtaaacacagtcctcaattttatttgcatttacaataaacagtatttataagtca

SEQ ID NO: 251935 - DNA, 120 bp, Artificial Sequence
  ENSG00000123607_43 (sequence is synthesized)
ccagactgctctgaactagtatttgaaggaactaatgaacatgacatgttaaatgaaagtttggggacgtacactcaggatggaagcagggggacacaacagaaatgaaagaattttctg

SEQ ID NO: 251936 - DNA, 120 bp, Artificial Sequence
  ENSG00000123607_44 (sequence is synthesized)
tagatctgggatctggacacctgccccccgtcatggttcctggttgtggttgttggaattctgcctgccagattagaggggagttactgtaacatgataaatcccagttatgatcaaaaa

SEQ ID NO: 251937 - DNA, 120 bp, Artificial Sequence
  ENSG00000123607_45 (sequence is synthesized)
tgtgctaccctccttctaatgctcctcttaagaaccagatgttttctagaaaaacgtttcactctgcaatctgccttaagtgcacatcaatgaatctggcacaatgcccataaaagcaat

SEQ ID NO: 251938 - DNA, 120 bp, Artificial Sequence
  ENSG00000123607_46 (sequence is synthesized)
ctgatcccataaatgagggatgcggagtaatgagcaggttctaaatgtcttacttccgagtggtataacatgagactcgatggcaacccttaaaccaggctgctttcaaatagtatgtat

SEQ ID NO: 251939 - DNA, 120 bp, Artificial Sequence
  ENSG00000123607_47 (sequence is synthesized)
gttacatttatcttccttcaaacaaattcttttggcaatgtaaaagaaatcctgttttttttttaagggggtattttaagaaggtaattactatttccattttcaccaaaagcagcctag

SEQ ID NO: 251940 - DNA, 120 bp, Artificial Sequence
  ENSG00000123607_48 (sequence is synthesized)
ttttatttttaatgggtaaatgatgtaagaaccttaaaaaaccacatgaaacacagaggacaaagctgcaaaatgttcagtagtatcctcacttatttcgggtcagggcaataggtcctt

SEQ ID NO: 251941 - DNA, 120 bp, Artificial Sequence
  ENSG00000123607_49 (sequence is synthesized)
tttcacagttacagattaaactttctttgaaaaacacagtaagcttaagaactttgaggaaaaagaatgcactaaaacgctaagcagttacaaaaatgctcttttcatacagtttaagtt

SEQ ID NO: 251942 - DNA, 120 bp, Artificial Sequence
  ENSG00000123607_50 (sequence is synthesized)
taatatgtgaagttgctctagtaaatacataaaaactcctcccttacatagtttcctgaagaatttttttgtccaatttttcacattgacttaagttacaaattgcagaggatagattga

SEQ ID NO: 251943 - DNA, 120 bp, Artificial Sequence
  ENSG00000123607_51 (sequence is synthesized)
gggggactctgggtgggtgcaagtgcaggatattgagaaatcgcaagggcaaagttaaaatgattgaatacgtaccatgtgaagagtcaaggtgaggaaacgggacaaacgacatgtcta

SEQ ID NO: 251944 - DNA, 120 bp, Artificial Sequence
  ENSG00000123607_52 (sequence is synthesized)
gatcctgatgtcacttacttgtgttaaacacatgaatctactgccttttataaaatgtatgtgctgggtggttgtttttgtagattttttaaaatgcccaatattcattattcaagtttc

SEQ ID NO: 251945 - DNA, 120 bp, Artificial Sequence
  ENSG00000123607_53 (sequence is synthesized)
caagtttcaataagaatgattttgtttctacaaaaaggaaacaactttttaattttttatttggaaaaaaattaaatgtacagaaagttgcataaataatattgcaaataccatatatat

SEQ ID NO: 251946 - DNA, 120 bp, Artificial Sequence
  ENSG00000123607_54 (sequence is synthesized)
tcctgtctctgagcttccttctccaggtttgctcctttccatcaggtatcactttatcaccacctcctcaaagaggccgtgttcatgtccaggcccacaatctcaagtagccatcctgtg

SEQ ID NO: 251947 - DNA, 120 bp, Artificial Sequence
  ENSG00000123607_55 (sequence is synthesized)
attctgtatcatattatcctttttaaactctatgcagcatttactacctctgatgttttttcttctttaaggatttgattgccttatgtgacaagcccaagatctgtgacagttggagct

SEQ ID NO: 251948 - DNA, 120 bp, Artificial Sequence
  ENSG00000123607_56 (sequence is synthesized)
ctgggatctggacacctgccccccgtcatgggaaggcagtaaacaagatgctaactgatggagtgaaatccccaggagatgcagaaggcaagtgcagctaactgaggcctcaggggcagg

SEQ ID NO: 251949 - DNA, 120 bp, Artificial Sequence
  ENSG00000123607_57 (sequence is synthesized)
agatgcccatcaggatgagagctatgtctttctccagtgatgactctgcttctatgaggtcaccagcagtagaaccatatcttgctggcatacacttgggatggccccgcctcctggact

SEQ ID NO: 251950 - DNA, 120 bp, Artificial Sequence
  ENSG00000123607_58 (sequence is synthesized)
tccatctgtcatcaggagaacataaccatctggagtcagtacagatcatcaatccttccacatatacaagttcattttaaatttttaaaaatataatacaactgagaagtcttcattaaa

SEQ ID NO: 251951 - DNA, 120 bp, Artificial Sequence
  ENSG00000123607_59 (sequence is synthesized)
agtttatttttatttttctcagttaccaagtcattcagtctgatcacactatattatgtattttctgtaggtacaatttatacatatgtttatcttcctgacaagggtgtaaattcatca

SEQ ID NO: 251952 - DNA, 120 bp, Artificial Sequence
  ENSG00000123607_60 (sequence is synthesized)
ggcacaagaaatgtgtcttatactattttcgtgttccttatatcctctggcagaggtttcattagtacatagggatttttttagataaaagggaatgtatattagtaattgttacacaaa

SEQ ID NO: 251953 - DNA, 120 bp, Artificial Sequence
  ENSG00000123607_61 (sequence is synthesized)
ttccgagtctctcatcttccttgttgctgtctcctggaagctctaaaatagtgtttcccaaactgtgctttggaacagttggggagattttaataattattttttttttaattaaaaaga

SEQ ID NO: 251954 - DNA, 120 bp, Artificial Sequence
  ENSG00000123607_62 (sequence is synthesized)
atgaagtgtgaaggtggtagatgccatggccatgtaagtttggaaagtgctgttttatttttccatgcccctctgacctgttgtaccataaatgaacaacctctcaaatatgatttggct

SEQ ID NO: 251955 - DNA, 120 bp, Artificial Sequence
  ENSG00000123607_63 (sequence is synthesized)
cttaaaagttttctttgatgcattagactatatcggcatcttaaaatggtagtatttgtacctatgttagttgaaatcgcttttaatcagactgtttttagtaatgactgctgtcaacta

SEQ ID NO: 251956 - DNA, 120 bp, Artificial Sequence
  ENSG00000123607_64 (sequence is synthesized)
ctgaaagtattggtttgcaaatattcatttgtatttcataaaatcttaaaatcttcagtttaaagaaatattaaaaggcatctaattcagacacctaccttatatttgctaccagtctgt

SEQ ID NO: 251957 - DNA, 120 bp, Artificial Sequence
  ENSG00000123607_65 (sequence is synthesized)
aacatcactgtcaatgtctatcccatgtctggacacactaaaatgaagttcttgtcatataactatgattgttagcctgtgtttcctgtgttaagtcaaactctgcttttggttaaaaaa

SEQ ID NO: 251958 - DNA, 120 bp, Artificial Sequence
  ENSG00000123609_0 (sequence is synthesized)
gtttcaggcgctgctgttttccgggaagggcaggcgcgctgggccttggggagctgcgctcggcgggcggacgcgggggatcatggaagctgataaagatgacacacaacaaattcttaa

SEQ ID NO: 251959 - DNA, 120 bp, Artificial Sequence
  ENSG00000123609_1 (sequence is synthesized)
ggagcattcgccagatgaatttataaaagatgaacaaaataagggactaattgatgaaattacaaagaaaaatattcaactaaagaaggagatccaaaagcttgaaacggagttacaaga

SEQ ID NO: 251960 - DNA, 120 bp, Artificial Sequence
  ENSG00000123609_2 (sequence is synthesized)
ggctaccaaagaattccagattaaagaggatattcctgaaacaaagatgaaattcttatcagttgaaactcctgagaatgacagccagttgtcaaatatctcctgttcgtttcaagtgag

SEQ ID NO: 251961 - DNA, 120 bp, Artificial Sequence
  ENSG00000123609_3 (sequence is synthesized)
ctcgaaagttccttatgagatacaaaaaggacaagcacttatcacctttgaaaaagaagaagttgctcaaaatgtggtaagcatgagtaaacatcatgtacagataaaagatgtaaatct

SEQ ID NO: 251962 - DNA, 120 bp, Artificial Sequence
  ENSG00000123609_4 (sequence is synthesized)
ggaggttacggccaagccagttccattaaattcaggagtcagattccaggtttatgtagaagtttctaaaatgaaaatcaatgttactgaaattcctgacacattgcgtgaagatcaaat

SEQ ID NO: 251963 - DNA, 120 bp, Artificial Sequence
  ENSG00000123609_5 (sequence is synthesized)
agtcccgaaatggaggcggagaggtggaccgcgtggactatgacagacagtccgggagtgcagtcatcacgtttgtggagattggagtggctgacaagattttgaaaaagaaagaatacc

SEQ ID NO: 251964 - DNA, 120 bp, Artificial Sequence
  ENSG00000123609_6 (sequence is synthesized)
ctctttatataaatcaaacctgccatagagttactgtttctccatacacagaaatacacttgaaaaagtatcagatattttcaggaacatctaagaggacagtgcttctgacaggaatgg

SEQ ID NO: 251965 - DNA, 120 bp, Artificial Sequence
  ENSG00000123609_7 (sequence is synthesized)
aaggcattcaaatggatgaagaaattgtggaggatttaattaacattcactttcaacgggcaaagaatggaggtggagaagtagatgtggtcaagtgttctctaggtcaacctcacatag

SEQ ID NO: 251966 - DNA, 120 bp, Artificial Sequence
  ENSG00000123609_8 (sequence is synthesized)
catactttgaagaatagacttaacagaatcatgaaaactatagctttttaacccggattactgtaaatgtttgacaaaaatgaatatgcttttccttaaaaaatgaaaactttaattttt

SEQ ID NO: 251967 - DNA, 120 bp, Artificial Sequence
  ENSG00000123609_9 (sequence is synthesized)
accatccatttatgtttagatacaaaacttatttccatgtttctgaatcttctttgtttcaaatggtgctgcatgttttcaactacaataagtgcactgtaataaaaagttttgtttata

SEQ ID NO: 251968 - DNA, 120 bp, Artificial Sequence
  ENSG00000123609_10 (sequence is synthesized)
gacaaccatgtttagtatttgagcattggttaaatgctaaagaaaaatcgccgttaaagcagttttctttttcactgtctttttcttttcgcggggaacccagctgttcctgcgagggcc

SEQ ID NO: 251969 - DNA, 80 bp, Artificial Sequence
  ENSG00000123609_11 (sequence is synthesized)
gctgttttctccgagtgtctctggagatagtccttaggaaaacggatttcttaagaaaacgattcttggggatcatggaa

SEQ ID NO: 251970 - DNA, 120 bp, Artificial Sequence
  ENSG00000123609_12 (sequence is synthesized)
aacggatttcttaagaaaacgattcttggggatcatggaagctgataaagatgacacacaacaaattcttaaggagcattcgccagatgaatttataaaagatgaacaaaataagggact

SEQ ID NO: 251971 - DNA, 120 bp, Artificial Sequence
  ENSG00000123609_13 (sequence is synthesized)
acaaaaaggacaagcacttatcacctttgaaaaagaagaaggtatgactaatgttaaaaaatatgaccatgttatttggaaagcactttcatagacatttagctattacttcgctaatat

SEQ ID NO: 251972 - DNA, 120 bp, Artificial Sequence
  ENSG00000123609_14 (sequence is synthesized)
tacttcacttatattatttcttatcctcatagtgacgttctgaggcaggtatgattattcccattttacagatgagaaaactgactctgagacaagtgccttgaatatgatcttgtattc

SEQ ID NO: 251973 - DNA, 120 bp, Artificial Sequence
  ENSG00000123609_15 (sequence is synthesized)
agaaagccatgactgtgggacttaatccaggtgctatgatgatgtccaataccagcctctttctactccacatgctacctccaaataatgatagtaatatttcaaggtagtagagctgta

SEQ ID NO: 251974 - DNA, 120 bp, Artificial Sequence
  ENSG00000123609_16 (sequence is synthesized)
cagttctcagagacattatcacattttatactcacacaattccataaatataggaggataggatagttattattgtgtactttaaatatagacatgccagagccaagaaaacagattctg

SEQ ID NO: 251975 - DNA, 120 bp, Artificial Sequence
  ENSG00000123609_17 (sequence is synthesized)
gggagctagagatttggaatgaaacctaatgtttgctaagtctgccatggtgagggcccctgttcagagctgggggttcctgagtggggaggatctggctttgagtgccagccttgtccc

SEQ ID NO: 251976 - DNA, 120 bp, Artificial Sequence
  ENSG00000123609_18 (sequence is synthesized)
ttcctagaagcatgatttgggataggttctttataaacctcagggttttatacaggtgcttcatggtagtacctacttcatgaggctgctttgagtattaaatgagaaatgttgataaaa

SEQ ID NO: 251977 - DNA, 120 bp, Artificial Sequence
  ENSG00000123609_19 (sequence is synthesized)
tacttagcacaatgttggacacttaatacaaacttaatggatgttagtttttgctacatgttagaaatttttcagataaggatacagaagcttaaagaagataattaacttgcttaaagt

SEQ ID NO: 251978 - DNA, 120 bp, Artificial Sequence
  ENSG00000123609_20 (sequence is synthesized)
ctatacggttagttgcagagcttagagccaaaccctgagagtccatgtacttccactgggccaatatttctctcggtaggccaccagcccaggcctttgttcttttatttaagttatgtg

SEQ ID NO: 251979 - DNA, 120 bp, Artificial Sequence
  ENSG00000123609_21 (sequence is synthesized)
gtgagggaccagatggtgttcccagcccttccagtgctcatattctgacagtctataacccatgtttcctcaaaactggtgcaccactgtagcctgaaaataaatgttgaaaggcattcc

SEQ ID NO: 251980 - DNA, 120 bp, Artificial Sequence
  ENSG00000123609_22 (sequence is synthesized)
agcaggacagtatctgtgcgtagaagacatgcatcgccagtgtgttttccttcaccctggagctactgctacaggtagaagaggagtccaggactcatactggcgactggtaatcgggat

SEQ ID NO: 251981 - DNA, 120 bp, Artificial Sequence
  ENSG00000123609_23 (sequence is synthesized)
ataactaaaagatagatataaatgaggatttgggaggcaggatttctgcacagcaatttcctgggaatgttggaaatggaattctctaaaagcacctacatcattgcttctacgcttgac

SEQ ID NO: 251982 - DNA, 120 bp, Artificial Sequence
  ENSG00000123609_24 (sequence is synthesized)
gtggctctgagctcccaatctcctgggacagcagtaggtttgaaacacaattaagtaggagttggctcttgattgtcagagtcacaacaattgagacacaagcggtccctctcagctgta

SEQ ID NO: 251983 - DNA, 120 bp, Artificial Sequence
  ENSG00000123609_25 (sequence is synthesized)
tcagatcaccagatgttgggggtttgtggaagagtgggagggaaagaggatcatctgagtattactcattgatattttctgttattgtctgttgtcattagcaaaaaaacacaaaaacac

SEQ ID NO: 251984 - DNA, 120 bp, Artificial Sequence
  ENSG00000123609_26 (sequence is synthesized)
ttataaaagatgaacaaaataaggtaaaaaggaaattactgggtattattaaaaattattttatatctattagttttgcagtaaggcatgttttgtatgtctttgtccaacattaccttg

SEQ ID NO: 251985 - DNA, 120 bp, Artificial Sequence
  ENSG00000123610_0 (sequence is synthesized)
agtcacatttcagccactgctctgagaatttgtgagcagcccctaacaggctgttacttcactacaactgacgatatgatcatcttaatttacttatttctcttgctatgggaagacact

SEQ ID NO: 251986 - DNA, 120 bp, Artificial Sequence
  ENSG00000123610_1 (sequence is synthesized)
caaggatggggattcaaggatggaatttttcataactccatatggcttgaacgagcagccggtgtgtaccacagagaagcacggtctggcaaatacaagctcacctacgcagaagctaag

SEQ ID NO: 251987 - DNA, 120 bp, Artificial Sequence
  ENSG00000123610_2 (sequence is synthesized)
gcggtgtgtgaatttgaaggcggccatctcgcaacttacaagcagctagaggcagccagaaaaattggatttcatgtctgtgctgctggatggatggctaagggcagagttggatacccc

SEQ ID NO: 251988 - DNA, 120 bp, Artificial Sequence
  ENSG00000123610_3 (sequence is synthesized)
attgtgaagccagggcccaactgtggatttggaaaaactggcattattgattatggaatccgtctcaataggagtgaaagatgggatgcctattgctacaacccacacgcaaaggagtgt

SEQ ID NO: 251989 - DNA, 120 bp, Artificial Sequence
  ENSG00000123610_4 (sequence is synthesized)
ggtggcgtctttacagatccaaagcaaatttttaaatctccaggcttcccaaatgagtacgaagataaccaaatctgctactggcacattagactcaagtatggtcagcgtattcacctg

SEQ ID NO: 251990 - DNA, 120 bp, Artificial Sequence
  ENSG00000123610_5 (sequence is synthesized)
tgtggagatgagcttccagatgacatcatcagtacaggaaatgtcatgaccttgaagtttctaagtgatgcttcagtgacagctggaggtttccaaatcaaatatgttgcaatggatcct

SEQ ID NO: 251991 - DNA, 120 bp, Artificial Sequence
  ENSG00000123610_6 (sequence is synthesized)
gtatccaaatccagtcaaggaaaaaatacaagtactacttctactggaaataaaaactttttagctggaagatttagccacttataaaaaaaaaaaaaaggatgatcaaaacacacagtg

SEQ ID NO: 251992 - DNA, 120 bp, Artificial Sequence
  ENSG00000123610_7 (sequence is synthesized)
tttatgttggaatcttttggaactcctttgatctcactgttattattaacatttatttattatttttctaaatgtgaaagcaatacataatttagggaaaattggaaaatataggaaact

SEQ ID NO: 251993 - DNA, 120 bp, Artificial Sequence
  ENSG00000123610_8 (sequence is synthesized)
ttaaacgagaaaatgaaacctctcataatcccactgcatagaaataacaagcgttaacattttcatatttttttctttcagtcatttttctatttgtggtatatgtatatatgtacctat

SEQ ID NO: 251994 - DNA, 120 bp, Artificial Sequence
  ENSG00000123610_9 (sequence is synthesized)
atgtatttgcatttgaaattttggaatcctgctctatgtacagttttgtattatactttttaaatcttgaactttataaacattttctgaaatcattgattattctacaaaaacatgatt

SEQ ID NO: 251995 - DNA, 120 bp, Artificial Sequence
  ENSG00000123610_10 (sequence is synthesized)
ttaaacagctgtaaaatattctatgatatgaatgttttatgcattatttaagcctgtctctattgttggaatttcaggtcattttcataaatattgttgcaataaatatccttgaacaca

SEQ ID NO: 251996 - DNA, 120 bp, Artificial Sequence
  ENSG00000123610_11 (sequence is synthesized)
gtttctttacagtgtccctgaaagtaaagggacactgttaaatagtaaatagtagttattattcactttttaaagttgaaagaaccaacaccagatgcagcttgctaggttgtaaaatgc

SEQ ID NO: 251997 - DNA, 120 bp, Artificial Sequence
  ENSG00000123612_0 (sequence is synthesized)
agtggcaggagcgccgcgcaccgccagccgcagggggcgtgggatgggggcggccggggaggggggcgcccacactgactagagccaaccgcgcacttcaaaagggtgtcggtgccgcgc

SEQ ID NO: 251998 - DNA, 120 bp, Artificial Sequence
  ENSG00000123612_1 (sequence is synthesized)
ctcccgcggcccgggaacttcaaagcgggccgtgctgccccggctgcctcgctctgctctggggcctcgcagccccggcgcggccgcctggtggcgatgacccgggcgctctgctcagcg

SEQ ID NO: 251999 - DNA, 120 bp, Artificial Sequence
  ENSG00000123612_2 (sequence is synthesized)
agcgctccgccaggctctcctgctgctcgcagcggccgccgagctctcgccaggactgaagtgtgtatgtcttttgtgtgattcttcaaacttcacctgccaaacagaaggagcatgttg

SEQ ID NO: 252000 - DNA, 120 bp, Artificial Sequence
  ENSG00000123612_3 (sequence is synthesized)
ggcatcagtcatgctaaccaatggaaaagagcaggtgatcaaatcctgtgtctcccttccagaactgaatgctcaagtcttctgtcatagttccaacaatgttaccaaaaccgaatgctg

SEQ ID NO: 252001 - DNA, 120 bp, Artificial Sequence
  ENSG00000123612_4 (sequence is synthesized)
cttcacagatttttgcaacaacataacactgcaccttccaacagcatcaccaaatgccccaaaacttggacccatggagctggccatcattattactgtgcctgtttgcctcctgtccat

SEQ ID NO: 252002 - DNA, 120 bp, Artificial Sequence
  ENSG00000123612_5 (sequence is synthesized)
agctgcgatgctgacagtatgggcatgccagggtcgacagtgctcctacaggaagaaaaagagaccaaatgtggaggaaccactctctgagtgcaatctggtaaatgctggaaaaactct

SEQ ID NO: 252003 - DNA, 120 bp, Artificial Sequence
  ENSG00000123612_6 (sequence is synthesized)
gaaagatctgatttatgatgtgaccgcctctggatctggctctggtctacctctgttggttcaaaggacaattgcaaggacgattgtgcttcaggaaatagtaggaaaaggtagatttgg

SEQ ID NO: 252004 - DNA, 120 bp, Artificial Sequence
  ENSG00000123612_7 (sequence is synthesized)
tgaggtgtggcatggaagatggtgtggggaagatgtggctgtgaaaatattctcctccagagatgaaagatcttggtttcgtgaggcagaaatttaccagacggtcatgctgcgacatga

SEQ ID NO: 252005 - DNA, 120 bp, Artificial Sequence
  ENSG00000123612_8 (sequence is synthesized)
aaacatccttggtttcattgctgctgacaacaaagataatggaacttggactcaactttggctggtatctgaatatcatgaacagggctccttatatgactatttgaatagaaatatagt

SEQ ID NO: 252006 - DNA, 120 bp, Artificial Sequence
  ENSG00000123612_9 (sequence is synthesized)
gaccgtggctggaatgatcaagctggcgctctcaattgctagtggtctggcacaccttcatatggagattgttggtacacaaggtaaacctgctattgctcatcgagacataaaatcaaa

SEQ ID NO: 252007 - DNA, 120 bp, Artificial Sequence
  ENSG00000123612_10 (sequence is synthesized)
gaatatcttagtgaaaaagtgtgaaacttgtgccatagcggacttagggttggctgtgaagcatgattcaatactgaacactatcgacatacctcagaatcctaaagtgggaaccaagag

SEQ ID NO: 252008 - DNA, 120 bp, Artificial Sequence
  ENSG00000123612_11 (sequence is synthesized)
gtatatggctcctgaaatgcttgatgatacaatgaatgtgaatatctttgagtccttcaaacgagctgacatctattctgttggtctggtttactgggaaatagcccggaggtgttcagt

SEQ ID NO: 252009 - DNA, 120 bp, Artificial Sequence
  ENSG00000123612_12 (sequence is synthesized)
cggaggaattgttgaggagtaccaattgccttattatgacatggtgccttcagatccctcgatagaggaaatgagaaaggttgtttgtgaccagaagtttcgaccaagtatcccaaacca

SEQ ID NO: 252010 - DNA, 120 bp, Artificial Sequence
  ENSG00000123612_13 (sequence is synthesized)
gtggcaaagttgtgaagcactccgagtcatggggagaataatgcgtgagtgttggtatgccaacggagcggcccgcctaactgctcttcgtattaagaagactatatctcaactttgtgt

SEQ ID NO: 252011 - DNA, 120 bp, Artificial Sequence
  ENSG00000123612_14 (sequence is synthesized)
caaagaagactgcaaagcctaatgatgataattatgttaaaaagaaatctctcatagctttcttttccattttcccctttatgtgaatgtttttgccattttttttttgttctacctcaa

SEQ ID NO: 252012 - DNA, 120 bp, Artificial Sequence
  ENSG00000123612_15 (sequence is synthesized)
agataagacagtacagtatttaagtgcccataaggcagcatgaaaagataactctaaagttaagcatgggcaggagttgacttcatccaatctctatgttatgtttaattttattttgaa

SEQ ID NO: 252013 - DNA, 120 bp, Artificial Sequence
  ENSG00000123612_16 (sequence is synthesized)
agcaacacctcaactcatctttttatttaataaggaagaaatatattacaaaagtataaaataagctctataaaaatgttatagtcattaagtttttattttacttgaaccaagagcaca

SEQ ID NO: 252014 - DNA, 120 bp, Artificial Sequence
  ENSG00000123612_17 (sequence is synthesized)
tgaatgaacaggaaaagatgtaaaaacatttttttctgagatgaaaacatattaattaaacatgcaaattagagcatgctatctttaggtgatgcaatctatgtttccccctttttaagt

SEQ ID NO: 252015 - DNA, 120 bp, Artificial Sequence
  ENSG00000123612_18 (sequence is synthesized)
tagcaggactttttaaaaataaatattgctctaaactttaatatatcgaacgtgagagtggagctgcttagtggaagatgtaagtgaggtgggtgtcccatgtgcttggtctccccttct

SEQ ID NO: 252016 - DNA, 120 bp, Artificial Sequence
  ENSG00000123612_19 (sequence is synthesized)
gctgttctcctgttcttcataatccactactgcagcagtccctgaaccactaaacttgttcctttcatttacaaaagagatacctgacatcctgagacactgagaaatgtcctgaagtca

SEQ ID NO: 252017 - DNA, 120 bp, Artificial Sequence
  ENSG00000123612_20 (sequence is synthesized)
cacagctaatggcagaactggcactaggtccaaatcttgtgataatgaacaccgtaaggttagctagcttcctactttcccttgaatagtgcttttctccctatgtaatatcttttatta

SEQ ID NO: 252018 - DNA, 120 bp, Artificial Sequence
  ENSG00000123612_21 (sequence is synthesized)
tgatatttgtggtttagaaggcatattgagttattttgcagaatcataatggacccgcacaaaatctcagaaccatatctgttgacattttttctcatagaaatatcatggttaccccat

SEQ ID NO: 252019 - DNA, 120 bp, Artificial Sequence
  ENSG00000123612_22 (sequence is synthesized)
ttgttaatgagcattaatgttttctgaacacttccaaagattaatcaaacataaatattcattgtctgaaaatgtctttaagatacaattcagaggtccctatttcctttgtacatacac

SEQ ID NO: 252020 - DNA, 120 bp, Artificial Sequence
  ENSG00000123612_23 (sequence is synthesized)
acttagaaagaaaagacagaaaaggaagaggaaggaaggaaatattttgagaatatattgagaagaattaagaaaactcttcaatgaagtgttaacaaccaaaccctacagacggtatca

SEQ ID NO: 252021 - DNA, 120 bp, Artificial Sequence
  ENSG00000123612_24 (sequence is synthesized)
gaaacagcaaatagatattcctctaccctttcacagtgagtgagtgagtacagaagaatgctcatgatagttttgccttcattctactttctgtggacacagagtaatgaatatttaatg

SEQ ID NO: 252022 - DNA, 120 bp, Artificial Sequence
  ENSG00000123612_25 (sequence is synthesized)
ggacattaaatatgcccttcaaatctataattttactttggtaaacgagatttaacatgatgtcttttatgctcctaaaacatcttttttcaaactccattccttagaacattcttctac

SEQ ID NO: 252023 - DNA, 120 bp, Artificial Sequence
  ENSG00000123612_26 (sequence is synthesized)
tgagatgatccaagaccaaaagtgttctttggtacttgcttataaagtgatagtacatgttagcatataatgtattttgaagagtgaagtaaatgctattgataacagtaaaaaaaaaaa

SEQ ID NO: 252024 - DNA, 120 bp, Artificial Sequence
  ENSG00000123612_27 (sequence is synthesized)
aaaaaactaataacagtaaagaaatgctacttgatttttttttaaactggattgctcagattacctgatcgtggtggaacccttttattaagaggaggggaaactttttactatcccata

SEQ ID NO: 252025 - DNA, 120 bp, Artificial Sequence
  ENSG00000123612_28 (sequence is synthesized)
tttaactgttctataaagcaaagcacagcttgggtaatagcgttctgaaggatatacttctgtattttctcatagagtacaatttagtgattatgcttcatttcactatggaaatatgtt

SEQ ID NO: 252026 - DNA, 120 bp, Artificial Sequence
  ENSG00000123612_29 (sequence is synthesized)
actgaatctatcttcattttactgagttgaaataaggaaggcaaaaaactgacagctatggagtttgcgtgtacttccatactcgttaatgctctcatccacttattaaataatcataga

SEQ ID NO: 252027 - DNA, 120 bp, Artificial Sequence
  ENSG00000123612_30 (sequence is synthesized)
gcacccatatcttgcttgccacaatatcgggtacaagagggaatacaaagatagataggtcctgccctcagggattttaaagtctaatttgggaatgggaatagggatgtgagtgtgtgg

SEQ ID NO: 252028 - DNA, 120 bp, Artificial Sequence
  ENSG00000123612_31 (sequence is synthesized)
gggaagagattaaattgacagataaaatacgaagtgggatgtcttgagttctgcatgacagtgggtttctaggataggtctgaaaattgctttcatttgcaacacatttagaaagtagct

SEQ ID NO: 252029 - DNA, 120 bp, Artificial Sequence
  ENSG00000123612_32 (sequence is synthesized)
ttatttggatattacagacaatctaaatatatcatcagtttttaaaagtgcctatgtgaagtgatttttaaaaagagcctatgtgaaggggtaatcttgcttgttcttgttactaatttc

SEQ ID NO: 252030 - DNA, 120 bp, Artificial Sequence
  ENSG00000123612_33 (sequence is synthesized)
tcatagattgtttttctgcatatataagaacgaaattatttatttactatggttgtacgtgcctcaaataaacaagaatgatatttcctgttttatttacttatgttgggtaaatatgct

SEQ ID NO: 252031 - DNA, 120 bp, Artificial Sequence
  ENSG00000123612_34 (sequence is synthesized)
tattgaatttttaagagaggattttttaccatctccatttttcttgtcattatgttttgtagcttatttgagggtgtctaaatataatttcatattttattggttcaactttcactctga

SEQ ID NO: 252032 - DNA, 120 bp, Artificial Sequence
  ENSG00000123612_35 (sequence is synthesized)
agaaatccgtatgttagtacattttgaggtatttttcttgttcttgtgttgtttaactatgactcctaactgagtagtcttatatttcaattacaaaatacattttttaagaaagggaat

SEQ ID NO: 252033 - DNA, 120 bp, Artificial Sequence
  ENSG00000123612_36 (sequence is synthesized)
taggatgatgaagtttagagcataaggcaggcttcttgtatatacttatgctgtcaaatgttatattgtttttaatggagtcccattgtgtaatatttatttcttttacattttgttata

SEQ ID NO: 252034 - DNA, 120 bp, Artificial Sequence
  ENSG00000123612_37 (sequence is synthesized)
agcaaaaaaaaaaaaaattctccttaggttatgttcagagtatcagtgttctttactccttacagatattttggctttggggtataatacaagacttgggaaaacactattatgaatttt

SEQ ID NO: 252035 - DNA, 120 bp, Artificial Sequence
  ENSG00000123612_38 (sequence is synthesized)
cagtactgtataaagtggtgatgggatttaaatgcagcatcactttctgaaaataagagaaacattatttgttgtcagtatttcagcatgaacttgttgccttgtaaattttgcctttaa

SEQ ID NO: 252036 - DNA, 120 bp, Artificial Sequence
  ENSG00000123612_39 (sequence is synthesized)
gtttgtaattggtacagattctgttgtatgctttcttctatgtctaaaatatttggcatgtcacatctagaattcttaatttatgttctgacttgagagttaagtgaaacatgactgtcg

SEQ ID NO: 252037 - DNA, 120 bp, Artificial Sequence
  ENSG00000123612_40 (sequence is synthesized)
tgcactattttaggcatagcacttgcttttcatctttatactttcaattaactttgcattttaaatttccatgattgtatgaaaatagtaacctggttgcagtatctgaaaaaattaaaa

SEQ ID NO: 252038 - DNA, 120 bp, Artificial Sequence
  ENSG00000123612_41 (sequence is synthesized)
taaaaatgaaaatctacaatagattcattaggttagaagttccagaataatttattattttattacacctactattgtagaattactaataaaacaaaacaaaactactcctattttcct

SEQ ID NO: 252039 - DNA, 120 bp, Artificial Sequence
  ENSG00000123612_42 (sequence is synthesized)
tcctattttcctggaattttgccaccatgtgacttattggggcagagaaaactcagggttgtctttgagtctgcacaaaagcaccagggaacctgcttagcaaatcgtctgaaaacaggg

SEQ ID NO: 252040 - DNA, 120 bp, Artificial Sequence
  ENSG00000123612_43 (sequence is synthesized)
agctgatgtttgccattatacaaagtttgagtaaacaacttaaaattgcttgttagggcatagtctttgattgaaataagtatgagaatgtatttggctaaataaatgtatttaaaatat

SEQ ID NO: 252041 - DNA, 120 bp, Artificial Sequence
  ENSG00000123612_44 (sequence is synthesized)
acaaattttatttcccactggaaaattaagaaagtagcagtaccaaatgaataaaagctggcagttgatgtcttcaataatcattcctttaaaataaattcacaaacacatcattacaag

SEQ ID NO: 252042 - DNA, 120 bp, Artificial Sequence
  ENSG00000123612_45 (sequence is synthesized)
ctacttagaaatgtttagtattcgtatcttaaaatggcaccattgtggttttcaaagatattttaaacatcttttgtgaaacatactatttctgtttgacaatgctttgttctagctctg

SEQ ID NO: 252043 - DNA, 120 bp, Artificial Sequence
  ENSG00000123612_46 (sequence is synthesized)
tgtgctgatacctacatggagtttttctgctattttagtgaaaacagtaattcttttatcttgagagctgcttctaaataacaaaaaagttaattggaatgtaagtttttaaaaaatgtt

SEQ ID NO: 252044 - DNA, 120 bp, Artificial Sequence
  ENSG00000123612_47 (sequence is synthesized)
atagaatttttataatatgggcatttttcaaaacattttaatgaaaatatatagatatttgactttctttttttcatctagccttgctttatatttcattatttttctcactttttttct

SEQ ID NO: 252045 - DNA, 120 bp, Artificial Sequence
  ENSG00000123612_48 (sequence is synthesized)
ttttttcttaatattccctcactatctttcaacattatcattagttcctaattttaaaaataactcttatttaacttaaccgtctggaatttagccttctaatgaaagagaatcccttag

SEQ ID NO: 252046 - DNA, 120 bp, Artificial Sequence
  ENSG00000123612_49 (sequence is synthesized)
tactctcagagattatataaagttattccaattttgtgtagatgacgaaaccaaggatcagagattaaatgactactagttactagcagaactcttatgaaagcctggtggtgacaccca

SEQ ID NO: 252047 - DNA, 120 bp, Artificial Sequence
  ENSG00000123612_50 (sequence is synthesized)
gcactgttccctgccatatccccaacttttactgattaaaaattaattcgcatgcatctaaacctaccttgaatgcacactaacgtaatgtgccattcaatgatgatgataaaatcccac

SEQ ID NO: 252048 - DNA, 120 bp, Artificial Sequence
  ENSG00000123612_51 (sequence is synthesized)
ttttctttgggtttctactaaaataatttactcactcagagtgaggtcaatgagaaaaactaaactaggctaagaaagagttgtagaatggttgttgagctaagtaggcaaccactgggg

SEQ ID NO: 252049 - DNA, 120 bp, Artificial Sequence
  ENSG00000123612_52 (sequence is synthesized)
tgctgataaaattaatggataaaatttaggaactgtgagagtatagaatttcttagtgcaagtaatgattagagaagcttcctgacatcccccaccctttctgtaaggactgttctttct

SEQ ID NO: 252050 - DNA, 120 bp, Artificial Sequence
  ENSG00000123612_53 (sequence is synthesized)
ctttgtaccttggaatgggggtgaaaggtgatttgatagctgaatttgggactatgtccagtgggatattatctaacttttctctctttctcttttttttcccctcagtttctcattagt

SEQ ID NO: 252051 - DNA, 120 bp, Artificial Sequence
  ENSG00000123612_54 (sequence is synthesized)
ttgtctttggcattcatcttcttttagtgcattaaaaaatgtttggcagatctcatcaatcccaagtcactctataattcctgtatttctttagttgtcgtttaacctgtccaaacttct

SEQ ID NO: 252052 - DNA, 120 bp, Artificial Sequence
  ENSG00000123612_55 (sequence is synthesized)
acacaatgaacttcttaacaagattttaagttctctgtataagaggtttcacctcataacttctccagtaatccttcatttggcactatagagtatttgttaatggcagagatgattttt

SEQ ID NO: 252053 - DNA, 120 bp, Artificial Sequence
  ENSG00000123612_56 (sequence is synthesized)
cttttaaaacctaaaaagactagctgttatttgtattctagcttttagctaacatataaagaatgtctacttttgctttaatgctaaattccgcttgagaaatagtaactgggaaagaca

SEQ ID NO: 252054 - DNA, 120 bp, Artificial Sequence
  ENSG00000123612_57 (sequence is synthesized)
atttgaaatatatgccccataatgtgattgttaaatttatttctgctgttccataccattgctttgttttgcttttgacaaactaagccattatgctattagtttggaatataatactac

SEQ ID NO: 252055 - DNA, 120 bp, Artificial Sequence
  ENSG00000123612_58 (sequence is synthesized)
agcaaaattaggtaacaatccctattttaaaattcccctaacaataatagaactgccagcatacttttctctttcagttgtagatgaatacattcgagagaatatgagctgtatttcatc

SEQ ID NO: 252056 - DNA, 120 bp, Artificial Sequence
  ENSG00000123612_59 (sequence is synthesized)
ctagattttaatattttcagatgtgactgtatttcctgatcattggtccaagttgtcctaaaagaaatttttctctccagacctaacagttttaactgcaagagtttactgtgggttatg

SEQ ID NO: 252057 - DNA, 120 bp, Artificial Sequence
  ENSG00000123612_60 (sequence is synthesized)
ttaatctgaattttaatagggccactaagaatctgagtgccttaggagattacccttatacccactgccatcacatccagtcaggcctgttgtgctctatataaatcttcccagctgagg

SEQ ID NO: 252058 - DNA, 120 bp, Artificial Sequence
  ENSG00000123612_61 (sequence is synthesized)
ggcaggtgcgggctaaaatccaactgcaattggctcccagacataattttatattttacagagaagcatcttattggcttatatgtgtttaaagaatggtctggcttatacatcttcaga

SEQ ID NO: 252059 - DNA, 120 bp, Artificial Sequence
  ENSG00000123612_62 (sequence is synthesized)
aaatgagaattaaaaagtcaaaataattcttgacatctacagattgaacaaagaacttagaagaaataatactttatcttttcatcctggcattcctgagagaagagaaattgattgttt

SEQ ID NO: 252060 - DNA, 120 bp, Artificial Sequence
  ENSG00000123612_63 (sequence is synthesized)
atcatgttggtttaatttttcaacccagacaatctgcagcaaggcacatggaccccaattttgatatcgtccatacagttttcattctatgcatggagctaattactgactttgcctgta

SEQ ID NO: 252061 - DNA, 120 bp, Artificial Sequence
  ENSG00000123612_64 (sequence is synthesized)
aagagaggattgtgtgcctaaattttgtctaacaaatgcaagcgtagaatgacatttactaatatttctatttcttccataggctaaataatagtaactaagtatttttaaggacacagc

SEQ ID NO: 252062 - DNA, 120 bp, Artificial Sequence
  ENSG00000123612_65 (sequence is synthesized)
cctttttttctctttatacaaaatgagagtatctgagccaaaatattaaattctagttcttttccgcaatgactagtgtcaagctcatgtactcttctgattctagactggagaagatta

SEQ ID NO: 252063 - DNA, 120 bp, Artificial Sequence
  ENSG00000123612_66 (sequence is synthesized)
ttcaaacttgatctgtgtttcaggtttttaaatgtcctaaaaacagaaaattagattcagatctcaaaaaaggaattttggattgactttcaaagtactaatactaattatacttttctt

SEQ ID NO: 252064 - DNA, 120 bp, Artificial Sequence
  ENSG00000123612_67 (sequence is synthesized)
ttggtagcgtgactcttcttatacctaagaacatattacaaatgtcaaaaccattgcattttgacattgcaaaacatgccttgaactcttgaactactgtgaaaagaatcaccgttgtaa

SEQ ID NO: 252065 - DNA, 120 bp, Artificial Sequence
  ENSG00000123612_68 (sequence is synthesized)
agactttttgtaagctagctgatactcttaagtatgtaaaaagattgtctttcagccgacaggcccaaaggaatgtatataaggaaggaatatgaaaaaataaattaggttttaaaatag

SEQ ID NO: 252066 - DNA, 120 bp, Artificial Sequence
  ENSG00000123612_69 (sequence is synthesized)
gaattgggcaataaactgtatcaaaaatatgtagatggattttagtagttgtaatttaaatgtggaaggtgaagagaatttcaaactccaaagagaaatgaatgatattcagatgtttca

SEQ ID NO: 252067 - DNA, 120 bp, Artificial Sequence
  ENSG00000123612_70 (sequence is synthesized)
atatgcattttatagtaatatgtatagacttattttatttagaaataatagtgttttagaatttattaaaaactcagtgatagcctttataccaaaatgtttaactttaccaacagcaag

SEQ ID NO: 252068 - DNA, 120 bp, Artificial Sequence
  ENSG00000123612_71 (sequence is synthesized)
ttaactttaccaacagcaagtcataaaagtatttattttaaagctttttaatattatcgtgtaactttcatctgtcttcagatgtaaataattatctgcctaaatgttatatttttatgt

SEQ ID NO: 252069 - DNA, 120 bp, Artificial Sequence
  ENSG00000123612_72 (sequence is synthesized)
atgcattttctgaaaatgtattgttttgtaaagtgggaaagataataaatcaagcacttcttgcacttgtttctgtgaagcatatagaactctattttaaataaaggaagatgtgtcgta

SEQ ID NO: 252070 - DNA, 120 bp, Artificial Sequence
  ENSG00000123612_73 (sequence is synthesized)
gttgcgctgccgtcgggcaggtggccgagccccgcgggagctgtcgtcggggccgaattcactgcgccaaggtccagcggaaagctggggcatcccggcgaccgcagggtgtcccttcgc

SEQ ID NO: 252071 - DNA, 120 bp, Artificial Sequence
  ENSG00000123612_74 (sequence is synthesized)
aaattcatcaggcgaaggggaggcggaagctcctggccgctgctctgggggagggctccgagctccaacctgcaagtccaggactgaagtgtgtatgtcttttgtgtgattcttcaaact

SEQ ID NO: 252072 - DNA, 120 bp, Artificial Sequence
  ENSG00000123636_0 (sequence is synthesized)
acttggttcatgaagccttcgcctagaagtgaagctgctgaacaaaccttgagaagaatcatctcctgcttcaatctgctgctggataggaactaatcagagagagagaggcggaagacg

SEQ ID NO: 252073 - DNA, 120 bp, Artificial Sequence
  ENSG00000123636_1 (sequence is synthesized)
gagaaggagggagtcgaaggctttcccgatcacaaatctcacctccactacaactctctttatacttttcttgcagaaataataatagaaataaggaggtggtggggtttccaaaaatct

SEQ ID NO: 252074 - DNA, 120 bp, Artificial Sequence
  ENSG00000123636_2 (sequence is synthesized)
taaccttcaaccatctggggaaaaggcaaaaatcccatctaccgcaactctcagttcgagagtaaaggtttcccaacagtgatgtcacaagattgaccacattgatcacaatatggagtc

SEQ ID NO: 252075 - DNA, 120 bp, Artificial Sequence
  ENSG00000123636_3 (sequence is synthesized)
tggagaacggttaccatcctcagcagcctcctctactacaccaacttcatcttcgacaccttctgtggcttcagtagtttcaaaaggtggcctttccactggagttgcttcacttagctc

SEQ ID NO: 252076 - DNA, 120 bp, Artificial Sequence
  ENSG00000123636_4 (sequence is synthesized)
tacaatcaacccatgtggacatttattcagaacagctggggatcaaccgtttaacctgtccacagtgtcgagtgccttcccaatggtcagccacccagtctttggtctacattcagccag

SEQ ID NO: 252077 - DNA, 120 bp, Artificial Sequence
  ENSG00000123636_5 (sequence is synthesized)
ctcagggcattcagaatttggtggtttggggacacttggtacacccacagccttagccgcacatccccaactagcatcttttccaggtgcagaatggtggcgaacaactgatgctcatac

SEQ ID NO: 252078 - DNA, 120 bp, Artificial Sequence
  ENSG00000123636_6 (sequence is synthesized)
tcgtacaggagcaaccttctttccaccattactgggaattccaccactatttgctcccccagcccagaatcatgattcttcttcattccattcaaggacttcgggaaaaagtaatcgaaa

SEQ ID NO: 252079 - DNA, 120 bp, Artificial Sequence
  ENSG00000123636_7 (sequence is synthesized)
tggtcccgaaaaaggtgtaaatgggtcaataaatggaagtaatacatcatctgtaattggtatcaacacatctgtactatccactactgcttcaagttccatgggacaaactaaaagtac

SEQ ID NO: 252080 - DNA, 120 bp, Artificial Sequence
  ENSG00000123636_8 (sequence is synthesized)
aagctcaggtggaggaaatcgaaaatgtaatcaggaacaaagcaaaaaccagcctttggatgctagagttgacaaaatcaaagataagaaaccaaggaagaaagcaatggaaagttctag

SEQ ID NO: 252081 - DNA, 120 bp, Artificial Sequence
  ENSG00000123636_9 (sequence is synthesized)
caacagtgatagtgattcaggcacatcatcagacacctcaagtgaaggcattagtagcagtgattcagatgatctagaagaagatgaagaagaagaagatcaaagtattgaagaaagtga

SEQ ID NO: 252082 - DNA, 120 bp, Artificial Sequence
  ENSG00000123636_10 (sequence is synthesized)
agatgatgattctgattcagagagtgaagcacaacataaaagtaacaaccaggtgctattacatggtatttcagacccaaaagcagatggacagaaagcaactgaaaaagcccaggaaaa

SEQ ID NO: 252083 - DNA, 120 bp, Artificial Sequence
  ENSG00000123636_11 (sequence is synthesized)
aagaatacaccagccattacctcttgcgtctgaatcccagactcactcattccaatcccagcagaagcagcctcaggttttgtcacagcagcttccatttattttccaaagctctcaggc

SEQ ID NO: 252084 - DNA, 120 bp, Artificial Sequence
  ENSG00000123636_12 (sequence is synthesized)
aaaggaggaatctgtgaacaaacacaccagtgtaatacagtctacgggattggtgtccaatgtgaaacctttatctttggtaaatcaagccaaaaaggaaacttacatgaaactcatagt

SEQ ID NO: 252085 - DNA, 120 bp, Artificial Sequence
  ENSG00000123636_13 (sequence is synthesized)
tccttctcctgatgttcttaaagcagggaataaaaatacctctgaagaatctagtttattgaccagtgaattgagatccaaacgggaacaatataaacaggcattcccatcacagttaaa

SEQ ID NO: 252086 - DNA, 120 bp, Artificial Sequence
  ENSG00000123636_14 (sequence is synthesized)
gaaacaagagtcatcgaagagcctgaagaaggttattgcagctttgtcaaatccaaaagcaacctctagttcaccagcacatccaaaacaaacattagaaaacaaccacccaaatccatt

SEQ ID NO: 252087 - DNA, 120 bp, Artificial Sequence
  ENSG00000123636_15 (sequence is synthesized)
cttgacaaatgcacttttaggtaatcaccaaccaaatggagttattcaaagtgtcattcaagaagctcctctagcacttactaccaaaactaaaatgcagagcaagattaatgaaaacat

SEQ ID NO: 252088 - DNA, 120 bp, Artificial Sequence
  ENSG00000123636_16 (sequence is synthesized)
tgctgctgcaagtagcacccctttttcctcacctgtaaatctgagtacaagtgggagaagaacccctggcaatcagacacctgtaatgccctctgcctctcccatcctgcatagtcaagg

SEQ ID NO: 252089 - DNA, 120 bp, Artificial Sequence
  ENSG00000123636_17 (sequence is synthesized)
gaaggaaaaagcagttagcaataatgtaaacccagtaaaaacacagcatcactcccatcctgcaaaatctttagtggaacaattcagaggaacagattcagacattcccagtagtaaaga

SEQ ID NO: 252090 - DNA, 120 bp, Artificial Sequence
  ENSG00000123636_18 (sequence is synthesized)
ttctgaagattcaaatgaggatgaagaggaagatgatgaagaagaagatgaggaagatgatgaagatgatgaatctgatgacagccaatcagaatcagatagtaattcagaatcagatac

SEQ ID NO: 252091 - DNA, 120 bp, Artificial Sequence
  ENSG00000123636_19 (sequence is synthesized)
agaaggatcagaagaagaagatgatgatgataaagaccaagatgaatcagatagtgatactgaaggagagaaaacttcaatgaaactgaataaaacaacttcctctgtcaaaagcccttc

SEQ ID NO: 252092 - DNA, 120 bp, Artificial Sequence
  ENSG00000123636_20 (sequence is synthesized)
catgagtctcacaggtcactcaacacctcgtaacctccacatagcaaaagccccaggctctgctcctgctgccttatgttctgaatcccagtcacctgcttttcttggtacatcttcttc

SEQ ID NO: 252093 - DNA, 120 bp, Artificial Sequence
  ENSG00000123636_21 (sequence is synthesized)
cacacttacttcaagcccacactctggcacttccaaaagaagaagagtaacagatgaacgtgaactgcgtattccattggaatatggctggcagagagagacaagaataagaaactttgg

SEQ ID NO: 252094 - DNA, 120 bp, Artificial Sequence
  ENSG00000123636_22 (sequence is synthesized)
agggcgccttcaaggagaagtagcatattatgctccatgtggaaagaaacttaggcagtaccctgaagtaataaagtatctcagcagaaatggaataatggatatctcaagggacaattt

SEQ ID NO: 252095 - DNA, 120 bp, Artificial Sequence
  ENSG00000123636_23 (sequence is synthesized)
cagcttcagtgcaaaaataagagtgggtgacttctatgaagccagagatggaccgcagggaatgcagtggtgtcttttgaaagaagaggatgtcattcctcgtatcagggcaatggaagg

SEQ ID NO: 252096 - DNA, 120 bp, Artificial Sequence
  ENSG00000123636_24 (sequence is synthesized)
tcgtagaggaagaccaccaaatccagatagacaacgagcaagagaggaatccaggatgagacgtcggaaaggtcgacctccaaatgttggcaatgctgaattcctagataacgcagatgc

SEQ ID NO: 252097 - DNA, 120 bp, Artificial Sequence
  ENSG00000123636_25 (sequence is synthesized)
aaagttgctaagaaaactgcaagctcaagaaatagccaggcaagcagcacaaataaagcttttgagaaaacttcaaaagcaggaacaggctcgggttgctaaagaagccaaaaaacaaca

SEQ ID NO: 252098 - DNA, 120 bp, Artificial Sequence
  ENSG00000123636_26 (sequence is synthesized)
agcaataatggctgctgaggagaagcggaagcaaaaagaacagataaagattatgaaacagcaggaaaaaattaagagaatacagcaaatcagaatggaaaaagaacttcgagctcagca

SEQ ID NO: 252099 - DNA, 120 bp, Artificial Sequence
  ENSG00000123636_27 (sequence is synthesized)
aattctagaggctaaaaagaaaaagaaggaagaagcggcaaatgccaaattattggaggccgagaaacgaataaaggaaaaagaaatgagaagacaacaagctgttcttctgaaacatca

SEQ ID NO: 252100 - DNA, 120 bp, Artificial Sequence
  ENSG00000123636_28 (sequence is synthesized)
ggaacgagagcgaaggcgacaacacatgatgcttatgaaagctatggaagctcgtaaaaaagcagaagaaaaagagcggttgaaacaagaaaaacgtgatgagaaaagattaaataaaga

SEQ ID NO: 252101 - DNA, 120 bp, Artificial Sequence
  ENSG00000123636_29 (sequence is synthesized)
gcgtaaactagagcagcgaagattagaattagaaatggcaaaggaactaaagaagcctaatgaagacatgtgcttagcagaccaaaagcctttgccagagttgcctcgtattccaggact

SEQ ID NO: 252102 - DNA, 120 bp, Artificial Sequence
  ENSG00000123636_30 (sequence is synthesized)
tgttctctctggaagtacattttcagactgtctcatggtggtgcagttcttacgaaactttggtaaagttttgggctttgatgtgaatattgatgttccaaacctgagtgttcttcaaga

SEQ ID NO: 252103 - DNA, 120 bp, Artificial Sequence
  ENSG00000123636_31 (sequence is synthesized)
gggattgctaaatataggggacagcatgggtgaagtacaagacttgcttgtgaggctcctctcagctgctgtatgtgatccaggtctaataacaggatacaaggctaaaacagctcttgg

SEQ ID NO: 252104 - DNA, 120 bp, Artificial Sequence
  ENSG00000123636_32 (sequence is synthesized)
agaacatttgctgaatgttggtgtgaatcgagacaatgtttccgagattttacagatatttatggaagcccactgtggacaaactgagcttactgaaagtctgaagaccaaagcttttca

SEQ ID NO: 252105 - DNA, 120 bp, Artificial Sequence
  ENSG00000123636_33 (sequence is synthesized)
gtcaaacttgaggagagataaatgggtggtagaaggtaaactccgcaagctcagaatcattcatgctaagaaaacaggcaaaagagacacttcaggtggcattgatctgggagaagagca

SEQ ID NO: 252106 - DNA, 120 bp, Artificial Sequence
  ENSG00000123636_34 (sequence is synthesized)
gcatcccttgggcacacccactccaggacgcaagcgaagaaggaagggaggagacagtgattatgacgatgatgatgacgatgacagtgatgaccaaggggatgaagatgatgaggatga

SEQ ID NO: 252107 - DNA, 120 bp, Artificial Sequence
  ENSG00000123636_35 (sequence is synthesized)
agaagataaagaagacaaaaaaggaaaaaagactgatatctgtgaagatgaggatgaaggtgaccaagcagcaagtgttgaagagctggaaaaacagattgaaaaactgagtaaacaaca

SEQ ID NO: 252108 - DNA, 120 bp, Artificial Sequence
  ENSG00000123636_36 (sequence is synthesized)
gagtcagtacagaaggaagctctttgatgcgtctcactcattgcgttcagtgatgtttggccaagatcgttacagacgccggtactggattcttccccaatgtggggggatttttgtaga

SEQ ID NO: 252109 - DNA, 120 bp, Artificial Sequence
  ENSG00000123636_37 (sequence is synthesized)
aggcatggagagtggtgaaggactagaagaaattgcaaaagaaagagaaaaactgaaaaaggcagaaagtgtccagatcaaagaagaaatgtttgagacttctggggacagtttaaattg

SEQ ID NO: 252110 - DNA, 120 bp, Artificial Sequence
  ENSG00000123636_38 (sequence is synthesized)
ttcaaatacagatcactgtgaacaaaaggaagatcttaaagaaaaagataacacaaatctattccttcagaaacctggctctttttccaaattaagcaagcttttggaagtagctaagat

SEQ ID NO: 252111 - DNA, 120 bp, Artificial Sequence
  ENSG00000123636_39 (sequence is synthesized)
gcctcctgagtcagaggttatgacccccaaaccaaatgctggtgcaaatgggtgcacgttgtcttatcagaacagtggaaaacattcactgggcagcgttcagtcaacagcaacgcaaag

SEQ ID NO: 252112 - DNA, 120 bp, Artificial Sequence
  ENSG00000123636_40 (sequence is synthesized)
caatgtggaaaaggcagactctaataatctgtttaatactggttcaagtggtccagggaagttctacagtcctctccccaatgaccagttactaaaaacgctgactgaaaagaatagaca

SEQ ID NO: 252113 - DNA, 120 bp, Artificial Sequence
  ENSG00000123636_41 (sequence is synthesized)
atggtttagtcttttgccacgaacaccctgtgatgacacttcacttactcatgccgatatgtcaactgcttctttggtgactcctcagtctcagccaccatctaagtcaccttcacctac

SEQ ID NO: 252114 - DNA, 120 bp, Artificial Sequence
  ENSG00000123636_42 (sequence is synthesized)
cccagctcctcttggatcttctgctcagaatcctgttggcttaaatccatttgctttatcacctcttcaggtgaaaggtggagtatctatgatgggacttcagttttgtggatggcccac

SEQ ID NO: 252115 - DNA, 120 bp, Artificial Sequence
  ENSG00000123636_43 (sequence is synthesized)
tggtgtggttacttctaatattccatttacatcatctgtacctagtctaggatcggggttagggttatcagaaggaaatggtaattcattcttgacttccaatgttgcttcaagtaaaag

SEQ ID NO: 252116 - DNA, 120 bp, Artificial Sequence
  ENSG00000123636_44 (sequence is synthesized)
tgaatctccagtaccacagaatgaaaaggccacttcagctcaacctgcagctgttgaagtagcaaaaccagtagattttcctagtccaaaacctattccagaagaaatgcagtttggttg

SEQ ID NO: 252117 - DNA, 120 bp, Artificial Sequence
  ENSG00000123636_45 (sequence is synthesized)
gtggagaattattgacccagaggacctaaaagctttgctcaaagtgctgcatctcagaggaataagagaaaaggcattacaaaaacaaattcagaaacatttggattatattactcaagc

SEQ ID NO: 252118 - DNA, 120 bp, Artificial Sequence
  ENSG00000123636_46 (sequence is synthesized)
ctgcctcaagaataaggatgttgctattattgaactgaatgaaaatgaagaaaaccaagtaactcgagatattgtggagaactggtcagtagaagaacaagcaatggaaatggatttgag

SEQ ID NO: 252119 - DNA, 120 bp, Artificial Sequence
  ENSG00000123636_47 (sequence is synthesized)
tgtccttcaacaggtagaagatctagaaaggagagttgcatcagcaagtttgcaagtgaagggttggatgtgtccagagcctgcatcagaaagggaggacttggtatattttgaacataa

SEQ ID NO: 252120 - DNA, 120 bp, Artificial Sequence
  ENSG00000123636_48 (sequence is synthesized)
atcatttactaaattgtgcaaggagcatgatggagaatttactggcgaagacgaaagcagtgcacatgcactagaacggaagagtgacaaccccctagatatagctgtaaccaggctggc

SEQ ID NO: 252121 - DNA, 120 bp, Artificial Sequence
  ENSG00000123636_49 (sequence is synthesized)
tgatttggagcggaacattgaaagaagaattgaagaggatattgctccagggctcagggtatggagaagggcattatcagaagctcgcagtgctgcacaggtagctctgtgcattcagca

SEQ ID NO: 252122 - DNA, 120 bp, Artificial Sequence
  ENSG00000123636_50 (sequence is synthesized)
attacagaaatcaatagcatgggaaaaatcaattatgaaagtttactgccaaatctgtcgaaagggagataatgaagaactgcttcttctttgtgatggctgtgacaaaggctgtcatac

SEQ ID NO: 252123 - DNA, 120 bp, Artificial Sequence
  ENSG00000123636_51 (sequence is synthesized)
ctactgccatagacccaagattacaacaatcccagatggagactggttttgtccagcttgcattgctaaggcaagtggtcaaactctaaaaatcaaaaaacttcatgtcaaaggaaaaaa

SEQ ID NO: 252124 - DNA, 120 bp, Artificial Sequence
  ENSG00000123636_52 (sequence is synthesized)
gactaatgagtcaaagaaaggcaagaaggtaactttaacaggagatactgaagatgaagactctgcatctacaagtagttcactaaaaagaggaaacaaagacctcaagaaaagaaaaat

SEQ ID NO: 252125 - DNA, 120 bp, Artificial Sequence
  ENSG00000123636_53 (sequence is synthesized)
ggaggaaaacacttctattaacttgtcaaaacaagaaagttttacttcagttaagaaacctaaaagagatgactccaaggacctagctctttgcagtatgattctgactgaaatggaaac

SEQ ID NO: 252126 - DNA, 120 bp, Artificial Sequence
  ENSG00000123636_54 (sequence is synthesized)
tcatgaggatgcatggccttttctacttcctgtaaacttgaaacttgttcctggttataagaaagttattaagaagcctatggatttttccacaattagagagaaactaagtagtggaca

SEQ ID NO: 252127 - DNA, 120 bp, Artificial Sequence
  ENSG00000123636_55 (sequence is synthesized)
gtatccaaaccttgaaacctttgctctagatgtcaggcttgtttttgacaactgtgaaacatttaatgaagatgattctgatataggcagagctggccacaatatgaggaagtattttga

SEQ ID NO: 252128 - DNA, 120 bp, Artificial Sequence
  ENSG00000123636_56 (sequence is synthesized)
aaaaaagtggacagatactttcaaagtgagctgaagttataataatctctttatttttttccttctaaacaaggacaaatgagaccagcaatgtgaactgtatttacataaacgtgcaag

SEQ ID NO: 252129 - DNA, 120 bp, Artificial Sequence
  ENSG00000123636_57 (sequence is synthesized)
gcacatacataatgactttctttttccttaagtataaaaaaaaagtatcagaagaatgataccatttttaaaggcttcattcctacaacaaccaaggccctcggttattggtttgtgtga

SEQ ID NO: 252130 - DNA, 120 bp, Artificial Sequence
  ENSG00000123636_58 (sequence is synthesized)
tttatcagctaatttaggtagaacagggaagcacacccaaagaattttcaaaggaaagggtgttatagtgcaatagcaattaaaatatatcaaatcgcactgaatactcaacaccagagc

SEQ ID NO: 252131 - DNA, 120 bp, Artificial Sequence
  ENSG00000123636_59 (sequence is synthesized)
tctaatgtgggaaatggttctcctttccctctcaataaatatctatttttcatttttttactttgtagtttattttttagtgaatgtatttaattttatgaattatttatgattaaacca

SEQ ID NO: 252132 - DNA, 120 bp, Artificial Sequence
  ENSG00000123636_60 (sequence is synthesized)
catccagaatcttcgttttctgtgaaaaggaagaactagaaaattgctttaaatcttgaaaatacaaggaatgttttaaaatataaaacaaagccaagttaaactgtttacactgatgtg

SEQ ID NO: 252133 - DNA, 120 bp, Artificial Sequence
  ENSG00000123636_61 (sequence is synthesized)
ctataaaagcaccaaaaagaaactttactgtagagttacaagtacatttatatatatatgttgctgcatcacttgtgtagttaaattgtatttcaaaacagtgaaaaaattgacatgtat

SEQ ID NO: 252134 - DNA, 120 bp, Artificial Sequence
  ENSG00000123636_62 (sequence is synthesized)
atactgttcattcttgtttatattaagtcttgttttaaatatgtattatgtgtatatattgtttgcagacattattgttcatgccttagaggattgtagcattttattttcgtctgaagg

SEQ ID NO: 252135 - DNA, 120 bp, Artificial Sequence
  ENSG00000123636_63 (sequence is synthesized)
taatgatagctatacagtctgtacagtaattatcctctaccaacactgtggcgtctccttaatcttggtagtgcctgcctttgaaacagggtgtaggggatattagttttccatttttct

SEQ ID NO: 252136 - DNA, 120 bp, Artificial Sequence
  ENSG00000123636_64 (sequence is synthesized)
attttgttatataattttaagccaccagggcctaaattaaagtataatcatttgtatccatgtggaataaaattgtgacaatttcctacgcacacagtattttttcatagaaacatttcc

SEQ ID NO: 252137 - DNA, 120 bp, Artificial Sequence
  ENSG00000123636_65 (sequence is synthesized)
ctcccatttgccttgcctcagaaataaatttaaaagacgtttgtaaccactgtgttttatctactgtgtgttgtggtggcctgttggaggcaaatagatcagattttttttgtacctacg

SEQ ID NO: 252138 - DNA, 120 bp, Artificial Sequence
  ENSG00000123636_66 (sequence is synthesized)
taagagtacttgaagttttatttaaaataaaatgttgtggaaaaggtagcattctttttttaggagtgttatttttcactatgtgtggcacggatacaataaaagacttttacaaactaa

SEQ ID NO: 252139 - DNA, 120 bp, Artificial Sequence
  ENSG00000123636_67 (sequence is synthesized)
ctaatgtcatgttaattatttcatatgttaatgtgtacatgcttctgaagtgtgtgcaaggcattctgcctctagctttgttctttgcagtgtacttgaaatgtgcatttaccccaatag

SEQ ID NO: 252140 - DNA, 120 bp, Artificial Sequence
  ENSG00000123636_68 (sequence is synthesized)
aactgctcacccgtcatgtggtccatatctgtgtaacgaaagatacatagatgtgtatggctactgtatatttgtaagcaagcggaatgttcattactaatataaattaggaattatggt

SEQ ID NO: 252141 - DNA, 120 bp, Artificial Sequence
  ENSG00000123636_69 (sequence is synthesized)
atgcataataatcacatcatggaaaattgggtattcatcacctcaagcatttatcctttgtgttacagataatccacttctactcttttacttattttaaagtgtacaattaaactatga

SEQ ID NO: 252142 - DNA, 120 bp, Artificial Sequence
  ENSG00000123636_70 (sequence is synthesized)
cagagagtgaagcacaacataaaagtaacaaccaggtataatttttttcatggacagtatccaaacattattcatatttaggaattaactggtttatcttgactctcaaagtctgtagtt

SEQ ID NO: 252143 - DNA, 120 bp, Artificial Sequence
  ENSG00000123636_71 (sequence is synthesized)
ttaaagttaatcattactttgagttcatacttttgcccaagaaagaagatgaagaaatgtttttaaagggacatacggtatttcttttacgaatttttagatttttagatattatcataa

SEQ ID NO: 252144 - DNA, 120 bp, Artificial Sequence
  ENSG00000123636_72 (sequence is synthesized)
ggcattaagaacactttgaaagtacccgtttttatctccaggttttactgcttgatagtctttgtcttaatagatgttaggaacttaccttttcatttttatatctaggtgctattacat

SEQ ID NO: 252145 - DNA, 120 bp, Artificial Sequence
  ENSG00000123636_73 (sequence is synthesized)
aatacacaagtttaagttaaattctaccttcatttttatactttcttagtctccaggaatagaatatgtacagcagaaaactaaatttctctgattttatattcatatatgtatctgttt

SEQ ID NO: 252146 - DNA, 120 bp, Artificial Sequence
  ENSG00000123636_74 (sequence is synthesized)
aatgtatttttggcaatgcaatcatgtcattccagctcccctgcaacccatgcctaaggtaagtccccacacccaagatctaaggatttagaaataaggggataaatatgtttgagtaag

SEQ ID NO: 252147 - DNA, 120 bp, Artificial Sequence
  ENSG00000123636_75 (sequence is synthesized)
acaagcttcacaattacttgggtttaaaattaatgtcctttttttcctaataccaatttttttttattttttttttttgaggcagggtctcaatctgttgccgaggctggagtgcggtgg

SEQ ID NO: 252148 - DNA, 120 bp, Artificial Sequence
  ENSG00000123636_76 (sequence is synthesized)
cagctcactgcaacctccacctcccggatccaagtgatcctgctgtctcagacttcctagtaggtgggactactggcatgcgtcacgacaccaggctaatttttgtatatttagtaaaga

SEQ ID NO: 252149 - DNA, 120 bp, Artificial Sequence
  ENSG00000123636_77 (sequence is synthesized)
aaatatattctttttcaaagaagtgaactcaagtaatttacctctgtagtcctagaatgtacacattttaagtgtaaaaacccttcataaagaatcacttttctggccagacatggtggt

SEQ ID NO: 252150 - DNA, 120 bp, Artificial Sequence
  ENSG00000123636_78 (sequence is synthesized)
tcacacctgtaatcctagcactttgggagccaaggcaggaggactgtttgagcccaggagtttgagaccaacctctgcaacatagtgagaccctgtctctaccgaaaaaaaaaaaaaaaa

SEQ ID NO: 252151 - DNA, 120 bp, Artificial Sequence
  ENSG00000123636_79 (sequence is synthesized)
gtttgaggagcattgcttctcatacagtaaggtttcccaacagtgatgtcacaagattgaccacattgatcacagtaagaccaaaatgatagttaagcttttaaggaagtttggttttct

SEQ ID NO: 252152 - DNA, 120 bp, Artificial Sequence
  ENSG00000123636_80 (sequence is synthesized)
aatattactttaaaggatttaaaaaacatttaaaatgaaaattacttttaatttacaactgaaattacaggcctaaatatactaaattatttcagtgtgacttaaattctgaacgtcatc

SEQ ID NO: 252153 - DNA, 120 bp, Artificial Sequence
  ENSG00000123636_81 (sequence is synthesized)
aattatttcagtgtgacttaaattctgaacgtcatcttttttgagtttttatttttaccagaaaatgacagaaaggttaaggtgattccacattaggaaatatatataaaagtaaattac

SEQ ID NO: 252154 - DNA, 120 bp, Artificial Sequence
  ENSG00000123636_82 (sequence is synthesized)
cggaacattgaaagaaggtatctgaagagccccttaagtaccaccattcagatcaaactggataatgtgggcacagttactgtccctgctcctgcaccatccgttagtggtgatggtgac

SEQ ID NO: 252155 - DNA, 120 bp, Artificial Sequence
  ENSG00000123636_83 (sequence is synthesized)
ggaattgaagaggatattgctccagggctcagggtatggagaagggcattatcagaagctcgcagtgctgcacaggtagctctgtgcattcagcaattacagaaatcaatagcatgggaa

SEQ ID NO: 252156 - DNA, 120 bp, Artificial Sequence
  ENSG00000123636_84 (sequence is synthesized)
cttgaacaaagcttattcggcatgtttgatgttattaaatggcagcttttcttcccaaagctaccgcggctcccagtgacttgttttctaataaaaatgccttttgaagagaaaatggta

SEQ ID NO: 252157 - DNA, 120 bp, Artificial Sequence
  ENSG00000123636_85 (sequence is synthesized)
gttttacagtggcgagtcctggcagataccagcttaaccaagtgatcgaagttaatgtcaccagaactacatagcaacattatgggccctagataaattgctctgagaagggcacattga

SEQ ID NO: 252158 - DNA, 120 bp, Artificial Sequence
  ENSG00000123636_86 (sequence is synthesized)
ccatcttttctaataatgcatcacctcttctaatcatgagaacacatcagacaaactcaaccagagggacattttacagaatacctctgaccagtacacttcagtgtattaaagtcataa

SEQ ID NO: 252159 - DNA, 120 bp, Artificial Sequence
  ENSG00000123636_87 (sequence is synthesized)
caaacaagactgaggaaataacacgactgtacaaaactagggagacacaacacctaaatgtaatatgagatcctggattggatcttgggacagagaagtgacattggtgggaaaactaat

SEQ ID NO: 252160 - DNA, 120 bp, Artificial Sequence
  ENSG00000123636_88 (sequence is synthesized)
taaatctgaataaattctttattttaattagttaatcaaggttaatttcttagtttggaaagttgttctttagtcatgtaagatgataacataaggagaagtaaggttgggtagacagta

SEQ ID NO: 252161 - DNA, 120 bp, Artificial Sequence
  ENSG00000123636_89 (sequence is synthesized)
ggttgggtagacagtatataggaactctgtgtactatttttgcaactcttgtgagtcaaaataatctcaaaataactacttaaaaataaaaataggctgggcgcagtggctcacacttgt

SEQ ID NO: 252162 - DNA, 120 bp, Artificial Sequence
  ENSG00000123636_90 (sequence is synthesized)
aaaaataataataataaaacccaatctgaatagacttttctcaagaaacatataagtggccagcagatatatgaaaaaatgctcaacatcactaatcattagggagatgcaaattaaaat

SEQ ID NO: 252163 - DNA, 120 bp, Artificial Sequence
  ENSG00000123636_91 (sequence is synthesized)
cacaatgagctatcatctcacacctgtcagattggcttttctcaactagacaaaagacaagtattggcaaggatgtggagaaaagggaacgcttgtacactgttaatggggatgtaaatt

SEQ ID NO: 252164 - DNA, 120 bp, Artificial Sequence
  ENSG00000123636_92 (sequence is synthesized)
caaaaaactaaaaatagaattaccatataatccagccatcctgtttgtgggatttacccaaaggacttgtaaacagtttgtctaagagatgtctgcactcccatgttcattgcagaacga

SEQ ID NO: 252165 - DNA, 120 bp, Artificial Sequence
  ENSG00000123636_93 (sequence is synthesized)
agagatgtctgcactcccatgttcattgcagaacgattaacaatagacacgttaaggaatcgtcttttttaagtgtcaaaatataaatgttgagaacagcccaagatggccaacttcaat

SEQ ID NO: 252166 - DNA, 120 bp, Artificial Sequence
  ENSG00000123636_94 (sequence is synthesized)
gattgtgtgttggataaggagaaggtatgcatagctgctaaattcatcactcatgcacccgcaggagaatttaatgaagtattcagtgatattcggctactatgtaataatgacagtctc

SEQ ID NO: 252167 - DNA, 120 bp, Artificial Sequence
  ENSG00000123636_95 (sequence is synthesized)
ctcagggaaagggcagcacgtgcatttgcccattataacatggatcagttcacacccgtgaagatggaaggatgtgaagatcaggtcataattacagagcatgggggacctgggtaatag

SEQ ID NO: 252168 - DNA, 120 bp, Artificial Sequence
  ENSG00000123636_96 (sequence is synthesized)
cagagttttagatccaagaaacaaaatttcctttacatttgatcacttatagaaaaaagcaagtgacccccagccaaaacaagtagatggaggtctgaagtcttggagagaatcctgtga

SEQ ID NO: 252169 - DNA, 120 bp, Artificial Sequence
  ENSG00000123636_97 (sequence is synthesized)
cagtgctttaagagcctatgtgaaagaccattattccaacggcttctgtactgtttatgctaaaaactatcgatgggcaacagactattattgcatgtattgaaagccatgagtgtcagc

SEQ ID NO: 252170 - DNA, 120 bp, Artificial Sequence
  ENSG00000123636_98 (sequence is synthesized)
ctaaaaacttctggaatggtcgttggagatcagagtggaagtttaccatcacaccacctacagcccaggtggttggagtgcttaagattcaggttcactattacgaagatggcagtgttc

SEQ ID NO: 252171 - DNA, 120 bp, Artificial Sequence
  ENSG00000123636_99 (sequence is synthesized)
agttggttagtcataaagatgtacaggattcgctaactgtttcgaatgacgcacaaactgccaaggagtttattaaaatcatagagaatgcagaaaatgaatatcagacagcaattagtg

SEQ ID NO: 252172 - DNA, 120 bp, Artificial Sequence
  ENSG00000123636_100 (sequence is synthesized)
aaaactgtcaaacaatgtcagataccacattcaaggtcttgcgccggcagcttccggttacccgcaccaaaattgactggaacaagattactcagctacaacattagcaaagaaatgcag

SEQ ID NO: 252173 - DNA, 120 bp, Artificial Sequence
  ENSG00000123636_101 (sequence is synthesized)
aatgcctaaaggctgaatgtaggattcttcagtatgtggaaagacaaggattcaacatgtggtcatatgataaataagtgatttataaacaagagtgatattttgctagagctttcaaag

SEQ ID NO: 252174 - DNA, 120 bp, Artificial Sequence
  ENSG00000123636_102 (sequence is synthesized)
ttaaccagttttctaacctcatggaatactgttgaacctatagcattgtctgattcttttgtgttctctgctttgtaattttctgttattgctatatccaagtgtaagtctttttttttt

SEQ ID NO: 252175 - DNA, 120 bp, Artificial Sequence
  ENSG00000123636_103 (sequence is synthesized)
aattctgccacatttaatgttggagagagagatctatcctagagacattttactgtttaaaaaagtttcctagccatgaagcgctgctactgatttagacaaggtatatggtcattactt

SEQ ID NO: 252176 - DNA, 120 bp, Artificial Sequence
  ENSG00000123636_104 (sequence is synthesized)
tctacccctatccttccaagcacttctgatactgcagtggtttttactgatccaccagcacctaaagaggctgtactacagtctatagctaagtggaaggcacattcatccttctccctc

SEQ ID NO: 252177 - DNA, 120 bp, Artificial Sequence
  ENSG00000123636_105 (sequence is synthesized)
tgactgctttgatcatcatttattgcatcgcagaactgtaattttccaaagtttggattgggacttttcaggtcctttttggagggcaaaggaagtgtcagcttctctggggaacttgtt

SEQ ID NO: 252178 - DNA, 120 bp, Artificial Sequence
  ENSG00000123636_106 (sequence is synthesized)
gaagagttttagccatttatttttttaaacagtcaagaactgctgacatactgtggatatagagtataaaacttgaaaaatgcagatgttgaaggaataacaggtatcttgtgctttaat

SEQ ID NO: 252179 - DNA, 120 bp, Artificial Sequence
  ENSG00000123636_107 (sequence is synthesized)
actttatggcaggattgtactataagcaaatgaattaaacagctatgtaaatcataaacaaaaactgaaaatgaaccaaaatgaaaaggataacttccaggcagtatctttctattgtaa

SEQ ID NO: 252180 - DNA, 120 bp, Artificial Sequence
  ENSG00000123636_108 (sequence is synthesized)
cctgttatttaaggaaatactaacgatttcttctaaataggatgtaaaacttatttcagattactcttcctcagtcctgcctgccaagaactcaagtgtaactgtgataaaataacctgt

SEQ ID NO: 252181 - DNA, 120 bp, Artificial Sequence
  ENSG00000123636_109 (sequence is synthesized)
cccaggtatattggcaggtatgtgtgtaatctcagaatacacaggtgacatagatataatataacaactggtaatggtggattcatttacattgcttacagttctatgaccaggccttaa

SEQ ID NO: 252182 - DNA, 120 bp, Artificial Sequence
  ENSG00000123636_110 (sequence is synthesized)
gggaaggtcagtttaaaaaaaaaacaagtaatgtcttcctgcctatctccacatacatgtaaaaaaaaaacgtgtttgtgcttcagttctgtttttgctcagtaatatagtcaaggaaca

SEQ ID NO: 252183 - DNA, 120 bp, Artificial Sequence
  ENSG00000123636_111 (sequence is synthesized)
gtttgtttccaagtacccattgagctgtgtatgcatttttgtttatttcaaataaaatatatttgtattatttgtcatccatactatccatccataccacactatcttctgtatgagata

SEQ ID NO: 252184 - DNA, 120 bp, Artificial Sequence
  ENSG00000123636_112 (sequence is synthesized)
gtctaatagaaatatacctgttttgttctaaaattatatataaaggttaactggctcaaagcatttttagaatgcaagagtgaaatgagaattacttggagagaaatgttttgtcaccag

SEQ ID NO: 252185 - DNA, 120 bp, Artificial Sequence
  ENSG00000123636_113 (sequence is synthesized)
taactgtagacttctttctgttcttaatcaaagttcaagtttacagaatttggacattttgagttcagaaatatttaaacattaatatacttaagaattttaatatgtgagccagtaatt

SEQ ID NO: 252186 - DNA, 120 bp, Artificial Sequence
  ENSG00000123636_114 (sequence is synthesized)
tgaatattgctttgatttacagtaattttgatgatgttctttttgctattacactaagttattactgatattaattaaagtcctcataacaactttatttgaatataccaccatttttaa

SEQ ID NO: 252187 - DNA, 120 bp, Artificial Sequence
  ENSG00000123636_115 (sequence is synthesized)
tgaatagccatactttgcaagatgtacattagatcctgatttttaatgttgcaaatttatgcttaccattttgaacaactggagacaaaatttgaagacatgatataacaattttgtgta

SEQ ID NO: 252188 - DNA, 120 bp, Artificial Sequence
  ENSG00000123636_116 (sequence is synthesized)
gcattgaaagattaaaagacacttttagcacacagaaaaacgtgaagttatgtcatggtaagcaattttcttgacttttaaaaagattgagtgctttaacatacttagttcttacaatta

SEQ ID NO: 252189 - DNA, 120 bp, Artificial Sequence
  ENSG00000123636_117 (sequence is synthesized)
ttttgttttatttgctttctggacttttccttagtgatgggagattttgttcactggtagtttagagtcaaggcattagttcagtacaatttcattctgatagggggaaaaccttgttga

SEQ ID NO: 252190 - DNA, 120 bp, Artificial Sequence
  ENSG00000123636_118 (sequence is synthesized)
attattctttaatattaataaaggcatttgtagttaccatgccttgttactgacacacaccagcatttgtgtactgattttaatcacttttatatgtagtgatttgatttggctagtaga

SEQ ID NO: 252191 - DNA, 120 bp, Artificial Sequence
  ENSG00000123636_119 (sequence is synthesized)
atttgaaaagctttgctgaaaaatattcagctcattgtaatttgagaacataggcattgcagatgtgtattaatttttattatgtaaaatgtatacagttacctatcttaaaatagaaac

SEQ ID NO: 252192 - DNA, 120 bp, Artificial Sequence
  ENSG00000123636_120 (sequence is synthesized)
ataatatttacattaataatattgaaactatgtttgaatgttaatatctgcaaaaaattgtggtcttctaaaaatattattttatggtataattcatcagcttgcaaatgttttctctga

SEQ ID NO: 252193 - DNA, 120 bp, Artificial Sequence
  ENSG00000123636_121 (sequence is synthesized)
ctgagcagaactcaaaagttttcatcaagacaggttttgtgagcaatacatctgttgatattaagtatattaatgtaagaaacattttcttttctaaaagtgaaacattctactatccag

SEQ ID NO: 252194 - DNA, 120 bp, Artificial Sequence
  ENSG00000123636_122 (sequence is synthesized)
gtaattttgttttgtacttataaggttaatagagcctatttgacttgagctgtatttcattttgtgaaagtatctttctgcttttttattaatactgaatatgctttgttttaaatgtaa

SEQ ID NO: 252195 - DNA, 120 bp, Artificial Sequence
  ENSG00000123636_123 (sequence is synthesized)
ttataggattgactgagccatcatcagtctatgatcaaaattttcctagtgaacagtagtttgaaatgttaagatagttgaagactaaaggcattgtcctggcaatggagccaagggtgt

SEQ ID NO: 252196 - DNA, 120 bp, Artificial Sequence
  ENSG00000123636_124 (sequence is synthesized)
aaacaaaacagcaatccctgctgtataaaaagattaaagccacaaagtgacatcattctaaatacctagtgagcttttactaaccttgtgagtgacttttgcaattggagcaaagtgaca

SEQ ID NO: 252197 - DNA, 120 bp, Artificial Sequence
  ENSG00000123636_125 (sequence is synthesized)
tgttatattttaatcatttaaagaataatttccggttattctagccttttaaaagaagagtgaaacaaagaattgaaaagtactgttttgaagatgcctatagcaggtattatgaagtgt

SEQ ID NO: 252198 - DNA, 120 bp, Artificial Sequence
  ENSG00000123636_126 (sequence is synthesized)
tgcctctgccaactgataacagtttgctttgtgcaatgttttgtaaagagtaaaaatggctgtttccttcataacttttataccctagtaatggtctgataaaggacaaattgccaataa

SEQ ID NO: 252199 - DNA, 120 bp, Artificial Sequence
  ENSG00000123636_127 (sequence is synthesized)
tctatcatgaacaatgaaaagaggccccaaatataactgtctggagattcaggaatacttcttgagcaataggttcttgaaatagttagtaaagaatataattataaagggcagaaatca

SEQ ID NO: 252200 - DNA, 120 bp, Artificial Sequence
  ENSG00000123636_128 (sequence is synthesized)
aagagcatgttatataggctttggaggttctcaagtggaagaaataatgtgaccaaaaatacagcagtgagaaacaatttattaaattcttattgtgtttcagattattggaaatcctga

SEQ ID NO: 252201 - DNA, 120 bp, Artificial Sequence
  ENSG00000123636_129 (sequence is synthesized)
gctaaataagatgcagtttttgcctcaaagatctaaaatcctggcttataattcatttgcatagaggtgatagtttaaacagtataagcatgtgaaatactgaaggagaaagcataagag

SEQ ID NO: 252202 - DNA, 120 bp, Artificial Sequence
  ENSG00000123636_130 (sequence is synthesized)
aaggaaagagatagctggacaaaatctttaggaatcttttacatttagggggaaaaaagcaaaagaaaatccaataaaggagatagtattattgaaagatgtatagttaagaagaggatc

SEQ ID NO: 252203 - DNA, 120 bp, Artificial Sequence
  ENSG00000123636_131 (sequence is synthesized)
agtattattgaaagatgtatagttaagaagaggatcaagagggttccacgacctagatcttaaggatgataatgggttttgaaaagaaaggaccaggccaggcgcggtggctcacacctg

SEQ ID NO: 252204 - DNA, 120 bp, Artificial Sequence
  ENSG00000123636_132 (sequence is synthesized)
acatgcccgtcttggctttgttgttgcttcatcgtcattaatcatccaagcagtaacttcaaaggggctatgctgtcttctccacacaggaaaaagagcggttgaaacaagaaaaacgtg

SEQ ID NO: 252205 - DNA, 120 bp, Artificial Sequence
  ENSG00000123636_133 (sequence is synthesized)
ccggcttgggcctctagctctcccgtgtgtagctggaggctctgagtttactgaagatgagcgggggtgggggtggggcaggtgggattgggaaaagatctggatacctgggaaggtcta

SEQ ID NO: 252206 - DNA, 120 bp, Artificial Sequence
  ENSG00000123636_134 (sequence is synthesized)
gtttaccaggaaatcaagatgtgtaaactgcaggaagtactatttgaccctctccgacagtatctcattacaataattgctaatctctgaataagacagccatgttttgtgagtaactga

SEQ ID NO: 252207 - DNA, 120 bp, Artificial Sequence
  ENSG00000123636_135 (sequence is synthesized)
gagagagagaggttgtgttaggtagattttaggtgtttcaacaaatagagcattgtaaatgcttacttggattatgttttcatgatagcttttgataaaagacatatgctgacccttggg

SEQ ID NO: 252208 - DNA, 120 bp, Artificial Sequence
  ENSG00000123636_136 (sequence is synthesized)
gtcagcaaagctaggacacaatagtaggtattctttcatgccttttaactgaaaaatatcacggcttgttgttttggagtgctgtcactgctctgaatcgaaaggataatggctacttcc

SEQ ID NO: 252209 - DNA, 120 bp, Artificial Sequence
  ENSG00000123636_137 (sequence is synthesized)
tagccgtgggcacgaatggacactgagaacatgaaagatcagtaccagaaatctataagtccggaaatttatgtcactaatctaccagggaatgcagtggtgtcttttgaaagaagagga

SEQ ID NO: 252210 - DNA, 70 bp, Artificial Sequence
  ENSG00000123636_138 (sequence is synthesized)
tgaaaccccatctttactaaaaatataaatattagctgggcgtggtggggtgtgcaggaggtggaggttg

SEQ ID NO: 252211 - DNA, 90 bp, Artificial Sequence
  ENSG00000123636_139 (sequence is synthesized)
taaaaaaaacaaaaacattagccaggtatggtggcacgtgcccatagtctcagctactcaggaatctgaggcaggcttgaacccgggagg

SEQ ID NO: 252212 - DNA, 90 bp, Artificial Sequence
  ENSG00000123636_140 (sequence is synthesized)
aaaaacattagccaggtatggtggcacgtgcccatagtctcagctactcaggaatctgaggcaggcttgaacccgggaggtgggggttgc

SEQ ID NO: 252213 - DNA, 120 bp, Artificial Sequence
  ENSG00000123636_141 (sequence is synthesized)
atttataagtattttatataacattccatcagcatttacacttgtgaaatctccatcacaaatctttgctgattttagtgttaggagcccaggtctgatgctgacaacactactgatttt

SEQ ID NO: 252214 - DNA, 120 bp, Artificial Sequence
  ENSG00000123636_142 (sequence is synthesized)
aatttcaaggcaatcattttcaatgcagaattttaccttagattaagaaattcagctccttctgttaactcaaaggattttaataattctgctgctgttaatttttatgtaatattttaa

SEQ ID NO: 252215 - DNA, 120 bp, Artificial Sequence
  ENSG00000123636_143 (sequence is synthesized)
ttatagtagcttaataaaattcatgattgtgttgttttcaaggggattctaatagttaaataagtttttgtttatagacataaattttatggcttaatagtttataatcttttccaagaa

SEQ ID NO: 252216 - DNA, 120 bp, Artificial Sequence
  ENSG00000123636_144 (sequence is synthesized)
aattgtatttttctaaattgtttactcgggaatattactgtgcaaaggcacactaaagtagatcccacagaatgttgaatgtccatttccaccagcttagtatcttaaatctttgcttca

SEQ ID NO: 252217 - DNA, 120 bp, Artificial Sequence
  ENSG00000123636_145 (sequence is synthesized)
aagaagttcttgctcaggaagttattcattcagcaacctaaaattgttttttgagtacatatcaagcacagggttctgagcaatgtcttaggaagaccataaaggtgaataaatgagtgt

SEQ ID NO: 252218 - DNA, 120 bp, Artificial Sequence
  ENSG00000123636_146 (sequence is synthesized)
ttctaccctgaggaatttatcaaagatgttaagttatctccttagaggtataagtcatataggcatattctatgtatactaaaggtggtatggcataagagtacatatagtcaccaactt

SEQ ID NO: 252219 - DNA, 78 bp, Artificial Sequence
  ENSG00000123636_147 (sequence is synthesized)
tctttgacttatgatctttcaacttcacaatggagcgaatgctatacacattcagtagaaattggtacaataatccct

SEQ ID NO: 252220 - DNA, 120 bp, Artificial Sequence
  ENSG00000123636_148 (sequence is synthesized)
atgctatacacattcagtagaaattggtacaataatcccttgatgctgagcagcagcagtgagccacagctcctggtcagccgcatgataacaagggcagacaactgatactctacagtt

SEQ ID NO: 252221 - DNA, 120 bp, Artificial Sequence
  ENSG00000123636_149 (sequence is synthesized)
tactgtgttgataggttattttgctcaactttaggctaatgtaagtgttttcagtacatttaaggtagtttagactaagctatgatgtttggtaggttaggtgtattgtatctatttttg

SEQ ID NO: 252222 - DNA, 120 bp, Artificial Sequence
  ENSG00000123636_150 (sequence is synthesized)
acttaatgatattttcaactttcgatgagtttatggggaagtcaccccatggcaagctgaggagcatctatataaagaggtaaaagagctcaaaggaaagaggcaaagaatgcttctggc

SEQ ID NO: 252223 - DNA, 120 bp, Artificial Sequence
  ENSG00000123636_151 (sequence is synthesized)
tgggaaatttggaaagcttcttggtttggatcttgaagaataaacagtattttgtcagcttgaaatttctaagaggaggctatttcatgcaaagaaaatggttttaagtttggattattg

SEQ ID NO: 252224 - DNA, 120 bp, Artificial Sequence
  ENSG00000123636_152 (sequence is synthesized)
tgaaaatggaagcaacagtaaagaggggaggctagtcaaaaggcatataatttttaatggggaaaaactaaataaattttaataaattagagccaaaatgtagcaaccaactagtcatag

SEQ ID NO: 252225 - DNA, 120 bp, Artificial Sequence
  ENSG00000123636_153 (sequence is synthesized)
ctacttttacagcatttgtatatcatgatttaaatttatatatgatataatagctataatttgttttcagatattgaaagcaaataaaagcaatctttgttttgtggtacattttgttgt

SEQ ID NO: 252226 - DNA, 120 bp, Artificial Sequence
  ENSG00000123636_154 (sequence is synthesized)
caggtatgtgtatacattggaagtgacttttaaaatatgggacttattttgaggatttgttagtaatgtacattatttttgatttcttaaataactatatttcacattaatatttgtgtc

SEQ ID NO: 252227 - DNA, 120 bp, Artificial Sequence
  ENSG00000123636_155 (sequence is synthesized)
ttatttagaaagttgctatcttctattaattaaaattttacctttttaataaagtcttctacttccaagtgtttaaagaaatgattaccaaacagtaaatttgtgtaagtactttaatat

SEQ ID NO: 252228 - DNA, 120 bp, Artificial Sequence
  ENSG00000123636_156 (sequence is synthesized)
cctggtagactttgtataagttgatatcttgaacaattttcagaatttttaaattaatgtatcagtcaatgaagtatattgctcgaatgttcaaattttaataaaagcttgtttttctta

SEQ ID NO: 252229 - DNA, 120 bp, Artificial Sequence
  ENSG00000123636_157 (sequence is synthesized)
aacatgtaaaatattagtagaaaattaaattcaagttatacaaaataagatttgccttcattgcttcttaatgctttcaggattacttaaaagttgccactgcaaaaaaaaaaaaaaaaa

SEQ ID NO: 252230 - DNA, 120 bp, Artificial Sequence
  ENSG00000123643_0 (sequence is synthesized)
gaggtccggaagcggctgccgggcagcaaaggaggatggcgaggggctgatactgaacccgggaagggtgggctgtgctgaagccagagccggagccggagctggggccagaacccgagc

SEQ ID NO: 252231 - DNA, 120 bp, Artificial Sequence
  ENSG00000123643_1 (sequence is synthesized)
agtgagttcctccactggctgccggctggcggcgctcgccgccttgggcaggacccacctcgccttcctcccggcgtggcagatgctccagctgccatgtccacgcagagacttcggaat

SEQ ID NO: 252232 - DNA, 120 bp, Artificial Sequence
  ENSG00000123643_2 (sequence is synthesized)
gaagactaccacgactacagctccacggacgtgagccctgaggagagcccgtcggaaggcctcaacaacctctcctccccgggctcctaccagcgctttggtcaaagcaatagcacaaca

SEQ ID NO: 252233 - DNA, 120 bp, Artificial Sequence
  ENSG00000123643_3 (sequence is synthesized)
tggttccagaccttgatccacctgttaaaaggcaacattggcacaggactcctgggactccctctggcggtgaaaaatgcaggcatcgtgatgggtcccatcagcctgctgatcataggc

SEQ ID NO: 252234 - DNA, 120 bp, Artificial Sequence
  ENSG00000123643_4 (sequence is synthesized)
atcgtggccgtgcactgcatgggtatcctggtgaaatgtgctcaccacttctgccgcaggctgaataaatcctttgtggattatggtgatactgtgatgtatggactagaatccagcccc

SEQ ID NO: 252235 - DNA, 120 bp, Artificial Sequence
  ENSG00000123643_5 (sequence is synthesized)
tgctcctggctccggaaccacgcacactggggaagacgtgttgtggacttcttcctgattgtcacccagctgggattctgctgtgtctattttgtgtttctggctgacaactttaaacag

SEQ ID NO: 252236 - DNA, 120 bp, Artificial Sequence
  ENSG00000123643_6 (sequence is synthesized)
gtgatagaagcggccaatgggaccaccaataactgccacaacaatgagacggtgattctgacgcctaccatggactcgcgactctacatgctctccttcctgcccttcctggtgctgctg

SEQ ID NO: 252237 - DNA, 120 bp, Artificial Sequence
  ENSG00000123643_7 (sequence is synthesized)
gttttcatcaggaacctccgagccctgtccatcttctccctgttggccaacatcaccatgctggtcagcttggtcatgatctaccagttcattgttcagaggatcccagaccccagccac

SEQ ID NO: 252238 - DNA, 120 bp, Artificial Sequence
  ENSG00000123643_8 (sequence is synthesized)
ctccccttggtggccccttggaagacctaccctctcttctttggcacagcgattttttcatttgaaggcattggaatggttctgcccctggaaaacaaaatgaaggatcctcggaagttc

SEQ ID NO: 252239 - DNA, 120 bp, Artificial Sequence
  ENSG00000123643_9 (sequence is synthesized)
ccactcatcctgtacctgggcatggtcatcgtcaccatcctctacatcagcctggggtgtctggggtacctgcaatttggagctaatatccaaggcagcataaccctcaacctgcccaac

SEQ ID NO: 252240 - DNA, 120 bp, Artificial Sequence
  ENSG00000123643_10 (sequence is synthesized)
tgctggttgtaccagtcagttaagctgctgtactccatcgggatctttttcacctacgcactccagttctacgtcccggctgagatcatcatccccttctttgtgtcccgagcgcccgag

SEQ ID NO: 252241 - DNA, 120 bp, Artificial Sequence
  ENSG00000123643_11 (sequence is synthesized)
cactgtgagttagtggtggacctgtttgtgcgcacagtgctggtctgcctgacatgcatcttggccatcctcatcccccgcctggacctggtcatctccctggtgggctccgtgagcagc

SEQ ID NO: 252242 - DNA, 120 bp, Artificial Sequence
  ENSG00000123643_12 (sequence is synthesized)
agcgccctggccctcatcatcccaccgctcctggaggtcaccaccttctactcagagggcatgagccccctcaccatctttaaggacgccctgatcagcatcctgggcttcgtgggcttt

SEQ ID NO: 252243 - DNA, 120 bp, Artificial Sequence
  ENSG00000123643_13 (sequence is synthesized)
gtggtggggacctatgaggctctctatgagctgatccagccaagcaatgctcccatcttcatcaattccacctgtgccttcatatagggatctgggttcgtctctgcagctgcctacccc

SEQ ID NO: 252244 - DNA, 120 bp, Artificial Sequence
  ENSG00000123643_14 (sequence is synthesized)
tgccccatgtgtcccccgttacctgtcctcagagcctcaggtatggtccaggctctgaggaaagtcagggttgctgtgtgggaacccctctgcctggcacctggataccctgggccaggt

SEQ ID NO: 252245 - DNA, 120 bp, Artificial Sequence
  ENSG00000123643_15 (sequence is synthesized)
aacctgagggcaggggagaggtggggtggcagacacgcagaagtgctactagtgacagggctgccatcgctcacctgtacctatttacacccagaactttccagctccccctcatcatgc

SEQ ID NO: 252246 - DNA, 120 bp, Artificial Sequence
  ENSG00000123643_16 (sequence is synthesized)
ctcctccttcctacctgcctcccctctgctggtgcacctcgcccaactcattcttactgcacagttcactttatttaacaattttcatgtcccccacctcatgttttcaccttttctggg

SEQ ID NO: 252247 - DNA, 120 bp, Artificial Sequence
  ENSG00000123643_17 (sequence is synthesized)
ccaggcatagattaagtaactgggaacgccccctctttataaagctgggcttctttctcatctctctcccaaatgttgtatctcagtattcttcctattcgagtctccagggggtggctg

SEQ ID NO: 252248 - DNA, 120 bp, Artificial Sequence
  ENSG00000123643_18 (sequence is synthesized)
gacctacctggtcatttgaaacaggcccccaagctggagtttttaatctggactctctggcttgctgtgacccctaaggcaatgcttctcttccctggattccttagtgtgggtcacagt

SEQ ID NO: 252249 - DNA, 120 bp, Artificial Sequence
  ENSG00000123643_19 (sequence is synthesized)
actgtgttcttagttgctttagctcttaaaacatacgaagtgttgcctaaactgaaaatatttatcttttatttaaaatcagatttttgtttttagactgtcttagatctggggctatta

SEQ ID NO: 252250 - DNA, 120 bp, Artificial Sequence
  ENSG00000123643_20 (sequence is synthesized)
cgaatcacttcttcttcagtaaactttgactcaacttctcctgctgaaaagaagctcgctccagatgtctgcatgggtcctcggcactcttggctgaggactcaaaggttttaatcagga

SEQ ID NO: 252251 - DNA, 120 bp, Artificial Sequence
  ENSG00000123643_21 (sequence is synthesized)
tcgtctaaaaatgtacctcggtgaggaggcacagattttgcctcctgttgaccagcctggtttcataccgaaaagacattgaaggactgcagaaatgtatgggtgcaccgggccgaggga

SEQ ID NO: 252252 - DNA, 120 bp, Artificial Sequence
  ENSG00000123643_22 (sequence is synthesized)
agggtggctgagtgagaggcgtataaaatggggctgtgtgcatgcaggcccatgtttcagcctcagcccacgccaggtgaaaggatcagcaatgctctgttgccatcgtgctgggacgac

SEQ ID NO: 252253 - DNA, 120 bp, Artificial Sequence
  ENSG00000123643_23 (sequence is synthesized)
accagctctattgccaccgatgagtagctgaggtcagtgtgcacagagtttgaaattaagttaatagactttacagcagctggtctgacactacgcgcagtgctcggttgtttacaatca

SEQ ID NO: 252254 - DNA, 120 bp, Artificial Sequence
  ENSG00000123643_24 (sequence is synthesized)
gcagaaccagtgcccggccccacactgcctctgtggcctggactttgaaaggaacccactgaacactaattatgagccctgtctttcccccagaatgcctccctgggtttcacaaacagc

SEQ ID NO: 252255 - DNA, 120 bp, Artificial Sequence
  ENSG00000123643_25 (sequence is synthesized)
cttgaggttggccctcctcaaggtcagccttcagatttgggagcaaacttcagagaaggcagaggaagatacattgccttgctgtgggctgcctcttctttcctcttggtgtgcgaagta

SEQ ID NO: 252256 - DNA, 120 bp, Artificial Sequence
  ENSG00000123643_26 (sequence is synthesized)
tttcagaaggccattgatgaattccccctctttagctgtgtatttgtgcacgtgtgtgtgtacgtgcgtgtgtgtgtgtgttcctgtgtaagtaacagaccagactccttttctcttctg

SEQ ID NO: 252257 - DNA, 120 bp, Artificial Sequence
  ENSG00000123643_27 (sequence is synthesized)
tcccgtcaccaggctcttgcttcactgcagatacagttcactctgaaagctggttgaaggagagcagcaaaaatgtatcaggggttttgcttctgtgtttcgccaaagctcataagggct

SEQ ID NO: 252258 - DNA, 120 bp, Artificial Sequence
  ENSG00000123643_28 (sequence is synthesized)
gtgacccacccatatggccccagttttttctgtctcttctgttccaaagccaggagagctgacttccaggtgaagggatgggaaaagtggactctcattgtagtgactcccaacctacct

SEQ ID NO: 252259 - DNA, 120 bp, Artificial Sequence
  ENSG00000123643_29 (sequence is synthesized)
aataatttgttaacttaggaatatgctatcattgttgacttgttcttccttaggagaaggacgattttcacccaccctttctgttctatggtggactcttaacaggtgctatgtgaccag

SEQ ID NO: 252260 - DNA, 120 bp, Artificial Sequence
  ENSG00000123643_30 (sequence is synthesized)
gaatctagccgggagtagcagaggccctgtcttctgaagtctcaggcttagaagttaccaaagtgggctcagaaactgtcatctcctggttccaagttcgggctctggcagcccagccgc

SEQ ID NO: 252261 - DNA, 120 bp, Artificial Sequence
  ENSG00000123643_31 (sequence is synthesized)
tatcttagctgtctttcccagcggtgctaagagtggtctcagtgagaaggtagatgccaactggagggccagacctgtgtcctgcccatgtcctccttggtggacgtttctgtttactca

SEQ ID NO: 252262 - DNA, 120 bp, Artificial Sequence
  ENSG00000123643_32 (sequence is synthesized)
gagctgctagagaccatcctgcccatccgagttctgagattgggactgtgatgttgggacctgaggactggatggtagaatactggggtcccccagctcttagcaggatgcaggctattg

SEQ ID NO: 252263 - DNA, 120 bp, Artificial Sequence
  ENSG00000123643_33 (sequence is synthesized)
cttccacacccctggccgtgagaacgtggtatgtaggagagttggctgtagctttaggatttctggaagccaatttggcatggcctatttgatctctggcttgtgctcctgctacactga

SEQ ID NO: 252264 - DNA, 120 bp, Artificial Sequence
  ENSG00000123643_34 (sequence is synthesized)
cagactgattgcgtggctctttcagaagacccaggaagggcagctccagccagaggaccttcctggctatgcaggtgcacagctcttaggcatcaagcaaagggtcagccagtcagtagt

SEQ ID NO: 252265 - DNA, 120 bp, Artificial Sequence
  ENSG00000123643_35 (sequence is synthesized)
agtgggaggaagcccttcctcctcttatgcaagcagctcgcagccagcccagaatctcttatgcagcccaaagggcttcttgaggtagagagccctccccagtgtcttcccaggataagt

SEQ ID NO: 252266 - DNA, 120 bp, Artificial Sequence
  ENSG00000123643_36 (sequence is synthesized)
agaaatatgatcacagagcaacggagcaaaggctttcgggagtgtgaggctgcatctgctggagcaaagggaaaccgtgggcttttccggccagatactcttgagctctgtgaccctgct

SEQ ID NO: 252267 - DNA, 120 bp, Artificial Sequence
  ENSG00000123643_37 (sequence is synthesized)
cctgtcaccccaatttctccaagccagaggtagctttctcagagccccttggtggttctgtcctccaaatgctgctgttgggagcgggcttccagctctcagtgggcagtgcacctcctc

SEQ ID NO: 252268 - DNA, 120 bp, Artificial Sequence
  ENSG00000123643_38 (sequence is synthesized)
ctaaatgcaggcacttgctaggaagagtgtgagctggcgtcttctgttcaccctgcctagcagttgtcaccattcacaagtggcattatttatgttgtgctgctgtccagctgctaagat

SEQ ID NO: 252269 - DNA, 120 bp, Artificial Sequence
  ENSG00000123643_39 (sequence is synthesized)
cccttcatctgcacaagccctggctagatatgtgtgaatgtgtggcatcatttcacttcagccgcccaattccatctctcctctgcagccagattcactggctgatgctcactgctcact

SEQ ID NO: 252270 - DNA, 120 bp, Artificial Sequence
  ENSG00000123643_40 (sequence is synthesized)
gtctatccccacgaaatttagttttatcagtagtcttaaagtgttgatctcaaacaagtacattagaaaaatcatgtttcttctctctcatcttactttttcttctcagatttctccctt

SEQ ID NO: 252271 - DNA, 120 bp, Artificial Sequence
  ENSG00000123643_41 (sequence is synthesized)
cctagaacattctctctgtttagcactaatgttcacctcgtattttttggaagtgcaaaaatctcaatttgtgtctgtttacagctctctctcctcactgctcacagcaaggggttctgt

SEQ ID NO: 252272 - DNA, 120 bp, Artificial Sequence
  ENSG00000123643_42 (sequence is synthesized)
atcagtggatttcattttgtagctgctgagatgttaaggcaagcctcagcatctgcccctgctgggtgcacaatgctgcttcctcgaagagaagacacagagtccaagtggcaggacttg

SEQ ID NO: 252273 - DNA, 120 bp, Artificial Sequence
  ENSG00000123643_43 (sequence is synthesized)
aggttggcttccactctgccttagaagttaattttccaaagtacattacaaatctctgaggccattaggggaaaaggaaggggtgtggtttgtctttgaaattacggttaatacttttag

SEQ ID NO: 252274 - DNA, 120 bp, Artificial Sequence
  ENSG00000123643_44 (sequence is synthesized)
acagtaagtccggctggttgcagggctatttgccccgacagcatcagcctgtaacatttcttctctttcctttgtgccactgagtcgttccctggccagaggacataaatggtgctggta

SEQ ID NO: 252275 - DNA, 120 bp, Artificial Sequence
  ENSG00000123643_45 (sequence is synthesized)
ggaggttatcagagtaaggaaggtagcagatataggtgcagggtgcctgtcattcactgtgttatttggtttaaatcaaagtgattctgggggaagctatgctctttcagtggataataa

SEQ ID NO: 252276 - DNA, 120 bp, Artificial Sequence
  ENSG00000123643_46 (sequence is synthesized)
aattggtaactctattgtaaaacatgtcaatggtgtgtgaagaaaaatcaaccaatctgtaggtgttgataactagacagtactgtgtatgttacgtgcctgtgtggatgtgcacttcca

SEQ ID NO: 252277 - DNA, 120 bp, Artificial Sequence
  ENSG00000123643_47 (sequence is synthesized)
gcatggtatgtgtagcgatgtggatcatgccagagttcgtagatcctgttttggggtttgcacatggatcgtatgttaagctttttcttttcaataaatgaattttatttttatttttga

SEQ ID NO: 252278 - DNA, 120 bp, Artificial Sequence
  ENSG00000123643_48 (sequence is synthesized)
gagctcttcatccgcctgggcccaaccctggaactattcctttcaatggtgtcttttcttgccttgtttcagaaggatctactagttggccctatcttgtgccaagactgacagcaagga

SEQ ID NO: 252279 - DNA, 120 bp, Artificial Sequence
  ENSG00000123643_49 (sequence is synthesized)
caaggtcttccacagagagcaggttcctctctgtcttcagcatgtggagtctcaaatggaacagttctgggcagagtgctttgcacagagggtgctcccaataaatgttttatcactgca

SEQ ID NO: 252280 - DNA, 120 bp, Artificial Sequence
  ENSG00000123643_50 (sequence is synthesized)
gtttgtgcgcacagtgctggtctgcctgacatgagtgtaagttaaaagacaggatacccttctgtttgctgtggttgaaaactggtgacatttagaaaataaaagtaaattttttttgta

SEQ ID NO: 252281 - DNA, 120 bp, Artificial Sequence
  ENSG00000123643_51 (sequence is synthesized)
gccttctcttgtttcccatagaagaagctctcactgagtctgtttacttccacccaggccttggaagaatcctgtacctctctcctttggccaggccttactgtgatgagcacataaaga

SEQ ID NO: 252282 - DNA, 120 bp, Artificial Sequence
  ENSG00000123643_52 (sequence is synthesized)
attccatcgacagagaggagaaaatacatctggggaatttgccgctgctctgagttccaaagtccaaaccaatgtaattgtttcagaataacggatgacacttttagcttgcaaacaagg

SEQ ID NO: 252283 - DNA, 120 bp, Artificial Sequence
  ENSG00000123643_53 (sequence is synthesized)
tttttccctaaagggcacccagtctgcaggctttcatgagaaaagacaatgtgtgttgtagtgaagctggctatgtttgtgacagagaacctggcccatggcctcactttcagagttgag

SEQ ID NO: 252284 - DNA, 120 bp, Artificial Sequence
  ENSG00000123643_54 (sequence is synthesized)
gcacctccagatggggaagtgaattaattacatatgtactgtaaagaacatgggaatgaggacagtggtttatgtatagatagggtatgaaatgctgtggaggtggttatcattcagagt

SEQ ID NO: 252285 - DNA, 120 bp, Artificial Sequence
  ENSG00000123643_55 (sequence is synthesized)
gcggctgccgggcagcaaaggaggatggcgaggggctgatactgaacccgggaagggtgggctgtgctgaagccagagccggagccggagctgggcaggacccacctcgccttcctcccg

SEQ ID NO: 252286 - DNA, 120 bp, Artificial Sequence
  ENSG00000123684_0 (sequence is synthesized)
gtccgcgcccgccgaggtgagcccggcgcgcgggccgcgcccgccgccacgacccttccacatccgcggaaaccgctgcaggctccaccggctccccgcgctgcggtcgcctcttctctg

SEQ ID NO: 252287 - DNA, 120 bp, Artificial Sequence
  ENSG00000123684_1 (sequence is synthesized)
ggctccaccggctccccgcgctgcggtcgcctcttctctgcccctttcatcatcccctgcttccttgccctctggtcggaaatctcattctcttcatccccagttccttggcttttacct

SEQ ID NO: 252288 - DNA, 120 bp, Artificial Sequence
  ENSG00000123684_2 (sequence is synthesized)
ctttctggcttttgctcccttccccctactcctgtccttcctctttttcgcattataaccccctactttcttcctctcaccttgtaagctttttttctaggccccccattttttttctta

SEQ ID NO: 252289 - DNA, 120 bp, Artificial Sequence
  ENSG00000123684_3 (sequence is synthesized)
aaaaaaaaagggaaacaaaaaccctattgctacaaatgagaattttgagggtaactcttcgctagagccagagaccttttaaaggaatgcatcggtgtgcaggaatcgtggtggtgagga

SEQ ID NO: 252290 - DNA, 120 bp, Artificial Sequence
  ENSG00000123684_4 (sequence is synthesized)
gactgaggtcctcagtatctgggaaatcttattgaggggaccctgtttcggtcatgtcacttgtgtcttcagtttggagatcctgaggttgtctgaagcgagtggatctatttttctaag

SEQ ID NO: 252291 - DNA, 120 bp, Artificial Sequence
  ENSG00000123684_5 (sequence is synthesized)
tccaatagacgaccgcagtgagacacggtgcggggacggccaccgattactgaatgggaattgtgttatcatttgctaaatatattgtgacatacttcgtgcctcggtgaacagctccct

SEQ ID NO: 252292 - DNA, 120 bp, Artificial Sequence
  ENSG00000123684_6 (sequence is synthesized)
tgaccttgtgcggctcctcctccctcgctctctgtccccctctggaatttcccctgagagatcaccgagaaagacaggacggagtccagtgtgagaatggctataactttggaagaagct

SEQ ID NO: 252293 - DNA, 120 bp, Artificial Sequence
  ENSG00000123684_7 (sequence is synthesized)
ccgtggctgggctggctcttggtgaaagcactgatgaggtttgccttcatggtcgtcaacaacctggttgctattccatcctacatctgctatgtaattatacttcagccccttcgagtg

SEQ ID NO: 252294 - DNA, 120 bp, Artificial Sequence
  ENSG00000123684_8 (sequence is synthesized)
ttaaagcagtttcaaaagatgaagcagtgatgttggtgaatcatcaggcaacaggagatgtgtgcacactgatgatgtgcctccaggacaaaggactggttgttgctcagatgatgtggt

SEQ ID NO: 252295 - DNA, 120 bp, Artificial Sequence
  ENSG00000123684_9 (sequence is synthesized)
tgatggatcatatttttaagtacacaaactttggaattgtttctctagttcatggagacttctttataagacagggaagatcttatcgtgaccaacagctgctgcttctcaagaagcact

SEQ ID NO: 252296 - DNA, 120 bp, Artificial Sequence
  ENSG00000123684_10 (sequence is synthesized)
tagaaaataattacaggagcagagatcgaaaatggattgttttgtttccagaagggggcttcctcaggaagaggcgagaaacaagtcaggcatttgccaagaaaaataacttgccatttc

SEQ ID NO: 252297 - DNA, 120 bp, Artificial Sequence
  ENSG00000123684_11 (sequence is synthesized)
ttacaaatgttactctgccaaggtctggggcaacaaaaattattttgaatgcacttgtagcacaacagaaaaatggaagtccagcaggaggagatgctaaagaattagacagcaaatcaa

SEQ ID NO: 252298 - DNA, 120 bp, Artificial Sequence
  ENSG00000123684_12 (sequence is synthesized)
aaggcctccagtggataatagatacaacgatagcttatcccaaagctgaacctatagatattcaaacctggatccttggatacaggaaaccaacagtcacacatgtacattacaggatct

SEQ ID NO: 252299 - DNA, 120 bp, Artificial Sequence
  ENSG00000123684_13 (sequence is synthesized)
ttccaattaaagatgtacccctggagactgatgaccttaccacttggctctatcagcggtttgttgaaaaagaagacctcttatcacatttttatgaaacaggagcttttccaccttcca

SEQ ID NO: 252300 - DNA, 120 bp, Artificial Sequence
  ENSG00000123684_14 (sequence is synthesized)
agggccataaggaagctgtttccagggagatgaccctcagcaacttgtggatatttctcatacagtcttttgcatttttgtcaggctatatgtggtacaacatcattcagtatttttacc

SEQ ID NO: 252301 - DNA, 120 bp, Artificial Sequence
  ENSG00000123684_15 (sequence is synthesized)
attgcctgttttaggaattgacgtggacttgtcaaggtcaccgtaggagttcagactttctttcataagtgtgcattattttacatgtgcaaatcagaatatatttaaaaaaaagcaaaa

SEQ ID NO: 252302 - DNA, 80 bp, Artificial Sequence
  ENSG00000123684_16 (sequence is synthesized)
ggccgcgccacagccggagcggggcagggccccgccaccgccttcttccgccggccccgccgccggccatgcattcttcc

SEQ ID NO: 252303 - DNA, 120 bp, Artificial Sequence
  ENSG00000123684_17 (sequence is synthesized)
ccgccgccggccatgcattcttccggctcctctgactcccaaagccccggctggggcccggccagcccgagaaagacaggacggagtccagtgtgagaatggctataactttggaagaag

SEQ ID NO: 252304 - DNA, 120 bp, Artificial Sequence
  ENSG00000123684_18 (sequence is synthesized)
attcaatggatggattaatatttatccccctttgggatattttaaaatctactaaaatgaggattagtaatataatgacctgctaatatattttaagaacatgttttaaaaagatacact

SEQ ID NO: 252305 - DNA, 120 bp, Artificial Sequence
  ENSG00000123684_19 (sequence is synthesized)
ctatcacatatttaagcaaacatcacatttggagaagaggaaatcataaaatcatcctagaagactatctgagagaaattctgttgccaccagttatacttgacaatttagttgaagctc

SEQ ID NO: 252306 - DNA, 120 bp, Artificial Sequence
  ENSG00000123684_20 (sequence is synthesized)
agaaagttatattcatccctcttagctgtagtctatattagggcagttctctagaacgcccacatttccaccaactcagtaaacttgaggggagctggttggcacctcgtgaagaactct

SEQ ID NO: 252307 - DNA, 120 bp, Artificial Sequence
  ENSG00000123684_21 (sequence is synthesized)
ttccctgtcgtttgcagtaacaaactccagtctgttgcagtaacaaactccagtctgttgcagtaacaaactctagaatattgacattctctgtgggggaaaagcagtgtccactggacc

SEQ ID NO: 252308 - DNA, 120 bp, Artificial Sequence
  ENSG00000123684_22 (sequence is synthesized)
ccttctggtactggatgtgttctttacaaaggctagctcagtccaacactgtgtttacatacactcgtgcttttccttatctgacttctcattttgtatcagaggcatatcataaattga

SEQ ID NO: 252309 - DNA, 120 bp, Artificial Sequence
  ENSG00000123684_23 (sequence is synthesized)
taattttgcaaaatgcacttttttgagatgcagatatagcaaaggattagtaatatagcctgaaaacaaatgggagcatagcagtgtgtgaggttctcgagaactgtcttgtctctgtgt

SEQ ID NO: 252310 - DNA, 120 bp, Artificial Sequence
  ENSG00000123684_24 (sequence is synthesized)
gtttatttgcctgccagtgctctccagcgccatcctgccctggacaccaccctgacgtgatgcctctattgcagctcagaggctttattttttccattttgacattggcactaaatgcat

SEQ ID NO: 252311 - DNA, 120 bp, Artificial Sequence
  ENSG00000123684_25 (sequence is synthesized)
ttggggatggttaaaacaaattactatagaacatttaaatgatcagtttaaggggaaataggctagtttatagaaaaataagagctagtggcttataatggtgacaggttctcatgtggc

SEQ ID NO: 252312 - DNA, 120 bp, Artificial Sequence
  ENSG00000123684_26 (sequence is synthesized)
acccctaggacctgtgcagacagtagtctgttgaatcattacatcaaggagctgcccctgtcagggtgagtgtaattaggaacgataccagcacataaggctccccccaatctcttccag

SEQ ID NO: 252313 - DNA, 120 bp, Artificial Sequence
  ENSG00000123684_27 (sequence is synthesized)
ataccagcacataaggctccccccaatctcttccagttgctttttcttttttcttttttttttagacaggtcttactctgtcacccaggctgtagtgcagtggcataatctcagctcact

SEQ ID NO: 252314 - DNA, 120 bp, Artificial Sequence
  ENSG00000123684_28 (sequence is synthesized)
tgcaggcgtgagccaccacgcccggcctccagttgcttttgaagagggtaaagtcaagtttctatttctagaaaacattttttagaaatttgttgcgatgtttgtacaatttacctcata

SEQ ID NO: 252315 - DNA, 120 bp, Artificial Sequence
  ENSG00000123684_29 (sequence is synthesized)
tttagaaatttgttgcgatgtttgtacaatttacctcataagagaaccacacccttctccaaaagtgctggtactgcatcagtgagatgagtagggtttttgtttgggattgtaagacta

SEQ ID NO: 252316 - DNA, 120 bp, Artificial Sequence
  ENSG00000123684_30 (sequence is synthesized)
ttaagatcctagtaagtcagtggtagtttactgtgatgtgagcattgtagattcccccgttgtcactaatcacacaacaattttgagaagtaggctataaaacaaaaaaaggttgctgtt

SEQ ID NO: 252317 - DNA, 120 bp, Artificial Sequence
  ENSG00000123684_31 (sequence is synthesized)
ttctatttttaaataaaccaaaaaaaaacagaaaagatgtgaattttccccagttatgtgggaaaggtaaagcaacaccaaataaaagcccacagcagcttcatctttacgataactcag

SEQ ID NO: 252318 - DNA, 120 bp, Artificial Sequence
  ENSG00000123684_32 (sequence is synthesized)
tgcatatgtgaaagagaatgatgcattaactgaaatacctcattgaatattatactactactggtaaaatgcagaagacagtgttaatgtgtttggtttggggactggttgttataaaat

SEQ ID NO: 252319 - DNA, 120 bp, Artificial Sequence
  ENSG00000123684_33 (sequence is synthesized)
gcaatttttttttaaatctaagcatttcattatgtgttctacagtgtcggtgaataaatgaaaccaatctcaatttagaggtatggatgatgacagaaagcccaatagaagcttaatgat

SEQ ID NO: 252320 - DNA, 120 bp, Artificial Sequence
  ENSG00000123684_34 (sequence is synthesized)
gcttctgtttgaggcccagcaagcaccactaaattactggatgaaatgaaattgttcacttgagggattagtcaaccatctgggggagaagttgctcactgtcaaatacagcatgcacgg

SEQ ID NO: 252321 - DNA, 120 bp, Artificial Sequence
  ENSG00000123684_35 (sequence is synthesized)
tcctagctgatagaccttttcctcattgctacagcaagccacagggtagagtgaccagttctcctatccaaaaataaatgcgaacatgcatacataaatgtggctgagggccacttttgc

SEQ ID NO: 252322 - DNA, 120 bp, Artificial Sequence
  ENSG00000123684_36 (sequence is synthesized)
catcactgtgctccaaaggaacatgatattgttaaatatactgtacacattaaactattctataagatgctttacttttcaagtacggtgtcattttcacagtctccagggtgacaaatg

SEQ ID NO: 252323 - DNA, 120 bp, Artificial Sequence
  ENSG00000123684_37 (sequence is synthesized)
atgttctctctcttctgtttgcaaaatatgtttgaaagcattggtagtgctttccttatcagtaactggagttctcctgcttgcactagagaaggtaaagagagaatcagtattcttata

SEQ ID NO: 252324 - DNA, 120 bp, Artificial Sequence
  ENSG00000123684_38 (sequence is synthesized)
tggcaatctggggaagcagcaatatgccactgtacaaaactgaagaaaagttcctaatttgtactttgtgaagggagatgaaaggacgtttaaagtatatatattttgtcaagaggaaag

SEQ ID NO: 252325 - DNA, 120 bp, Artificial Sequence
  ENSG00000123684_39 (sequence is synthesized)
aagataaaactatgccagttttatatcaatagcttgtagaagctcagctcttcttggtcttggctagactgcctagattcccacagcagacaaggttgagaatccattgctggaatcttg

SEQ ID NO: 252326 - DNA, 120 bp, Artificial Sequence
  ENSG00000123684_40 (sequence is synthesized)
gtattgatgagttacagtgatggaacatgtgcttggccacaggcaggtccagtcactgcaaaagtgaccaagccagcaggtcacccttaacttcagaaacaattattggtggtgaactgt

SEQ ID NO: 252327 - DNA, 120 bp, Artificial Sequence
  ENSG00000123684_41 (sequence is synthesized)
ccttaacttcagaaacaattattggtggtgaactgtacttaaattgcagagaaacctgtaagtaatggaaggtaaagaaaaattacagaatggaaaataatattttgggcaagcaaacaa

SEQ ID NO: 252328 - DNA, 120 bp, Artificial Sequence
  ENSG00000123684_42 (sequence is synthesized)
gatagctatgagttcagatctatcttattggtctttaatattacaaccaatccttaactttccactataaaggaaggattactagattgattactttctggatagataatctggtaataa

SEQ ID NO: 252329 - DNA, 120 bp, Artificial Sequence
  ENSG00000123684_43 (sequence is synthesized)
atgataggtaaatcaaaaattacttttatttaggagtttgaattcttactctcatcagacattttttttctagggacgcttactaattaaatgatttaagttgtttcttaggggtttttt

SEQ ID NO: 252330 - DNA, 120 bp, Artificial Sequence
  ENSG00000123684_44 (sequence is synthesized)
gcctatatatttatgactgtgttaatgagtagtgaaatgatgcggaaagacagctatcaggaagaggaaatacagaagcctgaataatctatgggttagaaaagcatccctgaataatca

SEQ ID NO: 252331 - DNA, 120 bp, Artificial Sequence
  ENSG00000123684_45 (sequence is synthesized)
aaaattggcagtattggcattgttctcaagcctttttatgaaaatgaaatctgaaatcaccaaatgtaaacctgggaacattattctagtgttgctgtcttggattcatgttaagaagcg

SEQ ID NO: 252332 - DNA, 120 bp, Artificial Sequence
  ENSG00000123684_46 (sequence is synthesized)
tcttcattctttgctcatgttgcccacttcttgtggatttgtctgagtgttttttgacaatcacttccttaaagactcttctgaactagttggacctggttaatcatagagagtagcctt

SEQ ID NO: 252333 - DNA, 120 bp, Artificial Sequence
  ENSG00000123684_47 (sequence is synthesized)
taatcatggatagtcttcttggattatttttatatttgaaaagaaaatgttttatttgcactactgagtaggaagagttaattgttttctttgttctttttttgaagtcattacacagga

SEQ ID NO: 252334 - DNA, 120 bp, Artificial Sequence
  ENSG00000123684_48 (sequence is synthesized)
cttcactccagagttaccattatgagtgtgttcagctctggtccacagaggatggataaaaatggtttgttatgtttttttgctctgcagtgctatgagccttatatctgttaatatgaa

SEQ ID NO: 252335 - DNA, 120 bp, Artificial Sequence
  ENSG00000123684_49 (sequence is synthesized)
ggacaaagtcaaaagcagcagtggatagcaggaagggtagagactaatatgtttgggaccaaaaccatctaagttagagatttccagatcacagaggggctgggcattctctggagcagt

SEQ ID NO: 252336 - DNA, 120 bp, Artificial Sequence
  ENSG00000123684_50 (sequence is synthesized)
cattggttggtgctttattgtaatcattttgcgccaatccccaacaattaggaactggaccctgggaataagctgagggtgctgaactgttggggaagggtgactgtagccacatggaag

SEQ ID NO: 252337 - DNA, 120 bp, Artificial Sequence
  ENSG00000123684_51 (sequence is synthesized)
ataaaatatgggtttttctgcaaaatttccatctgagggtttttacatttaatatttttttaagacagtttaaagagcaaacgttttttaagtgtattctagttgcaaagtatgcacaca

SEQ ID NO: 252338 - DNA, 120 bp, Artificial Sequence
  ENSG00000123684_52 (sequence is synthesized)
tatcttgaatggctttatttttattgtgtaaaactgttgaacacatgactgtgatgcacaaattctttacgtgtaaggagtctatgcattttacagtaacttattttatgatcgggtgat

SEQ ID NO: 252339 - DNA, 120 bp, Artificial Sequence
  ENSG00000123684_53 (sequence is synthesized)
gagacagttatactttcaactgccattatttttattaagtgctttcattttctttacagttattataaaattgtatttattttatacagatgggttttcattttcctgatgctgtaatgt

SEQ ID NO: 252340 - DNA, 120 bp, Artificial Sequence
  ENSG00000123684_54 (sequence is synthesized)
ttacttcagcttgttgacctttctttgtgttatctgcatgttgtaacgtgtgataagaatgaatgtaaaggctgtggcaactgtaattaatttttgtaaagggctggtcacacgtggatc

SEQ ID NO: 252341 - DNA, 120 bp, Artificial Sequence
  ENSG00000123684_55 (sequence is synthesized)
tggtttatgaatgcatttgggatgattttggtaaccagatcaccttttcagaaatttagatgtgaacaccaaaagaagcattttctcaacaaaaattaatagctggttctatttttttta

SEQ ID NO: 252342 - DNA, 120 bp, Artificial Sequence
  ENSG00000123684_56 (sequence is synthesized)
aacctagaaaaaataaagttgatttttttcaattaaagtgcttttaattcttagcagtggggatggggcatgtgtgttttaccagagctatttgggcattaatatctgcaggcaagtact

SEQ ID NO: 252343 - DNA, 120 bp, Artificial Sequence
  ENSG00000123684_57 (sequence is synthesized)
taaagcacactgtggcagttggatgctgaaggcaaactgaaaaaccaaatgaaaaaacatcagacttccttctttggtttaaaaatatttccccctttctccccattctcccaatccagt

SEQ ID NO: 252344 - DNA, 120 bp, Artificial Sequence
  ENSG00000123684_58 (sequence is synthesized)
ggtgtgctggtaaatgtttagcagttcactcttctgggagaaaattatgtattcaactatacatgtttgttataaattttgctgatagcaagaacatataacacaattaacaaataataa

SEQ ID NO: 252345 - DNA, 120 bp, Artificial Sequence
  ENSG00000123684_59 (sequence is synthesized)
gatacaaatactttattgtaaatcccatatagccagttgattctcacagtatacttagttgctcaggaaagaactaaaatgcttttttaaaaggatacttaattgctttttgctcaactc

SEQ ID NO: 252346 - DNA, 120 bp, Artificial Sequence
  ENSG00000123684_60 (sequence is synthesized)
ctacagtcaacctatgattgattgtctttcaactgtgatttgaaaaatggcagactgtccaaatctaactcatttcccaataaatttattatcattcaatctgatacgtgatctactgtt

SEQ ID NO: 252347 - DNA, 120 bp, Artificial Sequence
  ENSG00000123684_61 (sequence is synthesized)
aaaactgtttcttaccatggtacatattagactcattaagccgaaaccacttttagctttaacattaattgtaaatttatatgattcaattttcataaccaatgcttaacaactgcaggc

SEQ ID NO: 252348 - DNA, 120 bp, Artificial Sequence
  ENSG00000123684_62 (sequence is synthesized)
aaaattctaaaatgtgaccactgggtcttgggaatcagtaggggctgtatccagcacaccactgccccatcctttttttcttaactattagtgttgaataaacttctcatagttaatcta

SEQ ID NO: 252349 - DNA, 120 bp, Artificial Sequence
  ENSG00000123684_63 (sequence is synthesized)
cttgctgaactcaggaaattcctatcactgaccctggccagggctttaaagggtaggaaaagcattaatgtcagtcctacacagcgaacttttgatttagaagaatgtgacagaaagaaa

SEQ ID NO: 252350 - DNA, 120 bp, Artificial Sequence
  ENSG00000123684_64 (sequence is synthesized)
acatttactgaaatacatgggaagcttgcatatttctaaagttgtctttatacttttcatttctcaaagctaagtaaactgtggtataggcatctctaagatgttagcatttaaaacatc

SEQ ID NO: 252351 - DNA, 120 bp, Artificial Sequence
  ENSG00000123684_65 (sequence is synthesized)
aattgttttattgatgtttaaacaattgtttaaatcccactgaaaaatttaaatattaaaatatcttgcacagtctaccaaatgagttaaatcgttacagtcgtgtctacctcttatttt

SEQ ID NO: 252352 - DNA, 120 bp, Artificial Sequence
  ENSG00000123684_66 (sequence is synthesized)
tctatctgtatttaggctgctgttttggtgagattctaatttctttttcccctggaactactttctgtggaagacaaggaacagactggggacagaggcctgaaaacaaattggaagcac

SEQ ID NO: 252353 - DNA, 120 bp, Artificial Sequence
  ENSG00000123684_67 (sequence is synthesized)
tcagagatctattgctgaccagccctattcctcatgagttggcggggggaaagccattgtttttaatttccacttaatatgaaaatgcttgtttttaaaatgttttttcctgctgaacaa

SEQ ID NO: 252354 - DNA, 120 bp, Artificial Sequence
  ENSG00000123684_68 (sequence is synthesized)
atgtatttttaaaaggaaaaaaattctcttttggctctaagaagtcagctgtatgagcaggcgtgaccatatcataacatgctgatatgatagaaatcaataaatttttacctctcagga

SEQ ID NO: 252355 - DNA, 120 bp, Artificial Sequence
  ENSG00000123684_69 (sequence is synthesized)
ccgcttgggccgccaccgcgtccatgaccgcgacccctcggcgggggacacccgcccccgctctccgcagccgcccgccgtccgcgcccgccgagacaggacggagtccagtgtgagaat

SEQ ID NO: 252356 - DNA, 120 bp, Artificial Sequence
  ENSG00000123684_70 (sequence is synthesized)
aacttagttctaaactttcggatgttttagctaggtgacatatcatcattaatatacatcattttttctaatataaggtttgtgataatataaaaatctttaaaatgacagctttgaaac

SEQ ID NO: 252357 - DNA, 80 bp, Artificial Sequence
  ENSG00000123685_0 (sequence is synthesized)
gggcggggcgggccgggccagaggagcgcccggcatgtcgcaagggctcccggccgccggcagcgtcctgcagaggagcg

SEQ ID NO: 252358 - DNA, 120 bp, Artificial Sequence
  ENSG00000123685_1 (sequence is synthesized)
agcgtcgcggcgcccgggaaccagccgcagccgcagccgcagcagcagagccctgaggatgatgacaggaaggtccgaaggagagaaaaaaaccgagttgctgctcagagaagtcggaag

SEQ ID NO: 252359 - DNA, 120 bp, Artificial Sequence
  ENSG00000123685_2 (sequence is synthesized)
aagcagacccagaaggctgacaagctccatgaggaatatgagagcctggagcaagaaaacaccatgctgcggagagagatcgggaagctgacagaggagctgaagcacctgacagaggca

SEQ ID NO: 252360 - DNA, 120 bp, Artificial Sequence
  ENSG00000123685_3 (sequence is synthesized)
ctctgcccagcaaggagccttggtcattttcatacctgggaggaaggcttttccttcacaattgtatacagggggcacctgtggccaggcctcctcctgggagctccaggaccagccagc

SEQ ID NO: 252361 - DNA, 120 bp, Artificial Sequence
  ENSG00000123685_4 (sequence is synthesized)
tgtgttccctgcagactgggctcagcccgacatccaacaggcgccaaactcacagagcccttgtgcagatccagcatggaggccaccctcaggagtgacttctcatccaccctggcagct

SEQ ID NO: 252362 - DNA, 120 bp, Artificial Sequence
  ENSG00000123685_5 (sequence is synthesized)
agtaggttctgctgttatgcagagccatttcctctagaatttggataataaagatgcttattgtctctcccttctccagttctgggaatttacaggcacaatacacttccttttcctgga

SEQ ID NO: 252363 - DNA, 120 bp, Artificial Sequence
  ENSG00000123685_6 (sequence is synthesized)
attaaatgtttctgctgggttggcaggtgtgatcatggtgatgagtccagtttagagtcagctccccgagggcagtatgcaggctgctttcttgtgctagtgactttttgattacagaga

SEQ ID NO: 252364 - DNA, 120 bp, Artificial Sequence
  ENSG00000123685_7 (sequence is synthesized)
gcaaagaggcatgagaagcactatgcagaatacatttttttttaaagtagcaacttcaacaaaggcaggtaacttcttgagggcatactgtatgctgggagctttaggacaaaatctcat

SEQ ID NO: 252365 - DNA, 120 bp, Artificial Sequence
  ENSG00000123685_8 (sequence is synthesized)
ttcatcgcatcccaatcctaagcattaggctgttagcaccaagtctgcagagttcactgaccctttgtttagggcttgtatccccagtgtctagaacagtgtctggcacatggtaggtgc

SEQ ID NO: 252366 - DNA, 120 bp, Artificial Sequence
  ENSG00000123685_9 (sequence is synthesized)
tcagttaatacatattgaaagaatgaatgaattatgcttacaataaatgagaaaactgaaaatttagagaatttaaaccatttacacaagaccatgttgacactaagagacaaaactagg

SEQ ID NO: 252367 - DNA, 120 bp, Artificial Sequence
  ENSG00000123685_10 (sequence is synthesized)
atctgtgtgattctaaagctaaagagctgtcttctaaccacatgttcccctgtaatgttctggttttgtttatcaagacttctttgcctctctagaagactgtattatcatactttgttc

SEQ ID NO: 252368 - DNA, 120 bp, Artificial Sequence
  ENSG00000123685_11 (sequence is synthesized)
ccttaagcttctatttgctatgtatgttatttattcctctcctttttatgcctttatattcttgcatatctgaaacttcttacctgcagtaacttgggaagatgtgtgtcttatgtggaa

SEQ ID NO: 252369 - DNA, 120 bp, Artificial Sequence
  ENSG00000123685_12 (sequence is synthesized)
tacaagatgagatcaaatgataactgaaaatatccttttttgtgttattaatatttgcattccgtgaatattaataactgagtagttttccttgtttgtacctcttggctcttaaactct

SEQ ID NO: 252370 - DNA, 120 bp, Artificial Sequence
  ENSG00000123685_13 (sequence is synthesized)
gtaagtgtggtatttttcccgcttggtggtgtcttctcatggggttctagaaagcaaatactgctctcctttttcatgttttctatagctgattgaagtgtttttaccatggtcagtgca

SEQ ID NO: 252371 - DNA, 120 bp, Artificial Sequence
  ENSG00000123685_14 (sequence is synthesized)
tttttccgcctgcctgtttcatgatcactattgagggatttgactgaatttggttaaatcttacatatagctaacagctttcaagacacataaaaaatttgctgacttctgaaacaaaat

SEQ ID NO: 252372 - DNA, 120 bp, Artificial Sequence
  ENSG00000123685_15 (sequence is synthesized)
ctgcaattagttgtaagtgtaatcatgatttgcatgcagtatcaaaagtacctttcatgtgtggtggtataaggactggcaaacagcaagttccagatagcagatctctccaccgccccc

SEQ ID NO: 252373 - DNA, 120 bp, Artificial Sequence
  ENSG00000123685_16 (sequence is synthesized)
cacccccacccagctttccagtctcagatggacgacattgacaccacagctcttccaggcacacgccctgtgggctagaggtttatgaacgttgatttggagaccaacagacctgagttc

SEQ ID NO: 252374 - DNA, 120 bp, Artificial Sequence
  ENSG00000123685_17 (sequence is synthesized)
cacttcccactcacccacttagtggctgtaatacctggagcaaggtccttaacctctctgagtttcttattcctcatcttttaaacggcggtcacaccacacacttcacacactcacatg

SEQ ID NO: 252375 - DNA, 120 bp, Artificial Sequence
  ENSG00000123685_18 (sequence is synthesized)
gtgagtgctcctgggcaaggggctgttgtgagcccattggtatagcaactagtggtgctgtctactgcaaagcaaatgatgaagctcagtgaacaacgctgagtgatgagacagggcaga

SEQ ID NO: 252376 - DNA, 120 bp, Artificial Sequence
  ENSG00000123689_0 (sequence is synthesized)
tgccagcggcggagtctccaactgggagagctgcagctgccgagaggaggagaacgctgaggtcggtcggaccaacggacgcgctgaccgctgccaactgcagctcgcgctgcctcctgc

SEQ ID NO: 252377 - DNA, 120 bp, Artificial Sequence
  ENSG00000123689_1 (sequence is synthesized)
tcgcgccgtgccactaaggtcattcccgcctccgagagcccagagccgagatggaaacggtccaggagctgatccccctggccaaggagatgatggcccagaagcgcaaggggaagatgg

SEQ ID NO: 252378 - DNA, 120 bp, Artificial Sequence
  ENSG00000123689_2 (sequence is synthesized)
tgaagctgtacgtgctgggcagcgtgctggccctcttcggcgtggtgctcggcctgatggagactgtgtgcagccccttcacggccgccagacgtctgcgggaccaggaggcagccgtgg

SEQ ID NO: 252379 - DNA, 120 bp, Artificial Sequence
  ENSG00000123689_3 (sequence is synthesized)
agaagcaagccctgcaggagaaaggcaagcagcaggacacggtcctcggcggccgggccctgtccaaccggcagcacgcctcctaggaactgtgggagaccagcggagtgggagggagac

SEQ ID NO: 252380 - DNA, 120 bp, Artificial Sequence
  ENSG00000123689_4 (sequence is synthesized)
gcagtagacagagacagaccgagagaggaatggagagacagagggggcgcgcgcacaggagcctgactccgctgggagagtgcaggagcacgtgctgttttttatttggacttaacttca

SEQ ID NO: 252381 - DNA, 120 bp, Artificial Sequence
  ENSG00000123689_5 (sequence is synthesized)
gagaaaccgctgacatctagaactgacctaccacaagcatccaccaaaggagtttgggattgagttttgctgctgtgcagcactgcattgtcatgacatttccaacactgtgtgaattat

SEQ ID NO: 252382 - DNA, 120 bp, Artificial Sequence
  ENSG00000123689_6 (sequence is synthesized)
ctaaatgcgtctaccattttgcactagggaggaaggataaatgctttttatgttattattattaattattacaatgaccaccattttgcattttgaaataaaaaaactttttataccata

SEQ ID NO: 252383 - DNA, 120 bp, Artificial Sequence
  ENSG00000123700_0 (sequence is synthesized)
gcgcactggagccctggccagcgcgcagccttcccggcgccggcgggctgggtcttgggaattctggtttgctttggctcactcgctttttacaaaccactggatcttacatgcctctgt

SEQ ID NO: 252384 - DNA, 120 bp, Artificial Sequence
  ENSG00000123700_1 (sequence is synthesized)
accccccacttccactccatgtccccatgctcctgcgccagcaacaggacatgttctctggatgtcagctgagtcattaaagtaactctgcatgtcagtagacagaccttggtagaacca

SEQ ID NO: 252385 - DNA, 120 bp, Artificial Sequence
  ENSG00000123700_2 (sequence is synthesized)
caaggctcccagagacacccatctctcctcatttttttggtgtgtgtgtcttcaccgaacattcaaaactgtttctccaaagcgttttgcaaaaactcagactgttttccaaagcagaag

SEQ ID NO: 252386 - DNA, 120 bp, Artificial Sequence
  ENSG00000123700_3 (sequence is synthesized)
cactggagtccccagcagaagcgatgggcagtgtgcgaaccaaccgctacagcatcgtctcttcagaagaagacggtatgaagttggccaccatggcagttgcaaatggctttgggaacg

SEQ ID NO: 252387 - DNA, 120 bp, Artificial Sequence
  ENSG00000123700_4 (sequence is synthesized)
ggaagagtaaagtccacacccgacaacagtgcaggagccgctttgtgaagaaagatggccactgtaatgttcagttcatcaatgtgggtgagaaggggcaacggtacctcgcagacatct

SEQ ID NO: 252388 - DNA, 120 bp, Artificial Sequence
  ENSG00000123700_5 (sequence is synthesized)
tcaccacgtgtgtggacattcgctggcggtggatgctggttatcttctgcctggctttcgtcctgtcatggctgttttttggctgtgtgttttggttgatagctctgctccatggggacc

SEQ ID NO: 252389 - DNA, 120 bp, Artificial Sequence
  ENSG00000123700_6 (sequence is synthesized)
tggatgcatccaaagagggcaaagcttgtgtgtccgaggtcaacagcttcacggctgccttcctcttctccattgagacccagacaaccataggctatggtttcagatgtgtcacggatg

SEQ ID NO: 252390 - DNA, 120 bp, Artificial Sequence
  ENSG00000123700_7 (sequence is synthesized)
aatgcccaattgctgttttcatggtggtgttccagtcaatcgtgggctgcatcatcgatgctttcatcattggcgcagtcatggccaagatggcaaagccaaagaagagaaacgagactc

SEQ ID NO: 252391 - DNA, 120 bp, Artificial Sequence
  ENSG00000123700_8 (sequence is synthesized)
ttgtcttcagtcacaatgccgtgattgccatgagagacggcaagctgtgtttgatgtggcgagtgggcaatcttcggaaaagccacttggtggaagctcatgttcgagcacagctcctca

SEQ ID NO: 252392 - DNA, 120 bp, Artificial Sequence
  ENSG00000123700_9 (sequence is synthesized)
aatccagaattacttctgaaggggagtatatccctctggatcaaatagacatcaatgttgggtttgacagtggaatcgatcgtatatttctggtgtccccaatcactatagtccatgaaa

SEQ ID NO: 252393 - DNA, 120 bp, Artificial Sequence
  ENSG00000123700_10 (sequence is synthesized)
tagatgaagacagtcctttatatgatttgagtaaacaggacattgacaacgcagactttgaaatcgtggtcatactggaaggcatggtggaagccactgccatgacgacacagtgccgta

SEQ ID NO: 252394 - DNA, 120 bp, Artificial Sequence
  ENSG00000123700_11 (sequence is synthesized)
gctcttatctagcaaatgaaatcctgtggggccaccgctatgagcctgtgctctttgaagagaagcactactacaaagtggactattccaggttccacaaaacttacgaagtccccaaca

SEQ ID NO: 252395 - DNA, 120 bp, Artificial Sequence
  ENSG00000123700_12 (sequence is synthesized)
ctcccctttgtagtgccagagacttagcagaaaagaaatatatcctctcaaatgcaaattcattttgctatgaaaatgaagttgccctcacaagcaaagaggaagacgacagtgaaaatg

SEQ ID NO: 252396 - DNA, 120 bp, Artificial Sequence
  ENSG00000123700_13 (sequence is synthesized)
gagttccagaaagcactagtacggacacgccccctgacatagaccttcacaaccaggcaagtgtacctctagagcccaggcccttacggcgagagtcggagatatgactgactgattcct

SEQ ID NO: 252397 - DNA, 120 bp, Artificial Sequence
  ENSG00000123700_14 (sequence is synthesized)
tctctggaatagttactttacaacacggtctgttggtcagaggcccaaaacagttatacagatgacggtactggtcaagatgggtcaagcaagcggccacaagggactgaggcaagcaca

SEQ ID NO: 252398 - DNA, 120 bp, Artificial Sequence
  ENSG00000123700_15 (sequence is synthesized)
atggtttcaaagaaagactgtaagctccatgattagcataaagcactaaccatgtctccatgtgacccgatggcacatagatgttgtagaataagttatgggtttttatgttttgttttg

SEQ ID NO: 252399 - DNA, 120 bp, Artificial Sequence
  ENSG00000123700_16 (sequence is synthesized)
tgtttttccaaaacttgaacttgcaggcaagccttggttgggtatttgatttatccagaatgcttctctttagggaacaaggatgtttttaatggcataacaaaggcaagactctgcctt

SEQ ID NO: 252400 - DNA, 120 bp, Artificial Sequence
  ENSG00000123700_17 (sequence is synthesized)
aatttttgaaaagctgctaactacatgaacacaaatgtgtatttttgttgcagtgtagttttccttttgtgtaattttaaagtcagtgttgaattttattgaaagctcatgatgcgcttc

SEQ ID NO: 252401 - DNA, 120 bp, Artificial Sequence
  ENSG00000123700_18 (sequence is synthesized)
aaagtggcaagtatttggctattaactgccaaaacaagagcctgattttttgaggccagtaattcgtttgctagaattgattttttttctctctctctttgttacataagggcattatgt

SEQ ID NO: 252402 - DNA, 120 bp, Artificial Sequence
  ENSG00000123700_19 (sequence is synthesized)
aacactagccgaatggtagcctctgggttgttgtttttttcttttcctccatgatgttaatgggttatctcaaattttaagttaaactacctaaaataaataccaaagataatgcatatt

SEQ ID NO: 252403 - DNA, 120 bp, Artificial Sequence
  ENSG00000123700_20 (sequence is synthesized)
tttgcacagtggagcttacacttaaaagaaaacaaagccccatgggctgccttgaaatcaagagacaataactttgaacctcagcaagaccttgaaccgccggttcattttgcaccttat

SEQ ID NO: 252404 - DNA, 120 bp, Artificial Sequence
  ENSG00000123700_21 (sequence is synthesized)
tcagaaaatagagcatcatactcaccgagtctagtcagtgtagtgcttttaaaaattttgtcctttcatgtaacttttttattttaagaggaagaagaagaaaggggcacacacacacaa

SEQ ID NO: 252405 - DNA, 120 bp, Artificial Sequence
  ENSG00000123700_22 (sequence is synthesized)
attcatttcataagacaagatcttcataggacctccttggcatcctggcattctcaaaactgagccatccagcatgaaagataaatgggtttaaacccttgctgctgaatttattgcctg

SEQ ID NO: 252406 - DNA, 120 bp, Artificial Sequence
  ENSG00000123700_23 (sequence is synthesized)
gactgtcaggacatcaccagcccaccttcaccttagggaagatgccacacctggcctccacacttgctcttctgatcagtctgtctggattgagtcctacagtgtcagatagggcggcaa

SEQ ID NO: 252407 - DNA, 120 bp, Artificial Sequence
  ENSG00000123700_24 (sequence is synthesized)
atgccaaagcagggaaacagggaggtgtggacaagccagtttgatgcagcacttcagatcaagtgcttaggaaggagaggaaacttgccttttttatggcagaggatagtaatgaaaatg

SEQ ID NO: 252408 - DNA, 120 bp, Artificial Sequence
  ENSG00000123700_25 (sequence is synthesized)
tctcagtattttagggtcaatgagagccataaaaatataacataatcacaagtaaaggagataatggtctaaaacagctatttcccttttctgtgtgcatacttatgactgaatgtgagc

SEQ ID NO: 252409 - DNA, 120 bp, Artificial Sequence
  ENSG00000123700_26 (sequence is synthesized)
taagcattttctcctgtggagccctagagcaggttactaaggaaggacacattgttttccagaagcctcccctgcctggctgactgccttgctagaaacataattttttttttctcactg

SEQ ID NO: 252410 - DNA, 120 bp, Artificial Sequence
  ENSG00000123700_27 (sequence is synthesized)
aagctcaataatggaactctttttttttttttttttaatttaaagttccctatttgtgaattctgggattactgacttttctttttaattggagtctcaaaatcaactctcttatggtat

SEQ ID NO: 252411 - DNA, 120 bp, Artificial Sequence
  ENSG00000123700_28 (sequence is synthesized)
tatatctctgtatgccattaaaaaacagcttgttctagaatcatgtattttgtaaactgatgtttgtgatggtctctggttcttgaacagccatatctgaatgccgtgcctgcaaaacta

SEQ ID NO: 252412 - DNA, 120 bp, Artificial Sequence
  ENSG00000123700_29 (sequence is synthesized)
tgacaatttttgctgttttcagccttcagatttgatggcttgggaaactgaggtgttattttcaatgaaacaaagaaagagatgttaagcaagtggttgttttagatccaaatgtaaagg

SEQ ID NO: 252413 - DNA, 120 bp, Artificial Sequence
  ENSG00000123700_30 (sequence is synthesized)
caggtttgggaaggtgtttaaagagttggaggaattggggattgagttgtaaagaaaacttacagaagaggcaacaatttggttcttgacagtgagaggatattgagggcttcagctgct

SEQ ID NO: 252414 - DNA, 120 bp, Artificial Sequence
  ENSG00000123700_31 (sequence is synthesized)
gctattatgatgttttgcaaaggaaaataatcaaaccaaagagtattcagtgatatgtaaattaaatgaagatacagtggagaatgggggtgaccacaaaagaggctccccctaaacaca

SEQ ID NO: 252415 - DNA, 120 bp, Artificial Sequence
  ENSG00000123700_32 (sequence is synthesized)
cagtgctgccacttaaaaagacttgagaaatttgaaagggggtgggtatggggggggcaagaaagagggagggaaatctttcaacttatttctgaaaaagagaaaaaaatataaaatttc

SEQ ID NO: 252416 - DNA, 120 bp, Artificial Sequence
  ENSG00000123700_33 (sequence is synthesized)
tggtgcacaggtttgttttttcaagaaaattttgcagaagctatgtttttaaagtgtacattttataaagtttatcagatattttcatatttaaagccaaatgtaaatagaggtctgtaa

SEQ ID NO: 252417 - DNA, 120 bp, Artificial Sequence
  ENSG00000123700_34 (sequence is synthesized)
agaaaaataattgccatagaaagtataatttcagtgcagtaatttctgagagctagtacctatatgctaccggttagcatggttttagcaaatatataccagccttataaggttcgtatt

SEQ ID NO: 252418 - DNA, 120 bp, Artificial Sequence
  ENSG00000123700_35 (sequence is synthesized)
tattgctatgttcttctgttatttatttcagcatggactgttcatttgaaacctttttctagttattagcgttttaacagttacaagctttaaatggcaatttttttttttttttttttt

SEQ ID NO: 252419 - DNA, 120 bp, Artificial Sequence
  ENSG00000123700_36 (sequence is synthesized)
ttttttttttgtcaagagccaagacacaggtaatgcacgacattgattgctgcattttaccttcaaaatatttgtccttattgactgggtctccttaattaatgtacacatgtcattaga

SEQ ID NO: 252420 - DNA, 120 bp, Artificial Sequence
  ENSG00000123700_37 (sequence is synthesized)
atgcagacggaggggactcaccatgaatatctggggttgattcccagatgtgtgttgcttctctattgcaagcagattccctgttggatttacttcggatttattcccttttaaagaatt

SEQ ID NO: 252421 - DNA, 120 bp, Artificial Sequence
  ENSG00000123700_38 (sequence is synthesized)
tttgcccatatctggaagggcactatatttttgggaggagccatagattcctggttatcctatttttaaacaaaatgtagacaaagtgaactctattttgattattgagaaaggagtagt

SEQ ID NO: 252422 - DNA, 120 bp, Artificial Sequence
  ENSG00000123700_39 (sequence is synthesized)
tttctatccctctaagagtatacttgaatcagacattttaaggatgtcactatggcactgttgtcatttccaaattcctagaaaagtttgttttactttgtttttattctgttaatgcat

SEQ ID NO: 252423 - DNA, 120 bp, Artificial Sequence
  ENSG00000123700_40 (sequence is synthesized)
tctttcttctctttacttcctttcttaccagtacactcctatctcaactctgtttatttgatgagttctgtcccgtaaatcatatttcccttacaattaataaatgtcacttcatatttt

SEQ ID NO: 252424 - DNA, 120 bp, Artificial Sequence
  ENSG00000123700_41 (sequence is synthesized)
ataataaaccactcagtaaaagcaaaagcttgtcctgagaagtagagtgagttctttttcactctgtgtctaataatgttaaggtgggaaaaaaaaaagtgtggcatagctacctgccca

SEQ ID NO: 252425 - DNA, 120 bp, Artificial Sequence
  ENSG00000123700_42 (sequence is synthesized)
tccccaaccctcagcaaagtagaatctcttttctggtaattttgggtttccgctctgggctctggcaagttgaacaatcctagccattgacaatcgtgatagttattattttcccatttg

SEQ ID NO: 252426 - DNA, 120 bp, Artificial Sequence
  ENSG00000123700_43 (sequence is synthesized)
tttgctgtctttttgtatctaaagtcttcctattgtactgcacaaaccatggattgtacatatttttatatattatgtcttattttattatttctaaataaaaaaattaaaaattgaaaa

SEQ ID NO: 252427 - DNA, 120 bp, Artificial Sequence
  ENSG00000123700_44 (sequence is synthesized)
tgggaggcgctgaagcgagggcagatctgagtgtctgtaggagttgctattccaaaaaaaatcattactctctaattgttctgattttagatcagcaaagcgtgccgggcggtggtggag

SEQ ID NO: 252428 - DNA, 120 bp, Artificial Sequence
  ENSG00000123728_0 (sequence is synthesized)
ggggtgggggtgggggtggggggtgggtgagaaaaaaaagaggtgggttcgcctggagtccctgcggccgccgcggaaggcccccgcttctttccccgcggcgagcagcagcgctggggc

SEQ ID NO: 252429 - DNA, 120 bp, Artificial Sequence
  ENSG00000123728_1 (sequence is synthesized)
tctttccccgcggcgagcagcagcgctggggcagcggagagacagaggagccagcgggtggccatggccttggcgtgacagagcctccccggcggccgggcgggtgcggacggcggggcc

SEQ ID NO: 252430 - DNA, 120 bp, Artificial Sequence
  ENSG00000123728_2 (sequence is synthesized)
gaaacccgcccgggcagcggtaactggaacggagccctcaggcctgagccggctgggctgcgcgagcaggaagcggggtccctgggcccctttgtgtgaagggcgggggaggagtgccgg

SEQ ID NO: 252431 - DNA, 120 bp, Artificial Sequence
  ENSG00000123728_3 (sequence is synthesized)
ggctcctccgacgtccgcctcgccgcagggtcccctcgccgcagcccccaccctttccctcccgggggcacgcgcctcctcgccaccctcgccgggcttttcccaggctcgccctcctcc

SEQ ID NO: 252432 - DNA, 120 bp, Artificial Sequence
  ENSG00000123728_4 (sequence is synthesized)
aggctcgccctcctccccacgccccctgctcgggctgcagttcctataggaagggcattaccatcccttccccaccctccccgactctacgctctttcccctccccctcctgtaacttcc

SEQ ID NO: 252433 - DNA, 120 bp, Artificial Sequence
  ENSG00000123728_5 (sequence is synthesized)
tcttcttccccggttgggccctctgctcctctgcactctcctccccagttcgcagatttccgcccaccttccgcctcgtctagccgcgccacagctagcggggtgatctttccccccctc

SEQ ID NO: 252434 - DNA, 120 bp, Artificial Sequence
  ENSG00000123728_6 (sequence is synthesized)
tggtaggagttggtgaaggtgagactcatgagggaatacaaggtagtggtgttagggagtggaggggttggcaaatctgcccttactgtgcagtttgtcactgggactttcattgagaaa

SEQ ID NO: 252435 - DNA, 120 bp, Artificial Sequence
  ENSG00000123728_7 (sequence is synthesized)
tatgaccccaccattgaagatttctaccgcaaagagatcgaagtggactcttccccctccgtgctggaaattctggacaccgcaggaactgagcagtttgcctccatgagagatctctac

SEQ ID NO: 252436 - DNA, 120 bp, Artificial Sequence
  ENSG00000123728_8 (sequence is synthesized)
atcaaaaacggccaaggtttcatcctggtttatagcctggttaatcaacagtcttttcaggatatcaagccaatgagagatcaaattgtcagagtgaagagatatgaaaaagtcccacta

SEQ ID NO: 252437 - DNA, 120 bp, Artificial Sequence
  ENSG00000123728_9 (sequence is synthesized)
atcctagtaggaaataaagtggatctggaaccagaaagagaggttatgtcttcagaaggcagagctctggctcaagaatggggctgtcctttcatggagacatcggcaaaaagtaaatca

SEQ ID NO: 252438 - DNA, 120 bp, Artificial Sequence
  ENSG00000123728_10 (sequence is synthesized)
atggtggatgaactttttgctgagatcgtcaggcaaatgaactattcatccctgccggagaagcaagatcagtgttgtacaacttgtgtcgtccagtaaagaagataacctcaatcatgg

SEQ ID NO: 252439 - DNA, 120 bp, Artificial Sequence
  ENSG00000123728_11 (sequence is synthesized)
ccataccgagcagataaaactcagaggaaatttgcacagatgctgctttggagaactttacaacctgggttgcagaactgagccttggtaaacctgtctctattacagcatgttgccata

SEQ ID NO: 252440 - DNA, 120 bp, Artificial Sequence
  ENSG00000123728_12 (sequence is synthesized)
catctatttaagtgcataaggtctttggccttcaagatccatcgaccttaaacaggaatgcttagcacgtttaccatacgtttaaaatccattctttatcaatcagtccttttatagctt

SEQ ID NO: 252441 - DNA, 120 bp, Artificial Sequence
  ENSG00000123728_13 (sequence is synthesized)
tctaagttcttattgatggctaatatacaagggttaatttttaatattttaattgatttctttaatcagtttctcgacttgtatttattaaatactcaaactcagtattacctactcaat

SEQ ID NO: 252442 - DNA, 120 bp, Artificial Sequence
  ENSG00000123728_14 (sequence is synthesized)
gccttttaaaagaaagttataatggagaaaaaattgagccttaaacaaatggttacttctgtatattacctcgtaccagtgcttcatcctatttgtaaaatctttctcctttaaaattat

SEQ ID NO: 252443 - DNA, 120 bp, Artificial Sequence
  ENSG00000123728_15 (sequence is synthesized)
tggttaatactttgagactttgtttacgtgtggcagtgttgtaaaaagaaactaaagatcacattttacctgtatggatggaatatcccttttcttcaagtgcagtttgtgatgtgtttt

SEQ ID NO: 252444 - DNA, 120 bp, Artificial Sequence
  ENSG00000123728_16 (sequence is synthesized)
gaaattgactgtagagcatttagttgaagagttaagcattcagttccattaggttttcacatgtgttaatctcatttacagcattgaattgcggcagtaacattttcctttctgtgaagt

SEQ ID NO: 252445 - DNA, 120 bp, Artificial Sequence
  ENSG00000123728_17 (sequence is synthesized)
tctaaatttagttatgacctatttagcaatgcctttgaaaagggatattgtatccatggtaaattaattgtatacctaaacagagatagctcatctttgcctatcaggcttgtaattgac

SEQ ID NO: 252446 - DNA, 120 bp, Artificial Sequence
  ENSG00000123728_18 (sequence is synthesized)
atctagtagacttctgcacatgtaaaattgaattcaaataaaatcatacacactttctagttcttaatatttgtctttctgaataatagtttaaagcaatatttgttaaagttttcttgc

SEQ ID NO: 252447 - DNA, 120 bp, Artificial Sequence
  ENSG00000123728_19 (sequence is synthesized)
actatcacaattgctttttagttatttctcaagaagcatgttcgtattagagacaaaatctgtgtaacaggagggagaatagcgccaagtctctgggctattttttatttttgcaaatgt

SEQ ID NO: 252448 - DNA, 120 bp, Artificial Sequence
  ENSG00000123728_20 (sequence is synthesized)
gctttctaatagccattgccttccatgttgtttacctaatcagcatatttttgtctgaatacttgaacattttaacagtaacgcaggtgtagaatcagaaaggaaacttatgcagagtaa

SEQ ID NO: 252449 - DNA, 120 bp, Artificial Sequence
  ENSG00000123728_21 (sequence is synthesized)
tattttggttcagttttaacatcgtgacaatgagggctttttctagcaatgatttttaaattgtgtaagtttgacagtattttattgttgggtttttatttgattttagttgtgtgcttt

SEQ ID NO: 252450 - DNA, 120 bp, Artificial Sequence
  ENSG00000123728_22 (sequence is synthesized)
tcatttgcagaagttagtaactgcagctcacctactgcaccaaagttctcgattttaggagcccagctttagtcatttgaacatgcttctaaataaaataaaacaaaaccaaaactatac

SEQ ID NO: 252451 - DNA, 120 bp, Artificial Sequence
  ENSG00000123728_23 (sequence is synthesized)
ttttgatctataataagagctcaataactttgtcaaggaaagctctaatatatgcagtgatggtttatgaaagggtgtggcaattttaaatttatattgtgtgtgatgttcaaataaagt

SEQ ID NO: 252452 - DNA, 120 bp, Artificial Sequence
  ENSG00000123728_24 (sequence is synthesized)
ggtatctacattcatgtgatttatgggtcagcatgaccattaattactgagtagaaattgactaaactttgatttcctttttttaaatcgtgttgcatttgattcctgagcaaattccct

SEQ ID NO: 252453 - DNA, 120 bp, Artificial Sequence
  ENSG00000123728_25 (sequence is synthesized)
caaagtgaactcttgttcttaaattttgaattttatggtgagattgtaaagatagaggcaattgaaacattgttccttatttatgaactgcttgaagtgaatacttaatttaagtttgca

SEQ ID NO: 252454 - DNA, 120 bp, Artificial Sequence
  ENSG00000123728_26 (sequence is synthesized)
ctttaataccaaacttaaaaccaaacactcatttaaaagtaggttaagtgatcatggatcattgttattagctttgtggctttgtgaaattctaaaggaatcaaataattcatcatgatt

SEQ ID NO: 252455 - DNA, 120 bp, Artificial Sequence
  ENSG00000123728_27 (sequence is synthesized)
tgaaattctaaaggaatcaaataattcatcatgatttaaattttctagagattttgatttttttataatgtttctttcctgtagattgtgttcttgtttctctctctctctctctctctc

SEQ ID NO: 252456 - DNA, 120 bp, Artificial Sequence
  ENSG00000123728_28 (sequence is synthesized)
aattacagtgttcattgtcattgacctcagcagcaaatttgacttgaattcacttaggatcgcaggaatcaggggaaagtgattttaaaggtggtttctccagcacattttaagaaaagg

SEQ ID NO: 252457 - DNA, 120 bp, Artificial Sequence
  ENSG00000123728_29 (sequence is synthesized)
gaccaaaagttattttagcttcctcaatagattgcatgttgcttattaggataataaattaatattaaatgcaatatatgtcttgtctttattatggcatctatttaggagttgttcaaa

SEQ ID NO: 252458 - DNA, 120 bp, Artificial Sequence
  ENSG00000123728_30 (sequence is synthesized)
tcactgcagtagggctctgcaaataaaataatgtaacctattatcatggatctaatgtactgtaactttatcagtgaaaggtaaaatctcaaataacaagtacaaacattgaacaattac

SEQ ID NO: 252459 - DNA, 120 bp, Artificial Sequence
  ENSG00000123728_31 (sequence is synthesized)
ctataaagatttgtaaaagtaaaatttttccaatagatttcattcttgtcattttgtaagacgaccctgcagtccacctgtttgtaacttttttaataaaatagacatctgtattactga

SEQ ID NO: 252460 - DNA, 120 bp, Artificial Sequence
  ENSG00000123728_32 (sequence is synthesized)
agagctggggacttcgctggagagatggcaccggcctgaggtcaaggagaaattgaactaaactctcctttgaagactgtttccagaggcccgttcccgaagccggagtcccgacccgaa

SEQ ID NO: 252461 - DNA, 120 bp, Artificial Sequence
  ENSG00000123728_33 (sequence is synthesized)
ggcccgttcccgaagccggagtcccgacccgaaaccgtccccggccggctcgctcgctcagcagggcgcggctccagcgccacccggctcgccccgaagagttcgcagatttccgcccac

SEQ ID NO: 252462 - DNA, 120 bp, Artificial Sequence
  ENSG00000123737_0 (sequence is synthesized)
gatgacgtaattttcctgcgcctcggggcgagcagcggcgcgcaaggaaagatcgggttccgtttttcccgcggattctggtgcctgtggggccggtgacccaacaccatgaaggaaacg

SEQ ID NO: 252463 - DNA, 120 bp, Artificial Sequence
  ENSG00000123737_1 (sequence is synthesized)
ccactctcaaactgcgaacgccgcttcctactccgtgccatcgaagagaagaagcggctggatggcagacaaacctatgattataggaacatcaggatctcatttggaacagattacgga

SEQ ID NO: 252464 - DNA, 120 bp, Artificial Sequence
  ENSG00000123737_2 (sequence is synthesized)
tgctgcattgtggaacttggaaaaacaagagttcttggacaggtttcctgtgaacttgtgtctccaaaactcaatcgggcaacagaaggtattcttttttttaaccttgaactctctcag

SEQ ID NO: 252465 - DNA, 120 bp, Artificial Sequence
  ENSG00000123737_3 (sequence is synthesized)
atggccgctccagctttcgaacctggcaggcagtcagatctcttggtgaagttgaatcgactcatggaaagatgtctaagaaattcgaagtgtatagacactgagtctctctgtgttgtt

SEQ ID NO: 252466 - DNA, 120 bp, Artificial Sequence
  ENSG00000123737_4 (sequence is synthesized)
gctggtgaaaaggtttggcaaatacgtgtagacctacatttattaaatcatgatggaaatattattgatgctgccagcattgctgcaatcgtggccttatgtcatttccgaagacctgat

SEQ ID NO: 252467 - DNA, 120 bp, Artificial Sequence
  ENSG00000123737_5 (sequence is synthesized)
gtctctgtccaaggagatgaagtaacactgtatacacctgaagagcgtgatcctgtaccattaagtatccaccacatgcccatttgtgtcagttttgcctttttccagcaaggaacatat

SEQ ID NO: 252468 - DNA, 120 bp, Artificial Sequence
  ENSG00000123737_6 (sequence is synthesized)
tggcttgctggtgattgccatgaacaaacatcgagagatttgtactatccagtccagtggtgggataatgctactaaaagatcaagttctgagatgcagtaaaatcgctggtgtgaaagt

SEQ ID NO: 252469 - DNA, 120 bp, Artificial Sequence
  ENSG00000123737_7 (sequence is synthesized)
agcagaaattacagagctaatattgaaagctttggagaatgaccaaaaagtaaggaaagaaggtggaaagtttggttttgcagagtctatagcaaatcaaaggatcacagcatttaaaat

SEQ ID NO: 252470 - DNA, 120 bp, Artificial Sequence
  ENSG00000123737_8 (sequence is synthesized)
ggaaaaggcccctattgatacctcggatgtagaagaaaaagcagaagaaatcattgctgaagcagaacctccttcagaagttgtttctacacctgtgctatggactcctggaactgccca

SEQ ID NO: 252471 - DNA, 120 bp, Artificial Sequence
  ENSG00000123737_9 (sequence is synthesized)
aattggagagggagtagaaaactcctggggtgatcttgaagactctgagaaggaagatgatgaaggcggtggtgatcaagctatcattcttgatggtataaaaatggacactggagtaga

SEQ ID NO: 252472 - DNA, 120 bp, Artificial Sequence
  ENSG00000123737_10 (sequence is synthesized)
agtctctgatattggaagccaagatgctcccataatactctcagatagtgaagaagaagaaatgatcattttggaaccagacaagaatccaaagaaaataagaacacagaccaccagtgc

SEQ ID NO: 252473 - DNA, 120 bp, Artificial Sequence
  ENSG00000123737_11 (sequence is synthesized)
aaaacaagaaaaagcaccaagtaaaaagccagtgaaaagaagaaaaaagaagagagctgccaattaaagctaacagttgtatatctgtatatataactattaaaagggatatttattcca

SEQ ID NO: 252474 - DNA, 120 bp, Artificial Sequence
  ENSG00000123737_12 (sequence is synthesized)
cgaccggcacgttcaccccatccctcaggctttatttattttttttcgacaggttcttttcaaggctccagtcaccgcagcagttgtccatgctgtagtttccactttcctgtatgggcg

SEQ ID NO: 252475 - DNA, 120 bp, Artificial Sequence
  ENSG00000123737_13 (sequence is synthesized)
ggctggttaggattccactttcccccaagtgcttagcccagggccagacaaaaagtagttgcttaagaaatacttgttgaaggaataaattaatgaatgaatttgtgcttacagcggctg

SEQ ID NO: 252476 - DNA, 120 bp, Artificial Sequence
  ENSG00000123737_14 (sequence is synthesized)
tatatagcatattagctatatagagatgtatagtggataaataacatacaggatactatatagagagaatatagatatgtagttatatatagggatgtaagtattgcatttttagagggg

SEQ ID NO: 252477 - DNA, 120 bp, Artificial Sequence
  ENSG00000123737_15 (sequence is synthesized)
ggatgtaagtattgcatttttagaggggctaaatattgtgatttaaatttcaactaaattattgtggctagctgcaatactaatgctactttctaaaagaatatgcatatctttgtagag

SEQ ID NO: 252478 - DNA, 120 bp, Artificial Sequence
  ENSG00000123737_16 (sequence is synthesized)
tagtggaacactggcataaatgatagtgatatttttaattaaaaaaattttgtgtgtgtgtatgtatgtgggtgggttttaagggaatgagtttcttgaagatcttattcctccctgctg

SEQ ID NO: 252479 - DNA, 120 bp, Artificial Sequence
  ENSG00000123737_17 (sequence is synthesized)
tctttttttttgtagtttctagactgaaacaaaaagcccatcccatatcataacatataatactgcctaaataaaactttctatgatgatagaaacattaagtatctacactggtatagc

SEQ ID NO: 252480 - DNA, 120 bp, Artificial Sequence
  ENSG00000123737_18 (sequence is synthesized)
agccactagccccacatggctagtgaacacttgaaatgtggcttgtgttactgagaactgaattttaaattttacttaatacaaaattaagcagccacatgtggctagtggctaccatgc

SEQ ID NO: 252481 - DNA, 120 bp, Artificial Sequence
  ENSG00000123737_19 (sequence is synthesized)
ctagaatactggtagtcctagacgtttcttgcattctgaaagccatagaactgaagttgttatgtatggttatttctactttttaaaaaaagcaaattcttgctggtctatataatagaa

SEQ ID NO: 252482 - DNA, 120 bp, Artificial Sequence
  ENSG00000123737_20 (sequence is synthesized)
tgacttattttcttacgtggtaagaacagaaatcctacaaggaactgggagctaggctggcagggaaaattgaaggtgatgtgtttaataggaatgtaatgcaaatacttctgttttcaa

SEQ ID NO: 252483 - DNA, 120 bp, Artificial Sequence
  ENSG00000123737_21 (sequence is synthesized)
agagagaaattattgcttatgaacattactggagcctgggctttttgtttttttacttaagtaaataggtaaggaaaaaatttcccattgattgggacccttactcaaatttcccagtgg

SEQ ID NO: 252484 - DNA, 120 bp, Artificial Sequence
  ENSG00000123737_22 (sequence is synthesized)
ttacttctatttggtattattcttccagaacttgttccaggtatttatttactctctgtgcagtgatgtaagctaatgctgcatatacttgtatagcattgaatataactagttggttta

SEQ ID NO: 252485 - DNA, 120 bp, Artificial Sequence
  ENSG00000123737_23 (sequence is synthesized)
acaattctcttattgttgaagatgtaagttgtttccattttctcactgttaatatccttgcacttgcatatacctcttatatgtttgtttagtgtattcttctaacagtgaataatattt

SEQ ID NO: 252486 - DNA, 120 bp, Artificial Sequence
  ENSG00000123737_24 (sequence is synthesized)
tcaactgaatataatgaaggtggacctaagcattggaaaaatggagcaggtacagccttcctaaagcatgtgaacaaagggagaaactaattgaaaactaaaaatacaaataattgatat

SEQ ID NO: 252487 - DNA, 120 bp, Artificial Sequence
  ENSG00000123737_25 (sequence is synthesized)
gggttaattcacattttatgtatatcattaactaataagcaggagaaaaatgggcaaaatacatggagcagttctcaaagtatacaatggccagtaatatttttcatggtcagccctgac

SEQ ID NO: 252488 - DNA, 120 bp, Artificial Sequence
  ENSG00000123737_26 (sequence is synthesized)
agtaatacaaataaaatccaaagaaaaatgacatggcattttttgttactgtattttgggcagtattaaaaacaccagcaatgccaaaggtatatgggaaatgggttcttttatttcttg

SEQ ID NO: 252489 - DNA, 120 bp, Artificial Sequence
  ENSG00000123737_27 (sequence is synthesized)
gaatgtaaactggaactatttctggaggaatagagtagcacaaacaattcagttgtctctacaaaagatgctatatacatttccccctagcttttctattatgacatgtaccaaattgtc

SEQ ID NO: 252490 - DNA, 120 bp, Artificial Sequence
  ENSG00000123737_28 (sequence is synthesized)
acaccattcaagcacctgtaggaaataagagtttaaagaaacaaatgttacagatgagttctagagtgctctaagaagctgatttaaagaaaagattaagcctccacctagagttttatt

SEQ ID NO: 252491 - DNA, 89 bp, Artificial Sequence
  ENSG00000123737_29 (sequence is synthesized)
cccagactggagtgcagtggcactgcaacctccacctccagagtagctgggcctacaagcacatgccaccacgcctggctaatttttct

SEQ ID NO: 252492 - DNA, 88 bp, Artificial Sequence
  ENSG00000123737_30 (sequence is synthesized)
ggcctacaagcatttttaatagagctggggtttcaccatgttggccagactggactcgagttcctgacctcaggtaatccacctgcct

SEQ ID NO: 252493 - DNA, 120 bp, Artificial Sequence
  ENSG00000123737_31 (sequence is synthesized)
caaaatgtgggtattaaaagtgtgagccaccacgcccagccccagaaataagagtttagaacgtctgatagaaataaattcatgtagaaataaattttgcaagagattgcttaacttttt

SEQ ID NO: 252494 - DNA, 120 bp, Artificial Sequence
  ENSG00000123737_32 (sequence is synthesized)
caagaagaaaactttcattctcatcttcaacagttcatcaaatagcaatatttttgttactcagttttcttaacttgttaagtgtttctacacctgtgctatggactcctggaactgccc

SEQ ID NO: 252495 - DNA, 120 bp, Artificial Sequence
  ENSG00000123737_33 (sequence is synthesized)
caaggagtaactgcgtgttttaacagcaagaaaaaataatttgtacacaatgttacttttcctgataaatagccactggttgtaatcagttaggatttatttttattttaaattcactat

SEQ ID NO: 252496 - DNA, 120 bp, Artificial Sequence
  ENSG00000123737_34 (sequence is synthesized)
ctcgccttattatgggccaaaattacaaatgcagctaggaattttattgctctactcaagtatgtcatgttaatattaaacaaacacttcccttaatagtaaagcaccttgtatttcctt

SEQ ID NO: 252497 - DNA, 120 bp, Artificial Sequence
  ENSG00000123737_35 (sequence is synthesized)
tctttctttgtaagggcattagttggcaaagaactttctcagtagaagtaacaaaactcttatactttgatgaagatacttcccaacatttttcttttcatgggatacttataaacttag

SEQ ID NO: 252498 - DNA, 120 bp, Artificial Sequence
  ENSG00000123739_0 (sequence is synthesized)
gcacaggggacggttgctggcccaggtgagcgggcgcgctggtccaggtgagcgggcgcgtccccgcgacggcgctgcctgcccgaggcggttcacgtaaagacagcgagatcctgaggg

SEQ ID NO: 252499 - DNA, 120 bp, Artificial Sequence
  ENSG00000123739_1 (sequence is synthesized)
ccagccgggaaggaggcgtggatatggagctggctgctgccaagtccggggcccgcgccgctgcctagcgcgtcctggggactctgtggggacgcgccccgcgccgcggctcggggaccc

SEQ ID NO: 252500 - DNA, 120 bp, Artificial Sequence
  ENSG00000123739_2 (sequence is synthesized)
gtagagcccggcgctgcgcgcatggccctgctctcgcgccccgcgctcaccctcctgctcctcctcatggccgctgttgtcaggtgccaggagcaggcccagaccaccgactggagagcc

SEQ ID NO: 252501 - DNA, 120 bp, Artificial Sequence
  ENSG00000123739_3 (sequence is synthesized)
accctgaagaccatccggaacggcgttcataagatagacacgtacctgaacgccgccttggacctcctgggaggcgaggacggtctctgccagtataaatgcagtgacggatctaagcct

SEQ ID NO: 252502 - DNA, 120 bp, Artificial Sequence
  ENSG00000123739_4 (sequence is synthesized)
ttcccacgttatggttataaaccctccccaccgaatggatgtggctctccactgtttggtgttcatcttaacattggtatcccttccctgacaaagtgttgcaaccaacacgacaggtgc

SEQ ID NO: 252503 - DNA, 120 bp, Artificial Sequence
  ENSG00000123739_5 (sequence is synthesized)
tatgagacctgtggcaaaagcaagaatgactgtgatgaagaattccagtattgcctctccaagatctgccgagatgtacagaaaacactaggactaactcagcatgttcaggcatgtgaa

SEQ ID NO: 252504 - DNA, 120 bp, Artificial Sequence
  ENSG00000123739_6 (sequence is synthesized)
acaacagtggagctcttgtttgacagtgttatacatttaggttgtaaaccatatctggacagccaacgagccgcatgcaggtgtcattatgaagaaaaaactgatctttaaaggagatgc

SEQ ID NO: 252505 - DNA, 120 bp, Artificial Sequence
  ENSG00000123739_7 (sequence is synthesized)
cgacagctagtgacagatgaagatggaagaacatacctttgacaaataactaatgtttttacaacataaaactgtcttatttttgtgaaaggattattttgagaccttaaaataatttat

SEQ ID NO: 252506 - DNA, 120 bp, Artificial Sequence
  ENSG00000123739_8 (sequence is synthesized)
atcttgatgttaaaacctcaaagcaaaaaaagtgagggagatagtgaggggagggcacgcttgtcttctcaggtatcttccccagcattgctcccttacttagtatgccaaatgtcttga

SEQ ID NO: 252507 - DNA, 120 bp, Artificial Sequence
  ENSG00000123739_9 (sequence is synthesized)
ccaatatcaaaaacaagtgcttgtttagcggagaattttgaaaagaggaatatataactcaattttcacaaccacatttaccaaaaaaagagatcaaatataaaattcatcataatgtct

SEQ ID NO: 252508 - DNA, 120 bp, Artificial Sequence
  ENSG00000123739_10 (sequence is synthesized)
gttcaacattatcttatttggaaaatggggaaattatcacttacaagtatttgtttactatgaaattttaaatacacatttatgcctagaaggaacggactttttttttctattttaatt

SEQ ID NO: 252509 - DNA, 120 bp, Artificial Sequence
  ENSG00000123739_11 (sequence is synthesized)
acacataatatgtaattaaagtacaacataatatgttgtttctctgtagcccgttgagcatatgagtaagtcacatttctattaggactacttacaaggacaaggtttccatttttccag

SEQ ID NO: 252510 - DNA, 120 bp, Artificial Sequence
  ENSG00000123739_12 (sequence is synthesized)
ttgtaaaattggaaccatcagctgataacctcgtagggagcaaccccaggatagctaagtgttatgtaatatgcctagaaggtgatgtgaatgcgattcagaagcatagccactcccatt

SEQ ID NO: 252511 - DNA, 120 bp, Artificial Sequence
  ENSG00000123739_13 (sequence is synthesized)
ttatgagctactcacatgacaaatgtcatcttttgctataacctttgccaagttagagaaaagatggatttaatgagataaatgaaaagatatttaacctaatatatcaaggcactattt

SEQ ID NO: 252512 - DNA, 120 bp, Artificial Sequence
  ENSG00000123739_14 (sequence is synthesized)
gctgttatgctttgttatttatttcccagcacttgttccttattgtagattttttaaagactgtaaccttttactaactgtggtcttactaaaatttgtgcttgatactgcttttcaaaa

SEQ ID NO: 252513 - DNA, 120 bp, Artificial Sequence
  ENSG00000123739_15 (sequence is synthesized)
agcctttaattagagccaaaaggatggaaaaggcaagatataaatgccttttatagatctcttatttacattgaaaattattaccatatgtttagagcaaatccaagaaaacttcaacag

SEQ ID NO: 252514 - DNA, 120 bp, Artificial Sequence
  ENSG00000123739_16 (sequence is synthesized)
cttctgaagatgtctatgaatgttgaaaacttttcaatctcttggaatgctcagttatgttcctagaccggtctttgctgactactggttgttaacctttccctagcctgggacctcaag

SEQ ID NO: 252515 - DNA, 120 bp, Artificial Sequence
  ENSG00000123739_17 (sequence is synthesized)
ccatatatatcctttgggtgacccatggccaaagttattaagatgaactgactttcaaagtcagagaaggacagcatagggagaggcggttatttgtaagtcattacaggtagaacaggg

SEQ ID NO: 252516 - DNA, 120 bp, Artificial Sequence
  ENSG00000123739_18 (sequence is synthesized)
cagaaggaaaagtatgttctggagaaagggccatgttcctaactttggagatatgtcattgccgggaacctagtatcttccaacttgaattggtggcagctgttccagtgagacaaggca

SEQ ID NO: 252517 - DNA, 120 bp, Artificial Sequence
  ENSG00000123739_19 (sequence is synthesized)
catgtatgccttgtggctaagtgagcaaactgggtttccacttaaatgtttgggaccctcaattgattctttatttcaaacctttataaaaggtacagttttgtaagccattattaataa

SEQ ID NO: 252518 - DNA, 120 bp, Artificial Sequence
  ENSG00000123739_20 (sequence is synthesized)
ggtttatcaatatttactattgaaatatttgtccaggtaactttacacttacaatgaattcatggattttgttagcagcattggctttctcaaaaggacaaactcaatatcgttataaaa

SEQ ID NO: 252519 - DNA, 120 bp, Artificial Sequence
  ENSG00000123739_21 (sequence is synthesized)
tataattcgtgatcacaaattatacaaaaatcagtagaaacagttttttatgttcagattaaaaaaaaaaacttgggataattttagatttacagaaaagttgcaaagatacatggagag

SEQ ID NO: 252520 - DNA, 120 bp, Artificial Sequence
  ENSG00000123739_22 (sequence is synthesized)
cttctgtgaccactcacccagttcccccagtgttaaccttttatttaaccatgaagcatttgtcagaagctaagtaaccagcaatggcaattactattaacggaactttgactttatttt

SEQ ID NO: 252521 - DNA, 120 bp, Artificial Sequence
  ENSG00000123739_23 (sequence is synthesized)
tcagattgtactagttttttaattaatgtcatttttcttttccaggatccaatctaggataccacactgaattagtcgtcatgcctaattagcctctggtctgtgatagttccacagtct

SEQ ID NO: 252522 - DNA, 120 bp, Artificial Sequence
  ENSG00000123739_24 (sequence is synthesized)
ttctttttcataaccttgacagttttgaggagtactggtcaggtgttttgtagaatattcctcaatttgggtttgtctgatgttttcctcatggttagagtggggttatagatttttagg

SEQ ID NO: 252523 - DNA, 120 bp, Artificial Sequence
  ENSG00000123739_25 (sequence is synthesized)
aagaataccagaggtgaaggtccttctcactgcatcatgtcaggagttacatgctatcagcttgatggtgtattaactttggacacttggttaaggtagtgtgtgttggttttttgctgc

SEQ ID NO: 252524 - DNA, 120 bp, Artificial Sequence
  ENSG00000123739_26 (sequence is synthesized)
tgaaaattactgttattttccctttccatacttctgttctttggaaaacagtcactaagtccagtcatgggaggtggtgggtgggaaagattacattcaaccccctggaagtgggaatat

SEQ ID NO: 252525 - DNA, 120 bp, Artificial Sequence
  ENSG00000123739_27 (sequence is synthesized)
ccatatgtagtatttggaatttttctatatggaaaatttgtttctccctcccaccctaatttgtttacatcagtatggactcatgtatattttgtattttgggtaacacagtatttattt

SEQ ID NO: 252526 - DNA, 120 bp, Artificial Sequence
  ENSG00000123739_28 (sequence is synthesized)
tgttgcttaagttgtccagcttggctattaggagttctgccaggttggctactatgtccctttgatgtgcccatccttttgatttttgagcacttcttactttctggcactacaagatgc

SEQ ID NO: 252527 - DNA, 120 bp, Artificial Sequence
  ENSG00000123739_29 (sequence is synthesized)
tccaggttcatcttggatattccctgccccaaccctagaatccctagaatcaacccctgctccaaagagccctggttccttttgttggagaatcatacttagaaaccaagatctgggcat

SEQ ID NO: 252528 - DNA, 120 bp, Artificial Sequence
  ENSG00000123739_30 (sequence is synthesized)
tagatgtgcttgttgctactgggatgtcactgtttgtagcagagttgagaaatatgtatgtatattaatccatgcatatgtacacatctataattatttatgtgtgtacaaagctaaaca

SEQ ID NO: 252529 - DNA, 120 bp, Artificial Sequence
  ENSG00000123739_31 (sequence is synthesized)
tgagtttgtactgccgtcttcaactcaaaatttgtcccaaaattttgtggcatatgtttagattttaaagttgatattttccctattgacagaataaactcattaaaagagcaaaaaaaa

SEQ ID NO: 252530 - DNA, 120 bp, Artificial Sequence
  ENSG00000123739_32 (sequence is synthesized)
aaaaaaaaaaaaaaaggcaagaactaactgtcagcagctctttgcaagaaatgtaatattgatactttaaaataatactgccttcaaatgatgcctgtctctttaaaatcttttgacata

SEQ ID NO: 252531 - DNA, 120 bp, Artificial Sequence
  ENSG00000123739_33 (sequence is synthesized)
gttcttccagggacagatatggctgtatttatttcatagatggagaaactgagcacagagctgtaatgaagacagaattgagatataagggcaaaagctaattaaacgcatcctcacagg

SEQ ID NO: 252532 - DNA, 120 bp, Artificial Sequence
  ENSG00000123739_34 (sequence is synthesized)
tagcctttctttcagtgaacctgtagactagtccagtaatacttattaaaattagttgttagaggctgggcatggtggttcaagcctgtaatctcagcactgtgggaggccaaggcggac

SEQ ID NO: 252533 - DNA, 82 bp, Artificial Sequence
  ENSG00000123739_35 (sequence is synthesized)
ataggcgtcagaataagactctgtcttggaaagaagaaaaaaaattgttagcctaaaaccaactctctctaaatttaaaaga

SEQ ID NO: 252534 - DNA, 120 bp, Artificial Sequence
  ENSG00000123739_36 (sequence is synthesized)
aattgttagcctaaaaccaactctctctaaatttaaaagagtgattatttatcttagtatttatagaagtatgagattatcagaaggtgcgatgcacaatgctcattattttatcctagt

SEQ ID NO: 252535 - DNA, 120 bp, Artificial Sequence
  ENSG00000123739_37 (sequence is synthesized)
acaagacacgtataacatctaacagtaaagaagatggaatctttctataaaaacaattctgttattaatagttgactgacttcagtaactttgaggagtagaatgaaacttattaggcaa

SEQ ID NO: 252536 - DNA, 120 bp, Artificial Sequence
  ENSG00000123739_38 (sequence is synthesized)
gatctttccacatacactacattgtattgttcaaaattcatagaaattacttgcaatatattgatttaagccttatgtagtgactgttgctatatttgaagtagcatttttagtttgctg

SEQ ID NO: 252537 - DNA, 120 bp, Artificial Sequence
  ENSG00000123739_39 (sequence is synthesized)
tttttcctcactgcttaatcctacaaaaaccagccatctgcctaaaaaataaaagagcaaaaatgaatcagtgcaaccggtatacgaaaaataataattattaataaaactgtaaaggga

SEQ ID NO: 252538 - DNA, 120 bp, Artificial Sequence
  ENSG00000123810_0 (sequence is synthesized)
agcaacaaccacggaaaccaagacgagcgcggtcgcggaagtatcgcggcttacatatctcgcagccaggcgggtcctgggagaggcgcgagccaggcctggtcggcgcccgcggagaaa

SEQ ID NO: 252539 - DNA, 120 bp, Artificial Sequence
  ENSG00000123810_1 (sequence is synthesized)
agaagcagtcaagcccatgaactacaaccccggttgccgctttctcctctcctaaccgttaagtgcgctaagggccatggctgaggtgcacgtgatcgggcagatcataggggccagcgg

SEQ ID NO: 252540 - DNA, 120 bp, Artificial Sequence
  ENSG00000123810_2 (sequence is synthesized)
tttctcggaaagtagcctcttctgcaagtggggcattcacacaggggcggcatggaagctcctgtcaggcgtgcgggagggccaaacgcaagtggacaccccgcagataggggacatggc

SEQ ID NO: 252541 - DNA, 120 bp, Artificial Sequence
  ENSG00000123810_3 (sequence is synthesized)
ttactggtcccaccccatcgacctgcacttcgccaccaaaggtcttcaaggctggccccggctccatttccaggtgtggtcccaggacagctttggccgctgccagcttgcaggctatgg

SEQ ID NO: 252542 - DNA, 120 bp, Artificial Sequence
  ENSG00000123810_4 (sequence is synthesized)
ccacgtggcggcccctgggcagttggcgagaacagttggcacgggctttcgtgggtggtgggccgcagctgctgcatggggacaccatctacagtggggccgaccgctatcgcctgcaca

SEQ ID NO: 252543 - DNA, 120 bp, Artificial Sequence
  ENSG00000123810_5 (sequence is synthesized)
cagctgctggtggcaccgtgcacctggagatcggcctgctgctccgcaacttcgaccgctacggcgtggagtgctgagggactctgcctccaacgtcaccaccatccacaccccggacac

SEQ ID NO: 252544 - DNA, 120 bp, Artificial Sequence
  ENSG00000123810_6 (sequence is synthesized)
ccagtgatgggggaggatggcacagtggtcaagagcacagactctagagactgtcagagctgaccccagctaaggcatggcaccgcttctgtcctttctaggacctcggggtccctctgg

SEQ ID NO: 252545 - DNA, 120 bp, Artificial Sequence
  ENSG00000123810_7 (sequence is synthesized)
gcccagtttccctatctgtaaattggggacagtaaatgtatggggtcgcagggtgttgagtgacaggaggctgcttagccacatgggaggtgctcagtaaaggagagcaattcttacagg

SEQ ID NO: 252546 - DNA, 120 bp, Artificial Sequence
  ENSG00000123810_8 (sequence is synthesized)
gctgagtctgaatccagtcccatgatgggaccttggtctgctatagtcactgctatgtcaccagcatggaaaacagtgcttggcacatagcaggtgctgaataaatgttcatgaactcac

SEQ ID NO: 252547 - DNA, 120 bp, Artificial Sequence
  ENSG00000123815_0 (sequence is synthesized)
ctctgagcatccgaagcgcggccaggtatgcatctagggcaccggggtcctggtggcgcgccagtgggccccctccctccacccctgtgactaaaccaccctccctacacggttgaatga

SEQ ID NO: 252548 - DNA, 120 bp, Artificial Sequence
  ENSG00000123815_1 (sequence is synthesized)
caagttcaaccttccctaaaacccccggtgacgagtccagccgcgcgcccattcttcacgcaggggcgggacggactttcaaagacttggagttcccacgggtgtgggttcgagaccttc

SEQ ID NO: 252549 - DNA, 120 bp, Artificial Sequence
  ENSG00000123815_2 (sequence is synthesized)
ctctgccagttcccagctccgctaccctgagcaaatgacttacgctccattggattttccgcaatgtggctgaaggtggggggcctacttcgggggaccggtggacagctgggccagact

SEQ ID NO: 252550 - DNA, 120 bp, Artificial Sequence
  ENSG00000123815_3 (sequence is synthesized)
gttggttggccttgtggggccctggggcctgggccccaccgctggggaccatgtggaggttcttgggcccaaaagttttaccaggatgggcctgggagaggcctgggtgaggaggacatt

SEQ ID NO: 252551 - DNA, 120 bp, Artificial Sequence
  ENSG00000123815_4 (sequence is synthesized)
cgcagggcacgggaggcccgtcccaggaagacaccccggccccagctgagtgaccgctctcgagaacgcaaggtgcctgcctcccgcatcagccgcttggccaactttgggggactggct

SEQ ID NO: 252552 - DNA, 120 bp, Artificial Sequence
  ENSG00000123815_5 (sequence is synthesized)
gtgggcttggggctaggagtactggccgagatggctaagaagtccatgccaggaggtcgtctgcagtcagagggtggttctgggctggactccagccccttcctgtcggaggccaatgcc

SEQ ID NO: 252553 - DNA, 120 bp, Artificial Sequence
  ENSG00000123815_6 (sequence is synthesized)
gagcggattgtgcagaccttatgtacagttcgaggggccgccctcaaggttggccagatgctcagcatccaggacaacagcttcatcagccctcagctgcagcacatctttgagcgggtc

SEQ ID NO: 252554 - DNA, 120 bp, Artificial Sequence
  ENSG00000123815_7 (sequence is synthesized)
cgccagagcgccgacttcatgccccgctggcagatgctgagagttcttgaagaggagctcggcagggactggcaggccaaggtggcctccttggaggaggtgccctttgccgctgcctca

SEQ ID NO: 252555 - DNA, 120 bp, Artificial Sequence
  ENSG00000123815_8 (sequence is synthesized)
attgggcaggtgcaccagggcctgctgagggacgggacggaggtggccgtgaagatccagtaccccggcatagcccagagcattcagagcgatgtccagaacctgctggcggtactcaag

SEQ ID NO: 252556 - DNA, 120 bp, Artificial Sequence
  ENSG00000123815_9 (sequence is synthesized)
atgagcgcggccctgcccgcgggcctgtttgccgagcagagcctgcaggccttgcagcaggagctggcttgggagtgtgactaccgtcgtgaggcggcttgtgcccagaatttcaggcag

SEQ ID NO: 252557 - DNA, 120 bp, Artificial Sequence
  ENSG00000123815_10 (sequence is synthesized)
aggagctgtgcacgacacgggtgctgggcatggagctggctggaggggtccccctggaccagtgccagggcctaagccaggacctgcggaaccagatttgcttccagctcctgacgctgt

SEQ ID NO: 252558 - DNA, 120 bp, Artificial Sequence
  ENSG00000123815_11 (sequence is synthesized)
gtctgcgggagctgtttgagttccgattcatgcagactgaccccaactgggccaacttcctgtatgatgcctccagccaccaggtgaccctgctggactttggtgcaagccgggagtttg

SEQ ID NO: 252559 - DNA, 120 bp, Artificial Sequence
  ENSG00000123815_12 (sequence is synthesized)
ggacagagttcacagaccattacatcgaggtggtgaaggctgcagctgatggagacagagactgtgtcctgcagaagtccagggacctcaaattcctcacaggctttgaaaccaaggcat

SEQ ID NO: 252560 - DNA, 120 bp, Artificial Sequence
  ENSG00000123815_13 (sequence is synthesized)
tctccgacgcccacgtggaggcagtgatgatcctgggggagcctttcgccacccagggcccttatgactttgggtcgggggaaacggcccgccgcatacaggacctcatcccggtgctgc

SEQ ID NO: 252561 - DNA, 120 bp, Artificial Sequence
  ENSG00000123815_14 (sequence is synthesized)
tgcggcaccggctgtgtcccccacccgaggagacctatgccctgcaccgcaagctggcaggggctttcctggcctgtgcccacctccgagcccacatcgcctgcagggacctcttccagg

SEQ ID NO: 252562 - DNA, 120 bp, Artificial Sequence
  ENSG00000123815_15 (sequence is synthesized)
acacctaccaccgctactgggccagtcgccagccagacgcagccactgccggcagcctccccaccaaaggggactcctgggtggatccctcatgacagcctccatgggggattcagtccc

SEQ ID NO: 252563 - DNA, 120 bp, Artificial Sequence
  ENSG00000123815_16 (sequence is synthesized)
cagagcaggccgtaccctgctgtagtgcctcttatcccttccccgtctgccctgggtcagaggagcccccttgggcttcccagtcttgcctggctctcctccttggcccaggagctcagg

SEQ ID NO: 252564 - DNA, 120 bp, Artificial Sequence
  ENSG00000123815_17 (sequence is synthesized)
atccctggggctggggaactcccaacttcgtgccctagatcctgcacctccccactcgaaagtgggtatccgaaaactaagccagggaagcggttaacttatctttgccaacatttgagg

SEQ ID NO: 252565 - DNA, 120 bp, Artificial Sequence
  ENSG00000123815_18 (sequence is synthesized)
gagccttgggccgctgcatgtcgttatgcagatcagactcatcagggggagccctcacctctgcctcaagcctcccgtggaaggcgagatggtcctggaggcagtcctcacctctgcctc

SEQ ID NO: 252566 - DNA, 120 bp, Artificial Sequence
  ENSG00000123815_19 (sequence is synthesized)
cctcgctcctccaacagctgccttctcccgggttccagcctctcagtgtgttggagaggtaggggtgcggggtgggggggagctgaatcttcaatcggaataaaagcagccctccccttc

SEQ ID NO: 252567 - DNA, 120 bp, Artificial Sequence
  ENSG00000123815_20 (sequence is synthesized)
tggcagatgctgtaccccggcatagcccagagcattcagagcgatgtccagaacctgctggcggtactcaagatgagcgcggccctgcccgcgggtgaggcgcccacccactcctctgct

SEQ ID NO: 252568 - DNA, 120 bp, Artificial Sequence
  ENSG00000123815_21 (sequence is synthesized)
gacctcccaaaggggctatgcccagagagagaaagcaggagggggagcccagaggagagcacgggcagggtgtgctggcgttgtgagcgggagtgtcagagacagaaaggacaccaaggc

SEQ ID NO: 252569 - DNA, 120 bp, Artificial Sequence
  ENSG00000123815_22 (sequence is synthesized)
ggggagagcccagggagcatgagcaggcctgtttgccgagcagagcctgcaggccttgcagcaggagctggcttgggagtgtgactaccgtcgtgaggcggcttgtgcccagaatttcag

SEQ ID NO: 252570 - DNA, 120 bp, Artificial Sequence
  ENSG00000123815_23 (sequence is synthesized)
gccctacccaccaacaggccccaacttcagatactcacacggggtccctcctcacctcttcgcttacttcccccctggttccactgtctcccaagacaacagcttcatcagccctcagct

SEQ ID NO: 252571 - DNA, 120 bp, Artificial Sequence
  ENSG00000123815_24 (sequence is synthesized)
gcgccgacttcatgccccgctggcagatgctggtgagtgcccagtgggggagggcggtgagggaggcaggctccatctcctctgacctgcctgaccttcctggcttcactgccccactcc

SEQ ID NO: 252572 - DNA, 120 bp, Artificial Sequence
  ENSG00000123815_25 (sequence is synthesized)
ctgcctctgagcctcactttccccatctgtaaaatgggaatcaccagagtacacacctcctagcattgctgtggtgattaaaacagggaacagcagcctgacctctctgtgcttcagttc

SEQ ID NO: 252573 - DNA, 120 bp, Artificial Sequence
  ENSG00000123815_26 (sequence is synthesized)
ccttccctgggaaatggcgatagtgacagccacacccacatcatagggtcacataaatcagtttacactgagcactgagaacggcccctgattcactgtgagcaacatgcaggtgttagc

SEQ ID NO: 252574 - DNA, 120 bp, Artificial Sequence
  ENSG00000123815_27 (sequence is synthesized)
tgtgattattactgtttttttaattaaaggagatcgtgtctgtaataggttggcacggcgcctggcaccaagtaagtgcccaggacatgagctgttctaataactgggtaaggcatggaa

SEQ ID NO: 252575 - DNA, 120 bp, Artificial Sequence
  ENSG00000123815_28 (sequence is synthesized)
tccaggattccgccacccacctgctctcccatccctgttctgcttattcgccatgcggccccaggcaggtactgcctctctctgggccactctgaataggacctggcccacaggaagccc

SEQ ID NO: 252576 - DNA, 120 bp, Artificial Sequence
  ENSG00000123815_29 (sequence is synthesized)
ggaagcccattgtaaattttagctcttcttgatcacagtaactgtgagttaataataacatataagagcataataaaggatggttggccacgtgtaatggctcatgcctgtaatcccagc

SEQ ID NO: 252577 - DNA, 89 bp, Artificial Sequence
  ENSG00000123815_30 (sequence is synthesized)
accactaaacataataacagtaataattagctgggcacagtggcacatatctgtagtcccagctattcaggaggcaggaggatggcttg

SEQ ID NO: 252578 - DNA, 120 bp, Artificial Sequence
  ENSG00000123815_31 (sequence is synthesized)
tctgtagtcccagctattcaggaggcaggaggatggcttgagctcgggaggttgatgctgcagtgagccgtgagagtgccactacactccagcctgggctacagaacaagaccctgtctc

SEQ ID NO: 252579 - DNA, 120 bp, Artificial Sequence
  ENSG00000123815_32 (sequence is synthesized)
ggcgtgagcgggaaacagttggcaagcaaggcaagggatttatatgcacaaggaaggaggttgggtgccagaatgtgggtgtttgtgcaaagtggaggggctccatgtgcaagggaaatg

SEQ ID NO: 252580 - DNA, 120 bp, Artificial Sequence
  ENSG00000123815_33 (sequence is synthesized)
gcagaagagaggcgtcaggtttgtaagggagactttgcaagaaagtgtagggaacagaagggtctgtcgcgtacaaggcactttgaggcaatgtggctgaaggtggggggcctacttcgg

SEQ ID NO: 252581 - DNA, 120 bp, Artificial Sequence
  ENSG00000123815_34 (sequence is synthesized)
ttggggagggtggttctgggctggactccagccccttcctgtcggaggccaatgccgagcggattgtgcagaccttatgtacagttcgaggggccgccctcaaggttggccagatgctca

SEQ ID NO: 252582 - DNA, 120 bp, Artificial Sequence
  ENSG00000123815_35 (sequence is synthesized)
ggataaaaccccacaccaccctcctgttctccctcactctcctccagccatcccacggatcctcaaccagagaccttgctcatattctctgcctcccaaatcttacatagacatacttct

SEQ ID NO: 252583 - DNA, 120 bp, Artificial Sequence
  ENSG00000123815_36 (sequence is synthesized)
ttcttttatttttttgagacagggtctcgctctgttttccaggctggaatacagtggtgagatcacagctcactccagcctcgacctcccaggctcaagtgattttcccacctcagcctc

SEQ ID NO: 252584 - DNA, 120 bp, Artificial Sequence
  ENSG00000123815_37 (sequence is synthesized)
acaggtgtaagccactgcacccagccaacacacttacctcaatctataatccgtctgtttgtgagagtgtggtctcggggttgggggccaggtccagggactggttcattcactgctctg

SEQ ID NO: 252585 - DNA, 120 bp, Artificial Sequence
  ENSG00000123815_38 (sequence is synthesized)
tccagggactggttcattcactgctctgtccccagcatcatttagcacaaggatggacacagaagattctttcccgctatttacctgtgttcagagtagtgattgcaaggactgacccat

SEQ ID NO: 252586 - DNA, 120 bp, Artificial Sequence
  ENSG00000123815_39 (sequence is synthesized)
gggtatcactatagacttcacagattttgataccagtgactacttttgggatgaatgaattaataaattaatgaaaaagtaatgcaaaggctgaaatacacctgaactcatccttctggg

SEQ ID NO: 252587 - DNA, 120 bp, Artificial Sequence
  ENSG00000123815_40 (sequence is synthesized)
gcaaccagaagtcatagaagggtttcgggtagggaagtggtgactgggtttccagcagcacccagttgagaggcaggtgcagagtaggcaccttggagatacttgttaaatctcagtcca

SEQ ID NO: 252588 - DNA, 120 bp, Artificial Sequence
  ENSG00000123815_41 (sequence is synthesized)
gccaggtgttggtcatcacccagggcagacagcagcaagagatgggcaggagggagggcatggcgcagactgttcatggaggacttctgagagcacaaggaggaggtctcaagctgggtc

SEQ ID NO: 252589 - DNA, 120 bp, Artificial Sequence
  ENSG00000123815_42 (sequence is synthesized)
ggagaaccaggagaaactgtgggaatctattaatagtggaggaagtatttagtgggtgggaatgagagagggtggacacagaggaacatgggggcctggccaagaagccaggcaactccc

SEQ ID NO: 252590 - DNA, 120 bp, Artificial Sequence
  ENSG00000123815_43 (sequence is synthesized)
tgggaatcttggctgagtgtgttctgggaaatgtcaggcctacaggaagcagagggctcccagtcgcaccattccgcagggaccatgtggaggttcttgggcccaaaagttttaccagga

SEQ ID NO: 252591 - DNA, 120 bp, Artificial Sequence
  ENSG00000123815_44 (sequence is synthesized)
agaagccgccgctgcccccctcaacccgggaggggggtcccactggctgggcctcaggctcaggggtctcaggggtaatgatgaggcggggcacagggcacagggggctacacttcaggc

SEQ ID NO: 252592 - DNA, 120 bp, Artificial Sequence
  ENSG00000123836_0 (sequence is synthesized)
ggtcccggccacaagctgtcggctcggttcggtcgcgttacagggcaggcgccggggccaaggcagggagggatcttaggagagatcgtaggacatctgaagagctgccatgtctggggc

SEQ ID NO: 252593 - DNA, 120 bp, Artificial Sequence
  ENSG00000123836_1 (sequence is synthesized)
atcttcctcagaacagaacaacaacagctatgaaaccaaaaccccaaatcttcgaatgtcagagaagaaatgttcatgggcctcctacatgaccaactccccgactctgatcgttatgat

SEQ ID NO: 252594 - DNA, 120 bp, Artificial Sequence
  ENSG00000123836_2 (sequence is synthesized)
tggtttgccagcccggggtaaaacctacgtgtccaagaaactaacacgctacctcaactggattggagtccccaccaaagtgtttaatcttggggtgtatcggcgtgaagcagtcaagtc

SEQ ID NO: 252595 - DNA, 120 bp, Artificial Sequence
  ENSG00000123836_3 (sequence is synthesized)
ctataagtcctacgacttctttcggcatgacaatgaggaggccatgaagatccgcaaacagtgtgctctggtggcgctggaagatgttaaggcgtatctcactgaggagaatggtcagat

SEQ ID NO: 252596 - DNA, 120 bp, Artificial Sequence
  ENSG00000123836_4 (sequence is synthesized)
tgcggtgtttgatgccaccaatacaacccgggagaggagggacatgattttgaactttgctgaacagaattccttcaaggtattctttgtggaatccgtctgtgatgatcctgatgtcat

SEQ ID NO: 252597 - DNA, 120 bp, Artificial Sequence
  ENSG00000123836_5 (sequence is synthesized)
tgctgccaatattctggaggttaaggtatcaagccctgactatcctgaaaggaacagagagaacgtgatggaggacttcctgaagagaattgaatgctacaaagttacctaccgacctct

SEQ ID NO: 252598 - DNA, 120 bp, Artificial Sequence
  ENSG00000123836_6 (sequence is synthesized)
tgacccagacaactatgacaaggatctttctttcatcaaggtgataaacgtgggccagcgatttttagtcaacagagtccaggactacatccagagcaagatagtctactacctcatgaa

SEQ ID NO: 252599 - DNA, 120 bp, Artificial Sequence
  ENSG00000123836_7 (sequence is synthesized)
tatccacgtccagcctcgcaccatttacctttgccggcatggagaaagcgagttcaatctcttggggaagattgggggtgactctggcctctcggtgcggggaaagcagtttgcccaagc

SEQ ID NO: 252600 - DNA, 120 bp, Artificial Sequence
  ENSG00000123836_8 (sequence is synthesized)
tctaaggaaatttctggaggaacaggaaataacagacctcaaagtgtggacaagccagttgaagaggaccatacagactgctgaatctctcggggtgccctatgagcagtggaagattct

SEQ ID NO: 252601 - DNA, 120 bp, Artificial Sequence
  ENSG00000123836_9 (sequence is synthesized)
gaatgagattgatgctggtgtgtgtgaagagatgacctatgcagagattgagaaacggtacccagaagagtttgcacttcgagatcaagagaagtatctgtatcgatatcctggtgggga

SEQ ID NO: 252602 - DNA, 120 bp, Artificial Sequence
  ENSG00000123836_10 (sequence is synthesized)
gtcataccaggacctggtgcagcggctggagcctgtcatcatggagctggaacgtcagggcaatgtcctcgtcatctcccaccaggctgtcatgcgctgcctcctggcctacttcttgga

SEQ ID NO: 252603 - DNA, 120 bp, Artificial Sequence
  ENSG00000123836_11 (sequence is synthesized)
taagggcgcagatgagctaccatacttgagatgccctctccataccatcttcaaacttactcctgtggcctatgggtgcaaagtggaaacaattaaacttaacgtggaggctgtgaacac

SEQ ID NO: 252604 - DNA, 120 bp, Artificial Sequence
  ENSG00000123836_12 (sequence is synthesized)
gcaccgtgacaagccaactaacaacttccccaagaaccaaacccctgtaaggatgagaaggaacagctttacgcctctgtccagttcgaatacaataaggcgtccaagaaattacagtgt

SEQ ID NO: 252605 - DNA, 120 bp, Artificial Sequence
  ENSG00000123836_13 (sequence is synthesized)
tgggagccggcccctcaagcccctcagccctctccgtgcccaggacatgcaagaaggggccgactagccgaagacccaagtcagcattccggtggtgtaactgtgtgtttccctccagcc

SEQ ID NO: 252606 - DNA, 120 bp, Artificial Sequence
  ENSG00000123836_14 (sequence is synthesized)
ctggcctcctgcccttgtcactaatcaccaaggagtcattaacttcctccctctatgcccacccctgacacttcaccattaatcttaacacagaacatgaggttatgtgtttataggaca

SEQ ID NO: 252607 - DNA, 120 bp, Artificial Sequence
  ENSG00000123836_15 (sequence is synthesized)
acttaagctgttcttcagtttgaaacatcttttcacccaggggcaagttagcaaattgagtcttttaggacagattctcagatgggatgatctggaggaggaggaaaaagatacactccc

SEQ ID NO: 252608 - DNA, 120 bp, Artificial Sequence
  ENSG00000123836_16 (sequence is synthesized)
ttggggctgagcatgccccacactcttggatcttctctctgttccctggtgtcttcactaatgtcctcatgttggtgaagtgttgggggatggagggcgggtgagcagtcgggggacaaa

SEQ ID NO: 252609 - DNA, 120 bp, Artificial Sequence
  ENSG00000123836_17 (sequence is synthesized)
aagtctatttttccttcacttttgtctcttcaatgtgtgttttcctcacactccttacttgactgctttcttcccccactttcatgtcccctctggattgtccagtgtaatgcatggcat

SEQ ID NO: 252610 - DNA, 120 bp, Artificial Sequence
  ENSG00000123836_18 (sequence is synthesized)
tgtggtgtctgtctaggaaggaaggggtgattgacaagagacaagtctggcccagttaatgctttctgcagtgggtctaaatggatctggactggaggagtctttcctttcctttctccc

SEQ ID NO: 252611 - DNA, 120 bp, Artificial Sequence
  ENSG00000123836_19 (sequence is synthesized)
ttcctctccagccaggtcctgtaagggccagcccagactacaggacatccacagaatattctggagcttgcaagtagacatagggtgagagttcttgcctcctttcatgagaaacagttc

SEQ ID NO: 252612 - DNA, 120 bp, Artificial Sequence
  ENSG00000123836_20 (sequence is synthesized)
taagtcttcgatgccctgggagaatctggctctgagcatgtgggaaatgtcttggtttttatttttaatttagagtcaggcctgggtcttttgaggtctgcagagtggggtttaggagag

SEQ ID NO: 252613 - DNA, 120 bp, Artificial Sequence
  ENSG00000123836_21 (sequence is synthesized)
tagggtgggctctagctcttgcagggctcttagagagcagtcatgtcttttctcccatgactctcaggttctttgccaatcacagcaacttttcctgccaaagccagtatcctctggggc

SEQ ID NO: 252614 - DNA, 120 bp, Artificial Sequence
  ENSG00000123836_22 (sequence is synthesized)
tgtttagaagggcagttagattcaggagtcaccactgatgtttgagttgctcaaggcaagaggcagagaagagttcactaaaactgcttatttttgaataatttcagcacactgtcctta

SEQ ID NO: 252615 - DNA, 120 bp, Artificial Sequence
  ENSG00000123836_23 (sequence is synthesized)
agaagaaagaaacatcaaaacaaaatagtttttacatgaccatttttttcccaaatgtggaaaagcttgatgatgaatttaatctctctcattggagtattcttttgttcataaagagaa

SEQ ID NO: 252616 - DNA, 120 bp, Artificial Sequence
  ENSG00000123836_24 (sequence is synthesized)
actatctcatcttgatgtccagagaagtccttggaaccctgtgggatctagctcgtaactgtttgtatttctctattcacttctgtcatttcattttctttgtagggttaaacagaaaat

SEQ ID NO: 252617 - DNA, 120 bp, Artificial Sequence
  ENSG00000123836_25 (sequence is synthesized)
gtttagggaagaaattcttagccccttgatgaccatgatggcttattctctttcccaattttgcatgcaaaatgtacgaatatatgtatgtttttctgagaggcaagtttagggttctca

SEQ ID NO: 252618 - DNA, 120 bp, Artificial Sequence
  ENSG00000123836_26 (sequence is synthesized)
tgggattttaaaaagagataggtgactccccaccttaaagttatctgctggtcttttagaggtaaccagtgagaaggagttagctattttccaagggtgttttcatttggtaatggaaga

SEQ ID NO: 252619 - DNA, 120 bp, Artificial Sequence
  ENSG00000123836_27 (sequence is synthesized)
ctttttgctgtggttctcatccaggagtattccttagaattgcctttaggattgttgaatcataaacatgcctgtgtccaccttatgcttaatactgactcagaatctctgggatctggg

SEQ ID NO: 252620 - DNA, 120 bp, Artificial Sequence
  ENSG00000123836_28 (sequence is synthesized)
tctggacatgcatgtatttaagtagcttcccggatgattctgattcatagctcgggttaagaactccaccttaggaagttaggtggaaaaatactggatagtagtttctcagacaaaagt

SEQ ID NO: 252621 - DNA, 120 bp, Artificial Sequence
  ENSG00000123836_29 (sequence is synthesized)
tgttttagagggttattctaggttctagtcccatctttaaccctttacattgctgagtgatgtggaacaaatcactgaattaaataattgtctctagagagcagctggggattttaagca

SEQ ID NO: 252622 - DNA, 120 bp, Artificial Sequence
  ENSG00000123836_30 (sequence is synthesized)
ccctggagagaggtgcagaccctgccaggatgataaaggttgtcatcactggcaactgactcctgaccccgggtcctttactcgtatgtcccaagtaggataccataggcagcttctaaa

SEQ ID NO: 252623 - DNA, 120 bp, Artificial Sequence
  ENSG00000123836_31 (sequence is synthesized)
ggctgcttacctagattcttctcaaaattgtgtccaagatgttaagtaacctgctattcctgtttagtggttacataacatgtacttagtgtctttgtggagctttgggctggtaggggc

SEQ ID NO: 252624 - DNA, 120 bp, Artificial Sequence
  ENSG00000123836_32 (sequence is synthesized)
agggataggggaaagctaaacagaagtagaagaaaaggtccttgtccagaggaaggttattttaagagacaggacatgtaatttataacaaatggacatttgcaatatagcaacagtctg

SEQ ID NO: 252625 - DNA, 120 bp, Artificial Sequence
  ENSG00000123836_33 (sequence is synthesized)
agtctagaagtgttcaaccatcacatcgcttctcctgacttttctgttgtcctatggctatgagactacaggggttgggggatggggatgcccccaccaccaccagtgtgagaatgagat

SEQ ID NO: 252626 - DNA, 120 bp, Artificial Sequence
  ENSG00000123836_34 (sequence is synthesized)
atggttggggaggcgtgtttggcacttttacaaggttgcattgtccacatttgcttggatggtggcatctgtagcccaaatgggcattcagtcttttcttctgctgtgaggtaagagtaa

SEQ ID NO: 252627 - DNA, 120 bp, Artificial Sequence
  ENSG00000123836_35 (sequence is synthesized)
ttcagacctaatgaatgagaagagggagcactttgatccacagactttggattaacactgtacccactcttagcaaaaggggacttctctaacaagctagcattgtgttaacctgtcatt

SEQ ID NO: 252628 - DNA, 120 bp, Artificial Sequence
  ENSG00000123836_36 (sequence is synthesized)
aacccagcattagagacaggtcactgggatgttcattctggctctcagcctgctgttatttccccactctcacctgtgctagttcgctttctccagaagaggagctgaggtggtcttatc

SEQ ID NO: 252629 - DNA, 120 bp, Artificial Sequence
  ENSG00000123836_37 (sequence is synthesized)
ctcagataggacatgagaaattggaatttggcaagcaagggcttcagcatcctttagtttctaaagcaagatcccttcagagaagtctagcaggaagaagccaggagaatgtagaatgga

SEQ ID NO: 252630 - DNA, 120 bp, Artificial Sequence
  ENSG00000123836_38 (sequence is synthesized)
aaagagctcttactccaaattttagagaagtttcagctctacttctcatcttttctctcctggtcttacttgaatgcatgttggtaatctgtatacattactatgactgtgtctatcaca

SEQ ID NO: 252631 - DNA, 120 bp, Artificial Sequence
  ENSG00000123836_39 (sequence is synthesized)
agtcctacaaaataaaaatggacttaaaagtactctctgctgaggctgtaagttttgttttgtgagaaataggtaaagacattagcatttaatctactggaataagctggttgctgtggc

SEQ ID NO: 252632 - DNA, 87 bp, Artificial Sequence
  ENSG00000123836_40 (sequence is synthesized)
agaatcacacctctaaaaaagttttttataaatttacttgtctaaagtggggaaagggaaattattctgttttcttattcttgcttc

SEQ ID NO: 252633 - DNA, 120 bp, Artificial Sequence
  ENSG00000123836_41 (sequence is synthesized)
tggggaaagggaaattattctgttttcttattcttgcttcaagactatgacagatttgaaagagaattctaaagcagatttagagaacctgcttctcttcttatctcctaatccctaaat

SEQ ID NO: 252634 - DNA, 120 bp, Artificial Sequence
  ENSG00000123836_42 (sequence is synthesized)
tgtaatttagctcttatctgtattgttgttttgttttggtaaagggatgatttttacattgagttttaaagtagaataagaaaagcttctaaaaacttgcattgtgctagggatctgccc

SEQ ID NO: 252635 - DNA, 120 bp, Artificial Sequence
  ENSG00000123836_43 (sequence is synthesized)
tatatctttgcctctggtgtttcgttgttgttgttattgtttgtttgtttccaaagaagttggagttaaggacacaatatatttgtacccctagactgaatgggtgagtattccatatga

SEQ ID NO: 252636 - DNA, 120 bp, Artificial Sequence
  ENSG00000123836_44 (sequence is synthesized)
ggatctgggtaatcctctttgcaacccacatttggtcttcagagacactggcattttgaagaaacatatgatatagctgtttggaaataaattcatctatgttactttttttttcttttt

SEQ ID NO: 252637 - DNA, 120 bp, Artificial Sequence
  ENSG00000123836_45 (sequence is synthesized)
tttttttttttatgagcaggagatcttaattgacagaaactcattggtggttggagtggccaatgggcacgggaaaaagtatccagtaatcagaagaattgtatctgggttatgtaatct

SEQ ID NO: 252638 - DNA, 120 bp, Artificial Sequence
  ENSG00000123836_46 (sequence is synthesized)
tatgcacattccattgtctttgccaagcccagaagccatgttgtgttcattgttaagaaatttgatagatttacccagcttttctatgtattttgacttattgaaaatatgtaacaactg

SEQ ID NO: 252639 - DNA, 120 bp, Artificial Sequence
  ENSG00000123836_47 (sequence is synthesized)
agtcgggttgcagcactggtggggtagaatcgactttccctgaaggtgacacagatgtcagaattgtgtccagggatttaatttagacccatactgtccaggagactgtctctagttgga

SEQ ID NO: 252640 - DNA, 120 bp, Artificial Sequence
  ENSG00000123836_48 (sequence is synthesized)
tctctgtgctgactgactgacagacagactttagtgtctgtgtgctgactgacagactctagtagtgtctatatgttgaccaactggtagaccaggaggatctgtgtgctgattgactct

SEQ ID NO: 252641 - DNA, 120 bp, Artificial Sequence
  ENSG00000123836_49 (sequence is synthesized)
agtaggatctgtttgtcactgacagactgtagtagtgtctgtgtgctgactgatagatagactatagtaaaatttgggtgttgcctgactaacggtctagggtctgtaagctgacagtct

SEQ ID NO: 252642 - DNA, 120 bp, Artificial Sequence
  ENSG00000123836_50 (sequence is synthesized)
gcctgctttctgattgtatccattgaagtgtatgtacattatggtaattctctgtctattaaatgtgtctaacaaaggaaggaattaagcactccacgtgttttctttataggggagttc

SEQ ID NO: 252643 - DNA, 120 bp, Artificial Sequence
  ENSG00000123836_51 (sequence is synthesized)
tgtacactatgattttaaatagatatttcttatatagtagtggccaaattctcattattttgtacaagataaaggttatgcatcacttttatggtattttgtgaactcagctaagggaat

SEQ ID NO: 252644 - DNA, 120 bp, Artificial Sequence
  ENSG00000123836_52 (sequence is synthesized)
gcctgttcagagcctggagttgttacctttacttgaagtcatctcatccagtcccctgctttagggcaggacttcagttccactgttcatttctgaagcttctgtgtccccagcttaccc

SEQ ID NO: 252645 - DNA, 120 bp, Artificial Sequence
  ENSG00000123836_53 (sequence is synthesized)
tgttctgaaatgttgtattccattggacagggctgctatttttagtcagccatgcatttggattttacacttaatctagtaagtaaaaatgagaagaaaatttggcatttaaaaattgat

SEQ ID NO: 252646 - DNA, 120 bp, Artificial Sequence
  ENSG00000123836_54 (sequence is synthesized)
tttaagggttggcaaaagtattttttccagtaagcctttcactggatatctgtgaccaatgtttacctacgcaatgtttttgtatctgaattgcttatgtacgttttttattatattgac

SEQ ID NO: 252647 - DNA, 120 bp, Artificial Sequence
  ENSG00000123836_55 (sequence is synthesized)
ctaacaagaagatcaacttatgctggtatggtgatggttttgctatggcaaaatcaaagggctgatcatacatggtgccctttgggaagggggatggtgtggggctgagcacctctgggt

SEQ ID NO: 252648 - DNA, 120 bp, Artificial Sequence
  ENSG00000123836_56 (sequence is synthesized)
tgaatgggaatgggtcagattgggaagcctaggaagagagttctactgtagatttcctaggcactgctctgttgaaataggaacataagtctttagcaacattctgatttaatcgggtga

SEQ ID NO: 252649 - DNA, 120 bp, Artificial Sequence
  ENSG00000123836_57 (sequence is synthesized)
cactgataacaaagtatgccactcagatccatttaaagtgtgcataactgtatttgaaatgtgtttttgtgtgcgtgtgtgtagaatgggtaaataaaattgttgagtaacttgaaccta

SEQ ID NO: 252650 - DNA, 120 bp, Artificial Sequence
  ENSG00000123836_58 (sequence is synthesized)
ggctgtgcgcagacgcccctccgcagcgtccctcatgttgccttgctaatgatgtggatgttcaggcctcacctctccaaacgactgggatctactgaaaagcttgggatgtcagcttca

SEQ ID NO: 252651 - DNA, 120 bp, Artificial Sequence
  ENSG00000123836_59 (sequence is synthesized)
cagaggctagaacaggaagttaagtgggaactggactttgggggccaccaaaacgaggcctggagaaacgtcaccatatttcctcccctcctgcctaatgggaatatcagttacactgaa

SEQ ID NO: 252652 - DNA, 120 bp, Artificial Sequence
  ENSG00000123836_60 (sequence is synthesized)
tgtgcctcaaaacatttagcaacctgaaccagtgactttttgtcatctctgtgctgagtttggtccaagttggtcaatctcattctgtataggcatttaacatcctacctgtgactgtct

SEQ ID NO: 252653 - DNA, 120 bp, Artificial Sequence
  ENSG00000123836_61 (sequence is synthesized)
gcatcctttgctggctcttttttgcccaaagtgcaaatgcacttcttcagatttacttttcaagtgagaaggtaagagctggtctctgccactgttccaggcgagcaggctagagtctaa

SEQ ID NO: 252654 - DNA, 120 bp, Artificial Sequence
  ENSG00000123836_62 (sequence is synthesized)
tatacttatgctagcagttaccatttgccacattggaagcaagagacaaatcaccaggtgaatggagggtcttctgagaaattcagtccctaaaacatcttctctgccttgatagaagaa

SEQ ID NO: 252655 - DNA, 120 bp, Artificial Sequence
  ENSG00000123836_63 (sequence is synthesized)
cagtgtcagtggcaaccttttcatttagagaagtttttcttgttccaggcccttcaggacaggatctgactgcaagactccccaaaatgggtacccatcttctaagttcccttttgtagc

SEQ ID NO: 252656 - DNA, 120 bp, Artificial Sequence
  ENSG00000123836_64 (sequence is synthesized)
tactgtacttttgacttgatgcatgtgcctctcatgcatcaagatggggctgatgtggttctcctgggtggttgggaatgtggactagacagaaaagtagagtgccatttatatcacgtg

SEQ ID NO: 252657 - DNA, 120 bp, Artificial Sequence
  ENSG00000123836_65 (sequence is synthesized)
agtaagtcaagaaagctccttgagaatcagcccgatcagggagtgttttggcttcagaacaggtggaaggagacacgcccctctgtgggctctgtcaccatgatacagtccttgagagag

SEQ ID NO: 252658 - DNA, 120 bp, Artificial Sequence
  ENSG00000123836_66 (sequence is synthesized)
ctgtggctgtgacttggagggcagtagtctcctgatacctgcctcttggccactggtcactattgtggtcactgatctctcatataaaagtgagggtggcggggtcatggaccagcgcct

SEQ ID NO: 252659 - DNA, 120 bp, Artificial Sequence
  ENSG00000123836_67 (sequence is synthesized)
cagtgcattagtcattcgcttttccttacagacaaatcagataactcttccccagtgattgtcaaatgtatgaatgtatctctgtaaatgtggttttgacatgtcactgttactgaagga

SEQ ID NO: 252660 - DNA, 120 bp, Artificial Sequence
  ENSG00000123836_68 (sequence is synthesized)
gagtatggaatccccacaggatattatatcttgcaaggaaagtctattttttaaagaatagtatgtttttagctttacttttctttcttttccttttcactcaaatgctcacttgctggg

SEQ ID NO: 252661 - DNA, 120 bp, Artificial Sequence
  ENSG00000123836_69 (sequence is synthesized)
caaaagggtgagtagcaagaaaagtaatgatatgtagcttttctcaaatggttcttttatactgtggatgatacaggactctgttacctaagatgtgataagctgggctgcaggcggttc

SEQ ID NO: 252662 - DNA, 120 bp, Artificial Sequence
  ENSG00000123836_70 (sequence is synthesized)
agcatccagcaactaggagctgcttttctacgtacaaagctgccttcaggaaggctccttaccctgtagcagatgattttcatctggctgcctaccgcatgctgtactataatgatttag

SEQ ID NO: 252663 - DNA, 120 bp, Artificial Sequence
  ENSG00000123836_71 (sequence is synthesized)
ttgtgatatggatttctctctgcatcgaaaactgtcttttgatgatcagacaatgtttatatttagttatttattctatccatgtaaggcatttttgagttttcttgtcactgtttgcat

SEQ ID NO: 252664 - DNA, 120 bp, Artificial Sequence
  ENSG00000123836_72 (sequence is synthesized)
gtatttaatcagaatgtaatataatttatgttgtcaggtttttttttgtttgtttgtttggggttttttttgtagaaatttaggtagttagagcttttaagtctaatgtcatattaactt

SEQ ID NO: 252665 - DNA, 120 bp, Artificial Sequence
  ENSG00000123836_73 (sequence is synthesized)
aagttaaatttccagaacgtagatatctgtcttctgtaaaaggaaaataacgatgttaagggacagtgaattttttttgaatactttgtttctcattgatttttattgtaagtgtaaacc

SEQ ID NO: 252666 - DNA, 120 bp, Artificial Sequence
  ENSG00000123836_74 (sequence is synthesized)
aagagatgcatttctctggagaagtgtttatctcctggattaataaaatcatgctaaaatatgcgagtaatatgtattgcttttgtaataagaacataaaataaaattatttttaattaa

SEQ ID NO: 252667 - DNA, 120 bp, Artificial Sequence
  ENSG00000123836_75 (sequence is synthesized)
gatgtcataatactaacaaaacaggaagggcatctccaaatcagcagttcagtgcaaccagagtcacacccatggatgaagtcaatgaagttgatccagctccatagcctccaagacggc

SEQ ID NO: 252668 - DNA, 120 bp, Artificial Sequence
  ENSG00000123836_76 (sequence is synthesized)
agtgcaaccagagtcacacccatggatgaagtcaatgaagttgatccagctccatagaaatataccaagtctctaacattccaagagagttggaaaggaggcctggactacagaaaaggg

SEQ ID NO: 252669 - DNA, 120 bp, Artificial Sequence
  ENSG00000123836_77 (sequence is synthesized)
aggatttccaaagtcagtcaaaagcctgaaagaataagacttcctggttgatataggtcatcatttgaggggcctccaagacggccatcaaacctgtttttcaccacattttacagcttc

SEQ ID NO: 252670 - DNA, 120 bp, Artificial Sequence
  ENSG00000123836_78 (sequence is synthesized)
ctggatcagggaagttacgctgaagtggatcatagtggatgccatcataaataagcagaacccttttgtattgcctcactatagaagtctggatcgcttgctacaatttgtgctatgagg

SEQ ID NO: 252671 - DNA, 120 bp, Artificial Sequence
  ENSG00000123836_79 (sequence is synthesized)
cgtctcatctcaggggcacaagctggattcaagactcctccttcgacgacatagtacacactagtaaagaggcaagagttgtctgctgggaccacggttctggtaagcacaggcaaagtt

SEQ ID NO: 252672 - DNA, 120 bp, Artificial Sequence
  ENSG00000123836_80 (sequence is synthesized)
ggctcaagggccagtgtcatgctgacactcctggcagcatcaggacagtggttgaatattcccagcctgccacgctgcctactaggagggtggtatcttaggagcagcagttgtttctgg

SEQ ID NO: 252673 - DNA, 120 bp, Artificial Sequence
  ENSG00000123836_81 (sequence is synthesized)
agtgcaaccagagtcacacccatggatgaagtcaatgaagttgatccagctccatagcctccaagacggccatcaaacctgtttttcaccacattttacagtattgcctcactatagaag

SEQ ID NO: 252674 - DNA, 120 bp, Artificial Sequence
  ENSG00000123836_82 (sequence is synthesized)
ggtgtgtgtgaagagatgacctatgcagagattgagaaacggtacccagaagagtttgcacttcgagatcaagagaagtatctgtatcgatatcctggtggggagggtgcaaagtggaaa

SEQ ID NO: 252675 - DNA, 120 bp, Artificial Sequence
  ENSG00000123836_83 (sequence is synthesized)
ctcagcattttatcttgggaatatagttataatcctggactctgctgcttggtgggagtgataaataattatttgacatggaaatttaatgcaaagtctccagggtagaatgtcctgtct

SEQ ID NO: 252676 - DNA, 120 bp, Artificial Sequence
  ENSG00000123838_0 (sequence is synthesized)
aaccgtccttgaccagccaaccacatggctgaaattcagggactctttggtggagcaattaccagtcaacttcagggtattatgataaactctgatctggggaggaaccaggactacata

SEQ ID NO: 252677 - DNA, 120 bp, Artificial Sequence
  ENSG00000123838_1 (sequence is synthesized)
gatcaaggcagttttcttctttgagaaactatcccagatatcatcatagagtcttctgctcttcctcaactaccaaagaaaaacatcagcgaagcagcaggccatgcaccccccaaaaac

SEQ ID NO: 252678 - DNA, 120 bp, Artificial Sequence
  ENSG00000123838_2 (sequence is synthesized)
tccatctggggctcttcatagaaaaaggaaaatggcagcctggcccttctccaggctgtggaaagtctctgatccaattctcttccaaatgaccttgatcgctgctctgttgcctgctgt

SEQ ID NO: 252679 - DNA, 120 bp, Artificial Sequence
  ENSG00000123838_3 (sequence is synthesized)
tcttggcaattgtggtcctccacccactttatcatttgctgccccgatggatattacgttgactgagacacgcttcaaaactggaactactctgaaatacacctgcctccctggctacgt

SEQ ID NO: 252680 - DNA, 120 bp, Artificial Sequence
  ENSG00000123838_4 (sequence is synthesized)
cagatcccattcaactcagacgcttacctgtaattctgatggcgaatgggtgtataacaccttctgtatctacaaacgatgcagacacccaggagagttacgtaatgggcaagtagagat

SEQ ID NO: 252681 - DNA, 120 bp, Artificial Sequence
  ENSG00000123838_5 (sequence is synthesized)
taagacagatttatcttttggatcacaaatagaattcagctgttcagaaggatttttcttaattggctcaaccactagtcgttgtgaagtccaagatagaggagttggctggagtcatcc

SEQ ID NO: 252682 - DNA, 120 bp, Artificial Sequence
  ENSG00000123838_6 (sequence is synthesized)
tctcccacaatgtgaaattgtcaagtgtaagcctcctccagacatcaggaatggaaggcacagcggtgaagaaaatttctacgcatacggcttttctgtcacctacagctgtgacccccg

SEQ ID NO: 252683 - DNA, 120 bp, Artificial Sequence
  ENSG00000123838_7 (sequence is synthesized)
cttctcactcttgggccatgcctccatttcttgcactgtggagaatgaaacaataggtgtttggagaccaagccctcctacctgtgaaaaaatcacctgtcgcaagccagatgtttcaca

SEQ ID NO: 252684 - DNA, 120 bp, Artificial Sequence
  ENSG00000123838_8 (sequence is synthesized)
tggggaaatggtctctggatttggacccatctataattacaaagacactattgtgtttaagtgccaaaaaggttttgttctcagaggcagcagtgtaattcattgtgatgctgatagcaa

SEQ ID NO: 252685 - DNA, 120 bp, Artificial Sequence
  ENSG00000123838_9 (sequence is synthesized)
gttgggactgtgttaaggtaccgctgtcatcctggctacaaacccactacagatgagcctacgactgtgatttgtcagaaaaatttgagatggaccccataccaaggatgtgaggcgtta

SEQ ID NO: 252686 - DNA, 120 bp, Artificial Sequence
  ENSG00000123838_10 (sequence is synthesized)
tgttgccctgaaccaaagctaaataatggtgaaatcactcaacacaggaaaagtcgtcctgccaatcactgtgtttatttctatggagatgagatttcattttcatgtcatgagaccagt

SEQ ID NO: 252687 - DNA, 120 bp, Artificial Sequence
  ENSG00000123838_11 (sequence is synthesized)
aggttttcagctatatgccaaggagatggcacgtggagtccccgaacaccatcatgtggagacatttgcaattttcctcctaaaattgcccatgggcattataaacaatctagttcatac

SEQ ID NO: 252688 - DNA, 120 bp, Artificial Sequence
  ENSG00000123838_12 (sequence is synthesized)
agctttttcaaagaagagattatatatgaatgtgataaaggctacattctggtcggacaggcgaaactctcctgcagttattcacactggtcagctccagcccctcaatgtaaagctctg

SEQ ID NO: 252689 - DNA, 120 bp, Artificial Sequence
  ENSG00000123838_13 (sequence is synthesized)
tgtcggaaaccagaattagtgaatggaaggttgtctgtggataaggatcagtatgttgagcctgaaaatgtcaccatccaatgtgattctggctatggtgtggttggtccccaaagtatc

SEQ ID NO: 252690 - DNA, 120 bp, Artificial Sequence
  ENSG00000123838_14 (sequence is synthesized)
acttgctctgggaacagaacctggtacccagaggtgcccaagtgtgagtgggagacccccgaaggctgtgaacaagtgctcacaggcaaaagactcatgcagtgtctcccaaacccagag

SEQ ID NO: 252691 - DNA, 120 bp, Artificial Sequence
  ENSG00000123838_15 (sequence is synthesized)
gatgtgaaaatggccctggaggtatataagctgtctctggaaattgaacaactggaactacagagagacagcgcaagacaatccactttggataaagaactataatttttctcaaaagaa

SEQ ID NO: 252692 - DNA, 120 bp, Artificial Sequence
  ENSG00000123838_16 (sequence is synthesized)
ggaggaaaaggtgtcttgctggcttgcctcttgcaattcaatacagatcagtttagcaaatctactgtcaatttggcagtgatattcatcataataaatatctagaaatgataatttgct

SEQ ID NO: 252693 - DNA, 120 bp, Artificial Sequence
  ENSG00000123838_17 (sequence is synthesized)
aaagtttagtgctttgagattgtgaaattattaatcatcctctgtgtggctcatgtttttgcttttcaacacacaaagcacaaattttttttcgattaaaaatgtatgtataaaaaacta

SEQ ID NO: 252694 - DNA, 120 bp, Artificial Sequence
  ENSG00000123838_18 (sequence is synthesized)
caaaggctgtcatttccttgaagacatggatcccataacatttattctagtgctttatgacaagttggaattcaatgactatttattaaattgagttctttcagcagaaaaacatcagcg

SEQ ID NO: 252695 - DNA, 120 bp, Artificial Sequence
  ENSG00000123843_0 (sequence is synthesized)
cattcccagaaaccaggaaatttctgaaactgagttttaaacctggcaactcttttaccatccctttgtatttttgcagttcctccctataccagcttccttacagctgttctgatttcc

SEQ ID NO: 252696 - DNA, 120 bp, Artificial Sequence
  ENSG00000123843_1 (sequence is synthesized)
tgtcgtaagattttttcttttcattttctccagggagggtaaatcaatataacctcttctctagagaggaggtggttaggttggtcttaagcagtgttagaagatctattttttttcaaa

SEQ ID NO: 252697 - DNA, 120 bp, Artificial Sequence
  ENSG00000123843_2 (sequence is synthesized)
ccaggtgtctgagctgggtgaattccagcctggggagaggactttgatcaccagatgtttttttggtgtgcgtgctgtcttatggttgcgtggcgagtttctgcttcagatgcagagcac

SEQ ID NO: 252698 - DNA, 120 bp, Artificial Sequence
  ENSG00000123843_3 (sequence is synthesized)
tgtccagagcttcctccagtggacaatagcatatttgtcgcaaaggaggtggaaggacagattctggggacttacgtttgtatcaagggctaccacctggtaggaaagaagacccttttt

SEQ ID NO: 252699 - DNA, 120 bp, Artificial Sequence
  ENSG00000123843_4 (sequence is synthesized)
agtgccgcttgggccactgtcctgatcctgtgctggtgaatggagagttcagttcttcagggcctgtgaatgtaagtgacaaaatcacgtttatgtgcaatgaccactacatcctcaagg

SEQ ID NO: 252700 - DNA, 120 bp, Artificial Sequence
  ENSG00000123843_5 (sequence is synthesized)
gcagcaatcggagccagtgtctagaggaccacacctgggcacctccctttcccatctgcaaaagtagggactgtgaccctcctgggaatccagttcatggctattttgaaggaaataact

SEQ ID NO: 252701 - DNA, 120 bp, Artificial Sequence
  ENSG00000123843_6 (sequence is synthesized)
tcaccttaggatccaccattagttattactgtgaagacaggtactacttagtgggcgtgcaggagcagcaatgcgttgatggggagtggagcagtgcacttccagtctgcaagttgatcc

SEQ ID NO: 252702 - DNA, 120 bp, Artificial Sequence
  ENSG00000123843_7 (sequence is synthesized)
aggaagctcccaaaccagagtgtgagaaggcacttcttgcctttcaggagagtaagaacctctgcgaagccatggagaactttatgcaacaattaaaggaaagtggcatgacaatggagg

SEQ ID NO: 252703 - DNA, 120 bp, Artificial Sequence
  ENSG00000123843_8 (sequence is synthesized)
agctaaaatattctctggagctgaagaaagctgagttgaaggcaaaattgttgtaacactacagctgagcagatgtaatagaaataaacctatgaataaattttcttcttggttctgaaa

SEQ ID NO: 252704 - DNA, 120 bp, Artificial Sequence
  ENSG00000123843_9 (sequence is synthesized)
ttccatacttttttcctgtgcttatgtatgtgtaaccatgatttacaaaaataatattatacatgctctttcatcatctgctgtttttactcaaccatttgtttagaagatttttatgtt

SEQ ID NO: 252705 - DNA, 120 bp, Artificial Sequence
  ENSG00000123843_10 (sequence is synthesized)
tcagtaaatatacacccacataatcattgttagccactatttttgatcgacatgtttagtgtcctgtggtctcagagctgactgggaccttagagatgatattatttaacctgcttatct

SEQ ID NO: 252706 - DNA, 120 bp, Artificial Sequence
  ENSG00000123843_11 (sequence is synthesized)
gataatattaggaaggaagccaagaggagcaaaatggctttagtgctacatagctagtggaagagccagtatcaagactcacaactcctaacacgtcatcctgctttctttccacagttc

SEQ ID NO: 252707 - DNA, 85 bp, Artificial Sequence
  ENSG00000123843_12 (sequence is synthesized)
acaactcctaacacgtcatcctgctttctttccacagttccacagactcgtcctcttcccttccagccatgttctcccctatttc

SEQ ID NO: 252708 - DNA, 68 bp, Artificial Sequence
  ENSG00000123843_13 (sequence is synthesized)
ccttctcccctttttctgatactctctttgatatagtttggatgtgtgttcctgctcaaatctcatat

SEQ ID NO: 252709 - DNA, 120 bp, Artificial Sequence
  ENSG00000123843_14 (sequence is synthesized)
tgatatagtttggatgtgtgttcctgctcaaatctcatattgaattgtaatctccagtgttggaggtggtgcttggtgggaggtgactggatcatgcgggtggatttctcatgaatggtc

SEQ ID NO: 252710 - DNA, 78 bp, Artificial Sequence
  ENSG00000123843_15 (sequence is synthesized)
cagcgcctcctccctctctcgttcctgcacctgttatgtgagatgcctccctccccctttgccttctgccatgattgt

SEQ ID NO: 252711 - DNA, 76 bp, Artificial Sequence
  ENSG00000123843_16 (sequence is synthesized)
tatcacaatgtgagatggactaatacactcatgtttcacaactcttatccacaggggatgtcagcttccacttgag

SEQ ID NO: 252712 - DNA, 120 bp, Artificial Sequence
  ENSG00000123843_17 (sequence is synthesized)
cacaactcttatccacaggggatgtcagcttccacttgagctcacacgcttcatctcctctctcagggagttatttcttcagccttcacctatggcccaatttttcttttcttgtacatt

SEQ ID NO: 252713 - DNA, 120 bp, Artificial Sequence
  ENSG00000123843_18 (sequence is synthesized)
aacaattagcttctctacaacttaaaatttctttccttgagctcctgctgtcagataatactcccaaatccctactaactcagaagatgggctgggggaaagctctttcccatggacaaa

SEQ ID NO: 252714 - DNA, 120 bp, Artificial Sequence
  ENSG00000123843_19 (sequence is synthesized)
tatgatttagaagagaaggaaatgaatgaagaacaggtttccagatcccgcaggtgttgctgtgaggatgtcaggtgctggcgcaggtgttgctctgaggctgtcaggtgctggcataaa

SEQ ID NO: 252715 - DNA, 120 bp, Artificial Sequence
  ENSG00000123843_20 (sequence is synthesized)
cagctgcaattaggggtgctgttcattgagcgtgcctggccctcataactatgacttctatactcgtttctctcaggggactgtgaccctcctgggaatccagttcatggctattttgaa

SEQ ID NO: 252716 - DNA, 120 bp, Artificial Sequence
  ENSG00000123843_21 (sequence is synthesized)
gccagatgcctttttaggttattgaatgataaagtgcttctatcactctccccacccaaaacctgggtgtgtaaacacctgattcagaatttctcacttctctatgttttatgggttgac

SEQ ID NO: 252717 - DNA, 120 bp, Artificial Sequence
  ENSG00000123843_22 (sequence is synthesized)
tcatcacttgggtcctctcctacctccaggaaaatggttttactttgaactgctttgtaataccgagataacttaagcatgcattgaggctcaagggcagggaggtggattccatcacag

SEQ ID NO: 252718 - DNA, 120 bp, Artificial Sequence
  ENSG00000123892_0 (sequence is synthesized)
gcgcagagcccaggctgcgcttccctggtcaggcacggcacgtctggccggccgccaggatgcaggccccgcacaaggagcacctgtacaagttgctggtgattggcgacctgggcgtgg

SEQ ID NO: 252719 - DNA, 120 bp, Artificial Sequence
  ENSG00000123892_1 (sequence is synthesized)
ggaagaccagtatcatcaagcgctacgtgcaccagaacttctcttcgcactaccgggccacaatcggcgtggacttcgcgctcaaggtgctccactgggacccggagactgtggtgcgcc

SEQ ID NO: 252720 - DNA, 120 bp, Artificial Sequence
  ENSG00000123892_2 (sequence is synthesized)
tgcagctctgggatatcgcaggtcaagaaagatttggaaacatgacgagggtctattaccgagaagctatgggtgcatttattgtcttcgatgtcaccaggccagccacatttgaagcag

SEQ ID NO: 252721 - DNA, 120 bp, Artificial Sequence
  ENSG00000123892_3 (sequence is synthesized)
tggcaaagtggaaaaatgatttggactccaagttaagtctccctaatggcaaaccggtttcagtggttttgttggccaacaaatgtgaccaggggaaggatgtgctcatgaacaatggcc

SEQ ID NO: 252722 - DNA, 120 bp, Artificial Sequence
  ENSG00000123892_4 (sequence is synthesized)
tcaagatggaccagttctgcaaggagcacggtttcgtaggatggtttgaaacatcagcaaaggaaaatataaacattgatgaagcctccagatgcctggtgaaacacatacttgcaaatg

SEQ ID NO: 252723 - DNA, 120 bp, Artificial Sequence
  ENSG00000123892_5 (sequence is synthesized)
gtctggtaggaatgacctcattgttccacaaattgtgcctctatttttaccattttgggtaaacgtcaggatagagataccacatgtggcaagccaaagatctatgcctctgttttttca

SEQ ID NO: 252724 - DNA, 120 bp, Artificial Sequence
  ENSG00000123892_6 (sequence is synthesized)
gtgagagagaaatagcaaatgttctttctatgctttcctcaccatcatcacagtgtttacaaacttttgaaaatatttagtctgttacaaacttctgtcatgtagctgaccaaaatcctg

SEQ ID NO: 252725 - DNA, 120 bp, Artificial Sequence
  ENSG00000123892_7 (sequence is synthesized)
cagggccacagtcggcactgttatttgcttcttttaatcagcaaaggcctcaagtcttaaaataaaaggggagaagaacaaactagctgtcaagtcaaggactggctttcaccttgccct

SEQ ID NO: 252726 - DNA, 120 bp, Artificial Sequence
  ENSG00000123892_8 (sequence is synthesized)
ggtgtctttttccagatttcagtatattctctgatggcctgacaggcctattaagtagatgtgatattttctcccaagatgacctccattctcggcagacctaagagttgcctctgagtt

SEQ ID NO: 252727 - DNA, 120 bp, Artificial Sequence
  ENSG00000123892_9 (sequence is synthesized)
agctctttggaatcgtgaacacaggtgtgctatattgtccttgtcctaactgtcacttgccatggcctgaatgttggcttaactgaatattgtatgaaaagacatgcctccatatgtgcc

SEQ ID NO: 252728 - DNA, 120 bp, Artificial Sequence
  ENSG00000123892_10 (sequence is synthesized)
tttctgttagctttctctgactcaagctgtggggctcctctatacatgctatacatgtaatatatattatatatatttttgcaagtgaacaataaaacattaaaagatgctgtttcccta

SEQ ID NO: 252729 - DNA, 80 bp, Artificial Sequence
  ENSG00000123901_0 (sequence is synthesized)
gtgccgaccgcgggctggtggcgggcggcgcggtgctccgcgcgtccgggctccctggctcctcgggacggccttgtatg

SEQ ID NO: 252730 - DNA, 120 bp, Artificial Sequence
  ENSG00000123901_1 (sequence is synthesized)
gggaggggacgcccggcccgcaggctcccaggggaggggtggctcctgcaaaatggtccctcacctcttgctgctctgtctcctccccttggtgcgagccaccgagccccacgagggccg

SEQ ID NO: 252731 - DNA, 120 bp, Artificial Sequence
  ENSG00000123901_2 (sequence is synthesized)
ggccgacgagcagagcgcggaggcggccctggccgtgcccaatgcctcgcacttcttctcttggaacaactacaccttctccgactggcagaactttgtgggcaggaggcgctacggcgc

SEQ ID NO: 252732 - DNA, 120 bp, Artificial Sequence
  ENSG00000123901_3 (sequence is synthesized)
tgagtcccagaaccccacggtgaaagccctgctcattgtggcttactccttcatcattgtcttctcactctttggcaacgtcctggtctgtcatgtcatcttcaagaaccagcgaatgca

SEQ ID NO: 252733 - DNA, 120 bp, Artificial Sequence
  ENSG00000123901_4 (sequence is synthesized)
ctcggccaccagcctcttcatcgtcaacctggcagttgccgacataatgatcacgctgctcaacacccccttcactttggttcgctttgtgaacagcacatggatatttgggaagggcat

SEQ ID NO: 252734 - DNA, 120 bp, Artificial Sequence
  ENSG00000123901_5 (sequence is synthesized)
gtgccatgtcagccgctttgcccagtactgctcactgcacgtctcagcactgacactgacagccattgcggtggatcgccaccaggtcatcatgcaccccttgaaaccccggatctcaat

SEQ ID NO: 252735 - DNA, 120 bp, Artificial Sequence
  ENSG00000123901_6 (sequence is synthesized)
cacaaagggtgtcatctacatcgctgtcatctggaccatggctacgttcttttcactcccacatgctatctgccagaaattatttaccttcaaatacagtgaggacattgtgcgctccct

SEQ ID NO: 252736 - DNA, 120 bp, Artificial Sequence
  ENSG00000123901_7 (sequence is synthesized)
ctgcctgccagacttccctgagccagctgacctcttctggaagtacctggacttggccaccttcatcctgctctacatcctgcccctcctcatcatctctgtggcctacgctcgtgtggc

SEQ ID NO: 252737 - DNA, 120 bp, Artificial Sequence
  ENSG00000123901_8 (sequence is synthesized)
caagaaactgtggctgtgtaatatgattggcgatgtgaccacagagcagtactttgccctgcggcgcaaaaagaagaagaccatcaagatgttgatgctggtggtagtcctctttgccct

SEQ ID NO: 252738 - DNA, 120 bp, Artificial Sequence
  ENSG00000123901_9 (sequence is synthesized)
ctgctggttccccctcaactgctacgtcctcctcctgtccagcaaggtcatccgcaccaacaatgccctctactttgccttccactggtttgccatgagcagcacctgctataacccctt

SEQ ID NO: 252739 - DNA, 120 bp, Artificial Sequence
  ENSG00000123901_10 (sequence is synthesized)
catatactgctggctgaacgagaacttcaggattgagctaaaggcattactgagcatgtgtcaaagacctcccaagcctcaggaggacaggccaccctccccagttccttccttcagggt

SEQ ID NO: 252740 - DNA, 120 bp, Artificial Sequence
  ENSG00000123901_11 (sequence is synthesized)
ggcctggacagagaagaatgatggccagagggctccccttgccaataacctcctgcccacctcccaactccagtctgggaagacagacctgtcatctgtggaacccattgtgacgatgag

SEQ ID NO: 252741 - DNA, 120 bp, Artificial Sequence
  ENSG00000123901_12 (sequence is synthesized)
ttagaagaggttgggaagagggagtgggaggggtctgtctccacctgaggcagggaaagagagcctattctcacacatgatcttcagagtgctggaaacacactcctgcagaagctgtag

SEQ ID NO: 252742 - DNA, 120 bp, Artificial Sequence
  ENSG00000123901_13 (sequence is synthesized)
gactcttgaattcctaggaaactgtccagcctcctagccccatgtgatgtgaaaactaaaaggcaccaccaactagacatgtgttcataaattcccatctaagaaacactgggaggcaca

SEQ ID NO: 252743 - DNA, 120 bp, Artificial Sequence
  ENSG00000123901_14 (sequence is synthesized)
gcagcctgtatctctgaggaagaggagcgaggacaacgttggcccagatgggggctgaatcattcaactgcctccatctgtggggcagctgctgccttacagcccttcctactgctgagc

SEQ ID NO: 252744 - DNA, 120 bp, Artificial Sequence
  ENSG00000123901_15 (sequence is synthesized)
atccctaagggagacctaaatcatactttgggtgtggtgacccagatgcacagagctctgcttgaaacaggtacacgggccagggaaatgccagcaagccagagcgggcgtggagatttt

SEQ ID NO: 252745 - DNA, 120 bp, Artificial Sequence
  ENSG00000123901_16 (sequence is synthesized)
tatgcctcactttctggagtcactgggccatgatgaatcataagtcttcagtggcctagcaatatccagataagaaaggaccaacttgggttccttaaaacaaagggaaattattattgc

SEQ ID NO: 252746 - DNA, 120 bp, Artificial Sequence
  ENSG00000123901_17 (sequence is synthesized)
ttatcccatccatttgtgataacatctgtgaacatgctgtggctctatttgcaacattttccttcgtgtgtgtgattgtgtgcatgtgtgcatgaccttttttttttctttttttttttt

SEQ ID NO: 252747 - DNA, 120 bp, Artificial Sequence
  ENSG00000123901_18 (sequence is synthesized)
acaggcgtgagccaccccgcccggcccttttttttcatttatactttttcatttagattgtaatgattaacagaaacaggggtacctttcccaggggtgtccaccagaagagttgaagaa

SEQ ID NO: 252748 - DNA, 120 bp, Artificial Sequence
  ENSG00000123901_19 (sequence is synthesized)
gaggtgagaagatcccaaggtgaagcctgtcaccacgcagacagaactgccccctattgtagacagtggtgggaagggcctggctcacatgcccctccttagaggcagcctcaagatgaa

SEQ ID NO: 252749 - DNA, 120 bp, Artificial Sequence
  ENSG00000123901_20 (sequence is synthesized)
ccagggaatcaaactcaaccaggaggcatgattccttctctcctgcaattgcacaaaaacaagtggtggtgaaacattgttctgttttcacaagagatgagggagcaggctttccaatat

SEQ ID NO: 252750 - DNA, 120 bp, Artificial Sequence
  ENSG00000123901_21 (sequence is synthesized)
gctggaagtaattgtgcttagacacctcatcctcccaagctgtctagaaaggccatttcgctgtgttgtctaaataatgagggttttttcacaccatttctcaaaaggagattcgctgtc

SEQ ID NO: 252751 - DNA, 120 bp, Artificial Sequence
  ENSG00000123901_22 (sequence is synthesized)
aacatcattttggtggttcaggtgtaactttcacttacagaaacttatgcatccttaagagatctcaattcttaagggtctaacttgccagagaaatctcattccagggactgattgttt

SEQ ID NO: 252752 - DNA, 120 bp, Artificial Sequence
  ENSG00000123901_23 (sequence is synthesized)
ttatcaccttctgtctggtcctgagtgactcactgtgtcacccagaaaagagacctgtcaggcagaatcgagcttaattcacctgctctaaacaattgttactgacacactgcttttagg

SEQ ID NO: 252753 - DNA, 120 bp, Artificial Sequence
  ENSG00000123901_24 (sequence is synthesized)
ttttcttctagcaccagataaactctgaaatcaaagcatggatatgagctcagtaggaaactaaggtttgagggagaaagagtttgtcacttagacctcttggctgttaactgaaactga

SEQ ID NO: 252754 - DNA, 120 bp, Artificial Sequence
  ENSG00000123901_25 (sequence is synthesized)
acttgctcacatcatctgcttccctgtaatgaactatgagggttctttatcctagtttctatttatgaagatggttgaaaattttcaagacacaagattttgaaaactcactgaattatg

SEQ ID NO: 252755 - DNA, 120 bp, Artificial Sequence
  ENSG00000123901_26 (sequence is synthesized)
ggcaaaaccatgactttcattgggcagacagagtcttctaagcccacagggatccccagatggatttttcaggacaaatggctcatgtgcctgtacttattgtctctgtggtgtgtcaag

SEQ ID NO: 252756 - DNA, 120 bp, Artificial Sequence
  ENSG00000123901_27 (sequence is synthesized)
aagtagctaatggtttcatctgaaagctgccatagaaattctgtgaaccagaatgagacaaggcagcaggcatacagaaggtttgtcctgctctgggaagcatggaggatgttgtacttc

SEQ ID NO: 252757 - DNA, 120 bp, Artificial Sequence
  ENSG00000123901_28 (sequence is synthesized)
actcctctctgagggtgtctaggaatacagaagctccttgacttacatctcaataaacccatcgtaagtccaaaatattggaagttgaaaatgcattgaatacacccaacctactgaaca

SEQ ID NO: 252758 - DNA, 120 bp, Artificial Sequence
  ENSG00000123901_29 (sequence is synthesized)
tcgtagcttagccaagcctaccttaaatgctctgagaacacttatattagcctacagctgggaaaaatcatttaacacaaagcctatcttctaatgaagtatggaatatctcatgtaatt

SEQ ID NO: 252759 - DNA, 120 bp, Artificial Sequence
  ENSG00000123901_30 (sequence is synthesized)
tattgaatactgtactgaaggtgaaaaccagaatggttgtatggatatgcgaagtatggtttctactgaatgtgtattgctttcccatcatcataaaatttttaaaaatcctaagttgaa

SEQ ID NO: 252760 - DNA, 120 bp, Artificial Sequence
  ENSG00000123901_31 (sequence is synthesized)
tcattgttagtccgggaccttcagtactgccaagtcccagagaaaacccttttactctggggagaacccactgatggctcattagatctgtcccttccccgaggtccgtgtgtgactttg

SEQ ID NO: 252761 - DNA, 120 bp, Artificial Sequence
  ENSG00000123901_32 (sequence is synthesized)
agcaaaaagtgacttctttttgtgaatgtaaaatttgtgaaacttgagtttttccaatgtgctgtaaagtgttttattgtaaattgctcatctcaataaaatttacttcaggtttgtgga

SEQ ID NO: 252762 - DNA, 120 bp, Artificial Sequence
  ENSG00000123908_0 (sequence is synthesized)
cgccaccatgtactcgggagccggccccgcacttgcacctcctgcgccgccgccccccatccaaggatatgccttcaagcctccacctagacccgactttgggacctccgggagaacaat

SEQ ID NO: 252763 - DNA, 120 bp, Artificial Sequence
  ENSG00000123908_1 (sequence is synthesized)
caaattacaggccaatttcttcgaaatggacatccccaaaattgacatctatcattatgaattggatatcaagccagagaagtgcccgaggagagttaacagggaaatcgtggaacacat

SEQ ID NO: 252764 - DNA, 120 bp, Artificial Sequence
  ENSG00000123908_2 (sequence is synthesized)
ggtccagcactttaaaacacagatctttggggatcggaagcccgtgtttgacggcaggaagaatctatacacagccatgccccttccgattgggagggacaaggtggagctggaggtcac

SEQ ID NO: 252765 - DNA, 120 bp, Artificial Sequence
  ENSG00000123908_3 (sequence is synthesized)
gctgccaggagaaggcaaggatcgcatcttcaaggtgtccatcaagtgggtgtcctgcgtgagcttgcaggcgttacacgatgcactttcagggcggctgcccagcgtcccttttgagac

SEQ ID NO: 252766 - DNA, 120 bp, Artificial Sequence
  ENSG00000123908_4 (sequence is synthesized)
gatccaggccctggacgtggtcatgaggcacttgccatccatgaggtacacccccgtgggccgctccttcttcaccgcgtccgaaggctgctctaaccctcttggcgggggccgagaagt

SEQ ID NO: 252767 - DNA, 120 bp, Artificial Sequence
  ENSG00000123908_5 (sequence is synthesized)
gtggtttggcttccatcagtccgtccggccttctctctggaaaatgatgctgaatattgatgtgtcagcaacagcgttttacaaggcacagccagtaatcgagtttgtttgtgaagtttt

SEQ ID NO: 252768 - DNA, 120 bp, Artificial Sequence
  ENSG00000123908_6 (sequence is synthesized)
ggattttaaaagtattgaagaacaacaaaaacctctgacagattcccaaagggtaaagtttaccaaagaaattaaaggtctaaaggtggagataacgcactgtgggcagatgaagaggaa

SEQ ID NO: 252769 - DNA, 120 bp, Artificial Sequence
  ENSG00000123908_7 (sequence is synthesized)
gtaccgcgtctgcaatgtgacccggcggcccgccagtcaccaaacattcccgctgcagcaggagagcgggcagacggtggagtgcacggtggcccagtatttcaaggacaggcacaagtt

SEQ ID NO: 252770 - DNA, 120 bp, Artificial Sequence
  ENSG00000123908_8 (sequence is synthesized)
ggttctgcgctacccccacctcccatgtttacaagtcggacaggagcagaaacacacctaccttcccctggaggtctgtaacattgtggcaggacaaagatgtattaaaaaattaacgga

SEQ ID NO: 252771 - DNA, 120 bp, Artificial Sequence
  ENSG00000123908_9 (sequence is synthesized)
caatcagacctcaaccatgatcagagcgactgctaggtcggcgcccgatcggcaagaagagattagcaaattgatgcgaagtgcaagtttcaacacagatccatacgtccgtgaatttgg

SEQ ID NO: 252772 - DNA, 120 bp, Artificial Sequence
  ENSG00000123908_10 (sequence is synthesized)
aatcatggtcaaagatgagatgacagacgtgactgggcgggtgctgcagccgccctccatcctctacgggggcaggaataaagctattgcgacccctgtccagggcgtctgggacatgcg

SEQ ID NO: 252773 - DNA, 120 bp, Artificial Sequence
  ENSG00000123908_11 (sequence is synthesized)
gaacaagcagttccacacgggcatcgagatcaaggtgtgggccattgcgtgcttcgccccccagcgccagtgcacggaagtccatctgaagtccttcacagagcagctcagaaagatctc

SEQ ID NO: 252774 - DNA, 120 bp, Artificial Sequence
  ENSG00000123908_12 (sequence is synthesized)
gagagacgccggcatgcccatccagggccagccgtgcttctgcaaatacgcgcagggggcggacagcgtggagcccatgttccggcacctgaagaacacgtatgcgggcctgcagctggt

SEQ ID NO: 252775 - DNA, 120 bp, Artificial Sequence
  ENSG00000123908_13 (sequence is synthesized)
ggtggtcatcctgcccggcaagacgcccgtgtacgccgaggtcaagcgcgtgggagacacggtgctggggatggccacgcagtgcgtgcagatgaagaacgtgcagaggaccacgccaca

SEQ ID NO: 252776 - DNA, 120 bp, Artificial Sequence
  ENSG00000123908_14 (sequence is synthesized)
gaccctgtccaacctctgcctgaagatcaacgtcaagctgggaggcgtgaacaacatcctgctgccccagggcaggccgccggtgttccagcagcccgtcatctttctgggagcagacgt

SEQ ID NO: 252777 - DNA, 120 bp, Artificial Sequence
  ENSG00000123908_15 (sequence is synthesized)
cactcacccccccgccggggatgggaagaagccctccattgccgccgtggtgggcagcatggacgcccaccccaatcgctactgcgccaccgtgcgcgtgcagcagcaccggcaggagat

SEQ ID NO: 252778 - DNA, 120 bp, Artificial Sequence
  ENSG00000123908_16 (sequence is synthesized)
catacaagacctggccgccatggtccgcgagctcctcatccagttctacaagtccacgcgcttcaagcccacccgcatcatcttctaccgcgacggtgtctctgaaggccagttccagca

SEQ ID NO: 252779 - DNA, 120 bp, Artificial Sequence
  ENSG00000123908_17 (sequence is synthesized)
ggttctccaccacgagttgctggccatccgtgaggcctgtatcaagctagaaaaagactaccagcccgggatcaccttcatcgtggtgcagaagaggcaccacacccggctcttctgcac

SEQ ID NO: 252780 - DNA, 120 bp, Artificial Sequence
  ENSG00000123908_18 (sequence is synthesized)
tgacaagaacgagcgggttgggaaaagtggaaacattccagcaggcacgactgtggacacgaaaatcacccaccccaccgagttcgacttctacctgtgtagtcacgctggcatccaggg

SEQ ID NO: 252781 - DNA, 120 bp, Artificial Sequence
  ENSG00000123908_19 (sequence is synthesized)
gacaagcaggccttcgcactatcacgtcctctgggacgacaatcgtttctcctctgatgagctgcagatcctaacctaccagctgtgtcacacctacgtgcgctgcacacgctccgtgtc

SEQ ID NO: 252782 - DNA, 120 bp, Artificial Sequence
  ENSG00000123908_20 (sequence is synthesized)
catcccagcgccagcatactacgctcacctggtggccttccgggccaggtaccacctggtggataaggaacatgacagtgctgaaggaagccatacctctgggcagagtaacgggcgaga

SEQ ID NO: 252783 - DNA, 120 bp, Artificial Sequence
  ENSG00000123908_21 (sequence is synthesized)
ccaccaagcactggccaaggcggtccaggttcaccaagacactctgcgcaccatgtactttgcttgacatgttttagtgtttagcgattgtgtaccgagtgggattcacgagaccagcta

SEQ ID NO: 252784 - DNA, 120 bp, Artificial Sequence
  ENSG00000123908_22 (sequence is synthesized)
cactcagaccaacagatggccagcccttccgtgacagccagcatcgaacatgagacgtcattgattttattagattctccgttttccagaatgccttccgtcccagatttcaaacttgga

SEQ ID NO: 252785 - DNA, 120 bp, Artificial Sequence
  ENSG00000123908_23 (sequence is synthesized)
ttttgaactgcagacctgtatgagaacccaatgtcataggaaatatggtttgctaaaatctataagctgcttattaaaacagagtcccgtgtgtcctaaaaatctcctaaaaccagtcta

SEQ ID NO: 252786 - DNA, 120 bp, Artificial Sequence
  ENSG00000123908_24 (sequence is synthesized)
tgaactcagggctttaaaacatttttaatttatttggtcattcaatttacttgtttttaatacatgattctctatgaaattgatgggctcaaactagctgtgaatcttctgagagtgaaa

SEQ ID NO: 252787 - DNA, 120 bp, Artificial Sequence
  ENSG00000123908_25 (sequence is synthesized)
gcaacacaaaacacaagtgtggttttaaagccttgaacattctgatgttgtcactaaagttgatttccaggcgatgctcgtgtgcccctggcgtggctcacccaagttcctcgactgagg

SEQ ID NO: 252788 - DNA, 120 bp, Artificial Sequence
  ENSG00000123908_26 (sequence is synthesized)
gccggtggccatgcagaggcgtccgcaggtgccgtgttctgccagcaccgcccttcacccggcctgaactaaggagcagtggcagaaggtgggccccgtgtgtttacagcatttccaggt

SEQ ID NO: 252789 - DNA, 120 bp, Artificial Sequence
  ENSG00000123908_27 (sequence is synthesized)
ccagagaggttggcagacaagtgccattttaataaaaaatgtatttaaaaaaagaaaaaagacaatatactgacagtctaatcatcagatttgtcctataggactgtgacatttattttc

SEQ ID NO: 252790 - DNA, 120 bp, Artificial Sequence
  ENSG00000123908_28 (sequence is synthesized)
caaagtttttaaagaatacgggtctgtggtgataaatacagtacaatcctttttcactgttatgtctttaatgtaagagaagaatatatatatctggtttgcagtattaatgtgatagat

SEQ ID NO: 252791 - DNA, 120 bp, Artificial Sequence
  ENSG00000123908_29 (sequence is synthesized)
agatgctgttttttcattttattgactatggggtgcttctgtgatctgtttggcatatcaagagtgttttggagcctggagatgggaccgcctctcagttcttagtgcttaaggacagga

SEQ ID NO: 252792 - DNA, 120 bp, Artificial Sequence
  ENSG00000123908_30 (sequence is synthesized)
atatgcaattgacttaatgtgacagcaacccgcttcccccgtggagactgtgcagcgtgtacccatgggagggacggatgtgccctccgcgccgctcgccaccctccctgccgcctcatc

SEQ ID NO: 252793 - DNA, 120 bp, Artificial Sequence
  ENSG00000123908_31 (sequence is synthesized)
cccgtgtgtcactcactcagctgatgaagcacaagtggaaattatttattcttgcattgctgggaaacattgatgtgtggggactcactcctctccgtgtgctcttttgtcagatgactt

SEQ ID NO: 252794 - DNA, 120 bp, Artificial Sequence
  ENSG00000123908_32 (sequence is synthesized)
ccatagatctatgcactgagattcgtagaaagctgttggtggtggctctgctgggcgtgaggccgtcggtcacagcgaaggagcttgcctggccctgggaggcccaaggatagcagggcc

SEQ ID NO: 252795 - DNA, 120 bp, Artificial Sequence
  ENSG00000123908_33 (sequence is synthesized)
agcagagggcatgggccgttcttctggggtttgcatttggggccccagacttgggtttgccaatctagaaactgttgcactaagagtgacaccacggacgattttgaaggctaacaacag

SEQ ID NO: 252796 - DNA, 120 bp, Artificial Sequence
  ENSG00000123908_34 (sequence is synthesized)
acaactctgtttgtgctgagtgggctttttgtctctgtacacagttttagtaagactcaaatccatgttccgtgtagaggcgtcaggaaggaggcgagcctcccctagtgctgctgtgcg

SEQ ID NO: 252797 - DNA, 120 bp, Artificial Sequence
  ENSG00000123908_35 (sequence is synthesized)
ctccgtaggtcccctcttcctgctgctgttccctccccggccctgcgcgacacttacctcggcactgtggtggggtggggtgccaaaggagctgcctcctgctcagcggcaccccccccc

SEQ ID NO: 252798 - DNA, 120 bp, Artificial Sequence
  ENSG00000123908_36 (sequence is synthesized)
ccacctttgtgctcagctgctttggaggcagcaggaggggcagcaagccgcaggtcgggggtctcccgatacctcgcctggatattggcggcaatgacaaagggatgactattatttgtg

SEQ ID NO: 252799 - DNA, 120 bp, Artificial Sequence
  ENSG00000123908_37 (sequence is synthesized)
aagatgtgtactcagagtggtgtgtgtgtgtgtgcatgcgtgtgtccctgtgtgtgagtgtcttattaatggcattagtctcttctggctgtatttttttttaatctttttaaatgacag

SEQ ID NO: 252800 - DNA, 120 bp, Artificial Sequence
  ENSG00000123908_38 (sequence is synthesized)
aagctcccactctaagaaatggcagttccttttgttttagtggcaagtggcactttctcctgttttcagaaggatacagacatgctcgtagcttaaattaatggatgcattcaagctaag

SEQ ID NO: 252801 - DNA, 120 bp, Artificial Sequence
  ENSG00000123908_39 (sequence is synthesized)
gagggaatcttgtgactaataacttttcaaatctgaaattagattagtttccagccatttttacaatcatctggaaccatgtgtctcaaaggtgtgtttcttccacctgcgtcaggctgt

SEQ ID NO: 252802 - DNA, 120 bp, Artificial Sequence
  ENSG00000123908_40 (sequence is synthesized)
ctgggggatggcggttcttgtttaacatgcagatttgtgggcctgctgccacctcctgcgtgcggtacttcagggatggccagggcatctgtgtctaagcgatggcctgcagccctgggc

SEQ ID NO: 252803 - DNA, 120 bp, Artificial Sequence
  ENSG00000123908_41 (sequence is synthesized)
tccctggggtctgaggacccagctctggtggcacccagcagggaggaggtgcttcctgagcagatgcctgagacagactgggctggcagaaaagtaggactacaatttttgtttttttta

SEQ ID NO: 252804 - DNA, 120 bp, Artificial Sequence
  ENSG00000123908_42 (sequence is synthesized)
atcattttgaaggaaaactttcatttttagtgggccagagtacttcgaaaagggtacttttttatagccctatgcttgttttataaaacttttaatactaaaaacattaatagaccaaac

SEQ ID NO: 252805 - DNA, 120 bp, Artificial Sequence
  ENSG00000123908_43 (sequence is synthesized)
atctccagctgggtcagctgcacacctttgtacatgtctgatgattcagagtttaaatggctgtagttacaatttctcaggtaaacaattgttttctcaaatttttaccaatccctgcat

SEQ ID NO: 252806 - DNA, 120 bp, Artificial Sequence
  ENSG00000123908_44 (sequence is synthesized)
tattaggataaattttgagacagtgtaaaaacctcaaagtacagtagggtaagtcccagccctgttcacgtgaaagccagaggtggcccttccccggcatctgatcgtctgatcatgtgg

SEQ ID NO: 252807 - DNA, 120 bp, Artificial Sequence
  ENSG00000123908_45 (sequence is synthesized)
gtgcctggggccttgccacccttccctgtccactgctgcccccctgggcctgtcaagatttgaggggtgcccactcgctggctttgtccccatcccactgttaagtaaggtgtgccttgc

SEQ ID NO: 252808 - DNA, 120 bp, Artificial Sequence
  ENSG00000123908_46 (sequence is synthesized)
tttaagcaaactgaatgtgaaaattatgtgtagaagtctgggtttgtttaaaagaaaaactgggattttatctcatctctttaaaagaggtctcccaattcgatttctgtactgggactc

SEQ ID NO: 252809 - DNA, 120 bp, Artificial Sequence
  ENSG00000123908_47 (sequence is synthesized)
ttcctggtgtgtttttacatgttcactttttaaaaacattgatgtactcccatccttttaccactaccctatcacatttgacaagttcttgctgtaatgacgacgcaattaacgaacacc

SEQ ID NO: 252810 - DNA, 120 bp, Artificial Sequence
  ENSG00000123908_48 (sequence is synthesized)
aggggagcggtggaaagctgccctcgtgtgtgagcccttcggtgacgcaaagccaccgtcctgttgttttgtgtgtcctaagctcagattttcctggtttggataaattttgtaaaactg

SEQ ID NO: 252811 - DNA, 120 bp, Artificial Sequence
  ENSG00000123908_49 (sequence is synthesized)
ggcatagctgtacttttagaaagggatcgttttccttaagttttggttttctctggttcaagcagtctttacatgcagccttttgattgcacatcagggtctcccttttcttttccagat

SEQ ID NO: 252812 - DNA, 120 bp, Artificial Sequence
  ENSG00000123908_50 (sequence is synthesized)
gatgttgcttttcggtggtggtctcacactcctttgaatgaatgtttgcactctagaaccacaaacgatgcgtgaccattgtacagcttgcccaagagggaactgttggaagcaggcagt

SEQ ID NO: 252813 - DNA, 120 bp, Artificial Sequence
  ENSG00000123908_51 (sequence is synthesized)
gacctccacgctgtttgtttgaggctgacctaaactgctatcactaatgtttacccccgtgacggagtgcccattagaacagatcatgtcagttcagttcctgtagtggggttagtaggt

SEQ ID NO: 252814 - DNA, 120 bp, Artificial Sequence
  ENSG00000123908_52 (sequence is synthesized)
ggggggttttattgttgttgttatttgttacttttattgctgttaaatgcaaatattgctatttattttttcctttctgctctggtttggtttggccgacacagatattccagtgcatgt

SEQ ID NO: 252815 - DNA, 120 bp, Artificial Sequence
  ENSG00000123908_53 (sequence is synthesized)
ggtacctaatggatatgatagaaattatttccccaacttttataaattgcctaatgtttaccttcaagtttgctggatgatttatttttgaaagccacaaatgtgatttttctggatgaa

SEQ ID NO: 252816 - DNA, 120 bp, Artificial Sequence
  ENSG00000123908_54 (sequence is synthesized)
ttgtttttcttatatatgcagcaatgtaattttacattgatctgcggggtggtttaaattttatttttacaaggcagtttttcagtcaaattatatatttgatacaatacgctaggatag

SEQ ID NO: 252817 - DNA, 120 bp, Artificial Sequence
  ENSG00000123908_55 (sequence is synthesized)
accggccacacgtcaggcagccgggacaccggagtgtccccaggaggcctttggggctggggtggcccgtggcttgttccctgcgcctctgggaactggatgagtccttcggcgggactg

SEQ ID NO: 252818 - DNA, 120 bp, Artificial Sequence
  ENSG00000123908_56 (sequence is synthesized)
tgacccgctggacagttaaaaggatttttcatgggcattttcctacacataaggcagttccattaggaggagctttagaagtcgacataatccagacagtggacaatcccagtggcccag

SEQ ID NO: 252819 - DNA, 120 bp, Artificial Sequence
  ENSG00000123908_57 (sequence is synthesized)
acaagccatacgacattttcctgtgacctctctctgacccatctctcacgctcatgagaaaaggaatgtacaataaatagaaacagaaacttcctcagtgctcatgcgcctcacttgcag

SEQ ID NO: 252820 - DNA, 120 bp, Artificial Sequence
  ENSG00000123908_58 (sequence is synthesized)
aacgtgagtatttcatttatgtttgaagcccttccccaaagtgaccgaggagttgcactctagctgccgtgccagcagtctcgtctgctgtgacgcttctcggtgcggatgcagtgcacc

SEQ ID NO: 252821 - DNA, 120 bp, Artificial Sequence
  ENSG00000123908_59 (sequence is synthesized)
aaaataattgcactgattttttgacaacttctttttacgatgtcccacttcgcatctgctgtacttgtttgagatgattgtaaatagatttgtggtaggagaagtgacatgaatgcaaca

SEQ ID NO: 252822 - DNA, 120 bp, Artificial Sequence
  ENSG00000123908_60 (sequence is synthesized)
cgtggctctgttgtggagacactgcctcgtattcagtattatgtgttaaagttgtgtggacttaactctgttccgccctttagcttcgtgtctgttgaccatttatgaaggacaagttcg

SEQ ID NO: 252823 - DNA, 120 bp, Artificial Sequence
  ENSG00000123908_61 (sequence is synthesized)
cctcattttctttttcttctgaagggaagttctagatcggttactaggagaacatggtctcttggtgcctgatgatttagtcctaagcagactcgttgcagtcttgtgaacactgttgtg

SEQ ID NO: 252824 - DNA, 120 bp, Artificial Sequence
  ENSG00000123908_62 (sequence is synthesized)
gtctgtttgattcctcgtcgcttaccgtggctctccaaagcatggtctttgagttccacccagcctgggacagtccagacgggaggcatctgctccgcctgctactaggacgcaagggcc

SEQ ID NO: 252825 - DNA, 120 bp, Artificial Sequence
  ENSG00000123908_63 (sequence is synthesized)
tccttgcatctctgtggtcagagtcatcttaaagccatgaggttactgtcgtgtcaaagctgtcatttgtgcccgttattttgctggagtagcagcgtgtgctgtagcccccgtgtgtca

SEQ ID NO: 252826 - DNA, 120 bp, Artificial Sequence
  ENSG00000123908_64 (sequence is synthesized)
ctctgtggtcaggctaccctgtgtcacacccagcaagaagtttttcagccccagaccagtctgtgtgtgtgtccgagtcacaccagtgccattacggtgccctcgcttatgcttctttca

SEQ ID NO: 252827 - DNA, 120 bp, Artificial Sequence
  ENSG00000123908_65 (sequence is synthesized)
gtatgttttgccatgttattgtctaaagtgaatgtattggcttagccaaatcactacagaaggtggttcctaaataccttttagtttaaaaaaaaatgcagataaaggctacctctgaat

SEQ ID NO: 252828 - DNA, 120 bp, Artificial Sequence
  ENSG00000123908_66 (sequence is synthesized)
tctcaatagattcatcatgtttgctcttaagtgtagctgtccacactgaaaacagccaatatgttgcctgaataaactgaattgtgaacatctatctgttcagttctggcttgaaaatgt

SEQ ID NO: 252829 - DNA, 120 bp, Artificial Sequence
  ENSG00000123908_67 (sequence is synthesized)
gtgtgccatactgtgacccacgggcagcccctcctcctctactgtgtcaggtggaccagggtcacctctgttctgcgcagctttgagattctaggattctacggccggcacgaatggcat

SEQ ID NO: 252830 - DNA, 120 bp, Artificial Sequence
  ENSG00000123908_68 (sequence is synthesized)
gggagggttctctgcacgggacggcataacggcatgccatccttcaggctggcaggagcctgcgcaggtgtggcaaaatcttgaaacagcctgtgtcctgcctggcttttcactttccta

SEQ ID NO: 252831 - DNA, 120 bp, Artificial Sequence
  ENSG00000123908_69 (sequence is synthesized)
tttaatataagaaagcacttttttttctgctttacctacaaatgggttgaaaatggcctcctctgtcctctcctctcttttatacactctgtaaaatcacaaaggtgcttcaacaccgac

SEQ ID NO: 252832 - DNA, 120 bp, Artificial Sequence
  ENSG00000123908_70 (sequence is synthesized)
tgtcatgcaaataatacatttaaaatagttgcatggtttcaaagacaatgcagacgtaattggcctttgactttgggacctcgggttactctcactccctactgcaaaacaaactaaggg

SEQ ID NO: 252833 - DNA, 120 bp, Artificial Sequence
  ENSG00000123908_71 (sequence is synthesized)
ttgaaagcaaagcattctgttcaaatccagggccctttgtttgaaaagaacacagggcccacagctggtgttttgaagtagaagttcccactagtggcgcagtggaccgtctgatgcaga

SEQ ID NO: 252834 - DNA, 120 bp, Artificial Sequence
  ENSG00000123908_72 (sequence is synthesized)
cttgcaggaagtcggtcctgggaggctctgaacacccctccctgtgattaaccactttgctgtcagaaatgtcattttcccatacactgtgctgtgggcccggggcctccttcgcttctt

SEQ ID NO: 252835 - DNA, 120 bp, Artificial Sequence
  ENSG00000123908_73 (sequence is synthesized)
tctttgggttccatatgttgcccgatcttgaggttagcgctcgccccaatttctccatgagtttactctgagttgacaggcgatgatctgacagttggaggtgtctgggtgtttggaggt

SEQ ID NO: 252836 - DNA, 120 bp, Artificial Sequence
  ENSG00000123908_74 (sequence is synthesized)
ggccccgttctcatgttggctgctcatcagacattgagtttggccccggcggttctactacgtcactacctggaagcaattgcctttaacactctgctgtttggggtttcgatgcttttt

SEQ ID NO: 252837 - DNA, 120 bp, Artificial Sequence
  ENSG00000123908_75 (sequence is synthesized)
atgctgcgttgcgtgctttcattccggaagagctaagtgtcctttgcagtctctctgagaatgttttgtaattctgccgccacgctgttctgtgcggaccgacctcaagaggcttgggcc

SEQ ID NO: 252838 - DNA, 120 bp, Artificial Sequence
  ENSG00000123908_76 (sequence is synthesized)
cccgtgggtgtcccactgcctgccggcccagggtacaggctgcttgggtccgctgggctggccttgggctgtcagaatctggtccagggtgtttcgaggggacactgcacagccgctcgc

SEQ ID NO: 252839 - DNA, 120 bp, Artificial Sequence
  ENSG00000123908_77 (sequence is synthesized)
ccctcgactcagtcatgggagctgcagcacgcagatccaccgcaagcttcctgcacgcgcatctccggaatgctgcgctgggccctcccaccatcttcgcgtttgtgagaatttactcag

SEQ ID NO: 252840 - DNA, 120 bp, Artificial Sequence
  ENSG00000123908_78 (sequence is synthesized)
aagtgagagaactgaagattcctggtgcttttgttaacacgtttctatcttattggttggtgtggaaatgttagatgtgttgttaggtttttaaatgctgtgggtggtatgattaaaggg

SEQ ID NO: 252841 - DNA, 120 bp, Artificial Sequence
  ENSG00000123908_79 (sequence is synthesized)
ttaagtcctcacctcagcccccagcccccttttggggggtaggaagaggctgagttatctcctatttaaaacctccttggatttaagtagttcagagttaaagctaaaacaccaaatatt

SEQ ID NO: 252842 - DNA, 120 bp, Artificial Sequence
  ENSG00000123908_80 (sequence is synthesized)
aactctttcccccaagtgtctccaggaactggacgttggggccattcttattcagttctttctgtagctccaaggtccttaaaatgagtgagttgatcccaagaacaccccacagcacca

SEQ ID NO: 252843 - DNA, 120 bp, Artificial Sequence
  ENSG00000123908_81 (sequence is synthesized)
accagcagggcacagtgcaagcgacttcatagatcggggtgctcgtgtaggggtccggggctcctttgaactctgggagttgtgtgcgcagtcttgggtgggagacggcaggtccctctg

SEQ ID NO: 252844 - DNA, 120 bp, Artificial Sequence
  ENSG00000123908_82 (sequence is synthesized)
tcccaagaagctggtggtgccaaggccttcctctgtctccatcagtgccagcctgatcgcgttctggaagacccagtctcagactctgtgcctttaaagtccggtcctcagtgtcctttc

SEQ ID NO: 252845 - DNA, 120 bp, Artificial Sequence
  ENSG00000123908_83 (sequence is synthesized)
agaatcatgttggggctgcgtttctctggggaactaagcctgtgccattccacaaggcaggcgtggacctccagccttggaagctttctttccgctcctcagcccctgacttgtaaactg

SEQ ID NO: 252846 - DNA, 120 bp, Artificial Sequence
  ENSG00000123908_84 (sequence is synthesized)
tgatgccatgcagtctggagccgcgggggacgcactcggtctcattgcggaaaacacttggttccagtcgtgtggtttctcccataccctgaccaagtccacctctgccaggattgcagg

SEQ ID NO: 252847 - DNA, 120 bp, Artificial Sequence
  ENSG00000123908_85 (sequence is synthesized)
agattggtgcaagacccatctcttatgcattgaccatgaccatcagcaaagcctggtggtcttgttctcatagtcactcgagaagaatatttattgtaatggaagtagattttttaaaaa

SEQ ID NO: 252848 - DNA, 120 bp, Artificial Sequence
  ENSG00000123908_86 (sequence is synthesized)
aggaattggaatcatgtctttgtagaatgtgtgtgtgtgaagtcctcagctgtaaggtgctattcagtcctgtgacccttattttggaatgctcttcattactgttgctctgttttgtga

SEQ ID NO: 252849 - DNA, 120 bp, Artificial Sequence
  ENSG00000123908_87 (sequence is synthesized)
cttcctgggaaaccgcttactttggtgtggtgtcaccttgagctgtgcacataggacaccagttttgacttaacctaacaggcagtttttatctctagctttttcaagccaggtattgag

SEQ ID NO: 252850 - DNA, 120 bp, Artificial Sequence
  ENSG00000123908_88 (sequence is synthesized)
cagtttcttggccaatggcctgagaaaccacctgtccctgtcaaggggtgattttattggttttaagtggggaagtaatcccatgtacttatttcttaaatacctaggaagttcttcttg

SEQ ID NO: 252851 - DNA, 120 bp, Artificial Sequence
  ENSG00000123908_89 (sequence is synthesized)
gtggctcctcttggccctcccctctttctcccccaacccaccatcctgcaaggcaaggaatggcctctccctccacagaggcaacggctgcagagggagcactgtggctgccatcccagt

SEQ ID NO: 252852 - DNA, 120 bp, Artificial Sequence
  ENSG00000123908_90 (sequence is synthesized)
tcctcttcaaagccaaacagacacgcgtgactcaaatcctacagtatggagggtggcgttgcattgaaattccaggcctgagtttgatagtggattttaatgtagttgttaaaggtatga

SEQ ID NO: 252853 - DNA, 120 bp, Artificial Sequence
  ENSG00000123908_91 (sequence is synthesized)
attcatgttttataactgtagaggcaagcaagtttttattttttaaaaagttttgagagaataatttataagtttctgtgcagcaaagtggctaattactcattaaatacaggaaaagaa

SEQ ID NO: 252854 - DNA, 120 bp, Artificial Sequence
  ENSG00000123908_92 (sequence is synthesized)
tgtagtatctaaatccagctttttcttacctctggtacacttcagattacttacctaatacatattgagggcttttaacccttagttttatcaatttttctagttttattttatttttat

SEQ ID NO: 252855 - DNA, 120 bp, Artificial Sequence
  ENSG00000123908_93 (sequence is synthesized)
aaaataattgaaaaagaaccaaaaatgaattcagaagttccatagatggatttttgccccttcttaattttctcccacaatgaaaacattttagaagacattttgaatcaaaatgtatta

SEQ ID NO: 252856 - DNA, 120 bp, Artificial Sequence
  ENSG00000123908_94 (sequence is synthesized)
tgaccattgaaagttctctattttctaagaagctgagcagctccaagggcctcgtttcaggtggtactctatgtattgtctgtgggcttgtttctacctgtacagtggaaccatgtgacc

SEQ ID NO: 252857 - DNA, 120 bp, Artificial Sequence
  ENSG00000123908_95 (sequence is synthesized)
atgtcttgtgcttgcaatatagaaaccatgcagtgctgttttgtgaattggcagtttctgtataaactcttatttatatacattggcctctctgtatgattttccatttgctacatgaat

SEQ ID NO: 252858 - DNA, 120 bp, Artificial Sequence
  ENSG00000123908_96 (sequence is synthesized)
tgtaaaattaattataaaattatagtacctgctaaatacaattctgaggcttcatgtcattgtctttagttgaataccatgctgtgtgtcttgaagatgtccacgcttgcatgatgctag

SEQ ID NO: 252859 - DNA, 120 bp, Artificial Sequence
  ENSG00000123908_97 (sequence is synthesized)
gtggcaatgccactttaaattaagccttaatcagatgttaaatttgtgagtttcagagtatgcaaaaatattaggcagagtgagtgtaaactgttcagatcaagatgctgtatcataatt

SEQ ID NO: 252860 - DNA, 88 bp, Artificial Sequence
  ENSG00000123908_98 (sequence is synthesized)
tgagtgtaaactgttcagatcaagatgctgtatcataattcaagttatttttttctggagttaaagggaagcattcagtgatacaccc

SEQ ID NO: 252861 - DNA, 120 bp, Artificial Sequence
  ENSG00000123908_99 (sequence is synthesized)
tctctctcttgtctagcttggctatggccatagcttgatgaaaatggaccattgtgcatttctgtgacagtcaaaaagacctgttctaaaagtcttgcgactttttcagggttttttttt

SEQ ID NO: 252862 - DNA, 120 bp, Artificial Sequence
  ENSG00000123908_100 (sequence is synthesized)
tttttcatgtttctttttttttttcccctccagtctgagatttctgtgtggctgatggagagtgtgatttgggcgtaggtcttatttgcaaacctgctcatgttctaagctttcttcagg

SEQ ID NO: 252863 - DNA, 120 bp, Artificial Sequence
  ENSG00000123908_101 (sequence is synthesized)
tagtaccacctgtcatcgcttctgcatatgatttaaatggatttttgtttttataaaagtatcataaatttagagataaaatggaggggacccagctttctttacaatgtggatctacct

SEQ ID NO: 252864 - DNA, 120 bp, Artificial Sequence
  ENSG00000123908_102 (sequence is synthesized)
cagttaaacagttgggtgctattactaagtctgtcaaattaaattggaaaaagtaaccaaacagtgagatacaactccacatgaaacttgaaattgtaatttccgtttatttaatgatat

SEQ ID NO: 252865 - DNA, 120 bp, Artificial Sequence
  ENSG00000123908_103 (sequence is synthesized)
ttttatttatttgtgccttttatgttgaaccccaatgcattgaaaaaattcagtatgaaacagtacatattttatttatattacaggtgggagaaaagtccaattggtcatggaatttga

SEQ ID NO: 252866 - DNA, 120 bp, Artificial Sequence
  ENSG00000123908_104 (sequence is synthesized)
tagacttttccccagccaactgctacagtgtattataatcccgactgcccccctgtgaaaagaaaaaaaaaaatgtccaagagcaaatttaacattttacaaacaataaagtccaaactc

SEQ ID NO: 252867 - DNA, 120 bp, Artificial Sequence
  ENSG00000123908_105 (sequence is synthesized)
ctctatgcacatatttatagcttatcacttcattttctgtgccagtgaaggggtggccagaaaaaaaatcccaagtaccctcatcattgcttttctagccattcatgccccctcttcctc

SEQ ID NO: 252868 - DNA, 120 bp, Artificial Sequence
  ENSG00000123908_106 (sequence is synthesized)
tggcacattttctaagagtttatttcataagcagcaaacggactgttgtcgatttcatctctcctgacctacctggtggaggtgctaatggccatggacagaaaggggcgagccagagct

SEQ ID NO: 252869 - DNA, 120 bp, Artificial Sequence
  ENSG00000123908_107 (sequence is synthesized)
cgtggctttgtggaggcagaggcctgcattcagcagcggccctgtgtgcctgtaagttaggaaggctttctgacaggtaagaaaatgagataggttgatgacttaccatgcttttatatt

SEQ ID NO: 252870 - DNA, 120 bp, Artificial Sequence
  ENSG00000123908_108 (sequence is synthesized)
tggcagtttacaattctagacttttcctactatggcgatctttttttacttaattctttggaggtaacaatattttggagtcttaagaatttgattttataccaataagaaataaaaatt

SEQ ID NO: 252871 - DNA, 120 bp, Artificial Sequence
  ENSG00000123908_109 (sequence is synthesized)
agggatctttcctgtagtatatagttttactattttaaagagatctctgaattttacaagagaaccaacattccttaatggcagaactttgaaagttgatttgggaggctttttgctgca

SEQ ID NO: 252872 - DNA, 120 bp, Artificial Sequence
  ENSG00000123908_110 (sequence is synthesized)
ggatctcaaaaatagagagagagatgattctacttaaatgtttttaattttctaacttccatcaggttgatacttaagctctattttgtaaagagtaaatcatcctttagtatgctgcat

SEQ ID NO: 252873 - DNA, 120 bp, Artificial Sequence
  ENSG00000123908_111 (sequence is synthesized)
aagatgatcagcattcttgcactttctcagtaataagacgtgccgggcaattggctccccaggacgcattgtgtttttaacctaacgagaggactttggggcaggtgattaaatttatat

SEQ ID NO: 252874 - DNA, 120 bp, Artificial Sequence
  ENSG00000123908_112 (sequence is synthesized)
aggtacctcaagaaaaagaacctgaatatgctgcattttctttctttagcttttacatgtagcattttgttttgcttttgttatttttgttttgatatatgctttttggaccccaataga

SEQ ID NO: 252875 - DNA, 120 bp, Artificial Sequence
  ENSG00000123908_113 (sequence is synthesized)
ctgttgaaagaaatttaaaaattactcttgtagggatatagtatccttaaaaaataaaaatttaaaaaaatttaaaaaaattgctgcaatatctggctcgaaggttgccctatattagaa

SEQ ID NO: 252876 - DNA, 120 bp, Artificial Sequence
  ENSG00000123908_114 (sequence is synthesized)
taatactttagccaaatacacctgaggaggcagacactgtgtttataagcagacaataatgttctgaatccttcctgttcatgctgctttcttaattcatttctccatgtcatcaagagg

SEQ ID NO: 252877 - DNA, 120 bp, Artificial Sequence
  ENSG00000123908_115 (sequence is synthesized)
ttggataacttatttctaagctcaaggttaaaaatcatgtcacctttttttttttcccccaacacagacctcagaaaaattgcgattgaggaagtagcatgatcctaaatgtgttgctga

SEQ ID NO: 252878 - DNA, 120 bp, Artificial Sequence
  ENSG00000123908_116 (sequence is synthesized)
aatcaggcagcccgagcctctggtctctccagagagcccgtcttcacatttctctattcctcagcactcacccgaaactgaacagatggggagtggtcttgattgtcaagataaaactgg

SEQ ID NO: 252879 - DNA, 120 bp, Artificial Sequence
  ENSG00000123908_117 (sequence is synthesized)
tgaagaaagctaaatgctgagaaactgagcatctattgtcgtgtttaagcttagctgggtcctttctagtttgtttttacagcttactaggtgaagtagtttgcactatttttgcaataa

SEQ ID NO: 252880 - DNA, 120 bp, Artificial Sequence
  ENSG00000123908_118 (sequence is synthesized)
attcatggaaaacctaacagttacttgttttgtttcttactgtgtgtatataaactaatactaaaagtttggcatagtgttttttcacctccttacataacccctaacatgcacagaatg

SEQ ID NO: 252881 - DNA, 120 bp, Artificial Sequence
  ENSG00000123908_119 (sequence is synthesized)
ctgtaaatctgataaaatatgatgtgaatgatattttataaagttattttgtatggtgtcaattttgttttgcctcatagtatgtcagcaaaaaattaaataaaagtcctcctatttaca

SEQ ID NO: 252882 - DNA, 120 bp, Artificial Sequence
  ENSG00000123908_120 (sequence is synthesized)
cggccgcccctcggccccggagcccctcggcggcgccaccatgtactcgggagccggccccgggacaaaggaattaatagagtaacacgggtaaaaaatgcagagaaagcaaaggaagat

SEQ ID NO: 252883 - DNA, 120 bp, Artificial Sequence
  ENSG00000123908_121 (sequence is synthesized)
gggagtggctgggggctcatgtgacgttgcaggatgcccgcctcagcataacagcaccctgagcgcaggctcaggtcaggcccacctcactggaatcctggccacgtgatgggtgtctca

SEQ ID NO: 252884 - DNA, 120 bp, Artificial Sequence
  ENSG00000123908_122 (sequence is synthesized)
cctcacctctctgaacctcagtctcctcttcgtacagagtgaaaacctcgtcctcatggtggtggtgctttgatcagaggagatgatgcgggcgacctgcagttgtgtcccacatgcagg

SEQ ID NO: 252885 - DNA, 120 bp, Artificial Sequence
  ENSG00000123908_123 (sequence is synthesized)
gggacacttctcgtccccatcttcccgagagtccaggcacatgcccaggaaaggaaagttttgggaacccctgaccacactcactgcctgttcctgcaggtggtgggcagcatggacgcc

SEQ ID NO: 252886 - DNA, 120 bp, Artificial Sequence
  ENSG00000123908_124 (sequence is synthesized)
ctgagcctgtaaaagacgtgagatttcataaaggaatggctttccttggtcctttttaaagtttttcagaattatccttaatgttttcagaagataatttttattatcccatgaaagttt

SEQ ID NO: 252887 - DNA, 120 bp, Artificial Sequence
  ENSG00000123908_125 (sequence is synthesized)
agagagcaccattctgtgtgtgacagacactcaccgagggtcgaattatttcccagaaggctgtactgcttttctattctttaacttttgctttggggatgtttggtaacagttttttgt

SEQ ID NO: 252888 - DNA, 120 bp, Artificial Sequence
  ENSG00000123908_126 (sequence is synthesized)
ccttgctaatttaacttctggttttgtttgttttgaggcagggtcttgctctgtcacccgagctagaaggcagtggcatgacctgactataggtcactgcagcctctaactcccgggctc

SEQ ID NO: 252889 - DNA, 80 bp, Artificial Sequence
  ENSG00000123933_0 (sequence is synthesized)
ggagcgggccgggcagcggccgccgccgtcccggggcggacgggcgcgggcgggaggatggagctgaactccctgctgat

SEQ ID NO: 252890 - DNA, 120 bp, Artificial Sequence
  ENSG00000123933_1 (sequence is synthesized)
ggcgggaggatggagctgaactccctgctgatcctgctggaggcggccgagtacctggagcgcagggatcgagaggccgagcacggctacgcctcggtgctgcccttcgacggcgacttc

SEQ ID NO: 252891 - DNA, 120 bp, Artificial Sequence
  ENSG00000123933_2 (sequence is synthesized)
gccagggagaaaacaaaggcggccggcctggtgcgcaaggccccgaacaacaggtcttcacacaacgagctagaaaagcacagacgagccaaactcaggctgtaccttgagcagctcaag

SEQ ID NO: 252892 - DNA, 120 bp, Artificial Sequence
  ENSG00000123933_3 (sequence is synthesized)
caactggtgcccctgggccccgacagcacccgccacaccacgctgagcctcctgaagcgggccaaggtgcacatcaagaaactggaggagcaggaccgccgggcactgagcatcaaggag

SEQ ID NO: 252893 - DNA, 120 bp, Artificial Sequence
  ENSG00000123933_4 (sequence is synthesized)
cagctgcagcaggagcatcgtttcctgaagcggcgcctggagcagctgtcggtgcagagcgtggagcgcgtgcgcacagatagcacgggctctgctgtctccacggacgactcagagcaa

SEQ ID NO: 252894 - DNA, 120 bp, Artificial Sequence
  ENSG00000123933_5 (sequence is synthesized)
gaagtggacatagagggcatggagtttggccctggtgagctggacagtgttggcagcagcagtgacgcggacgaccactacagcctgcagagtggcaccggcggcgacagtggcttcggg

SEQ ID NO: 252895 - DNA, 120 bp, Artificial Sequence
  ENSG00000123933_6 (sequence is synthesized)
ccccactgccggcggctgggccgccccgccctctcgtaggcccgtgccctctgctccttggcctgcctgcccgccagccacgcgtgtcagccctccagttctccttcagttgacgccagc

SEQ ID NO: 252896 - DNA, 120 bp, Artificial Sequence
  ENSG00000123933_7 (sequence is synthesized)
ctctccacaggcccactgctgtgccattctggaagctccagctgctgctgggctgcctggcactgcccgcttgccggtcagggcctgccgagctgcctgccccttccagctgggcagagt

SEQ ID NO: 252897 - DNA, 120 bp, Artificial Sequence
  ENSG00000123933_8 (sequence is synthesized)
cccctgcaaggaggcagggcccagcttccacatccggagccctggtcagcatagccgcccacggtctgttctcagattcctaatcattccagaagtattaaacgtcattgctgcaaacct

SEQ ID NO: 252898 - DNA, 120 bp, Artificial Sequence
  ENSG00000123933_9 (sequence is synthesized)
cggcaggtgccgtgtgaggggcttaatgaccaccacagggagctcagaccccaaccctggatcccaggagaaaggagtggaccgaggaaggaaggaaggcaaggctgtctgtccatccgt

SEQ ID NO: 252899 - DNA, 120 bp, Artificial Sequence
  ENSG00000123933_10 (sequence is synthesized)
ccgtctgtccacctacctgtcagtccacataggctcctggcgtggacaaggggtctgtgaagggcgggaactgggtgagcacctggggcaggtgggtggttaaggtccttcccacttcgc

SEQ ID NO: 252900 - DNA, 120 bp, Artificial Sequence
  ENSG00000123933_11 (sequence is synthesized)
aggtgtcagaacctagggctgggctctcggggccaggcaggccagcccagcccacgccgagctgggcagcgtctgctctggtaggactgtcagacgcacacgcgcacgcacctagacaca

SEQ ID NO: 252901 - DNA, 120 bp, Artificial Sequence
  ENSG00000123933_12 (sequence is synthesized)
cccactcatgtacatgctcacacatgcagacacacctgggcgtcccgaggtcacatgttctggggatgatggccttcaggggtcatctggcaaacagcccctgggctgtgcctggatccc

SEQ ID NO: 252902 - DNA, 120 bp, Artificial Sequence
  ENSG00000123933_13 (sequence is synthesized)
cctctagctcctgctcacccacgcccacccagtagtcctgcctgtctgcacaggagaggggcttctcttcctggctggggctggggtgaactggaggctggttaagttgcagccgctggg

SEQ ID NO: 252903 - DNA, 120 bp, Artificial Sequence
  ENSG00000123933_14 (sequence is synthesized)
tcctcgggggcttactcatctcccttttttaaacaaaaagcaaaaaagtaaaatgctgcactgcccagcagcccggttagggctcctggagccaccttaggaaagggcttctcatgagct

SEQ ID NO: 252904 - DNA, 120 bp, Artificial Sequence
  ENSG00000123933_15 (sequence is synthesized)
ctgctgcggcagcttcagctggcagagaggctttcccagaaaaaaaaaaaaaaccatttttaaaaagaagaaagcctaaagactctcggcctagggacgtccgtgtgtgccgcctctgtt

SEQ ID NO: 252905 - DNA, 120 bp, Artificial Sequence
  ENSG00000123933_16 (sequence is synthesized)
tagctgttgttgcgtccttgtttgctgaggggtgggagccacccagcgtctcagggacctgtccctccgtcacgtcgtcaaagtgtgccttgtgtcttgtgtcaggccttgcccttccca

SEQ ID NO: 252906 - DNA, 120 bp, Artificial Sequence
  ENSG00000123933_17 (sequence is synthesized)
ccagcatgtccctcgtggctcagggtgccccaggcctgcccagctagtgctgtcctcccatctcctgtgggcagcccctcccggcagccagggcttcctggaggcgatgcagccaggccc

SEQ ID NO: 252907 - DNA, 120 bp, Artificial Sequence
  ENSG00000123933_18 (sequence is synthesized)
ctgtgggtggcacggaggggctgtgacctggtccccagtgttgccctccccagtggctggcaggggcctgcttgctcactagagagatggattctcacctgtcacctgactcgagccccc

SEQ ID NO: 252908 - DNA, 120 bp, Artificial Sequence
  ENSG00000123933_19 (sequence is synthesized)
tgcttcctggcctaggcgagggttccaggtttcagacactggcagccaatgaagactgtgctcgctgggtggtgcaggcctggcaccaggaggcttgcacccgcctttccttcctgacgt

SEQ ID NO: 252909 - DNA, 120 bp, Artificial Sequence
  ENSG00000123933_20 (sequence is synthesized)
cctctgtccttggggctggcccatagcagtgcctgccgtgcctctggtacatctgtagccaattcccatatcatggggaaaattcgtgtctattttcagtcgtacgcatagacgccccag

SEQ ID NO: 252910 - DNA, 120 bp, Artificial Sequence
  ENSG00000123933_21 (sequence is synthesized)
gatggggggcccactgtggcggaagggggtccctggaaacaactctggcacagaacctgccctgcaggctgtagggggcatggtgcctggagctgaggggcatccgaacgcgttgcgggt

SEQ ID NO: 252911 - DNA, 120 bp, Artificial Sequence
  ENSG00000123933_22 (sequence is synthesized)
ggttgtgaggaggcctgtctgcatctccttccggccccactggggtccaggggtgcccagaaaggagcttcccctgcctgcctgagtctgtccccccaggcttcatttcaaacaccgtgg

SEQ ID NO: 252912 - DNA, 120 bp, Artificial Sequence
  ENSG00000123933_23 (sequence is synthesized)
cacctccgagcaaggcgggccgtgtgtaaaagcttgcttccccagccagcactgcagggccctgaggtggtcgtgtccctgccctcaattcttgaagcaccagctccctgccccaccctc

SEQ ID NO: 252913 - DNA, 120 bp, Artificial Sequence
  ENSG00000123933_24 (sequence is synthesized)
cagtgcctgaggcagctaggggcttctgctctcatctctgaccagcagaatccacccggtgaccagtggtggcccctcagcccaccctcccggcagctcagcctgtggctcttgaggccg

SEQ ID NO: 252914 - DNA, 120 bp, Artificial Sequence
  ENSG00000123933_25 (sequence is synthesized)
tggttcccacgtggactgggaggcagtctcagccacccggggtgctgttcagctgcccctccctgccatcagcaggtgggtgaggggttgcccactgggtgggggcccgtgctaggagtc

SEQ ID NO: 252915 - DNA, 120 bp, Artificial Sequence
  ENSG00000123933_26 (sequence is synthesized)
accacatgctccaacctcccactgctccctgtcaggggcccaggctgccatcactggaggctgcagggaccaagaggccatcaccgtgtctatagagagcagacagaagcagaacagagc

SEQ ID NO: 252916 - DNA, 120 bp, Artificial Sequence
  ENSG00000123933_27 (sequence is synthesized)
ccggggctcctgagcctctgcgtgtgccctcccagcccacaccagtgctctcggccactgagcacccagactcaggcttgggttccccagccttattggaaggcagctcccgcataccag

SEQ ID NO: 252917 - DNA, 120 bp, Artificial Sequence
  ENSG00000123933_28 (sequence is synthesized)
gataacccccgcaaaccacatagcagacccccgccatcctcgcagagtgggagaggctgcagcaaggctttgcctctgcagaccccatcttagtggcacggtgcttgggcctgtgtcccc

SEQ ID NO: 252918 - DNA, 120 bp, Artificial Sequence
  ENSG00000123933_29 (sequence is synthesized)
gggtggtggaaccctgtaccggtctgtggccctagggtccctgctctgtctgccccggcccgtgctgtccgctgggtgaggcaggctcccccgtgccctgcctccctctgtcagggaacc

SEQ ID NO: 252919 - DNA, 120 bp, Artificial Sequence
  ENSG00000123933_30 (sequence is synthesized)
tgggaccccctccccactgcctgcacagaggaccctgaccctcggccagcagggtggccccaggtccatgttgggcactagggcaggttccgtgccagagtcgggggccacacgagggcc

SEQ ID NO: 252920 - DNA, 120 bp, Artificial Sequence
  ENSG00000123933_31 (sequence is synthesized)
tggtgccggtgaggggggcgtgcgctagagggggaaaggggcccccggccacctgtccaccgtgtgggccgtgctgtgtccttatgtcattgtaatataaatacagatttttatatctca

SEQ ID NO: 252921 - DNA, 120 bp, Artificial Sequence
  ENSG00000123933_32 (sequence is synthesized)
ctgtggcacaccctgtggtgctgggaattgtgtgcccgcgtctgaatgggcaagacaggtcttcacacaacgagctagaaaagcacagagaccgcatcccaggcactcagaggctgagcc

SEQ ID NO: 252922 - DNA, 120 bp, Artificial Sequence
  ENSG00000123933_33 (sequence is synthesized)
acatcctccactgctccccgcgggcactaacattgccgatgagacttggataaggaggggaccttgttctccatttcctcacttgatctttcacccgacaccacgtacgtaagtcctgtc

SEQ ID NO: 252923 - DNA, 120 bp, Artificial Sequence
  ENSG00000123933_34 (sequence is synthesized)
cacactcctccaccttctcatccctgatgactgcacaggacacttggctgtgccaccagcgttctttgtgatgaccctctggtttacacagggacttccggacagtcctgcgatgtgcct

SEQ ID NO: 252924 - DNA, 120 bp, Artificial Sequence
  ENSG00000123933_35 (sequence is synthesized)
gctgcccttcgacggcgacttcgccagggagaaaacaaaggcggccggcctggtgcgcaaggccccgaacaacaggtcttcacacaacgagctagaaaagcacaggtgttccgtgatttc

SEQ ID NO: 252925 - DNA, 120 bp, Artificial Sequence
  ENSG00000123933_36 (sequence is synthesized)
ctttgtggatctggggggatagttttgtaggaccaaggccctagaagtagagatgctggttggcggtcagtgataactgtatcgatggcccttcagacctgtgtccccttttgctctccc

SEQ ID NO: 252926 - DNA, 120 bp, Artificial Sequence
  ENSG00000123933_37 (sequence is synthesized)
accagcaaaccatcaacgacccctcgaagtggctggcgcaggagccatcccttctcatgtcagcctgtcggagggtgcaagttgtacctccttgtttgtgtgtgcatttcctggctcggg

SEQ ID NO: 252927 - DNA, 120 bp, Artificial Sequence
  ENSG00000123933_38 (sequence is synthesized)
tgagatggagccgggcgttaggttaggttggccctcgtgtcctgcagcctgtttgtgtccttcgcccgttgtgacatcgaggcattctgcttttaatttttgatgtgtatgagctcaaaa

SEQ ID NO: 252928 - DNA, 120 bp, Artificial Sequence
  ENSG00000123933_39 (sequence is synthesized)
taccacaaatactaaccatttgtcttttatatgtattgcaaagatttttctacttgttctttgtctctcagctgtgtttttctttcttgtgcaaacgtgtctttctctgattgtcacagc

SEQ ID NO: 252929 - DNA, 120 bp, Artificial Sequence
  ENSG00000123933_40 (sequence is synthesized)
aatgtctgtgtgtgtttttttttaagcgtagaaaacctggaaaatacagaaaagcacaaagctaaagaaataaaattgccgggtgcttcgcctggagacgcacgctccctgtgccttgtt

SEQ ID NO: 252930 - DNA, 120 bp, Artificial Sequence
  ENSG00000123933_41 (sequence is synthesized)
tgattctgtcgtctcttgtgtgcgtctgctcttttattttttaaacaaaattgggtcacttgtcacctatgtggttccgtattctaatttttcacttaacattcatgatgtgcatatgta

SEQ ID NO: 252931 - DNA, 120 bp, Artificial Sequence
  ENSG00000123933_42 (sequence is synthesized)
attctaatttttcacttaacattcatgatgtgcatatgtaacacactaaaatgataatgaggttgttttggggtggtggaattcgggggtacttttaatttttttttattttttttcctt

SEQ ID NO: 252932 - DNA, 120 bp, Artificial Sequence
  ENSG00000123933_43 (sequence is synthesized)
atagtgctgatgtaattacatggtgggatggaaagccatttgctagagtggaccagggaaggagacccctggcaacgtccccacttgcaaacctcgtcccagtggtggctgcagtacagt

SEQ ID NO: 252933 - DNA, 120 bp, Artificial Sequence
  ENSG00000123933_44 (sequence is synthesized)
ggcgacgcgccttgggaaaggacccctccctgagcagagagagcacgctttggcctcttgcctacacagttcctggggtggggggcggcagggcgctcactcctgttggcggtggggagg

SEQ ID NO: 252934 - DNA, 120 bp, Artificial Sequence
  ENSG00000123933_45 (sequence is synthesized)
ctgagcttccaggcactggggtagtcacagagcggcagcctgggacccctttccctgcacctgtgcatgggagacagcgtgggagacgttgaggatcttggccctgttcaggccacctcc

SEQ ID NO: 252935 - DNA, 120 bp, Artificial Sequence
  ENSG00000123933_46 (sequence is synthesized)
aggcagacctcccgactggtggggctgttaccgctgcacccagcagccccctccttcttcaggctcctcctctgtccagaggaaatggctgtccctgccgacgttactcccagggggaca

SEQ ID NO: 252936 - DNA, 120 bp, Artificial Sequence
  ENSG00000123933_47 (sequence is synthesized)
agatttgctgggcttgggaacggcaggagcagacatgccaaggctggggtgctcagtgttggcaccacgtggggaaagtcacgtgtgtaggcatcagctgtggcagggcagttgggcggc

SEQ ID NO: 252937 - DNA, 120 bp, Artificial Sequence
  ENSG00000123933_48 (sequence is synthesized)
aggttttcaaaagacaaaaaatattcctgccccttcacctggtcattccactcgtaaggatttacccaaatcaaagtgtcctatatttggaagcagcctctgcggcctgcacgggatggg

SEQ ID NO: 252938 - DNA, 120 bp, Artificial Sequence
  ENSG00000123933_49 (sequence is synthesized)
tgagtccgtggttgaacatggcagtgacaaaacctccgggtgccctgcactgccaggcaggtgcacgtgggcctggccagggtcccaggccgagttgatgcctctgggtgagctgggctc

SEQ ID NO: 252939 - DNA, 120 bp, Artificial Sequence
  ENSG00000123933_50 (sequence is synthesized)
cccgcaccccgtgagctccaccagcctcccccgcagacaagcaggccagcagggaaggcggtgtttccacaggggcaggcctaggatgaagccagggcccctctcctgaggtgcccgatg

SEQ ID NO: 252940 - DNA, 120 bp, Artificial Sequence
  ENSG00000123933_51 (sequence is synthesized)
agcaagtacccttgagtgtgaacaagcaagcaagcaccactggatgtcatggctccagttttgtggaaagtggattcatctgtggatacggggacagaatctggaatgaggcagtttcca

SEQ ID NO: 252941 - DNA, 120 bp, Artificial Sequence
  ENSG00000123933_52 (sequence is synthesized)
aagggatatgaaacttgggttggaagggcctggtccctggccctcccttgacctaggctgatcatgtttccatggtcacaaaagtgacagagagcacgttgtgcacgatgaggtagagag

SEQ ID NO: 252942 - DNA, 120 bp, Artificial Sequence
  ENSG00000123933_53 (sequence is synthesized)
acgtgaatcttgtctgggtccttccagatctcggtgcagcctgaaaggcaccctcgcctcaccccacccctccctgcatgtggactccagggtggggatgggggatgggggatggcaggg

SEQ ID NO: 252943 - DNA, 120 bp, Artificial Sequence
  ENSG00000123933_54 (sequence is synthesized)
gggcgagctggggctcctaggaaatgcctggcggtgacgcgctgaggctttgcaggccatggtgagctgggcgcttctgccaggtgtctgggggctgtgggtgttgggctcctcctgggg

SEQ ID NO: 252944 - DNA, 120 bp, Artificial Sequence
  ENSG00000123933_55 (sequence is synthesized)
gtgggggacgggggttcccaaccaggccaggaggggatccttagagagggaccctcagcacatgtgcagcagtggatggtgggggtgggtctgtgcagggccctggaaactgcctgctgc

SEQ ID NO: 252945 - DNA, 120 bp, Artificial Sequence
  ENSG00000123975_0 (sequence is synthesized)
gttagtctccggcgagttgttgcctgggctggacgtggttttgtctgctgcgcccgctcttcgcgctctcgtttcattttctgcagcgcgccagcaggatggcccacaagcagatctact

SEQ ID NO: 252946 - DNA, 120 bp, Artificial Sequence
  ENSG00000123975_1 (sequence is synthesized)
actcggacaagtacttcgacgaacactacgagtaccggcatgttatgttacccagagaactttccaaacaagtacctaaaactcatctgatgtctgaagaggagtggaggagacttggtg

SEQ ID NO: 252947 - DNA, 120 bp, Artificial Sequence
  ENSG00000123975_2 (sequence is synthesized)
ctgggttcattacatgattcatgagccagaaccacatattcttctctttagacgacctcttccaaaagatcaacaaaaatgaagtttatctggggatcgtcaaatctttttcaaatttaa

SEQ ID NO: 252948 - DNA, 120 bp, Artificial Sequence
  ENSG00000123975_3 (sequence is synthesized)
tgtatatgtgtatataaggtagtattcagtgaatacttgagaaatgtacaaatctttcatccatacctgtgcatgagctgtattcttcacagcaacagagctcagttaaatgcaactgca

SEQ ID NO: 252949 - DNA, 120 bp, Artificial Sequence
  ENSG00000123975_4 (sequence is synthesized)
agtaggttactgtaagatgtttaagataaaagttcttccagtcagtttttctcttaagtgcctgtttgagtttactgaaacagtttacttttgttcaataaagtttgtatgttgcattta

SEQ ID NO: 252950 - DNA, 120 bp, Artificial Sequence
  ENSG00000123977_0 (sequence is synthesized)
gctgtttagccgtttccaaggctacgaagcccatcggccggggataagagagcaagaaaatgaagctcaagagcctcctgctccggtattacccgccaggaattatgttggaatatgaaa

SEQ ID NO: 252951 - DNA, 120 bp, Artificial Sequence
  ENSG00000123977_1 (sequence is synthesized)
aacatggagaattaaagactaagtccatagatttgcttgatcttggtcccagcactgatgtcagtgcgttagtagaagaaatccagaaggcagaacctctactcacagcttcacgaacag

SEQ ID NO: 252952 - DNA, 120 bp, Artificial Sequence
  ENSG00000123977_2 (sequence is synthesized)
agcaagtcaaacttttgatacagaggttgcaagagaaactcggccagaacagcaatcacacgttctatctttttaaggttctcaaagcacatatattgccactgactaatgttgcactta

SEQ ID NO: 252953 - DNA, 120 bp, Artificial Sequence
  ENSG00000123977_3 (sequence is synthesized)
acaaatcgggctcatgctttatcacaggaagctatgatcggacgtgcaagctctgggacactgcgtctggagaggagctgaacacgctggagggccacaggaatgtggtttatgccatag

SEQ ID NO: 252954 - DNA, 120 bp, Artificial Sequence
  ENSG00000123977_4 (sequence is synthesized)
cattcaacaatccttacggtgacaaaatcgccactgggtcctttgataaaacttgtaaactctggagtgtggaaacaggaaaatgttaccataccttcaggggtcatacagcagaaatag

SEQ ID NO: 252955 - DNA, 120 bp, Artificial Sequence
  ENSG00000123977_5 (sequence is synthesized)
tgtgtttatcatttaaccctcaaagcacattggtggcgactggaagtatggacacaacagccaaattgtgggacattcagaatggcgaggaagtttacaccttaagaggacattctgccg

SEQ ID NO: 252956 - DNA, 120 bp, Artificial Sequence
  ENSG00000123977_6 (sequence is synthesized)
aaatcatctccttgtcatttaacacctcaggagacagaatcatcacggggtcttttgatcataccgttgtagtgtgggacgctgatactggaaggaaggtaaatatcttaattggtcatt

SEQ ID NO: 252957 - DNA, 120 bp, Artificial Sequence
  ENSG00000123977_7 (sequence is synthesized)
ctgagattagcagtgcctcattcaattgggattgctctctaatattaactggctctatggacaaaacctgcaagctgtgggatgctacaaatggaaaatgtgtggcaaccttaacaggcc

SEQ ID NO: 252958 - DNA, 120 bp, Artificial Sequence
  ENSG00000123977_8 (sequence is synthesized)
atgatgatgaaatactagacagctgctttgattacactggaaagcttattgcaactgcttcagctgatggaacagcaagaattttcagtgctgccacaagaaaatgcattgccaaactgg

SEQ ID NO: 252959 - DNA, 120 bp, Artificial Sequence
  ENSG00000123977_9 (sequence is synthesized)
aaggtcatgaaggtgaaatttcaaagatttctttcaaccctcaagggaaccatcttctaactggcagctctgacaaaacggctagaatctgggatgctcagactggccagtgcctccagg

SEQ ID NO: 252960 - DNA, 120 bp, Artificial Sequence
  ENSG00000123977_10 (sequence is synthesized)
ttcttgaggggcacactgatgaaatcttttcatgtgctttcaactataaaggcaacatagtcattacaggcagcaaggataatacctgtaggatatggcgttgactgaaggaagctggtc

SEQ ID NO: 252961 - DNA, 120 bp, Artificial Sequence
  ENSG00000123977_11 (sequence is synthesized)
agtgagcaaccttgctagcaatggtaatcaagaactggaacttcacagacagcagctctcttaatatttcttatactttctctttttctgcaagtcaactatttctacaactgtccttca

SEQ ID NO: 252962 - DNA, 120 bp, Artificial Sequence
  ENSG00000123977_12 (sequence is synthesized)
tttcacagatatgaccattaaacatgacaaagttatgccactccaatattattatttgatggcgatggcaggacacagcataatgtttggctaatgccaccagttatttcagttgtgttt

SEQ ID NO: 252963 - DNA, 120 bp, Artificial Sequence
  ENSG00000123977_13 (sequence is synthesized)
gttttttaaaagcattatgatactgaaaaaggagaccagaacaacttaacaacgtgtctcctggattttactttgaagcctattgttataatttctgttgaataaagtgtttggaggaaa

SEQ ID NO: 252964 - DNA, 120 bp, Artificial Sequence
  ENSG00000123977_14 (sequence is synthesized)
tttagccgtttccaaggctacgaagcccatcggccggggataagagagcaagaaaatgaagctcaagagcctcctgctccggtattacccgccaggtgaggacatggtcacctttaaaga

SEQ ID NO: 252965 - DNA, 120 bp, Artificial Sequence
  ENSG00000123977_15 (sequence is synthesized)
ataagtgacacccattgatcacccagcttcttagggacagaaataggagtgcaattcttgggttctaattcagaactcgtcttctgaattagaaacatctgcaaaaaaaaaaaaaaaaag

SEQ ID NO: 252966 - DNA, 120 bp, Artificial Sequence
  ENSG00000123977_16 (sequence is synthesized)
gtttccaaggctacgaagcccatcggccggggataagagagcaagaaaatgaagctcaagagcctcctgctccggtattacccgccagtctttggtgagccaaatcatatgcaagtttcc

SEQ ID NO: 252967 - DNA, 120 bp, Artificial Sequence
  ENSG00000123977_17 (sequence is synthesized)
aggctttctggtgtaggttccgacgcacctgccttccattcccgcctatccatttaggctgcgacctctggtagttctccactttctctaattctgagttacttcatccttaagaagtgg

SEQ ID NO: 252968 - DNA, 120 bp, Artificial Sequence
  ENSG00000123977_18 (sequence is synthesized)
tgcataactcacaccttgttaggattgtatgagtatgtgtgcatacaccgtttaaagcaatgtagggcacagagtcaggaaatgcaaaatattaagttgaggtcatttttcttttgggag

SEQ ID NO: 252969 - DNA, 120 bp, Artificial Sequence
  ENSG00000123977_19 (sequence is synthesized)
gacaaggacagggcacgggctggggccctagagtagtaattagcgatgggcttttcctcccagccttccttttgggaaacgcagtgtgctaaaaaagtgcatgcagcccaggctgtggcc

SEQ ID NO: 252970 - DNA, 120 bp, Artificial Sequence
  ENSG00000123977_20 (sequence is synthesized)
taggccgtcggttcccggccatgcctagctcctctgaggtcgcccttagtgaggacacgaggtgccctcacctctttcactctagacacctccagaacactcgccccccgcgcgccggag

SEQ ID NO: 252971 - DNA, 83 bp, Artificial Sequence
  ENSG00000123977_21 (sequence is synthesized)
gagttatgtcacgttcttggtaatcatgtttgatgttatccggtgtgttcatctctttgatcactggacgtgatgctaaacta

SEQ ID NO: 252972 - DNA, 120 bp, Artificial Sequence
  ENSG00000123977_22 (sequence is synthesized)
tgtgttcatctctttgatcactggacgtgatgctaaactatgcctgtgtcatctgctgtcaacaatatggaacagcaagaattttcagtgctgccacaagaaaatgcattgccaaactgg

SEQ ID NO: 252973 - DNA, 120 bp, Artificial Sequence
  ENSG00000123983_0 (sequence is synthesized)
agacgctgctgtggctgcgccgggctgcgacactgcagttgtctacgcggccggggccgggacgaggaggcgttggacggggtcgcatacgttcgtcccctcgcattgcggccccgacag

SEQ ID NO: 252974 - DNA, 120 bp, Artificial Sequence
  ENSG00000123983_1 (sequence is synthesized)
ctgcgccaggatccccgggcggcggcgcggggcgtgaacgctctggggctcagccaggcctgcgcgggcccgaggccggaggaacccggactccggcgtagcggttttgacacaagggcg

SEQ ID NO: 252975 - DNA, 120 bp, Artificial Sequence
  ENSG00000123983_2 (sequence is synthesized)
catatcttcaaagcacctagtacctcctaccattgtcaactgatacagaattcgttgttgggaaggactggggaaacagctgtaacatttgccaccctcagaagctgctggtcctgtgtc

SEQ ID NO: 252976 - DNA, 120 bp, Artificial Sequence
  ENSG00000123983_3 (sequence is synthesized)
acaccaccttagcctcttgatcgaggaagattctcgctgaagtctgttaattctactttttgagtacttatgaataaccacgtgtcttcaaaaccatctaccatgaagctaaaacatacc

SEQ ID NO: 252977 - DNA, 120 bp, Artificial Sequence
  ENSG00000123983_4 (sequence is synthesized)
atcaaccctattcttttatattttatacattttctaatatcactttatactattttaacatacattccgttttattttttctccgagtcaagacaagaaaaatcaaaccgaattaaagca

SEQ ID NO: 252978 - DNA, 120 bp, Artificial Sequence
  ENSG00000123983_5 (sequence is synthesized)
aagcctgtaaattcaaaacctgattctgcatacagatctgttaatagtttggatggtttggcttcagtattataccctggatgtgatactttagataaagtttttacatatgcaaaaaac

SEQ ID NO: 252979 - DNA, 120 bp, Artificial Sequence
  ENSG00000123983_6 (sequence is synthesized)
aaatttaagaacaaaagactcttgggaacacgtgaagttttaaatgaggaagatgaagtacaaccaaatggaaaaatttttaaaaaggttattcttggacagtataattggctttcctat

SEQ ID NO: 252980 - DNA, 120 bp, Artificial Sequence
  ENSG00000123983_7 (sequence is synthesized)
gaagatgtctttgttcgagcctttaattttggaaatggattacagatgttgggtcagaaaccaaagaccaacatcgccatcttctgtgagaccagggccgagtggatgatagctgcacag

SEQ ID NO: 252981 - DNA, 120 bp, Artificial Sequence
  ENSG00000123983_8 (sequence is synthesized)
gcgtgttttatgtataattttcagcttgttacattatatgccactctaggaggtccagccattgttcatgcattaaatgaaacagaggtgaccaacatcattactagtaaagaactctta

SEQ ID NO: 252982 - DNA, 120 bp, Artificial Sequence
  ENSG00000123983_9 (sequence is synthesized)
caaacaaagttgaaggatatagtttctttggtcccacgcctgcggcacatcatcactgttgatggaaagccaccgacctggtccgagttccccaagggcatcattgtgcataccatggct

SEQ ID NO: 252983 - DNA, 120 bp, Artificial Sequence
  ENSG00000123983_10 (sequence is synthesized)
gcagtggaggccctgggagccaaggccagcatggaaaaccaacctcatagcaaaccattgccctcagatattgcagtaatcatgtacacaagtggatccacaggacttccaaagggagtc

SEQ ID NO: 252984 - DNA, 120 bp, Artificial Sequence
  ENSG00000123983_11 (sequence is synthesized)
atgatctcacatagtaacattattgctggtataactgggatggcagaaaggattccagaactaggagaggaagatgtctacattggatatttgcctctggcccatgttctagaattaagt

SEQ ID NO: 252985 - DNA, 120 bp, Artificial Sequence
  ENSG00000123983_12 (sequence is synthesized)
gctgagcttgtctgtctttctcacggatgccgcattggttactcttcaccacagactttagcagatcagtcttcaaaaattaaaaaaggaagcaaaggggatacatccatgttgaaacca

SEQ ID NO: 252986 - DNA, 120 bp, Artificial Sequence
  ENSG00000123983_13 (sequence is synthesized)
acactgatggcagcagttccggaaatcatggatcggatctacaaaaatgtcatgaataaagtcagtgaaatgagtagttttcaacgtaatctgtttattctggcctataattacaaaatg

SEQ ID NO: 252987 - DNA, 120 bp, Artificial Sequence
  ENSG00000123983_14 (sequence is synthesized)
gaacagatttcaaaaggacgtaatactccactgtgcgacagctttgttttccggaaagttcgaagcttgctagggggaaatattcgtctcctgttgtgtggtggcgctccactttctgca

SEQ ID NO: 252988 - DNA, 120 bp, Artificial Sequence
  ENSG00000123983_15 (sequence is synthesized)
accacgcagcgattcatgaacatctgtttctgctgtcctgttggtcagggatacgggctcactgaatctgctggggctggaacaatttccgaagtgtgggactacaatactggcagagtg

SEQ ID NO: 252989 - DNA, 120 bp, Artificial Sequence
  ENSG00000123983_16 (sequence is synthesized)
ggagcaccattagtttgctgtgaaatcaaattaaaaaactgggaggaaggtggatactttaatactgataagccacaccccaggggtgaaattcttattgggggccaaagtgtgacaatg

SEQ ID NO: 252990 - DNA, 120 bp, Artificial Sequence
  ENSG00000123983_17 (sequence is synthesized)
gggtactacaaaaatgaagcaaaaacaaaagctgatttctttgaagatgaaaatggacaaaggtggctctgtactggggatattggagagtttgaacccgatggatgcttaaagattatt

SEQ ID NO: 252991 - DNA, 120 bp, Artificial Sequence
  ENSG00000123983_18 (sequence is synthesized)
gatcgtaaaaaggaccttgtaaaactacaggcaggggaatatgtttctcttgggaaagtagaggcagctttgaagaatcttccactagtagataacatttgtgcatatgcaaacagttat

SEQ ID NO: 252992 - DNA, 120 bp, Artificial Sequence
  ENSG00000123983_19 (sequence is synthesized)
cattcttatgtcattggatttgttgtgccaaatcaaaaggaactaactgaactagctcgaaagaaaggacttaaagggacttgggaggagctgtgtaacagttgtgaaatggaaaatgag

SEQ ID NO: 252993 - DNA, 120 bp, Artificial Sequence
  ENSG00000123983_20 (sequence is synthesized)
gtacttaaagtgctttccgaagctgctatttcagcaagtctggaaaagtttgaaattccagtaaaaattcgtttgagtcctgaaccgtggacccctgaaactggtctggtgacagatgcc

SEQ ID NO: 252994 - DNA, 120 bp, Artificial Sequence
  ENSG00000123983_21 (sequence is synthesized)
ttcaagctgaaacgcaaagagcttaaaacacattaccaggcggacattgagcgaatgtatggaagaaaataattattctcttctggcatcagtttgctacagtgagctcagatcaaatag

SEQ ID NO: 252995 - DNA, 120 bp, Artificial Sequence
  ENSG00000123983_22 (sequence is synthesized)
gaaaatacttgaaatgcatgtctcaagctgcaaggcaaactccattcctcatattaaactattacttctcatgacgtcaccatttttaactgacaggattagtaaaacattaagacagca

SEQ ID NO: 252996 - DNA, 120 bp, Artificial Sequence
  ENSG00000123983_23 (sequence is synthesized)
gactgtacttgtcagtatgagaatttttctgaatcatattggggaagcagtgattttaaaacctcaagtttttaaacatgatttatatgttctgtataatgttcagtttgtaacttttta

SEQ ID NO: 252997 - DNA, 120 bp, Artificial Sequence
  ENSG00000123983_24 (sequence is synthesized)
aaagtttggatgtatagagggataaataggaaatataagaattggttatttgggggcttttttacttactgtatttaaaaatacaagggtattgatatgaaattatgtaaatttcaaatg

SEQ ID NO: 252998 - DNA, 120 bp, Artificial Sequence
  ENSG00000123983_25 (sequence is synthesized)
cttatgaatcaaatcattgttgaacaaaagatttgttgctgtgtaattattgtcttgtatgcatttgagagaaataaatatacccatacttatgttttaagaagttgagatcttgtgaat

SEQ ID NO: 252999 - DNA, 120 bp, Artificial Sequence
  ENSG00000123983_26 (sequence is synthesized)
atatgcctgtcagtgtcttctttatatatttattttttattagaaaaaatgaagtttggttggtgatgcatgaaacaaaatagcaagagagggttatagtttaatagtaagggagataac

SEQ ID NO: 253000 - DNA, 120 bp, Artificial Sequence
  ENSG00000123983_27 (sequence is synthesized)
acagcatgtgtagcaccagttgataattggtctctagtagcttactgtcaaaatgttcaatgaagtcttctgttcatctgttgaaactaggaaaatacccaaacttaaatggaagaattc

SEQ ID NO: 253001 - DNA, 120 bp, Artificial Sequence
  ENSG00000123983_28 (sequence is synthesized)
tgaaagagaggatagaatttaaagaacaagagtatataaagttattctttgaatatttcgttgactatatgtacattgagttatctatatttgtaaacaaattagtcatggaaaattatt

SEQ ID NO: 253002 - DNA, 120 bp, Artificial Sequence
  ENSG00000123983_29 (sequence is synthesized)
ctatctcaaagtctccttttagtctagataatcattatttcattttaaaattagtgtttttcctagtttgcactgatgcgtgtatggatgtgtgtgagtcagtggtagcttatttaaaaa

SEQ ID NO: 253003 - DNA, 120 bp, Artificial Sequence
  ENSG00000123983_30 (sequence is synthesized)
gcaccttatcctttctcccataacctttgtacactaaaaaatgaaagaatttagaatgtatttgatgatagcattctcactaagacacatgagaatttaactttataaccgcgtgagtta

SEQ ID NO: 253004 - DNA, 120 bp, Artificial Sequence
  ENSG00000123983_31 (sequence is synthesized)
agatttaattcataggttttgatgtcattgttgaagttatttgtaattcagaaaccttgcttgtgtgatacatagtctcttcatttattactgcttgtctgttgttatatctggattatc

SEQ ID NO: 253005 - DNA, 120 bp, Artificial Sequence
  ENSG00000123983_32 (sequence is synthesized)
aaaagcaatagtgcaccaattaagatgtgctcaaatcaggacttaaatcataggcaccacatttttcatgtcagactagttactttgttgattctcagttactgtaggcatcaaaaggca

SEQ ID NO: 253006 - DNA, 120 bp, Artificial Sequence
  ENSG00000123983_33 (sequence is synthesized)
aaaacaaaaacaaaaaaaaagatgaacctaggtctgtgtaaagtaaggggagtgttaggagcagccaggactgtgtagtgtgtgtttggttgcatcacaaacatcgtatgtggagacatt

SEQ ID NO: 253007 - DNA, 120 bp, Artificial Sequence
  ENSG00000123983_34 (sequence is synthesized)
cgtatgtggagacattgcaatacagtgttttttgttttcaacttttcttgtattgtatatttgtattatgttttgaatgcttttctcttttcataattaaatattaatgtttgggataac

SEQ ID NO: 253008 - DNA, 120 bp, Artificial Sequence
  ENSG00000123983_35 (sequence is synthesized)
tgccaagaagaagtaaaaatattgaatggaacttctatatgaggatgctgtgatctaaaaattaaatctcagtgggcggagagaatttgtttctgatgccttgtctttagaataattgtt

SEQ ID NO: 253009 - DNA, 120 bp, Artificial Sequence
  ENSG00000123983_36 (sequence is synthesized)
tgctttcagatgattaaaaaaaggagattgtatctaggaaaaaagtgtgaatgcttcaaaggagagatactgataattgtgacttgaaatagtgtcagatgaattatgtagctgatcact

SEQ ID NO: 253010 - DNA, 120 bp, Artificial Sequence
  ENSG00000123983_37 (sequence is synthesized)
gatggaaccatctaatgaggcaggcttaaactctatttagtttcgtttgttttctcatatgaagtttataattcctttcagtcctaaaatgtcagatgccaggtgtcaaatgccacagta

SEQ ID NO: 253011 - DNA, 120 bp, Artificial Sequence
  ENSG00000123983_38 (sequence is synthesized)
gaaagtgaaattaagtagagtccccttttaaacaaatttgtctgtaagcaaaactatctttagtgacttaaaaaataatatcctctaaaattaccctttcaagaggaaaaaactgttcaa

SEQ ID NO: 253012 - DNA, 120 bp, Artificial Sequence
  ENSG00000123983_39 (sequence is synthesized)
tgaaaaaaccactcaattatgactcatataagaaatactggtttaaccaggagatatttggggagcaaaattttaaggaatttcaaattgctaaatctaatacaaatatctgacaataag

SEQ ID NO: 253013 - DNA, 120 bp, Artificial Sequence
  ENSG00000123983_40 (sequence is synthesized)
atacagatctaaaagaatggttcttaagaactattgtttactgggaataaactaagctctatgaagaattcgtaagcattacatgttccagtaagtttagcaacttagagccaagactgg

SEQ ID NO: 253014 - DNA, 120 bp, Artificial Sequence
  ENSG00000123983_41 (sequence is synthesized)
tggccacctccatttatttccccactgctcctccactgacatccttcttagcagaaacttcatgaaaaagtttttgctgacacagaacaaacctgaaagtagtatctactttctaaatac

SEQ ID NO: 253015 - DNA, 120 bp, Artificial Sequence
  ENSG00000123983_42 (sequence is synthesized)
tactttgcttttcagtagtggatttgatatttataatgttctctaaagcttgcaactttttcagcaacgtttaaaaatagattaacctggaataacttacttgtttgctgctaaaatact

SEQ ID NO: 253016 - DNA, 120 bp, Artificial Sequence
  ENSG00000123983_43 (sequence is synthesized)
caagattttgccatttttaaacaaccagtccctgtgatacaactttgaaaaaacttttaaaaatctctgatgtgtgggctctttttttcccataagaattatgtacatctgtgatgtttt

SEQ ID NO: 253017 - DNA, 120 bp, Artificial Sequence
  ENSG00000123983_44 (sequence is synthesized)
acagggggatccgcttttaaacagtgtacatattggaccacactgaaatgtcatatatcctttctctacttaaaattggttatttactgtgagttcatttccgatgtgttcttggttgtt

SEQ ID NO: 253018 - DNA, 120 bp, Artificial Sequence
  ENSG00000123983_45 (sequence is synthesized)
gctgttttctgcctgaagacgtgtatcataaagagctacatggtatggactatttatttgtaatttgacataaagtttgaagaataaagatctataaaagttgaagtttctgatattaaa

SEQ ID NO: 253019 - DNA, 120 bp, Artificial Sequence
  ENSG00000123983_46 (sequence is synthesized)
actgcgtgcctcccggcgctgtggggcggggtggggaggccacccccttgaattaagagggctctgccgcggccccagcagtgcggtgtccgtggaaggagactcagccctgcgatttcg

SEQ ID NO: 253020 - DNA, 120 bp, Artificial Sequence
  ENSG00000123983_47 (sequence is synthesized)
aaaatgttccgagaactcttcctatctgttacttgtgggaatggcctccttctcattgcagccattagctgactcttttccttgtaaggcttcccctgatctttctctctgtccctgttt

SEQ ID NO: 253021 - DNA, 120 bp, Artificial Sequence
  ENSG00000123983_48 (sequence is synthesized)
tctgctttacgtctcactgcagtgtcccatggagggaggtgaagaaaataaaaccttccttcctgctgccttggtacccctacctacctgtccctcagcaggggaagcttcacagaacta

SEQ ID NO: 253022 - DNA, 120 bp, Artificial Sequence
  ENSG00000123983_49 (sequence is synthesized)
ctccagaggaatggggagtaaagaagtggcagtgaggagtgtgctgcttacttactcctgctctacacttgagcctgctcggcactccaggcaggtcttggggctcctatgtaagctgtg

SEQ ID NO: 253023 - DNA, 120 bp, Artificial Sequence
  ENSG00000123983_50 (sequence is synthesized)
actttattcaggcctttgctaaacgaaactctacagagacggtctccaggcttttccatccaaatagcatctattgtcatcttctcaccttgtcttgcttcagttttcttcatagaaaac

SEQ ID NO: 253024 - DNA, 120 bp, Artificial Sequence
  ENSG00000123983_51 (sequence is synthesized)
tgaaacaacgggcaagatgttctcagaggcagtgtaacagcgattaagagcctggactccagacccagactataggtctgaatcttggctttgccacttaactggctttctgaccctgga

SEQ ID NO: 253025 - DNA, 120 bp, Artificial Sequence
  ENSG00000123983_52 (sequence is synthesized)
gttctttttcacattgtaaagccaagtggccaacaattaagaatttgaagtcttagaaatcagttataattccttcacaatgtggtagtcccagagtaacatctgtaagtgaaacaaaat

SEQ ID NO: 253026 - DNA, 120 bp, Artificial Sequence
  ENSG00000123983_53 (sequence is synthesized)
aaaaatttaaatatcttcatctttaaaaattggaaatcttggggcatttaggggaggatgagtaggtgtaatgttgattagtatgataagataactttaaaaaacataacacttatagac

SEQ ID NO: 253027 - DNA, 120 bp, Artificial Sequence
  ENSG00000123983_54 (sequence is synthesized)
ctgaagaggttaaaattctgatgttaattttcacccagtgtccagttagtggagaactctgttgtgacttggaatttttggtttattttggaaaataaatcaattatatgacaaattgta

SEQ ID NO: 253028 - DNA, 120 bp, Artificial Sequence
  ENSG00000123983_55 (sequence is synthesized)
cagcataaccattaatgcttaattttgcaaagttttaaataatttgatagcaaattacttagagaatggccagtatttatatatgtattaaatgttactaatattattactcattgtttt

SEQ ID NO: 253029 - DNA, 120 bp, Artificial Sequence
  ENSG00000123989_0 (sequence is synthesized)
gcagtgacacgtcggacagctgcggccgcggctgaggctccagtgccgagcgcaagaaccctgcgcagcccagagcagctgctggaggggaatcgaggcgcggctccggggattcggctc

SEQ ID NO: 253030 - DNA, 80 bp, Artificial Sequence
  ENSG00000123989_1 (sequence is synthesized)
ccgcggggcccgagccctccggatccgccccctccccggtcccgccccctcggagactcctctggctgctctgggggttc

SEQ ID NO: 253031 - DNA, 120 bp, Artificial Sequence
  ENSG00000123989_2 (sequence is synthesized)
gggccggggacccgcggtccgggcgccatgcgggcatcgctgctgctgtcggtgctgcggcccgcagggcccgtggccgtgggcatctccctgggcttcaccctgagcctgctcagcgtc

SEQ ID NO: 253032 - DNA, 120 bp, Artificial Sequence
  ENSG00000123989_3 (sequence is synthesized)
cgtcacctgggtggaggagccgtgcggcccaggcccgccccaacctggagactctgagctgccgccgcgcggcaacaccaacgcggcgcgccggcccaactcggtgcagcccggagcgga

SEQ ID NO: 253033 - DNA, 120 bp, Artificial Sequence
  ENSG00000123989_4 (sequence is synthesized)
gcgcgagaagcccggggccggcgaaggcgccggggagaattgggagccgcgcgtcttgccctaccaccctgcacagcccggccaggccgccaaaaaggccgtcaggacccgctacatcag

SEQ ID NO: 253034 - DNA, 120 bp, Artificial Sequence
  ENSG00000123989_5 (sequence is synthesized)
cacggagctgggcatcaggcagaggctgctggtggcggtgctgacctctcagaccacgctgcccacgctgggcgtggccgtgaaccgcacgctggggcaccggctggagcgtgtggtgtt

SEQ ID NO: 253035 - DNA, 120 bp, Artificial Sequence
  ENSG00000123989_6 (sequence is synthesized)
cctgacgggcgcacggggccgccgggccccacctggcatggcagtggtgacgctaggcgaggagcgacccattggacacctgcacctggcgctgcgccacctgctggagcagcacggcga

SEQ ID NO: 253036 - DNA, 120 bp, Artificial Sequence
  ENSG00000123989_7 (sequence is synthesized)
cgactttgactggttcttcctggtgcctgacaccacctacaccgaggcgcacggcctggcacgcctaactggccacctcagcctggcctccgccgcccacctgtacctgggccggcccca

SEQ ID NO: 253037 - DNA, 120 bp, Artificial Sequence
  ENSG00000123989_8 (sequence is synthesized)
ggacttcatcggcggagagcccacccccggccgctactgccacggaggctttggggtgctgctgtcgcgcatgctgctgcaacaactgcgcccccacctggaaggctgccgcaacgacat

SEQ ID NO: 253038 - DNA, 120 bp, Artificial Sequence
  ENSG00000123989_9 (sequence is synthesized)
cgtcagtgcgcgccctgacgagtggctgggtcgctgcattctcgatgccaccggggtgggctgcactggtgaccacgagggggtgcactatagccatctggagctgagccctggggagcc

SEQ ID NO: 253039 - DNA, 120 bp, Artificial Sequence
  ENSG00000123989_10 (sequence is synthesized)
agtgcaggagggggaccctcatttccgaagtgccctgacagcccaccctgtgcgtgaccctgtgcacatgtaccagctgcacaaagctttcgcccgagctgaactggaacgcacgtacca

SEQ ID NO: 253040 - DNA, 120 bp, Artificial Sequence
  ENSG00000123989_11 (sequence is synthesized)
ggagatccaggagttacagtgggagatccagaataccagccatctggccgttgatggggaccaggcagctgcttggcccgtgggtattccagcaccatcccgcccggcctcccgctttga

SEQ ID NO: 253041 - DNA, 120 bp, Artificial Sequence
  ENSG00000123989_12 (sequence is synthesized)
cagcacgctttctcctgcgccgatggctcaccccgctgcccactgcgtggggctgaccgggctgatgtggccgatgttctggggacagctctagaggagctgaaccgccgctaccacccg

SEQ ID NO: 253042 - DNA, 120 bp, Artificial Sequence
  ENSG00000123989_13 (sequence is synthesized)
gccttgcggctccagaagcagcagctggtgaatggctaccgacgctttgatccggcccggggtatggaatacacgctggacttgcagctggaggcactgaccccccagggaggccgccgg

SEQ ID NO: 253043 - DNA, 120 bp, Artificial Sequence
  ENSG00000123989_14 (sequence is synthesized)
cccctcactcgccgagtgcagctgctccggccgctgagccgcgtggagatcttgcctgtgccctatgtcactgaggcctcacgtctcactgtgctgctgcctctagctgcggctgagcgt

SEQ ID NO: 253044 - DNA, 120 bp, Artificial Sequence
  ENSG00000123989_15 (sequence is synthesized)
gacctggcccctggcttcttggaggcctttgccactgcagcactggagcctggtgatgctgcggcagccctgaccctgctgctactgtatgagccgcgccaggcccagcgcgtggcccat

SEQ ID NO: 253045 - DNA, 120 bp, Artificial Sequence
  ENSG00000123989_16 (sequence is synthesized)
gcagatgtcttcgcacctgtcaaggcccacgtggcagagctggagcggcgtttccccggtgcccgggtgccatggctcagtgtgcagacagccgcaccctcaccactgcgcctcatggat

SEQ ID NO: 253046 - DNA, 120 bp, Artificial Sequence
  ENSG00000123989_17 (sequence is synthesized)
ctactctccaagaagcacccgctggacacactgttcctgctggccgggccagacacggtgctcacgcctgacttcctgaaccgctgccgcatgcatgccatctccggctggcaggccttc

SEQ ID NO: 253047 - DNA, 120 bp, Artificial Sequence
  ENSG00000123989_18 (sequence is synthesized)
tttcccatgcatttccaagccttccacccagctgtggccccaccacaagggcctgggcccccagagctgggccgtgacactggccgctttgatcgccaggcagccagcgaggcctgcttc

SEQ ID NO: 253048 - DNA, 120 bp, Artificial Sequence
  ENSG00000123989_19 (sequence is synthesized)
tacaactccgactatgtggcagcccgtgggcgcctggcggcagcctcagaacaagaagaggagctgctggagagcctggatgtgtacgagctgttcctccacttctccagtctgcatgtg

SEQ ID NO: 253049 - DNA, 120 bp, Artificial Sequence
  ENSG00000123989_20 (sequence is synthesized)
ctgcgggcggtggagccggcgctgctgcagcgctaccgggcccagacgtgcagcgcgaggctcagtgaggacctgtaccaccgctgcctccagagcgtgcttgagggcctcggctcccga

SEQ ID NO: 253050 - DNA, 120 bp, Artificial Sequence
  ENSG00000123989_21 (sequence is synthesized)
acccagctggccatgctactctttgaacaggagcagggcaacagcacctgaccccaccctgtccccgtgggccgtggcatggccacaccccaccccacttctcccccaaaaccagagcca

SEQ ID NO: 253051 - DNA, 120 bp, Artificial Sequence
  ENSG00000123989_22 (sequence is synthesized)
cctgccagcctcgctgggcagggctggccgtagccagaccccaagctggcccactggtcccctctctggctctgtgggtccctgggctctggacaagcactgggggacgtgcccccagag

SEQ ID NO: 253052 - DNA, 120 bp, Artificial Sequence
  ENSG00000123989_23 (sequence is synthesized)
ccacccacttctcatcccaaacccagtttccctgccccctgacgctgctgattcgggctgtggcctccacgtatttatgcagtacagtctgcctgacgccagccctgcctctgggccctg

SEQ ID NO: 253053 - DNA, 120 bp, Artificial Sequence
  ENSG00000123989_24 (sequence is synthesized)
ggggctgggctgtagaagagttgttggggaaggagggagctgaggagggggcatctcccaacttctcccttttggaccctgccgaagctccctgcctttaataaactggccaagtgtgga

SEQ ID NO: 253054 - DNA, 120 bp, Artificial Sequence
  ENSG00000123989_25 (sequence is synthesized)
aacttccgatggccctgccttcccgagagccgtggggccagtccgagactttctctgggccctatcccggcctgggctgaacttactggactgtgtcctaaaccggctcgacccgatggc

SEQ ID NO: 253055 - DNA, 120 bp, Artificial Sequence
  ENSG00000123989_26 (sequence is synthesized)
catgttcaaatccctctgagaggcaaagggatgttggagatacaggtctgcttttccatgccaattcggacatttattttctatctctgtgacccccagtaaattactaaatatcctggg

SEQ ID NO: 253056 - DNA, 120 bp, Artificial Sequence
  ENSG00000123992_0 (sequence is synthesized)
agatgagcggacacagccccacgcgcggggccatgcaggtaagtggctcccgacggccccacttgaatttcgatcccagaccgggtccggcgccctccggggcccaagcttagcgcggtg

SEQ ID NO: 253057 - DNA, 120 bp, Artificial Sequence
  ENSG00000123992_1 (sequence is synthesized)
ctgcagtggggccgcctgacccaaagcgaaaccgaaagccccgcggagggtgacctgacgactttcccgggactggaagggggagtcctgcgagagactaggtggccatgaacggtaagg

SEQ ID NO: 253058 - DNA, 120 bp, Artificial Sequence
  ENSG00000123992_2 (sequence is synthesized)
cccgcaaagaggcggtgcagactgcggctaaggaactcctcaagttcgtgaaccggagtccctctcctttccatgctgtggctgaatgccgcaaccgccttctccaggctggcttcagtg

SEQ ID NO: 253059 - DNA, 120 bp, Artificial Sequence
  ENSG00000123992_3 (sequence is synthesized)
aactcaaggagactgagaaatggaatattaagcccgagagcaagtacttcatgaccaggaactcctccaccatcatagcttttgctgtagggggccagtacgttcctggcaatggcttca

SEQ ID NO: 253060 - DNA, 120 bp, Artificial Sequence
  ENSG00000123992_4 (sequence is synthesized)
gcctcatcggggcccacacggacagcccctgcctccgggtgaaacgtcggtctcgccgcagccaggtgggcttccagcaagtcggtgtggagacctatggtggtgggatctggagcacct

SEQ ID NO: 253061 - DNA, 120 bp, Artificial Sequence
  ENSG00000123992_5 (sequence is synthesized)
ggtttgaccgtgacctgactctggctggacgcgtcattgtcaagtgccctacctcaggtcggctggagcagcagctggtgcacgtggagcggcccattcttcgcatcccacacctggcca

SEQ ID NO: 253062 - DNA, 120 bp, Artificial Sequence
  ENSG00000123992_6 (sequence is synthesized)
tccatctgcagcgaaatatcaacgagaactttgggcccaacacagagatgcatctagtccccattcttgccacagccatccaggaggagctggagaaggggactcctgagccagggcctc

SEQ ID NO: 253063 - DNA, 120 bp, Artificial Sequence
  ENSG00000123992_7 (sequence is synthesized)
tcaatgctgtggatgagcggcaccattcggtcctcatgtccctgctctgtgcccatctggggctgagccccaaggacatagtggagatggagctctgccttgcagacacccagcctgcgg

SEQ ID NO: 253064 - DNA, 120 bp, Artificial Sequence
  ENSG00000123992_8 (sequence is synthesized)
tcttgggtggtgcctatgatgagttcatctttgctcctcggctggacaatctgcacagctgcttctgtgccctgcaggccttgatagattcctgtgcaggccctggctccctggccacag

SEQ ID NO: 253065 - DNA, 120 bp, Artificial Sequence
  ENSG00000123992_9 (sequence is synthesized)
agcctcacgtgcgcatggtcacactctatgacaacgaagaggtggggtctgagagtgcacagggagcacagtcactgctgacagagctggtgctgcggcggatctcagcctcgtgccagc

SEQ ID NO: 253066 - DNA, 120 bp, Artificial Sequence
  ENSG00000123992_10 (sequence is synthesized)
gccttcgaggaagccatacccaagtccttcatgatcagcgcagacatggcccatgctgtgcatcccaactacctggacaagcatgaggagaaccaccggcctttattccacaagggcccc

SEQ ID NO: 253067 - DNA, 120 bp, Artificial Sequence
  ENSG00000123992_11 (sequence is synthesized)
gtgatcaaggtgaacagcaagcaacgctatgcttcaaacgcggtgtcagaggccctgatccgagaggtggccaacaaagtcaaggtccccctgcaggatctcatggtccggaatgacacc

SEQ ID NO: 253068 - DNA, 120 bp, Artificial Sequence
  ENSG00000123992_12 (sequence is synthesized)
ccctgtggaaccaccattggacctatcttggcttctcggctggggctgcgggtgctggatttaggcagcccccaactggccatgcactctatccgggagatggcctgcaccacaggagtc

SEQ ID NO: 253069 - DNA, 120 bp, Artificial Sequence
  ENSG00000123992_13 (sequence is synthesized)
ctccagaccctcaccctcttcaagggcttctttgagctgttcccttctctaagccataatctcttagtggattgagccctcttggaaagacttctctgccatccctttgcacctgagagg

SEQ ID NO: 253070 - DNA, 120 bp, Artificial Sequence
  ENSG00000123992_14 (sequence is synthesized)
ggaagttctcagctgagctgaagctggattattaaagtggattgtcactcagactctccgtgctacgcttatttggagactagaggagtgggagttgagcctggcttgaacctttggaac

SEQ ID NO: 253071 - DNA, 120 bp, Artificial Sequence
  ENSG00000123992_15 (sequence is synthesized)
cagaaaagttggggagcaggtggaggaggccacactcctgggagctgatggttttaaatctggttttaaatctcttctctgtctcaagtccatgtctgaagtgggtgaagggtggactgg

SEQ ID NO: 253072 - DNA, 120 bp, Artificial Sequence
  ENSG00000123992_16 (sequence is synthesized)
atcctcaagcagaaggtcacttctcccacccctagtcctccacctgggaaatggcctcaacggtcttccctctttccatccccagaatgggtgtcccgctctgccttcagagatcctgtt

SEQ ID NO: 253073 - DNA, 120 bp, Artificial Sequence
  ENSG00000123992_17 (sequence is synthesized)
ctgcactgggccaccttcagagctgctctgggcagacaaagctgtttctcaccctcccaaaatcccttcccatcccctctcaggagctgcaaagagaagggcacagtctataccttatca

SEQ ID NO: 253074 - DNA, 120 bp, Artificial Sequence
  ENSG00000123992_18 (sequence is synthesized)
cccttcatcatccacttctcagcagtccctggtattacttgattgtgaacatattatcaggaaaaaagattatcattgaaaaaattggaaaagtcaaagtctggccgggtgcagcggctc

SEQ ID NO: 253075 - DNA, 73 bp, Artificial Sequence
  ENSG00000123992_19 (sequence is synthesized)
aaaattggaaaagtcaaagtctggccgggtgcagcggctcacatctgtaagttcaagaccagccttgccaaca

SEQ ID NO: 253076 - DNA, 120 bp, Artificial Sequence
  ENSG00000123992_20 (sequence is synthesized)
aggggcggggctgaccgaggtgggcggggcggatgccgaggggcggggagaggtgggcggggaggccaaacatggggcggggcggcgcggccggggaagcgtgatgaaggcctacgagtg

SEQ ID NO: 253077 - DNA, 120 bp, Artificial Sequence
  ENSG00000123992_21 (sequence is synthesized)
tgatttggggagtgggctgggaattgaagggcagaggcagttgcccatcaggaggcacctgaacttatggatgccgcactcagctgtgccctcctcgcaatccccccacaacccacgtct

SEQ ID NO: 253078 - DNA, 120 bp, Artificial Sequence
  ENSG00000123992_22 (sequence is synthesized)
aagggcctccaggatcctggccacccctagcccgtcctgctgaagcacccatcacctccaccaagccctcagtaactctcatccccgtttttcccagtagacacatcccccactgcttct

SEQ ID NO: 253079 - DNA, 120 bp, Artificial Sequence
  ENSG00000123992_23 (sequence is synthesized)
agggcggtggttctcaaaaagacaagttccctaccccagacctgcccactaggactatctgggaattggccctttttacagattcccaaagagtttcttctacaggtgggccctgtctgc

SEQ ID NO: 253080 - DNA, 120 bp, Artificial Sequence
  ENSG00000123992_24 (sequence is synthesized)
cacctttgtctacaaacttgtttccatctattgctagaggctgcccggaaccctgtgtgtggaatgactctgaagtcccactgggctgggcgggaaagagtggtgatctattagtgatgt

SEQ ID NO: 253081 - DNA, 120 bp, Artificial Sequence
  ENSG00000123992_25 (sequence is synthesized)
ctgccatgggagggtggtgagtgtcgacaggcctgctcctgtttgctatgtctggcccttatctgtctcttacagggacaagcatgaggagaaccaccggcctttattccacaagggccc

SEQ ID NO: 253082 - DNA, 120 bp, Artificial Sequence
  ENSG00000123992_26 (sequence is synthesized)
aggcaggggaaggatccggcaaaaaaggcacacggttcaggcctgtccactccagccttgggaggaggtgagcaggtcaccatggctcggagcctctccatcatgttcgtccccaacagc

SEQ ID NO: 253083 - DNA, 120 bp, Artificial Sequence
  ENSG00000123992_27 (sequence is synthesized)
attgctaaatctttggatgctgtgtcctgcttgaacacgtactaagtttctgttttttggctggtttcctctgtttacttctttggcctttttgatgacaattcagcccttccttttctt

SEQ ID NO: 253084 - DNA, 120 bp, Artificial Sequence
  ENSG00000123992_28 (sequence is synthesized)
gacccacaggaagaggtcaagagctattggcctccacccttttgttcctcagcaccaacccagcccccttctccaatctctgcttggtcctgcctagcaaggaatcccagcactttggga

SEQ ID NO: 253085 - DNA, 120 bp, Artificial Sequence
  ENSG00000123992_29 (sequence is synthesized)
ttcctttctcccttcttcattctgccgggaggttcacgggcacttccttttcactactgcgagaccaacttggtcaaagtcatgcaatgcctaacccagggacaagcatgaggagaacca

SEQ ID NO: 253086 - DNA, 120 bp, Artificial Sequence
  ENSG00000123992_30 (sequence is synthesized)
gagcccggaggccagatgagcggacacagccccacgcgcggggccatgcaggtggccatgaacggtaaggcccgcaaagaggcggtgcagactgcggctaaggaactcctcaagttcgtg

SEQ ID NO: 253087 - DNA, 120 bp, Artificial Sequence
  ENSG00000123992_31 (sequence is synthesized)
aggcacacggttcaggcctgtccactccagccttgggaggaggtgagcaggtcaccatggctcggagcctctccatcatgttcgtccccaacagctggctcaatggctaccacaagtaaa

SEQ ID NO: 253088 - DNA, 120 bp, Artificial Sequence
  ENSG00000123992_32 (sequence is synthesized)
atgggaaccatggtcctcggctgagagtggggatggaggaagacactggatgaaactctcctccaggaaagcaaagaagcaaatggcccaggagatgcaataggacctctgggcagtaca

SEQ ID NO: 253089 - DNA, 120 bp, Artificial Sequence
  ENSG00000123992_33 (sequence is synthesized)
accgtgacctgactctggctggacgcgtcattgtcaaggtgggaaccgaggttggggatggcggagcctcctcagaagactgactgccacactcctcagggtacccgtggggaagagggg

SEQ ID NO: 253090 - DNA, 120 bp, Artificial Sequence
  ENSG00000123992_34 (sequence is synthesized)
aaacaaaatagtgccctaagccaggggtcagggagaggttgcgcaagaaaccaaggagacccttgggagcaaaagaaaggtgagtgggggtggagggttgaaggtcgggctgactgtctt

SEQ ID NO: 253091 - DNA, 120 bp, Artificial Sequence
  ENSG00000123992_35 (sequence is synthesized)
ctgccttgaggctctgccttggccccagcctcttcctttctcccttcttcattctgccgggaggttcacgggcacttccttttcactactgcgagaccaacttggtcaaagtcatgcaat

SEQ ID NO: 253092 - DNA, 120 bp, Artificial Sequence
  ENSG00000123992_36 (sequence is synthesized)
caacgagaactttgggcccaacacagagatgcatctgtcttgggtggtgcctatgatgagttcatctttgctcctcggctggacaatctgcacagctgcttctgtgccctgcaggccttg

SEQ ID NO: 253093 - DNA, 120 bp, Artificial Sequence
  ENSG00000123999_0 (sequence is synthesized)
gcagaccctggcagaaggggcacggggcagggtgtgagttccccactagcagggccaggtgagctatggtgctgcacctactgctcttcttgctgctgaccccacagggtgggcacagct

SEQ ID NO: 253094 - DNA, 120 bp, Artificial Sequence
  ENSG00000123999_1 (sequence is synthesized)
gccaggggctggagctggcccgggaacttgttctggccaaggtgagggccctgttcttggatgccttggggccccccgcggtgaccagggaaggtggggaccctggagtcaggcggctgc

SEQ ID NO: 253095 - DNA, 120 bp, Artificial Sequence
  ENSG00000123999_2 (sequence is synthesized)
cccgaagacatgccctggggggcttcacacacaggggctctgagcccgaggaagaggaggatgtctcccaagccatccttttcccagccacagatgccagctgtgaggacaagtcagctg

SEQ ID NO: 253096 - DNA, 120 bp, Artificial Sequence
  ENSG00000123999_3 (sequence is synthesized)
ccagagggctggcccaggaggctgaggagggcctcttcagatacatgttccggccatcccagcatacacgcagccgccaggtgacttcagcccagctgtggttccacaccgggctggaca

SEQ ID NO: 253097 - DNA, 120 bp, Artificial Sequence
  ENSG00000123999_4 (sequence is synthesized)
ggcagggcacagcagcctccaatagctctgagcccctgctaggcctgctggcactgtcaccgggaggacccgtggctgtgcccatgtctttgggccatgctccccctcactgggccgtgc

SEQ ID NO: 253098 - DNA, 120 bp, Artificial Sequence
  ENSG00000123999_5 (sequence is synthesized)
gacccaccccgtcctggtgctgctgctgcgctgtcccctctgtacctgctcagcccggcctgaggccacgcccttcctggtggcccacactcggaccagaccacccagtggaggggagag

SEQ ID NO: 253099 - DNA, 120 bp, Artificial Sequence
  ENSG00000123999_6 (sequence is synthesized)
agcccgacgctcaactcccctgatgtcctggccttggtctccctctgctctgcgcctgctgcagaggcctccggaggaaccggctgcccatgccaactgccacagagtagcactgaacat

SEQ ID NO: 253100 - DNA, 120 bp, Artificial Sequence
  ENSG00000123999_7 (sequence is synthesized)
ctccttccaggagctgggctgggaacggtggatcgtgtaccctcccagtttcatcttccactactgtcatggtggttgtgggctgcacatcccaccaaacctgtcccttccagtccctgg

SEQ ID NO: 253101 - DNA, 120 bp, Artificial Sequence
  ENSG00000123999_8 (sequence is synthesized)
ggctccccctaccccagcccagccctactccttgctgccaggggcccagccctgctgtgctgctctcccagggaccatgaggcccctacatgtccgcaccacctcggatggaggttactc

SEQ ID NO: 253102 - DNA, 120 bp, Artificial Sequence
  ENSG00000123999_9 (sequence is synthesized)
tttcaagtatgagacagtgcccaaccttctcacgcagcactgtgcttgtatctaagggtggggggtcttccttcttaatcccatggctggtggccacgcccccaccatcatcagctggga

SEQ ID NO: 253103 - DNA, 120 bp, Artificial Sequence
  ENSG00000123999_10 (sequence is synthesized)
ggaaaggcagagttgggaaatagatggctcccactcctccctcctttcacttctctgcctatgggctaccctccccaccccacttctatctcaataaagaacacagtgcatatgacttga

SEQ ID NO: 253104 - DNA, 120 bp, Artificial Sequence
  ENSG00000123999_11 (sequence is synthesized)
cgtgtgtgtatgcaactcggggaagctcctctagccttccctccgggcttttctttcctgatggaggtccagatcagcaccaacctgatgaatctgtgagcattgaactgtaacagtgag

SEQ ID NO: 253105 - DNA, 120 bp, Artificial Sequence
  ENSG00000123999_12 (sequence is synthesized)
gccaccaccgcagcctgggggcaacatgcttgactgcatgctaggaaggactcaggagaatttaccaactttttttcctctaagagaaaaaactggacaataactagtgaaggtgtactc

SEQ ID NO: 253106 - DNA, 120 bp, Artificial Sequence
  ENSG00000124003_0 (sequence is synthesized)
gccttttcctctccgcccagccagtgcccagcgcggggcccggatccggccgggcacttcccacaggcgccgcagagcagcgtgggtgcaggctgcagtggctggcgccgtcctcgcccg

SEQ ID NO: 253107 - DNA, 120 bp, Artificial Sequence
  ENSG00000124003_1 (sequence is synthesized)
gccaggccatgaaggtagagtttgcaccgctcaacatccagctggcgcggcggctgcagacggtggccgtgctgcagtgggtcctgaaatacctgctgctcgggccgatgtccattggaa

SEQ ID NO: 253108 - DNA, 120 bp, Artificial Sequence
  ENSG00000124003_2 (sequence is synthesized)
tcactgtgatgctgatcatacacaactatttgttcctttacatcccttatttgatgtggctttactttgactggcataccccagagcgaggaggcaggagatccagctggatcaaaaatt

SEQ ID NO: 253109 - DNA, 120 bp, Artificial Sequence
  ENSG00000124003_3 (sequence is synthesized)
ggactctttggaaacactttaaggactattttccaattcatcttatcaaaactcaagatttggatccaagtcacaactatatatttgggtttcacccccatggaataatggcagttggag

SEQ ID NO: 253110 - DNA, 120 bp, Artificial Sequence
  ENSG00000124003_4 (sequence is synthesized)
ctgtctttcgagaatatgtgatgagtgttgggctggtttcagtttccaagaaaagtgtgtcctacatggtaagcaaggagggaggtggaaacatctctgtcattgtccttgggggtgcaa

SEQ ID NO: 253111 - DNA, 120 bp, Artificial Sequence
  ENSG00000124003_5 (sequence is synthesized)
aagaatcactggatgctcatcctggaaagttcactctgttcatccgccagcggaaaggatttgttaaaattgctttgacccatggcgcctctctggtcccagtggtttcttttggtgaaa

SEQ ID NO: 253112 - DNA, 120 bp, Artificial Sequence
  ENSG00000124003_6 (sequence is synthesized)
atgaactgtttaaacaaactgacaaccctgaaggatcatggattagaactgttcagaataaactgcagaagatcatggggtttgctttgcccctgtttcatgccaggggagtttttcagt

SEQ ID NO: 253113 - DNA, 120 bp, Artificial Sequence
  ENSG00000124003_7 (sequence is synthesized)
acaattttggcctaatgacctataggaaagccatccacactgttgttggccgcccgatccctgttcgtcagactctgaacccgacccaggagcagattgaggagttacatcagacctata

SEQ ID NO: 253114 - DNA, 120 bp, Artificial Sequence
  ENSG00000124003_8 (sequence is synthesized)
tggaggaacttaggaaattgtttgaggaacacaaaggaaagtatggcattccagagcacgagactcttgttttaaaatgacttgactataaaaaaaaattaaaaaataaaaataaatgac

SEQ ID NO: 253115 - DNA, 120 bp, Artificial Sequence
  ENSG00000124006_0 (sequence is synthesized)
aagagcaggaagccaggcagcgggcaggggaggctgcggggccactcgctggagaggcaaacaggaaggactgccccctgagcgccaggcttcgggcccgggaatcgccgccgccgccgc

SEQ ID NO: 253116 - DNA, 80 bp, Artificial Sequence
  ENSG00000124006_1 (sequence is synthesized)
cgcagagctgcagctcggggccgagggtaaggaggcgagccgggagcgggaggcccgggagagctccgcgggtccccgcg

SEQ ID NO: 253117 - DNA, 120 bp, Artificial Sequence
  ENSG00000124006_2 (sequence is synthesized)
ccccctgcccccccaccgttcgccgctgcaggcggtcggccgccgcgatgaaggcgagctcgggggatcaggggagccccccgtgcttcctgcgcttcccgcggcctgtgcgggtggtaa

SEQ ID NO: 253118 - DNA, 120 bp, Artificial Sequence
  ENSG00000124006_3 (sequence is synthesized)
gcggcctgtgcgggtggtaagtggcgccgaggccgagctcaagtgcgtggtcctgggggagccgccgcctgtagtggtgtgggagaagggcgggcagcagctggcggcctcggaacgcct

SEQ ID NO: 253119 - DNA, 120 bp, Artificial Sequence
  ENSG00000124006_4 (sequence is synthesized)
gaacgcctgagcttcccggcggacggcgcggagcacggcctgctgctgaccgccgcactgcccaccgacgcgggggtctacgtgtgccgcgcccgcaacgcggccggcgaggcctacgcg

SEQ ID NO: 253120 - DNA, 120 bp, Artificial Sequence
  ENSG00000124006_5 (sequence is synthesized)
cgtcaccgtgctggagccgccggcctccgaccccgagctgcagcccgccgagcgcccgctgccatcgccggggtccggggagggcgccccggtcttcctcacggggcctcgatcccagtg

SEQ ID NO: 253121 - DNA, 120 bp, Artificial Sequence
  ENSG00000124006_6 (sequence is synthesized)
ggtgctgcggggggcggaggtggtgctgacgtgccgggcggggggcctccccgagcccacactgtactgggagaaggacgggatggccctggacgaagtgtgggacagcagccacttcgc

SEQ ID NO: 253122 - DNA, 120 bp, Artificial Sequence
  ENSG00000124006_7 (sequence is synthesized)
cacttcgcgctccagccgggccgcgccgaggacggccccggcgcgagcctggcactgcgcatcctggcggctcggctgccggattccggcgtctacgtgtgccacgcccgcaacgcgcac

SEQ ID NO: 253123 - DNA, 120 bp, Artificial Sequence
  ENSG00000124006_8 (sequence is synthesized)
gcaggcgggggcgctgctccaggtgcaccagccccccgagagcccgcccgcggaccccgacgaggcccccgcgccggtggtggagccgctcaagtgcgcgcctaagaccttctgggtgaa

SEQ ID NO: 253124 - DNA, 120 bp, Artificial Sequence
  ENSG00000124006_9 (sequence is synthesized)
cgagggcaagcacgccaagttccgctgctacgtgatgggcaagcccgagcccgagatcgaatggcactgggagggccgcccgctgctcccggaccgccgccgcctcatgtaccgcgaccg

SEQ ID NO: 253125 - DNA, 120 bp, Artificial Sequence
  ENSG00000124006_10 (sequence is synthesized)
cgacggcggcttcgtgctcaaggtgctttactgccaggccaaggatcgtgggctctacgtctgcgccgcgcgcaactcggcgggccagacgctcagtgccgtgcagctgcacgtgaaaga

SEQ ID NO: 253126 - DNA, 120 bp, Artificial Sequence
  ENSG00000124006_11 (sequence is synthesized)
gccccgcctccggttcacacggcccctgcaggacgtggagggccgtgagcacgggattgccgtgctggaatgtaaagtacccaactcccgcatccccacggcctggttccgtgaggacca

SEQ ID NO: 253127 - DNA, 120 bp, Artificial Sequence
  ENSG00000124006_12 (sequence is synthesized)
gcggctgctgccctgccgcaagtacgagcagatcgaagagggcactgtccggcgcctcatcatccacaggctgaaggcagacgatgatggtatctacctgtgcgagatgcggggccgggt

SEQ ID NO: 253128 - DNA, 120 bp, Artificial Sequence
  ENSG00000124006_13 (sequence is synthesized)
gcgcaccgtggccaacgtcacagtcaaagggcccatcctgaagcgcctgccccggaagctcgacgtcctggaaggagagaatgctgtgctgctagtggaaactctagaggccggggtcga

SEQ ID NO: 253129 - DNA, 120 bp, Artificial Sequence
  ENSG00000124006_14 (sequence is synthesized)
gggacgctggagccgtgatggggaggagctgccggtcatctgccagagcagctcaggccacatgcatgccctggtccttccaggggtcacccgagaggatgctggcgaggtcacctttag

SEQ ID NO: 253130 - DNA, 120 bp, Artificial Sequence
  ENSG00000124006_15 (sequence is synthesized)
cctgggcaactcccgtaccactacgcttctcagagtaaaatgtgtcaagcacagtcccccaggaccccccatattggcagagatgttcaagggccacaagaacacggtcctgttgacctg

SEQ ID NO: 253131 - DNA, 120 bp, Artificial Sequence
  ENSG00000124006_16 (sequence is synthesized)
gaagcctcccgagccagctcccgagaccccattcatctaccggctggagcggcaggaagtgggctctgaagactggattcagtgcttcagcatcgagaaagccggagccgtggaggtgcc

SEQ ID NO: 253132 - DNA, 120 bp, Artificial Sequence
  ENSG00000124006_17 (sequence is synthesized)
gggcgactgtgtgccctccgagggtgactaccgcttccgcatctgcacagtcagcggacatggccgtagtccccacgtggtgttccacggttctgctcaccttgtgcccacagctcgcct

SEQ ID NO: 253133 - DNA, 120 bp, Artificial Sequence
  ENSG00000124006_18 (sequence is synthesized)
ggtggcaggtctggaggatgtgcaggtatacgacggggaagatgccgtcttctccctcgatctctccaccatcatccagggtacctggttccttaatggggaagagctcaagagtaacga

SEQ ID NO: 253134 - DNA, 120 bp, Artificial Sequence
  ENSG00000124006_19 (sequence is synthesized)
gccggagggccaggtggaacctggggccctgcggtaccgtatagagcagaagggtctgcagcacagactcatcctgcatgccgtcaagcaccaggacagcggtgccctggtcggcttcag

SEQ ID NO: 253135 - DNA, 120 bp, Artificial Sequence
  ENSG00000124006_20 (sequence is synthesized)
ctgccccggcgtgcaggactcagctgccctcacaatccaagagagcccggtgcacatcctgagcccccaggacagggtgtcgttgaccttcacaacctcagagcgggtggtgctgacttg

SEQ ID NO: 253136 - DNA, 120 bp, Artificial Sequence
  ENSG00000124006_21 (sequence is synthesized)
tgagctctcaagggtggacttcccggcaacctggtacaaggatgggcagaaggtggaggagagcgagttgctggtggtgaagatggatgggcgcaaacaccgtctgatcctgcctgaggc

SEQ ID NO: 253137 - DNA, 120 bp, Artificial Sequence
  ENSG00000124006_22 (sequence is synthesized)
caaagtccaggacagtggcgagtttgagtgcaggacagaaggggtctcggccttcttcggcgtcactgtccaagatcctcccgtgcacatcgtggacccccgagaacatgtgttcgtgca

SEQ ID NO: 253138 - DNA, 120 bp, Artificial Sequence
  ENSG00000124006_23 (sequence is synthesized)
tgccataacttccgagtgtgtcatgctggcctgtgaggtggaccgagaggacgcccctgtgcgttggtacaaggacgggcaggaggtggaggagagtgacttcgtggtgctggagaatga

SEQ ID NO: 253139 - DNA, 120 bp, Artificial Sequence
  ENSG00000124006_24 (sequence is synthesized)
ggggccccatcgccgcctggtgctgcccgccacccagccctcagacgggggcgagtttcagtgcgtcgctggagatgagtgtgcctacttcactgtcaccatcacagacgtctcctcgtg

SEQ ID NO: 253140 - DNA, 120 bp, Artificial Sequence
  ENSG00000124006_25 (sequence is synthesized)
ggatggagaggaggtggtggagagccccgcgctgctcctgcagaaggaagacactgtccgccgcctggtgctgcccgctgtccagctcgaggactccggcgagtacttgtgtgaaattga

SEQ ID NO: 253141 - DNA, 120 bp, Artificial Sequence
  ENSG00000124006_26 (sequence is synthesized)
cgatgagtcggcctccttcactgtcaccgtcacagaacccccagtgcggatcatataccctcgcgatgaggtgaccttgatcgccgtgaccttggagtgtgtggtgctgatgtgtgaact

SEQ ID NO: 253142 - DNA, 120 bp, Artificial Sequence
  ENSG00000124006_27 (sequence is synthesized)
gtctcgggaggatgcccctgtgcgctggtacaaggatgggctggaagtggaggagagcgaggccctggtgctggagagggatgggccacgctgccgcctggtgctacctgctgctcagcc

SEQ ID NO: 253143 - DNA, 120 bp, Artificial Sequence
  ENSG00000124006_28 (sequence is synthesized)
cgaggacgggggcgagtttgtatgtgatgctggagatgactcggccttcttcactgtcactgtcacagccccaccagagaggattgtgcacccggcagcccgctccctggatctgcattt

SEQ ID NO: 253144 - DNA, 120 bp, Artificial Sequence
  ENSG00000124006_29 (sequence is synthesized)
tggggctccagggcgcgtggagctgcgctgtgaggtggccccagctgggtctcaggtgcgctggtacaaggacgggctggaagtggaggcatcagatgccctgcagctgggtgccgaggg

SEQ ID NO: 253145 - DNA, 120 bp, Artificial Sequence
  ENSG00000124006_30 (sequence is synthesized)
gcccacccgcaccctgaccctgccccacgcccagcctgaggacgccggggagtatgtgtgtgagacccggcatgaggccatcaccttcaatgtcatcctggctgagcctccagtgcagtt

SEQ ID NO: 253146 - DNA, 120 bp, Artificial Sequence
  ENSG00000124006_31 (sequence is synthesized)
ccttgctctagagacaactccaagcccgctctgtgtggcccctggggagccagtggtgctgagctgtgaactgtcccgggctggcgcccccgtggtctggagccacaatgggaggcccgt

SEQ ID NO: 253147 - DNA, 120 bp, Artificial Sequence
  ENSG00000124006_32 (sequence is synthesized)
gcaggagggcgagggcctagagctccatgccgagggcccccgccgagtcctctgcatccaggctgcaggcccagcccatgcagggctctacacctgccagtctggagcagcccccggagc

SEQ ID NO: 253148 - DNA, 120 bp, Artificial Sequence
  ENSG00000124006_33 (sequence is synthesized)
cccaagcctcagcttcaccgtccaggtggctgagccccctgtgcgggtggtagctcccgaggcagcccagacgagggttcggagcaccccaggcggggacctagagctggtggtgcacct

SEQ ID NO: 253149 - DNA, 120 bp, Artificial Sequence
  ENSG00000124006_34 (sequence is synthesized)
ctccgggccagggggccctgtacgctggtacaaggacggggagcgactggcaagccaggggcgggtgcagctggagcaggccggggccaggcaggtgctgcgggtgcagggggcacggag

SEQ ID NO: 253150 - DNA, 120 bp, Artificial Sequence
  ENSG00000124006_35 (sequence is synthesized)
cggggacgctggggagtacctgtgcgatgcgccccaggacagccgcatcttccttgtcagcgtggaagagccactgctggtgaagctggtctcggagctgacaccactcactgtccacga

SEQ ID NO: 253151 - DNA, 120 bp, Artificial Sequence
  ENSG00000124006_36 (sequence is synthesized)
gggcgatgatgccacgttccggtgtgaagtctccccaccagatgccgatgtcacctggctgcgcaatggggccgtcgtcactccagggccccaggtggagatggcccagaatggttcaag

SEQ ID NO: 253152 - DNA, 120 bp, Artificial Sequence
  ENSG00000124006_37 (sequence is synthesized)
ccgcatcttaaccttgcgaggctgccaactgggggatgcagggaccgtgactttgcgggcagggagcacggccacaagtgcccggctccatgttcgagagacagagctgctgttcctacg

SEQ ID NO: 253153 - DNA, 120 bp, Artificial Sequence
  ENSG00000124006_38 (sequence is synthesized)
gcggttgcaggatgtgcgggcagaggaaggccaggatgtgtgtctcgaagtggagacaggccgagtgggtgcagcgggggccgtgcgctgggtgcgaggtgggcagcccctgccccacga

SEQ ID NO: 253154 - DNA, 120 bp, Artificial Sequence
  ENSG00000124006_39 (sequence is synthesized)
ctctcgcctgtccatggcccaggatgggcacatccaccgcctcttcatccatggtgtcatactggccgaccagggcacctacggctgcgagagccaccacgatcgcaccctggccaggct

SEQ ID NO: 253155 - DNA, 120 bp, Artificial Sequence
  ENSG00000124006_40 (sequence is synthesized)
cagcgtgaggccgaggcagctgagggtgctgcggcctctggaggacgtgaccatcagtgaggggggcagtgccaccttccagctggagctgtcccaggaaggtgtgaccggggagtgggc

SEQ ID NO: 253156 - DNA, 120 bp, Artificial Sequence
  ENSG00000124006_41 (sequence is synthesized)
ccggggtggagtacagctgtatccaggacccaagtgtcacatccactcggacggccaccgtcaccgactggtactcaatggcctgggcctggccgactcaggctgtgtctccttcacagc

SEQ ID NO: 253157 - DNA, 120 bp, Artificial Sequence
  ENSG00000124006_42 (sequence is synthesized)
ggattccctgcgctgcgcagccagactcattgtgagagaggtcccagtgaccatcgtgcgggggccacacgacctagaggtgaccgagggcgacacagctacgttcgagtgcgagctttc

SEQ ID NO: 253158 - DNA, 120 bp, Artificial Sequence
  ENSG00000124006_43 (sequence is synthesized)
ccaagctttggctgatgttacctgggagaaggacgggaacgcgcttacgcctagcccgcggctccggctccaggccctcggcacgcgccgccttctccagctgcgacgctgcggcccctc

SEQ ID NO: 253159 - DNA, 120 bp, Artificial Sequence
  ENSG00000124006_44 (sequence is synthesized)
ggacgccgggacctacagctgcgcggtggggacggcccgcgccggaccggtccgcctgaccgtgcgcgagcgtactgtggcggtactctccgagctgcggtcggtgagcgcccgcgaagg

SEQ ID NO: 253160 - DNA, 120 bp, Artificial Sequence
  ENSG00000124006_45 (sequence is synthesized)
cgacggcgctacgttcgagtgcaccgtgtcggaggtcgagaccacggggcgctgggagctcggaggccgcccgctgagacccggagcccgcgtccgcatccgacaggaagggaagaaaca

SEQ ID NO: 253161 - DNA, 120 bp, Artificial Sequence
  ENSG00000124006_46 (sequence is synthesized)
cattctggtgcttagcgagctgcgcgccgaggacgccggtgaagtccgcttccaggcggggcccgcccagtccctggctctactggaagtggaggcattgcctctccagatgtgccgcca

SEQ ID NO: 253162 - DNA, 120 bp, Artificial Sequence
  ENSG00000124006_47 (sequence is synthesized)
cccccctcgcgagaagaccgttctggtgggccgccgggcggtgctggaggtgactgtgtcccgctcggggggccacgtgtgctggctgcgggagggggccgagctgtgcccgggagataa

SEQ ID NO: 253163 - DNA, 120 bp, Artificial Sequence
  ENSG00000124006_48 (sequence is synthesized)
gtatgagatgcgcagccacggccccacccacagcctggtcatccatgacgttcgacctgaggaccaaggcacttactgctgccaggccggccaggacagcacccacacacggctgctggt

SEQ ID NO: 253164 - DNA, 120 bp, Artificial Sequence
  ENSG00000124006_49 (sequence is synthesized)
agagggcaactaggagaacctaaccaggccaggcgggtgcccttggacagcttggaaggcgtttgcccttaccctgggcaggggtagagagacaaggaacaataaaagtgctacagctca

SEQ ID NO: 253165 - DNA, 120 bp, Artificial Sequence
  ENSG00000124006_50 (sequence is synthesized)
tcttaatgcattacccaccctacaccacagccttttctggctgtcctggagtccctcaggcccccaccaaagtgcccctcatcgctgagaaaagtcacccatggccgtcccagcagcagc

SEQ ID NO: 253166 - DNA, 120 bp, Artificial Sequence
  ENSG00000124006_51 (sequence is synthesized)
ttgcccaaagcaaaacttttctttttctaatattttttatttaccttagaagtccatgtggattttgcattccattgcatatttccaagtcggctttgctataaacacaaatattctcca

SEQ ID NO: 253167 - DNA, 120 bp, Artificial Sequence
  ENSG00000124006_52 (sequence is synthesized)
ctgcaggcaactaggagaacctaaccaggccaggcgggtgcccttggacagcttggaaggcgtttgcccttaccctgggcaggggtagagagacaaggaacaataaaagtgctacagctc

SEQ ID NO: 253168 - DNA, 120 bp, Artificial Sequence
  ENSG00000124006_53 (sequence is synthesized)
gctgccacaccttcactcccaggccactgttccccgcccctactgccctccccctggcagatcggacctcctccctttctcctcaagctatggtctagtcacattcaggaaacgtgttat

SEQ ID NO: 253169 - DNA, 120 bp, Artificial Sequence
  ENSG00000124006_54 (sequence is synthesized)
cataagcacattggtcttggctaaggaagcctggctttctctattctcctgaaaacctgtaccaagggaaatctctggggacagtgagtctattgcagggtagggcagagtctagggctg

SEQ ID NO: 253170 - DNA, 120 bp, Artificial Sequence
  ENSG00000124006_55 (sequence is synthesized)
gtggtctcaggcactaggggggcaaaaacatcttggaggaggagacccccagctcctccccccaaccctcctctcatcagttccacccttcataccgtccctgtcccaacccagagaatg

SEQ ID NO: 253171 - DNA, 120 bp, Artificial Sequence
  ENSG00000124006_56 (sequence is synthesized)
tggagcgtttctacagccgaggctgaccccgtggtcccctctgtgcagctcctgcgcagcagaaagtctgctgtgcttttgtgacagctgtattcgtgtgtctctagctgtgagtaactg

SEQ ID NO: 253172 - DNA, 120 bp, Artificial Sequence
  ENSG00000124006_57 (sequence is synthesized)
ttcaaataacaatccggagttatgcgtcctcttgaaaaagccgaagacccggcggctctggtcccgcttccccccatggcgacgaacagctggcactgagtagcagctgcccccatagtt

SEQ ID NO: 253173 - DNA, 120 bp, Artificial Sequence
  ENSG00000124006_58 (sequence is synthesized)
tggggcccacattcctctgtcccacctccctgccattgctttttgcctctccccagactgcttcagccgctaacctaacctggcccctgtgggcatttgagtttgcgacccctgtgttaa

SEQ ID NO: 253174 - DNA, 120 bp, Artificial Sequence
  ENSG00000124006_59 (sequence is synthesized)
ggaccctgatgaccgcgcgtgcttctagaaagggggcgtggagggggcgtgaccggtaactgccctctgccccgccccgctcacgccccgggctccgccccagagcgtactgtggcggta

SEQ ID NO: 253175 - DNA, 120 bp, Artificial Sequence
  ENSG00000124006_60 (sequence is synthesized)
ttccagaacttggggtggcaacgggtcctgggatacgtaggaggtggggatgggggaggggaggggtagagcacacccagggctggaaagccctggaactgcttggctcagatcagctgc

SEQ ID NO: 253176 - DNA, 120 bp, Artificial Sequence
  ENSG00000124006_61 (sequence is synthesized)
tcctggtcagctgttcccacctttctacgccccttcttgccaggcttctcctctctcctgccactggaccatgtttgtctctcttgaacagccctgtttctaccagttcctttcctcccc

SEQ ID NO: 253177 - DNA, 120 bp, Artificial Sequence
  ENSG00000124006_62 (sequence is synthesized)
acttcaccaacactgccttcctccagcctgtccctcctccttcctgccctctgcccagcttgcctctgcccatctcagcaagttccatgtcagccttggcagaagcctctttctttcctc

SEQ ID NO: 253178 - DNA, 120 bp, Artificial Sequence
  ENSG00000124006_63 (sequence is synthesized)
ttccccataagagacatcccaccttctatcccaaatcccagcattcccttcaggtgccgcgctgtgccccacccctagctgacccccaccttcctgccgccaagacagccctaaccaagg

SEQ ID NO: 253179 - DNA, 120 bp, Artificial Sequence
  ENSG00000124006_64 (sequence is synthesized)
cccagaaagggtagggcagaacctgggggcccagctctttgtgtactggtgtccaggctctgccaggggagaggaaggtggtacccccttctctccccagccccatgtggagtcattcct

SEQ ID NO: 253180 - DNA, 120 bp, Artificial Sequence
  ENSG00000124006_65 (sequence is synthesized)
ccccagcccctagtcccggacctctaggcttcccgctccgcatccctgttccgcccaccctagcatacactaacggcgtccgaaccgacccaggggcctgctgggcccccaccttcgtcc

SEQ ID NO: 253181 - DNA, 120 bp, Artificial Sequence
  ENSG00000124006_66 (sequence is synthesized)
agcagggatggctgtcaaacagcaccccacacctcccacccaaagctggagccctctgtttcctatgtgacctcatgcaagttaacctctttgagccaagtctccttaaaaatggggctg

SEQ ID NO: 253182 - DNA, 120 bp, Artificial Sequence
  ENSG00000124006_67 (sequence is synthesized)
gcctccaggaccacagcctgcctgctgacctgtgtggccctacttaccccaggcatgaatactgacccccaactcgtgtgacccccactgaccatgcctgtctcagtgtggccctcattg

SEQ ID NO: 253183 - DNA, 120 bp, Artificial Sequence
  ENSG00000124006_68 (sequence is synthesized)
acatccctgccagagtgtgatccccctgactcataggccctgtgtggccccagagtcctctgcctgggtgtggcccctgactgcccaaggctcagccaaccactgactctgctaccaaga

SEQ ID NO: 253184 - DNA, 120 bp, Artificial Sequence
  ENSG00000124006_69 (sequence is synthesized)
ggatagtgcttttcttataggcctgttgtgacaagtaaatgctgtaaatagggtccctggtaattgatattattagggtgccaccaaggtggggtgctaggctaggattatgaggaactg

SEQ ID NO: 253185 - DNA, 120 bp, Artificial Sequence
  ENSG00000124006_70 (sequence is synthesized)
actaaaaggagtggcagggagctggcatcttgtcctttgggccatcggtgtggtcgatacatagtaggtcctcacagaaggtctgttaaatgactggggacgagggcctgcatcctgagg

SEQ ID NO: 253186 - DNA, 120 bp, Artificial Sequence
  ENSG00000124006_71 (sequence is synthesized)
ggaggatcccttgaggccaggagttcgaggccatcctgggcaacatagcaagaacccatctccacaaaaaaaaataaaaattagccgggcatggtagttactagggaggctgaggcagaa

SEQ ID NO: 253187 - DNA, 89 bp, Artificial Sequence
  ENSG00000124006_72 (sequence is synthesized)
tgatcatgtcacggcataaattttaaaaatggggttgatccccgtctcaagtgtctctgggaacattaactgagataacatgaaaattc

SEQ ID NO: 253188 - DNA, 120 bp, Artificial Sequence
  ENSG00000124006_73 (sequence is synthesized)
agtgtctctgggaacattaactgagataacatgaaaattcttacacagagcttggtgaatggttgtcatttgtgacacatctcttctaacttatttcattcaagaaatcatcacaataaa

SEQ ID NO: 253189 - DNA, 120 bp, Artificial Sequence
  ENSG00000124006_74 (sequence is synthesized)
ctcagaccttctggggcccctttcaataagcagctgctggccggccagcccttgggggcagggctggaaccggggctagaaccggggctagggccgggggcaggtggtcctgcctgctct

SEQ ID NO: 253190 - DNA, 120 bp, Artificial Sequence
  ENSG00000124006_75 (sequence is synthesized)
atacttagaccagtggagccagtctgggctcttgtcctccagctgtgtcatcagagaatatttttgggattggcagctgcaggcgcctctgccactcaggcccaagcctggcgggcggct

SEQ ID NO: 253191 - DNA, 120 bp, Artificial Sequence
  ENSG00000124006_76 (sequence is synthesized)
gggcgggggcgctgctccaggtgcaccagccccccgagagcccgcccgcggaccccgacgaggcccccgcgccggtggtggagccgctcaagtgcgcgcctaagaccttctgggtgaacg

SEQ ID NO: 253192 - DNA, 120 bp, Artificial Sequence
  ENSG00000124019_0 (sequence is synthesized)
cgcagaaaccctggggaacgcctgaaaaggctaaacacaagcagttacattatgcacaagctggatgacgtgaccccgctgctgctgtgtggagagggaggctgctgaacccgagctggt

SEQ ID NO: 253193 - DNA, 120 bp, Artificial Sequence
  ENSG00000124019_1 (sequence is synthesized)
gtgagcttctcttgccgtaagtccacgggtggccaggagcacgtgttagtctggttaagagctctgctcagaagtagccgctgcagctgaaggttttcaggcgggctgaaggctgggccg

SEQ ID NO: 253194 - DNA, 120 bp, Artificial Sequence
  ENSG00000124019_2 (sequence is synthesized)
cttcttcattcatttcagaaacttgaacagtgggccttctacacacgctgtctttgtcagcctcaggcagttcctccatggatgagacacaggggcctctggccatgactgtccatcttc

SEQ ID NO: 253195 - DNA, 120 bp, Artificial Sequence
  ENSG00000124019_3 (sequence is synthesized)
ttgccaactctgggcacggctcccttctgcagaggactctggaccagctcctggattgcatttgcccagaggtccggctctttcaggtgtctgaacgggccagtcctgtgaaatactgtg

SEQ ID NO: 253196 - DNA, 120 bp, Artificial Sequence
  ENSG00000124019_4 (sequence is synthesized)
aaaagtcccattccaagcggtcccggtttccagggatgtccgtgttgctcttcctgcacgaaagcccgggagaggataggctatttcgcgtcctggactctctccagcattcgccatggc

SEQ ID NO: 253197 - DNA, 120 bp, Artificial Sequence
  ENSG00000124019_5 (sequence is synthesized)
agtgctaccccacccaggacactcggggaaggctgtgtccctacttttttgccaatcaggagttctacagcctggacagtcagctgcccatctggggggtgaggcaggtgcactgtggct

SEQ ID NO: 253198 - DNA, 120 bp, Artificial Sequence
  ENSG00000124019_6 (sequence is synthesized)
ccgagatcctgagggtgacgctgtactgcagttttgataactatgaagacgccatcagactctacgagatgatcctgcagagagaagcgaccttgcaaaagagcaatttttgtttcttcg

SEQ ID NO: 253199 - DNA, 120 bp, Artificial Sequence
  ENSG00000124019_7 (sequence is synthesized)
tgctctatgcctccaagagctttgctctgcagctctccctgaagcagctgcccccgggaatgtcagtggaccccaaagagtcttcggtgctgcagtttaaggttcaagagatcggccagt

SEQ ID NO: 253200 - DNA, 120 bp, Artificial Sequence
  ENSG00000124019_8 (sequence is synthesized)
gcccagactcgagtgcggtggtgccatcatagctccctgaggtcttcaccttctgggttcaagtgatcctcctgccttagcctcctgattagctgggactacaggcacgtgccgccatgt

SEQ ID NO: 253201 - DNA, 120 bp, Artificial Sequence
  ENSG00000124019_9 (sequence is synthesized)
ctggctattttattttatttctagagacggggtctcactatgttggccgagcttgtttagggatgttaagtttgcagtactattgacttaatttttattctttattattatactttaagt

SEQ ID NO: 253202 - DNA, 120 bp, Artificial Sequence
  ENSG00000124019_10 (sequence is synthesized)
tttgttacacaggtatacatgtgccatattggtttgttgcacccatcaactcgtattgacttaatttttaagcatcttgcatcactgtcaaattttaccacataccaagttagatagaat

SEQ ID NO: 253203 - DNA, 120 bp, Artificial Sequence
  ENSG00000124019_11 (sequence is synthesized)
ttttaccacataccaagttagatagaatgctttcttaaaaaaacttgaaattaaagccttcctttgtaaccatcctcgaaaacctaacatagcatgtgtgtatttagtcatgatagctgc

SEQ ID NO: 253204 - DNA, 120 bp, Artificial Sequence
  ENSG00000124019_12 (sequence is synthesized)
cgtgcattgcctttccatggtatgtgagcctgggcacttagtagctgtatgactgtgggcctcagtttcttcattagcacaataaaggcacccgagaattagcatcttcctctctcatac

SEQ ID NO: 253205 - DNA, 120 bp, Artificial Sequence
  ENSG00000124019_13 (sequence is synthesized)
ttacttacaggaaatgacctgacacttataaagtacataattaagatagtgccaagaactcaattttagctattattgttcatattatgccctatactaaggattctcttaaattgataa

SEQ ID NO: 253206 - DNA, 120 bp, Artificial Sequence
  ENSG00000124019_14 (sequence is synthesized)
ttttatttaatacttataacaacctatgaagttactatttttcccattttggagataagaaaactgagctttccagggggtcagttatttgcccaagataggaagtatctatctaccctc

SEQ ID NO: 253207 - DNA, 120 bp, Artificial Sequence
  ENSG00000124019_15 (sequence is synthesized)
aaagttcatgtggtcagccgctgcagtccagtgtatgtgtgtaaatgtgcaagcagggggatgaatgtcatgttcacagcaaaatatcctgtggcttctgtccttaagaaatggtcagaa

SEQ ID NO: 253208 - DNA, 120 bp, Artificial Sequence
  ENSG00000124019_16 (sequence is synthesized)
caggttcagctgaatccagaacttggtgttaagaatggcatcttgggagctggcatgcttcccctgggctccaggctgacttctgtctctgcaaagaggacctcagaacccaggagccag

SEQ ID NO: 253209 - DNA, 120 bp, Artificial Sequence
  ENSG00000124019_17 (sequence is synthesized)
gtgtgctggcacttcgtggaaaagccctggccggtcattccaggtcagcagcccagctatgggtgcccacctgcacctgtcttctcatcaccttgaatccggggccagaatgaaggtcct

SEQ ID NO: 253210 - DNA, 120 bp, Artificial Sequence
  ENSG00000124019_18 (sequence is synthesized)
caaccgggaaaacagctttcagaagcttgaggccgagacgaatgttgacaccggcttgaccatcataaattctgaacccaggcagacttattttggcggatttccaagggatttacagac

SEQ ID NO: 253211 - DNA, 120 bp, Artificial Sequence
  ENSG00000124019_19 (sequence is synthesized)
cagccagccaccattctgcttgccagcctcttccttgggggtggctacctccaaaaacaacagtgtccttaaggaaagagtctctcctttgccacttgctggccaaagggaccttggtac

SEQ ID NO: 253212 - DNA, 120 bp, Artificial Sequence
  ENSG00000124019_20 (sequence is synthesized)
caggaagacaatttcagaatgtctccttcatctgcaagttcagggtgaagaaaaagaagaagatgaagaagaattctttatatagcataaaataaatgtggttttctaaaacacaagatc

SEQ ID NO: 253213 - DNA, 120 bp, Artificial Sequence
  ENSG00000124019_21 (sequence is synthesized)
agataaaatgttctagaaatggagtactgacccagaatcagcctgttagttgttcatctgaggggggctgaatgctccccatgcacaatctgtattgattttatttcaaatgttcaaagt

SEQ ID NO: 253214 - DNA, 120 bp, Artificial Sequence
  ENSG00000124019_22 (sequence is synthesized)
ctaaaggtgctgggaatgattgtttatttgccgtcacagtcataagagaacacagccaacacacagggaaaaaaaccgaatgcttttgttccgtggagatgcactaacccagctggatgt

SEQ ID NO: 253215 - DNA, 120 bp, Artificial Sequence
  ENSG00000124019_23 (sequence is synthesized)
gttgaatccagcacctatcaggataattgcattgtatgcaaatgaatcggtatgttatacaacactaattagtgtctgtaatttggttttaatttttacttaggttgcatagctcatccc

SEQ ID NO: 253216 - DNA, 120 bp, Artificial Sequence
  ENSG00000124019_24 (sequence is synthesized)
cctggacaatatggactgctatttactcttgaatgctttttaattttcatgtgacctcttttggtaactaggccttgttcacataccctccttgtgattttgtctttaaagttgtttgta

SEQ ID NO: 253217 - DNA, 120 bp, Artificial Sequence
  ENSG00000124019_25 (sequence is synthesized)
tctggaatgagtgaaaatgcaaagtgttttgaaaattataaacagttaattttgttttcctgtttaatgagccaaaatactggaagccagaaaatcaggttgaacatgaatgctaggctc

SEQ ID NO: 253218 - DNA, 120 bp, Artificial Sequence
  ENSG00000124019_26 (sequence is synthesized)
tagggctttcctgctcatctgcttctcatttgtttctgcactatgtcaaagaggacagtggttcttgttacaaaccaaagaggaacattgagcacagtgggaaaattggactggttgatc

SEQ ID NO: 253219 - DNA, 120 bp, Artificial Sequence
  ENSG00000124019_27 (sequence is synthesized)
tggtcactggagcaggacttgggttcttctggccagattttgactcccagattcctttacaaaacgcactcattcattcatttatatatgttcattcaataaacattttttgaataccta

SEQ ID NO: 253220 - DNA, 120 bp, Artificial Sequence
  ENSG00000124067_0 (sequence is synthesized)
ggacagcggcggggacagcggcgggcggctgggacggcgggtgcggcggggccgagcccgcacgatgcctcacttcaccgtggtgccagtggacgggccgaggcgcggcgactatgacaa

SEQ ID NO: 253221 - DNA, 120 bp, Artificial Sequence
  ENSG00000124067_1 (sequence is synthesized)
aggcgcggcgactatgacaacctcgaggggctcagttgggtggactacggggagcgcgccgagctggatgactcggacggacatggcaaccacagagagagcagcccttttctttccccc

SEQ ID NO: 253222 - DNA, 120 bp, Artificial Sequence
  ENSG00000124067_2 (sequence is synthesized)
ttggaggcttccagaggaattgactactatgacaggaacctggcactgtttgaggaagagctggacatccgcccaaaggtatcgtctcttctgggaaagctcgtcagctacaccaacctc

SEQ ID NO: 253223 - DNA, 120 bp, Artificial Sequence
  ENSG00000124067_3 (sequence is synthesized)
acccagggcgccaaagagcatgaggaggccgagagtggggagggcacccgccggagggcagccgaggcacccagcatgggcaccctcatgggggtgtacctgccctgcctgcagaatatc

SEQ ID NO: 253224 - DNA, 120 bp, Artificial Sequence
  ENSG00000124067_4 (sequence is synthesized)
tttggggttatcctcttcctgcggctgacctggatggtgggcacagcaggtgtgctacaggccctcctcatcgtgcttatctgctgctgttgtaccctgctgacggccatctccatgagt

SEQ ID NO: 253225 - DNA, 120 bp, Artificial Sequence
  ENSG00000124067_5 (sequence is synthesized)
gccatcgccaccaacggtgtggttccagctgggggctcctatttcatgatctctcgttcactggggccagaatttggaggtgctgtgggcctgtgcttctacctgggaacaacattcgca

SEQ ID NO: 253226 - DNA, 120 bp, Artificial Sequence
  ENSG00000124067_6 (sequence is synthesized)
gcagccatgtacatcctgggggccatcgagatcttgctgacctacattgccccaccagctgccattttttacccatcgggtgctcatgacacgtcgaatgccactttgaacaatatgcgt

SEQ ID NO: 253227 - DNA, 120 bp, Artificial Sequence
  ENSG00000124067_7 (sequence is synthesized)
gtgtatgggaccattttcctgaccttcatgaccctggtggtgtttgtgggggtcaagtatgtgaacaaatttgcctcgctcttcctggcctgtgtgatcatctccatcctctccatctat

SEQ ID NO: 253228 - DNA, 120 bp, Artificial Sequence
  ENSG00000124067_8 (sequence is synthesized)
gctgggggcataaagtctatatttgaccctcccgtgtttccggtatgcatgctgggcaacaggaccctgtcccgggaccagtttgacatctgtgccaagacagctgtagtggacaatgag

SEQ ID NO: 253229 - DNA, 120 bp, Artificial Sequence
  ENSG00000124067_9 (sequence is synthesized)
acagtggccacccagctatggagtttcttctgccacagccccaaccttacgaccgactcctgtgacccctacttcatgctcaacaatgtgaccgagatccctggcatccccggggcagct

SEQ ID NO: 253230 - DNA, 120 bp, Artificial Sequence
  ENSG00000124067_10 (sequence is synthesized)
gctggtgtgctccaggaaaacctgtggagcgcctacctggagaagggtgacatcgtggagaagcatgggctgccctccgcagatgccccgagcctgaaggagagcctgcctctgtacgtg

SEQ ID NO: 253231 - DNA, 120 bp, Artificial Sequence
  ENSG00000124067_11 (sequence is synthesized)
gtcgctgacatcgccacatccttcaccgtgctggtcggcatcttcttcccttctgtaacaggcatcatggctggctcaaaccgctctggggaccttcgtgacgcccagaagtctatccct

SEQ ID NO: 253232 - DNA, 120 bp, Artificial Sequence
  ENSG00000124067_12 (sequence is synthesized)
gtggggaccattctggccatcattacaacttccctcgtgtacttcagcagtgtggttctctttggtgcctgcattgagggtgtggttctccgggacaagtatggcgatggtgtcagcagg

SEQ ID NO: 253233 - DNA, 120 bp, Artificial Sequence
  ENSG00000124067_13 (sequence is synthesized)
aacttggtggtgggcacactggcctggccttcaccctgggtcatcgtcatcggctccttcttttcaacgtgtggcgctggcctccagagcctcacaggggcaccacgcctattgcaggcc

SEQ ID NO: 253234 - DNA, 120 bp, Artificial Sequence
  ENSG00000124067_14 (sequence is synthesized)
attgccaaggacaacatcatccccttcctccgggtgtttggccacgggaaggtgaatggtgaacccacatgggcactcctcctgacggcactcatcgccgagctgggcatcctcatcgcc

SEQ ID NO: 253235 - DNA, 120 bp, Artificial Sequence
  ENSG00000124067_15 (sequence is synthesized)
tccctcgacatggtggcccccatcttatccatgttctttctgatgtgctacctgttcgtgaacctcgcctgtgcggtgcagacactcctgaggacccccaactggcggccccggttcaag

SEQ ID NO: 253236 - DNA, 120 bp, Artificial Sequence
  ENSG00000124067_16 (sequence is synthesized)
tactatcactgggcgctgtccttcctgggcatgagtctctgcctggcccttatgtttgtctcctcctggtactatgccctggtggccatgctcatcgccggcatgatctacaaatacatc

SEQ ID NO: 253237 - DNA, 120 bp, Artificial Sequence
  ENSG00000124067_17 (sequence is synthesized)
gagtaccaaggggctgagaaggagtggggtgacgggatccgaggcctgtccctgagcgctgcccgctacgcgctgttgcggctggaggaggggcctcctcacaccaagaactggcggccg

SEQ ID NO: 253238 - DNA, 120 bp, Artificial Sequence
  ENSG00000124067_18 (sequence is synthesized)
cagctgctggtgctgctgaagctggacgaggacctccacgtgaagtacccgcggctcctcaccttcgcctcccagctcaaggctggcaagggcctgaccattgttggttctgtcatccag

SEQ ID NO: 253239 - DNA, 120 bp, Artificial Sequence
  ENSG00000124067_19 (sequence is synthesized)
ctcaggccgccgagcagaccatcaagaacatgatggaaattgagaaggtgaagggcttctgccaggtggtggtggccagcaaggtgcgggaggggctggcccacctcatccagtcctgtg

SEQ ID NO: 253240 - DNA, 120 bp, Artificial Sequence
  ENSG00000124067_20 (sequence is synthesized)
gcctgggaggcatgcggcataactccgtggtgctgggctggccctacggctggcgacagagcgaggacccccgtgcctggaagaccttcattgacaccgtgcgctgcactacggctgccc

SEQ ID NO: 253241 - DNA, 120 bp, Artificial Sequence
  ENSG00000124067_21 (sequence is synthesized)
acctggccctgctcgtgcccaagaacatcgccttctaccccagcaaccacgagcgctacctggagggccacatagacgtgtggtggatcgtgcacgatggtggcatgctcatgcttctgc

SEQ ID NO: 253242 - DNA, 120 bp, Artificial Sequence
  ENSG00000124067_22 (sequence is synthesized)
ccttcctgctgcgccagcataaggtctggaggaagtgccggatgcgcatcttcacagtggcccagatggatgacaacagcatccagatgaagaaggacctggctgtctttctgtaccatc

SEQ ID NO: 253243 - DNA, 120 bp, Artificial Sequence
  ENSG00000124067_23 (sequence is synthesized)
tgcgccttgaggccgaggtggaggtggtggagatgcataacagtgacatctctgcatacacctacgagcggacgctgatgatggagcagcggtcgcagatgctgcggcagatgagactga

SEQ ID NO: 253244 - DNA, 120 bp, Artificial Sequence
  ENSG00000124067_24 (sequence is synthesized)
ccaagactgagcgggagcgagaagcccagctggtcaaggatcggcactcggccctgcggctggagagcctgtactcggacgaggaagatgagtctgcagtgggggctgacaagatccaga

SEQ ID NO: 253245 - DNA, 120 bp, Artificial Sequence
  ENSG00000124067_25 (sequence is synthesized)
tgacgtggaccagggacaagtacatgactgagacctgggaccccagccatgcccctgacaatttccgggagctggtgcacattaagccggaccaatccaatgtgcggcgcatgcacactg

SEQ ID NO: 253246 - DNA, 120 bp, Artificial Sequence
  ENSG00000124067_26 (sequence is synthesized)
ctgtgaagctcaatgaagtcattgtcacgcgctcccacgacgcccgcctggttctcctaaacatgcctggcccacccaggaacagtgagggcgacgagaactacatggagttcctcgagg

SEQ ID NO: 253247 - DNA, 120 bp, Artificial Sequence
  ENSG00000124067_27 (sequence is synthesized)
tgctgaccgagggccttgagcgggtgctgttggtgcgcggtggtggccgtgaagtcatcaccatctactcctgagcccagtgtcatcttgtggcctggagtcgaggtcttggccaggaca

SEQ ID NO: 253248 - DNA, 120 bp, Artificial Sequence
  ENSG00000124067_28 (sequence is synthesized)
taacaagctgtggtctggggtaacagcctcttcccagcacccacctgccagccctgcttgcctggccctgtcctggacccagctttgctaggtctccttggaaaccaggcctgggcctca

SEQ ID NO: 253249 - DNA, 120 bp, Artificial Sequence
  ENSG00000124067_29 (sequence is synthesized)
aaatggagatggatcccaggtcttgtgggaccctgggatgtttggggactttactatctagcaccccagtaggcctgtcctggccagagaagactggtaggggccgagtggggtttgaag

SEQ ID NO: 253250 - DNA, 120 bp, Artificial Sequence
  ENSG00000124067_30 (sequence is synthesized)
gcagccggcccggcccagcccaggagcgctatttattgcatatttattgtttggatgtcaccatcagagacgaagggaagggtagccagggagggagtccagcccagctgcctgcaggaa

SEQ ID NO: 253251 - DNA, 120 bp, Artificial Sequence
  ENSG00000124067_31 (sequence is synthesized)
gatctggctcagtctactatgggcagggccccccaccaagctgagccgaatggagacagctgagctgaggcctgactttttcaataaaacattgtgtagttctgggcctcctgctgcccc

SEQ ID NO: 253252 - DNA, 120 bp, Artificial Sequence
  ENSG00000124067_32 (sequence is synthesized)
ggctctgtttcccctggcgccaagagaagaaggcggaactgaacccaggcccagagccggctccctgaggctgtgcccctttccggcaatctctggccacaacccccactggccaggccg

SEQ ID NO: 253253 - DNA, 120 bp, Artificial Sequence
  ENSG00000124067_33 (sequence is synthesized)
tccctcccactggccctagggcccctcccactcccacaccagataaggacagcccagtgccgctttctctggcagtaggcaccagggctggaatggggccgcccggctccccatggcagt

SEQ ID NO: 253254 - DNA, 120 bp, Artificial Sequence
  ENSG00000124067_34 (sequence is synthesized)
gggtgacgctgctgctggggctgctgctccctcctgccgcccccttctggctcctcaatgtgctcttccccccgcacaccacgcccaaggctgagctcagtaaccacacacggcccgtca

SEQ ID NO: 253255 - DNA, 120 bp, Artificial Sequence
  ENSG00000124067_35 (sequence is synthesized)
tcctcggtaagcccccaccaggcccctgatgcaccacgccagaccctggggagcctgggccccagcccctggcagctgacctggccaaagcccttctgccctgcataagccccgacataa

SEQ ID NO: 253256 - DNA, 120 bp, Artificial Sequence
  ENSG00000124067_36 (sequence is synthesized)
gtacctgccctggtgtggggaggggccaaaagcttgtcccttagaggaatgacgtcccttctcccaccacactgtgactctcagttgtctaacccagggggggcggagtgggggacgggg

SEQ ID NO: 253257 - DNA, 120 bp, Artificial Sequence
  ENSG00000124067_37 (sequence is synthesized)
tgtgcctgaggtcttggctggggcatcacaagctgtggtcagtcacagccacaccagactctgggccaagccccaccactccttccttggcccccacccaccaaggacaagatgcccagc

SEQ ID NO: 253258 - DNA, 120 bp, Artificial Sequence
  ENSG00000124067_38 (sequence is synthesized)
ccaggatcggtgagcaggagaggcccatccatgcccggcccctattaggcccagcccccatgcccccagacctatctgttcccaccttggactttggcaataaaggagcgccagactggg

SEQ ID NO: 253259 - DNA, 120 bp, Artificial Sequence
  ENSG00000124067_39 (sequence is synthesized)
gagtcctgctagatccccgcaagctaggccagctcctcccactgcctcccttcctctttctcctcctcttactcctttccagccagaccttggctgtctacaggatgggggacaccctga

SEQ ID NO: 253260 - DNA, 120 bp, Artificial Sequence
  ENSG00000124067_40 (sequence is synthesized)
gctaagcaggcaggctggacacgtgggcctcctctgtcttgctcttcctctcatctcctcttgtgttcctggttctcatggcagccgggctgcagttcccttggccctttcaactgaaac

SEQ ID NO: 253261 - DNA, 120 bp, Artificial Sequence
  ENSG00000124067_41 (sequence is synthesized)
tgcctttccagaggccactcacaatcccacccccattgctacctccagggtggttcacctctgacttccttacaacccctcagcaaggaaacgcccgcttaggatttcccaactcaggat

SEQ ID NO: 253262 - DNA, 120 bp, Artificial Sequence
  ENSG00000124067_42 (sequence is synthesized)
ttctcctcttccttccactcctggttcttctccaagtccatggttcttcgctctcccatggattcttccttgtctttcttggttgacccttccagctctgtccctctctagttccctgag

SEQ ID NO: 253263 - DNA, 120 bp, Artificial Sequence
  ENSG00000124067_43 (sequence is synthesized)
tcctggtccatttgcagctttaggggatacgtctctggaaagattcccaaatatctgcctctgtacttgagttttatcttcttcagactcaagctgagcagtgagatctggatttaagac

SEQ ID NO: 253264 - DNA, 120 bp, Artificial Sequence
  ENSG00000124067_44 (sequence is synthesized)
gtagtttaagctcctaaactctgacccatgcattcagccactgcatggctgagtaatggagactccttaatctgccttttttttctctttcttcattttgagatggagtctcactctgtc

SEQ ID NO: 253265 - DNA, 62 bp, Artificial Sequence
  ENSG00000124067_45 (sequence is synthesized)
caacctctgccttccaagtgcctggctaatttttgtgtttttagagacggggtttcaccgtg

SEQ ID NO: 253266 - DNA, 89 bp, Artificial Sequence
  ENSG00000124067_46 (sequence is synthesized)
tagtgatcctcctgctcagcctctcaaagtgctggaattactgctgtgagccaccacatctggccgaggctccttaatctccacatgcc

SEQ ID NO: 253267 - DNA, 120 bp, Artificial Sequence
  ENSG00000124067_47 (sequence is synthesized)
gccaccacatctggccgaggctccttaatctccacatgcccccaagggccctcgtcttcctttctcacaccaaagcaacttctccctgtgtgtaggtcagaaaggagctgacagagaggg

SEQ ID NO: 253268 - DNA, 120 bp, Artificial Sequence
  ENSG00000124067_48 (sequence is synthesized)
aaaagctaaatgtgggcaggaggcaggtagaagcacagcctcgagaaggctgcaggagcagggatcatcgcctagaccccggtggggctgggggacctgagctctgggaggcctcctgac

SEQ ID NO: 253269 - DNA, 120 bp, Artificial Sequence
  ENSG00000124067_49 (sequence is synthesized)
ctgggaaagcagcaaggttctgcggtgaaggccttggcccagccccgcctgaggatgggctggaggatcaggatcccatctccgcgattgatgaagagctggacatccgcccaaaggtat

SEQ ID NO: 253270 - DNA, 120 bp, Artificial Sequence
  ENSG00000124067_50 (sequence is synthesized)
tctggccatcattacaacttccctcgtgtgtatcctttcccaggcctggggcaggtggggcagaggacgggaagcgcttggcctgtgtacgttgccaggtcacatgcacagacaccccac

SEQ ID NO: 253271 - DNA, 120 bp, Artificial Sequence
  ENSG00000124067_51 (sequence is synthesized)
acactcatatatagctccccttctcatgcacacatgcacatacacaccacgagactcccagctgtaggtgtcctggtagtctggctggggtgggggcacgtggtactattcagggacagt

SEQ ID NO: 253272 - DNA, 120 bp, Artificial Sequence
  ENSG00000124067_52 (sequence is synthesized)
atccctttgtggagaggcaggcagttgggaggtggatagcatgggaggtcaagccagcggcttctctcctgggcacccctgggtgggcatggcccaggtggcccgggttgcccgttgatt

SEQ ID NO: 253273 - DNA, 120 bp, Artificial Sequence
  ENSG00000124067_53 (sequence is synthesized)
agtgcatggtggggtagccagccggccacctttgggccatggcagccgaaggtgctgtgtgcggcttcgtctatctggagggcactgcctgggcggtccctgaggacaccgaacccttgg

SEQ ID NO: 253274 - DNA, 120 bp, Artificial Sequence
  ENSG00000124067_54 (sequence is synthesized)
gtcttgcggggcccagcggctctgattccgtaccccccaccccaagggctggaggctggcagtaggcgtagtcagaggacgccacccgagccacgcgagggagaagagtggagatagaca

SEQ ID NO: 253275 - DNA, 120 bp, Artificial Sequence
  ENSG00000124067_55 (sequence is synthesized)
ccatcgccaccaacggtgtggttccaggtcagtgagcgccacccaaggcctggtggaagagaaaaggacccagtatctgccttgacctacctgggaacccccatagcacacccctgcccc

SEQ ID NO: 253276 - DNA, 120 bp, Artificial Sequence
  ENSG00000124067_56 (sequence is synthesized)
aagcagttctgtagtgggctcccaatccctgatgccaggacagtgcccacgtaggagctttcctgcttgacagagttggagagtgccattgtggtttttgttaatataaaagcaatacca

SEQ ID NO: 253277 - DNA, 120 bp, Artificial Sequence
  ENSG00000124067_57 (sequence is synthesized)
tgagccctgcctgcctacccacccagccctgtccccaatcccggggagcccctgagggagtctcatctgtttttggaggcatcatggctggctcaaaccgctctggggaccttcgtgacg

SEQ ID NO: 253278 - DNA, 120 bp, Artificial Sequence
  ENSG00000124067_58 (sequence is synthesized)
gaatccccagctgcctccaacaggagaggctgcagctagagggcccagggctgggacgggaccttcgcgggggtctggttcccagggtcgcggagaaatgggatgcagacgctggaaatg

SEQ ID NO: 253279 - DNA, 120 bp, Artificial Sequence
  ENSG00000124067_59 (sequence is synthesized)
agtggcgggctctgggtgacggtggttcagccacctttgtctgtcgacttctagctgggcagctccttctctgtggtcagggtagccctgtggctgacgctgcagtcattgggctgaagc

SEQ ID NO: 253280 - DNA, 120 bp, Artificial Sequence
  ENSG00000124067_60 (sequence is synthesized)
tgttccctgagtccccaaagttgccctgcatctgcgcctctggctaggctgccccaaactacctggggtagtggggggcagctgtggtggtgacacagctacccctgcagaaaacctgtg

SEQ ID NO: 253281 - DNA, 120 bp, Artificial Sequence
  ENSG00000124067_61 (sequence is synthesized)
gcaaaaacagccccagcggcactggaatctaggggtggaggtggggtggggcagacaagtagtgttagatgggccaggggtggggaccctccttgcaggatggctcatggcgacctgtga

SEQ ID NO: 253282 - DNA, 120 bp, Artificial Sequence
  ENSG00000124067_62 (sequence is synthesized)
gtttagggctcatccaaaggagagaggcctggtgaggtggaatcagggagactggtgacacccatagggatagacacaggggcggcctgagcccccaaggcgggccctgggggtgaggga

SEQ ID NO: 253283 - DNA, 120 bp, Artificial Sequence
  ENSG00000124067_63 (sequence is synthesized)
cggctccttcttttcaacgtgtggcgctggcctccagagcctcacaggggcaccacgcctattgcaggccattgccaaggacaacatcatccccttcctccgggtgagcccctctgcact

SEQ ID NO: 253284 - DNA, 120 bp, Artificial Sequence
  ENSG00000124067_64 (sequence is synthesized)
cccccatggcctggctgctcccaggccctcgcccggctggggagagagatagggaacacagatgcagcacgtcctgcccttattggcccccggggccaggcggccatccatgaggagcta

SEQ ID NO: 253285 - DNA, 120 bp, Artificial Sequence
  ENSG00000124067_65 (sequence is synthesized)
aggcctggtgaggtggaatcagggagactgggcagggggatggggaaaggcttcctgaaccccagcacctccccgtggctgcgtctggtgttggaggtccagctgggagatgtggcaggc

SEQ ID NO: 253286 - DNA, 120 bp, Artificial Sequence
  ENSG00000124067_66 (sequence is synthesized)
tgcatggggagatgtggcctgacagggctcagcccacccctgcatttaggagcaagcctggcacctatgccaaagctataaggtgaccaatatgtccacacctccctgaggcccccagag

SEQ ID NO: 253287 - DNA, 120 bp, Artificial Sequence
  ENSG00000124074_0 (sequence is synthesized)
gcccggcaacaacaagtcccgtcgggtggcagcggctggcggcaaaacctctcgagtgagcccctgcccgagtgccgcgggggagaggccgcgagcgggaccgagaagtgggctgggagc

SEQ ID NO: 253288 - DNA, 80 bp, Artificial Sequence
  ENSG00000124074_1 (sequence is synthesized)
ctgggagcagaggtcgcggaggtggcgagcgaggccggggcccaggcggggaccggcaggggcccgggagtggcgggcac

SEQ ID NO: 253289 - DNA, 120 bp, Artificial Sequence
  ENSG00000124074_2 (sequence is synthesized)
gaagggggcccggggagggaggtaaacagccctgcaggcctcggggcaccgttgctgggcggcgccggcggcatgtgcgagggcccgtcccgcatctcggggcccatccccccagacccg

SEQ ID NO: 253290 - DNA, 120 bp, Artificial Sequence
  ENSG00000124074_3 (sequence is synthesized)
tctgtcctgacaactacaggcggccgacctcggctcaagggcgcctcgagggaaacgcgctgaagctggacttgctgacttccgaccgggccctggacaccaccgctccccgtggcccct

SEQ ID NO: 253291 - DNA, 120 bp, Artificial Sequence
  ENSG00000124074_4 (sequence is synthesized)
gcatcggtcccggtgccggagagatcctggagcgcggccagcgcggcgtcggggacgtgctgttgcaactcgaggggatctccctaggtcctggggcctctctcaagaggaaggacccta

SEQ ID NO: 253292 - DNA, 120 bp, Artificial Sequence
  ENSG00000124074_5 (sequence is synthesized)
aggaccatgagaaggagaacctgaggcggatcagggagattcagaagcgcttcagagaacaggagcgcagccgggagcagggccagcccaggcccctgaaagctctgtggcgctcaccca

SEQ ID NO: 253293 - DNA, 120 bp, Artificial Sequence
  ENSG00000124074_6 (sequence is synthesized)
gacaaggtggagtcccgggtcaaggcccagctccaggagcctggccctgcctctgggacagagtctgcccacttcctgcgggcgcactcccgctgcggccctggcctcccaccaccccat

SEQ ID NO: 253294 - DNA, 120 bp, Artificial Sequence
  ENSG00000124074_7 (sequence is synthesized)
gtatctagtccccagccaaccccaccaggtcccgaagctaaggagccaggcctgggggtggacttcattcgtcacaatgcacgagctgccaagagagccccccggaggcattcctgctca

SEQ ID NO: 253295 - DNA, 120 bp, Artificial Sequence
  ENSG00000124074_8 (sequence is synthesized)
ctgcaggtcctggcacaagtgctagagcagcagcggcaggcccaggagcactacaatgccacgcagaagggccatgtgccacattacttgttggagcgcagggacctgtggcggcgggag

SEQ ID NO: 253296 - DNA, 120 bp, Artificial Sequence
  ENSG00000124074_9 (sequence is synthesized)
gccgaggcccgcaagcagagccagccggaccctgccatgcccccaggccacacgcgcatgcctgagaaccagcggctggaaacactgaccaagctgctccagagccagagccagctgctg

SEQ ID NO: 253297 - DNA, 120 bp, Artificial Sequence
  ENSG00000124074_10 (sequence is synthesized)
cgtgagctggtactgctgcctgctggggcagactcactgagagcccagagccaccgtgctgagctggaccggaagctggtgcaggtagaggaggccatcaagatcttttctcggcccaaa

SEQ ID NO: 253298 - DNA, 120 bp, Artificial Sequence
  ENSG00000124074_11 (sequence is synthesized)
gtcttcgtgaagatggacgactgagcccctttgggggacagtggcaaggagctccatgctgaggatcgccacatggctgcaaaggacagggttggacccaatcccagagcagaggtctga

SEQ ID NO: 253299 - DNA, 120 bp, Artificial Sequence
  ENSG00000124074_12 (sequence is synthesized)
agacaggagcaggggggtggccagtgtccctagagcactcttcccagtcaccagtggctgcagaagggccaccctagccttttaactgctttgtcaaaattaaacattttgtacacagga

SEQ ID NO: 253300 - DNA, 120 bp, Artificial Sequence
  ENSG00000124074_13 (sequence is synthesized)
atggccgggcaaaggacatagggatccgtcactgaacacctaacgttagacaccgaaacgggaataaggacaccagcctgtgcccctccccgcctggagggcccagcctggcagttagcg

SEQ ID NO: 253301 - DNA, 120 bp, Artificial Sequence
  ENSG00000124074_14 (sequence is synthesized)
ggtcggggcgctcagttccacctctcagagcgctgcggccctgtgtttgaaggttaaacagcctgacggtcacctcggaggtctgagcgctgccgggctcctccgtgagctgtccctgcc

SEQ ID NO: 253302 - DNA, 120 bp, Artificial Sequence
  ENSG00000124074_15 (sequence is synthesized)
ccacgaccgtcgcctcctggacccccggccgcctctccgcccctgccgaggccatggctgcgcaggctgagtgcgtcctcgacagctgcttggggcgggccccaaggggctggatggtgg

SEQ ID NO: 253303 - DNA, 120 bp, Artificial Sequence
  ENSG00000124074_16 (sequence is synthesized)
gctgaagcatctgtggggttcccagggggtgggagtgtgtccaggaagcagatggaaattcaggcctggatctcaggagtgagacctaggagttattgacgatcaggttgaggacaacga

SEQ ID NO: 253304 - DNA, 120 bp, Artificial Sequence
  ENSG00000124074_17 (sequence is synthesized)
gaccaaggaattgaccgcctggatttgaggacttggaggccagctgttaggagccttgcagggctagagccaggaagcttggctaggaaggaggaaagagagtggtagctgggccagtac

SEQ ID NO: 253305 - DNA, 120 bp, Artificial Sequence
  ENSG00000124074_18 (sequence is synthesized)
tgaggtggaaggagagatggtttgttgttttcttaaaaatctgacatactcacacatttgtgtgctgatgaggacaagtgtcccttgaagagggaagagggcccgagggacatggatgca

SEQ ID NO: 253306 - DNA, 120 bp, Artificial Sequence
  ENSG00000124089_0 (sequence is synthesized)
aatgagcatccaaaagacgtatctggagggagattttgtctttcctgtgagcagcagcagcttcctacggaccctgctggagccccagctcggatcagcccttctgacagcaatgaatgc

SEQ ID NO: 253307 - DNA, 120 bp, Artificial Sequence
  ENSG00000124089_1 (sequence is synthesized)
ttcgtgctgcctgccctctgttcagccaacactgcctaatggctcggagcacctccaagcccctttcttcagcaaccagagcagcagcgccttctgtgagcaggtcttcatcaagcccga

SEQ ID NO: 253308 - DNA, 120 bp, Artificial Sequence
  ENSG00000124089_2 (sequence is synthesized)
ggttttcctgtctctgggcatcgtcagtctgctggaaaacatcctggttatcctggccgtggtcaggaacggcaacctgcactccccgatgtacttctttctctgcagcctggcggtggc

SEQ ID NO: 253309 - DNA, 120 bp, Artificial Sequence
  ENSG00000124089_3 (sequence is synthesized)
cgacatgctggtaagtgtgtccaatgccctggagaccatcatgatcgccatcgtccacagcgactacctgaccttcgaggaccagtttatccagcacatggacaacatcttcgactccat

SEQ ID NO: 253310 - DNA, 120 bp, Artificial Sequence
  ENSG00000124089_4 (sequence is synthesized)
tgcatctccctggtggcctccatctgcaacctcctggccatcgccgtcgacaggtacgtcaccatcttttacgcgctccgctaccacagcatcatgaccgtgaggaaggccctcaccttg

SEQ ID NO: 253311 - DNA, 120 bp, Artificial Sequence
  ENSG00000124089_5 (sequence is synthesized)
atcgtggccatctgggtctgctgcggcgtctgtggcgtggtgttcatcgtctactcggagagcaaaatggtcattgtgtgcctcatcaccatgttcttcgccatgatgctcctcatgggc

SEQ ID NO: 253312 - DNA, 120 bp, Artificial Sequence
  ENSG00000124089_6 (sequence is synthesized)
accctctacgtgcacatgttcctctttgcgcggctgcacgtcaagcgcatagcagcactgccacctgccgacggggtggccccacagcaacactcatgcatgaagggggcagtcaccatc

SEQ ID NO: 253313 - DNA, 120 bp, Artificial Sequence
  ENSG00000124089_7 (sequence is synthesized)
accattctcctgggcgtgttcatcttctgctgggcccccttcttcctccacctggtcctcatcatcacctgccccaccaacccctactgcatctgctacactgcccacttcaacacctac

SEQ ID NO: 253314 - DNA, 120 bp, Artificial Sequence
  ENSG00000124089_8 (sequence is synthesized)
ctggtcctcatcatgtgcaactccgtcatcgacccactcatctacgctttccggagcctggaattgcgcaacacctttagggagattctctgtggctgcaacggcatgaacttgggatag

SEQ ID NO: 253315 - DNA, 120 bp, Artificial Sequence
  ENSG00000124091_0 (sequence is synthesized)
atgagccagcttcgagccacaaagtctggacttgtcgtgagggcagtcatttgcatcttcatttttctttacttaaggaatccaactcctgcagaatcagaagaagaacctgcccaacca

SEQ ID NO: 253316 - DNA, 120 bp, Artificial Sequence
  ENSG00000124091_1 (sequence is synthesized)
gaagtagtagaatgtggcttttacccagatgaactgtgttccgctttatttgaagggaaaggggcggcccccattgcaaaattttgcaaaacccctcataaatctgaaatacatgctcat

SEQ ID NO: 253317 - DNA, 120 bp, Artificial Sequence
  ENSG00000124091_2 (sequence is synthesized)
ttacacacaccaggaaactgctccaggatttctcgggggctgcatttcataaccagacccctgtctgcagaagagggcgatttctctttggcatatattataactattcataaggagctg

SEQ ID NO: 253318 - DNA, 120 bp, Artificial Sequence
  ENSG00000124091_3 (sequence is synthesized)
gccatgtttgtgcagcttctcagagctatttatgtacctcaaaatgtttattgtattcatgttgatgaaaaggccccaatgaagtataagactgctgtgcaaaccttggttaactgtttt

SEQ ID NO: 253319 - DNA, 120 bp, Artificial Sequence
  ENSG00000124091_4 (sequence is synthesized)
gaaaacgtttttatttcctccaagacagagaaggtggcttatgctggctttacaagactacaggcagatattaattgtatgaaagttctagtgcattctaaatttcaatggaactatgtc

SEQ ID NO: 253320 - DNA, 120 bp, Artificial Sequence
  ENSG00000124091_5 (sequence is synthesized)
caacagagaaatcatacactacatcagaagcaaatggagtgataaaaatattactcctggagtaatccaaccattgcacattaaatccaagacaagtcaaagtcatctcgaattcgttcc

SEQ ID NO: 253321 - DNA, 120 bp, Artificial Sequence
  ENSG00000124091_6 (sequence is synthesized)
taaaggaagtatctatgcacctccaaataacagattcaaagacaaaccaccccataacttaaccatttattttggaagtgcttactatgtacttacaaggaagtttgtagagttcatact

SEQ ID NO: 253322 - DNA, 120 bp, Artificial Sequence
  ENSG00000124091_7 (sequence is synthesized)
gactgacatccatgcaaaagacatgcttcagtggtccaaagacatccgcagcccagagcaacactactgggtgaccctgaaccgactaaaagatgctccaggtgctacaccaaacgctgg

SEQ ID NO: 253323 - DNA, 120 bp, Artificial Sequence
  ENSG00000124091_8 (sequence is synthesized)
ctgggaaggaaatgttcgagccattaagcggaaaagtgaggaaggaaatgttcatgatggatgtaaaggccgctacgtcgaagacatctgcgtatacggaccaggagacctgccgtggct

SEQ ID NO: 253324 - DNA, 120 bp, Artificial Sequence
  ENSG00000124091_9 (sequence is synthesized)
cattcagtcgccttctctgtttgccaacaaattcgaaccctcgacagacccgcttgtggttacctgcttagagcggcggcacagacttcaagtgctgaggcaggcagaagttcctataga

SEQ ID NO: 253325 - DNA, 120 bp, Artificial Sequence
  ENSG00000124091_10 (sequence is synthesized)
gccacactggcattttcaacagcagagtcatttcaatatgagactgaaccgctagggagtgtttgctttcttactggtatcattctgtttccttgacttgaaacaagagaacattgaacc

SEQ ID NO: 253326 - DNA, 120 bp, Artificial Sequence
  ENSG00000124091_11 (sequence is synthesized)
ataagctccacctcgagttccattaaggtattgaatgcacagtctttgttgggggaagcatttctttttttctttaatggagagtgaagttggccgcctcgaaggccaggaggactctgc

SEQ ID NO: 253327 - DNA, 120 bp, Artificial Sequence
  ENSG00000124091_12 (sequence is synthesized)
tcctgtcaggaaagatactcaagctatcatctgtaaacatgaacaacatttactgctggatggggaatcaccagcgcatggaagaactcttggtggatgcgttgtctggagcctgctcac

SEQ ID NO: 253328 - DNA, 120 bp, Artificial Sequence
  ENSG00000124091_13 (sequence is synthesized)
tccgccacgttactcagcaatgctttccctgtttctggataccacgctcccttctgaacgatgaagcatgaagcaccacgctccataaaagaccctccctctccccgtgggagggctcag

SEQ ID NO: 253329 - DNA, 120 bp, Artificial Sequence
  ENSG00000124091_14 (sequence is synthesized)
gaagctatgagacctgagtatgtactgccttaaatcaacagcaacagaaggatctggtcccaaggaaatactcagagaagcaaaagcagcaacttttcaatctgcaggtcagaaccaaca

SEQ ID NO: 253330 - DNA, 120 bp, Artificial Sequence
  ENSG00000124091_15 (sequence is synthesized)
ggaataaaactctccagggacagatggcaacaaaacctgccaagcaactctactcaagtgactgaagcaggcgccgctgccggggaggaaccgatgggagagaaaggccaggctgggccc

SEQ ID NO: 253331 - DNA, 120 bp, Artificial Sequence
  ENSG00000124092_0 (sequence is synthesized)
aaccctgcctggctccgcccccttcacgccccctcttttccgctccgcgcctgcgcactgccaccctccactctcgcgccagcccggcggcggccggctgtgggctgcagcacgcggtgc

SEQ ID NO: 253332 - DNA, 120 bp, Artificial Sequence
  ENSG00000124092_1 (sequence is synthesized)
acgaggcagagcccacaagccaaagacggagtgggccgagcattccggccacgccttccgcggccaagtcattatggcagccactgagatctctgtcctttctgagcaattcaccaagat

SEQ ID NO: 253333 - DNA, 120 bp, Artificial Sequence
  ENSG00000124092_2 (sequence is synthesized)
caaagaactcgagttgatgccggaaaaaggcctgaaggaggaggaaaaagacggagtgtgcagagagaaagaccatcggagccctagtgagttggaggccgagcgtacctctggggcctt

SEQ ID NO: 253334 - DNA, 120 bp, Artificial Sequence
  ENSG00000124092_3 (sequence is synthesized)
ccaggacagcgtcctggaggaagaagtggagctggtgctggccccctcggaggagagcgagaagtacatcctgaccctgcagacggtgcacttcacttctgaagctgtggagttgcagga

SEQ ID NO: 253335 - DNA, 120 bp, Artificial Sequence
  ENSG00000124092_4 (sequence is synthesized)
tatgagcttgctgagcatacagcagcaagaaggggtgcaggtggtggtgcaacagcctggccctgggttgctgtggcttgaggaagggccccggcagagcctgcagcagtgtgtggccat

SEQ ID NO: 253336 - DNA, 120 bp, Artificial Sequence
  ENSG00000124092_5 (sequence is synthesized)
tagtatccagcaagagctgtactccccgcaagagatggaggtgttgcagttccacgctctagaggagaatgtgatggtggccagtgaagacagtaagttagcggtgagcctggctgaaac

SEQ ID NO: 253337 - DNA, 120 bp, Artificial Sequence
  ENSG00000124092_6 (sequence is synthesized)
tactggactgatcaagctcgaggaagagcaggagaagaaccagttattggctgaaagaacaaaggagcagctcttttttgtggaaacaatgtcaggagatgaaagaagtgacgaaattgt

SEQ ID NO: 253338 - DNA, 120 bp, Artificial Sequence
  ENSG00000124092_7 (sequence is synthesized)
tctcacagtttcaaattcaaatgtggaagaacaagaggatcaacctacagctggtcaagcagatgctgaaaaggccaaatctacaaaaaatcaaagaaagacaaagggagcaaaaggaac

SEQ ID NO: 253339 - DNA, 120 bp, Artificial Sequence
  ENSG00000124092_8 (sequence is synthesized)
cttccactgtgatgtctgcatgttcacctcttctagaatgtcaagttttaatcgtcatatgaaaactcacaccagtgagaagcctcacctgtgtcacctctgcctgaaaaccttccgtac

SEQ ID NO: 253340 - DNA, 120 bp, Artificial Sequence
  ENSG00000124092_9 (sequence is synthesized)
ggtcactctgctgcggaaccatgttaacacccacacaggaaccaggccctacaagtgtaacgactgcaacatggcatttgtcaccagtggagaactcgtccgacacaggcgctataaaca

SEQ ID NO: 253341 - DNA, 120 bp, Artificial Sequence
  ENSG00000124092_10 (sequence is synthesized)
tactcatgagaaaccctttaaatgttccatgtgcaagtatgccagtgtggaggcaagtaaattgaagcgccatgtccgatcccacactggggagcgcccctttcagtgttgccagtgcag

SEQ ID NO: 253342 - DNA, 120 bp, Artificial Sequence
  ENSG00000124092_11 (sequence is synthesized)
ctatgccagcagagatacctacaagctgaaacgccacatgagaacgcactcaggtgagaagccttacgaatgccacatctgccacacccgcttcacccagagcgggaccatgaaaataca

SEQ ID NO: 253343 - DNA, 120 bp, Artificial Sequence
  ENSG00000124092_12 (sequence is synthesized)
tattctgcagaaacacggcgaaaatgtccccaaataccagtgtccccattgtgccaccatcattgcacggaaaagcgacctacgtgtgcatatgcgcaacttgcatgcttacagcgctgc

SEQ ID NO: 253344 - DNA, 120 bp, Artificial Sequence
  ENSG00000124092_13 (sequence is synthesized)
agagctgaaatgccgctactgttctgctgtcttccatgaacgctatgccctcattcagcaccagaaaactcataagaatgagaagaggttcaagtgcaaacactgcagttatgcctgcaa

SEQ ID NO: 253345 - DNA, 120 bp, Artificial Sequence
  ENSG00000124092_14 (sequence is synthesized)
gaagcaacttctaaacgctcacttcaggaaataccacgatgcaaatttcatcccgactgtttacaaatgctccaagtgtggcaaaggcttttcccgctggattaacctgcacagacattc

SEQ ID NO: 253346 - DNA, 120 bp, Artificial Sequence
  ENSG00000124092_15 (sequence is synthesized)
ggagaagtgtggatcaggggaagcaaagtcggctgcttcaggaaagggaagaagaacaagaaagaggaagcagaccatcctgaaggaagccacaaagggtcagaaggaagctgcgaaggg

SEQ ID NO: 253347 - DNA, 120 bp, Artificial Sequence
  ENSG00000124092_16 (sequence is synthesized)
atggaaggaagccgcgaacggagacgaagctgctgctgaggaggcttccaccacgaagggagaacagttcccaggagagatgtttcctgtcgcctgcagagaaaccacagccagagtcaa

SEQ ID NO: 253348 - DNA, 120 bp, Artificial Sequence
  ENSG00000124092_17 (sequence is synthesized)
agaggaagtggatgaaggcgtgacctgtgaaatgctcctcaacacgatggataagtgagagggattcgggttgcgtgttcactgcccccaattcctaaagcaagttagaagtttttagca

SEQ ID NO: 253349 - DNA, 120 bp, Artificial Sequence
  ENSG00000124092_18 (sequence is synthesized)
tttaaggtgtgaaatgctcctcaacacgatggataagtgagagagagtcaggttgcatgttcactgcccctaattcctaaagcaagttagaaatttttagcattttctttgaaacaatta

SEQ ID NO: 253350 - DNA, 120 bp, Artificial Sequence
  ENSG00000124092_19 (sequence is synthesized)
agttcatgacaatggatgacacaagtttgaggtagtgtctagaattgttctcctgtttgtagctggatatttcaaagaaacattgcaggtattttataaaagttttaaaccttgaatgag

SEQ ID NO: 253351 - DNA, 120 bp, Artificial Sequence
  ENSG00000124092_20 (sequence is synthesized)
agggtaacacctcaaacctatggattcattcacttgatattggcaaggtggcccacaatgagtgagtagtgatttttggatatttcaaaatagtctagaccagctagtgcttccacagtc

SEQ ID NO: 253352 - DNA, 120 bp, Artificial Sequence
  ENSG00000124092_21 (sequence is synthesized)
aaagctggacatttttatgttgcattatatacacccatgatatttctaataatatatggttttaaacattaaagacaaatgtttttatacaaatgaattttctacaaaatttaaagctac

SEQ ID NO: 253353 - DNA, 120 bp, Artificial Sequence
  ENSG00000124092_22 (sequence is synthesized)
cataatgcttttaattagttctaaattcaaccaaaaaatgttttactcttataaaaaggaaaactgagtaggaaatgaaatactagattagactagaaaataaggaataaatcgatttta

SEQ ID NO: 253354 - DNA, 120 bp, Artificial Sequence
  ENSG00000124092_23 (sequence is synthesized)
ctttggtataggagcaaggttcacctttagatttttgtattctcttttaattatgctccttggcaggtatgaaattgccctggttacattccattattgcttattagtatttcactccat

SEQ ID NO: 253355 - DNA, 120 bp, Artificial Sequence
  ENSG00000124092_24 (sequence is synthesized)
aacccttttttctgctaaaactactctttttatatttgtaaaataattggcagagtgagaagaaacataaaatcagataaggcaaatgtgtacctgtaaggaatttgtactttttcataa

SEQ ID NO: 253356 - DNA, 120 bp, Artificial Sequence
  ENSG00000124092_25 (sequence is synthesized)
tgcccagtgattagtgagtatttcccttttgccagttgacaagatttttccaccctcgagcagcgtgagagatgcctctttaacacttgaaattcatttctatctggatacagaggcaga

SEQ ID NO: 253357 - DNA, 120 bp, Artificial Sequence
  ENSG00000124092_26 (sequence is synthesized)
tttttcttcattgcttagttgagcagtttgttttgctgccaacctgtctccacccctgtatttcaagatcattgataagccctaaattcaaattcttaagatatggaccttttattgaaa

SEQ ID NO: 253358 - DNA, 120 bp, Artificial Sequence
  ENSG00000124092_27 (sequence is synthesized)
atatcacaagttcagaatccctatacaatgtgaatatgtggaaataatttcccagcaggaagagcattatattctctttgtaccagcaaattaatttaactcaactcacatgagatttaa

SEQ ID NO: 253359 - DNA, 120 bp, Artificial Sequence
  ENSG00000124092_28 (sequence is synthesized)
attctgtgggctgtagtatgccatcattgtgactgaatttgtgcaatggtttcttaatttttttactgttatttaaagatgttttacataattcaataaaatgaaatgacttaaaattgc

SEQ ID NO: 253360 - DNA, 120 bp, Artificial Sequence
  ENSG00000124092_29 (sequence is synthesized)
tctcccaggccccctgcaggccctcgtgccctccttacttcccccccgggtctcccagcgccccctgcggggccctcctcccttcctcatccacttcaaccccaaggccaagtcattatg

SEQ ID NO: 253361 - DNA, 120 bp, Artificial Sequence
  ENSG00000124092_30 (sequence is synthesized)
agggtaaagcaggggccctgccaggcctccgagggagtgtgcttggtctggccgagggctgcttggccaagtctgggtgggctcgaggccactaggcccaaagcctgcctggctctgagg

SEQ ID NO: 253362 - DNA, 120 bp, Artificial Sequence
  ENSG00000124092_31 (sequence is synthesized)
gtgctaggtctagaaccgtgcacgaggggaatgcctgctcgggcccgaacctcgctgggcgccgggtgtgcactggcccggggcctgcttggacctgaaacttgctaggcccaggatatg

SEQ ID NO: 253363 - DNA, 120 bp, Artificial Sequence
  ENSG00000124092_32 (sequence is synthesized)
cactggccgagagcctgctgggcccaaaccttactaggcccaggatgttcactgactgaaccggctcaggcctaaccttgctaggcccaggatatgcactgggccagagtgtgctcaggc

SEQ ID NO: 253364 - DNA, 120 bp, Artificial Sequence
  ENSG00000124092_33 (sequence is synthesized)
ggaaccttgccaggcgcaggatgtgtgctggccctaagcctgctgaggcccaaacctgttcgttctagggttttgtacaaaatcctgctttagcctaaatcctgcttagccttgaccccc

SEQ ID NO: 253365 - DNA, 120 bp, Artificial Sequence
  ENSG00000124092_34 (sequence is synthesized)
tcctagacccaagccagatcagcattgttctgaccctactaagtccaaaaccttttgaggccagaccttgtttcaactccaaagcctgctaggttccagcaccccccgcatccctcctca

SEQ ID NO: 253366 - DNA, 120 bp, Artificial Sequence
  ENSG00000124092_35 (sequence is synthesized)
taaaaccacaaacatttatcacctgacagattctctgggttgggaactcggaagtggctgaactgggtggtcctggctcagggccactcctgaggctgcagtcaggatgtccgccagggc

SEQ ID NO: 253367 - DNA, 120 bp, Artificial Sequence
  ENSG00000124092_36 (sequence is synthesized)
tgcatcatccgaaggctggactggggccagaggatccacttccaggacagctccgccacacaactgctggcaccggcctcagttccttgctacagggacctctctgcagggctgcttgag

SEQ ID NO: 253368 - DNA, 120 bp, Artificial Sequence
  ENSG00000124092_37 (sequence is synthesized)
tgtcctcctgactcagagcaagtgagagagtgcaagtaggaagccatggtgccttttgcagtctagtcctaaaagcggcacaacagccagctgtgggggctcacacctgtaatcccagta

SEQ ID NO: 253369 - DNA, 69 bp, Artificial Sequence
  ENSG00000124092_38 (sequence is synthesized)
aaaaaaaagaaaatagctaggcgtggtagtgcacgcttgtaatcccagctacttgggtggttgggacgg

SEQ ID NO: 253370 - DNA, 79 bp, Artificial Sequence
  ENSG00000124092_39 (sequence is synthesized)
tactttaaaaaaaaaaaaagaaaatagctaggcgtggtagtgcacgcttgtaatcccagctacttgggtggttgggacg

SEQ ID NO: 253371 - DNA, 120 bp, Artificial Sequence
  ENSG00000124092_40 (sequence is synthesized)
agactctgtctcaaaaaaaaaaaaaaagtggcacattctagtcacaagaaatgaaccatgaagtcccacccacactcgagtggggaatgaagtttcttttgaaaggaacagcatcaaaga

SEQ ID NO: 253372 - DNA, 120 bp, Artificial Sequence
  ENSG00000124092_41 (sequence is synthesized)
atttcaggacatttaaaaaccactgcacatggctagctagatccttggaccatgtaggcttcagcctaactttataaaagttttataaaagttgaatttcctgaagttgactattttttt

SEQ ID NO: 253373 - DNA, 120 bp, Artificial Sequence
  ENSG00000124092_42 (sequence is synthesized)
aaaaatatttcttcttaaaacagtagtgtagttgtgtttttctgagtagcacagtgggatagttctggaatgtcaaccctattagtttaaaatttcaaataaaagctgtggcagtgctcc

SEQ ID NO: 253374 - DNA, 120 bp, Artificial Sequence
  ENSG00000124092_43 (sequence is synthesized)
caaaacaccattgctcatgcaaaaattgtgaagagttaaaattaacgagtagaattctaaagagaaaaaaactgctctttggtgcaagaaataaaaatgtagagaaaagaacaagtctgc

SEQ ID NO: 253375 - DNA, 120 bp, Artificial Sequence
  ENSG00000124092_44 (sequence is synthesized)
aggaaacttacaatcaaggcagaaggcgaagagggagtaggcgcgtcacatggtgaaagcaggagcgagagagggggaggcgccacactcctctgaacgaccagattccttgagaaccgc

SEQ ID NO: 253376 - DNA, 120 bp, Artificial Sequence
  ENSG00000124092_45 (sequence is synthesized)
acgaccagattccttgagaaccgccactgtcatgaggacagcaccaagcggatggtgctaaatcattcctaagaaaccgcccccgtgatccagtcacctcctaccaggccccacctccaa

SEQ ID NO: 253377 - DNA, 120 bp, Artificial Sequence
  ENSG00000124092_46 (sequence is synthesized)
ggggattacaattcaacatgagctttggccagggacaaatatccaaactatatcatgtattttactacaaccaaatgtatgttaatttcaaaaacagataacataaatatgtttgaaaac

SEQ ID NO: 253378 - DNA, 82 bp, Artificial Sequence
  ENSG00000124092_47 (sequence is synthesized)
cctgtgcctggcctgatggcaccagttttgtggatctcagtgtttcttttcatatccaagaactgggtcttcttgtctccct

SEQ ID NO: 253379 - DNA, 120 bp, Artificial Sequence
  ENSG00000124092_48 (sequence is synthesized)
tttcttttcatatccaagaactgggtcttcttgtctccctccatccaccaaaaaaaaaaaaaaaaaaatacttcaaggaagcatggacaaaaatatcctcagacaagttagaacatgaga

SEQ ID NO: 253380 - DNA, 120 bp, Artificial Sequence
  ENSG00000124092_49 (sequence is synthesized)
cagtcacgttcttcagtgtggcgctctgtggatgtttgggaaagtaatttggaaaatgagtagagcagggctccccaaccccccagccgtggacctgtgggctgttaggaactgggcctc

SEQ ID NO: 253381 - DNA, 120 bp, Artificial Sequence
  ENSG00000124092_50 (sequence is synthesized)
ccagcaggaggtgagcagtgggtgagggagtgaagctttgtattgacagccgctccccatcgggcgcatcaccgcctgagctccgcctcctgtcagatcagcggcagcgttagattctca

SEQ ID NO: 253382 - DNA, 120 bp, Artificial Sequence
  ENSG00000124092_51 (sequence is synthesized)
cagcgttagattctcatgagtgtgaaccctgttgtgaactctgcacgtgcaagggatctaggctgcacactccttacgagaatctaatgcccgacgatctgtcactgtctcccatcaccc

SEQ ID NO: 253383 - DNA, 88 bp, Artificial Sequence
  ENSG00000124092_52 (sequence is synthesized)
agatgcaggaaaacaagccctgtataattatttcattatatatcacaatgtaataataaaaataaagtacataagaaatgtaatgtgc

SEQ ID NO: 253384 - DNA, 120 bp, Artificial Sequence
  ENSG00000124092_53 (sequence is synthesized)
taactcttaaagcaagctttaaaaaattactttttattggcacaattaaagttcaaaggtaaaagtggatttttgcgtgccttcatgataaaagaatcttgatctgtacttttaccttta

SEQ ID NO: 253385 - DNA, 120 bp, Artificial Sequence
  ENSG00000124092_54 (sequence is synthesized)
tttagcagtaagagagtctgcatagatactgtgccacaaccccactgtgtggagtaaaacacaaagtatttgcttccgtagatttttcaggtgagaagccttacgaatgccacatctgcc

SEQ ID NO: 253386 - DNA, 120 bp, Artificial Sequence
  ENSG00000124092_55 (sequence is synthesized)
ttccagtgccctgcaggctctcctcctctccttatccacccccaccccaggtctcccagtgccctgtatgggaccctcctcccctcctcatccacccccccaggtccaccagtgccccct

SEQ ID NO: 253387 - DNA, 120 bp, Artificial Sequence
  ENSG00000124092_56 (sequence is synthesized)
gcttcatggcatcttagtagaggctgctgtacaagttactccaagtgtaactaacagtagaatctgttacaaacaggctttttattattcatataaaatttatgcaggaaataatatgca

SEQ ID NO: 253388 - DNA, 120 bp, Artificial Sequence
  ENSG00000124092_57 (sequence is synthesized)
ttctcttttatgaagttaaaatagaaaattggatttctttgtttctttgattactaattagtgaaaataatatgtaaaggtttacaaattacaaataaaccatctgtggtcaagaaataa

SEQ ID NO: 253389 - DNA, 120 bp, Artificial Sequence
  ENSG00000124092_58 (sequence is synthesized)
aaaaaagaaaaagtaaataaaaataaataaaagtcaactccttaattcattcttcaactttaaggcaaaacataaagtgtgctgcttttgtaacagaggtacttgatgtcttgtgttaag

SEQ ID NO: 253390 - DNA, 120 bp, Artificial Sequence
  ENSG00000124092_59 (sequence is synthesized)
tgtaacagaggtacttgatgtcttgtgttaagaatacatttatgtgtacttcttggttattcgtacagccccatggatgtgaaccaccttgaactcttgcgtagccaccagatgcgggga

SEQ ID NO: 253391 - DNA, 120 bp, Artificial Sequence
  ENSG00000124092_60 (sequence is synthesized)
agtcatgtctctggtccatcatggacacagctgtacttgacataagctgtctgggcttgatttgggagtctcatactaattgggggttgtccggtgagaagggggttgataaaggaggct

SEQ ID NO: 253392 - DNA, 120 bp, Artificial Sequence
  ENSG00000124092_61 (sequence is synthesized)
tggggcaaaaaaaaaaaacactttcagcacaggtggcctttggcaaggatcaggcctggagggggaatcactttgttgtctgcatctcaggtgagaagccttacgaatgccacatctgcc

SEQ ID NO: 253393 - DNA, 120 bp, Artificial Sequence
  ENSG00000124092_62 (sequence is synthesized)
caaaaaatttgacccttttgcccaaagagattctggagatgagatgaatttttttgaaaacctttctgaaaggcgaaaggtgttccacaaagtcttcacttttatttttcatctggacca

SEQ ID NO: 253394 - DNA, 120 bp, Artificial Sequence
  ENSG00000124092_63 (sequence is synthesized)
ttctgtcattgttgccgtagataccagcacatcacaaaacacagtccagtggggcttggtggggcacaagtctagccagttgctagacttttttgacaccatggcaaagtaacatggttt

SEQ ID NO: 253395 - DNA, 120 bp, Artificial Sequence
  ENSG00000124092_64 (sequence is synthesized)
atatccatctcatgccagtgggtgatacactccacatagccctataagatgctttataaacacattaattcttccttcccatgactgtatgagaaatcaagctctctaaatgtctgagtc

SEQ ID NO: 253396 - DNA, 120 bp, Artificial Sequence
  ENSG00000124092_65 (sequence is synthesized)
actgtgggtaaggtggagtagctccatcacacagctgtccattgtcatttggcttcttacacaagtatcacaagaccatcatgctttagacttagatgagcaaacccagccagaccttac

SEQ ID NO: 253397 - DNA, 80 bp, Artificial Sequence
  ENSG00000124098_0 (sequence is synthesized)
agcggcgcgggtgctgcgcctagctgcgcaccatggccgggttgctggcgttgctgggtccggcaggcagggtgggcgcc

SEQ ID NO: 253398 - DNA, 120 bp, Artificial Sequence
  ENSG00000124098_1 (sequence is synthesized)
ctggccctggccctgctcccgcccaggctagacgcccggctgctccgcacggcgcgcggggactgccgcggccaccaggaccccagccaggccacggggacaacaggcagcagcgtcagc

SEQ ID NO: 253399 - DNA, 120 bp, Artificial Sequence
  ENSG00000124098_2 (sequence is synthesized)
caacaggcagcagcgtcagctgcacagaggagaaaaagcaaagcaagtcacagcaactgaaaaagatttttcaagagtatggcactgttggcgtgtcattgcacattggaatctcattaa

SEQ ID NO: 253400 - DNA, 120 bp, Artificial Sequence
  ENSG00000124098_3 (sequence is synthesized)
tttccttgggcatattttacatggttgtgtcaagtggtgtggacatgcctgcaatcctgctgaaactcggatttaaagagtccctggtacagtcaaaaatggcagcaggcacaagtacct

SEQ ID NO: 253401 - DNA, 120 bp, Artificial Sequence
  ENSG00000124098_4 (sequence is synthesized)
tcgtggtggcctatgcaatccacaagctgtttgcgccagtgagaatcagcattacgctagtctctgtgcccttgattgtcagatattttcgaaaagtgggattttttaaacctccagctg

SEQ ID NO: 253402 - DNA, 120 bp, Artificial Sequence
  ENSG00000124098_5 (sequence is synthesized)
caaaaccttaatgaactcttcagtcgtacacactgaaaacctatttcttctaaattacatgatttggattggttttagggttttagggttgtagggtttcttttggagaggtagggggct

SEQ ID NO: 253403 - DNA, 120 bp, Artificial Sequence
  ENSG00000124098_6 (sequence is synthesized)
aattgctatgttctcatggataaactttgccagcaaaaatcaggcttttgaacaattttaattttttgcctcataaattttgtgaatgctattcattatagggcttgtatatataatcta

SEQ ID NO: 253404 - DNA, 120 bp, Artificial Sequence
  ENSG00000124098_7 (sequence is synthesized)
aaatgtcagcaaggcatcggagatgggttaacatctcaaaacaaaatagcctacaaatgttccttgtgggagactttggcgagggtctgtgggtaaaagcaccagggggttaatcttggc

SEQ ID NO: 253405 - DNA, 120 bp, Artificial Sequence
  ENSG00000124098_8 (sequence is synthesized)
tcagtttcctaaaaagcattgattaatttaactggcttttaaatatccccttccgctgatatttgttgtcagctgcctacagtttaatatgcagcgttcacaaaacagctgccagtgcta

SEQ ID NO: 253406 - DNA, 120 bp, Artificial Sequence
  ENSG00000124098_9 (sequence is synthesized)
caattaatgaagcaaaacttaatatgtaatcacaatctaaattagcatcaatactttgacattcattacattggtttgggggaagaaaagtagttctggtatgtttcattgatccccaga

SEQ ID NO: 253407 - DNA, 120 bp, Artificial Sequence
  ENSG00000124098_10 (sequence is synthesized)
taccttccaatctggacatgatggggctgattccagatggtttttctgaaatttcattaaggtaggtcagcgtcatttgtctctgtttaggtaaaatataaaaaccctgcccagtagcag

SEQ ID NO: 253408 - DNA, 120 bp, Artificial Sequence
  ENSG00000124098_11 (sequence is synthesized)
tggcatcgcttggttcctgatgcccatgttccagaggaattcggataccacaaacagctaagacaatctcagcttttcttagacaatcttctatctcaaacttcagacattccagaattg

SEQ ID NO: 253409 - DNA, 120 bp, Artificial Sequence
  ENSG00000124098_12 (sequence is synthesized)
aaccatgagataatacaagccagggagaggcttgtattacatgacaggtgtaattagtctgctgagccagctttacccaatgaagggcatatgtgttagagagattagctaagagtagaa

SEQ ID NO: 253410 - DNA, 120 bp, Artificial Sequence
  ENSG00000124098_13 (sequence is synthesized)
cactccagcctgggcgacagagggagacactgtctccaaaagaaagaaatcccagcgtagatccaaactgagacactgaggcttcgtccttatagtagtcaggagcaggcgattgaagta

SEQ ID NO: 253411 - DNA, 120 bp, Artificial Sequence
  ENSG00000124098_14 (sequence is synthesized)
gcaggcgattgaagtaattctgtcctgcggggttcagcatcatgcacgttccccctgggccattctctgatgcagggcacttgctccacactctgggaacccagattcaccagtctgccc

SEQ ID NO: 253412 - DNA, 120 bp, Artificial Sequence
  ENSG00000124098_15 (sequence is synthesized)
tgtcacgtagttgaaggagttgcatttatctttctggctcctaattcctttaaaattacatttgttgcagaacctccacaaggctaaataaaattacatttgtgaccatcagagaactga

SEQ ID NO: 253413 - DNA, 120 bp, Artificial Sequence
  ENSG00000124098_16 (sequence is synthesized)
ataaaccattaactggccatcctggttttgcagagatcaggttgttgacagttcctggttgacccacagctacccatgtcagttatctccactaacatatccaagaatctttgtaggaca

SEQ ID NO: 253414 - DNA, 120 bp, Artificial Sequence
  ENSG00000124098_17 (sequence is synthesized)
atttctccacctgcaaggtctttcaggtagaactcttcttttaaggcaattagcccattgccaaaaggttttactgtcttaaagctgtctttctgagatctaattccaaggacttctcca

SEQ ID NO: 253415 - DNA, 120 bp, Artificial Sequence
  ENSG00000124098_18 (sequence is synthesized)
cagctaagtgagatgcctcacaccattaggtgatgctttggacagaacagagtattttcatcttgtgtttaaagcaattccttggcttcggctcctcaccactttctatgccagtctccc

SEQ ID NO: 253416 - DNA, 120 bp, Artificial Sequence
  ENSG00000124098_19 (sequence is synthesized)
aaaaaaagaaaaaaaagaaaaactgatggtgaaacctacaggtttaagggcttaaatctcaaactttgttaggagtaacaggagcgtgctgagcgggcaagcaataaaacaaatcatacc

SEQ ID NO: 253417 - DNA, 120 bp, Artificial Sequence
  ENSG00000124098_20 (sequence is synthesized)
ctgagcgggcaagcaataaaacaaatcataccaaaaagccacattgctctctcctaagccccaaccccactccactcctgtggccaggggtccaaacagaaaataaccggagaagacaag

SEQ ID NO: 253418 - DNA, 120 bp, Artificial Sequence
  ENSG00000124098_21 (sequence is synthesized)
gaggtcaaaggatcagggaactaagcattatgtgaattcaccagcaagatgtacagaacgcctgtgtttacattgtttttatggaactagcagaataaaacatctattttaaaaatgaaa

SEQ ID NO: 253419 - DNA, 120 bp, Artificial Sequence
  ENSG00000124098_22 (sequence is synthesized)
cgcccctggccctggccctgctcccgcccaggctagacgcccggctgctccgcacggcgcgcggggactgccgcggccaccagtccgacaggtggcacacaggtcttggggatcctctcc

SEQ ID NO: 253420 - DNA, 120 bp, Artificial Sequence
  ENSG00000124098_23 (sequence is synthesized)
agagtggcaccttctgcacacaccgtgccgcctcctgatgattcttcagggcccagcccagctgttccttcctccgggaagccctctctaacgacctgtgaggtctcggatgcctccact

SEQ ID NO: 253421 - DNA, 120 bp, Artificial Sequence
  ENSG00000124098_24 (sequence is synthesized)
cccatggctgtgggtcttctctgcactcatctggaatggcctcttgtcctgcctgtcagccacattgaccttgtccccagctcaggccctggcactggagcggtgtgtgtgtatacagtg

SEQ ID NO: 253422 - DNA, 120 bp, Artificial Sequence
  ENSG00000124098_25 (sequence is synthesized)
gcaaagagttggcctcagactccctggattcctctctctactcacttgttgttgactttgatcaaattcccttctctctatctcaggcccctcatctgtaaaatgggacgttaataattc

SEQ ID NO: 253423 - DNA, 120 bp, Artificial Sequence
  ENSG00000124098_26 (sequence is synthesized)
agacttcatagaatatgaatgtaaaatgagatatgttcatacctggcatctggtgtgtcctaaattaaggttagaaatgactataattgcagtaaatatatacagtcacaaggccccagg

SEQ ID NO: 253424 - DNA, 120 bp, Artificial Sequence
  ENSG00000124102_0 (sequence is synthesized)
gccaaacaccttcctgacaccatgagggccagcagcttcttgatcgtggtggtgttcctcatcgctgggacgctggttctagaggcagctgtcacgggagttcctgttaaaggtcaagac

SEQ ID NO: 253425 - DNA, 120 bp, Artificial Sequence
  ENSG00000124102_1 (sequence is synthesized)
actgtcaaaggccgtgttccattcaatggacaagatcccgttaaaggacaagtttcagttaaaggtcaagataaagtcaaagcgcaagagccagtcaaaggtccagtctccactaagcct

SEQ ID NO: 253426 - DNA, 120 bp, Artificial Sequence
  ENSG00000124102_2 (sequence is synthesized)
ctgcccaggaatcaagaagtgctgtgaaggctcttgcgggatggcctgtttcgttccccagtgagagggagccggtccttgctgcacctgtgccgtccccagagctacaggccccatctg

SEQ ID NO: 253427 - DNA, 120 bp, Artificial Sequence
  ENSG00000124102_3 (sequence is synthesized)
gtcctaagtccctgctgcccttccccttcccacactgtccattcttcctcccattcaggatgcccacggctggagctgcctctctcatccactttccaataaagagttccttctgctcca

SEQ ID NO: 253428 - DNA, 120 bp, Artificial Sequence
  ENSG00000124103_0 (sequence is synthesized)
aaatgaaaaacaaaaacatgatggcctctcccagcaaagctccagggttggaaagagtcccctggcagggaattggcaccccgtcgtgcccatcctctctctctgactgcctgctggaaa

SEQ ID NO: 253429 - DNA, 120 bp, Artificial Sequence
  ENSG00000124103_1 (sequence is synthesized)
tgcccccatctccctttgagtcctcctcccgggcaacccctgtgacctgtaacctctgtcctgaaatcatcacaatggccagagtggcctcagctcagggcctctgtgacatcaccaagg

SEQ ID NO: 253430 - DNA, 120 bp, Artificial Sequence
  ENSG00000124103_2 (sequence is synthesized)
gcctggcaccaggtgcccagtctcccagttgcgagggcaagcaaacccgtcatgagcaactcccttccccatctctgctcaccatgtggacgctgaaatcgtccctggtcctgcttctgt

SEQ ID NO: 253431 - DNA, 120 bp, Artificial Sequence
  ENSG00000124103_3 (sequence is synthesized)
agcactttcggattcggcagaatctaccagagcacacccaaggctggcttgggagcaaatggctctggcttctttttgttgttgtgccgtttgtgatactgcagtgtcaaagagacagtg

SEQ ID NO: 253432 - DNA, 120 bp, Artificial Sequence
  ENSG00000124103_4 (sequence is synthesized)
agaagaataaggagcagagtcctcctggccttcgaggcggccaacttcactctccattaaagaaaaaaagaaatgcttcccccaacaaagactgtgcattcaataccttaatggaactcg

SEQ ID NO: 253433 - DNA, 120 bp, Artificial Sequence
  ENSG00000124103_5 (sequence is synthesized)
aggtggagcttatgaaatttgtgtccaaagtgcggaatcttaaacgtgccatggcaacaggtagtggcagtaacctcaggcttcgaaagtcagagatgcctgcagatccataccatgtca

SEQ ID NO: 253434 - DNA, 120 bp, Artificial Sequence
  ENSG00000124103_6 (sequence is synthesized)
cgatctgtgaaatatggggagaagaaagctctagctgaatggatttgtgtgtcaggagagaaaaaagttgagtgttgacaaactgtatgcaaactaataaaactattctgaagaaaagaa

SEQ ID NO: 253435 - DNA, 120 bp, Artificial Sequence
  ENSG00000124103_7 (sequence is synthesized)
ctcccaaaagcacagcaatgaatgagagctcttctggaaaagctgggaagcctccgtgtggagccacaaagaggtccatcgctgacagtgaagaatcggaggcctacaagtccctcttta

SEQ ID NO: 253436 - DNA, 120 bp, Artificial Sequence
  ENSG00000124103_8 (sequence is synthesized)
ccactcacagctccgccaagcgctccaaggaggagtctgcccactgggtcacccacacgtcctactgcttctgaagcccgcactgccaccgctcctgccccagaagaaaactagcgaacc

SEQ ID NO: 253437 - DNA, 120 bp, Artificial Sequence
  ENSG00000124104_0 (sequence is synthesized)
cccctggggcgcggcgcgcccctgaatgcaccgtgggacgcaggaggtagaggcgcacgaggcggcgcaagagacatcgggagggtcctgagcccctccggggaggaacgcggtcctagg

SEQ ID NO: 253438 - DNA, 120 bp, Artificial Sequence
  ENSG00000124104_1 (sequence is synthesized)
ctgagtgggttggggggaaagcgatgctggctgggtcccctggttcgcaagacctcggactgccagggggtggggcctcaccgcgcccctccctctccggttcgggccccgcccctcctc

SEQ ID NO: 253439 - DNA, 120 bp, Artificial Sequence
  ENSG00000124104_2 (sequence is synthesized)
ctcctgcgccgggctggggtacccctcctccgggatccggtacacagcgtcgcgcgctccccccagggtgccatggcctcccggctcctgcaccggctgcggcacgccttggccggcgac

SEQ ID NO: 253440 - DNA, 120 bp, Artificial Sequence
  ENSG00000124104_3 (sequence is synthesized)
ggccccggggaggcggcggccagtccagaggccgagcagtttccggagagctcagagctggaggacgacgacgccgagggcctgtcctcccgactcagcggcaccctcagcttcaccagc

SEQ ID NO: 253441 - DNA, 120 bp, Artificial Sequence
  ENSG00000124104_4 (sequence is synthesized)
gccgaggacgacgaggacgacgaggacgaggacgacgaggaggctggccctgaccagctgcccctcggggatgggacgtcaggagaagacgcagaacggagccccccacctgatgggcag

SEQ ID NO: 253442 - DNA, 120 bp, Artificial Sequence
  ENSG00000124104_5 (sequence is synthesized)
tggggcagtcagctcctggcgcggcagctgcaggatttctggaagaagtcccggaacaccttggcaccccagcggctgctcttcgaagtgaccagcgctaacgttgtcaaggacccgccc

SEQ ID NO: 253443 - DNA, 120 bp, Artificial Sequence
  ENSG00000124104_6 (sequence is synthesized)
tccaagtacgtgctctacaccctcgccgtgatcggcccaggaccgccagattgccagccagcccagatctctcgccgttactcggactttgagcggctgcaccgaaacctgcagcggcaa

SEQ ID NO: 253444 - DNA, 120 bp, Artificial Sequence
  ENSG00000124104_7 (sequence is synthesized)
tccttcccccgtaagcggctgcgccggaattttactgcagagaccattgcccgccgtagccgggcctttgagcagtttttgggtcacctgcaggcagtgcctgagctgcgccatgccccg

SEQ ID NO: 253445 - DNA, 120 bp, Artificial Sequence
  ENSG00000124104_8 (sequence is synthesized)
gacctgcaggacttcttcgtgctgccggagctgcggcgggcacagagcctcacctgtactggcctctatcgtgaggctctggcactctgggccaatgcctggcagctgcaagcccagctg

SEQ ID NO: 253446 - DNA, 120 bp, Artificial Sequence
  ENSG00000124104_9 (sequence is synthesized)
ggcaccccctctggcccagaccgccccctgctgaccctggctgggctggccgtgtgccaccaggagctggaagaccctggagaggcccgggcatgctgtgagaaggccctgcagctgctt

SEQ ID NO: 253447 - DNA, 120 bp, Artificial Sequence
  ENSG00000124104_10 (sequence is synthesized)
ggggacaagagcctccaccctttgctggcaccctttctggaggcccatgtccggctctcctggcgcctgggcctggacaaacgtcaatcagaggctcggctccaagccctgcaggaggca

SEQ ID NO: 253448 - DNA, 120 bp, Artificial Sequence
  ENSG00000124104_11 (sequence is synthesized)
ggccttacccccacaccaccccccagtctcaaagaattgctcatcaaggaggtgctggactaacccttgcctagatttaaggccactgtgaggagaggggttgccccagaaggcagggga

SEQ ID NO: 253449 - DNA, 120 bp, Artificial Sequence
  ENSG00000124104_12 (sequence is synthesized)
aggacctgatgagaacagaatagctgggaggctgcagagggtgctgggagcccctagaagttccaaaagagaatgtgaagcagatcaaggaaacttctgttgagctaggctcagggtgag

SEQ ID NO: 253450 - DNA, 120 bp, Artificial Sequence
  ENSG00000124104_13 (sequence is synthesized)
ctttggctggggttgcccttgtgtagtacagggaagtctgacacagcctctccagcctataaacagccggggggctgtggcacaggttggggcaatgttcccttgttggtgggcccccaa

SEQ ID NO: 253451 - DNA, 120 bp, Artificial Sequence
  ENSG00000124104_14 (sequence is synthesized)
gctggcaaggcctcttggctgaaggccagggactctgcccctggagtcctggagttaagggatgaaggcaaggctgcaggtctggcccaggggaattaaaagccagccactccagtggta

SEQ ID NO: 253452 - DNA, 120 bp, Artificial Sequence
  ENSG00000124104_15 (sequence is synthesized)
gcctcccaaagtactgggattacagagggggctgtcagaagaactaatgctctatgggaagggagtacaaaaaaaggggcagcagccccgggcactgaagctcatctctgtctttctctc

SEQ ID NO: 253453 - DNA, 120 bp, Artificial Sequence
  ENSG00000124104_16 (sequence is synthesized)
cgatattttgagggtggagctattaatttagcccctactgtctgccaggcacggtgtttggctcctcggtgcctctctgtccctcagtttccatttctgtaaaaagggggtaagtcctgc

SEQ ID NO: 253454 - DNA, 120 bp, Artificial Sequence
  ENSG00000124104_17 (sequence is synthesized)
gggtctggcccagggcagggctgccccacacaagggtgcactgagtgtcgtggctgctccaaatgccccttcatgagcttattatggaccgtcattgaggggtaactcctcccacaggaa

SEQ ID NO: 253455 - DNA, 120 bp, Artificial Sequence
  ENSG00000124104_18 (sequence is synthesized)
ccccagttgacagtttaaaagcactttcacacctctcctcgcttcctcaaaaagatcacagagggaggagctctgagaacagtctccttcaacagctcggccaagcagaactgctgtacc

SEQ ID NO: 253456 - DNA, 120 bp, Artificial Sequence
  ENSG00000124104_19 (sequence is synthesized)
tctgaccacttgtgttaggaaaactatcggctccctgtataataaatcaagccaggtcctccaagtggtaattcatgaaaaatatccccactaccaccaccaaggggaagaaaggactca

SEQ ID NO: 253457 - DNA, 120 bp, Artificial Sequence
  ENSG00000124104_20 (sequence is synthesized)
gaagagaggacttgaggccatgaggtctggcctcttccctccccatctggagactctttctcccttgctggctttgggcccaagtttgatgtttatgaggatgattgctggtttccctta

SEQ ID NO: 253458 - DNA, 120 bp, Artificial Sequence
  ENSG00000124104_21 (sequence is synthesized)
cacatagcagagctcactcagttctcacagtagccaaatgaagcagttatgtgttgtccagttttccagaccaggactgaaatccagagagggtcaggaatttggccccatgatgaagcc

SEQ ID NO: 253459 - DNA, 120 bp, Artificial Sequence
  ENSG00000124104_22 (sequence is synthesized)
aaatctgaacccatgtcctcacttcaaggttatcaatcttggattgtgatgctattggtacttgagaataccccttatctgagtataaagaatccttgagttttgtccttggtttatcaa

SEQ ID NO: 253460 - DNA, 120 bp, Artificial Sequence
  ENSG00000124104_23 (sequence is synthesized)
gctacagcttgctctctgagacctggggcttcactcggatcacgccctcctgggcacaggtcacagctaggactccatcctgacgccacagccgcccatggaccagcccccgagagccac

SEQ ID NO: 253461 - DNA, 120 bp, Artificial Sequence
  ENSG00000124104_24 (sequence is synthesized)
ctgtgggtgaggtgaagggtgatgatggcctgcttcagaacagccaaatacactttttttttttttcctgaaacagagtctcactaagttgccaggctggtctcaagcgcctgggttcaa

SEQ ID NO: 253462 - DNA, 120 bp, Artificial Sequence
  ENSG00000124104_25 (sequence is synthesized)
gaaaggaggtcagggttctgaagctagacattgatgaacgagtcttgtttctctcccctgcaaggaaggtccaagcaggcccttagggaccactgaatgccccgatcccaatcaggttaa

SEQ ID NO: 253463 - DNA, 120 bp, Artificial Sequence
  ENSG00000124104_26 (sequence is synthesized)
tcagaatcacttagagaacttaaaaatacagtttcctggaccttatccaagacctactgagtgagaatcttgagggtggaatcagaatctattttgaaaaggcatccccaaatggcagtc

SEQ ID NO: 253464 - DNA, 120 bp, Artificial Sequence
  ENSG00000124104_27 (sequence is synthesized)
tgatggactgcgggtttggataccactgctgtaatgtaaccctctttgtttagatgaggaaactgaggttcagatggaagatatgatttgcctattgtaatacaaagaatctgaactggt

SEQ ID NO: 253465 - DNA, 120 bp, Artificial Sequence
  ENSG00000124104_28 (sequence is synthesized)
cacttcttaaagcgcctgggccacctcttggctgtgtgaccttgagagagtcttaacccccctctgagccaagttttcccttgtgtcaagtgggagaactcactctcatctcagaattgc

SEQ ID NO: 253466 - DNA, 120 bp, Artificial Sequence
  ENSG00000124107_0 (sequence is synthesized)
agagtcactcctgccttcaccatgaagtccagcggcctcttccccttcctggtgctgcttgccctgggaactctggcaccttgggctgtggaaggctctggaaagtccttcaaagctgga

SEQ ID NO: 253467 - DNA, 120 bp, Artificial Sequence
  ENSG00000124107_1 (sequence is synthesized)
gtctgtcctcctaagaaatctgcccagtgccttagatacaagaaacctgagtgccagagtgactggcagtgtccagggaagaagagatgttgtcctgacacttgtggcatcaaatgcctg

SEQ ID NO: 253468 - DNA, 120 bp, Artificial Sequence
  ENSG00000124107_2 (sequence is synthesized)
gcgtgacttgaagtgttgcatgggcatgtgtgggaaatcctgcgtttcccctgtgaaagcttgattcctgccatatggaggaggctctggagtcctgctctgtgtggtccaggtcctttc

SEQ ID NO: 253469 - DNA, 120 bp, Artificial Sequence
  ENSG00000124107_3 (sequence is synthesized)
caccctgagacttggctccaccactgatatcctcctttggggaaaggcttggcacacagcaggctttcaagaagtgccagttgatcaatgaataaataaacgagcctatttctctttgca

SEQ ID NO: 253470 - DNA, 120 bp, Artificial Sequence
  ENSG00000124116_0 (sequence is synthesized)
acctcagctgatactctgggcaaggtgtacacctctagcctgaactgagctcttgtcccaactctcagcatcatcatgatgttaagctgcctctttcttctgaaggcacttcttgctctt

SEQ ID NO: 253471 - DNA, 120 bp, Artificial Sequence
  ENSG00000124116_1 (sequence is synthesized)
gggtctctggaatcctggataactgcaggagaacatgcaaaagagggagaatgccctccccataagaacccatgcaaagagctgtgccagggtgatgaattgtgtccggctgaacagaag

SEQ ID NO: 253472 - DNA, 120 bp, Artificial Sequence
  ENSG00000124116_2 (sequence is synthesized)
ggatgagaattgtcaagctggagaaaaatgttgcaagtcaggctgtggccgcttctgtgtcccaccagtcctgcccccaaaactgaccatgaaccccaactggactgtgaggtctgattc

SEQ ID NO: 253473 - DNA, 120 bp, Artificial Sequence
  ENSG00000124116_3 (sequence is synthesized)
cgaattagagatcccggtgccctagctgtgctgatttgtctggagcttctttggtaattctggaagcttttcctggcagtcaagagagggtgacatcctggggcttgtgacatttccagg

SEQ ID NO: 253474 - DNA, 120 bp, Artificial Sequence
  ENSG00000124116_4 (sequence is synthesized)
ggcactcatggccctctctgctctgcttctcctcctgccgctgaccagagcatgggaaatagccctggattgggtagtgggtgtgtggtgcttctctttcccgataaaggctggtgctga

SEQ ID NO: 253475 - DNA, 120 bp, Artificial Sequence
  ENSG00000124116_5 (sequence is synthesized)
gtggtcggatctgccgagacattcctaaggggaggaaaagagattgccctagggttattcggaaacaatcctgtttgaaaaggtgcatcactgatgagacatgtccaggtgtaaagaaat

SEQ ID NO: 253476 - DNA, 120 bp, Artificial Sequence
  ENSG00000124116_6 (sequence is synthesized)
gctgcacgcttggctgcaacaagagctgtgtagtcccaatctctaaacagaagctggcagagtttggtggtgaatgtcccgctgacccccttccgtgtgaggagctgtgtgatggggatg

SEQ ID NO: 253477 - DNA, 120 bp, Artificial Sequence
  ENSG00000124116_7 (sequence is synthesized)
ccaggggcataaatgctgcagcaccggctgtggccgcacctgcctcggagacattgagggagggcggggcggtgattgtccaaaagttctggtgggcctgtgcattgttggctgtgtgat

SEQ ID NO: 253478 - DNA, 120 bp, Artificial Sequence
  ENSG00000124116_8 (sequence is synthesized)
tgctgcaccacaggctgtggtcggatctgccgagacattcctaagggtatgttggcatgaggggcaaaatctgggcatactctctgacattgcctctgggatagatggaagtagagagct

SEQ ID NO: 253479 - DNA, 120 bp, Artificial Sequence
  ENSG00000124116_9 (sequence is synthesized)
tcccaccttctaggttgcctctggaagtctcccttgcctagagtacttcttctttactcttttagggtccctcctcctttaattattcagtgcccccagttgtttgccttccatcaggaa

SEQ ID NO: 253480 - DNA, 120 bp, Artificial Sequence
  ENSG00000124116_10 (sequence is synthesized)
tcctgtgaaggctggagggaagagttgtaaagggaaggctgtgtaagataatgattaagagagtagaccctagagccaagcagacctttttaagccttaagccttagctctttataaatc

SEQ ID NO: 253481 - DNA, 120 bp, Artificial Sequence
  ENSG00000124116_11 (sequence is synthesized)
ttaagcttttagcctcagtttcctcatctataaaatggggataattgtgaggatcaaataagatgttcatggcacaaggtaaacgtcagtaaatgttacagtaaatatttgctattacta

SEQ ID NO: 253482 - DNA, 120 bp, Artificial Sequence
  ENSG00000124116_12 (sequence is synthesized)
ttgttgttattattgtctctttgtcttagcaccagggttgagaggcttaaataaatctcaggacttcctttttctgtttttcccttctgctgtgcccgtgggtgttgccaggcactattt

SEQ ID NO: 253483 - DNA, 85 bp, Artificial Sequence
  ENSG00000124116_13 (sequence is synthesized)
tcccttctgctgtgcccgtgggtgttgccaggcactattttctctctctctctcttcagactagaatgcagtggcgtgatctcgg

SEQ ID NO: 253484 - DNA, 120 bp, Artificial Sequence
  ENSG00000124116_14 (sequence is synthesized)
cggaagcgcgacgctggagctgcggggttaccatgggaaccgaaccgccgcgcctcgcccaggacagttacacttagaggccttcaaaagagggagaatgccctccccataagaacccat

SEQ ID NO: 253485 - DNA, 120 bp, Artificial Sequence
  ENSG00000124116_15 (sequence is synthesized)
cgcgctgctcgtccgcccggaagcgcgacgctggagctgcggggttaccatgggaaccgaaccgccgcgcctcgcccaggacagttacacttagaggccttggaggaaaagagattgccc

SEQ ID NO: 253486 - DNA, 120 bp, Artificial Sequence
  ENSG00000124116_16 (sequence is synthesized)
tggcgagagatgtccactttcacgtaactgttttctgagttgtggaggaaatatgttccctgaaggtgtgtggagaagcatggacaagatgaggagccatagagaaaagtgagcccattc

SEQ ID NO: 253487 - DNA, 120 bp, Artificial Sequence
  ENSG00000124116_17 (sequence is synthesized)
aggcttcatgatgttgcagacagcagatagaagaatcccggacttgactgaaatatctgaagggttagctgtccttctcatgtgaggagttgaattcatatctctgatttttatctttcc

SEQ ID NO: 253488 - DNA, 120 bp, Artificial Sequence
  ENSG00000124116_18 (sequence is synthesized)
agggcttaagcctgggcagagttctggtgcatccagaatcagccttgtgagcagaacagttaagttcttgggtacccagccatgtagcttgaaagaccatgctttaccagaaccctactg

SEQ ID NO: 253489 - DNA, 120 bp, Artificial Sequence
  ENSG00000124116_19 (sequence is synthesized)
attaacctcagccttccccccttctttcctccacatctagggatcatgaccactattgctcgggacatcaacatctctataatgaacagttgtaaataaattcttaccaatgctttaata

SEQ ID NO: 253490 - DNA, 120 bp, Artificial Sequence
  ENSG00000124120_0 (sequence is synthesized)
gtcacttccggcgcgagaggccgggcaggccgggcagggagtgcgggtcggttctgcgtgcgctgccggacgaggctcccgccgccgattgacccgcgctccgcccgtagtcgggccggg

SEQ ID NO: 253491 - DNA, 120 bp, Artificial Sequence
  ENSG00000124120_1 (sequence is synthesized)
accttggtagctaatgtccgaagaaagtgactctctgagaaccagcccttctgtggcctcactctctgaaaatgagctgccaccaccacctgagcctccgggctatgtgtgctcactgac

SEQ ID NO: 253492 - DNA, 120 bp, Artificial Sequence
  ENSG00000124120_2 (sequence is synthesized)
agaagacctggtcaccaaagcccgggaagagctgcaggaaaagccggaatggagacttcgagatgtgcaggcccttcgtgacatggtgcggaaggagtaccccaacctgagcacatccct

SEQ ID NO: 253493 - DNA, 120 bp, Artificial Sequence
  ENSG00000124120_3 (sequence is synthesized)
cgacgatgccttcctgctgcgcttcctccgagcccgcaagtttgattacgaccgggccctgcagctcctcgtcaactaccacagctgtagaagaagctggcccgaagtcttcaataactt

SEQ ID NO: 253494 - DNA, 120 bp, Artificial Sequence
  ENSG00000124120_4 (sequence is synthesized)
gaagccatcagccttaaaagatgtccttgcttccgggttcctcaccgtgctgccccacactgaccccaggggctgccatgtcgtctgcatccgcccagacagatggataccaagcaacta

SEQ ID NO: 253495 - DNA, 120 bp, Artificial Sequence
  ENSG00000124120_5 (sequence is synthesized)
tccaattactgaaaacatccgagccatatacttgaccttagaaaaactcattcagtctgaagaaacccaggtgaatggaattgtaattcttgcagactacaaaggagtgagtttatcaaa

SEQ ID NO: 253496 - DNA, 120 bp, Artificial Sequence
  ENSG00000124120_6 (sequence is synthesized)
agcatctcactttggcccttttatagccaaaaaggtgattggcatcctccaggatggtttccccattcggataaaagcagtccatgtggtgaatgaacctcgaatatttaaaggcatttt

SEQ ID NO: 253497 - DNA, 120 bp, Artificial Sequence
  ENSG00000124120_7 (sequence is synthesized)
tgccatcataaaaccatttctaaaggagaaaatagcaaacagattcttcctccatgggtctgacttgaactctctccacacaaaccttccaagaagcatcctccccaaggagtatggggg

SEQ ID NO: 253498 - DNA, 120 bp, Artificial Sequence
  ENSG00000124120_8 (sequence is synthesized)
cacggctggggagctggacactgccacctggaacgcggtactgctggcttcagaagacgattttgtgaaagagttctgccaacctgttcctgcctgtgacagcatcctgggccagacgct

SEQ ID NO: 253499 - DNA, 120 bp, Artificial Sequence
  ENSG00000124120_9 (sequence is synthesized)
gctgcccgagggcctgacctcagatgcacagtgtgacgactccttgcgagctgtgaagtcacagctgtactcctgctactagcccgtcccccagggtcaccatctttaattcttttcctt

SEQ ID NO: 253500 - DNA, 120 bp, Artificial Sequence
  ENSG00000124120_10 (sequence is synthesized)
cttttctttggagaggcacaaggagaatttaagggtccatggattcagtcttgctccttgtaattaaactgcaggatggaggaacagcctgagatatgagcatgagcccattttggggta

SEQ ID NO: 253501 - DNA, 120 bp, Artificial Sequence
  ENSG00000124120_11 (sequence is synthesized)
agcctttggttactttaattactccatggaagacatggaaaatgtccccactgattcttaaacatttggaatcccagtctgcaactattaatctggaggctatatctattttgttttgct

SEQ ID NO: 253502 - DNA, 120 bp, Artificial Sequence
  ENSG00000124120_12 (sequence is synthesized)
ttttggttggggggtggtgatctggttcttacacatcttggaagcaagaacaatcaggaccaaagtcactttgatcccacttttccaggagaaaaaccacctgtttggccagtgagaact

SEQ ID NO: 253503 - DNA, 120 bp, Artificial Sequence
  ENSG00000124120_13 (sequence is synthesized)
acttgtatgaaataatttggccaaaccttcagtgtgaccaaatgtgagactgggagtttgtgtttttcacaggaaccctaagtatagacctctgctgctcatcaggaaacttactggaga

SEQ ID NO: 253504 - DNA, 120 bp, Artificial Sequence
  ENSG00000124120_14 (sequence is synthesized)
tgaaggccccagctgttgtcaccgggtttggaaagcaccttaactgaatcatgtaagcatcaggacataagcagcactttgtggtcaaatgtggaagccggagacttcaaagcacctctg

SEQ ID NO: 253505 - DNA, 120 bp, Artificial Sequence
  ENSG00000124120_15 (sequence is synthesized)
ggacccactggttgaagtttgcaatagaaacttaagttttcccaaatccataaagccttagccctggttctcaatagaatcagggacctagcaggaaatgattttactcaacctaaaatg

SEQ ID NO: 253506 - DNA, 120 bp, Artificial Sequence
  ENSG00000124120_16 (sequence is synthesized)
ctggatcccaggcccgtgtagctataagaattctggcctggatcccaggtgtacaactatggacaagatatgggcctctactttctcctctataaaatgaggctggatgaaatgtcagct

SEQ ID NO: 253507 - DNA, 120 bp, Artificial Sequence
  ENSG00000124120_17 (sequence is synthesized)
agggccattttggctgctgaggctctgggatttggtttagttactgaatgttagattttctgcctagaaagataactatctagatacaagtggttggatcctgtttttgtttgtggtaca

SEQ ID NO: 253508 - DNA, 120 bp, Artificial Sequence
  ENSG00000124120_18 (sequence is synthesized)
tgtgtctttccaagagagatgtgtcaccaattagccctgcctttaaagaaactattatgtgtattcctgggactcactgacaccaattttctttttatagtgatggttcaattttgaaaa

SEQ ID NO: 253509 - DNA, 120 bp, Artificial Sequence
  ENSG00000124120_19 (sequence is synthesized)
gatggcttttgtgaggccaggttaaggtgaccaggatcttgtatgatgaattccttccatccctgagactctggtactatattgtaaacctggctacagtagttaattacttgagattct

SEQ ID NO: 253510 - DNA, 67 bp, Artificial Sequence
  ENSG00000124120_20 (sequence is synthesized)
ggtctctggaaatgaacacaagggcaggttattcctgggtcacttctgggcccccctgccctcccag

SEQ ID NO: 253511 - DNA, 120 bp, Artificial Sequence
  ENSG00000124120_21 (sequence is synthesized)
gttattcctgggtcacttctgggcccccctgccctcccagccccacttgagtttctctctctggtgtgggtgaaccagtcagcctgaatgttctgcatttcagcactttagaacctccct

SEQ ID NO: 253512 - DNA, 120 bp, Artificial Sequence
  ENSG00000124120_22 (sequence is synthesized)
gtgaagattttagccttagcccaaacatcaaattagacggttcacatgatggtttttgacctatttcctttctaatgtattccacatgatcatggtgttaaatagtgaaaagtactgtgt

SEQ ID NO: 253513 - DNA, 120 bp, Artificial Sequence
  ENSG00000124120_23 (sequence is synthesized)
ctaagctgtttatctctattgcctttttaaatgtctggataagttgttggtggaaattaagttacttaacctcattaataccaattctagagaaagttcttttcaccatggatagtaacc

SEQ ID NO: 253514 - DNA, 120 bp, Artificial Sequence
  ENSG00000124120_24 (sequence is synthesized)
ctggatcctctacggtactggctgagctggaagtgccaaaaagcactcctggctgcttctggttccatctgatgatgatgtgacacacactgctgaaaaggcccaagcagggcaagtggg

SEQ ID NO: 253515 - DNA, 120 bp, Artificial Sequence
  ENSG00000124120_25 (sequence is synthesized)
atggctgaaggagggaaggagggggttcagaacccactggcctggatgggagaactgggtggaggcttccccaagagggaagacagataaacaaaacaaaacaaaaactgggtaaagagg

SEQ ID NO: 253516 - DNA, 120 bp, Artificial Sequence
  ENSG00000124120_26 (sequence is synthesized)
aatgaatcactcagccctgatgtttcaattctacactgcattcctggccagtcgcatttgttttaatgcaggcatggccacagctctcctagagaattatctcaaagaccagaagggacc

SEQ ID NO: 253517 - DNA, 120 bp, Artificial Sequence
  ENSG00000124120_27 (sequence is synthesized)
tggagaggcctatttcttaggtttttccagttggacaaggaaggagtggtttcactcagcttctagaaggagttggagcctaagtttatctgcctccgggagctgcttgctttgttttgg

SEQ ID NO: 253518 - DNA, 120 bp, Artificial Sequence
  ENSG00000124120_28 (sequence is synthesized)
ctccgaagaggtatcagatagttttgacacctcaggaaacttgaaccaagctgtgaaaccaagacctccctgcgtgaaaatcaaggtggtctccttgtggcttcaccaggatgtttgtgt

SEQ ID NO: 253519 - DNA, 120 bp, Artificial Sequence
  ENSG00000124120_29 (sequence is synthesized)
caggctgtctcagcagggtggggaatgaccagccagggagcacagtgagccttactcagcactggggagcgcactggtgaggcaaacccatgaacctcaagaactgggagtatgttcctt

SEQ ID NO: 253520 - DNA, 120 bp, Artificial Sequence
  ENSG00000124120_30 (sequence is synthesized)
cagggagaagttctggcccattgcacaaacacttggaaattaacttttccctaaattcaagatagtgtggtgtcggaaggaaatgggacagtaaattaggagacgcgggctccaccttta

SEQ ID NO: 253521 - DNA, 120 bp, Artificial Sequence
  ENSG00000124120_31 (sequence is synthesized)
ccttactacgtggcctttgatgagctggcttaacatccctgagtgattccatgatagagatctatactccaaactttattcctggtatctagttggcttcactgccacagacactgtact

SEQ ID NO: 253522 - DNA, 120 bp, Artificial Sequence
  ENSG00000124120_32 (sequence is synthesized)
ctctctttttagaagtttttttccttttttttccccctcaattggcttatttagtaaatttaggtctgaatgaattggtacctaaaagcttccaaatctatacatttcagaatatgggaa

SEQ ID NO: 253523 - DNA, 120 bp, Artificial Sequence
  ENSG00000124120_33 (sequence is synthesized)
ttttcttcctcttcttcccccatatcccaacatggaattctggaaaactgtgcctcttcccctgttctgccttcatgggggagagactggatgaaatctacaaaaacagccaaaagtgcc

SEQ ID NO: 253524 - DNA, 120 bp, Artificial Sequence
  ENSG00000124120_34 (sequence is synthesized)
accctggcttcatgtcttgaatttctaacttgctcttggcaaaggtcgctttattttttaatttttttccttgcattttcttttttattctattgctgctgcaaaaattaaggcaaaagt

SEQ ID NO: 253525 - DNA, 120 bp, Artificial Sequence
  ENSG00000124120_35 (sequence is synthesized)
aaattaaggcaaaagtagctttcgatctttcatatttcatcctggtttcacaaggagtcacttatcttaggaggtctgtaagtcaggttacaaggccgggagcggtggctcacacctgta

SEQ ID NO: 253526 - DNA, 68 bp, Artificial Sequence
  ENSG00000124120_36 (sequence is synthesized)
tgggaagctgaagcaggagaatcacttaaacccaggtggcggaggttgcagtgagccgactaaaaatt

SEQ ID NO: 253527 - DNA, 120 bp, Artificial Sequence
  ENSG00000124120_37 (sequence is synthesized)
aaaataaaaattgaaaaatcaggttacaaaacaccatttttcccgaaataagacaataagaggcttttctctgaattcctttatattgagcctttcagaattctccctgggtgggcaatt

SEQ ID NO: 253528 - DNA, 120 bp, Artificial Sequence
  ENSG00000124120_38 (sequence is synthesized)
tctttaaatagtatttgaccctcagatcaatcctgggaatttttttcatttgggtagcaaaagctagagtattgctgtggcgattataatacttttaaaaagttttaccattttaaagtt

SEQ ID NO: 253529 - DNA, 120 bp, Artificial Sequence
  ENSG00000124120_39 (sequence is synthesized)
gccaacatttaattaaggttttcctttgaagcctcctttaatttagggagtaaaatgttagctaaaccaattatatactatatactatacactgtatctcctgtggccatgagaggtgtg

SEQ ID NO: 253530 - DNA, 120 bp, Artificial Sequence
  ENSG00000124120_40 (sequence is synthesized)
gctataccgaacagaaacatgcctactgttcaggaaagatgtcagttctggtaacacctctctgtattgggatctgttaattttgtaaatctaaattcttctgctcttggccaggtgcag

SEQ ID NO: 253531 - DNA, 83 bp, Artificial Sequence
  ENSG00000124120_41 (sequence is synthesized)
ttttgtaaatctaaattcttctgctcttggccaggtgcagtagttcatgccctgtaatcctagaactttgggaggctgaaggg

SEQ ID NO: 253532 - DNA, 71 bp, Artificial Sequence
  ENSG00000124120_42 (sequence is synthesized)
ggttgcagtaagccaagactatgccactgcactcccgcctgggtgacaaagcaatattctgtgtcaaataa

SEQ ID NO: 253533 - DNA, 120 bp, Artificial Sequence
  ENSG00000124120_43 (sequence is synthesized)
ctcccgcctgggtgacaaagcaatattctgtgtcaaataaataaattcattcttctgctctcctgacttagagaaatggtttgcttaaaatgctagtaacaaacatcacagtcaacagga

SEQ ID NO: 253534 - DNA, 120 bp, Artificial Sequence
  ENSG00000124120_44 (sequence is synthesized)
gcttgcttcatgcgaaggatcaatgtgatttgtggatggagatgatagtgatgaaattcctgtttcatggggctgtttttcttttcatctcactgggcagcaggtttagtgaggcagtga

SEQ ID NO: 253535 - DNA, 120 bp, Artificial Sequence
  ENSG00000124120_45 (sequence is synthesized)
gatgctgctgctgtggattcttgtagctatgcctcggcttcttggcatatcaggtaggaacctgttacaagtgaaatacttgaaacctctctgaccaagagcctctgatggagtgggagg

SEQ ID NO: 253536 - DNA, 120 bp, Artificial Sequence
  ENSG00000124120_46 (sequence is synthesized)
tgagctaattctctgaccagcttggggcactgtttcagccactggtcacattccttgcttcaaactgaaattcagtttggctttgagtatagggatacatggtggattcatgtacttcag

SEQ ID NO: 253537 - DNA, 120 bp, Artificial Sequence
  ENSG00000124120_47 (sequence is synthesized)
tgtttgttttgaccaaagtttatttttctagtgcattttctaagtcaaagtggtgaaaatatgtaataattttagtatgcatgactcagtctgaaacaataaaaatctctgaaaaatgtg

SEQ ID NO: 253538 - DNA, 120 bp, Artificial Sequence
  ENSG00000124120_48 (sequence is synthesized)
gagaggccgggcaggccgggcagggagtgcgggtcggttctgcgtgcgctgccggacgaggctcccgccgccgattgacccgcgctccgcccgtagtcgggccgttctgttccaagagat

SEQ ID NO: 253539 - DNA, 120 bp, Artificial Sequence
  ENSG00000124120_49 (sequence is synthesized)
tatagcatgtccctttcttgtgaatttcactgtaagaatttacatgttaaaggctctgaacaggaatgcagttaaggaaactcacttgattatgcttagtggactacgtttctcaaactc

SEQ ID NO: 253540 - DNA, 120 bp, Artificial Sequence
  ENSG00000124120_50 (sequence is synthesized)
atttgcctgctgtggagccctgttttatataacctctaatagcctgagaaatatactttgggcaacactgatctggaaggtctggtatttgccagatctgtccctgtagactcagactgt

SEQ ID NO: 253541 - DNA, 120 bp, Artificial Sequence
  ENSG00000124120_51 (sequence is synthesized)
tttctgctgtaagagcagcagctcttcatatgtttgcctctcttcttttttttttgagatggagtccaggctgtcatccaggctggagtacagtgacacgattttggctcactgcaacct

SEQ ID NO: 253542 - DNA, 76 bp, Artificial Sequence
  ENSG00000124120_52 (sequence is synthesized)
tacagtgagttctccagcctcagcctctccaagtagctgggattatagacacgtgccaccatgcccagctaatttt

SEQ ID NO: 253543 - DNA, 64 bp, Artificial Sequence
  ENSG00000124120_53 (sequence is synthesized)
ctctgtttgcctctcttctaacccagttttgggtcccaggaaagactttccctgaggtccgtct

SEQ ID NO: 253544 - DNA, 120 bp, Artificial Sequence
  ENSG00000124120_54 (sequence is synthesized)
agttttgggtcccaggaaagactttccctgaggtccgtcttcctagttaggccccacgtggactgtcattgaggaggccataaggatcagatcagactgatgttggggctgaaagtgaag

SEQ ID NO: 253545 - DNA, 80 bp, Artificial Sequence
  ENSG00000124126_0 (sequence is synthesized)
cgtccgggatggggcgcctggacgcctgagttgccgctcggcgcgacggaaggagccggcgccgcgcggccgcgctagaa

SEQ ID NO: 253546 - DNA, 80 bp, Artificial Sequence
  ENSG00000124126_1 (sequence is synthesized)
ctcggcgcgacggaaggagccggcgccgcgcggccgcgctagaatggaggcgcccagcggcagcgagcccggcggcgacg

SEQ ID NO: 253547 - DNA, 120 bp, Artificial Sequence
  ENSG00000124126_2 (sequence is synthesized)
cggcccgtgcgcggccgcccgggagtccgagcgccagctgcgcctccgcctctgcgtcctcaacgagatcttgggcaccgagagggactacgtgggcaccttgcgcttcttgcagtcggc

SEQ ID NO: 253548 - DNA, 120 bp, Artificial Sequence
  ENSG00000124126_3 (sequence is synthesized)
attcctgcatcgcatccggcagaacgtggccgactcagtggagaagggcctcacggaggagaatgtcaaggtcctgttctcgaacatcgaagacatcctggaagttcataaggatttctt

SEQ ID NO: 253549 - DNA, 120 bp, Artificial Sequence
  ENSG00000124126_4 (sequence is synthesized)
ggccgccttggagtattgtttacacccggagccgcagtctcagcatgaacttgggaatgttttcttaaaattcaaggacaagttctgcgtgtacgaggagtattgcagcaaccatgagaa

SEQ ID NO: 253550 - DNA, 120 bp, Artificial Sequence
  ENSG00000124126_5 (sequence is synthesized)
agccctgaggctgctggtggagctgaacaagatccctaccgtgcgcgccttccttttgagctgcatgcttctgggaggccggaagaccacggacatccctttggaaggctacctgttgtc

SEQ ID NO: 253551 - DNA, 120 bp, Artificial Sequence
  ENSG00000124126_6 (sequence is synthesized)
tccgatccagaggatctgcaagtacccgctcctccttaaggagctggccaagaggactcccggcaagcacccagaccaccccgcggtccagagtgccctgcaggccatgaagaccgtttg

SEQ ID NO: 253552 - DNA, 120 bp, Artificial Sequence
  ENSG00000124126_7 (sequence is synthesized)
ctccaacatcaatgagaccaagcggcagatggagaagctggaagccctggagcagctgcagtcccacatcgaaggctgggagggttccaacctcacagacatctgcactcagctcctcct

SEQ ID NO: 253553 - DNA, 120 bp, Artificial Sequence
  ENSG00000124126_8 (sequence is synthesized)
gcaagggactttgttaaagatctctgcgggcaacatccaggaaagggccttcttcctcttcgacaaccttctcgtctactgcaagcggaaatccagggtcaccgggagcaagaagtccac

SEQ ID NO: 253554 - DNA, 120 bp, Artificial Sequence
  ENSG00000124126_9 (sequence is synthesized)
caagaggaccaaatccatcaacggctccctctacatcttcaggggtcgaatcaacactgaagtcatggaggtggagaatgtggaagatgggacagcggattaccatagcaacggctatac

SEQ ID NO: 253555 - DNA, 120 bp, Artificial Sequence
  ENSG00000124126_10 (sequence is synthesized)
cgtcaccaacggctggaagatccacaacacggccaagaataagtggtttgtctgcatggccaagacggcagaggagaagcagaagtggctggatgccatcatccgcgagcgggagcagcg

SEQ ID NO: 253556 - DNA, 120 bp, Artificial Sequence
  ENSG00000124126_11 (sequence is synthesized)
cgagagcctgaagctgggcatggagcgtgatgcctacgtcatgattgcggagaagggggagaagctgtaccacatgatgatgaacaagaaggtgaacctcatcaaggaccgccggagaaa

SEQ ID NO: 253557 - DNA, 120 bp, Artificial Sequence
  ENSG00000124126_12 (sequence is synthesized)
gctgagcactgtccccaagtgctttcttggcaatgagttcgttgcctggctcctagaaattggtgaaatcagcaagacggaagaaggagtcaacttgggccaagccctgttggagaatgg

SEQ ID NO: 253558 - DNA, 120 bp, Artificial Sequence
  ENSG00000124126_13 (sequence is synthesized)
catcatccaccatgtttccgacaagcaccagttcaagaatgagcaggtgatgtatcgcttccgctacgacgatggcacctacaaggcccgaagtgagctggaggacatcatgtccaaggg

SEQ ID NO: 253559 - DNA, 120 bp, Artificial Sequence
  ENSG00000124126_14 (sequence is synthesized)
tgtgaggctttactgccgtcttcacagcctctacaccccggtgatcaaagaccgtgattaccacctgaagacctacaagtcagtgcttcccgggagcaagctggtggactggctgctggc

SEQ ID NO: 253560 - DNA, 120 bp, Artificial Sequence
  ENSG00000124126_15 (sequence is synthesized)
tcagggagactgccagactcgggaggaggcagtggcgctcggcgtgggtctgtgcaacaatggcttcatgcaccacgtgctggagaagagcgagttcagggatgagtcccagtacttccg

SEQ ID NO: 253561 - DNA, 120 bp, Artificial Sequence
  ENSG00000124126_16 (sequence is synthesized)
ctttcatgctgacgaggagatggaggggaccagcagcaagaacaaacagcttcgcaacgacttcaagctggtggagaacattctggccaagcgcctgctgatcctgccccaggaggagga

SEQ ID NO: 253562 - DNA, 120 bp, Artificial Sequence
  ENSG00000124126_17 (sequence is synthesized)
ctatggctttgacatcgaggagaagaacaaggctgtggtggtgaagtccgtccagaggggctcgctggctgaggtggctggcctgcaggtggggaggaagatctactccatcaatgagga

SEQ ID NO: 253563 - DNA, 120 bp, Artificial Sequence
  ENSG00000124126_18 (sequence is synthesized)
cctggtgttcctgcggccgttttcagaggtggagtccatcctcaaccagtccttctgctcccgccgccctctgcgcctcctggtggccacgaaggccaaagagatcatcaaaatccccga

SEQ ID NO: 253564 - DNA, 120 bp, Artificial Sequence
  ENSG00000124126_19 (sequence is synthesized)
ccagccggacacactgtgcttccagattcgtggagctgccccaccgtacgtctatgctgtggggagaggctctgaggccatggctgcagggctctgtgctggtcagtgcattctgaaggt

SEQ ID NO: 253565 - DNA, 120 bp, Artificial Sequence
  ENSG00000124126_20 (sequence is synthesized)
caatggcagcaacgtgatgaacgatggtgcccctgaggtcctggagcacttccaggcattccggagtcggcgcgaagaggccctgggcctgtaccagtggatctaccacacccatgagga

SEQ ID NO: 253566 - DNA, 120 bp, Artificial Sequence
  ENSG00000124126_21 (sequence is synthesized)
tgcccaggaagcacgagccagtcaggaggcctccactgaggaccccagtggcgagcaggcccaggaggaagaccaggctgattcagccttcccactgctgtccctgggtccccggctgag

SEQ ID NO: 253567 - DNA, 120 bp, Artificial Sequence
  ENSG00000124126_22 (sequence is synthesized)
cctgtgtgaggacagccccatggtcaccctgactgtggacaacgtgcacctggaacacggcgtggtgtatgagtatgtgagcacggcaggcgtcaggtgccatgtgctggagaagatcgt

SEQ ID NO: 253568 - DNA, 120 bp, Artificial Sequence
  ENSG00000124126_23 (sequence is synthesized)
ggagccccgcggctgcttcggcctcaccgccaagatcctcgaggcctttgctgccaatgacagcgtcttcgtggagaactgcaggcggctcatggccctgagcagcgccatcgtgaccat

SEQ ID NO: 253569 - DNA, 120 bp, Artificial Sequence
  ENSG00000124126_24 (sequence is synthesized)
gccccactttgagttccgcaacatctgtgacaccaagctggagagcattggccagaggattgcctgctaccaggagtttgcagcccaactgaagagcagggtcagcccacccttcaaaca

SEQ ID NO: 253570 - DNA, 120 bp, Artificial Sequence
  ENSG00000124126_25 (sequence is synthesized)
agcccccctggagccccacccgctgtgtggcctggacttctgccccaccaattgccacatcaacctcatggaagtgtcctaccccaagaccaccccctcagtgggcaggtccttcagcat

SEQ ID NO: 253571 - DNA, 120 bp, Artificial Sequence
  ENSG00000124126_26 (sequence is synthesized)
ccgctttggacgcaaaccctccctcatcggccttgacccggagcaaggccacctgaaccccatgtcgtacacccagcactgcatcaccaccatggctgctccctcctggaagtgcttgcc

SEQ ID NO: 253572 - DNA, 120 bp, Artificial Sequence
  ENSG00000124126_27 (sequence is synthesized)
tgctgcagagggtgatccccaaggccagggtctccatgatggcagcttcgggccagccagtgggacccttggtcaggaagaccggggcctcagcttcctactcaagcaggaggaccgtga

SEQ ID NO: 253573 - DNA, 120 bp, Artificial Sequence
  ENSG00000124126_28 (sequence is synthesized)
agctggatgtggccctgaaggagatgaagcaatatgtcacccagatcaacaggctgctgtccaccatcacagagcccacctcgggtgggtcctgcgacgcatccttggctgaggaggcct

SEQ ID NO: 253574 - DNA, 120 bp, Artificial Sequence
  ENSG00000124126_29 (sequence is synthesized)
cctccctgcccctggtcagtgaagagagcgagatggacaggagtgaccatgggggcatcaagaaggtgtgcttcaaggtggccgaggaggaccaggaggactcaggccacgacaccatga

SEQ ID NO: 253575 - DNA, 120 bp, Artificial Sequence
  ENSG00000124126_30 (sequence is synthesized)
gttatcgcgactcctacagcgagtgtaacagcaatcgagactcggtcctgtcctacaccagcgtgagaagtaacagctcctacttgggcagcgacgagatggggtctggagatgagctgc

SEQ ID NO: 253576 - DNA, 120 bp, Artificial Sequence
  ENSG00000124126_31 (sequence is synthesized)
cctgtgacatgcggatcccatctgacaagcaggacaagcttcatggctgcctggagcacctctttaaccaggtggactccatcaatgctctcctcaaggggccagtcatgagccgggctt

SEQ ID NO: 253577 - DNA, 120 bp, Artificial Sequence
  ENSG00000124126_32 (sequence is synthesized)
tcgaagagaccaagcatttccctatgaaccacagcttacaagagtttaaacagaaagaagagtgtacaatccgtggccggagcctgatccagattagcatccaggaggacccctggaacc

SEQ ID NO: 253578 - DNA, 120 bp, Artificial Sequence
  ENSG00000124126_33 (sequence is synthesized)
tccccaactccatcaagaccctggtggacaacattcagagatatgtggaagatgggaagaaccagctgctcctggccttgctgaagtgcacagacacggagctgcagctgcgcagagacg

SEQ ID NO: 253579 - DNA, 120 bp, Artificial Sequence
  ENSG00000124126_34 (sequence is synthesized)
cgatcttctgccaggccctggtggccgccgtgtgcaccttctccaagcagctgctggcggccctgggctaccgctacaacaacaatggcgagtacgaggagagcagccgcgacgccagcc

SEQ ID NO: 253580 - DNA, 120 bp, Artificial Sequence
  ENSG00000124126_35 (sequence is synthesized)
gcaagtggctggagcaggtggcggccacgggcgtcctgctgcactgccagtccctgctctcgccagccacagtgaaggaggaacggaccatgctggaggacatctgggtgacgctgtcag

SEQ ID NO: 253581 - DNA, 120 bp, Artificial Sequence
  ENSG00000124126_36 (sequence is synthesized)
agctggacaatgtcaccttctcctttaagcagctggacgagaactatgtggccaacaccaacgtcttctaccacattgagggcagccggcaggcgctgaaggtcatcttctacctcgaca

SEQ ID NO: 253582 - DNA, 120 bp, Artificial Sequence
  ENSG00000124126_37 (sequence is synthesized)
gctaccacttctccaagctgccctcccgcctggagggtggggccagcctgaggctgcacacagcgctgttcacgaaagtgctggagaacgtggaggggctgccttctccaggcagccagg

SEQ ID NO: 253583 - DNA, 120 bp, Artificial Sequence
  ENSG00000124126_38 (sequence is synthesized)
ccgcggaggatttgcagcaggacatcaacgcgcagtccctggagaaagttcagcagtattaccgcaaactcagggcattttacctggagcggtctaacctgcccacggatgccagcacca

SEQ ID NO: 253584 - DNA, 120 bp, Artificial Sequence
  ENSG00000124126_39 (sequence is synthesized)
cggcggtaaagatagaccagctgatccgccccatcaatgccctggatgagctctgccgcctcatgaagtcctttgtccacccaaagcctggtgctgctgggagtgtgggcgccggcctca

SEQ ID NO: 253585 - DNA, 120 bp, Artificial Sequence
  ENSG00000124126_40 (sequence is synthesized)
tccccatctcctcggagctctgctaccgcctgggggcctgccagatggtcatgtgtggcacaggcatgcagaggagcaccctgagcgtgtccctggagcaggcggccatcttggcacgga

SEQ ID NO: 253586 - DNA, 120 bp, Artificial Sequence
  ENSG00000124126_41 (sequence is synthesized)
gccacgggttgctgcccaagtgcatcatgcaggccacggacatcatgcggaagcagggcccaagggtggagattctggccaaaaacctgcgagtcaaggaccagatgccccagggtgctc

SEQ ID NO: 253587 - DNA, 120 bp, Artificial Sequence
  ENSG00000124126_42 (sequence is synthesized)
cgcgcctctaccgcctctgccagccgccggtggatggggacctctgaacacccaaatgccccacgctgggccgcggcctctggagctgggatttgggaggacacagcaggcagcgctggc

SEQ ID NO: 253588 - DNA, 120 bp, Artificial Sequence
  ENSG00000124126_43 (sequence is synthesized)
cttctccagggatggcccaaggcttccgcagccgcccgttccgggacctgcccagcgtcctccctgcctccttccgggacaagcctggccaccctcgctgtgatgacgagctggctgatt

SEQ ID NO: 253589 - DNA, 120 bp, Artificial Sequence
  ENSG00000124126_44 (sequence is synthesized)
ggccctgggccggcccattcttcacacgcctgccagaagctggaggggtgctggagacccatagagctgatgggagcagctggtgcctggccttcggctcctgcgtccccagaacccaag

SEQ ID NO: 253590 - DNA, 120 bp, Artificial Sequence
  ENSG00000124126_45 (sequence is synthesized)
ggaacgtcatggaggccacatggggccacccggctccctcgggatggctccgcctgcacttttgaaaccccggtttccttcaacgtccacattccaggtgaccacacgtgtctcctcctc

SEQ ID NO: 253591 - DNA, 120 bp, Artificial Sequence
  ENSG00000124126_46 (sequence is synthesized)
ctcatcttagcttccaggttcaccctaaccctgtactaacctgcttggtggacttggaaaagacttggctctgtcgggaaaggagagacggggcctccatcacgcctgttaccagaggat

SEQ ID NO: 253592 - DNA, 120 bp, Artificial Sequence
  ENSG00000124126_47 (sequence is synthesized)
ccccgagagccacaccagctctggacatcaccgcccctggaactggggccaccagccctgggcacgagatttgctctgactttatttatatggcatgaaatctctggtttattttgggat

SEQ ID NO: 253593 - DNA, 120 bp, Artificial Sequence
  ENSG00000124126_48 (sequence is synthesized)
tttttgttgttggtgttgtcaaagtttgttttttctaaagttgtgtgattatatatttgacattttacatttcaaagaaaggtatgttgtctaacaggggaccaacagaaggtagtattg

SEQ ID NO: 253594 - DNA, 120 bp, Artificial Sequence
  ENSG00000124126_49 (sequence is synthesized)
acaactgttcctgcttctactaaaaaaaaaagagcacaaaagaaaaactaaattattgaaaaattaaaaaatgtcattgtttcctgtttgttaatattagggttgtaaggtgtcgttttg

SEQ ID NO: 253595 - DNA, 120 bp, Artificial Sequence
  ENSG00000124126_50 (sequence is synthesized)
aggtatcgactgtgattccttcccccaccctccattctccagcggttggccggtgttagaactcgctctctttgagtgactggctacaagggcctgagaggtggccagccagggttggag

SEQ ID NO: 253596 - DNA, 120 bp, Artificial Sequence
  ENSG00000124126_51 (sequence is synthesized)
ctggaggggatggagccccacctgaggtgccgtgtcacacgggttagagggtcactgggaaacaccgggcggtggcttctgtgatttattttcttgatggtaacttctcagagcagggcg

SEQ ID NO: 253597 - DNA, 120 bp, Artificial Sequence
  ENSG00000124126_52 (sequence is synthesized)
attgggacatcaccagccagagcacaggaagccaccctgcctgctggggaggagggacccacacaagccccctcggcagtttgtccccccagcttcggtatgccttcagggaaaggtcac

SEQ ID NO: 253598 - DNA, 120 bp, Artificial Sequence
  ENSG00000124126_53 (sequence is synthesized)
agctggggaggaagcggggggacgcctgtcacccctggcaggtggtgagttcaggtgggggctccctgctgcccccaggcctgggagcttgaagccctcccggcatctggcatccgagcc

SEQ ID NO: 253599 - DNA, 120 bp, Artificial Sequence
  ENSG00000124126_54 (sequence is synthesized)
tcccgccctccagggtgcgcttccctctcttgccgcagcatacacgagggcaggcagtggccttgtcactgtatcttgcatcagagacaaaggaggacccgctttagccctgctgcggga

SEQ ID NO: 253600 - DNA, 120 bp, Artificial Sequence
  ENSG00000124126_55 (sequence is synthesized)
aatgggggagggcccagggccagcgcattgtgcactggtttactttaaaatgtacagattcttctcgttaaattcttgatagattttttattattattaaaagtcagtttataatacaaa

SEQ ID NO: 253601 - DNA, 120 bp, Artificial Sequence
  ENSG00000124126_56 (sequence is synthesized)
gaagatgggacaggtagcccctcccccagccttgcctgagccctgcctgagccctgcctgctccctggcactctctctgtttcatttaaatatatttttttcttttatcatgagatgtaa

SEQ ID NO: 253602 - DNA, 120 bp, Artificial Sequence
  ENSG00000124126_57 (sequence is synthesized)
tacctacagaaaagtgcccagagcatagatgcatgaagcgaacatctgggtggttagcattcaagttaagaaataaaacactgcaccccaaatccttcctccttgcaatgccttcttccc

SEQ ID NO: 253603 - DNA, 120 bp, Artificial Sequence
  ENSG00000124126_58 (sequence is synthesized)
cctagaagtaaccactgtctgaattttgtgatgatcattttcttgctttttaaagacatttttacctcctaagcatttatgactaaacattttaattaaaatttctatttttgagcctta

SEQ ID NO: 253604 - DNA, 120 bp, Artificial Sequence
  ENSG00000124126_59 (sequence is synthesized)
gaaacagtagcagtgctttacaatcttgtcatgcgttagtgcctgttgtccattttgcagatgaagaaactgaggctcagagaggtcaggtgatttgccctgtggctcacagccaggacc

SEQ ID NO: 253605 - DNA, 120 bp, Artificial Sequence
  ENSG00000124126_60 (sequence is synthesized)
gaccacgggggccgggccaaggccaccaagcacaccggctcccaaccgcctgcccgcccccgacatctcccctcccagtgctggagaacgtggaggggctgccttctccaggcagccagg

SEQ ID NO: 253606 - DNA, 120 bp, Artificial Sequence
  ENSG00000124134_0 (sequence is synthesized)
ggcagcgatcgatgcggccttcagccgcgggggactaggcaaggaagaaggaaggagagggcagcggggccgcctgcagcaggaggctcggcggggccggcggggcagaggcgagaccga

SEQ ID NO: 253607 - DNA, 120 bp, Artificial Sequence
  ENSG00000124134_1 (sequence is synthesized)
gtatagccagcggctcccagcctcggtggctttgggacagacacgcgaggcgcccgggaggtgccaccacaggtggagatccaagtggaggtgggagcggagctacatcacacgtttatt

SEQ ID NO: 253608 - DNA, 120 bp, Artificial Sequence
  ENSG00000124134_2 (sequence is synthesized)
gtgcattgattatgtgccagggaccatgctgccgataaacaccttgcatcatttaattctctgagcctctcctggaaagtatgatgctacccggttccacagacagggaaacaagcccag

SEQ ID NO: 253609 - DNA, 120 bp, Artificial Sequence
  ENSG00000124134_3 (sequence is synthesized)
agagggcgacgaatgcactcaaggacagcagctagtgatgctgatgctgctggtccggggaacacactatgagaacctccggtctaaagtggtgctgccaacacccctaggagggaggag

SEQ ID NO: 253610 - DNA, 120 bp, Artificial Sequence
  ENSG00000124134_4 (sequence is synthesized)
cactgaaacctttgtgagcgagttcccgggccccgacaccgggatccgctggcggcgaagcgacgaggcgctgcgcgtgaacgtgggtggcgtgcggcggcagctgagcgcgcgcgccct

SEQ ID NO: 253611 - DNA, 120 bp, Artificial Sequence
  ENSG00000124134_5 (sequence is synthesized)
ggcgcgcttcccgggcacgcggctgggccgcctgcaggccgcggcgtcggaggagcaggcgcggcgcctgtgcgacgactacgacgaggcggcgcgcgaattctacttcgaccggcaccc

SEQ ID NO: 253612 - DNA, 120 bp, Artificial Sequence
  ENSG00000124134_6 (sequence is synthesized)
gggcttcttcctgagcctgctgcacttctaccgcactggccacctgcacgtgctcgacgagctgtgcgtcttcgcctttggccaggaggccgactactggggcctaggcgagaacgcgct

SEQ ID NO: 253613 - DNA, 120 bp, Artificial Sequence
  ENSG00000124134_7 (sequence is synthesized)
tgccgcgtgctgccgcgcgcgctacctggagaggcggctgacccagccgcacgcctgggacgaggacagcgacacgccgagcagcgtggacccgtgccccgacgagatctccgacgtgca

SEQ ID NO: 253614 - DNA, 120 bp, Artificial Sequence
  ENSG00000124134_8 (sequence is synthesized)
gcgagaactggcgcgctatggcgcggcgcgctgtggccgcctgcgccgccgcctctggctgaccatggagaacccgggctactcgctgccgagcaagctcttcagctgcgtctccatcag

SEQ ID NO: 253615 - DNA, 120 bp, Artificial Sequence
  ENSG00000124134_9 (sequence is synthesized)
tcagcgtggtgctcgcctccatcgccgccatgtgcatccacagcctgcccgagtaccaggcccgcgaggcggcggccgccgtggctgcggtggccgcgggccgcagcccggaaggcgtgc

SEQ ID NO: 253616 - DNA, 120 bp, Artificial Sequence
  ENSG00000124134_10 (sequence is synthesized)
cgacccggtgctgcgacgcctcgagtacttctgcatcgcctggttcagcttcgaggtgtcgtcgcgcctcctgctggcgcccagtacgcgcaacttcttctgccacccgctcaacctcat

SEQ ID NO: 253617 - DNA, 120 bp, Artificial Sequence
  ENSG00000124134_11 (sequence is synthesized)
cgacattgtgtctgtgctgcccttctatctcacgctgctggctggtgtggcactgggcgaccagggcggcaaggagttcggccacctgggcaaggtggtgcaggtgttccgcctcatgcg

SEQ ID NO: 253618 - DNA, 120 bp, Artificial Sequence
  ENSG00000124134_12 (sequence is synthesized)
catcttccgcgtactcaagttggcgcgccattccaccgggctgcgctcgctgggagccacgctcaagcacagctaccgtgaggtgggcatcttgctgctgtacctggctgtgggtgtgtc

SEQ ID NO: 253619 - DNA, 120 bp, Artificial Sequence
  ENSG00000124134_13 (sequence is synthesized)
agtgttctctggtgtggcctacacagctgaaaaggaggaggacgtgggctttaacaccatcccagcctgctggtggtggggcacagtgagcatgaccaccgtgggctatggggatgtggt

SEQ ID NO: 253620 - DNA, 120 bp, Artificial Sequence
  ENSG00000124134_14 (sequence is synthesized)
gccagtgacggtggctggcaagctggcagcctcaggctgcatcctagggggcatcctggtggtagcactccccatcaccatcatcttcaacaagttctcccacttctaccggcgccagaa

SEQ ID NO: 253621 - DNA, 120 bp, Artificial Sequence
  ENSG00000124134_15 (sequence is synthesized)
ggctctggaggcagccgtgcgcaacagcaaccaccaagagtttgaggacttgctgagcagcattgatggggtgtcggaggcatctctggagacatcccgagaaacctctcaggagggaca

SEQ ID NO: 253622 - DNA, 120 bp, Artificial Sequence
  ENSG00000124134_16 (sequence is synthesized)
gtctgcagatctagagagccaggcccccagtgagcctccacaccctcagatgtattaaaaccagggatccgtgaccccctgccatgcccctacagtagagattcctcccctgctaaagtt

SEQ ID NO: 253623 - DNA, 120 bp, Artificial Sequence
  ENSG00000124134_17 (sequence is synthesized)
cttcatggtagtgagcctcccaggatcactcatgctgtcctgagaaatgagattcaaaagctgcattccttcctccaaaggcccaggacaggacagtgctaccctagattctgtgagatt

SEQ ID NO: 253624 - DNA, 120 bp, Artificial Sequence
  ENSG00000124134_18 (sequence is synthesized)
tgagcacctcctgtacatgaaccaggtcatgtttggccttgtgttggagaaagagaattatccccacttcacagatgaggaaaccaaggctaagagatgagcgatgcctctcccagatgt

SEQ ID NO: 253625 - DNA, 120 bp, Artificial Sequence
  ENSG00000124134_19 (sequence is synthesized)
cacaattagaagtggcagagtcaggtttggaatctgggcttgttggtgtgcctggagcaatgctccatcaactccatctttcttctgccctcatgaagtttgcgtgtgttttttggtgat

SEQ ID NO: 253626 - DNA, 120 bp, Artificial Sequence
  ENSG00000124134_20 (sequence is synthesized)
tcatggatccccagagttgatccacaagataagaaatccctttcagagccagggaagggtccagacaggagatttggatataggagctctggatctcagctgtggttcctttctaggagc

SEQ ID NO: 253627 - DNA, 120 bp, Artificial Sequence
  ENSG00000124134_21 (sequence is synthesized)
atccaacaggagtcagcaatcaaagatgagtcctggagggaaggaggatgagtcctgggaggaagtaccatagcattgtacttgcctctttagctggtatgcaagatttgctaagcaata

SEQ ID NO: 253628 - DNA, 120 bp, Artificial Sequence
  ENSG00000124134_22 (sequence is synthesized)
atcttccgaccttcctcccagggctgatgtgagagaaagaaaatctgaagggcccctggcctgagatctagacaacctagctgcgccaagacctgctgtgtaaagtggtccaatccctgc

SEQ ID NO: 253629 - DNA, 120 bp, Artificial Sequence
  ENSG00000124134_23 (sequence is synthesized)
ccccaagtccagattccagcccctctgtcaaatggtcagaatctgtgacccagagggcaatgaaagccaaggagagcagaggggtctctaacttaaagccagctcagctctgaaatgttc

SEQ ID NO: 253630 - DNA, 120 bp, Artificial Sequence
  ENSG00000124134_24 (sequence is synthesized)
agagggctgacatatatgaatactggcttctaagaccctcccccaacagtctgaccttggcagttcctttctgcccatcacacagacgtccagccctacattgtccagccctacctagag

SEQ ID NO: 253631 - DNA, 120 bp, Artificial Sequence
  ENSG00000124134_25 (sequence is synthesized)
tacccatccaggcccatgtgtgagagtcctctcccttctggccagctccagccccctcacccttgctgggggcatatctctcatacccacctgctgaatcttctcttcacttgctgagaa

SEQ ID NO: 253632 - DNA, 120 bp, Artificial Sequence
  ENSG00000124134_26 (sequence is synthesized)
agtcagaggaggggatccagtagccctttccacatactgtggctacagcacccagcactgtgctgttgttgtctgactgtggctatctctgtcccatcaccctgagcctcaagatggaag

SEQ ID NO: 253633 - DNA, 120 bp, Artificial Sequence
  ENSG00000124134_27 (sequence is synthesized)
acattgtctgcttgaactctgggcttggtgcagagtaggtatttggtaaatgttgaatagatcaaccaattcctacagcccactgggtgccaagctcagagggggaaaaaaagatagcca

SEQ ID NO: 253634 - DNA, 120 bp, Artificial Sequence
  ENSG00000124134_28 (sequence is synthesized)
gagagagacctggccctcaaaaaggtgtgaacaagactgaaaaggaggtccgttcagctccgcctgccctgtccctgcttggttcttgaagtttttacaatatattccttgtaggttctt

SEQ ID NO: 253635 - DNA, 120 bp, Artificial Sequence
  ENSG00000124134_29 (sequence is synthesized)
cactcactcactcaacaaatacccgttggaagagtcttaaactggggcttcatgtgtggcctgcagtcatgtttcggcttagtccaacagtgtttttattatattttaagaatctgaatg

SEQ ID NO: 253636 - DNA, 120 bp, Artificial Sequence
  ENSG00000124134_30 (sequence is synthesized)
cctttgcgtgaggcatgcactctcaggttccccatagtgtctcccccgctgccacccacaaacagacacacatgccgttgtgttatgcccagccactctgatatactggcttctgactta

SEQ ID NO: 253637 - DNA, 120 bp, Artificial Sequence
  ENSG00000124134_31 (sequence is synthesized)
tgggctgcttactagtctcaagagatacagtggtggaaaaatatatccctatactcatgaagcttaccgactagtagggaagatagactctaatgcaataatcacataaatatagcgagc

SEQ ID NO: 253638 - DNA, 120 bp, Artificial Sequence
  ENSG00000124134_32 (sequence is synthesized)
tctactaagtacaggtgtgtataatgtatcagggaccatggcccgagaaagtgagaaggctttcctgagcaagtgacaatctaacctgccatccaaatgataaattgctaattaagcaaa

SEQ ID NO: 253639 - DNA, 120 bp, Artificial Sequence
  ENSG00000124134_33 (sequence is synthesized)
tgaggttccaggggggagtactccaagcagagagaatggcatgtgtgaaggtgtgtgtcatacacagggcctagtacatagtgggccccctacatacgcatggattctgggtctccagat

SEQ ID NO: 253640 - DNA, 120 bp, Artificial Sequence
  ENSG00000124134_34 (sequence is synthesized)
tggaacagaggatggagctaagcagcaaagggcctcccttgaattcaccacacacataccagcccttctgcacactctgctccttacatctaggcccagctgaacccaggttaggggcag

SEQ ID NO: 253641 - DNA, 120 bp, Artificial Sequence
  ENSG00000124134_35 (sequence is synthesized)
atcagaagggctgcgtgtagcacccttatggtcttgcagaacacaccaagaaacccgacggcttccatattttctgaccctacaaacaggtccctaatactgatgtggagaaagctcaag

SEQ ID NO: 253642 - DNA, 120 bp, Artificial Sequence
  ENSG00000124134_36 (sequence is synthesized)
agggaatcatctggcctgagcctaccatgaggctgtttgtggtcctggcagaaaagcaacaactcgctccccttcccatgtatcagtgaaaaccattatgcaaataaagagctgggcccc

SEQ ID NO: 253643 - DNA, 120 bp, Artificial Sequence
  ENSG00000124134_37 (sequence is synthesized)
tgtatggagatggctccctgacatgctgtctgagtgattggagagggtgggcaatatgtggaatgacttggaatccacattctcaggctccagtcctggatttggcacaaactttgtggt

SEQ ID NO: 253644 - DNA, 120 bp, Artificial Sequence
  ENSG00000124134_38 (sequence is synthesized)
tgtgccagccagaacaggttgcaagtgacaggaattcagttggaacaaacttggtcaaaaagggtaatttataaaataattaaagtgatgaatgactgttaacaattagagtttgagggt

SEQ ID NO: 253645 - DNA, 120 bp, Artificial Sequence
  ENSG00000124134_39 (sequence is synthesized)
ataagcaacaaactgacatcaagcaaaaaatgaatttattggaagatatattagtttccagcagctgctgtaacaaattcaaacaaacttgatggcttaaaacagtagaagtgtattctc

SEQ ID NO: 253646 - DNA, 120 bp, Artificial Sequence
  ENSG00000124134_40 (sequence is synthesized)
tgacagttctggaggccagaaatccaaaatcaagatgtcagcagggccaccctccctctggagactccagggggaaaccctctccttttctcttctagtttgtggtggctgccaccattc

SEQ ID NO: 253647 - DNA, 120 bp, Artificial Sequence
  ENSG00000124134_41 (sequence is synthesized)
ttggctttccttggctgtggctgcatcactcaagtctctgcctctgatctcacttcagtgtctgtgtatgtcaagtcttccagtgcctctgtcttacaaggacacttttgatgacattta

SEQ ID NO: 253648 - DNA, 120 bp, Artificial Sequence
  ENSG00000124134_42 (sequence is synthesized)
ggcccaccaggataatccaagatgacctcatctcaggatccttaacttaaccacatttgcaaaaagaccctttcccaaataaggtaatagttacgggttccagagattaaaatatggaca

SEQ ID NO: 253649 - DNA, 120 bp, Artificial Sequence
  ENSG00000124134_43 (sequence is synthesized)
ggtgtttggggccaccatctggcccactacagaagggtatctgtgaaattcacccgaccaaaggaagagctgactgacgaggcctcaggaaatacaggaatgaggggagctctagggacc

SEQ ID NO: 253650 - DNA, 120 bp, Artificial Sequence
  ENSG00000124134_44 (sequence is synthesized)
tcagtagcaagactcatgaaccttctgtttaagacactgctacccacatgatctgcctccagtcaacttccttccctgtatcatcctgctcacagttccaatcccaggagagagtctgat

SEQ ID NO: 253651 - DNA, 120 bp, Artificial Sequence
  ENSG00000124134_45 (sequence is synthesized)
ttcacttgagtcatatgcctctctcttgggagggatggagggcaaggtaccgtattagtatttgcggcagttggaggaaaggtacttacccaaataaaagaccacctattgtcaccaaaa

SEQ ID NO: 253652 - DNA, 120 bp, Artificial Sequence
  ENSG00000124140_0 (sequence is synthesized)
gtgtgcgagtgtgtgtgcgccgggcgggcgggcactgcagcttcttcctccgtggagcggagagcgagacagagctacagcgaacgagagagcggcgaaggcgggtagaggggcgcgggc

SEQ ID NO: 253653 - DNA, 120 bp, Artificial Sequence
  ENSG00000124140_1 (sequence is synthesized)
gaggcggcgcagccatccccggaccaggggccgcgccgccaccatgctaaacaacctgacggactgcgaggacggcgatgggggagccaacccgggtgatggcaaccccaaggaaagcag

SEQ ID NO: 253654 - DNA, 120 bp, Artificial Sequence
  ENSG00000124140_2 (sequence is synthesized)
tcccttcatcaacagcaccgacacagagaagggaaaggagtatgatggcaagaacatggccttgtttgaggaggagatggacaccagccctatggtgtcctccttgctcagtggcctggc

SEQ ID NO: 253655 - DNA, 120 bp, Artificial Sequence
  ENSG00000124140_3 (sequence is synthesized)
caactacaccaacctgccccagggaagtagggagcatgaagaggcagaaaacaatgagggtggaaaaaagaagccggtgcaggccccacgcatgggcaccttcatgggcgtgtacctgcc

SEQ ID NO: 253656 - DNA, 120 bp, Artificial Sequence
  ENSG00000124140_4 (sequence is synthesized)
gtgcctgcagaacatctttggcgtcatcctcttcctgcggctcacctgggtggtgggcattgcaggcatcatggagtccttctgcatggtgttcatctgctgctcctgtacgatgctcac

SEQ ID NO: 253657 - DNA, 120 bp, Artificial Sequence
  ENSG00000124140_5 (sequence is synthesized)
ggccatctccatgagtgcaattgcaacgaatggtgttgtgcctgctggtggctcctactacatgatttccaggtctctgggcccagagtttgggggtgccgtgggcctctgcttctacct

SEQ ID NO: 253658 - DNA, 120 bp, Artificial Sequence
  ENSG00000124140_6 (sequence is synthesized)
gggcactacctttgcaggagccatgtacatcctgggcaccatcgaaatcctgctggcttacctcttcccagccatggccatcttcaaggcagaagatgccagtggggaggcagcagccat

SEQ ID NO: 253659 - DNA, 120 bp, Artificial Sequence
  ENSG00000124140_7 (sequence is synthesized)
gctgaacaacatgcgtgtttacggcacctgtgtgctcacctgcatggccactgtggtgtttgtgggtgtcaagtatgtcaacaagtttgcccttgtcttcctgggttgtgtcatcctctc

SEQ ID NO: 253660 - DNA, 120 bp, Artificial Sequence
  ENSG00000124140_8 (sequence is synthesized)
catcctggccatctatgctggggtcatcaagtctgccttcgacccacccaacttcccgatctgcctcctgggtaaccgcacgctgtctcgccatggctttgatgtctgtgccaagctggc

SEQ ID NO: 253661 - DNA, 120 bp, Artificial Sequence
  ENSG00000124140_9 (sequence is synthesized)
ttgggaaggaaatgagacggtgaccacacggctatggggccttttctgctcctctcgcttcctcaacgccacctgtgatgaatacttcacccgaaacaatgtcacagagatccagggcat

SEQ ID NO: 253662 - DNA, 120 bp, Artificial Sequence
  ENSG00000124140_10 (sequence is synthesized)
ccctggtgctgccagtggcctcatcaaagagaacctctggagctcctacctgaccaagggcgtgattgtggagaggagtgggatgacctcggtgggcctggccgatggcactcctatcga

SEQ ID NO: 253663 - DNA, 120 bp, Artificial Sequence
  ENSG00000124140_11 (sequence is synthesized)
catggaccacccttatgtcttcagtgatatgacctcctacttcaccctgctggttggcatctacttcccctcagtcacagggatcatggctggttctaaccgctctggggacctgaggga

SEQ ID NO: 253664 - DNA, 120 bp, Artificial Sequence
  ENSG00000124140_12 (sequence is synthesized)
tgcccagaagtcaatccccactggcaccatcctggccatcgccaccacctctgctgtctacatcagctccgttgttctgtttggggcctgcattgagggggtcgtcctgcgggacaagtt

SEQ ID NO: 253665 - DNA, 120 bp, Artificial Sequence
  ENSG00000124140_13 (sequence is synthesized)
tggcgaagctgtgaatggcaacctcgtggtgggcactctggcctggccatctccatgggtaattgtcatcggatccttcttctccacctgtggggctgggctgcagagcctcacgggggc

SEQ ID NO: 253666 - DNA, 120 bp, Artificial Sequence
  ENSG00000124140_14 (sequence is synthesized)
cccacgcctgctgcaggccatctcgagggatggcattgtgcccttcctgcaggtctttggccatggcaaggccaatggagagccgacctgggccctgctcctgactgcctgcatctgcga

SEQ ID NO: 253667 - DNA, 120 bp, Artificial Sequence
  ENSG00000124140_15 (sequence is synthesized)
gattggcatcctcattgcatccctcgacgaggtggcccccatcctctctatgttcttcctgatgtgctacatgtttgtgaatctggcctgtgcagtgcagacgctgctgaggacacccaa

SEQ ID NO: 253668 - DNA, 120 bp, Artificial Sequence
  ENSG00000124140_16 (sequence is synthesized)
ctggaggccacgctttcgatattaccactggaccctctccttcctgggcatgagcctctgcctggccctcatgttcatctgctcctggtattatgcactggtagccatgctcattgctgg

SEQ ID NO: 253669 - DNA, 120 bp, Artificial Sequence
  ENSG00000124140_17 (sequence is synthesized)
actcatctacaagtacattgagtaccgtggggcagagaaggagtggggcgatgggatacgaggtctgtctctcagtgcggctcgctatgccctcttacgcctggaggaagggcccccaca

SEQ ID NO: 253670 - DNA, 120 bp, Artificial Sequence
  ENSG00000124140_18 (sequence is synthesized)
caccaagaactggaggccacagctgctggtgctggtgcgtgtggaccaagaccagaatgtggtgcacccccagctgctctcactgacctcccagctgaaggcggggaagggcctgaccat

SEQ ID NO: 253671 - DNA, 120 bp, Artificial Sequence
  ENSG00000124140_19 (sequence is synthesized)
cgtgggctctgtccttgagggcacctttctggaaaatcatccacaggcccagcgggcagaagagtctatcaggcgcctgatggaggcagagaaggtgaagggcttctgccaggtggtgat

SEQ ID NO: 253672 - DNA, 120 bp, Artificial Sequence
  ENSG00000124140_20 (sequence is synthesized)
ctcctccaacttgcgtgatggcgtgtcccatctgatccagtccgggggcctcggggggctgcagcacaacactgtgcttgttggctggccccgcaactggcgccagaaggaagatcatca

SEQ ID NO: 253673 - DNA, 120 bp, Artificial Sequence
  ENSG00000124140_21 (sequence is synthesized)
gacgtggaggaacttcattgagctggtccgggaaaccacagctggccacttagccctgctggtcaccaagaacgtttccatgtttcctgggaaccctgagcgcttctctgagggcagcat

SEQ ID NO: 253674 - DNA, 120 bp, Artificial Sequence
  ENSG00000124140_22 (sequence is synthesized)
cgacgtttggtggattgtgcacgatggaggcatgctcatgctgctgcccttcctgctgcggcaccacaaggtctggcggaagtgcaagatgcgtatcttcactgtggcccagatggatga

SEQ ID NO: 253675 - DNA, 120 bp, Artificial Sequence
  ENSG00000124140_23 (sequence is synthesized)
caatagcatccagatgaagaaggatctgaccacatttctgtatcatttacgcatcactgcggaggtcgaggtggtggagatgcatgagagcgacatctcagcttacacctatgagaagac

SEQ ID NO: 253676 - DNA, 120 bp, Artificial Sequence
  ENSG00000124140_24 (sequence is synthesized)
gttggtgatggagcagcgttcccagatcctcaaacagatgcatttaaccaagaatgagcgggagcgggagatccagagtatcacagatgagtcacgaggctcaatccggagaaagaatcc

SEQ ID NO: 253677 - DNA, 120 bp, Artificial Sequence
  ENSG00000124140_25 (sequence is synthesized)
ccagaggaggaggtgcagctgatccacgatcagagtgctcccagctgccccagcagctccccgtccccaggggaggagcctgagggggaaggggagacagatccggagaaggtgcatctc

SEQ ID NO: 253678 - DNA, 120 bp, Artificial Sequence
  ENSG00000124140_26 (sequence is synthesized)
acctggaccaaggacaagtcggtggcagagaagaataagggccccagtcctgtctcctctgagggcatcaaggacttcttcagcatgaagccggagtgggagaacttgaaccagtccaac

SEQ ID NO: 253679 - DNA, 120 bp, Artificial Sequence
  ENSG00000124140_27 (sequence is synthesized)
gtgcggcgcatgcacacggccgtgcggctgaacgaggtcatcgtgaagaaatcccgggacgccaagcttgttttgctcaacatgcctgggcctccccgcaaccgcaatggtgatgaaaac

SEQ ID NO: 253680 - DNA, 120 bp, Artificial Sequence
  ENSG00000124140_28 (sequence is synthesized)
tacatggagtttctcgaggtcctcacagagcacctggaccgggtgatgctggtccgcggcggcggccgcgaggtcatcaccatctactcctgagaaccaggacctgccacccgggcccga

SEQ ID NO: 253681 - DNA, 120 bp, Artificial Sequence
  ENSG00000124140_29 (sequence is synthesized)
gcgcgcccggcccgcggctccggagccctcgccgcgccccccgccgctgtcaccgtttacatacagaccctgtgcccgtgtcctggccccttaccccgctgcctgaagcccggaggccac

SEQ ID NO: 253682 - DNA, 120 bp, Artificial Sequence
  ENSG00000124140_30 (sequence is synthesized)
gcctgttggggctgattcggagagggcgccccgccgcgcagagaccagagctcctcagtgccagtttggcccctgggtcttcgctgccctttttctaagcccggcctcgtctcgccggag

SEQ ID NO: 253683 - DNA, 120 bp, Artificial Sequence
  ENSG00000124140_31 (sequence is synthesized)
gagacgctgcaataaaggttgggagaaggcgcggaaaggagaggagctggggccttggggacccccaggtagtccatgcggcccattcctccccttcccactcccgccgcggtcctcgct

SEQ ID NO: 253684 - DNA, 120 bp, Artificial Sequence
  ENSG00000124140_32 (sequence is synthesized)
ctgctccctggctcccggcggcccggaggcccgcggggtgggaaggccgcgcttgccgtctccgccgccccttctcgccgagccgtggggcgcgggcggccgagcctatacatagtgtac

SEQ ID NO: 253685 - DNA, 120 bp, Artificial Sequence
  ENSG00000124140_33 (sequence is synthesized)
cctatacatagtgtacaggagacatcgcgtgtatttttaacgtccccatatttatgtgactagaagcgcaacagacttctcgccatagtcgagctctcccgctgggggcactgcggggag

SEQ ID NO: 253686 - DNA, 120 bp, Artificial Sequence
  ENSG00000124140_34 (sequence is synthesized)
gcgaggcctcgggaagctgaattttccttgacgtccaagagtttgagagcgaaagtgctttaggcccaggcgggggtcgtggcctcgttccctcgacacctccgtcctgctctcgcctct

SEQ ID NO: 253687 - DNA, 120 bp, Artificial Sequence
  ENSG00000124140_35 (sequence is synthesized)
tcgccctttccgcgcgcccttggcttcccaccctcctctccagtccttttccgagatgaggtgagacaagggtccaacttttcctggattcgcctcccagcggacgtgagcttccactgc

SEQ ID NO: 253688 - DNA, 120 bp, Artificial Sequence
  ENSG00000124140_36 (sequence is synthesized)
ggctgcagagacgcgagcaacctcttctcatcggctcttatgcaagttggggccaggataggggaggggtgctcctcaagaggaagaaaccgagaggcccgcgccccaccgaggaagccc

SEQ ID NO: 253689 - DNA, 120 bp, Artificial Sequence
  ENSG00000124140_37 (sequence is synthesized)
cgccccggtgccttcgctggggagcaggcgtctctcctcagtcggcttgtcgcctgctccccgtatcccatggctcctcgccaaagactgaaattgtggagctggagggcgccccctccc

SEQ ID NO: 253690 - DNA, 120 bp, Artificial Sequence
  ENSG00000124140_38 (sequence is synthesized)
cggagtttcctccctgggacaagtgagggaggagggggccgattctggtttaggggccggacccactgagaggccccagagccgcccgtgatgttcctcccccgtccccatctggcagct

SEQ ID NO: 253691 - DNA, 120 bp, Artificial Sequence
  ENSG00000124140_39 (sequence is synthesized)
cctgtctcgcctgagggacccagccgccttctccgtgctctggggccgggcctcgctgcttagcagcggcctctagctccgtctcccggggacctgggcctgagggagggctggagtcgc

SEQ ID NO: 253692 - DNA, 120 bp, Artificial Sequence
  ENSG00000124140_40 (sequence is synthesized)
acgcgctttgtccttagcgcctgtctgctctcctctaactaggacccagggcctttggcttccccagctcatccttggcccttccgctccaccagcctggtctgaggcgtgctctgtcct

SEQ ID NO: 253693 - DNA, 120 bp, Artificial Sequence
  ENSG00000124140_41 (sequence is synthesized)
tagagaaggcgcggtggccgggttcccttcccctagggcacattactaagggggtcaggcactgcatgctcgttccagcaccatctgggactgggtacagtacctccagccccagggccc

SEQ ID NO: 253694 - DNA, 120 bp, Artificial Sequence
  ENSG00000124140_42 (sequence is synthesized)
tgacctgcgcacctagcttgacatctcacgcacctcccagagctggcgccactgagtaatccggacctcaccacctcttttcctttgagcccaaggcagagctggagctggcgccaccca

SEQ ID NO: 253695 - DNA, 120 bp, Artificial Sequence
  ENSG00000124140_43 (sequence is synthesized)
gacagcgtcaggtgtggctggggtaggtttggaggtctgccagttacaccaagtcccctctgagattcgatcaggggactggatagattctttcaggtactcaatcaggaagctggaggt

SEQ ID NO: 253696 - DNA, 120 bp, Artificial Sequence
  ENSG00000124140_44 (sequence is synthesized)
gttagacaccagccccctgcatccttcagtagacctccctctgaacaccacagccaggtcctgccttctgggggcctgaatattccagagctgatgtgatgggctgtgcagaagggggct

SEQ ID NO: 253697 - DNA, 120 bp, Artificial Sequence
  ENSG00000124140_45 (sequence is synthesized)
gtatcaacatcaattagggaaccaaagttgcactatctgggcccagattgtctggttggcaagagcaaagtttccgttgatgaaacagacatcccacaacaaaaacccaagttttctgtg

SEQ ID NO: 253698 - DNA, 120 bp, Artificial Sequence
  ENSG00000124140_46 (sequence is synthesized)
ctacatgtgcaatatttgttatgaatgttatcacaagtcattcatcaagttatctttataatcactgtagttagatgtttcatgtccattcaagtgacttttattctgagtgcaatattt

SEQ ID NO: 253699 - DNA, 120 bp, Artificial Sequence
  ENSG00000124140_47 (sequence is synthesized)
caatagccttgtagtgataactagtgttgcttttgttttagatgatctatgtgcagggcaatgcaatgaagttgaaaacccttgtaaataggagaggttgcaaaccaaatcaagagtatt

SEQ ID NO: 253700 - DNA, 120 bp, Artificial Sequence
  ENSG00000124140_48 (sequence is synthesized)
tattactattactgctattattattaggcctgcctttaattttcagtgtaagtgttcagtatgccgcatcctgcctcagtattgatcttgtgttctttgtgccaatatgaaaaggagagg

SEQ ID NO: 253701 - DNA, 120 bp, Artificial Sequence
  ENSG00000124140_49 (sequence is synthesized)
gttggttctttcctttattgttgaatgctcccatttaatgctttatggcttttactgtgttacttttttagactcccgtctgcacaaaatgcaataaaaataattttattatacccttca

SEQ ID NO: 253702 - DNA, 120 bp, Artificial Sequence
  ENSG00000124140_50 (sequence is synthesized)
gcccagagtttgggggtgccgtgggcctctgcttctacctgggcactacctttgcaggagccatgtacatcctgggcaccatcgaaatcctgctgagtctcactctgttgcccaggctgg

SEQ ID NO: 253703 - DNA, 120 bp, Artificial Sequence
  ENSG00000124140_51 (sequence is synthesized)
tcaagtctgccttcgacccacccaacttcccgtgagtgctgctgctctgagcccaaggaatcgtcctcctacctccctggccctgtttcagagtctctgccaaactccccctccctgccc

SEQ ID NO: 253704 - DNA, 120 bp, Artificial Sequence
  ENSG00000124140_52 (sequence is synthesized)
ctcagaatctcagagtggtgtgggttgggagtagcttcccttgggagggaaaatctctcttagtttgggggcaatctcttcagagtgaggtaacttttctggaggagggaacaatttacc

SEQ ID NO: 253705 - DNA, 120 bp, Artificial Sequence
  ENSG00000124140_53 (sequence is synthesized)
ttgtaagagtcaacttcttgctggtagggtggacttaggaagaattaagtgggaatgagttccaaagcaatgaatgctgtctgtggtagggaaacctttcctgggtggggacaacctcct

SEQ ID NO: 253706 - DNA, 120 bp, Artificial Sequence
  ENSG00000124140_54 (sequence is synthesized)
ggaatgggacaatctcctagtgttggacaactcctccaggatgggaaaagacacagaagtctacagggtccagggactcagatccaagtccactccatccactgctcagaggtggagggc

SEQ ID NO: 253707 - DNA, 120 bp, Artificial Sequence
  ENSG00000124140_55 (sequence is synthesized)
ggcccccgagaccgctgtccacggtgctgaaacacagcattgcactaatgcggtgcttctccaccttggctgcttattagaatcacttggggagcttaagaaaaaaaaaaaaaagccaat

SEQ ID NO: 253708 - DNA, 120 bp, Artificial Sequence
  ENSG00000124140_56 (sequence is synthesized)
catcagctgctctctccctccctccctagggagcaataccctcgtctccacccctcccttgagtctaccttcttccttgagcctccccatccctccttctccctcctgggatttactccc

SEQ ID NO: 253709 - DNA, 120 bp, Artificial Sequence
  ENSG00000124140_57 (sequence is synthesized)
tctgctccctgccctctcctcatcctaccattcttacccctgttctcctcacctgttcctcctcctttcccatctcatcccaacctgaatagtttcgtgctccttgtccccatctcttcc

SEQ ID NO: 253710 - DNA, 120 bp, Artificial Sequence
  ENSG00000124140_58 (sequence is synthesized)
tctgcccttcgccacccagctcactccacttgctcccccagcctcctagcactgacaccctccctccataggaggagatggacaccagccctatggtgtcctccttgctcagtggcctgg

SEQ ID NO: 253711 - DNA, 120 bp, Artificial Sequence
  ENSG00000124140_59 (sequence is synthesized)
ctgtgctgggaccaccctcgggggagggcaagagggagggcagctgaacttgctgccttacctgctggtgcaggaagggtggggagggggaggactgaaccgtggggattctcctttatc

SEQ ID NO: 253712 - DNA, 120 bp, Artificial Sequence
  ENSG00000124140_60 (sequence is synthesized)
ggttgggggcgtcttcctcgcgggccctgtgcagggtcttgtaatggaagttacacgcagggcacagagtataggggaggggaaagatccttctggccttcggtggagaagtagcatcct

SEQ ID NO: 253713 - DNA, 120 bp, Artificial Sequence
  ENSG00000124140_61 (sequence is synthesized)
agggggcactcatcaggggtcctctccctggctctgaggccctcgggtctggaaggaacaaggcgaatcggcttgtagtggccccagcgaggggaggaggaggaggaggaggaggaggag

SEQ ID NO: 253714 - DNA, 120 bp, Artificial Sequence
  ENSG00000124140_62 (sequence is synthesized)
ggaggaggaggaagaggaggaggaagaggaggaggaggagaaggaggaggagaagcctccccagaccgccaggggtcgctgccgagccgcagcaaatccaactgatccccacgtcttggc

SEQ ID NO: 253715 - DNA, 120 bp, Artificial Sequence
  ENSG00000124140_63 (sequence is synthesized)
agtttttgtgcaagggggccactagtcgggctctgcccgcccctcatcttctcttctctctccctcccgctctccccccaaaaccccgccagtggctcacgcctcctgcatacgggatga

SEQ ID NO: 253716 - DNA, 120 bp, Artificial Sequence
  ENSG00000124140_64 (sequence is synthesized)
ggttcacggtcacctcgctgccccccgcagggcccgccagaagccctgacccagagtcccgccggcattcggtcgcagacccccgccacctcccgggggaagacgtcaaaggagctaata

SEQ ID NO: 253717 - DNA, 120 bp, Artificial Sequence
  ENSG00000124140_65 (sequence is synthesized)
ctgctgaggggcatggatatgactgcatccttgtctcttctatggaggcaagacgacttttataagttctatcaatgaagagagtcctaaactggagtaaagcaaactggatgctagacc

SEQ ID NO: 253718 - DNA, 120 bp, Artificial Sequence
  ENSG00000124140_66 (sequence is synthesized)
ggcctggttttcagtatcaggaaattagagaattattttatcaaggaaaaaacaatggaacatttggggctctgcctcccctgtcacccttacagaacttagtcctgtggcaggcacaca

SEQ ID NO: 253719 - DNA, 120 bp, Artificial Sequence
  ENSG00000124140_67 (sequence is synthesized)
aacatggcatggtcactgaccagtggactgaggactgacattggaccatagtgctaggcagagccttgctgtgccaaggttaacccttttgttgccagatgaggtctggggttctggaga

SEQ ID NO: 253720 - DNA, 120 bp, Artificial Sequence
  ENSG00000124140_68 (sequence is synthesized)
ggaggtggggcaggcagatcagtggtgcagtagctatttggtctcaaatcatagcaatattttaacaactggtacagttccagaaagtgcatcctggctgaacatcatctctggtgatag

SEQ ID NO: 253721 - DNA, 120 bp, Artificial Sequence
  ENSG00000124140_69 (sequence is synthesized)
ctccctcctagagcctggttgcagccacttgtgcgatcccggaccttgccgcggccgcctggctcctttccgcgccatgagccgcaggttcacggtcacctcgctgccccccgcagggcc

SEQ ID NO: 253722 - DNA, 120 bp, Artificial Sequence
  ENSG00000124140_70 (sequence is synthesized)
ctcacatggccacgaccacatcctctccactggcctccctgcctccagtccttccctagccctcctccacagaagccccccatcacttgcaaaataaaggccaaagccttaagtctgtca

SEQ ID NO: 253723 - DNA, 120 bp, Artificial Sequence
  ENSG00000124143_0 (sequence is synthesized)
tgccagcccatggccgagcctgccctcctccccgccgcccagatggagaggctggccccagggcccctagcctcaccgtgtcctcggatcccgcgggcccgcattgccaggcgctgcgcc

SEQ ID NO: 253724 - DNA, 120 bp, Artificial Sequence
  ENSG00000124143_1 (sequence is synthesized)
cagcgctgggccgacctgggctgcagctctggcccctcctcaggccgaatggatcagcttccccagaagaatctcctgcgactacaccctgctggctctgctggctgttccactggagtg

SEQ ID NO: 253725 - DNA, 120 bp, Artificial Sequence
  ENSG00000124143_2 (sequence is synthesized)
gagagctccagcatggatggcttttggatggaggtggaacagatccaacagagagatgagctgagggaagaggacagtggcgggaatgaaggccagcttccagaggaaggggaagctgaa

SEQ ID NO: 253726 - DNA, 120 bp, Artificial Sequence
  ENSG00000124143_3 (sequence is synthesized)
tcccagtggctgcaggacacaggcctgtcgggcctccttggtggcctgggcttggatggtgatcaccaggagctcctgtccaccctgacacagacccaggtggccgctgtgtgccgccgg

SEQ ID NO: 253727 - DNA, 120 bp, Artificial Sequence
  ENSG00000124143_4 (sequence is synthesized)
ctggacatctatgctcgctcagtgcgaagacaacacaagacacctgtcagagatgtcagggatgtctttggggtcttcaattcagggaaaatgtcgtcagagaatggcgactccggtatg

SEQ ID NO: 253728 - DNA, 120 bp, Artificial Sequence
  ENSG00000124143_5 (sequence is synthesized)
aagggggcccagctcagttccggggcctctaagtttcctccagcagcagagcctggggggctgcaggagcaggctgggagggaagaagccttcaacatggactctgcctactcagaacaa

SEQ ID NO: 253729 - DNA, 120 bp, Artificial Sequence
  ENSG00000124143_6 (sequence is synthesized)
gctgcggtgctcctgcagaggagcaggccatcccggggaggcacctctgcctggggcaagtgttccctgccgaagtttaccgtccccaaaggcagacttggcgtgacgaggataggagac

SEQ ID NO: 253730 - DNA, 120 bp, Artificial Sequence
  ENSG00000124143_7 (sequence is synthesized)
ttgtccctgcaggatatgaggaaggtaccttctctggccctcatagagctgaccgcgctctgtgacatcctcggcttggacctgaagaggagcaaggcggggaagtggaaagcggcagaa

SEQ ID NO: 253731 - DNA, 120 bp, Artificial Sequence
  ENSG00000124143_8 (sequence is synthesized)
actcgcctctttggtgtgccccttgacagcctgctagaagctgaccacaaagtcctccccagcacacaggtcccgctggtccttcaagccctgctgtcctgtttggaaaagagaggactg

SEQ ID NO: 253732 - DNA, 120 bp, Artificial Sequence
  ENSG00000124143_9 (sequence is synthesized)
gacatggaaggcattctcagggtgcccggatcccaggccagggtcaaggggctggaacagaaactggagagagacttctatgctggcctttttagctgggacgaggttcatcacaatgac

SEQ ID NO: 253733 - DNA, 120 bp, Artificial Sequence
  ENSG00000124143_10 (sequence is synthesized)
gcctctgatttgctcaaaaggttcatccggaagctgccgacacctttgctcacggctgagtacctcccggccttcgccgtggtgcctaacatccccaacctgaagcagcgcctgcaggtt

SEQ ID NO: 253734 - DNA, 120 bp, Artificial Sequence
  ENSG00000124143_11 (sequence is synthesized)
gcccgggaacagcacaacaagatgactctgaggaatgtttccaccgtgatggcccctaacctctttctgcaccaagggcggccccccaagctccccaaaggcaaggagaagcagctggca

SEQ ID NO: 253735 - DNA, 120 bp, Artificial Sequence
  ENSG00000124143_12 (sequence is synthesized)
gaaggggcagccgaggtggtgcagataatggtgcactaccaggatctgctgtggacggtcgcctctttcctggtcgcccaggtgcgaaaactgaacgacagtagcagcaggcgcccccag

SEQ ID NO: 253736 - DNA, 120 bp, Artificial Sequence
  ENSG00000124143_13 (sequence is synthesized)
ctctgcgacgcaggcctcaagacttggctgcggaggatgcacgcagacagggacaaggcgggggacggcctcgaggcgactcccaaggtggcaaagatccaggtggtctggcctatcaag

SEQ ID NO: 253737 - DNA, 120 bp, Artificial Sequence
  ENSG00000124143_14 (sequence is synthesized)
gaccccttgaaggtgcctctcacccccagcaccaaagtggcccacgtcctgaggcagttcacagagcacctcagccctggttccaagggtcaagaagacagtgaggacatggacagcctc

SEQ ID NO: 253738 - DNA, 120 bp, Artificial Sequence
  ENSG00000124143_15 (sequence is synthesized)
cttctacaccataggtccatggagtcagccaacatcctcctctatgaagttggagggaatatcaatgagcatcgcctggacccagatgcctacctcttagatctgtaccgtgccaacccg

SEQ ID NO: 253739 - DNA, 120 bp, Artificial Sequence
  ENSG00000124143_16 (sequence is synthesized)
catggtgagtgggtccttaaacagaaccccacctaaaccctgcgagtctcaggagcagcctggatgcctcctcctctcccctgctggctctgtgtccatgtacccagcatgagaacaaag

SEQ ID NO: 253740 - DNA, 120 bp, Artificial Sequence
  ENSG00000124143_17 (sequence is synthesized)
ctattccaggggagggtctgagttttattccaaggcttccttttctgaaatgcctctcagacccctcagaaatagactcaggggtggtgctctctccactcagaggggatgaggggctag

SEQ ID NO: 253741 - DNA, 120 bp, Artificial Sequence
  ENSG00000124143_18 (sequence is synthesized)
ggcctcagggaggggaggccaacactgtagccatgatcagccctggaagaactggacagaggaagaacttcccttcacagctctcatgttttaaccgtgcacacaatgccctcactcccc

SEQ ID NO: 253742 - DNA, 120 bp, Artificial Sequence
  ENSG00000124143_19 (sequence is synthesized)
tccaccctccagccctccagagagttgcttcctacaccaagcttgctgtatgacgccaccacttggggcgcttggatctccatgggcttctgtctgtggcttccagactggaggaaaatt

SEQ ID NO: 253743 - DNA, 120 bp, Artificial Sequence
  ENSG00000124143_20 (sequence is synthesized)
aaaaatgcagtacctttatcaagaggtagttggggtcttttccccccaggcaaaattgtttcgaaagtggccctacaatgtgtagtagcagcagcaccagagacaaaaccaggagagctc

SEQ ID NO: 253744 - DNA, 120 bp, Artificial Sequence
  ENSG00000124143_21 (sequence is synthesized)
tgtgaccttggacaagccccttgccctctcagaatcctttcaggatgaggggctagggcctcagggagaggaagccaagattgtagccatgaccagccccgggagaaatggacagaggaa

SEQ ID NO: 253745 - DNA, 120 bp, Artificial Sequence
  ENSG00000124143_22 (sequence is synthesized)
gactttgcttcacagctctcatgctttacatgttgatttgtacaatcttgtcattttgtaatatgatataatatgtaaacgtaattgtttaaacagtaaaggcacaacaagttcaatgtc

SEQ ID NO: 253746 - DNA, 120 bp, Artificial Sequence
  ENSG00000124143_23 (sequence is synthesized)
aacccacaaccaccgggggcgggagggcaggaagagaactcagaatggggaggcatggagtaatgatacccattgctgaagggtgggggcattgcagggacagcctctctgggaatcctc

SEQ ID NO: 253747 - DNA, 120 bp, Artificial Sequence
  ENSG00000124143_24 (sequence is synthesized)
tcatctcctacagtcccaggtctcacccttcctcttctcctctgccctgggtctgtatcctcaggccaggtgaggcttcgcttatttgttcacttaacaatgagtttactgagcatttaa

SEQ ID NO: 253748 - DNA, 120 bp, Artificial Sequence
  ENSG00000124145_0 (sequence is synthesized)
actcgccgcagcctgcgcgccttctccagtccgcggtgccatggcccccgcccgtctgttcgcgctgctgctgttcttcgtaggcggagtcgccgagtcgatccgagagactgaggtcat

SEQ ID NO: 253749 - DNA, 120 bp, Artificial Sequence
  ENSG00000124145_1 (sequence is synthesized)
cgacccccaggacctcctagaaggccgatacttctccggagccctaccagacgatgaggatgtagtggggcccgggcaggaatctgatgactttgagctgtctggctctggagatctgga

SEQ ID NO: 253750 - DNA, 120 bp, Artificial Sequence
  ENSG00000124145_2 (sequence is synthesized)
tgacttggaagactccatgatcggccctgaagttgtccatcccttggtgcctctagataaccatatccctgagagggcagggtctgggagccaagtccccaccgaacccaagaaactaga

SEQ ID NO: 253751 - DNA, 120 bp, Artificial Sequence
  ENSG00000124145_3 (sequence is synthesized)
ggagaatgaggttatccccaagagaatctcacccgttgaagagagtgaggatgtgtccaacaaggtgtcaatgtccagcactgtgcagggcagcaacatctttgagagaacggaggtcct

SEQ ID NO: 253752 - DNA, 120 bp, Artificial Sequence
  ENSG00000124145_4 (sequence is synthesized)
ggcagctctgattgtgggtggcatcgtgggcatcctctttgccgtcttcctgatcctactgctcatgtaccgtatgaagaagaaggatgaaggcagctatgacctgggcaagaaacccat

SEQ ID NO: 253753 - DNA, 120 bp, Artificial Sequence
  ENSG00000124145_5 (sequence is synthesized)
ctacaagaaagcccccaccaatgagttctacgcgtgaagcttgcttgtgggcactggcttggactttagcggggagggaagccaggggattttgaagggtggacattagggtagggtgag

SEQ ID NO: 253754 - DNA, 120 bp, Artificial Sequence
  ENSG00000124145_6 (sequence is synthesized)
gtcaacctaatactgacttgtcagtatctccagctctgattacctttgaagtgttcagaagagacattgtcttctactgttctgccaggttcttcttgagctttgggcctcagttgccct

SEQ ID NO: 253755 - DNA, 120 bp, Artificial Sequence
  ENSG00000124145_7 (sequence is synthesized)
ggcagaaaaatggattcaacttggcctttctgaaggcaagactgggattggatcacttcttaaacttccagttaagaatctaggtccgccctcaagcccatactgaccatgcctcatcca

SEQ ID NO: 253756 - DNA, 120 bp, Artificial Sequence
  ENSG00000124145_8 (sequence is synthesized)
gagctcctctgaagccagggggctaacggatgttgtgtggagtcctggctggaggtcctcccccagtggccttcctcccttcctttcacagccggtctctctgccaggaaatgggggaag

SEQ ID NO: 253757 - DNA, 120 bp, Artificial Sequence
  ENSG00000124145_9 (sequence is synthesized)
gaactagaaccacctgcaccttgagatgtttctgtaaatgggtacttgtgatcacactacgggaatctctgtggtatatacctggggccattctaggctctttcaagtgacttttggaaa

SEQ ID NO: 253758 - DNA, 120 bp, Artificial Sequence
  ENSG00000124145_10 (sequence is synthesized)
gtttgttcgtttttttaactgttcattcctttgtgcagagtgtatatctctgcctgggcaagagtgtggaggtgccgaggtgtcttcattctctcgcacatttccacagcacctgctaag

SEQ ID NO: 253759 - DNA, 120 bp, Artificial Sequence
  ENSG00000124145_11 (sequence is synthesized)
cacatttccacagcacctgctaagtttgtatttaatggtttttgtttttgtttttgtttgtttcttgaaaatgagagaagagccggagagatgatttttattaatttttttttttttttt

SEQ ID NO: 253760 - DNA, 120 bp, Artificial Sequence
  ENSG00000124145_12 (sequence is synthesized)
gatagggcctcccttcccctcttctttctttgttctctttcattaaaccccttccccagttttttttttatactttaaaccccgctcctcatggccttggccctttctgaagctgcttcc

SEQ ID NO: 253761 - DNA, 120 bp, Artificial Sequence
  ENSG00000124145_13 (sequence is synthesized)
tcttataaaatagcttttgccgaaacatagtttttttttagcagatcccaaaatataatgaaggggatggtgggatatttgtgtctgtgttcttataatatattattattcttccttggt

SEQ ID NO: 253762 - DNA, 120 bp, Artificial Sequence
  ENSG00000124145_14 (sequence is synthesized)
tctagaaaaatagataaatatatttttttcaggaaatagtgtggtgtttccagtttgatgttgctgggtggttgagtgagtgaattttcatgtggctgggtgggtttttgcctttttctc

SEQ ID NO: 253763 - DNA, 120 bp, Artificial Sequence
  ENSG00000124145_15 (sequence is synthesized)
ttgccctgttcctggtgccttctgatggggctggaatagttgaggtggatggttctaccctttctgccttctgtttgggacccagctggtgttctttggtttgctttcttcaggctctag

SEQ ID NO: 253764 - DNA, 120 bp, Artificial Sequence
  ENSG00000124145_16 (sequence is synthesized)
ggctgtgctatccaatacagtaaccacatgcggctgtttaaagttaagccaattaaaatcacataagattaaaaattccttcctcagttgcactaaccacgtttctagaggcgtcactgt

SEQ ID NO: 253765 - DNA, 120 bp, Artificial Sequence
  ENSG00000124145_17 (sequence is synthesized)
atgtagttcatggctactgtactgacagcgagagcatgtccatctgttggacagcactattctagagaactaaactggcttaacgagtcacagcctcagctgtgctgggacgacccttgt

SEQ ID NO: 253766 - DNA, 120 bp, Artificial Sequence
  ENSG00000124145_18 (sequence is synthesized)
ctccctgggtaggggggggggaatgggggagggctgatgaggccccagctggggcctgttgtctgggaccctccctctcctgagaggggaggcctggtggcttagcctgggcaggtcgtg

SEQ ID NO: 253767 - DNA, 120 bp, Artificial Sequence
  ENSG00000124145_19 (sequence is synthesized)
tctcctcctgaccccagtggctgcggtgaggggaaccaccctcccttgctgcaccagtggccattagctcccgtcaccactgcaacccagggtcccagctggctgggtcctcttctgccc

SEQ ID NO: 253768 - DNA, 120 bp, Artificial Sequence
  ENSG00000124145_20 (sequence is synthesized)
ccagtgcccttccccttgggctgtgttggagtgagcacctcctctgtaggcacctctcacactgttgtctgttactgattttttttgataaaaagataataaaacctggtactttctaaa

SEQ ID NO: 253769 - DNA, 120 bp, Artificial Sequence
  ENSG00000124151_0 (sequence is synthesized)
agctgctgctgtctcagccgctccacagcgacggcagcggctgcggcttagtcggtggcggccggcggcggctgcgggctgagcggcgagtttccgatttaaagctgagctgcgaggaaa

SEQ ID NO: 253770 - DNA, 120 bp, Artificial Sequence
  ENSG00000124151_1 (sequence is synthesized)
atggcggcgggaggatcaaaatacttgctggatggtggactcagagaccaataaaaataaactgcttgaacatcctttgactggttagccagttgctgatgtatattcaagatgagtgga

SEQ ID NO: 253771 - DNA, 120 bp, Artificial Sequence
  ENSG00000124151_2 (sequence is synthesized)
ttaggagaaaacttggatccactggccagtgattcacgaaaacgcaaattgccatgtgatactccaggacaaggtcttacctgcagtggtgaaaaacggagacgggagcaggaaagtaaa

SEQ ID NO: 253772 - DNA, 120 bp, Artificial Sequence
  ENSG00000124151_3 (sequence is synthesized)
tatattgaagaattggctgagctgatatctgccaatcttagtgatattgacaatttcaatgtcaaaccagataaatgtgcgattttaaaggaaacagtaagacagatacgtcaaataaaa

SEQ ID NO: 253773 - DNA, 120 bp, Artificial Sequence
  ENSG00000124151_4 (sequence is synthesized)
gagcaaggaaaaactatttccaatgatgatgatgttcaaaaagccgatgtatcttctacagggcagggagttattgataaagactccttaggaccgcttttacttcaggcattggatggt

SEQ ID NO: 253774 - DNA, 120 bp, Artificial Sequence
  ENSG00000124151_5 (sequence is synthesized)
ttcctatttgtggtgaatcgagacggaaacattgtatttgtatcagaaaatgtcacacaatacctgcaatataagcaagaggacctggttaacacaagtgtttacaatatcttacatgaa

SEQ ID NO: 253775 - DNA, 120 bp, Artificial Sequence
  ENSG00000124151_6 (sequence is synthesized)
gaagacagaaaggattttcttaagaatttaccaaaatctacagttaatggagtttcctggacaaatgagacccaaagacaaaaaagccatacatttaattgccgtatgttgatgaaaaca

SEQ ID NO: 253776 - DNA, 120 bp, Artificial Sequence
  ENSG00000124151_7 (sequence is synthesized)
ccacatgatattctggaagacataaacgccagtcctgaaatgcgccagagatatgaaacaatgcagtgctttgccctgtctcagccacgagctatgatggaggaaggggaagatttgcaa

SEQ ID NO: 253777 - DNA, 120 bp, Artificial Sequence
  ENSG00000124151_8 (sequence is synthesized)
tcttgtatgatctgtgtggcacgccgcattactacaggagaaagaacatttccatcaaaccctgagagctttattaccagacatgatctttcaggaaaggttgtcaatatagatacaaat

SEQ ID NO: 253778 - DNA, 120 bp, Artificial Sequence
  ENSG00000124151_9 (sequence is synthesized)
tcactgagatcctccatgaggcctggctttgaagatataatccgaaggtgtattcagagattttttagtctaaatgatgggcagtcatggtcccagaaacgtcactatcaagaagcttat

SEQ ID NO: 253779 - DNA, 120 bp, Artificial Sequence
  ENSG00000124151_10 (sequence is synthesized)
cttaatggccatgcagaaaccccagtatatcgattctcgttggctgatggaactatagtgactgcacagacaaaaagcaaactcttccgaaatcctgtaacaaatgatcgacatggcttt

SEQ ID NO: 253780 - DNA, 120 bp, Artificial Sequence
  ENSG00000124151_11 (sequence is synthesized)
gtctcaacccacttccttcagagagaacagaatggatatagaccaaacccaaatcctgttggacaagggattagaccacctatggctggatgcaacagttcggtaggcggcatgagtatg

SEQ ID NO: 253781 - DNA, 120 bp, Artificial Sequence
  ENSG00000124151_12 (sequence is synthesized)
tcgccaaaccaaggcttacagatgccgagcagcagggcctatggcttggcagaccctagcaccacagggcagatgagtggagctaggtatgggggttccagtaacatagcttcattgacc

SEQ ID NO: 253782 - DNA, 120 bp, Artificial Sequence
  ENSG00000124151_13 (sequence is synthesized)
cctgggccaggcatgcaatcaccatcttcctaccagaacaacaactatgggctcaacatgagtagccccccacatgggagtcctggtcttgccccaaaccagcagaatatcatgatttct

SEQ ID NO: 253783 - DNA, 120 bp, Artificial Sequence
  ENSG00000124151_14 (sequence is synthesized)
cctcgtaatcgtgggagtccaaagatagcctcacatcagttttctcctgttgcaggtgtgcactctcccatggcatcttctggcaatactgggaaccacagcttttccagcagctctctc

SEQ ID NO: 253784 - DNA, 120 bp, Artificial Sequence
  ENSG00000124151_15 (sequence is synthesized)
agtgccctgcaagccatcagtgaaggtgtggggacttcccttttatctactctgtcatcaccaggccccaaattggataactctcccaatatgaatattacccaaccaagtaaagtaagc

SEQ ID NO: 253785 - DNA, 120 bp, Artificial Sequence
  ENSG00000124151_16 (sequence is synthesized)
aatcaggattccaagagtcctctgggcttttattgcgaccaaaatccagtggagagttcaatgtgtcagtcaaatagcagagatcacctcagtgacaaagaaagtaaggagagcagtgtt

SEQ ID NO: 253786 - DNA, 120 bp, Artificial Sequence
  ENSG00000124151_17 (sequence is synthesized)
gagggggcagagaatcaaaggggtcctttggaaagcaaaggtcataaaaaattactgcagttacttacctgttcttctgatgaccggggtcattcctccttgaccaactcccccctagat

SEQ ID NO: 253787 - DNA, 120 bp, Artificial Sequence
  ENSG00000124151_18 (sequence is synthesized)
tcaagttgtaaagaatcttctgttagtgtcaccagcccctctggagtctcctcctctacatctggaggagtatcctctacatccaatatgcatgggtcactgttacaagagaagcaccgg

SEQ ID NO: 253788 - DNA, 120 bp, Artificial Sequence
  ENSG00000124151_19 (sequence is synthesized)
attttgcacaagttgctgcagaatgggaattcaccagctgaggtagccaagattactgcagaagccactgggaaagacaccagcagtataacttcttgtggggacggaaatgttgtcaag

SEQ ID NO: 253789 - DNA, 120 bp, Artificial Sequence
  ENSG00000124151_20 (sequence is synthesized)
caggagcagctaagtcctaagaagaaggagaataatgcacttcttagatacctgctggacagggatgatcctagtgatgcactctctaaagaactacagccccaagtggaaggagtggat

SEQ ID NO: 253790 - DNA, 120 bp, Artificial Sequence
  ENSG00000124151_21 (sequence is synthesized)
aataaaatgagtcagtgcaccagctccaccattcctagctcaagtcaagagaaagaccctaaaattaagacagagacaagtgaagagggatctggagacttggataatctagatgctatt

SEQ ID NO: 253791 - DNA, 120 bp, Artificial Sequence
  ENSG00000124151_22 (sequence is synthesized)
cttggtgatctgactagttctgacttttacaataattccatatcctcaaatggtagtcatctggggactaagcaacaggtgtttcaaggaactaattctctgggtttgaaaagttcacag

SEQ ID NO: 253792 - DNA, 120 bp, Artificial Sequence
  ENSG00000124151_23 (sequence is synthesized)
tctgtgcagtctattcgtcctccatataaccgagcagtgtctctggatagccctgtttctgttggctcaagtcctccagtaaaaaatatcagtgctttccccatgttaccaaagcaaccc

SEQ ID NO: 253793 - DNA, 120 bp, Artificial Sequence
  ENSG00000124151_24 (sequence is synthesized)
atgttgggtgggaatccaagaatgatggatagtcaggaaaattatggctcaagtatgggtgggccaaaccgaaatgtgactgtgactcagactccttcctcaggagactggggcttacca

SEQ ID NO: 253794 - DNA, 120 bp, Artificial Sequence
  ENSG00000124151_25 (sequence is synthesized)
aactcaaaggccggcagaatggaacctatgaattcaaactccatgggaagaccaggaggagattataatacttctttacccagacctgcactgggtggctctattcccacattgcctctt

SEQ ID NO: 253795 - DNA, 120 bp, Artificial Sequence
  ENSG00000124151_26 (sequence is synthesized)
cggtctaatagcataccaggtgcgagaccagtattgcaacagcagcagcagatgcttcaaatgaggcctggtgaaatccccatgggaatgggggctaatccctatggccaagcagcagca

SEQ ID NO: 253796 - DNA, 120 bp, Artificial Sequence
  ENSG00000124151_27 (sequence is synthesized)
tctaaccaactgggttcctggcccgatggcatgttgtccatggaacaagtttctcatggcactcaaaataggcctcttcttaggaattccctggatgatcttgttgggccaccttccaac

SEQ ID NO: 253797 - DNA, 120 bp, Artificial Sequence
  ENSG00000124151_28 (sequence is synthesized)
ctggaaggccagagtgacgaaagagcattattggaccagctgcacactcttctcagcaacacagatgccacaggcctggaagaaattgacagagctttgggcattcctgaacttgtcaat

SEQ ID NO: 253798 - DNA, 120 bp, Artificial Sequence
  ENSG00000124151_29 (sequence is synthesized)
cagggacaggcattagagcccaaacaggatgctttccaaggccaagaagcagcagtaatgatggatcagaaggcaggattatatggacagacatacccagcacaggggcctccaatgcaa

SEQ ID NO: 253799 - DNA, 120 bp, Artificial Sequence
  ENSG00000124151_30 (sequence is synthesized)
ggaggctttcatcttcagggacaatcaccatcttttaactctatgatgaatcagatgaaccagcaaggcaattttcctctccaaggaatgcacccacgagccaacatcatgagaccccgg

SEQ ID NO: 253800 - DNA, 120 bp, Artificial Sequence
  ENSG00000124151_31 (sequence is synthesized)
acaaacacccccaagcaacttagaatgcagcttcagcagaggctgcagggccagcagtttttgaatcagagccgacaggcacttgaattgaaaatggaaaaccctactgctggtggtgct

SEQ ID NO: 253801 - DNA, 120 bp, Artificial Sequence
  ENSG00000124151_32 (sequence is synthesized)
gcggtgatgaggcctatgatgcagccccaggtgagctcccagcagggttttcttaatgctcaaatggtcgcccaacgcagcagagagctgctaagtcatcacttccgacaacagagggtg

SEQ ID NO: 253802 - DNA, 120 bp, Artificial Sequence
  ENSG00000124151_33 (sequence is synthesized)
gcagcagcagcagcagcagcaacagcaacagcaacagcaacagcagcaacagcagcaaacccaggccttcagcccacctcctaatgtgactgcttcccccagcatggatgggcttttggc

SEQ ID NO: 253803 - DNA, 120 bp, Artificial Sequence
  ENSG00000124151_34 (sequence is synthesized)
aggacccacaatgccacaagctcctccgcaacagtttccatatcaaccaaattatggaatgggacaacaaccagatccagcctttggtcgagtgtctagtcctcccaatgcaatgatgtc

SEQ ID NO: 253804 - DNA, 120 bp, Artificial Sequence
  ENSG00000124151_35 (sequence is synthesized)
gtcaagaatgggtccctcccagaatcccatgatgcaacacccgcaggctgcatccatctatcagtcctcagaaatgaagggctggccatcaggaaatttggccaggaacagctccttttc

SEQ ID NO: 253805 - DNA, 120 bp, Artificial Sequence
  ENSG00000124151_36 (sequence is synthesized)
ccagcagcagtttgcccaccaggggaatcctgcagtgtatagtatggtgcacatgaatggcagcagtggtcacatgggacagatgaacatgaaccccatgcccatgtctggcatgcctat

SEQ ID NO: 253806 - DNA, 120 bp, Artificial Sequence
  ENSG00000124151_37 (sequence is synthesized)
gggtcctgatcagaaatactgctgacatctctgcaccaggacctcttaaggaaaccactgtacaaatgacactgcactaggattattgggaaggaatcattgttccaggcatccatcttg

SEQ ID NO: 253807 - DNA, 120 bp, Artificial Sequence
  ENSG00000124151_38 (sequence is synthesized)
gaagaaaggaccagctttgagctccatcaagggtattttaagtgatgtcatttgagcaggactggattttaagccgaagggcaatatctacgtgtttttcccccctccttctgctgtgta

SEQ ID NO: 253808 - DNA, 120 bp, Artificial Sequence
  ENSG00000124151_39 (sequence is synthesized)
tcatggtgttcaaaacagaaatgttttttggcattccacctcctagggatataattctggagacatggagtgttactgatcataaaacttttgtgtcacttttttctgccttgctagcca

SEQ ID NO: 253809 - DNA, 120 bp, Artificial Sequence
  ENSG00000124151_40 (sequence is synthesized)
aaatctcttaaatacacgtaggtgggccagagaacattggaagaatcaagagagattagaatatctggtttctctagttgcagtattggacaaagagcatagtcccagccttcaggtgta

SEQ ID NO: 253810 - DNA, 120 bp, Artificial Sequence
  ENSG00000124151_41 (sequence is synthesized)
gtagttctgtgttgaccctttgtccagtggaattggtgattctgaattgtcctttactaatggtgttgagttgctctgtccctattatttgccctaggctttctcctaatgaaggttttc

SEQ ID NO: 253811 - DNA, 120 bp, Artificial Sequence
  ENSG00000124151_42 (sequence is synthesized)
atttgccattcatgtcctgtaatacttcacctccaggaactgtcatggatgtccaaatggctttgcagaaaggaaatgagatgacagtatttaatcgcagcagtagcaaacttttcacat

SEQ ID NO: 253812 - DNA, 120 bp, Artificial Sequence
  ENSG00000124151_43 (sequence is synthesized)
gctaatgtgcagctgagtgcactttatttaaaaagaatggataaatgcaatattcttgaggtcttgagggaatagtgaaacacattcctggtttttgcctacacttacgtgttagacaag

SEQ ID NO: 253813 - DNA, 120 bp, Artificial Sequence
  ENSG00000124151_44 (sequence is synthesized)
aactatgatttttttttttaaagtactggtgtcaccctttgcctatatggtagagcaataatgctttttaaaaataaacttctgaaaacccaaggccaggtactgcattctgaatcagaa

SEQ ID NO: 253814 - DNA, 120 bp, Artificial Sequence
  ENSG00000124151_45 (sequence is synthesized)
tctcgcagtgtttctgtgaatagatttttttgtaaatatgacctttaagatattgtattatgtaaaatatgtatatacctttttttgtaggtcacaacaactcatttttacagagtttgt

SEQ ID NO: 253815 - DNA, 120 bp, Artificial Sequence
  ENSG00000124151_46 (sequence is synthesized)
gaagctaaatatttaacattgttgatttcagtaagctgtgtggtgaggctaccagtggaagagacatcccttgacttttgtggcctgggggaggggtagtgctccacagcttttccttcc

SEQ ID NO: 253816 - DNA, 120 bp, Artificial Sequence
  ENSG00000124151_47 (sequence is synthesized)
ccaccccccagccttagatgcctcgctcttttcaatctcttaatctaaatgctttttaaagagattatttgtttagatgtaggcattttaattttttaaaaattcctctaccagaactaa

SEQ ID NO: 253817 - DNA, 120 bp, Artificial Sequence
  ENSG00000124151_48 (sequence is synthesized)
gcactttgttaatttggggggaaagaatagatatggggaaataaacttaaaaaaaaatcaggaatttaaaaaaacgagcaatttgaagagaatcttttggattttaagcagtccgaaata

SEQ ID NO: 253818 - DNA, 120 bp, Artificial Sequence
  ENSG00000124151_49 (sequence is synthesized)
tgtgtgtatgtgtgtgtgtgtgtgtgtatgtttaattatgttaccttttcatcccctttaggagcgttttcagattttggttgctaagacctgaatcccatattgagatctcgagtagaa

SEQ ID NO: 253819 - DNA, 120 bp, Artificial Sequence
  ENSG00000124151_50 (sequence is synthesized)
cccatattgagatctcgagtagaatccttggtgtggtttctggtgtctgctcagctgtcccctcattctactaatgtgatgctttcattatgtccctgtggattagaatagtgtcagtta

SEQ ID NO: 253820 - DNA, 120 bp, Artificial Sequence
  ENSG00000124151_51 (sequence is synthesized)
tttcttaagtaactcagtacccagaacagccagttttactgtgattcagagccacagtctaactgagcaccttttaaacccctccctcttctgccccctaccacttttctgctgttgcct

SEQ ID NO: 253821 - DNA, 120 bp, Artificial Sequence
  ENSG00000124151_52 (sequence is synthesized)
ctctttgacacctgttttagtcagttgggaggaagggaaaaatcaagtttaattccctttatctgggttaattcatttggttcaaatagttgacggaattgggtttctgaatgtctgtga

SEQ ID NO: 253822 - DNA, 120 bp, Artificial Sequence
  ENSG00000124151_53 (sequence is synthesized)
atttcagaggtctctgctagccttggtatcattttctagcaataactgagagccagttaattttaagaatttcacacatttagccaatctttctagatgtctctgaaggtaagatcattt

SEQ ID NO: 253823 - DNA, 120 bp, Artificial Sequence
  ENSG00000124151_54 (sequence is synthesized)
aatatctttgatatgcttacgagtaagtgaatcctgattatttccagacccaccaccagagtggatcttattttcaaagcagtatagacaattatgagtttgccctctttcccctaccaa

SEQ ID NO: 253824 - DNA, 120 bp, Artificial Sequence
  ENSG00000124151_55 (sequence is synthesized)
gttcaaaatatatctaagaaagattgtaaatccgaaaacttccattgtagtggcctgtgcttttcagatagtatactctcctgtttggagacagaggaagaaccaggtcagtctgtctct

SEQ ID NO: 253825 - DNA, 120 bp, Artificial Sequence
  ENSG00000124151_56 (sequence is synthesized)
ttttcagctcaattgtatctgacccttctttaagttatgtgtgtggggagaaatagaatggtgctcttatctttcttgactttaaaaaaattattaaaaacaaaaaaaaaataaattttt

SEQ ID NO: 253826 - DNA, 120 bp, Artificial Sequence
  ENSG00000124151_57 (sequence is synthesized)
ttgcaatcctttcctcagacctggctccaggctaactggaaggcagcactcccttttttatatagtagaaaaatgaagtttattataagtttttatattttctacttgttcatttggtgc

SEQ ID NO: 253827 - DNA, 120 bp, Artificial Sequence
  ENSG00000124151_58 (sequence is synthesized)
aaactcaagatttcttttaataggtgcagtctttgagataatttgtttttacctgtattgccctttatcttttttaggtaattctttgtactcctgctgtctacctctcctcacacccca

SEQ ID NO: 253828 - DNA, 120 bp, Artificial Sequence
  ENSG00000124151_59 (sequence is synthesized)
gcaccccccattttttcaaaccttggtatctgttgggtgaacagtataatcttttcatctgcttttagaatgtgggatatttccagtacctactttttttttttttttttgctgaatcca

SEQ ID NO: 253829 - DNA, 120 bp, Artificial Sequence
  ENSG00000124151_60 (sequence is synthesized)
taaaatatatatattttataaagatcagaatgatataaaggagatacatgtttcttcctttaaaaaataaacggaagttacattgttaatgttcatattatgatgccacttttctaaact

SEQ ID NO: 253830 - DNA, 120 bp, Artificial Sequence
  ENSG00000124151_61 (sequence is synthesized)
cttttctaaactgcatctggattgaaaggtgtaaatatcaataacagtgctacttagttatcagtatttaatatctgaggtgagttgggggtatctatattaggggtagggtattacaga

SEQ ID NO: 253831 - DNA, 120 bp, Artificial Sequence
  ENSG00000124151_62 (sequence is synthesized)
agataattggcttgatgtcctagaagttctttgatccagaggtgggtgcagctgaaagtaaacagaatggattgccagttacatgtatgcctgcccagttccctttttatttgcagaagc

SEQ ID NO: 253832 - DNA, 120 bp, Artificial Sequence
  ENSG00000124151_63 (sequence is synthesized)
tgtgagttttgttcacaattaggttcctaggagcaaaacctcaaggattgatttattgttttcaactccaaggcacactgttaataaacgagcagggtgttttctctcttcctttctaat

SEQ ID NO: 253833 - DNA, 120 bp, Artificial Sequence
  ENSG00000124151_64 (sequence is synthesized)
atatggagtttcgaagaataaaatatgagagcaatatttaaattctcaggaattgacttatactcttgagaatgaattcagtttcaatcaagtttacattatgttgcttaaaaaaataga

SEQ ID NO: 253834 - DNA, 120 bp, Artificial Sequence
  ENSG00000124151_65 (sequence is synthesized)
aattattctttatcttgcaaagaattgaaaccacatgaaatgacttatgggggatggtgagctgtgactgctttgctgaccattttggatgtcattgtaaataaaggtttctatttaaaa

SEQ ID NO: 253835 - DNA, 85 bp, Artificial Sequence
  ENSG00000124151_66 (sequence is synthesized)
ttggccgggagtaattcttgacgtcaacctgagtttcaatcttggtctgccattttttaatcatagaaataaaaaattaaagaca

SEQ ID NO: 253836 - DNA, 120 bp, Artificial Sequence
  ENSG00000124155_0 (sequence is synthesized)
ggaagtagccgcaggcatggcggcggctatgccgcttgctctgctcgtcctgttgctcctggggcccggcggctggtgccttgcagaacccccacgcgacagcctgcgggaggaacttgt

SEQ ID NO: 253837 - DNA, 120 bp, Artificial Sequence
  ENSG00000124155_1 (sequence is synthesized)
catcaccccgctgccttccggggacgtagccgccacattccagttccgcacgcgctgggattcggagcttcagcgggaaggagtgtcccattacaggctctttcccaaagccctggggca

SEQ ID NO: 253838 - DNA, 120 bp, Artificial Sequence
  ENSG00000124155_2 (sequence is synthesized)
gctgatctccaagtattctctacgggagctgcacctgtcattcacacaaggcttttggaggacccgatactgggggccacccttcctgcaggccccatcaggtgcagagctgtgggtctg

SEQ ID NO: 253839 - DNA, 120 bp, Artificial Sequence
  ENSG00000124155_3 (sequence is synthesized)
gttccaagacactgtcactgatgtggataaatcttggaaggagctcagtaatgtcctctcagggatcttctgcgcctctctcaacttcatcgactccaccaacacagtcactcccactgc

SEQ ID NO: 253840 - DNA, 120 bp, Artificial Sequence
  ENSG00000124155_4 (sequence is synthesized)
ctccttcaaacccctgggtctggccaatgacactgaccactactttctgcgctatgctgtgctgccgcgggaggtggtctgcaccgaaaacctcaccccctggaagaagctcttgccctg

SEQ ID NO: 253841 - DNA, 120 bp, Artificial Sequence
  ENSG00000124155_5 (sequence is synthesized)
tagttccaaggcaggcctctctgtgctgctgaaggcagatcgcttgttccacaccagctaccactcccaggcagtgcatatccgccctgtttgcagaaatgcacgctgtactagcatctc

SEQ ID NO: 253842 - DNA, 120 bp, Artificial Sequence
  ENSG00000124155_6 (sequence is synthesized)
ctgggagctgaggcagaccctgtcagttgtatttgatgccttcatcacggggcagggaaagaaagactggtccctcttccggatgttctcccgaaccctcacggagccctgccccctggc

SEQ ID NO: 253843 - DNA, 120 bp, Artificial Sequence
  ENSG00000124155_7 (sequence is synthesized)
ttcagagagccgagtctatgtggacatcaccacctacaaccaggacaacgagacattagaggtgcacccacccccgaccactacatatcaggacgtcatcctaggcactcggaagaccta

SEQ ID NO: 253844 - DNA, 120 bp, Artificial Sequence
  ENSG00000124155_8 (sequence is synthesized)
tgccatctatgacttgcttgacaccgccatgatcaacaactctcgaaacctcaacatccagctcaagtggaagagacccccagagaatgaggcccccccagtgcccttcctgcatgccca

SEQ ID NO: 253845 - DNA, 120 bp, Artificial Sequence
  ENSG00000124155_9 (sequence is synthesized)
tgagtggctatgggctgcagaagggggagctgagcacactgctgtacaacacccacccataccgggccttcccggtgctgctgctggacaccgtaccctggtatctgcggctgtatgtgc

SEQ ID NO: 253846 - DNA, 120 bp, Artificial Sequence
  ENSG00000124155_10 (sequence is synthesized)
acaccctcaccatcacctccaagggcaaggagaacaaaccaagttacatccactaccagcctgcccaggaccggctgcaaccccacctcctggagatgctgattcagctgccggccaact

SEQ ID NO: 253847 - DNA, 120 bp, Artificial Sequence
  ENSG00000124155_11 (sequence is synthesized)
cagtcaccaaggtttccatccagtttgagcgggcgctgctgaagtggaccgagtacacgccagatcctaaccatggcttctatgtcagcccatctgtcctcagcgcccttgtgcccagca

SEQ ID NO: 253848 - DNA, 120 bp, Artificial Sequence
  ENSG00000124155_12 (sequence is synthesized)
tggtagcagccaagccagtggactgggaagagagtcccctcttcaacagcctgttcccagtctctgatggctctaactactttgtgcggctctacacggagccgctgctggtgaacctgc

SEQ ID NO: 253849 - DNA, 120 bp, Artificial Sequence
  ENSG00000124155_13 (sequence is synthesized)
cgacaccggacttcagcatgccctacaacgtgatctgcctcacgtgcactgtggtggccgtgtgctatggctccttctacaatctcctcacccgaaccttccacatcgaggagccccgca

SEQ ID NO: 253850 - DNA, 120 bp, Artificial Sequence
  ENSG00000124155_14 (sequence is synthesized)
caggtggcctggccaagcggctggccaaccttatccggcgcgcccgaggtgtccccccactctgattcttgccctttccagcagctgcagctgccgtttctctctggggaggggagccca

SEQ ID NO: 253851 - DNA, 120 bp, Artificial Sequence
  ENSG00000124155_15 (sequence is synthesized)
agggctgtttctgccacttgctctcctcagagttggcttttgaaccaaagtgccctggaccaggtcagggcctacagctgtgttgtccagtacaggagccacgagccaaatgtggcattt

SEQ ID NO: 253852 - DNA, 120 bp, Artificial Sequence
  ENSG00000124155_16 (sequence is synthesized)
gaatttgaattaacttagaaattcatttcctcacctgtagtggccacctctatattgaggtgctcaataagcaaaagtggtcggtggctgctgtattggacagcacagaaaaagatttcc

SEQ ID NO: 253853 - DNA, 120 bp, Artificial Sequence
  ENSG00000124155_17 (sequence is synthesized)
atcaccacagaaaggtcggctggcagcactggccaaggtgatggggtgtgctacacagtgtatgtcactgtgtagtggatggagtttactgtttgtggaataaaaacggctgtttccgtg

SEQ ID NO: 253854 - DNA, 120 bp, Artificial Sequence
  ENSG00000124155_18 (sequence is synthesized)
gtatgcattgttttgcccagcccagcacattcaaggaagatcagtgagctcatttcagctctgatacatgaggcgctttccatggtgtcaggggaagtacatagatgacccagactggtc

SEQ ID NO: 253855 - DNA, 120 bp, Artificial Sequence
  ENSG00000124155_19 (sequence is synthesized)
cttgtcctcaagttgcttacagcctagttagggagaaaaggtggtcaggacacgatgctgctgccacctagccatctcccaggagggacctagtaagatgcttggatggtcagaaccgtg

SEQ ID NO: 253856 - DNA, 120 bp, Artificial Sequence
  ENSG00000124155_20 (sequence is synthesized)
actgcacagaggagactgtgcttaaggagggcaggaaaggcttcgtggaggggaggtaagcactggagccggatcatgaaggtaggcagaaagaagttagcaaaggcttgcaaggaagga

SEQ ID NO: 253857 - DNA, 120 bp, Artificial Sequence
  ENSG00000124155_21 (sequence is synthesized)
agaatcacctgagcagagacccatggggatgcagagatgtccagaggagagtgaggaagaaggggctgagtaggatgagacccagcaagtgggctggctgggggcagcaatgttccagct

SEQ ID NO: 253858 - DNA, 120 bp, Artificial Sequence
  ENSG00000124155_22 (sequence is synthesized)
ccatcaactggcccgtctaatagttaagaatacagcctcctcctatcataggtttagcagccagctgtggactttgaaagagggagcagaggtagccccaggacagtgagtggatttgtg

SEQ ID NO: 253859 - DNA, 120 bp, Artificial Sequence
  ENSG00000124155_23 (sequence is synthesized)
cccctgggtctggccaatggtgagataacccctacagccctttccttcttcctcttacctcctgcccaaacctttgcctccttttccctcagtttcctgcttcctcagcctgggctagat

SEQ ID NO: 253860 - DNA, 120 bp, Artificial Sequence
  ENSG00000124155_24 (sequence is synthesized)
cctaagtcccctgtgtgtgcaggcccccaatactgtgccatctctgcatgccttttcccaaggagagaagggagtcctactcccagttgggactgtccagactgtggtgctagaggtggt

SEQ ID NO: 253861 - DNA, 120 bp, Artificial Sequence
  ENSG00000124155_25 (sequence is synthesized)
gtggggagcaggagggtcattcccatctctggaatgtggatcccgaggggtcagagcccaaggcccaccccagacagacctctgtctccctcagacactgaccactactttctgcgctat

SEQ ID NO: 253862 - DNA, 120 bp, Artificial Sequence
  ENSG00000124155_26 (sequence is synthesized)
tgtatttagaccagatttccagagtcatatgctgctgactgtagctattccaagctctacgattttgggtaggttcctaaactccccaagcttcagcatccacatctgaaaaatagagta

SEQ ID NO: 253863 - DNA, 120 bp, Artificial Sequence
  ENSG00000124155_27 (sequence is synthesized)
tacttagcaaattggatgagatgatgtgaaaaatggagttagttcatgcatttgcttaatcaaccaaatacttttgaattcatactaagtgccaggcatagagtgttgaataagacagag

SEQ ID NO: 253864 - DNA, 120 bp, Artificial Sequence
  ENSG00000124155_28 (sequence is synthesized)
gacactgcactcaagaaatataagtctactagctagggcaggtgtcagttaattaattacagttgtgttcagttcccttaccaagggaaagagcagaatatcctgagaggacctggattg

SEQ ID NO: 253865 - DNA, 120 bp, Artificial Sequence
  ENSG00000124155_29 (sequence is synthesized)
ggttcgaagggggcacggtgttcgtcacgtaagcacttcaatactagcaacctattgtcatcatcgcttgttggctggggaagacagggatgattccagaacccagattgcccagtttca

SEQ ID NO: 253866 - DNA, 120 bp, Artificial Sequence
  ENSG00000124155_30 (sequence is synthesized)
gtggcagggctgttccccatctactcactggcttgggactctgaacatggcctgggcaggtggggtggggagtgattcttacctttggcagctgttaactgttgatatttctttacacag

SEQ ID NO: 253867 - DNA, 120 bp, Artificial Sequence
  ENSG00000124155_31 (sequence is synthesized)
cagcacttccagtaggcagcgattccatgggggtagagctggcattggaagtaagaaatgttaccacagatgaataaacttcccaatcctaaaactttcagacctgaggtagcacatgca

SEQ ID NO: 253868 - DNA, 120 bp, Artificial Sequence
  ENSG00000124155_32 (sequence is synthesized)
tatccctggagaggcaaatagcaaacaattaatgcttatttggaggtaaggcagtagaaaactggcaactggataaccttttaaaaggcattcattaatattttttaaatgataataaat

SEQ ID NO: 253869 - DNA, 120 bp, Artificial Sequence
  ENSG00000124155_33 (sequence is synthesized)
accacgaaagccaaccataacatatctgtgggttacaactggccaacaggatgctacatcacagtgttagaggaactgcttttgtttgggagggggcaggtctagttactgtgcctacta

SEQ ID NO: 253870 - DNA, 120 bp, Artificial Sequence
  ENSG00000124155_34 (sequence is synthesized)
caaaccgctatttcccagtggctgctgtggctatcctgtttagaatagaacctttctgtgcagtggttgcaaacaggtctacatgggccacacaggtaaggaatgaataaaggtattttt

SEQ ID NO: 253871 - DNA, 120 bp, Artificial Sequence
  ENSG00000124155_35 (sequence is synthesized)
aaaattgacaaacacaggaatgagaaatatatctcattttcctcttaatcccactataagaaatcaatagtgcaagtatgatataacaagttttagggcaataaaaaggagcagcaggaa

SEQ ID NO: 253872 - DNA, 120 bp, Artificial Sequence
  ENSG00000124155_36 (sequence is synthesized)
ttgtggcaggctagagagtttgtgtgacattctaacgaggacagctctgccactcagcttctatggattgttgccatgtgggaatagaggcctaatgtggtcagagtcaaatgtttctaa

SEQ ID NO: 253873 - DNA, 61 bp, Artificial Sequence
  ENSG00000124155_37 (sequence is synthesized)
ctggtctcgaagagccaccacacctggcctcatttttcaagagataccagaaatctggaat

SEQ ID NO: 253874 - DNA, 120 bp, Artificial Sequence
  ENSG00000124155_38 (sequence is synthesized)
acctggcctcatttttcaagagataccagaaatctggaatttaatgtgaaaattggcaaattcaaatatcagcaagtaatttaaaaattttttgagtgctgtgcgggtcaatgttgtgca

SEQ ID NO: 253875 - DNA, 120 bp, Artificial Sequence
  ENSG00000124155_39 (sequence is synthesized)
taccaaatgaagcatgtttatggtttgagtagagctttccggcttcaagtttgccatttttatttgaggcttaaggattggagcagttgaaaagctctgaacatagaattatcaaaagct

SEQ ID NO: 253876 - DNA, 120 bp, Artificial Sequence
  ENSG00000124155_40 (sequence is synthesized)
cctggacaacactaaggaataaggaataagcagtaactccccagcttgccaagactttctctcttgcctcaactctggctcccctaccctttcctgtctactctgctgtcactgtcttcc

SEQ ID NO: 253877 - DNA, 120 bp, Artificial Sequence
  ENSG00000124155_41 (sequence is synthesized)
ctcagcccgtaattgcctgaaatgtggagcaaatgcttagaattctttctagtgcttattaagttttatgctttctctattactgagagcaaatctcttttgatatttctccaagaaaag

SEQ ID NO: 253878 - DNA, 120 bp, Artificial Sequence
  ENSG00000124155_42 (sequence is synthesized)
aacattaatttaatttgatgtttttatgaaatcctagaacagttgtttttcccatgttcagtgagcttttttggatataagacttctcaccatgatagtagaatcaggacttacctttat

SEQ ID NO: 253879 - DNA, 120 bp, Artificial Sequence
  ENSG00000124155_43 (sequence is synthesized)
ctattgccttggacttaacacgtgttccttatcagctggctgctgtcctttgacttccaccagatggtgtgcttcctggaggcacaggttctgtctttcattaagacctgacccatctca

SEQ ID NO: 253880 - DNA, 120 bp, Artificial Sequence
  ENSG00000124155_44 (sequence is synthesized)
ggacatgacaaaggaaatatcttgtttttgatttcttggaagaggaagcactctgggcaagaggtatgagccgggatgaagtggactccttgtctggaggtggtgctacacaccttggag

SEQ ID NO: 253881 - DNA, 120 bp, Artificial Sequence
  ENSG00000124155_45 (sequence is synthesized)
gggctcctgggagctactgagaatgtcccctaagtcagtattcctgcctcagctgaaatgccagtcttcagcctcatctactgcacacttgagtccatgagattttagagtggtccttct

SEQ ID NO: 253882 - DNA, 120 bp, Artificial Sequence
  ENSG00000124155_46 (sequence is synthesized)
tcaacatcagctccaggatctgcaagatctttggatatggccgctgcagaaggaaggagaaccacttcctggagaagcaggagtgagccaggatctgccacacaagagagccgggaaccc

SEQ ID NO: 253883 - DNA, 120 bp, Artificial Sequence
  ENSG00000124155_47 (sequence is synthesized)
agggcatgggttaaggcgaggagcaggtccggagggaagatctgaggcaaagagagagcctgtcacctgtgctgccttgagatgctgacatctgaggatgccccagacagggcctgtggc

SEQ ID NO: 253884 - DNA, 120 bp, Artificial Sequence
  ENSG00000124155_48 (sequence is synthesized)
tgctttctgaaatagtgcagcaccttctctgcttcctcctcaaccttctccttcacagcagaaccctgcctccttcctctccccacaggcttgtttcagcattgatttgatcaactgagc

SEQ ID NO: 253885 - DNA, 120 bp, Artificial Sequence
  ENSG00000124155_49 (sequence is synthesized)
accacgagaacacaaaccacattcctttgttttttcatcacgttacccccagcacttaggacagtgcctggcacaaaggaggtagtctgtaaatatttgcgtaatgaatgaataaaggag

SEQ ID NO: 253886 - DNA, 120 bp, Artificial Sequence
  ENSG00000124155_50 (sequence is synthesized)
ggcatgagtacatctcctctgcccagcacggatgacaggctgagggtttgaatccaggactctctcaccgtagccctcattctcactgcatcctcaccttcgtcctccaccccccacccc

SEQ ID NO: 253887 - DNA, 120 bp, Artificial Sequence
  ENSG00000124155_51 (sequence is synthesized)
cccactgggttccttggggatggcaggggtggagttcctggcatccagttctgagcatcagctctgccaagtagtggtggcgggggggttttcatgaaagaatccccctcgctccctgtg

SEQ ID NO: 253888 - DNA, 120 bp, Artificial Sequence
  ENSG00000124155_52 (sequence is synthesized)
atgttggacatttttccttgtctgtgtagtttcaggctttgtctctctggccttatacaatatttaaaaacattcattttccagttaaacaaactggattggatactgttgtttgcaact

SEQ ID NO: 253889 - DNA, 120 bp, Artificial Sequence
  ENSG00000124155_53 (sequence is synthesized)
aagaaccttaatattgggtgatcttcccaatattttgcagaacagcagcatcaccgcttttcctgccatcagactgggccctaccagttgtaagaagaaaacccattgcaacacctacct

SEQ ID NO: 253890 - DNA, 120 bp, Artificial Sequence
  ENSG00000124155_54 (sequence is synthesized)
ctaccagttgtaagaagaaaacccattgcaacacctacctcttaatggccactccaagctacacaaaaacctgagtgatgtttcaacattaaagccttttcttttttttttttttttttt

SEQ ID NO: 253891 - DNA, 120 bp, Artificial Sequence
  ENSG00000124155_55 (sequence is synthesized)
tggtctctctgaaggagaagggaaggagcatgagggtcaattgtctgcttatctaagaaatccccttccctgaagttgtgtgtgtgtgtgtgtatctctgtatgtgtgttgtagggtggt

SEQ ID NO: 253892 - DNA, 120 bp, Artificial Sequence
  ENSG00000124155_56 (sequence is synthesized)
ggtggtggtttgttatttcagttacagcaataacaactacccatttagtggacaccgaccatgtaccaggctccatgcttagccttttacacgcattatttcatttaattcccaagaatc

SEQ ID NO: 253893 - DNA, 120 bp, Artificial Sequence
  ENSG00000124155_57 (sequence is synthesized)
tggggcaactagaacaaaggactacagactgactggtttaaacaactgcaatttaccctcttaaattctggaggccagaagtgtgagatcagggtgtccacagggctgcgtttgctctga

SEQ ID NO: 253894 - DNA, 120 bp, Artificial Sequence
  ENSG00000124155_58 (sequence is synthesized)
agaagctggggaaggatctgttccaggcctctctcctggcttctggaagctccttgacttgtggtcacataaatccagtcttcacatagtgttctcccgtctgtcccctttttaaggaca

SEQ ID NO: 253895 - DNA, 120 bp, Artificial Sequence
  ENSG00000124155_59 (sequence is synthesized)
ccagttgtattggattagggcccacactgatgacctcatcttaacttgattacctttgtaaagagcccatctccaaataaggtcacatttggagggacctgggggttacgactccaagta

SEQ ID NO: 253896 - DNA, 120 bp, Artificial Sequence
  ENSG00000124155_60 (sequence is synthesized)
gcttttttgggaggacacagttcaacccataacagctgataaatggcagaacccaggcatatgtgacagacccaaaggctttgtcctttgggaggaagattgtgtaaattagagcccaga

SEQ ID NO: 253897 - DNA, 120 bp, Artificial Sequence
  ENSG00000124155_61 (sequence is synthesized)
ctttccagccaggctataaaagtcctaattctgggtttgtctgaatttgggaatttggggatctaagaagcagcttattaggtaaggtgggcgtgggggtgagaaagggtgaggcatcaa

SEQ ID NO: 253898 - DNA, 120 bp, Artificial Sequence
  ENSG00000124155_62 (sequence is synthesized)
gccccccatcactgtttgtgactgagcttaatcccattgggaatgctgggagcagggccagacaattcctcgcagcagctatcaccccctttccctaggagagcaagtgtttatgcacca

SEQ ID NO: 253899 - DNA, 120 bp, Artificial Sequence
  ENSG00000124155_63 (sequence is synthesized)
gtggagatattcaggcaccagtctccatatggactgagggtttccggctgatctgggcctgggccctccttgtgtggcttccaaggaagccctcaggcaaagagatgcagacactagcac

SEQ ID NO: 253900 - DNA, 120 bp, Artificial Sequence
  ENSG00000124155_64 (sequence is synthesized)
ttggaaatcagctggtggcaccgaaggagtcaggtccggggtaagggtagggcacatatcttctgccacactctgtatgtggctttgaacaagtgatttaacttgtaggtgtgctctgta

SEQ ID NO: 253901 - DNA, 120 bp, Artificial Sequence
  ENSG00000124155_65 (sequence is synthesized)
cctgtcttctccctgtgtggggttgttgtgtagctaagtgaattaacacatgctgagcccttggaccatgtaatgactgcaacttaaacattaactatgattattattgactaaatgata

SEQ ID NO: 253902 - DNA, 120 bp, Artificial Sequence
  ENSG00000124155_66 (sequence is synthesized)
ctgccccctactggaaaatgtgtgacccggacatcacttagaaactagtgctggatggcatttgggagggaatctgatccaacttcctcatttcacagatgaggaattcagacctaagaa

SEQ ID NO: 253903 - DNA, 120 bp, Artificial Sequence
  ENSG00000124155_67 (sequence is synthesized)
agggaagtatgttgcccaatgtcacacagctaacatatataatcattataatagacaacccaggcagcctcattcacttgttcattcattcactctcatgtgtgtgtatatatgtatata

SEQ ID NO: 253904 - DNA, 120 bp, Artificial Sequence
  ENSG00000124155_68 (sequence is synthesized)
tacatatgcatataatatatattatacatgcacatacacatgtatataattatatacatatatatgcatatatacacacacatatgtatcactagtgtttgtaagtgatatccgggtcac

SEQ ID NO: 253905 - DNA, 120 bp, Artificial Sequence
  ENSG00000124155_69 (sequence is synthesized)
gtttgtaagtgatatccgggtcactcattttccagtagggaatagtataattatatacatatatgtgcacatatatacataatacatatgtttttagagactgggtattgctctgtcacc

SEQ ID NO: 253906 - DNA, 89 bp, Artificial Sequence
  ENSG00000124155_70 (sequence is synthesized)
tctcagcttccccagtagctggaactacagatatgtgccaccatgctcagctaattttttaactttttgtagaaacagggtctctccat

SEQ ID NO: 253907 - DNA, 120 bp, Artificial Sequence
  ENSG00000124155_71 (sequence is synthesized)
tgtgccaccatgctcagctaattttttaactttttgtagaaacagggtctctccatgctgctcaggctggtttggaactcctggcctcgagcaatcctctggcctcggcctcccaaagtg

SEQ ID NO: 253908 - DNA, 120 bp, Artificial Sequence
  ENSG00000124155_72 (sequence is synthesized)
gagccaccacgccaggcctcactcctaaatattaagcacctgttttgtgataggcaccaggaaaacagtaatgaccaaaacggtagcctccaaatttgtttgatccctcacaccacccat

SEQ ID NO: 253909 - DNA, 85 bp, Artificial Sequence
  ENSG00000124155_73 (sequence is synthesized)
aaagttaggaaaaggtttttgagtgtgcagttcccgtatttataagtatgtgcatattgttgtactaatatgtacattataagta

SEQ ID NO: 253910 - DNA, 120 bp, Artificial Sequence
  ENSG00000124155_74 (sequence is synthesized)
gtgcatattgttgtactaatatgtacattataagtattcaataatataaattttaataaagtataggctagaaatgaataaactgaagtttctaaatattttctttctgtaccacagtgc

SEQ ID NO: 253911 - DNA, 120 bp, Artificial Sequence
  ENSG00000124155_75 (sequence is synthesized)
gtgcaccccacttaggagttggctggaccagaacaggggagacagaggaatagtttcagcagcacaaacgctgcgagaacccaggtggaggcccttaatctcacctgaagaggtcaaggc

SEQ ID NO: 253912 - DNA, 120 bp, Artificial Sequence
  ENSG00000124155_76 (sequence is synthesized)
tggcgtcgcagaggaggcagcgctcatcctggattttgaaggatgaactgaattttatcaggtcaccagctgccatgaagagaacataacacaccaacaatggagagaggtctggaatgg

SEQ ID NO: 253913 - DNA, 120 bp, Artificial Sequence
  ENSG00000124155_77 (sequence is synthesized)
atagagatctgaggtttttcacccagttggaaaatggtacagcaggagtggctgacatggcccaggggttgtatatagaatcacaatgataggaaaagggcagttctgctcttgccttac

SEQ ID NO: 253914 - DNA, 120 bp, Artificial Sequence
  ENSG00000124155_78 (sequence is synthesized)
cgcgtgatcctggagagtgtcacctgtccctcaggttctcgtttacaacagaaggtggcgccacgtgtgataattcaagcatcccttttaacactcatgtaatcatgtaatgcagccaat

SEQ ID NO: 253915 - DNA, 120 bp, Artificial Sequence
  ENSG00000124155_79 (sequence is synthesized)
cacctccaagggcaaggagaacaaaccaagtgaggacctgagtcctgaaccaggcccccagcccgccctctcatgtcctctccaggtcccccaaactctcatttcccagggtagttcctg

SEQ ID NO: 253916 - DNA, 120 bp, Artificial Sequence
  ENSG00000124155_80 (sequence is synthesized)
aagtacctctgaaaagctacacaggcataaagagtaaggaatagtttctcaaaactggaacgggagcctcactgtgccaggttcagaagtaatttataaaacagcaataattaaaacaca

SEQ ID NO: 253917 - DNA, 120 bp, Artificial Sequence
  ENSG00000124155_81 (sequence is synthesized)
catccagccccaagggacagggcttcacctccggacaagggtgagatgaatgaggtcttggacacagaatttaagaagtcaaaaacctcagccatcaagataaatcatattaaaatgcaa

SEQ ID NO: 253918 - DNA, 120 bp, Artificial Sequence
  ENSG00000124155_82 (sequence is synthesized)
tggtttaaaaaattaaaattaattttaaaagtccatgaacaaaatataaacatttaaaataaagacagggtccaaccttgcacctgcacagtcctgccttgctctctgcaccctaaccca

SEQ ID NO: 253919 - DNA, 120 bp, Artificial Sequence
  ENSG00000124155_83 (sequence is synthesized)
gccctgctcagcccaagagctttgaatctgaatacaaatcattccagacttcaagatcaagttaaagtgttaatcgtctaccagaatgtgatttctagctttaaaaagaaaaccaagaaa

SEQ ID NO: 253920 - DNA, 120 bp, Artificial Sequence
  ENSG00000124155_84 (sequence is synthesized)
tccacatcaatgcaaaggttttctcatttcaccaggtttttgttttccgtctgtttacctgatggtttactaaagaggtgaagaagtctgtggctgaatgaacacattgaataattgcag

SEQ ID NO: 253921 - DNA, 77 bp, Artificial Sequence
  ENSG00000124155_85 (sequence is synthesized)
aagaagtctgtggctgaatgaacacattgaataattgcagagacttaaattctcaaatattcataaaaatattttac

SEQ ID NO: 253922 - DNA, 120 bp, Artificial Sequence
  ENSG00000124155_86 (sequence is synthesized)
tccacccacctcggcctcccaaagtgttcggattacaggtgtgagtcaccatgcttggccatgccggttgtttctgctgcttgctgtgtagaccgctgtgatgaccatcttcttattgac

SEQ ID NO: 253923 - DNA, 120 bp, Artificial Sequence
  ENSG00000124155_87 (sequence is synthesized)
ctgctgggccttaacacaggtgaccaggctcctgcaggggagttcagggtagatgttacatcttccaaagagatgtgtagatttaattcaatcctaataaaaatcctggcagtctgtgga

SEQ ID NO: 253924 - DNA, 120 bp, Artificial Sequence
  ENSG00000124155_88 (sequence is synthesized)
atttgtgaagactttataaaatgattttaaagtgcttctagaagaatacttttacttacagcctacatttacttcttgatgctcttaaatatttaatcaagcacttatcaaatgccaagt

SEQ ID NO: 253925 - DNA, 120 bp, Artificial Sequence
  ENSG00000124155_89 (sequence is synthesized)
gcttctgagagcactgagtgtgcaagattaaacaaaacagacttggccctggcctccctttgcttacagtctagaaggaagattctggtctagagagtaatggggttagaggttgggtag

SEQ ID NO: 253926 - DNA, 120 bp, Artificial Sequence
  ENSG00000124155_90 (sequence is synthesized)
gaattgatttactgggttatctaggaaggcttcatttaggaggtggcatttaggctgaaaccaggctaagaaagaagcaaccaagcaaaggcggggcccctttcctccacctcaacacca

SEQ ID NO: 253927 - DNA, 120 bp, Artificial Sequence
  ENSG00000124155_91 (sequence is synthesized)
attgatagtagaatccactcctagggttgttgtgatagtttatcaaactgatgcacatacagctgtcagcacggggtctggcacgaggtcaagtgctcaggagtgggtggtagcaaatcg

SEQ ID NO: 253928 - DNA, 120 bp, Artificial Sequence
  ENSG00000124155_92 (sequence is synthesized)
atggatgtgaagatacatagatgagggattgagtctgagtaggagtctttttgggggctgtgtggtgagagtgataccccctcactgctgccatctggcccttgtgatagaatgcacgct

SEQ ID NO: 253929 - DNA, 120 bp, Artificial Sequence
  ENSG00000124155_93 (sequence is synthesized)
cctctcctatatttcttgtgtgttggtggttagatttagaaacctgattagattcatgtcccacatttttggcaagaaaaattcccaggtggttctgtgaacttcttcttgcgtcacatc

SEQ ID NO: 253930 - DNA, 120 bp, Artificial Sequence
  ENSG00000124155_94 (sequence is synthesized)
aggcacttggtgtctggtgccccagttgtagtgatgtgaagattgattagccatctgcagcactcctaacaacctctcttgatcgcatcctgggatcactgccctggaaacatcctctcc

SEQ ID NO: 253931 - DNA, 120 bp, Artificial Sequence
  ENSG00000124155_95 (sequence is synthesized)
cttttcttagcccctgctttcttcccttgcctgcctggcttctatgctcccaagcccatcttctaggcacccagattgaggctccatggcaagcagcagggacaggggcagcaggtagcc

SEQ ID NO: 253932 - DNA, 71 bp, Artificial Sequence
  ENSG00000124155_96 (sequence is synthesized)
ctgtgttagccagggtggtctcgatcttataaattgtttttaattagctgggggtggtgttgcacgcctgt

SEQ ID NO: 253933 - DNA, 62 bp, Artificial Sequence
  ENSG00000124155_97 (sequence is synthesized)
ccttggcctcccaaagtgctgggattaaaataaattgtttttaattagctgggggtggtgtt

SEQ ID NO: 253934 - DNA, 120 bp, Artificial Sequence
  ENSG00000124155_98 (sequence is synthesized)
tattgcacttcagcatgggcgacagtgtgagaccctgtcacgaaaaaaaaaaaagtttctttttctttaaaattactagactattcttagagcagttttaggtttacagaaaaactgagc

SEQ ID NO: 253935 - DNA, 120 bp, Artificial Sequence
  ENSG00000124155_99 (sequence is synthesized)
acaaagcacagagttcccatatactccctgtctccacacccagaatgtcccttattataaatgtcttgtctttggtgtggtactcttcagtctctcttcatctgtagcagtgcccatgcc

SEQ ID NO: 253936 - DNA, 120 bp, Artificial Sequence
  ENSG00000124155_100 (sequence is synthesized)
ggtaagtgacctttggggtctcagttttcctatctgtaaagggagtgggctggacaatgaacagctgttctccattcttttgttattggttcccatccagagcctcccagctagttgtct

SEQ ID NO: 253937 - DNA, 120 bp, Artificial Sequence
  ENSG00000124155_101 (sequence is synthesized)
caacatcccaggggagaaagcatagctctttgtccattggtttatttattcaatttaggaataatgagtgtattgttttatatgaataaccatacttatttaaaagatcaaactaaacta

SEQ ID NO: 253938 - DNA, 120 bp, Artificial Sequence
  ENSG00000124155_102 (sequence is synthesized)
aatagtacaaacaagcgaaatctctccccaaagtctactatggtgctgtgcaacagaaatataatacaagccacaaatcgaattttcaatttcctagtagcttttttaaaaagtaaaaag

SEQ ID NO: 253939 - DNA, 65 bp, Artificial Sequence
  ENSG00000124155_103 (sequence is synthesized)
aggggccatcacctgagctcgggaagttgaggctaatagtgggctgagattgtgccactgcactc

SEQ ID NO: 253940 - DNA, 120 bp, Artificial Sequence
  ENSG00000124155_104 (sequence is synthesized)
gggaattggacattagcactaacatagaccttaagctgataagcatttacaacctcttctctctgaagcctgctaaagtggaggcttcatctgcatgatgaaaccttggtctccacaacc

SEQ ID NO: 253941 - DNA, 120 bp, Artificial Sequence
  ENSG00000124155_105 (sequence is synthesized)
ccttacctaacccagacattcctttctactgattccagatctttagataataaccaattgccaatcaaaaaatctttgaatccacctgtgatctggaagcccctcccatctttctgaact

SEQ ID NO: 253942 - DNA, 120 bp, Artificial Sequence
  ENSG00000124155_106 (sequence is synthesized)
caaccattgtacatcttacatgtattgattgatgtcttatgtccccctaaaatgtataaaatcaagttataggccgaccaccttgggcccacgtcatcagggcctcccctgagactgtgc

SEQ ID NO: 253943 - DNA, 120 bp, Artificial Sequence
  ENSG00000124155_107 (sequence is synthesized)
tgtccttaaccttggcaaaataaactccaaaattgagacttgtttcagatacttttggtttacagttctaactcaggagtgtcagaagtgaattaatttgtgaacacctagttggtgttg

SEQ ID NO: 253944 - DNA, 120 bp, Artificial Sequence
  ENSG00000124155_108 (sequence is synthesized)
tggtgttggagaatttgttggtgttggaaaagatactgttaccggaaagaggtcccaatccaaaccccaaaagagggttcttggacctcgtgcaagaaagaattcagggtgagtccatag

SEQ ID NO: 253945 - DNA, 120 bp, Artificial Sequence
  ENSG00000124155_109 (sequence is synthesized)
atttattaagaaagtaaaggaataaaagagtggctgctccataggcagaacagccccaagggctgctggttggctatttttttcattatttcttgattatttgctaaacaaggggtggat

SEQ ID NO: 253946 - DNA, 120 bp, Artificial Sequence
  ENSG00000124155_110 (sequence is synthesized)
caaggggtggattattcatgagttttacgggaaaggggtcagcagttcctggaattgagggttcttccccttcttagatcatatagggtaacttcttgacattatgatggcatttgtaaa

SEQ ID NO: 253947 - DNA, 120 bp, Artificial Sequence
  ENSG00000124155_111 (sequence is synthesized)
gtgctggtgggagtgtcttttagcatgttaatgcattataattagcatatcatgagcagtgaggataactagaggtcacttctgttgccatcttagttttggtgggttttggcaggcttc

SEQ ID NO: 253948 - DNA, 120 bp, Artificial Sequence
  ENSG00000124155_112 (sequence is synthesized)
ttggcaggcttctttactgcaacctattttatcagcaaggtctttgtggcctataccttgtaccgacctcctgtctcactctgtgacttagaatgcctaacctcctgggaaagcagccca

SEQ ID NO: 253949 - DNA, 120 bp, Artificial Sequence
  ENSG00000124155_113 (sequence is synthesized)
ttttacccagctcctattcaagatggagtctctctgattcaaacgcctctgacaataccatgtatttggtgttaggaaaaaactctccagactcactcatccctgttctttggtggctaa

SEQ ID NO: 253950 - DNA, 120 bp, Artificial Sequence
  ENSG00000124155_114 (sequence is synthesized)
tcgcacctacacagtgtccctcctctgatgctgaggctctctctgccttccgaggagaaagtggcgacgtgtcctgtgaaaccgcagacttaacacatcttccaaaagccagcttggcag

SEQ ID NO: 253951 - DNA, 120 bp, Artificial Sequence
  ENSG00000124155_115 (sequence is synthesized)
gaggtcactgctagaagcacctctgaaataatctgagccgtcttacctgttcccctttttcagatgggaacactgaggcagccaccctgcagagtgagtctgcagtgctcctgagccacc

SEQ ID NO: 253952 - DNA, 120 bp, Artificial Sequence
  ENSG00000124155_116 (sequence is synthesized)
cccctccaggcttggcaaactcactgccttcttgtctgttgccttgactgcagggaggaccagaggtgctcatttctgggagggtctaggatctgccagctgcacagtgtccaagtcaag

SEQ ID NO: 253953 - DNA, 90 bp, Artificial Sequence
  ENSG00000124155_117 (sequence is synthesized)
cttcagcctcatctactgcacacttgagtccatgagattttagagtgaaatgaaatcttgttatgttgtccagggtggtcttcaacacct

SEQ ID NO: 253954 - DNA, 120 bp, Artificial Sequence
  ENSG00000124155_118 (sequence is synthesized)
agcttcctttttcacttacttttgcctcctttctggagcattgggttttgtgatgattcatagactctttaaggtagggaaagggtttggcaacgttaggcttttgaagctaggaagata

SEQ ID NO: 253955 - DNA, 120 bp, Artificial Sequence
  ENSG00000124155_119 (sequence is synthesized)
gcagagctggagtagatggtgttttgcttccttgggaggggtaaagaggtacagttaattaaatttttttatttctatttttattaaaatttatttttattttctattatttttctaagg

SEQ ID NO: 253956 - DNA, 120 bp, Artificial Sequence
  ENSG00000124155_120 (sequence is synthesized)
agaagataatattagtgcttcctattaggtgccaggcatagcactaaagcacttgcctttctttggtgtagggggagactagtagtaaagtaaaagacctctgaggaagaggttgtacca

SEQ ID NO: 253957 - DNA, 120 bp, Artificial Sequence
  ENSG00000124155_121 (sequence is synthesized)
tatcccaaacggccaaacttaaaaacctttcagtactttagttgattcctatattttcaaacatacggtgaatagtttcacttattttcagcaccattatttgtaccaccttcaaaatct

SEQ ID NO: 253958 - DNA, 120 bp, Artificial Sequence
  ENSG00000124155_122 (sequence is synthesized)
ctatttcagacatcctaactgcatattctataggtttttctgttattattcttttaaatcttctcctttggaaaatttcaaacccaaacccaaacagaatagtgtaataatcccctgtac

SEQ ID NO: 253959 - DNA, 120 bp, Artificial Sequence
  ENSG00000124155_123 (sequence is synthesized)
cccaaacagaatagtgtaataatcccctgtacacaccctgcagccttttttttttttttttaagagacagactgttgctctgtcagctatgccggagtgcagtggcatgatcatggctca

SEQ ID NO: 253960 - DNA, 120 bp, Artificial Sequence
  ENSG00000124155_124 (sequence is synthesized)
aagcaatcctcctacctccgcttccctaggactacaggcatgaaccgccatgcctttaattttttcacagaggcagggtcttgttatgttgcacaggctggtctcaaactcctggcctca

SEQ ID NO: 253961 - DNA, 120 bp, Artificial Sequence
  ENSG00000124155_125 (sequence is synthesized)
gcctcagtctcctaaagtgctgggattataggtgtaagccgctgcctgctggcatatcttaaagcaaatcttagacattgcatcaattaacctttaaatactttaaggatttttaaaaat

SEQ ID NO: 253962 - DNA, 120 bp, Artificial Sequence
  ENSG00000124155_126 (sequence is synthesized)
gtaaccgtatcattaccacttctgttttcccctgtggtcttaaaaatgtctttttataattggtttgtttaaattgggataaacaaggttctcacattgcatttgctttatactaagttc

SEQ ID NO: 253963 - DNA, 120 bp, Artificial Sequence
  ENSG00000124155_127 (sequence is synthesized)
taatctcagcactttgggaggccaacacagaaggaccacttgagtccaggagttcgaaaccagcctggacaacattgtgaggctccccctacctatacaaaaaaaatttttttttttttt

SEQ ID NO: 253964 - DNA, 76 bp, Artificial Sequence
  ENSG00000124155_128 (sequence is synthesized)
ggagttcgaaaccagcctggacaacattgtgaggctccccctacctataccctcactctgtcacccaggctggagt

SEQ ID NO: 253965 - DNA, 120 bp, Artificial Sequence
  ENSG00000124155_129 (sequence is synthesized)
tgctgattcagctgccggccaactcagtcaccaaggtttccatccagtttgagcgggcgctgctgaagtggaccgagtacacgccagatcctaaccatggcttctatgtcagatgggaac

SEQ ID NO: 253966 - DNA, 120 bp, Artificial Sequence
  ENSG00000124155_130 (sequence is synthesized)
gctggggactggggattgtttgctgagtgcctgaacaggacctcctaccctatgcctgcaaccccctccacaaaaaacaaaaaaccctacctcctcccacctggccggaaatttcttctc

SEQ ID NO: 253967 - DNA, 120 bp, Artificial Sequence
  ENSG00000124155_131 (sequence is synthesized)
ctgatctgctccccctgtcctccccatccccatctgattgtgattcccagaactccccgggttgtttgggagtgtttctgaaagcataatccatggccatggaaatgaatcatcctactt

SEQ ID NO: 253968 - DNA, 120 bp, Artificial Sequence
  ENSG00000124155_132 (sequence is synthesized)
cttgggggcattgagagtcagtccacatcagcaagggtagagtggagaggtgggagggctctgggtggtgggtctctaactgtagtgtgcatcagagtcactgggggcacttgtgaaaat

SEQ ID NO: 253969 - DNA, 120 bp, Artificial Sequence
  ENSG00000124155_133 (sequence is synthesized)
aatgtatgttcctggggtccagatcctactaattcagttggtctgggtgtggcccagactttgactttttagcaggcttctcaggagctcctgctgtgctctgtcctcagaccaccccca

SEQ ID NO: 253970 - DNA, 120 bp, Artificial Sequence
  ENSG00000124155_134 (sequence is synthesized)
ggctttgaagccaggctcattggattgaagcccgccccgcccacctcccttgctggttacataaccctggatttctgtaaaacaagcctttaggcggttgcctcccactgccctcatctt

SEQ ID NO: 253971 - DNA, 120 bp, Artificial Sequence
  ENSG00000124155_135 (sequence is synthesized)
ctgtcttttcctctggcacacttggcatcaactgtgtgttatttgcagttccccccacctcctaccccactcagttctcccatcatagtggtttggcctagaatgccctattccaccaac

SEQ ID NO: 253972 - DNA, 120 bp, Artificial Sequence
  ENSG00000124155_136 (sequence is synthesized)
ctggtgacagagtgagactctgtctcaaacacacacacacacacacacaccccagatgagaagttgctgcctccgggaagtttcccttgacgtgtccgtgccccacgcctttgcttccag

SEQ ID NO: 253973 - DNA, 120 bp, Artificial Sequence
  ENSG00000124155_137 (sequence is synthesized)
aaaaaatcattccctcttctgacctcccatgtcgagaccatttataacatgttagaactcgattcctaacaaggaggtgcccgatgatcaaatacacttttttccagggaacttaattat

SEQ ID NO: 253974 - DNA, 120 bp, Artificial Sequence
  ENSG00000124155_138 (sequence is synthesized)
cctcattctattcaatgactgcagcaccatccccaccatcaatgagcatgagcagattaattcatttgacaaatatttgccaagtacctacaaggcatcgttctccatgagcacatagct

SEQ ID NO: 253975 - DNA, 120 bp, Artificial Sequence
  ENSG00000124155_139 (sequence is synthesized)
gtaaacaaaacacagcagcaaaggaccctaccctctaggtgaggcaggcaatagaaaaataaggagataatatgtgagtcatgacaagcattttgaagacaaaatagtggaaggggataa

SEQ ID NO: 253976 - DNA, 120 bp, Artificial Sequence
  ENSG00000124155_140 (sequence is synthesized)
ggagtaatgggggtaaaggaggtgctgctcttttatgtagaccggtcaaagagcagaacctgtagaaagtaagtgagcatcgtgaccagctgggagaagagcaatgcaggaagaagacgc

SEQ ID NO: 253977 - DNA, 120 bp, Artificial Sequence
  ENSG00000124155_141 (sequence is synthesized)
ggttagtgcaaaggccccaggaagactgtgcctgatgtgtttgagcagcagcgatgaggccagtgtggctggggctgagtgggtggggtgggagagtgtaagatgatatggtcagagagg

SEQ ID NO: 253978 - DNA, 120 bp, Artificial Sequence
  ENSG00000124155_142 (sequence is synthesized)
ctgtgggggcaagccttgtaggactgtataaaaacttaggctttgtaagagagatgggaaatcacaggaacatcatgatctgattcaaattgtcacaggatccctctggctgcagtgtgg

SEQ ID NO: 253979 - DNA, 120 bp, Artificial Sequence
  ENSG00000124155_143 (sequence is synthesized)
agagtggcctgtaggggaccaagggtggagacagagggccagtgagtaggctactgcaccagtccaggcaaacactgaagacctgtgtatatgtgttgttccctcggtctgtctcaggtc

SEQ ID NO: 253980 - DNA, 120 bp, Artificial Sequence
  ENSG00000124155_144 (sequence is synthesized)
tgttgaatagtaagaatgctttgctctgttgaagatgattccgttctttacataagtaattaaatgtctttcctttgctgtttcctgatacctaaatgcagtaatatatgctcatgatag

SEQ ID NO: 253981 - DNA, 120 bp, Artificial Sequence
  ENSG00000124155_145 (sequence is synthesized)
aaaacttagaaaataaagaaaagcattaaacaataaagatttccaactcctacaactcaaagaaaacagataaatcatcctactttagaggactaaatgtacaggaactcattgatttgc

SEQ ID NO: 253982 - DNA, 120 bp, Artificial Sequence
  ENSG00000124155_146 (sequence is synthesized)
tcatcaaaaggtgaagagggaagagtagcagccccaggtagagctacccagcaggcgaggctgccctcaggaaccacagccttccctttcctaatgatttctactctgtggcacccacac

SEQ ID NO: 253983 - DNA, 120 bp, Artificial Sequence
  ENSG00000124157_0 (sequence is synthesized)
aagatttttcaagcaagatgaagtccatcatcctctttgtcctttccctgctccttatcttggagaagcaagcagctgtgatgggacaaaaaggtggatcaaaaggccaattgccaagcg

SEQ ID NO: 253984 - DNA, 120 bp, Artificial Sequence
  ENSG00000124157_1 (sequence is synthesized)
gatcttcccaatttccacatggacaaaagggccagcactattttggacaaaaagaccaacaacatactaaatccaaaggcagtttttctattcaacacacatatcatgtagacatcaatg

SEQ ID NO: 253985 - DNA, 120 bp, Artificial Sequence
  ENSG00000124157_2 (sequence is synthesized)
atcatgactggacccgaaaaagtcagcaatatgatttgaatgccctacataaggcgacaaaatcaaaacaacacctaggtggaagtcaacaactgctcaattataaacaagaaggcagag

SEQ ID NO: 253986 - DNA, 120 bp, Artificial Sequence
  ENSG00000124157_3 (sequence is synthesized)
accatgataaatcaaaaggtcattttcacatgatagttatacatcataaaggaggccaagctcatcatgggacacaaaatccttctcaagatcaggggaatagcccatctggaaagggat

SEQ ID NO: 253987 - DNA, 120 bp, Artificial Sequence
  ENSG00000124157_4 (sequence is synthesized)
tatccagtcaatgttcaaacacagaaaaaaggctatgggttcatggactaagtaaagaacaagcttcagcctctggtgcacaaaaaggtagaacacaaggtggatcccaaagcagttatg

SEQ ID NO: 253988 - DNA, 120 bp, Artificial Sequence
  ENSG00000124157_5 (sequence is synthesized)
ttctccaaactgaagaactagtagttaacaaacaacaacgtgagactaaaaattctcatcaaaataaagggcattaccaaaatgtggttgacgtgagagaggaacattcaagtaaactac

SEQ ID NO: 253989 - DNA, 120 bp, Artificial Sequence
  ENSG00000124157_6 (sequence is synthesized)
aaacttcactccatcctgcacatcaagacagactccaacatggacccaaagacatttttactacccaagatgagctcctagtatataacaagaatcaacaccagacaaaaaatctcagtc

SEQ ID NO: 253990 - DNA, 120 bp, Artificial Sequence
  ENSG00000124157_7 (sequence is synthesized)
aagatcaagagcatggccggaaggcacataaaatatcatacccgtcttcacgtacagaagaaagacaacttcaccatggagaaaagagtgtacagaaagatgtatccaaaggcagcattt

SEQ ID NO: 253991 - DNA, 120 bp, Artificial Sequence
  ENSG00000124157_8 (sequence is synthesized)
tcaagatcaagagcatggccataaggaaaataaaatatcataccaatcttcaagtacagaagaaagacatctcaactgtggagaaaagggcatccagaaaggtgtatccaaaggcagtat

SEQ ID NO: 253992 - DNA, 120 bp, Artificial Sequence
  ENSG00000124157_9 (sequence is synthesized)
ttcgatccaaactgaagagcaaatacatggcaagtctcaaaaccaggtaagaattcctagtcaagctcaagagtatggccataaggaaaataaaatatcataccaatcttcgagtacaga

SEQ ID NO: 253993 - DNA, 120 bp, Artificial Sequence
  ENSG00000124157_10 (sequence is synthesized)
agaaagacgtctcaacagtggagaaaaggatgtacagaaaggtgtatccaaaggcagtatttctatccaaactgaagagaaaatacatggcaagtctcaaaaccaggtaacaattcctag

SEQ ID NO: 253994 - DNA, 120 bp, Artificial Sequence
  ENSG00000124157_11 (sequence is synthesized)
tcaagatcaagagcatggccataaggaaaataaaatgtcataccaatcttcaagtacagaagaaagacgactcaactatggaggaaagagcacgcagaaagatgtatcccaaagcagtat

SEQ ID NO: 253995 - DNA, 120 bp, Artificial Sequence
  ENSG00000124157_12 (sequence is synthesized)
ttctttccaaattgaaaagctagtagaaggcaagtctcaaatccagacaccaaatcctaatcaagatcaatggtctggccaaaatgcaaaaggaaagtctggtcaatctgcagatagcaa

SEQ ID NO: 253996 - DNA, 120 bp, Artificial Sequence
  ENSG00000124157_13 (sequence is synthesized)
acaagacctactcagtcatgaacaaaaaggcagatacaaacaggaatccagtgagtcacataatattgtaattactgagcatgaggttgcccaagatgatcatttgacacaacaatataa

SEQ ID NO: 253997 - DNA, 120 bp, Artificial Sequence
  ENSG00000124157_14 (sequence is synthesized)
tgaagacagaaatccaatatctacatagccctgttgcttagcaaccacttgaaaagctggaccaatagcaaggtgtcacccgacctcagtgaagtctttgatgtttctgagaggcagact

SEQ ID NO: 253998 - DNA, 120 bp, Artificial Sequence
  ENSG00000124157_15 (sequence is synthesized)
cccatgtggtcccagatccttggtccatggatgacaccaccttcccatgcttccttgcattaggctttctaaacccggagccccttcaaacttccaataaagggatcattttctgcttta

SEQ ID NO: 253999 - DNA, 120 bp, Artificial Sequence
  ENSG00000124159_0 (sequence is synthesized)
ccaagcgccatgagaggccttctttgctggcccgtgttgctgctccttcttcagccctgggaaacccagctccagttgacaggtcccaggtgtcacactgggcccctggatctggtgttc

SEQ ID NO: 254000 - DNA, 120 bp, Artificial Sequence
  ENSG00000124159_1 (sequence is synthesized)
gtgattgacagctcccgcagcgtgcgccctttcgagttcgagaccatgcggcagttcctcatgggcctcctccgaggcctgaacgtgggtcccaacgccacgcgcgttggcgtgatccag

SEQ ID NO: 254001 - DNA, 120 bp, Artificial Sequence
  ENSG00000124159_2 (sequence is synthesized)
tattcgagtcaagtgcagagcgtcttccctctccgcgcgttctctcgccgcgaggacatggagcgcgccatccgcgacctggtgcctctggcgcaaggcaccatgacgggactggcaatc

SEQ ID NO: 254002 - DNA, 120 bp, Artificial Sequence
  ENSG00000124159_3 (sequence is synthesized)
cagtacgccatgaacgtggccttcagtgtggccgagggcgcgcgaccgccagaggagcgcgtgccgcgtgtcgctgtcatcgtgacagacgggcggccccaggaccgcgtggccgaggtg

SEQ ID NO: 254003 - DNA, 120 bp, Artificial Sequence
  ENSG00000124159_4 (sequence is synthesized)
gcggcacaggcgcgcgcccgcggcattgaaatttacgcggtgggggtgcagcgcgcggacgtgggctccctgcgcgccatggcatcgcccccgctagacgagcacgtcttcctcgtagag

SEQ ID NO: 254004 - DNA, 120 bp, Artificial Sequence
  ENSG00000124159_5 (sequence is synthesized)
tccttcgacctcatccaggagttcggcctgcagttccagagccggctgtgtgggaaggaccagtgtgctgaggggggacatggttgccagcaccaatgtgtcaatgcctgggccatgttc

SEQ ID NO: 254005 - DNA, 120 bp, Artificial Sequence
  ENSG00000124159_6 (sequence is synthesized)
cactgcacctgcaacccaggctacaagctagcagcagataacaagagctgtttggccattgatctgtgtgctgaagggacccatggatgtgagcaccactgcgtcaattccccaggctcc

SEQ ID NO: 254006 - DNA, 120 bp, Artificial Sequence
  ENSG00000124159_7 (sequence is synthesized)
tatttctgtcactgccaagttggctttgtactccagcaggaccagaggagctgcagggccattgactactgcagctttgggaaccatagctgtcagcatgagtgtgttagcacccctggt

SEQ ID NO: 254007 - DNA, 120 bp, Artificial Sequence
  ENSG00000124159_8 (sequence is synthesized)
gggccacggtgccactgcagagagggccatgacttgcagcctgatgggaggagctgtcaggtccgggacctttgcaatggcgtggaccatggctgtgagttccagtgtgtgagcgagggc

SEQ ID NO: 254008 - DNA, 120 bp, Artificial Sequence
  ENSG00000124159_9 (sequence is synthesized)
aggcagatggcaagagctgcaaccggtgccgggaaggccacgtggaccttgttctgctggttgatggctccaagagcgtgcgtccacaaaacttcgagctagtgaagcgcttcgtgaacc

SEQ ID NO: 254009 - DNA, 120 bp, Artificial Sequence
  ENSG00000124159_10 (sequence is synthesized)
agattgtggacttcctagatgtgtcccccgagggcacgcgggtggggctggtgcagttctcgagccgcgtgcgcaccgagttccctctgggtcgctacggcaccgcagccgaggtgaagc

SEQ ID NO: 254010 - DNA, 120 bp, Artificial Sequence
  ENSG00000124159_11 (sequence is synthesized)
aggcggtcctggccgtggagtacatggaacgcggcaccatgacagggctggcgttgcggcacatggtggagcacagcttctccgaggcgcagggtgcacggccccgtgcccttaacgtgc

SEQ ID NO: 254011 - DNA, 120 bp, Artificial Sequence
  ENSG00000124159_12 (sequence is synthesized)
ctcgtgttggcctggtcttcacggatggccgctcccaggatgacatctcggtgtgggcagcgcgcgccaaggaggaaggcatcgtcatgtacgccgtgggcgtgggcaaggcggtggagg

SEQ ID NO: 254012 - DNA, 120 bp, Artificial Sequence
  ENSG00000124159_13 (sequence is synthesized)
cggagctgcgcgagatcgcctcggagccagcggaactgcacgtgtcctatgccccggacttcggcaccatgacgcacctgctggagaacctcagaggcagcatctgtccagaggagggca

SEQ ID NO: 254013 - DNA, 120 bp, Artificial Sequence
  ENSG00000124159_14 (sequence is synthesized)
tcagcgcagggacagagcttcggagcccatgcgaatgcgaaagcctcgtggagttccagggccgcacgctgggggcgctcgagagcctgacgctgaacctggcccagctgacggcgcgcc

SEQ ID NO: 254014 - DNA, 120 bp, Artificial Sequence
  ENSG00000124159_15 (sequence is synthesized)
tggaggatctggagaaccagctggccaaccagaagtgagggccacggacggcccagacccgggctggggcgcggcaccacggacggtgccccttgcgcgccatcggtgcgccggggccag

SEQ ID NO: 254015 - DNA, 120 bp, Artificial Sequence
  ENSG00000124159_16 (sequence is synthesized)
gcagaacctgggcccgtccggcttgggctgtcggggcggaggcgctggcgggcttccggcattgagctgagttggcctcgcccggaccattaggcggactgcggcgtcagggggatagcg

SEQ ID NO: 254016 - DNA, 120 bp, Artificial Sequence
  ENSG00000124159_17 (sequence is synthesized)
ggtggtgagggaaggggcacgtgctagaccggcacgccctcgccgcgtgctgcgctcagttctttgttggatttcttgtttgtgttcttaaaaaaataaaaaaaactgatttccacgggg

SEQ ID NO: 254017 - DNA, 120 bp, Artificial Sequence
  ENSG00000124159_18 (sequence is synthesized)
ctgcctggcagtccccacctagggcacgctgccacgccgccgttacctggtccaagtgcccgggaggctccgcctgtcggcttcgctctgcagctgcatctctgatctgtcctgcaggct

SEQ ID NO: 254018 - DNA, 120 bp, Artificial Sequence
  ENSG00000124160_0 (sequence is synthesized)
actctccgcccggccgccattgcctcgtgcccgcgccggtcggttggtggcgcctttgtcctacggcgggcaggtgggccgacgcggaggcggcagcggcgggcctgaggcgaaggagcg

SEQ ID NO: 254019 - DNA, 120 bp, Artificial Sequence
  ENSG00000124160_1 (sequence is synthesized)
gccgggagcccgccgcgctggtagcgatattaataaggcagcggaaagaagaaatatgaatacggctccatcaagacccagccccacacgaagggatccatatggctttggagacagtcg

SEQ ID NO: 254020 - DNA, 120 bp, Artificial Sequence
  ENSG00000124160_2 (sequence is synthesized)
agattcaaggcgtgatcgatccccaattcgaggaagtccaaggagagagcccagggatggcagaaatggccgggatgcccgggacagcagagacattcgagacccccgagacttgcggga

SEQ ID NO: 254021 - DNA, 120 bp, Artificial Sequence
  ENSG00000124160_3 (sequence is synthesized)
ccacagacatagtagagatttgcgggatcacagagacagcaggagtgtgcgcgacgttcgggacgtgagggatcttagagactttcgtgatctaagagactctagggattttcgagatca

SEQ ID NO: 254022 - DNA, 120 bp, Artificial Sequence
  ENSG00000124160_4 (sequence is synthesized)
gcgagaccccatgtacgacagatacagagacatgagagactcccgagatcctatgtacaggagagaaggctcttatgaccgatacctacgaatggatgactattgcaggagaaaggatga

SEQ ID NO: 254023 - DNA, 120 bp, Artificial Sequence
  ENSG00000124160_5 (sequence is synthesized)
ctcttattttgaccgttacagagatagctttgatggacggggccctccaggcccagaaagtcagtctcgtgcaaaagagcgtttgaaacgtgaggaacggcgtagagaagagctttatcg

SEQ ID NO: 254024 - DNA, 120 bp, Artificial Sequence
  ENSG00000124160_6 (sequence is synthesized)
tcaatattttgaggaaatccagagacgctttgatgccgaaaggcccgttgattgttctgtgattgtggtcaacaaacagacaaaagactatgctgagtctgtggggcggaaggtgcgaga

SEQ ID NO: 254025 - DNA, 120 bp, Artificial Sequence
  ENSG00000124160_7 (sequence is synthesized)
cctgggcatggtagtggacttgatcttccttaacacagaagtgtcactgtcacaagccttggaggatgttagcaggggaggttctccttttgctattgtcatcacccagcaacaccagat

SEQ ID NO: 254026 - DNA, 120 bp, Artificial Sequence
  ENSG00000124160_8 (sequence is synthesized)
tcaccgctcctgcacagtcaacatcatgtttggaaccccgcaagagcatcgcaacatgccccaagcagatgccatggtgctggtggccagaaattatgagcgttacaagaatgagtgccg

SEQ ID NO: 254027 - DNA, 120 bp, Artificial Sequence
  ENSG00000124160_9 (sequence is synthesized)
ggagaaggaacgtgaggagattgccagacaggcagccaagatggccgatgaagccatcctgcaggaaagagagagaggaggccctgaggagggagtgcgtgggggccaccctccagccat

SEQ ID NO: 254028 - DNA, 120 bp, Artificial Sequence
  ENSG00000124160_10 (sequence is synthesized)
ccagagcctcatcaacctgctggcagacaacaggtacctcactgctgaagagactgacaagatcatcaactacctgcgagagcggaaggagcggctgatgaggagcagcaccgactctct

SEQ ID NO: 254029 - DNA, 120 bp, Artificial Sequence
  ENSG00000124160_11 (sequence is synthesized)
gcctggcccgatttcccgccaaccactcggggcgacctcgggtgcctcgctgaagacacagccaagctcccaaccgctccagagcggccaagtgctcccctctgctacacccactccatc

SEQ ID NO: 254030 - DNA, 120 bp, Artificial Sequence
  ENSG00000124160_12 (sequence is synthesized)
tgcaccccccacctcccagcaagagcttcaggccaaaatcctcagcctcttcaatagtggcacagtgacggccaatagcagctctgcatccccctcggttgctgccggaaacaccccaaa

SEQ ID NO: 254031 - DNA, 120 bp, Artificial Sequence
  ENSG00000124160_13 (sequence is synthesized)
tgggccccagacctggggctccttcccaagggctttttggccagccttccagtcgcctggcacctgctagcaacatgactagccagaggcctgtgtcttccacaggtatcaactttgaca

SEQ ID NO: 254032 - DNA, 120 bp, Artificial Sequence
  ENSG00000124160_14 (sequence is synthesized)
atccaagtgtacagaaggctctggataccctgatccagagtggccctgctctctcccacctggttagccagaccacagcacagatggggcagccacaggcccccatgggatcttaccaga

SEQ ID NO: 254033 - DNA, 120 bp, Artificial Sequence
  ENSG00000124160_15 (sequence is synthesized)
ggcattactgaagctaaatctttcaactctccccagtcccctcatcccctggcctcctcccacttacttgttctaaatagagctgtttggaggatgttctctgcgctcccaggccggcat

SEQ ID NO: 254034 - DNA, 120 bp, Artificial Sequence
  ENSG00000124160_16 (sequence is synthesized)
cgagtgtcatcaatttctaccacctgctctctcttctgcccaaggctgtgttgcttattccttacaaagtttatactgcatttggggctgtatctttttttgttttttgttttgtagaaa

SEQ ID NO: 254035 - DNA, 120 bp, Artificial Sequence
  ENSG00000124160_17 (sequence is synthesized)
ataaatatctccgggggcagtacaggtgtctgggcttgtatttgatggggtttctccggtccctgtttctactggatttggagccaggcccagctagccaagtttggaatggcatttgtc

SEQ ID NO: 254036 - DNA, 120 bp, Artificial Sequence
  ENSG00000124160_18 (sequence is synthesized)
atgtcagtagccaccacctttgttcattgtgaacctaccaaggctttccagcttcatacacattgaccagagctcaagctcctgcctgcaactcctgcctagagttgaagaaaagcaaac

SEQ ID NO: 254037 - DNA, 120 bp, Artificial Sequence
  ENSG00000124160_19 (sequence is synthesized)
tggccttggcaggcacagtgtcatcataccctcaccccatatgtttggggtctgcttgaggattcataaatcagccactctggattgttgaggaatggccatggcagccacagaaaaaag

SEQ ID NO: 254038 - DNA, 120 bp, Artificial Sequence
  ENSG00000124160_20 (sequence is synthesized)
tttttttctcttttcttttttgttttcatttcattggaagatctccaatggactgaacagctccagtcagcagcagttaccacaaactgtgaatctgggccccaccactcttccctgtta

SEQ ID NO: 254039 - DNA, 120 bp, Artificial Sequence
  ENSG00000124160_21 (sequence is synthesized)
gtgaatctgggccccaccactcttccctgttaaccagttctgtcagcatccccctctccagcagcacttccatgaagttggttctgagactctggccgtgaacacccgtttcttcagtga

SEQ ID NO: 254040 - DNA, 120 bp, Artificial Sequence
  ENSG00000124160_22 (sequence is synthesized)
tttgttttgggcttttggctcaaaaccccaggctcttgtttttgtctagactcttattctgtttcctgagcagcaggaggtagggaccactttgatgtcagacttctggtagctggacat

SEQ ID NO: 254041 - DNA, 120 bp, Artificial Sequence
  ENSG00000124160_23 (sequence is synthesized)
gttctcgagatgggtggctgttcgcgacttttgtaccagagtgaaattgttagaaggagggtttctggctgtggttctaaatggagccccaggaagctgccctctccccagggtttgtgc

SEQ ID NO: 254042 - DNA, 120 bp, Artificial Sequence
  ENSG00000124160_24 (sequence is synthesized)
tcagtagagccctgtggatcacagtcttgaggtcctctagcaggggtgagggagagcagcgacttcagctgagtccctgccagtggttaagcaaacaatggtttcaaaattcaaggtccc

SEQ ID NO: 254043 - DNA, 120 bp, Artificial Sequence
  ENSG00000124160_25 (sequence is synthesized)
caaatggcagcattttatgttctgacctgtttgtgttatatagtggttttttttttcctctttggaactcttgtgttgttaataaaatgaaatgattactttttaattaaaatgaaaaaa

SEQ ID NO: 254044 - DNA, 120 bp, Artificial Sequence
  ENSG00000124164_0 (sequence is synthesized)
ccccgcccctggagccggcggcgcagggcgcagcttcccgccgccagagcgggccagcctgctgcgtgcgtgcgtgtgtacgactctgcgtgcgtgcgtgcgtgcgtgcgtgccgtcagc

SEQ ID NO: 254045 - DNA, 120 bp, Artificial Sequence
  ENSG00000124164_1 (sequence is synthesized)
gcggcctcgccctcgccctccgcccctgcgcctgcaccgcgtagaccgacccccccccagcgcgcccacccggtagaggacccccgcccgtgccccgaccggtccccgcctttttgtaaa

SEQ ID NO: 254046 - DNA, 120 bp, Artificial Sequence
  ENSG00000124164_2 (sequence is synthesized)
cctttttgtaaaacttaaagcgggcgcagcattaacgcttcccgccccggtgacctctcaggggtctccccgccaaaggtgctccgccgctaaggaacatggcgaaggtggagcaggtcc

SEQ ID NO: 254047 - DNA, 120 bp, Artificial Sequence
  ENSG00000124164_3 (sequence is synthesized)
tgagcctcgagccgcagcacgagctcaaattccgaggtcccttcaccgatgttgtcaccaccaacctaaagcttggcaacccgacagaccgaaatgtgtgttttaaggtgaagactacag

SEQ ID NO: 254048 - DNA, 120 bp, Artificial Sequence
  ENSG00000124164_4 (sequence is synthesized)
caccacgtaggtactgtgtgaggcccaacagcggaatcatcgatgcaggggcctcaattaatgtatctgtgatgttacagcctttcgattatgatcccaatgagaaaagtaaacacaagt

SEQ ID NO: 254049 - DNA, 120 bp, Artificial Sequence
  ENSG00000124164_5 (sequence is synthesized)
ttatggttcagtctatgtttgctccaactgacacttcagatatggaagcagtatggaaggaggcaaaaccggaagaccttatggattcaaaacttagatgtgtgtttgaattgccagcag

SEQ ID NO: 254050 - DNA, 120 bp, Artificial Sequence
  ENSG00000124164_6 (sequence is synthesized)
agaatgataaaccacatgatgtagaaataaataaaattatatccacaactgcatcaaagacagaaacaccaatagtgtctaagtctctgagttcttctttggatgacaccgaagttaaga

SEQ ID NO: 254051 - DNA, 120 bp, Artificial Sequence
  ENSG00000124164_7 (sequence is synthesized)
aggttatggaagaatgtaagaggctgcaaggtgaagttcagaggctacgggaggagaacaagcagttcaaggaagaagatggactgcggatgaggaagacagtgcagagcaacagcccca

SEQ ID NO: 254052 - DNA, 120 bp, Artificial Sequence
  ENSG00000124164_8 (sequence is synthesized)
tttcagcattagccccaactgggaaggaagaaggccttagcacccggctcttggctctggtggttttgttctttatcgttggtgtaattattgggaagattgccttgtagaggtagcatg

SEQ ID NO: 254053 - DNA, 120 bp, Artificial Sequence
  ENSG00000124164_9 (sequence is synthesized)
cacaggatggtaaattggattggtggatccaccatatcatgggatttaaatttatcataaccatgtgtaaaaagaaattaatgtatgatgacatctcacaggtcttgcctttaaattacc

SEQ ID NO: 254054 - DNA, 120 bp, Artificial Sequence
  ENSG00000124164_10 (sequence is synthesized)
cctccctgcacacacatacacagatacacacacacaaatataatgtaacgatcttttagaaagttaaaaatgtatagtaactgattgagggggaaaagaatgatctttattaatgacaag

SEQ ID NO: 254055 - DNA, 120 bp, Artificial Sequence
  ENSG00000124164_11 (sequence is synthesized)
ggaaaccatgagtaatgccacaatggcatattgtaaatgtcattttaaacattggtaggccttggtacatgatgctggattacctctcttaaaatgacacccttcctcgcctgttggtgc

SEQ ID NO: 254056 - DNA, 120 bp, Artificial Sequence
  ENSG00000124164_12 (sequence is synthesized)
tggcccttggggagctggagcccagcatgctggggagtgcggtcagctccacacagtagtccccacgtggcccactcccggcccaggctgctttccgtgtcttcagttctgtccaagcca

SEQ ID NO: 254057 - DNA, 120 bp, Artificial Sequence
  ENSG00000124164_13 (sequence is synthesized)
tcagctccttgggactgatgaacagagtcagaagcccaaaggaattgcactgtggcagcatcagacgtactcgtcataagtgagaggcgtgtgttgactgattgacccagcgctttggaa

SEQ ID NO: 254058 - DNA, 120 bp, Artificial Sequence
  ENSG00000124164_14 (sequence is synthesized)
ataaatggcagtgctttgttcacttaaagggaccaagctaaatttgtattggttcatgtagtgaagtcaaactgttattcagagatgtttaatgcatatttaacttatttaatgtatttc

SEQ ID NO: 254059 - DNA, 120 bp, Artificial Sequence
  ENSG00000124164_15 (sequence is synthesized)
atctcatgttttcttattgtcacaagagtacagttaatgctgcgtgctgctgaactctgttgggtgaactggtattgctgctggagggctgtgggctcctctgtctctggagagtctggt

SEQ ID NO: 254060 - DNA, 120 bp, Artificial Sequence
  ENSG00000124164_16 (sequence is synthesized)
catgtggaggtggggtttattgggatgctggagaagagctgccaggaagtgttttttctgggtcagtaaataacaactgtcatagggagggaaattctcagtagtgacagtcaactctag

SEQ ID NO: 254061 - DNA, 120 bp, Artificial Sequence
  ENSG00000124164_17 (sequence is synthesized)
gttaccttttttaatgaagagtagtcagtcttctagattgttcttataccacctctcaaccattactcacacttccagcgcccaggtccaagtctgagcctgacctccccttggggacct

SEQ ID NO: 254062 - DNA, 120 bp, Artificial Sequence
  ENSG00000124164_18 (sequence is synthesized)
agcctggagtcaggacaaatggatcgggctgcagagggttagaagcgagggcaccagcagttgtgggtggggagcaagggaagagagaaactcttcagcgaatccttctagtactagttg

SEQ ID NO: 254063 - DNA, 120 bp, Artificial Sequence
  ENSG00000124164_19 (sequence is synthesized)
agagtttgactgtgaattaattttatgccataaaagaccaacccagttctgtttgactatgtagcatcttgaaaagaaaaattataataaagccccaaaattaagaattcttttgtcatt

SEQ ID NO: 254064 - DNA, 120 bp, Artificial Sequence
  ENSG00000124164_20 (sequence is synthesized)
ttgtcacatttgctctatggggggaattattattttatcatttttattattttgccattggaaggttaactttaaaatgagccctatcactgagaaatacgtgtttcatgatttaactct

SEQ ID NO: 254065 - DNA, 120 bp, Artificial Sequence
  ENSG00000124164_21 (sequence is synthesized)
gtgtgtgtgtgtgtgtattttttttttggttgtcttcagctgacagtatgaaaaatgaaactgctgaaaaagctgagcacctggtcacccttggccttccattgctttggccttcagtaa

SEQ ID NO: 254066 - DNA, 120 bp, Artificial Sequence
  ENSG00000124164_22 (sequence is synthesized)
attgctttggccttcagtaaaaagcagcctcccttctaggtcagggaaccatgccattgagactagtaacgggcgttctgggcacagtcccactgtgcacaggtttgagaggacaagttc

SEQ ID NO: 254067 - DNA, 120 bp, Artificial Sequence
  ENSG00000124164_23 (sequence is synthesized)
atcagaaggaaggcagtccttagaagtcacatacgttgagccacgttgctcctaagcctggctctgtcaagctgggtcaggggccttgaaactggagaagtggaagtctatggttggtct

SEQ ID NO: 254068 - DNA, 120 bp, Artificial Sequence
  ENSG00000124164_24 (sequence is synthesized)
gagtaagtaacttcctgtcttcatgaaaaaagttgactttgaatcccaggtactcacagaaatggtgaacagacttagttgttacccaggcacccatggattgtgttgagtgtgcagaca

SEQ ID NO: 254069 - DNA, 120 bp, Artificial Sequence
  ENSG00000124164_25 (sequence is synthesized)
gggaggccaccccaataggaattcgtctccaggatttttcccatgtgtcccccagtacttataaaagggagtgaaaagaccgagctgtaaggcatgtgccttctgccacctgactttccg

SEQ ID NO: 254070 - DNA, 120 bp, Artificial Sequence
  ENSG00000124164_26 (sequence is synthesized)
tgaggggactaaaatttactaattgtagttgctgcagccagttaagtcctgtagcttccaggccctcatgtctttgataggagagtgcttaggtggtccccaacagtgcctaggggtaca

SEQ ID NO: 254071 - DNA, 120 bp, Artificial Sequence
  ENSG00000124164_27 (sequence is synthesized)
gtacagtcccattacactagagcagggctctatttatttttaaaggatatggccgtgtgttttgataaaactttattcacaaaaacagccgggtcatgggatttggcttgtgagtctgta

SEQ ID NO: 254072 - DNA, 120 bp, Artificial Sequence
  ENSG00000124164_28 (sequence is synthesized)
acagttcttaaaaagaatatctgagaaactactctgttttagacctttgaaggtgatttagagttttgtgtacatctaggagaaggtgttcagcttctcagaggatgtggacattttggt

SEQ ID NO: 254073 - DNA, 120 bp, Artificial Sequence
  ENSG00000124164_29 (sequence is synthesized)
tgcagctaaaaatcagtctctgaagtctctctcccttctagaggttaggacttggtgaacatgtttgtgggccttttgactgagtggcagaaggaaactgctcaggaagagaaacaggtg

SEQ ID NO: 254074 - DNA, 120 bp, Artificial Sequence
  ENSG00000124164_30 (sequence is synthesized)
actgatgggaaggttgattattttctcagtcatcctggcagccaaaaatgtgccaggaaaagaaagaatgtggagcacgcgtggctcctggaggacttggagatgcatgcacatttaggg

SEQ ID NO: 254075 - DNA, 120 bp, Artificial Sequence
  ENSG00000124164_31 (sequence is synthesized)
tgttttccctagaattacataatgaaaaaaagaataaggcaaagaggaggtgaatatggggcctgtcacaacggcctgccctgccccaagagggttaagagtcagataatcgggacgaaa

SEQ ID NO: 254076 - DNA, 120 bp, Artificial Sequence
  ENSG00000124164_32 (sequence is synthesized)
ctggcatggaaagagcgagcctagggaggatgccgctgggcagtgtgcatgggggagctgctgccaggctgccctccagtctgctcctgtggttactggctccacagcacctcagagagg

SEQ ID NO: 254077 - DNA, 120 bp, Artificial Sequence
  ENSG00000124164_33 (sequence is synthesized)
aaatgccagccatagtgctcacaaatgcagaagagatggaagcggtgacagaatcctgaaagtttttattgattgaagttttaaattggtaacttaagcttccttggcacgatacaaaat

SEQ ID NO: 254078 - DNA, 120 bp, Artificial Sequence
  ENSG00000124164_34 (sequence is synthesized)
acctcttaaagacagcaggcttttttatttgtaggtgtgaggaactggctttaacttttttctcctcctagtttgcatgttttccttctctcgtcttctgaactgctggcaccagcagta

SEQ ID NO: 254079 - DNA, 120 bp, Artificial Sequence
  ENSG00000124164_35 (sequence is synthesized)
atacatactgataaaatcaaaattgatttttaccagtggccagtttatggctagagagacgacttatacctccataacacagaagggggaaaaatgaagaacctccagtgatccgtgaaa

SEQ ID NO: 254080 - DNA, 120 bp, Artificial Sequence
  ENSG00000124164_36 (sequence is synthesized)
acctaaacgctttcaaacaaatcccaggaacagaattgctatcgaaagatatcattgcccagtttgcaggctatgttgagtcagatagaactgaatgtagtgagagctcagagctacaga

SEQ ID NO: 254081 - DNA, 120 bp, Artificial Sequence
  ENSG00000124164_37 (sequence is synthesized)
gcctttcagatgaatttgaaaacagactctgtgtgtgtgtgcatgtgtgcatgtgtgcatgtgtggcatatgtgccgtatgtcagtagcttgacagttttcaaatcgtgcctatattttt

SEQ ID NO: 254082 - DNA, 120 bp, Artificial Sequence
  ENSG00000124164_38 (sequence is synthesized)
ttgcatacacaaatttttgtgtttgcaaactcagaatccatgccaaaatacaatgttatatgtcattttcagctccttctctaaaggaatggcccatttctcattgtagtttgagaaata

SEQ ID NO: 254083 - DNA, 120 bp, Artificial Sequence
  ENSG00000124164_39 (sequence is synthesized)
catgtatgaagagataggggtcttgggcttcccagtgtcactttgaacacctgaataacatttaactcctgagaccttctcggtgtagaggccactgcttccccctgctggagatggcat

SEQ ID NO: 254084 - DNA, 120 bp, Artificial Sequence
  ENSG00000124164_40 (sequence is synthesized)
ttcattgaagggcctctcgtggctttccctgcccccggctgtctggcctgaagaaggagaaagaaccaaactgaactatgaaaagttaccactctgaggagacctctcttaattaacact

SEQ ID NO: 254085 - DNA, 120 bp, Artificial Sequence
  ENSG00000124164_41 (sequence is synthesized)
tggggccatgtttgctgttgttgagaaggagtgttctcaaagatgagctggaatggaattgtatttagaaaggcccctgcaaagtatatagatggatgactctagttcatgacatacaaa

SEQ ID NO: 254086 - DNA, 120 bp, Artificial Sequence
  ENSG00000124164_42 (sequence is synthesized)
tcccataaggccaacgaccactcttctggaacaccaagagcagctctgagatcatgctggccctacgcgaattgagtttctgtggcctaattggatttggagaacgccttccctggcccc

SEQ ID NO: 254087 - DNA, 120 bp, Artificial Sequence
  ENSG00000124164_43 (sequence is synthesized)
ttttcctcagacagatctgctctgataggaaccttttcaagaaagttactgttgtttcaatgccactccttacctgtatagaacatttccaatacattcgctcattgaacttaatccttg

SEQ ID NO: 254088 - DNA, 120 bp, Artificial Sequence
  ENSG00000124164_44 (sequence is synthesized)
caactgtgactggggggtagatggctctgtttgcatacgaagaaataaaggctccaggaggttaaatcgggcaactttttagaactaaatcagtctctgtaaggcctacattgctaagat

SEQ ID NO: 254089 - DNA, 120 bp, Artificial Sequence
  ENSG00000124164_45 (sequence is synthesized)
accatttcagctctgaaaatctgcttcagggaagtgagtggatgaggccttcctgcctcagctactctgcccgtctgtacatcttttgtgtctgcctccgtaccttattcagttattttc

SEQ ID NO: 254090 - DNA, 120 bp, Artificial Sequence
  ENSG00000124164_46 (sequence is synthesized)
acactaaagtaagtagaattaagactgtagttcagatgctttttctttttctgttggaaactgaacacactacagacagtgaaaaaaggtacatattccattttctcattgcctgaagat

SEQ ID NO: 254091 - DNA, 120 bp, Artificial Sequence
  ENSG00000124164_47 (sequence is synthesized)
ctctgctgatgctcctggagaatgactttgggggctttagaaagaatattgccagtccgtctcggcaaggagatgatgggagcgctttatatggaggctttacatgacttgtaaattaaa

SEQ ID NO: 254092 - DNA, 120 bp, Artificial Sequence
  ENSG00000124164_48 (sequence is synthesized)
tgtgaatgagggcagttgattaaaattggtattacagaagggccctgctgaggtttgaaaacagctgagctgctgatgtctcaggcctttccctgaattagcactgcggttctccaggat

SEQ ID NO: 254093 - DNA, 120 bp, Artificial Sequence
  ENSG00000124164_49 (sequence is synthesized)
atcagcaaagagggcaagtaatagaagcccctgataaggagcgtcagccgacaggcaagcttgggaggctgtgggaatgggtctgcccccagcttcacagacctcttcctccagcctctg

SEQ ID NO: 254094 - DNA, 120 bp, Artificial Sequence
  ENSG00000124164_50 (sequence is synthesized)
aatcccattagccacagcctagaacattagctgagctgcacaagctcacccacccctgtgccagggggccctgacctccctccatgccatgtttttggctgtatctacggcacttaacaa

SEQ ID NO: 254095 - DNA, 120 bp, Artificial Sequence
  ENSG00000124164_51 (sequence is synthesized)
taggggctttttattttcattacagagatattttgaaaaatttaaaagacatgaactcacataaacagttatggatgatagttaaaagagaaacgggtggaggtggatgagaggttgtct

SEQ ID NO: 254096 - DNA, 120 bp, Artificial Sequence
  ENSG00000124164_52 (sequence is synthesized)
tcatgaatataattacttgagatttttttttcttaatggaattagtttattagaaaatgtctgtgttaaatccgtagaaaaggaagaaaagtgtagcaacaaaaatgtagccattatcta

SEQ ID NO: 254097 - DNA, 120 bp, Artificial Sequence
  ENSG00000124164_53 (sequence is synthesized)
acttgccataaatatttgcagttatgataccttggaatgttgccacgatatggattgctttgattaaaagatgtcagttgaataaaacagtactgtgggagaatcgctttctgctgctag

SEQ ID NO: 254098 - DNA, 120 bp, Artificial Sequence
  ENSG00000124164_54 (sequence is synthesized)
ataaatgctgatgtttatttttaaaccaggaaacattgatcctgtaacaatgcccgattacaattgctttattacaccccagggctgatggagatgtaatcacttggctaatggatgtgg

SEQ ID NO: 254099 - DNA, 120 bp, Artificial Sequence
  ENSG00000124164_55 (sequence is synthesized)
gtgcaggacagatgctcgcttgctggcctgctttcctgcttgcattctgatgagctgcaggagtgcgcctggccttctgcaggtggagctgctgtcagagcttcgtttcactgataccca

SEQ ID NO: 254100 - DNA, 120 bp, Artificial Sequence
  ENSG00000124164_56 (sequence is synthesized)
aagccatgtctgactgaaataaaacaggttccctttttttttccctttggaaaatgccaactaagggagactaatcagatatcttaacacaatttcatccaggcttagtgctaacaagat

SEQ ID NO: 254101 - DNA, 120 bp, Artificial Sequence
  ENSG00000124164_57 (sequence is synthesized)
tgcggggctttttagggtttaagaagatgagaaatgagtgtgcacgtttcacacgttgacttgccggtttttccatgtcatacaaaaaagtcctggctgtttctccgaactggctgcctg

SEQ ID NO: 254102 - DNA, 120 bp, Artificial Sequence
  ENSG00000124164_58 (sequence is synthesized)
cattcccgtctttcttttgtttttaagaaatagactgaattcagctgttaatcctctagtacagtatccatgttaaaatgtttttccattgcatcttttatgtgaattcaaaggtcagaa

SEQ ID NO: 254103 - DNA, 120 bp, Artificial Sequence
  ENSG00000124164_59 (sequence is synthesized)
tttattgtctgtgatattgagaccatgtgtacaagaactactttttgcttttcatcattcactccttagcaaacgtttcgtaagtaccctctgtctgtttgctactatatgaggtgctgc

SEQ ID NO: 254104 - DNA, 120 bp, Artificial Sequence
  ENSG00000124164_60 (sequence is synthesized)
gaaattagtgggcgtggctttttatatttttcattcgtgtgtagcctaagtaaggtgactcaagatgatacaccgagagaaaaatgcaaaatatatttggttctcatttctgttgctgtc

SEQ ID NO: 254105 - DNA, 120 bp, Artificial Sequence
  ENSG00000124164_61 (sequence is synthesized)
gtttcctttttaaagacgatttatcaactgctgccatttggaacttcctataagaaactaaaaatgatctatttcagtgttcctttcgcctttcctctgctttctgaataaatggtttca

SEQ ID NO: 254106 - DNA, 120 bp, Artificial Sequence
  ENSG00000124164_62 (sequence is synthesized)
gtaacccatgctgttctctccctattctacgtctttctccctatgttgaaaaaagattcccacagtttctgatgtgtgtgtttatagtcttcaatgtatgttaacatgttaggaactgag

SEQ ID NO: 254107 - DNA, 120 bp, Artificial Sequence
  ENSG00000124164_63 (sequence is synthesized)
tatcttaagagatgtcttagaatgctttagttttcataatttgtcctttatgtatttttcattgtatttgctgttttgacatggaagtaatttaaaaagttggtgcaggaaaggactctt

SEQ ID NO: 254108 - DNA, 120 bp, Artificial Sequence
  ENSG00000124164_64 (sequence is synthesized)
tactgttgcacattttggttttctgatatgtaataaattcatggcttggcagctgacatgatgtttcccagagagaaggagatgtatttctgcagggtccagaccaaaagagccatttac

SEQ ID NO: 254109 - DNA, 120 bp, Artificial Sequence
  ENSG00000124164_65 (sequence is synthesized)
agcatgttctcccatgttccattatcagcctgatgaaacctgccctgccaaggcataaacttttgtactagctgtctccatattatgttcaataaattctgtgctctgaatatatttaaa

SEQ ID NO: 254110 - DNA, 120 bp, Artificial Sequence
  ENSG00000124164_66 (sequence is synthesized)
gcagcacgagctcaaattccgagatgaacatgttgaaccaacaaatgaacctcctcaggacttctgatgggattgggcccattttcctttcactgcgtccctcatgctgtctcctggttg

SEQ ID NO: 254111 - DNA, 120 bp, Artificial Sequence
  ENSG00000124164_67 (sequence is synthesized)
cggtgcaaggaggctgccacggtgctgggatcctttttctccgcagagctgtctggagcaacacctgcggcgatgggaagccatgaccctggtttctcccagatactattacctctgtcc

SEQ ID NO: 254112 - DNA, 120 bp, Artificial Sequence
  ENSG00000124164_68 (sequence is synthesized)
ttcaaaacttagatgtgtgtttgaattgccagcagagaatgataaaccagtaagtatatttatagttaacaataattgaatgttgtaagctgatacttatttgcataccatttcctgcaa

SEQ ID NO: 254113 - DNA, 120 bp, Artificial Sequence
  ENSG00000124164_69 (sequence is synthesized)
aaccaagatttaagttggcaaattattttcctttatctgatgtctgaagaaaaaaaataagctgaagtcagcaaataagtgggcctttatgaaatcagcctttgaaaaactcacggaaag

SEQ ID NO: 254114 - DNA, 120 bp, Artificial Sequence
  ENSG00000124164_70 (sequence is synthesized)
acaactgattgacagtgtttccccttgaaaagtgcagcccgatggccattgagatgtcataaatcctgaagagcttctgtggcctggcaaaggtataggttgctgttaaacagtgggtga

SEQ ID NO: 254115 - DNA, 120 bp, Artificial Sequence
  ENSG00000124164_71 (sequence is synthesized)
gagtgaaagagggaacaatttgccctttatcatggtggttgatggacgtgtgggaagctttcaagttctcttgttttacaaagtgccctgtcagcctccctaccccttttaccctatcta

SEQ ID NO: 254116 - DNA, 120 bp, Artificial Sequence
  ENSG00000124164_72 (sequence is synthesized)
cctcttcaatcaaaggctgcttttagatgaggatttctcagcctcaacactgttgatatttggggcaaatccttggtggtggtggaggttgccctgtgtactgtagggtgttttattaat

SEQ ID NO: 254117 - DNA, 120 bp, Artificial Sequence
  ENSG00000124164_73 (sequence is synthesized)
agcagcatccctggcttctgccctcttgatactggtagtacttcccagttgtgacaactaaaaatgtctccagatattgccacatgtgtcctggagggcaatatcaacccccattgagag

SEQ ID NO: 254118 - DNA, 120 bp, Artificial Sequence
  ENSG00000124164_74 (sequence is synthesized)
tgatcccattccggtgttgcctgtggggagaaggaaggagccccatcctctaggctgtccactgtgagcgctttacctttcatgatcctcacttgtgaccagttgaagaaaggagactgt

SEQ ID NO: 254119 - DNA, 120 bp, Artificial Sequence
  ENSG00000124164_75 (sequence is synthesized)
atctgaaatgctaatttggacttcccttcaacctagtcgaaaacattttaatttttataaaaacaccaaaactgtgaaagcatgcagcatgtgaaactatcctagccattaatagctgga

SEQ ID NO: 254120 - DNA, 120 bp, Artificial Sequence
  ENSG00000124164_76 (sequence is synthesized)
gttgggaaacagaagtaccctgaaatgttgtgttaacagtatctatgttggtctgcgcgagtgctgttgatttgtgtcaaaactacctgagattttatttctgctgaatcatttaccact

SEQ ID NO: 254121 - DNA, 120 bp, Artificial Sequence
  ENSG00000124164_77 (sequence is synthesized)
atcattaccctgtttctttaagtggatagtggtcattttttccctcttcccagtgtacatcctgtcacaggaaggtcagtttggaagctgtgaaagcagtattctggcctcagctctgtg

SEQ ID NO: 254122 - DNA, 120 bp, Artificial Sequence
  ENSG00000124164_78 (sequence is synthesized)
ataggttgacttggtagcctggggccttgcttcacagggcctactcttctcatctggaaaatgatgggtagagctagattccaggccaatgatcgtcagttactctttccctgacaagct

SEQ ID NO: 254123 - DNA, 120 bp, Artificial Sequence
  ENSG00000124164_79 (sequence is synthesized)
gcgtgcttccatgccctccctccactgactggctctcatcccctgtaaatctcaagaggggatcatagctgaatcttggcaggggaaataaggggagtatgtaacttcccaagattgaaa

SEQ ID NO: 254124 - DNA, 120 bp, Artificial Sequence
  ENSG00000124164_80 (sequence is synthesized)
cattgcagacactgagtttgtttcaccttcatcccagcttccaaatgctaagttggtaaagtaattcgccctctgtctaatgctctcccaagcctcctaaccccactaaggcaatcctag

SEQ ID NO: 254125 - DNA, 120 bp, Artificial Sequence
  ENSG00000124164_81 (sequence is synthesized)
ggatgttcacatctttgtggtgacagtaatttgtggctaataattcctgagcttgcacaattacagtatgctgatttttccgtggcaggaatttgatagtgcaatatacacagccctttt

SEQ ID NO: 254126 - DNA, 120 bp, Artificial Sequence
  ENSG00000124164_82 (sequence is synthesized)
aatccatttttaaaataaatgtgacattttacagtgtggatgaaatgctaccacgtttggtgtttgctgagaactactttactttgcataaaaaagtccattattacatggtcggtgaca

SEQ ID NO: 254127 - DNA, 120 bp, Artificial Sequence
  ENSG00000124164_83 (sequence is synthesized)
attgctttttcagataaatctgaacattcttcgatactacaccaaaacttgacaagtgttactttcttcaaggttattagtatgatgtggaatctgaagccatgtctgtgactttttgaa

SEQ ID NO: 254128 - DNA, 120 bp, Artificial Sequence
  ENSG00000124164_84 (sequence is synthesized)
cattgtttcactaaaacacatcagtctctgttgtactttgaatggattttgtgatatcatgcatggattgtttggaaaccatttgctgagtgttgcagagcttccaaatgttggcatatt

SEQ ID NO: 254129 - DNA, 120 bp, Artificial Sequence
  ENSG00000124164_85 (sequence is synthesized)
gcattgtacactcacaaaaaaatcacattcatttcttttcctgatgatctcattggaaaagtctgtaagtatttgcagaaccatgaagctctggttggcagatgaaagtattccacaatt

SEQ ID NO: 254130 - DNA, 120 bp, Artificial Sequence
  ENSG00000124164_86 (sequence is synthesized)
ataatttttacctaaaagcctgtattttatcattgacagtaactactgtaaattgtttttctctagagtcaaagccaggtttgagccctggcactcttgtttaatacgctggccatggga

SEQ ID NO: 254131 - DNA, 120 bp, Artificial Sequence
  ENSG00000124164_87 (sequence is synthesized)
cccagagctctccagagtggtagacttgggagtggtgcaatagctgttcacagctgggagaacagagtctcaaggtgatgttacagcctttcgattatgatcccaatgagaaaagtaaac

SEQ ID NO: 254132 - DNA, 120 bp, Artificial Sequence
  ENSG00000124171_0 (sequence is synthesized)
agtccgaccctcggtcccgccgtgtgagcagctggtggagtggagctcagcgcggacgccggagctgcggccgccccctctgcaggtgcctgtgaggaggcgcccgggccgcaaccgctt

SEQ ID NO: 254133 - DNA, 120 bp, Artificial Sequence
  ENSG00000124171_1 (sequence is synthesized)
tccgagatccccagtcgcgcactcgctccccgcgctcctgaggggccgcccggccggaggaggccgtcgcggggctcggcgttcagcatgaaccgcagccaccggcacggggcgggcagc

SEQ ID NO: 254134 - DNA, 120 bp, Artificial Sequence
  ENSG00000124171_2 (sequence is synthesized)
ggctgcctgggcactatggaggtgaagagcaagtttggagctgaatttcgtcggttttcgctggaaagatcaaaacctggaaaatttgaggagttttatggattactacaacatgttcat

SEQ ID NO: 254135 - DNA, 120 bp, Artificial Sequence
  ENSG00000124171_3 (sequence is synthesized)
aagatccccaatgttgacgttttggtaggctatgcagacatccatggagacttactacctataaataatgatgataattatcacaaagctgtttcaacggccaatccactgcttaggata

SEQ ID NO: 254136 - DNA, 120 bp, Artificial Sequence
  ENSG00000124171_4 (sequence is synthesized)
tttatacaaaagaaggaagaagcagactacagtgcctttggtacagacacgctaataaagaagaagaatgttttaaccaacgtattgcgtcctgacaaccatagaaaaaagccacatata

SEQ ID NO: 254137 - DNA, 120 bp, Artificial Sequence
  ENSG00000124171_5 (sequence is synthesized)
gtcattagtatgccccaagactttagacctgtgtcttctattatagacgtggatattctcccagaaacgcatcgtagggtacgtctttacaaatacggcacggagaaacccctaggattc

SEQ ID NO: 254138 - DNA, 120 bp, Artificial Sequence
  ENSG00000124171_6 (sequence is synthesized)
tacatccgggatggctccagtgtcagggtaacaccacatggcttagaaaaggttccagggatctttatatccaggcttgtcccaggaggtctggctcaaagtacaggactattagctgtt

SEQ ID NO: 254139 - DNA, 120 bp, Artificial Sequence
  ENSG00000124171_7 (sequence is synthesized)
aatgatgaagttttagaagttaatggcatagaagtttcagggaagagccttgatcaagtaacagacatgatgattgcaaatagccgtaacctcatcataacagtgagaccggcaaaccag

SEQ ID NO: 254140 - DNA, 120 bp, Artificial Sequence
  ENSG00000124171_8 (sequence is synthesized)
aggaataatgttgtgaggaacagtcggacttctggcagttccggtcagtctactgataacagccttcttggctacccacagcagattgaaccaagctttgagccagaggatgaagacagc

SEQ ID NO: 254141 - DNA, 120 bp, Artificial Sequence
  ENSG00000124171_9 (sequence is synthesized)
gaagaagatgacattatcattgaagacaatggagtgccacagcagattccaaaagctgttcctaatactgagagcctggagtcattaacacagatagagctaagctttgagtctggacag

SEQ ID NO: 254142 - DNA, 120 bp, Artificial Sequence
  ENSG00000124171_10 (sequence is synthesized)
aatggctttattccctctaatgaagtgagcttagcagccatagcaagcagctcaaacacggaatttgaaacacatgctccagatcaaaaactcttagaagaagatggaacaatcataaca

SEQ ID NO: 254143 - DNA, 120 bp, Artificial Sequence
  ENSG00000124171_11 (sequence is synthesized)
ttatgaaaccgtggtttgaatgttttcagagtgaggatgccatgaggacttgtacatttggctagtttaaaagcatatatacctctgaccagtgacgtggaataggcatgagacgagtaa

SEQ ID NO: 254144 - DNA, 120 bp, Artificial Sequence
  ENSG00000124171_12 (sequence is synthesized)
cgttgcaagcttacaatattattaaagtagtagtttgataattgttaatataaactttggtggatcagaggtgaatttaagtccaaaacaaaggggcctttgctgatgaagttacgtgct

SEQ ID NO: 254145 - DNA, 120 bp, Artificial Sequence
  ENSG00000124171_13 (sequence is synthesized)
tttgctgttttgtctgtggagaatcagatgttaaagcacattcttggaactatgtgagaagactagatcatttctgttggaagtggttgcatatttaacctgctgtgcagagcccagtta

SEQ ID NO: 254146 - DNA, 120 bp, Artificial Sequence
  ENSG00000124171_14 (sequence is synthesized)
atttttcctttaactgtatttttaaaattctaatgtgaagtctgattctctcttgtggtacattggggacctcagctcttaaaggtctcatgttcccaatattttattttgatttttttt

SEQ ID NO: 254147 - DNA, 120 bp, Artificial Sequence
  ENSG00000124171_15 (sequence is synthesized)
ttttttttttttttttttttagtgactgggtctcactctgttgcccacactggaatgcagtggcatgatcacagctctctgcagcctcaatcccctgggctcaagcagtcctcccacctc

SEQ ID NO: 254148 - DNA, 76 bp, Artificial Sequence
  ENSG00000124171_16 (sequence is synthesized)
ccacatctgtctaagttggtcttgaactcctgggcttaagcagtcctgcctcggcttcccaaaatgctaggattag

SEQ ID NO: 254149 - DNA, 120 bp, Artificial Sequence
  ENSG00000124171_17 (sequence is synthesized)
taagcagtcctgcctcggcttcccaaaatgctaggattagagccaccatgcccagcctattttgatttttgtttttttatgttcctttctaataaattgtaacaaatgatgttctcaagt

SEQ ID NO: 254150 - DNA, 120 bp, Artificial Sequence
  ENSG00000124171_18 (sequence is synthesized)
ttacaggcgtgagccaccgcgcccagttgtgcatttctggtttctaagaatcaaaccacttggctgtttttaggagttacttcccatgttataaagctgaggaagctttttttttttttt

SEQ ID NO: 254151 - DNA, 71 bp, Artificial Sequence
  ENSG00000124171_19 (sequence is synthesized)
tcctgcctcagccttctgagtagctaagattacaggtgtgcgccaacacgtctggcttgggtctcaaactc

SEQ ID NO: 254152 - DNA, 120 bp, Artificial Sequence
  ENSG00000124171_20 (sequence is synthesized)
gatccgcccatctcctcccaaagtgctggattgcaggcatgagcgcctagccaggaagctatcttttcttgagttatgaaactttgcaacagttgttcaaattggtgtttgtccttccta

SEQ ID NO: 254153 - DNA, 120 bp, Artificial Sequence
  ENSG00000124171_21 (sequence is synthesized)
tagctttcatattttcaaattaattctgtatggctatataatttatgttttaaaaggcaattctcttgactttggaaatatggaagtctctcctttaacctattcttgttcccattccca

SEQ ID NO: 254154 - DNA, 120 bp, Artificial Sequence
  ENSG00000124171_22 (sequence is synthesized)
gtctcatttgaaatcattccttttattgttagtgtgtgtatttttgttggtgtgcttttaatgcatccaagtatgcatcattttggataaaaaatacatccaaattaagatgttttaaca

SEQ ID NO: 254155 - DNA, 120 bp, Artificial Sequence
  ENSG00000124171_23 (sequence is synthesized)
cataggacaaacttgtgcactttttatgccaaaaaaaaaaaaaattgggttttccttcatgggatttctagaaacactgcctacactttatgaaaactacatagtattcacctgtgacag

SEQ ID NO: 254156 - DNA, 120 bp, Artificial Sequence
  ENSG00000124171_24 (sequence is synthesized)
gtagagtttatcactattaattttatgaggctatttattactttccaatgcatccacttagaacaagctaagagtaaggctgctaactttaattccttgcctgattttattgtacagtgt

SEQ ID NO: 254157 - DNA, 120 bp, Artificial Sequence
  ENSG00000124171_25 (sequence is synthesized)
gcacaagcacaatggtatgcttgtatatagaaactaaaaatactatgaagtacataagttccctatggcttatggagagttatttattaattaactttatggtagggctagtatgaatac

SEQ ID NO: 254158 - DNA, 120 bp, Artificial Sequence
  ENSG00000124171_26 (sequence is synthesized)
ctttttaacaattgtgtgctattacaacaatgaagattcaaatgactccgctttgaaggatgttttctctatatggtaaaatatatatgaagaagtcttgattacgtgaagatcacttga

SEQ ID NO: 254159 - DNA, 120 bp, Artificial Sequence
  ENSG00000124171_27 (sequence is synthesized)
ctcagaatacttcaatgtattttgttcacattaccactaagcatattatcagtaaactattaactgactgcacattatgtaatacgttgtactttttgttgaattcaccgaagttcttcc

SEQ ID NO: 254160 - DNA, 120 bp, Artificial Sequence
  ENSG00000124171_28 (sequence is synthesized)
atttatatgctatttttaatggcattccggctttaacattctgtgagtcttacaaatttgactcttgaatggcaaaataatgttagtatgtagaaggttaactttcatttataatataag

SEQ ID NO: 254161 - DNA, 120 bp, Artificial Sequence
  ENSG00000124171_29 (sequence is synthesized)
tggtgcaggggttcaacattttaagtaaaaatatttttacacactacctctctctttttttttttaaagttttaacatcagaacttttgggggaaaaactacttcagggcttgacttttt

SEQ ID NO: 254162 - DNA, 120 bp, Artificial Sequence
  ENSG00000124171_30 (sequence is synthesized)
gtacaaattttaactgtaaaatacagatttatcttgtacgcattcatggaaatggaaatcaaagctgctattgctttttattttaattatcctgttaagggtatctatcaatggtatttt

SEQ ID NO: 254163 - DNA, 120 bp, Artificial Sequence
  ENSG00000124171_31 (sequence is synthesized)
caagtagatctctgtttcttaaattattggtgaaataattgattactagatatattgtaaaaccaatagatcctggttatacgataaaatatcagctcattggtaggctgaatcaattat

SEQ ID NO: 254164 - DNA, 120 bp, Artificial Sequence
  ENSG00000124171_32 (sequence is synthesized)
ttcaagtgcaccttattaacaaaagtatcagtggatccaacataaaattttatagtactaaatgtcaagcctaactgtgaattttgttctgtatcttaagtaaatttatgataatgttct

SEQ ID NO: 254165 - DNA, 120 bp, Artificial Sequence
  ENSG00000124171_33 (sequence is synthesized)
cgagctatcaacaaaatatatgtacttttgtgagctatgaattttctaattaaattttacatgctataacatgatttttacatgaatgatactttgtttataactatcaaatgtcagtat

SEQ ID NO: 254166 - DNA, 120 bp, Artificial Sequence
  ENSG00000124171_34 (sequence is synthesized)
aaaagaagggatgtgtattggaacattccaaaaacaatgtcaggatgccctgtttgaaaacactgtgaagtgctttacttttcacttgagatatttgccatgggaaagactatcatattt

SEQ ID NO: 254167 - DNA, 120 bp, Artificial Sequence
  ENSG00000124172_0 (sequence is synthesized)
cttcctgcggctgaaccgcccggctgagccgacattgccggcgtcttggcgattcggcccgacgagctccgctttcgctacagcatggtggcctactggagacaggctggactcagctac

SEQ ID NO: 254168 - DNA, 120 bp, Artificial Sequence
  ENSG00000124172_1 (sequence is synthesized)
atccgatactcccagatctgtgcaaaagcagtgagagatgcactgaagacagaattcaaagcaaatgctgagaagacttctggcagcaacgtaaaaattgtgaaagtaaagaaggaataa

SEQ ID NO: 254169 - DNA, 120 bp, Artificial Sequence
  ENSG00000124172_2 (sequence is synthesized)
tctaccctgactaaagcttgaaatgctacatttccaaggtgaagatgtgtgggcacatgttatggcagattgaaaaggatctcattccatgggaaaaaaaaaaatcctgtcttgttcata

SEQ ID NO: 254170 - DNA, 120 bp, Artificial Sequence
  ENSG00000124172_3 (sequence is synthesized)
aattgacaatgtcaataaattgaaatatggttcactgttactcttgattttagtttgtgagactttttcattttctttaaaggaactgtctgcacagctgcatgattatggccatgtgaa

SEQ ID NO: 254171 - DNA, 120 bp, Artificial Sequence
  ENSG00000124172_4 (sequence is synthesized)
ccagggtttcttaaaagcaggggaagccagatttaatatttagtgaccaaagggatacagaaagcattttgaaaatgtctcaaaatagttgtttcatgacattaattggtgatcaaaatt

SEQ ID NO: 254172 - DNA, 120 bp, Artificial Sequence
  ENSG00000124172_5 (sequence is synthesized)
atctgctgtcattgaggcttcgtagtcccttatttttgaattgttgtcatgtcagaataatgacatggttatcagtaacaaatggaaataattattaaatactaaaagtgtagattagaa

SEQ ID NO: 254173 - DNA, 120 bp, Artificial Sequence
  ENSG00000124172_6 (sequence is synthesized)
gaagaaatactaaattgtacttgttttgtattgtgcacttaaagcctatagataagaacggttacagaatttaagcacaaagtgtttttcacattgttttgtaaatgaatctttatactc

SEQ ID NO: 254174 - DNA, 120 bp, Artificial Sequence
  ENSG00000124172_7 (sequence is synthesized)
tggtagcatttctcataggaaatgaggcaaagctattgaataacttgctcattgagttgatggccaaactgaaattaaaacctaggagttttgactgcaagtctgggacacggtgaccac

SEQ ID NO: 254175 - DNA, 120 bp, Artificial Sequence
  ENSG00000124172_8 (sequence is synthesized)
aacagcagtttcgtggtatttccatagtgattcattcattcattatttagggatgaaaaattgttgcaagttatgtttttatctttctttgaaacttgaaagggcttgggcaagtaaaac

SEQ ID NO: 254176 - DNA, 120 bp, Artificial Sequence
  ENSG00000124172_9 (sequence is synthesized)
accattgcaaagttaactgcctgattttaactgtttttggagactggagaaataaatttgaactggaaattttgaaacaccattctaggatcagttctcacatggtacttaagctcacaa

SEQ ID NO: 254177 - DNA, 120 bp, Artificial Sequence
  ENSG00000124172_10 (sequence is synthesized)
tgatttatcagggccactgtcagcaatgccgaggataagccgaaaagaacatctttgttctcggcttctgggaatgacttattgtcccgacacttgacctgtaggttttactgaattctc

SEQ ID NO: 254178 - DNA, 120 bp, Artificial Sequence
  ENSG00000124172_11 (sequence is synthesized)
agcacagagcgagcagggaggcagagccaattgagtggaagagggtgcctctggaaaacagcaggttaggagcccttggagtcctccgcctcggagctgtcatcctgctgttggcaagtt

SEQ ID NO: 254179 - DNA, 120 bp, Artificial Sequence
  ENSG00000124172_12 (sequence is synthesized)
agggcacctcagttcagtgctgtggcccccaagattaaggtactaggaagtatcctccattacagggaacaggaataaatgaatcaaaaagctatcgggcctttttgacatgggacgaat

SEQ ID NO: 254180 - DNA, 120 bp, Artificial Sequence
  ENSG00000124172_13 (sequence is synthesized)
aaagtaactaataggcaaaggggctaaatgatttccagtcaagtaattagagataagtcatttattaaggaggcagatggggtattattggtatatagatggcatagtagattgctagta

SEQ ID NO: 254181 - DNA, 120 bp, Artificial Sequence
  ENSG00000124172_14 (sequence is synthesized)
tattggtagattattggtatatagatggtatgttaaggaggcagatggggtattactggtatatagatggtatggtagattggtagtatattggcagattattggtatatggtatgttga

SEQ ID NO: 254182 - DNA, 120 bp, Artificial Sequence
  ENSG00000124172_15 (sequence is synthesized)
gtattactggtatatagatggcatagtagattggtagtatattggtagattattggtatagagatggtatattattaaggaggcagatggggtaattagaggtgagacttagggacaggg

SEQ ID NO: 254183 - DNA, 120 bp, Artificial Sequence
  ENSG00000124172_16 (sequence is synthesized)
cttgtgatatggaaaggagtgaagtcactgagtaaaagacaagtttactgtcagcagagattcttagaggctcttttctccgtgattaaaaaaaaatcctaaaccagtagtataataaac

SEQ ID NO: 254184 - DNA, 120 bp, Artificial Sequence
  ENSG00000124172_17 (sequence is synthesized)
ttcctgcctccagcagtgctgggtagctggcaggatgactgtgcccagtgatgaggtgaccccagtcagaccaacttaatgagtatcccactaattagttggatgatgtttgaagctgtc

SEQ ID NO: 254185 - DNA, 120 bp, Artificial Sequence
  ENSG00000124172_18 (sequence is synthesized)
agttaatctcttagttcacatcgttcttgtgagcaaagtgaaggaatcggataagctctaaatttcggtgatgctgctgctctgagagaccaaggtcgctggagcaaccgtactgctaaa

SEQ ID NO: 254186 - DNA, 120 bp, Artificial Sequence
  ENSG00000124172_19 (sequence is synthesized)
ggataagctcttcaaaatcaaaagggacagatttcttaagtttctagtttgttttgtgtttttacatctatttctaccatacgaaagagtaggatggtgagatgcatttctaaatatttt

SEQ ID NO: 254187 - DNA, 120 bp, Artificial Sequence
  ENSG00000124172_20 (sequence is synthesized)
taactactcagtctggatggttaggcttcaagaaaaggaatttatttagtctgaaataaagcaattttgccatttaaaattgaattactttgtagtttaatgattactattgagcaaaca

SEQ ID NO: 254188 - DNA, 120 bp, Artificial Sequence
  ENSG00000124172_21 (sequence is synthesized)
aatctttacagtaatataagtcagcaaaagttttttaaaaggtttaaatccctccttccttacatctatttcattgcttttttaggtttgggaagtaaagcaccagaggaagcatgtgta

SEQ ID NO: 254189 - DNA, 120 bp, Artificial Sequence
  ENSG00000124172_22 (sequence is synthesized)
aatccttgtataatcgcaggctgtaagtctttagcatctcaggaagttactaacttcaaactaagtatataggtagagtttcttactaaatctagtgcttcttgaaccacaagtagaaag

SEQ ID NO: 254190 - DNA, 120 bp, Artificial Sequence
  ENSG00000124172_23 (sequence is synthesized)
catttaaaacatgaatgttgttttgtgttttttgaagtttgtaaatagaagacttgttgatgatccgatggcaaggtatttttctcttggtatgtattttagttatttcctcgtgatgca

SEQ ID NO: 254191 - DNA, 120 bp, Artificial Sequence
  ENSG00000124172_24 (sequence is synthesized)
taagtgaaaagagtgaagtttctcagaatgagcaactgtcatccatctacctgctattttattattgctgattacaaaagcaaatcaagagatgagaacccagttgcctgcaagtaaata

SEQ ID NO: 254192 - DNA, 120 bp, Artificial Sequence
  ENSG00000124172_25 (sequence is synthesized)
tttactgcattgagggtcggagcattttcccattaccggttatccatggatcaaatagtgtatctcagtggtaattctagagggccattaaaaccctgatggtgctggaagagatggcag

SEQ ID NO: 254193 - DNA, 120 bp, Artificial Sequence
  ENSG00000124172_26 (sequence is synthesized)
tgctgcatgtcagaaataggtaaactgtaattaagaagttacagatgatttgattacgctcttgtgtatttggtcctgttataatgtgagcagattaaaatcatgtagtgcttaaagcta

SEQ ID NO: 254194 - DNA, 120 bp, Artificial Sequence
  ENSG00000124172_27 (sequence is synthesized)
tgtcattatgcaaacatttatggcaacttctgcaaattaatttgaactgtaaaagttccctaatgagacgatgtcctccataactgagaaggacactgcagccattgctgcttaattcct

SEQ ID NO: 254195 - DNA, 120 bp, Artificial Sequence
  ENSG00000124172_28 (sequence is synthesized)
gcatttgaatggttgccgagcgcatggtgtgccctttctcaaagagcagagaggctgcagagcattttggggggtgatgactgaatgaaagtgaaaagaccatttcaaaatagcctttaa

SEQ ID NO: 254196 - DNA, 120 bp, Artificial Sequence
  ENSG00000124172_29 (sequence is synthesized)
aaggaaagccaaggatgattattaatgaattcctgggatctaacagtagtaagaaatttaaactatataaacatatatgttaaaggctagctcttcagaaataaagatcagaagactgca

SEQ ID NO: 254197 - DNA, 120 bp, Artificial Sequence
  ENSG00000124172_30 (sequence is synthesized)
atttggaagttagttattgggatggtataatttaaagcatgcaggttatagaagtcccctggcctaataaaaagaaagtcttcttgggccctgacaagcagaagtaattggcacattgat

SEQ ID NO: 254198 - DNA, 120 bp, Artificial Sequence
  ENSG00000124172_31 (sequence is synthesized)
tttcagttcatttagcaatgcttaggtagagagccatcgtatttgaattaaacctgtttcatttgtctgcacaaatcaaataatttggaggatgaactccccacttgtataattgcaatt

SEQ ID NO: 254199 - DNA, 120 bp, Artificial Sequence
  ENSG00000124172_32 (sequence is synthesized)
ggagttacataacagtccaagagcatgaaaaactacagttctttacatttttatttcccccacaaccactaatgttctcacaaatcactacttcccgaacataataactacaggcacagg

SEQ ID NO: 254200 - DNA, 120 bp, Artificial Sequence
  ENSG00000124172_33 (sequence is synthesized)
caagggtcctgctgttgtatcaagcaataaaatctgcaagaccccgcagcgaatactgttttgctaatttattatgctttcagagggtttggttcattttacttttccaaagatgttggt

SEQ ID NO: 254201 - DNA, 120 bp, Artificial Sequence
  ENSG00000124172_34 (sequence is synthesized)
agtggtttgatctctaaagtactttcttgacattgttatttcaaaagtaggcaaggcaaattatcagagagatgtttttcagatttaatttttcttgttttgcttttaaaaagcttcaga

SEQ ID NO: 254202 - DNA, 120 bp, Artificial Sequence
  ENSG00000124172_35 (sequence is synthesized)
cccataatagcacagaaatgtgataaatattaatcctttggcagcttatggttatgagcaattttacttattggaactgtctcccctaagcacttttcattttcattttgaattagtaaa

SEQ ID NO: 254203 - DNA, 120 bp, Artificial Sequence
  ENSG00000124172_36 (sequence is synthesized)
tattttattacaagtctggagatgcagtgttttgaatttagccctttttctaggggctctctgtctaatctcataattctgagtaatgagacctggttttatgttgggttgttttgtttt

SEQ ID NO: 254204 - DNA, 120 bp, Artificial Sequence
  ENSG00000124172_37 (sequence is synthesized)
aacagtaagctaacagaaaatcatttagcctcactcggctcagagctgccagactgcatctaatgctgagattttgcaaagtcctgggggtcaggaagtagtgtccgatccccttaaaca

SEQ ID NO: 254205 - DNA, 120 bp, Artificial Sequence
  ENSG00000124172_38 (sequence is synthesized)
aagcattagcccctctctgttatgcccttcagggttacagaccccacctcattagcacaaggagatgttagtgtcttttaaaggcaaagtagtttctttattctgggagagtgtttactt

SEQ ID NO: 254206 - DNA, 120 bp, Artificial Sequence
  ENSG00000124172_39 (sequence is synthesized)
ttactcagcaggaaaatgcctgcttgactaagcctgtgtacttgaaccagcactttttacatctgagccacggcaatgtgaatgatagccacagttatacagttcactataaggaagtta

SEQ ID NO: 254207 - DNA, 120 bp, Artificial Sequence
  ENSG00000124177_0 (sequence is synthesized)
agctgtttgtattttggctgctgcaggagccattttagaaataaatatcttccttcaatagatgaaaatgaaaatacagaaaaaagagaagcagttgtcaaatttaaaagttttgaatca

SEQ ID NO: 254208 - DNA, 120 bp, Artificial Sequence
  ENSG00000124177_1 (sequence is synthesized)
ctccccaatgtctgatgcctctgtcaattttgactacaaatctccatccccatttgactgcagcactgatcaagaagagaaaattgaagatgttgctagtcactgtctgcctcagaagga

SEQ ID NO: 254209 - DNA, 120 bp, Artificial Sequence
  ENSG00000124177_2 (sequence is synthesized)
cctgtatactgctgaagaggaagctgctaccctttttcctaggaaaatgacatcccataatgggatggaggacagtggaggaggaggtactggagtgaagaagaaacggaagaaaaagga

SEQ ID NO: 254210 - DNA, 120 bp, Artificial Sequence
  ENSG00000124177_3 (sequence is synthesized)
gccaggagaccaagagggtgcagcaaagggaagcaaggacagagagcccaagccaaagaggaaacgagaaccgaaagagccaaaggaacccagaaaggccaaggagccgaagaaggccaa

SEQ ID NO: 254211 - DNA, 120 bp, Artificial Sequence
  ENSG00000124177_4 (sequence is synthesized)
ggagcacaaggagccgaagcaaaaagatggggcaaagaaggcacggaagccccgggaggcctcgggcaccaaggaggccaaagagaagaggagctgcactgactctgcagccaggacgaa

SEQ ID NO: 254212 - DNA, 120 bp, Artificial Sequence
  ENSG00000124177_5 (sequence is synthesized)
gtccaggaaggccagcaaggagcaaggaccaaccccagtggagaaaaagaagaaaggaaaaaggaaaagtgaaactacagtggagagtttagagctggatcagggcctgacgaacccatc

SEQ ID NO: 254213 - DNA, 120 bp, Artificial Sequence
  ENSG00000124177_6 (sequence is synthesized)
tctgcggagtcctgaggagtccactgagtctacagacagccagaaacgacgctcgggaaggcaagtaaagcgcagaaaatacaatgaggacctggacttcaaagtggtggatgatgatgg

SEQ ID NO: 254214 - DNA, 120 bp, Artificial Sequence
  ENSG00000124177_7 (sequence is synthesized)
ggaaacaattgctgttcttggagctggtcgaacatctgcactctcagcctctacactggcctggcaggcggaggagcctccagaagatgatgcaaacatcattgagaagatcctggcatc

SEQ ID NO: 254215 - DNA, 120 bp, Artificial Sequence
  ENSG00000124177_8 (sequence is synthesized)
taagactgtccaggaggttcacccaggagaacctccgttcgacttggagctgttctacgttaagtatagaaatttttcctacttacattgtaaatgggccacaatggaagagctcgaaaa

SEQ ID NO: 254216 - DNA, 120 bp, Artificial Sequence
  ENSG00000124177_9 (sequence is synthesized)
ggatcctcgcatcgcacagaagatcaagcgatttaggaataaacaagcccagatgaagcacatttttacggagcctgatgaagacttgttcaatccagactatgtagaagttgatcgcat

SEQ ID NO: 254217 - DNA, 120 bp, Artificial Sequence
  ENSG00000124177_10 (sequence is synthesized)
cttggaggtggcccacaccaaggatgcagaaacaggggaggaggtaacacattacctggtgaagtggtgctcactaccatatgaagaaagcacgtgggagctagaggaagatgtagatcc

SEQ ID NO: 254218 - DNA, 120 bp, Artificial Sequence
  ENSG00000124177_11 (sequence is synthesized)
tgcaaaagttaaagaatttgaatctcttcaagttctccctgaaattaagcatgtggagcggcctgcttcagactcctggcagaaacttgagaagtctcgcgagtataagaacagtaacca

SEQ ID NO: 254219 - DNA, 120 bp, Artificial Sequence
  ENSG00000124177_12 (sequence is synthesized)
gctccgggagtaccagctggaagggatgaactggcttctttttaactggtataacagaaaaaactgtattttggctgatgagatgggcctagggaaaaccatccagtccatcacattcct

SEQ ID NO: 254220 - DNA, 120 bp, Artificial Sequence
  ENSG00000124177_13 (sequence is synthesized)
ttcagaaatatttctgagaggaatccacggcccttttctcattatcgcccctctctccaccatcactaactgggagcgggagttccggacatggacagagatgaatgccattgtgtacca

SEQ ID NO: 254221 - DNA, 120 bp, Artificial Sequence
  ENSG00000124177_14 (sequence is synthesized)
cggcagccagatcagcaggcagatgatccagcagtatgaaatggtgtacagagacgcccagggaaaccccctttcaggagtcttcaagttccacgtcgtcatcacaacatttgaaatgat

SEQ ID NO: 254222 - DNA, 120 bp, Artificial Sequence
  ENSG00000124177_15 (sequence is synthesized)
cctagcagactgcccagagttgaagaagattcactggagctgtgtgataattgatgaagcccacagactgaagaataggaactgcaaacttctggagggtctaaagcttatggccctgga

SEQ ID NO: 254223 - DNA, 120 bp, Artificial Sequence
  ENSG00000124177_16 (sequence is synthesized)
acataaagtgcttctcactggaacacccttgcagaactctgtggaggagctcttcagtttgttaaattttctggagccatcacagtttccttcagagaccgctttcttggaggaatttgg

SEQ ID NO: 254224 - DNA, 120 bp, Artificial Sequence
  ENSG00000124177_17 (sequence is synthesized)
agatctgaaaacagaggagcaggtaaagaaactgcagtctatcctaaaaccaatgatgcttcggcggctgaaagatgatgtggaaaagaaccttgctcccaaacaagagacgatcattga

SEQ ID NO: 254225 - DNA, 120 bp, Artificial Sequence
  ENSG00000124177_18 (sequence is synthesized)
ggtggaactgaccaatatccagaaaaagtactaccgtgccatcctcgagaagaacttttccttcctgaccaagggggcaaatcagcacaacatgcccaatctcatcaacaccatgatgga

SEQ ID NO: 254226 - DNA, 120 bp, Artificial Sequence
  ENSG00000124177_19 (sequence is synthesized)
gctgaggaagtgctgtaaccatccctacctgatcaatggagcagaggagaaaattctagaagatttccgaaaaacccacagccctgatgcccctgactttcagctgcaggccatgattca

SEQ ID NO: 254227 - DNA, 120 bp, Artificial Sequence
  ENSG00000124177_20 (sequence is synthesized)
ggcagcaggaaagcttgtgttgattgataaactactccctaagctgattgcaggtggccacaaagtactcatcttctcccagatggtgcgctgcctcgacatcctagaagattacctcat

SEQ ID NO: 254228 - DNA, 120 bp, Artificial Sequence
  ENSG00000124177_21 (sequence is synthesized)
ccagagaagatacacctatgagcgaattgatgggcgagtacggggaaacctgcgccaggcagccatcgaccggttctgtaagccagattcagaccgctttgtctttcttctgtgcaccag

SEQ ID NO: 254229 - DNA, 120 bp, Artificial Sequence
  ENSG00000124177_22 (sequence is synthesized)
agcgggaggcctggggatcaatctcacagctgctgatacctgcatcatatttgattctgactggaacccacaaaatgacttgcaggctcaggcccgatgtcaccgcataggccagagcaa

SEQ ID NO: 254230 - DNA, 120 bp, Artificial Sequence
  ENSG00000124177_23 (sequence is synthesized)
agctgtgaaggtgtatcgcctcatcactcgaaattcctacgagcgcgagatgtttgacaaggccagcctaaagctggggctggacaaggctgttcttcaggacatcaaccgaaagggcgg

SEQ ID NO: 254231 - DNA, 120 bp, Artificial Sequence
  ENSG00000124177_24 (sequence is synthesized)
caccaatggggtacagcagctctcaaaaatggaggtggaggacctactccggaaaggtgcttatggagccttaatggatgaagaagatgaaggctccaagttctgtgaagaagacataga

SEQ ID NO: 254232 - DNA, 120 bp, Artificial Sequence
  ENSG00000124177_25 (sequence is synthesized)
ccagattctgcagaggcgaacgcacaccatcaccatccagtctgaggggaaagggtccacttttgccaaggctagctttgtggcttcaggaaacagaacagatatttccttagatgatcc

SEQ ID NO: 254233 - DNA, 120 bp, Artificial Sequence
  ENSG00000124177_26 (sequence is synthesized)
taacttttggcagaaatgggctaaaatagctgaactagacactgaagcaaagaatgaaaaggaaagcttagtgatcgaccgacctcgcgtgagaaagcagaccaaacactacaactcgtt

SEQ ID NO: 254234 - DNA, 120 bp, Artificial Sequence
  ENSG00000124177_27 (sequence is synthesized)
tgaggaagacgagctcatggagttttcagagttagacagcgactcagacgaaaggcccacgagatccaggcgcctcaatgacaaagccaggcgctacctccgagcggagtgcttccgggt

SEQ ID NO: 254235 - DNA, 120 bp, Artificial Sequence
  ENSG00000124177_28 (sequence is synthesized)
agagaagaacctgctcatctttggctggggccggtggaaggacatcctgactcatggccgattcaagtggcatctgaacgagaaggacatggagatgatttgccgtgccctcctggtgta

SEQ ID NO: 254236 - DNA, 120 bp, Artificial Sequence
  ENSG00000124177_29 (sequence is synthesized)
ctgtgtcaagcattataagggggacgagaagatcaagagtttcatttgggaactgatcacacctaccaaagatgggcaagcccagaccctccagaaccactcaggcttatctgccccagt

SEQ ID NO: 254237 - DNA, 120 bp, Artificial Sequence
  ENSG00000124177_30 (sequence is synthesized)
ccccagagggaggaaggggaagaagacgaagaaccagttgctaatcccagagctaaaggatgcagattggctagccacctgcaaccccgaggtggtcttgcatgatgatggctataagaa

SEQ ID NO: 254238 - DNA, 120 bp, Artificial Sequence
  ENSG00000124177_31 (sequence is synthesized)
acacctcaaacagcactgcaacaaagtacttttgcgagtccggatgctgtactacctaaaagctgaaatactgggagaagcagctgagaaagcatttgaaggatctcctgccagggagct

SEQ ID NO: 254239 - DNA, 120 bp, Artificial Sequence
  ENSG00000124177_32 (sequence is synthesized)
ggatgtacctctgcctgacatcgactacatggagatcccagtggactggtgggatgctgaagccgataagtcacttctcattggcgtgttcaagcatggttatgaaaggtacaatgccat

SEQ ID NO: 254240 - DNA, 120 bp, Artificial Sequence
  ENSG00000124177_33 (sequence is synthesized)
gcgagcagacccagcactttgcttcctggagaaagttgggatgcccgatgagaagtccctttctgcagaacagggtgttacagatgggacctcagacattcctgaaagaggcaacacaga

SEQ ID NO: 254241 - DNA, 120 bp, Artificial Sequence
  ENSG00000124177_34 (sequence is synthesized)
taaagaagacaatgctgaggacaaagtagatggcctccagaaacaaacggagagttccagtgatggaggtgatggcgtttttagcgaaaagaaggatgacagccgggcagcccaggatgg

SEQ ID NO: 254242 - DNA, 120 bp, Artificial Sequence
  ENSG00000124177_35 (sequence is synthesized)
ctccgacccagacaaatcgccctggccagtttcctccgccctcacagctcgtctcagacgtctggtcactgtttaccagcgctgcaaccgcaaggaactgtgccggcctgaaattctggg

SEQ ID NO: 254243 - DNA, 120 bp, Artificial Sequence
  ENSG00000124177_36 (sequence is synthesized)
accaggtaaccaaggatattgggttcaggaagagatgttcaggagaacctcagaaatggacctcatcaacaaggaagcccaaaagaggtggactaggagagaacaagcagacttctatag

SEQ ID NO: 254244 - DNA, 120 bp, Artificial Sequence
  ENSG00000124177_37 (sequence is synthesized)
aacagtgtcttcctttggtgttgtttacgatcaagaaaagaaaacctttgactggacacagttccgcatcatttcccgtttggacaagaagtcggatgagagcctggaacagtattttta

SEQ ID NO: 254245 - DNA, 120 bp, Artificial Sequence
  ENSG00000124177_38 (sequence is synthesized)
tagttttgtggccatgtgccggaatgtctgtcgtctacccacatggaaagatggcggtcccccagataccaccatctacgttgaacccatcactgaggaacgtgctgcaagaactctgta

SEQ ID NO: 254246 - DNA, 120 bp, Artificial Sequence
  ENSG00000124177_39 (sequence is synthesized)
ccgcattgaactgttacggaaagtccgagagcaagtgctcaagtgccctcagctgcatgaacgcctccagctgtgcaggcccagcctctacctcccagtctggtgggagtgtgggaagca

SEQ ID NO: 254247 - DNA, 120 bp, Artificial Sequence
  ENSG00000124177_40 (sequence is synthesized)
tgatcgagacctgctcatcggcactgccaaacatgggctgaaccgcactgactgttacatcatgaacgacccccagctgtccttcctggatgcctatagaaactatgcccagcataaaag

SEQ ID NO: 254248 - DNA, 120 bp, Artificial Sequence
  ENSG00000124177_41 (sequence is synthesized)
atctggcacccaggcaccaggaaatctctgttgcctttaccagaccaactccaagttatatgaatctcttacatattctcaaatgagtaggacttcagagtcccttgaaaatgaacctga

SEQ ID NO: 254249 - DNA, 120 bp, Artificial Sequence
  ENSG00000124177_42 (sequence is synthesized)
aaatctagtgagagtagaaagcagagatgatcatctcagcctgcctgatgtgacatgtgaaaactttatttctaaagttcaggatgtcatttccatcaaccatgatgaaagtctgctgcc

SEQ ID NO: 254250 - DNA, 120 bp, Artificial Sequence
  ENSG00000124177_43 (sequence is synthesized)
tgagtccttagagagcatgatgtatggtaagaaggtgctcagccaagaaccaagctcttttcaggagagcccaagtaccaatactgaatctagaaaagatgttattaccatctcaataag

SEQ ID NO: 254251 - DNA, 120 bp, Artificial Sequence
  ENSG00000124177_44 (sequence is synthesized)
aatagcttctggccctacttttatgggtagcttagaagcaggaggagtagctcaagcaaacatcaaaaatggaaaacatttgttgatgtctatttcaaaggaaggggagctctgctgcag

SEQ ID NO: 254252 - DNA, 120 bp, Artificial Sequence
  ENSG00000124177_45 (sequence is synthesized)
tgaggcaggacagagacctgaaaacattggccagctggaagccaagtgtttagcttccccttccttgaatccaggaaatgaaagtgggtttgtagatatgtgcagtcttagtgtctgtga

SEQ ID NO: 254253 - DNA, 120 bp, Artificial Sequence
  ENSG00000124177_46 (sequence is synthesized)
ctccaaaagaaacctgtcatcagatcagcaattaattgatttattggaaaacaaaagcttagaaagtaaattgattttgagtcagaaccacagtgatgaggaggaagaagaggaggaaaa

SEQ ID NO: 254254 - DNA, 120 bp, Artificial Sequence
  ENSG00000124177_47 (sequence is synthesized)
cgaggaggaaaacttagccatggcagtaggcatgggggaaaggccagaggtattgcatctcacggagcccactactaacatctcaagggaaaagaaccaaggcttccaagatgaaaccaa

SEQ ID NO: 254255 - DNA, 120 bp, Artificial Sequence
  ENSG00000124177_48 (sequence is synthesized)
gaaaggaagcttagaggtggcaaaccagactcctgggctacagagggctttccccgctccagcagcctgtcagtgccactgcaaacacatggagaggtggatgcatggcctcgagaatga

SEQ ID NO: 254256 - DNA, 120 bp, Artificial Sequence
  ENSG00000124177_49 (sequence is synthesized)
tgaatttgaaatcgagaaacccaaggcttatatcccagatctgttcaaaagtaaaaccaatactatcgccatggagggtgaacccactgctattccatcacagccgtttaaagtgaagca

SEQ ID NO: 254257 - DNA, 120 bp, Artificial Sequence
  ENSG00000124177_50 (sequence is synthesized)
tgagcttttaaaagaaccttggaaagaaagtgcagaggggcaaaacgttttccccacatatcctcttgaaggaagtgagctcaaatcagaagacatggattttgagaataaagatgatta

SEQ ID NO: 254258 - DNA, 120 bp, Artificial Sequence
  ENSG00000124177_51 (sequence is synthesized)
tgatagagacggaaactgccatagtcaagattatccagggaagtactctgaagaggagagcaagagctcaacatcgggcatcacaggagacattggggatgagctacaggaggctcgagc

SEQ ID NO: 254259 - DNA, 120 bp, Artificial Sequence
  ENSG00000124177_52 (sequence is synthesized)
tcccactattgctcagctgctacaggagaaaactctctattccttctctgagtggccaaaggaccgcgtgataattaaccgcctagataatatctgccacgtggtgttaaaggggaagtg

SEQ ID NO: 254260 - DNA, 120 bp, Artificial Sequence
  ENSG00000124177_53 (sequence is synthesized)
gccctctagccagcagtatgagccctcaggcacactgcccaccccggtattaaccagcagtgctggttctcgaaccagcctctcagagccggaagcagcagaacacagcttcagcaacgg

SEQ ID NO: 254261 - DNA, 120 bp, Artificial Sequence
  ENSG00000124177_54 (sequence is synthesized)
cgcagcattggcggcccagatccacaaggagagcttcttagctccagtattcacaaaggatgaacaaaagcacaggcgtccctatgagtttgaggtggagagggatgcaaaggctcgggg

SEQ ID NO: 254262 - DNA, 120 bp, Artificial Sequence
  ENSG00000124177_55 (sequence is synthesized)
cctggagcagttctctgccacccacgggcacacccctatcatcctcaatggctggcatggggagtcagctatggacctctcctgctcatcagaggggtccccaggagccacatccccttt

SEQ ID NO: 254263 - DNA, 120 bp, Artificial Sequence
  ENSG00000124177_56 (sequence is synthesized)
cccagtgagcgccagcacccctaagattggggctatcagttcacttcagggagcccttggcatggacttgtctgggattctgcaagctggcctgatccatcctgtgactggacagattgt

SEQ ID NO: 254264 - DNA, 120 bp, Artificial Sequence
  ENSG00000124177_57 (sequence is synthesized)
caatggaagcctcagaagagatgatgcagccacgaggaggcggagagggaggcggaaacatgttgaaggagggatggacctcatctttttgaaggagcagacacttcaggcgggaatctt

SEQ ID NO: 254265 - DNA, 120 bp, Artificial Sequence
  ENSG00000124177_58 (sequence is synthesized)
ggaagtccatgaagacccagggcaggccaccttgagcaccacacaccctgaggggccagggcctgccacctcggctcctgagccagctacggcagccagcagccaagccgagaaatccat

SEQ ID NO: 254266 - DNA, 120 bp, Artificial Sequence
  ENSG00000124177_59 (sequence is synthesized)
tcccagcaagagtctgcttgactggctaaggcagcaggctgactactccttagaagttcctggctttggggcaaatttttcagacaaaccaaagcagaggaggccacgctgtaaagaacc

SEQ ID NO: 254267 - DNA, 120 bp, Artificial Sequence
  ENSG00000124177_60 (sequence is synthesized)
tggaaaattagatgtcagctccctgagcggggaagagagagttcctgccatccccaaggagccaggactgagggggtttcttccagaaaacaagttcaatcacactctggctgagcctat

SEQ ID NO: 254268 - DNA, 120 bp, Artificial Sequence
  ENSG00000124177_61 (sequence is synthesized)
tcttcgagatacgggcccccgcaggagggggaggcggcctcggagcgaactcctgaaggctccttccattgtggcagactctccctctggaatggggccactgttcatgaatggactgat

SEQ ID NO: 254269 - DNA, 120 bp, Artificial Sequence
  ENSG00000124177_62 (sequence is synthesized)
tgctgggatggacctggtaggacttcagaacatgagaaatatgccaggcatccccctcaccgggctggtggggtttccagctggctttgccacgatgccaacaggtgaagaggtcaaaag

SEQ ID NO: 254270 - DNA, 120 bp, Artificial Sequence
  ENSG00000124177_63 (sequence is synthesized)
taccctgagcatgctgcccatgatgctgccaggcatggctgctgtgccccagatgtttggtgttgggggactcctcagtccacccatggcaaccacctgcacttccactgctccggcgtc

SEQ ID NO: 254271 - DNA, 120 bp, Artificial Sequence
  ENSG00000124177_64 (sequence is synthesized)
tctatcaagcacaacgaaaagtggtacggcagtgactgaaaagactgcggaagacaagccgagtagccatgatgtgaaaacagacactttagctgaggacaagcctggtccaggtccatt

SEQ ID NO: 254272 - DNA, 120 bp, Artificial Sequence
  ENSG00000124177_65 (sequence is synthesized)
ttctgatcagtctgaacctgcaataactactagtagtcctgtggcttttaacccatttctcatcccaggagtatctcctggactcatttacccatccatgttcctctcccctggtatggg

SEQ ID NO: 254273 - DNA, 120 bp, Artificial Sequence
  ENSG00000124177_66 (sequence is synthesized)
catggctctgccagccatgcagcaggccagacactcggaaatagtaggtctggagagccagaagaggaagaagaagaagacaaagggggacaaccccaactcccacccagagcctgctcc

SEQ ID NO: 254274 - DNA, 120 bp, Artificial Sequence
  ENSG00000124177_67 (sequence is synthesized)
cagctgtgaaagggagcccagcggtgatgagaactgtgccgaacccagtgcccctttgcccgcagagagagaacatggggcacaggctggggagggggcactcaaagactccaacaacga

SEQ ID NO: 254275 - DNA, 120 bp, Artificial Sequence
  ENSG00000124177_68 (sequence is synthesized)
caccaattagaacttttttcatttaagaaattattgtgacttgtaagtttcttatcccataaaggtttgttacttccctcacttcacctccataagaacctgtgtttccataagtaagat

SEQ ID NO: 254276 - DNA, 120 bp, Artificial Sequence
  ENSG00000124177_69 (sequence is synthesized)
tacgtacctgatttcctgtctgagaactatggtaacagatgttaatagttgcagggtctcaccacttcattagataagtgttgtctacctagtctaggaggcacagaattctcattctgt

SEQ ID NO: 254277 - DNA, 120 bp, Artificial Sequence
  ENSG00000124177_70 (sequence is synthesized)
tatccagttcattccagcaatcatagttaatacagtacttggtgacacgccctacccccttctcttccaagtttcccactcacttgaggaggaaaaatggcaaaagaaagctgtctaggg

SEQ ID NO: 254278 - DNA, 120 bp, Artificial Sequence
  ENSG00000124177_71 (sequence is synthesized)
ttttaccattgaagggtggaagaacagagacaaagaggagctctttttctgtgagctgggttgcacaggaagaatgtcacagggaaccaaaaagcacagaaaaaggaagtgctggtgcat

SEQ ID NO: 254279 - DNA, 120 bp, Artificial Sequence
  ENSG00000124177_72 (sequence is synthesized)
ttgagttaaaatatttccctattttatcatgattactaagtgagtagtatagacagaagtatataactaatggttgaaaatacatatattcatttctttataaaaaacaaaaaccttacc

SEQ ID NO: 254280 - DNA, 120 bp, Artificial Sequence
  ENSG00000124177_73 (sequence is synthesized)
taccggtagtaatataatttcccccttggtggtttttcagacacctgcagcaagaagaaatactgactgactaggcattattttctatacatccctctcaccagtgaaaagattcctctt

SEQ ID NO: 254281 - DNA, 120 bp, Artificial Sequence
  ENSG00000124177_74 (sequence is synthesized)
gctgcgagaaagctttacccaccatgagttattgctgtcgacgggggtggggcaaggacccgcgctccgtagagctacacgctgcttcacaagcacacggctagcgctctgctctcacct

SEQ ID NO: 254282 - DNA, 120 bp, Artificial Sequence
  ENSG00000124177_75 (sequence is synthesized)
ggttcgcttacagatttctctagccattaatttgcctctctgtgtttaaagagcaccaggaccgaatggattttcacttcaggctttccttcaccaagaataaggttctttctggagcct

SEQ ID NO: 254283 - DNA, 120 bp, Artificial Sequence
  ENSG00000124177_76 (sequence is synthesized)
gcaagaagacagttgcccaacactttgacacttgctagtaggtcctttgatcaagagtgtctgaggctgtcaaatgtgtgccaccctttataatacagctatgaaaagttacttctccat

SEQ ID NO: 254284 - DNA, 120 bp, Artificial Sequence
  ENSG00000124177_77 (sequence is synthesized)
taatttctccattctgtttatatcttacagttggacccaaattccaaattatcagttaatcgaaactacattgcaagtcaacattattttctcttcttcctcagcttctccatgtttagg

SEQ ID NO: 254285 - DNA, 120 bp, Artificial Sequence
  ENSG00000124177_78 (sequence is synthesized)
aactgagaaagaaactgcctaagcagcacttccccatgtcctttcaccttcatgttaacgtcccttctgatggtctcactcttcacaggtagttcacactctgagacttgaagtaagctc

SEQ ID NO: 254286 - DNA, 120 bp, Artificial Sequence
  ENSG00000124177_79 (sequence is synthesized)
atggttcagtactctgggggcgcagggctgcgcaggacccttggaaatgttgcaagtgttactagtaccagtttcactttttgttgtcacaatttactgtattttttactttttctgtta

SEQ ID NO: 254287 - DNA, 120 bp, Artificial Sequence
  ENSG00000124177_80 (sequence is synthesized)
cagttttgctaatttatcagaaggtccaaaagtctgacataactatttcattttgcattatttatttatgatgcttttttcattgtcttttatacatttgggattataaattatgtaaat

SEQ ID NO: 254288 - DNA, 120 bp, Artificial Sequence
  ENSG00000124177_81 (sequence is synthesized)
gttaaaatgagcatctcaaagaagtctgttaaatcatgactgaaaaaaatcaatcagatgtatcttcaaaaagtggagtcccagttttatgaatcagagatataaaccagaaattctata

SEQ ID NO: 254289 - DNA, 120 bp, Artificial Sequence
  ENSG00000124177_82 (sequence is synthesized)
actgatcatagaagaagaatccagtaattgaacaaatcctatttaatgacatccttgtagcatagatggtctataatgctgaccacagatttcttagaaatgctgctctctctatttaac

SEQ ID NO: 254290 - DNA, 120 bp, Artificial Sequence
  ENSG00000124177_83 (sequence is synthesized)
taacattttgttcagttttgcctccagtggaagcagaaagggttttttcagctgttaaatcctaaaaatcaatataatttatttatgtaagaaaaataactcaatcaatatatttttgaa

SEQ ID NO: 254291 - DNA, 120 bp, Artificial Sequence
  ENSG00000124177_84 (sequence is synthesized)
ccttttaagtactaattttctttttatcaagtagaaaaaaaaatgtatttgccctaaatccttaaaatacaaatgctataaaaattcctgtatcttgaaagccttactgcaaatgagtat

SEQ ID NO: 254292 - DNA, 120 bp, Artificial Sequence
  ENSG00000124177_85 (sequence is synthesized)
tatagacatccagcagagtctggttttctttgttgtcgttgtgttgttgttgttttgtatggaaaagctgctttccccgggttccacttataacctccggtaggtcacagggttcaatgt

SEQ ID NO: 254293 - DNA, 120 bp, Artificial Sequence
  ENSG00000124177_86 (sequence is synthesized)
ggatctgacttaaaaacccaccagcatgctcaatcccttgttatccttatggaatctgtatgttaactctctgggtgttcaggcttctatttgactgctgttgtgaccctgtttgcaaaa

SEQ ID NO: 254294 - DNA, 120 bp, Artificial Sequence
  ENSG00000124177_87 (sequence is synthesized)
tgaatatgacactctgtggattatttgctctgtaaggcacaagtgcttcttatgattattttgacgtttccaagagcaaaagccaaatttaaactctcttcagcaaacttgagccttttc

SEQ ID NO: 254295 - DNA, 120 bp, Artificial Sequence
  ENSG00000124177_88 (sequence is synthesized)
atctaattccatgtcactcacggccataactttccttgaccattcttcaccccatgtcttacataataaattgtggtcttgatcctggatttaaaaacaaaagaaaaagtttaaaagtca

SEQ ID NO: 254296 - DNA, 120 bp, Artificial Sequence
  ENSG00000124177_89 (sequence is synthesized)
ctgtttgtattttggctgctgcaggagccattttagcccatgtgtcagtctcatatgattggcttttgtaccagttctgtaaatgaagaaactgagacccagggagatcaaataagttgc

SEQ ID NO: 254297 - DNA, 120 bp, Artificial Sequence
  ENSG00000124177_90 (sequence is synthesized)
ttcgacttggagctgttctacgttaagtatagaaatttgtacgtctatttaaagtattctctgtatttgggttttatatgaataaaactttttttctcttgtgactttattatcttctac

SEQ ID NO: 254298 - DNA, 120 bp, Artificial Sequence
  ENSG00000124177_91 (sequence is synthesized)
ttatagctgcacacagaattacctggagagcttttttaaacctctaaagcctttgctccacccaagaccattggctcagactcagtggggcccaaggattgttgtgtttttaaaaactcc

SEQ ID NO: 254299 - DNA, 120 bp, Artificial Sequence
  ENSG00000124177_92 (sequence is synthesized)
ttgggcaattctcatatgcaaccagggtagagaaccactctcctgtagcatatgctcttttcccctcttgtatattttcctttctgctacagacccactttcactaatgtgtgttaatga

SEQ ID NO: 254300 - DNA, 120 bp, Artificial Sequence
  ENSG00000124177_93 (sequence is synthesized)
taacctgcccacagctgccctgcctctgttctcagccagtttctctagaagctgcagagagatcagttgcttggaattactccgttttgttttgttttctgttgttgcccttaaggggaa

SEQ ID NO: 254301 - DNA, 120 bp, Artificial Sequence
  ENSG00000124177_94 (sequence is synthesized)
ggtctttctaagcccaatctccagcagtttcacaataaaccattttactatttctgtgttaggtggtcaccgtgtttattgaacaccttaaagctcgatcatttgctagttatgtgcttg

SEQ ID NO: 254302 - DNA, 120 bp, Artificial Sequence
  ENSG00000124177_95 (sequence is synthesized)
ccagatgaagcacatttttacggaggtgaagcaatatttactgactcatttgactgctgcttttcttgcagcagtaaatactgtgtttacgtttctaagtccaagttaaattcctataca

SEQ ID NO: 254303 - DNA, 120 bp, Artificial Sequence
  ENSG00000124177_96 (sequence is synthesized)
gatctgttgctcaagtcaaattgataaatgtgtgctgatttgcaacaaaactagtctagattcaagtcaaagaaaactatccaccaaagttaaggatcaaaccttataaactgacaactc

SEQ ID NO: 254304 - DNA, 120 bp, Artificial Sequence
  ENSG00000124177_97 (sequence is synthesized)
ataacggcgtgcatcttggtctgaatactaataaatagctagagtgagaggaatacgcacacaattcttttgtccctgctccctcaacccactgcaacccaaaaaggacatttcagaagg

SEQ ID NO: 254305 - DNA, 120 bp, Artificial Sequence
  ENSG00000124177_98 (sequence is synthesized)
tcctaaagtttgaatgtaaaaaacaaaacaaatctaaaagtgagagaaagtaaacaaataaataattttatttatgtaaacttgggaatttctaagtattgtacctatagcaagaggaag

SEQ ID NO: 254306 - DNA, 120 bp, Artificial Sequence
  ENSG00000124177_99 (sequence is synthesized)
gactgatggattttaatattaaacaaatctataatgctatatatcagaaaatgccacaaaccttaaccttaatgtgttattcttggaataaagactaaaccctgtaatagagcctacaca

SEQ ID NO: 254307 - DNA, 120 bp, Artificial Sequence
  ENSG00000124177_100 (sequence is synthesized)
attttctctcattataagatgccctccatcttctgtagaactagatagttactaactcattaatggcgcttaatctgcttacagcctggagaaatgagccaggaggtcttgccatttcaa

SEQ ID NO: 254308 - DNA, 120 bp, Artificial Sequence
  ENSG00000124177_101 (sequence is synthesized)
ataggaacaaccccgctcctccagggtttcagaagagccactgttgacggcacggcagagcaagatggcagggttgagtgtgcagcggcttttctccggggtagtgaggctctccaagac

SEQ ID NO: 254309 - DNA, 120 bp, Artificial Sequence
  ENSG00000124177_102 (sequence is synthesized)
tggggtatgggagaaagaacaggagtcagggctacctgaatgtgatcctggctcttctgcttgacttactgggtgatattgggctacaactgagactcactttgctcctgtgtaaagtgg

SEQ ID NO: 254310 - DNA, 120 bp, Artificial Sequence
  ENSG00000124177_103 (sequence is synthesized)
ggcaacagcatctaccacggagggttgaagatttacggagatcatgctaagacagtttgttccaaactcaaaggaaatcatttgcaaacaacagaaaaggtcagaaaccgtatacctggc

SEQ ID NO: 254311 - DNA, 120 bp, Artificial Sequence
  ENSG00000124177_104 (sequence is synthesized)
caagagagatcccttttacgctttgtttaatgtttcatgttgtattttgggttttcccatttactggattctgagctccaaaacaggaatcacattttatgttttcttattttaaaagca

SEQ ID NO: 254312 - DNA, 120 bp, Artificial Sequence
  ENSG00000124177_105 (sequence is synthesized)
ataataataactagtacttattgagtgcctactgcttaccatgttcaaggctttacatgattatcttgtttgttcctcacaaccactctgaagatgggctttgttattcccattttatag

SEQ ID NO: 254313 - DNA, 120 bp, Artificial Sequence
  ENSG00000124177_106 (sequence is synthesized)
gtgaggaaaataaggctttaaagcattaaataatttccccaagattatccagctagtaagtgacaaagcaggaaaccaaaccaaggacctttttctctaggggctgagaactttactgct

SEQ ID NO: 254314 - DNA, 120 bp, Artificial Sequence
  ENSG00000124177_107 (sequence is synthesized)
aagccatattgcttgggttatgtcttcctcttagactttcaaagtaatctgggaagctgaagtgacacgttctttccctgctcaatcctgcaagcttttaagaagtcttttacctttttt

SEQ ID NO: 254315 - DNA, 120 bp, Artificial Sequence
  ENSG00000124177_108 (sequence is synthesized)
agatgtgcaacaccatagtttctctataatgatcatagaattccaatggaatgaccgataaaaattttcccccttgtcctcagagtatttttttaatttattgatgcaaacacttattta

SEQ ID NO: 254316 - DNA, 120 bp, Artificial Sequence
  ENSG00000124177_109 (sequence is synthesized)
gcatggtcattgttatagaccccattataggcattagtaaaacagaggtaagacaggcattcaaactatagagggtgagtaaattgtggtatggcgttttctttatgtgagagagctagg

SEQ ID NO: 254317 - DNA, 120 bp, Artificial Sequence
  ENSG00000124177_110 (sequence is synthesized)
aaccgagtgctgtggggacaggagctggagcagtgagtgctgcctgggacagtgggcagtggtgacagaggaggaaaactgaatccggcagtcaggatggagttaaagtgtaccaagtgg

SEQ ID NO: 254318 - DNA, 120 bp, Artificial Sequence
  ENSG00000124177_111 (sequence is synthesized)
ggtcagtggtgtgtgtagggttctaattcaggcaccccagctgagtaatatcagggtggaaataggtggagtgattcaaataacaccttacatgttttctttctttagaaactaattttc

SEQ ID NO: 254319 - DNA, 120 bp, Artificial Sequence
  ENSG00000124177_112 (sequence is synthesized)
agggcctggcttggctacagagcatccgtgatgctctatgctatggtgtcagctggatgacaggcttagggccttggtcagggggtgaaactgaatgaaaagtaaatgtcgacccttcca

SEQ ID NO: 254320 - DNA, 120 bp, Artificial Sequence
  ENSG00000124177_113 (sequence is synthesized)
actaattagagagtgtggttctttccgttaaatcaaatgatgtttcacagtggtagcctccagatatagactagaactactaattattattattatcagaaataaagatactaatcttga

SEQ ID NO: 254321 - DNA, 120 bp, Artificial Sequence
  ENSG00000124181_0 (sequence is synthesized)
cgccggtgtgaggcggcccgtcctggctcccttgtccgggaagcccgcccaggagccgccgccgggtcccgctcgtctgccgcctcagcctcagccccaacctcagccgccgccgttgcg

SEQ ID NO: 254322 - DNA, 80 bp, Artificial Sequence
  ENSG00000124181_1 (sequence is synthesized)
ccaacctcagccgccgccgttgcgcttgctcccgggcggtcctggcctgtgccgccgccgcccccagcgtcggagccatg

SEQ ID NO: 254323 - DNA, 120 bp, Artificial Sequence
  ENSG00000124181_2 (sequence is synthesized)
gcgcgccctcggacgccgaggtgctgcacctctgccgcagcctcgaggtgggcaccgtcatgactttgttctactccaagaagtcgcagcgacccgagcggaagaccttccaggtcaagc

SEQ ID NO: 254324 - DNA, 120 bp, Artificial Sequence
  ENSG00000124181_3 (sequence is synthesized)
tggagacgcgccagatcacgtggagccggggcgccgacaagatcgagggggccattgacattcgtgaaattaaggagatccgcccagggaagacctcacgggactttgatcgctatcaag

SEQ ID NO: 254325 - DNA, 120 bp, Artificial Sequence
  ENSG00000124181_4 (sequence is synthesized)
aggacccagctttccggccggaccagtcacattgctttgtcattctctatggaatggaatttcgcctgaaaacgctgagcctgcaagccacatctgaggatgaagtgaacatgtggatca

SEQ ID NO: 254326 - DNA, 120 bp, Artificial Sequence
  ENSG00000124181_5 (sequence is synthesized)
agggcttaacttggctgatggaggatacattgcaggcacccacacccctgcagattgagaggtggctccggaagcagttttactcagtggatcggaatcgtgaggatcgtatatcagcca

SEQ ID NO: 254327 - DNA, 120 bp, Artificial Sequence
  ENSG00000124181_6 (sequence is synthesized)
aggacctgaagaacatgctgtcccaggtcaactaccgggtccccaacatgcgcttcctccgagagcggctgacggacctggagcagcgcagcggggacatcacctacgggcagtttgctc

SEQ ID NO: 254328 - DNA, 120 bp, Artificial Sequence
  ENSG00000124181_7 (sequence is synthesized)
agctgtaccgcagcctcatgtacagcgcccagaagacgatggacctccccttcttggaagccagtactctgagggctggggagcggccggagctttgccgagtgtcccttcctgagttcc

SEQ ID NO: 254329 - DNA, 120 bp, Artificial Sequence
  ENSG00000124181_8 (sequence is synthesized)
agcagttccttcttgactaccagggggagctgtgggctgttgatcgcctccaggtgcaggagttcatgctcagcttcctccgagaccccttacgagagatcgaggagccatacttcttcc

SEQ ID NO: 254330 - DNA, 120 bp, Artificial Sequence
  ENSG00000124181_9 (sequence is synthesized)
tggatgagtttgtcaccttcctgttctccaaagagaacagtgtgtggaactcgcagctggatgcagtatgcccggacaccatgaacaaccctctttcccactactggatctcctcctcgc

SEQ ID NO: 254331 - DNA, 120 bp, Artificial Sequence
  ENSG00000124181_10 (sequence is synthesized)
acaacacgtacctgaccggggaccagttctccagtgagtcctccttggaagcctatgctcgctgcctgcggatgggctgtcgctgcattgagttggactgctgggacggcccggatggga

SEQ ID NO: 254332 - DNA, 120 bp, Artificial Sequence
  ENSG00000124181_11 (sequence is synthesized)
tgccagttatttaccatgggcacacccttaccaccaagatcaagttctcagatgtcctgcacaccatcaaggagcatgcctttgtggcctcagagtacccagtcatcctgtccattgagg

SEQ ID NO: 254333 - DNA, 120 bp, Artificial Sequence
  ENSG00000124181_12 (sequence is synthesized)
accactgcagcattgcccagcagagaaacatggcccaatacttcaagaaggtgctgggggacacactcctcaccaagcccgtggagatctctgccgacgggctcccctcacccaaccagc

SEQ ID NO: 254334 - DNA, 120 bp, Artificial Sequence
  ENSG00000124181_13 (sequence is synthesized)
ttaagaggaagatcctcatcaagcacaagaagctggctgagggcagtgcctacgaggaggtgcctacatccatgatgtactctgagaacgacatcagcaactctatcaagaatggcatcc

SEQ ID NO: 254335 - DNA, 120 bp, Artificial Sequence
  ENSG00000124181_14 (sequence is synthesized)
tctacctggaggaccctgtgaaccacgaatggtatccccactactttgttctgaccagcagcaagatctactactctgaggagaccagcagtgaccagggcaacgaggatgaggaggagc

SEQ ID NO: 254336 - DNA, 120 bp, Artificial Sequence
  ENSG00000124181_15 (sequence is synthesized)
ccaaggaggtcagcagcagcacagagctgcactccaatgagaagtggttccatgggaagctaggggcagggcgtgacgggcgtcacatcgctgagcgcctgcttactgagtactgcatcg

SEQ ID NO: 254337 - DNA, 120 bp, Artificial Sequence
  ENSG00000124181_16 (sequence is synthesized)
agaccggagcccctgacggctccttcctcgtgcgagagagtgagaccttcgtgggcgactacacgctctctttctggcggaacgggaaagtccagcactgccgtatccactcccggcaag

SEQ ID NO: 254338 - DNA, 120 bp, Artificial Sequence
  ENSG00000124181_17 (sequence is synthesized)
atgctgggacccccaagttcttcttgacagacaacctcgtctttgactccctctatgacctcatcacgcactaccagcaggtgcccctgcgctgtaatgagtttgagatgcgactttcag

SEQ ID NO: 254339 - DNA, 120 bp, Artificial Sequence
  ENSG00000124181_18 (sequence is synthesized)
agcctgtcccacagaccaacgcccacgagagcaaagagtggtaccacgcgagcctgaccagagcacaggctgagcacatgctaatgcgcgtccctcgtgatggggccttcctggtgcgga

SEQ ID NO: 254340 - DNA, 120 bp, Artificial Sequence
  ENSG00000124181_19 (sequence is synthesized)
agcggaatgaacccaactcatatgccatctctttccgggctgagggcaagatcaagcattgccgtgtccagcaagagggccagacagtgatgctagggaactcggagttcgacagccttg

SEQ ID NO: 254341 - DNA, 120 bp, Artificial Sequence
  ENSG00000124181_20 (sequence is synthesized)
ttgacctcatcagctactatgagaaacacccgctataccgcaagatgaagctgcgctatcccatcaacgaggaggcactggagaagattggcacagctgagcctgactacggggccctgt

SEQ ID NO: 254342 - DNA, 120 bp, Artificial Sequence
  ENSG00000124181_21 (sequence is synthesized)
atgagggacgcaaccctggcttctatgtagaggcaaaccctatgccaactttcaagtgtgcagtcaaagccctctttgactacaaggcccagagggaggacgagctgaccttcatcaaga

SEQ ID NO: 254343 - DNA, 120 bp, Artificial Sequence
  ENSG00000124181_22 (sequence is synthesized)
atcatccagaatgtggagaagcaagagggaggctggtggcgaggggactacggagggaagaagcagctgtggttcccatcaaactacgtggaagagatggtcaaccccgtggccctggag

SEQ ID NO: 254344 - DNA, 120 bp, Artificial Sequence
  ENSG00000124181_23 (sequence is synthesized)
ccggagagggagcacttggacgagaacagccccctaggggacttgctgcggggggtcttggatgtgccggcttgtcagattgccatccgtcctgagggcaagaacaaccggctcttcgtc

SEQ ID NO: 254345 - DNA, 120 bp, Artificial Sequence
  ENSG00000124181_24 (sequence is synthesized)
ttctccatcagcatggcgtcggtggcccactggtccctggatgttgctgccgactcacaggaggagctgcaggactgggtgaaaaagatccgtgaagtggcccagacagcagacgccagg

SEQ ID NO: 254346 - DNA, 120 bp, Artificial Sequence
  ENSG00000124181_25 (sequence is synthesized)
ctcactgaagggaagataatggaacggaggaagaagattgccctggagctctctgaacttgtcgtctactgccggcctgttccctttgatgaagagaagattggcacagaacgtgcttgc

SEQ ID NO: 254347 - DNA, 120 bp, Artificial Sequence
  ENSG00000124181_26 (sequence is synthesized)
taccgggacatgtcatccttcccggaaaccaaggctgagaaatacgtgaacaaggccaaaggcaagaagttccttcagtacaatcgactgcagctctcccgcatctaccccaagggccag

SEQ ID NO: 254348 - DNA, 120 bp, Artificial Sequence
  ENSG00000124181_27 (sequence is synthesized)
cgactggattcctccaactacgatcctttgcccatgtggatctgtggcagtcagcttgtggccctcaacttccagacccctgacaagcctatgcagatgaaccaggccctcttcatgacg

SEQ ID NO: 254349 - DNA, 120 bp, Artificial Sequence
  ENSG00000124181_28 (sequence is synthesized)
ggcaggcactgtggctacgtgctgcagccaagcaccatgcgggatgaggccttcgacccctttgacaagagcagcctccgcgggctggagccatgtgccatctctattgaggtgctgggg

SEQ ID NO: 254350 - DNA, 120 bp, Artificial Sequence
  ENSG00000124181_29 (sequence is synthesized)
gcccgacatctgccaaagaatggccgaggcattgtgtgtccttttgtggagattgaggtggctggagctgagtatgacagcaccaagcagaagacagagtttgtggtggacaatggactc

SEQ ID NO: 254351 - DNA, 120 bp, Artificial Sequence
  ENSG00000124181_30 (sequence is synthesized)
aaccctgtatggccagccaagcccttccacttccagatcagtaaccctgaatttgcctttctgcgcttcgtggtgtatgaggaagacatgtttagtgaccagaatttcctggctcaggct

SEQ ID NO: 254352 - DNA, 120 bp, Artificial Sequence
  ENSG00000124181_31 (sequence is synthesized)
actttcccagtaaaaggcctgaagacaggatacagagcagtgcctttgaagaacaactacagtgaggacctggagttggcctccctgctgatcaagattgacattttccctgccaagcag

SEQ ID NO: 254353 - DNA, 120 bp, Artificial Sequence
  ENSG00000124181_32 (sequence is synthesized)
gagaatggtgacctcagtcccttcagtggtacgtccctgcgggagcggggctcagatgcctcaggccagctgtttcatggccgagcccgggaaggctcctttgaatcccgctaccagcag

SEQ ID NO: 254354 - DNA, 120 bp, Artificial Sequence
  ENSG00000124181_33 (sequence is synthesized)
ccgtttgaggacttccgcatctcccaggagcatctcgcagaccattttgacagtcgagaacgaagggccccaagaaggactcgggtcaatggagacaaccgcctctagttgtaccccagc

SEQ ID NO: 254355 - DNA, 120 bp, Artificial Sequence
  ENSG00000124181_34 (sequence is synthesized)
ctcgttggagagcagcaggtgctgtgcgccttgtagaatgccgcgaactgggttctttggaagcagccccctgtggcggccttccgggtctcgcagcctgaagcctggattccagcagtg

SEQ ID NO: 254356 - DNA, 120 bp, Artificial Sequence
  ENSG00000124181_35 (sequence is synthesized)
aatgctagacagaaaccaagccattaatgagatgttattactgttttgggcctccatgccccagctctggatgaaggcaaaaactgtactgtgtttcgcattaagcacacacatctggcc

SEQ ID NO: 254357 - DNA, 120 bp, Artificial Sequence
  ENSG00000124181_36 (sequence is synthesized)
ctgacttctggagatggatccttccatcttgtggggccaggaccatggccgaagccccttggagagagaggctgcctcagccagtggcacaggagactccaaggagctactgacattcct

SEQ ID NO: 254358 - DNA, 120 bp, Artificial Sequence
  ENSG00000124181_37 (sequence is synthesized)
aagagtggaggaggaggaggagccttgctgggccagggaaacaaagtttacattgtcctgtagctttaaaaccacagctgggcagggtgagaagctagatgcccctgcagtttggccctg

SEQ ID NO: 254359 - DNA, 120 bp, Artificial Sequence
  ENSG00000124181_38 (sequence is synthesized)
gagccagggcagaggaatgtagggcctgcatggagaagggttctgccctgcctgaggaggaggacacagcacaagggcacattgcccatggctgggaacatgacccagcctgaaagatac

SEQ ID NO: 254360 - DNA, 120 bp, Artificial Sequence
  ENSG00000124181_39 (sequence is synthesized)
aggggatcatgttaaaaatagcagtattatttttcgtctcaatggtattgtaactaagttatttactcctcctgctcctcacccctgtagggaaaccttggagaggagagtggcaggtgg

SEQ ID NO: 254361 - DNA, 120 bp, Artificial Sequence
  ENSG00000124181_40 (sequence is synthesized)
gctgcctgctgtgttaagaggacttagtttgtgatgtaaggcactgtcaggaatggggggcgggccagggtgggaagagaagaaatagcagagcctattttggtgaggttttttgttttt

SEQ ID NO: 254362 - DNA, 120 bp, Artificial Sequence
  ENSG00000124181_41 (sequence is synthesized)
aagtcaaagaagactcagtatgctttccctgaggaatgaaaaagggattgaggagttgcctgactcctgggtgggtggggtacaggcagttaggtgctgaatgaagctgccatccttgct

SEQ ID NO: 254363 - DNA, 120 bp, Artificial Sequence
  ENSG00000124181_42 (sequence is synthesized)
gcagcttctaactggtaaaaagatccagggatggagatgggaaggttagaaaggcagccctcacctctgaggacagaggccggggtccaggcccgtgggcgcaaaggtgcctcatagcat

SEQ ID NO: 254364 - DNA, 120 bp, Artificial Sequence
  ENSG00000124181_43 (sequence is synthesized)
agccagcattcagcacacacaaacctactgcccacatttgggctcagggttggccatttgctagttctgctgccctcttaagatctgactgccaaataaatcatcctcatgtcctttttc

SEQ ID NO: 254365 - DNA, 120 bp, Artificial Sequence
  ENSG00000124181_44 (sequence is synthesized)
gccgctcgtggccgccgggctgtgtccggggccgcgtgagaaagctctgcgggactgagggctgggtgggtcgaccgggaacggcgcgcgctcccgccgccatcgcgcctccgtccccgc

SEQ ID NO: 254366 - DNA, 80 bp, Artificial Sequence
  ENSG00000124181_45 (sequence is synthesized)
gccgacgggcgggggtcctccccacgggtgcgcgggcgcctttgttcccggcgccgaagcggggtggggcctcagggcag

SEQ ID NO: 254367 - DNA, 120 bp, Artificial Sequence
  ENSG00000124181_46 (sequence is synthesized)
aatttctggaaatttctcaggttaagcagcaagagctgtaacccctcctctgggctaacaggagttgtgggtccactctctcctgcccaccctctgagggtgtgtctgagcagagtacat

SEQ ID NO: 254368 - DNA, 120 bp, Artificial Sequence
  ENSG00000124181_47 (sequence is synthesized)
cctgcctgggttctttgtggccagccagttttggtggtgagctggaaacaaccagagcccctttccagttccacagaaacctctcctttcaaaaatgttgcattcagttcgttaacactg

SEQ ID NO: 254369 - DNA, 120 bp, Artificial Sequence
  ENSG00000124181_48 (sequence is synthesized)
ccaggtgccattctgattgcctctaggacttggcagctgaaatctctgggccctttcaacacagttgaaaggcccttctcttcctgaagctctgtttccatagttggctgtgctgggatg

SEQ ID NO: 254370 - DNA, 120 bp, Artificial Sequence
  ENSG00000124181_49 (sequence is synthesized)
gaacaaaaatgacgccacacaaaaaatttaagatagatccggttccgtggatgacatgaactgatgatagccagtatcaaacagcgatagtgctcaggttcttgtgtgactttcttttac

SEQ ID NO: 254371 - DNA, 120 bp, Artificial Sequence
  ENSG00000124181_50 (sequence is synthesized)
agcttcacagtcccagttcatagagaggagggtggctttttcccatacacaagaaggtggtgggtgggaattcacctgggccctcatgatccatgtttcctctctaggtttttatggcct

SEQ ID NO: 254372 - DNA, 120 bp, Artificial Sequence
  ENSG00000124181_51 (sequence is synthesized)
ggagagaaaggtttcctatcagagaaggaagaggactgtgtaggcccttctgttagggcccatccacgttggttaggacgtccttggcgtgtttgttagtgttgacccttttagttttca

SEQ ID NO: 254373 - DNA, 120 bp, Artificial Sequence
  ENSG00000124181_52 (sequence is synthesized)
tcaatacgtatctctatttgctgaacaagtgtctttctggaacacaacctggggaacagacagctctgcctttcttaaggcagctttgtagacctgaggctcacctctcttgggctctgt

SEQ ID NO: 254374 - DNA, 120 bp, Artificial Sequence
  ENSG00000124181_53 (sequence is synthesized)
aagacattgcctttgcctcactgcaaatgttttgattgttcttcctagtggaaaacgtgccaactctcaagcaaatttaaagatcattttcacttcaagattcctccagacctgacaaat

SEQ ID NO: 254375 - DNA, 120 bp, Artificial Sequence
  ENSG00000124181_54 (sequence is synthesized)
gttgattgacccagaaggcagagtgtttgttggtggggaagacccttacttggggccgaatgctttggcatcaggagttgtttgccccatcccatgcatgcaggccgtgtccctacagtg

SEQ ID NO: 254376 - DNA, 120 bp, Artificial Sequence
  ENSG00000124181_55 (sequence is synthesized)
cgacagctcagggttatgacctgtggagtctcaaccctaacagcacattagcaccacttggggagcttctgaaaaatactggtacccggggccttagcataggtattgttcaaaacctct

SEQ ID NO: 254377 - DNA, 120 bp, Artificial Sequence
  ENSG00000124181_56 (sequence is synthesized)
caaggtgatttaaatgagtaacaagggttgaaaaaccctgattttggcagcacaaaccaaaagagcaggcagggccgggagagggaagtcagtggtaccagaaggtagatgggctccctt

SEQ ID NO: 254378 - DNA, 120 bp, Artificial Sequence
  ENSG00000124181_57 (sequence is synthesized)
gcaggctccttgttctcctgccatcaccagtagaaccttctggctgacagaccagggacaagtagactgggttcaaagtgacagacctttcactttcaacagctttggctcagcagacat

SEQ ID NO: 254379 - DNA, 120 bp, Artificial Sequence
  ENSG00000124181_58 (sequence is synthesized)
gtacacatacaaagtagagcctacaaggtcaggggcattctgcccccgccacaggactaaagactgccctgcgggaagatggcaggagcagtttctgacctcagttgagtatctgtggcc

SEQ ID NO: 254380 - DNA, 120 bp, Artificial Sequence
  ENSG00000124181_59 (sequence is synthesized)
atgagcagaaaaggcaggggtctgcctcctgaccaagcacatcttgaacatcacctgagagcttgaacatcactaaggacctagacactcacttgtctttcaacttgagcccatcactca

SEQ ID NO: 254381 - DNA, 120 bp, Artificial Sequence
  ENSG00000124181_60 (sequence is synthesized)
ccatgtgagttctgttgagggtgggtagaaagcaaataggttcaggttatcccaccagactaactcggtgaatgaaaggatcatgccttcttcacattttaattaaatggatcaagcaca

SEQ ID NO: 254382 - DNA, 120 bp, Artificial Sequence
  ENSG00000124181_61 (sequence is synthesized)
tgtgaagaaaggaaagggaacagtgaggccgggcctgaggcctctgaagccgtctctactgaggtcgaaggatccctgtggatcaggtgcaagtttgctgcactgggggaaagggaagct

SEQ ID NO: 254383 - DNA, 120 bp, Artificial Sequence
  ENSG00000124181_62 (sequence is synthesized)
tatgctagataggccacagcccctgccttagctagggattgagaagaaacagacacataagatgcaatgtggtgtgtttaggttgtgttgagtttgagatactgatgggtcgttgaagtg

SEQ ID NO: 254384 - DNA, 120 bp, Artificial Sequence
  ENSG00000124181_63 (sequence is synthesized)
ggtctgcttagtgggcaattggatacacaagaccagaggtaagaggagaagtcctgggctggaagcaggagtggagtgggggctgaggcatagaagggatgaggtggtgtcgcataggaa

SEQ ID NO: 254385 - DNA, 120 bp, Artificial Sequence
  ENSG00000124181_64 (sequence is synthesized)
tgccggcttgtcagattggtgagctcccatctgtttctcttgcccactgttccctagggtgagattcttctttgtatctctttcctgctcctagggaggaagctgatggctgaaccccaa

SEQ ID NO: 254386 - DNA, 120 bp, Artificial Sequence
  ENSG00000124181_65 (sequence is synthesized)
tttaaaaccacagctgggcagggaaagcctgttgcatgggacatgctcactagaaacagtcgccagatgattattctgcagtagaagcagaccaactcttcagccagtgcatgcagggct

SEQ ID NO: 254387 - DNA, 120 bp, Artificial Sequence
  ENSG00000124181_66 (sequence is synthesized)
tcaaagaggtcagatttgtgggcaggcaagagctcaggaatgaagaaccaaaaaggaggctctcaacccctctccaaggccagacgctctctgtactcccattaacttcacaaccaagtg

SEQ ID NO: 254388 - DNA, 120 bp, Artificial Sequence
  ENSG00000124181_67 (sequence is synthesized)
cagacgctcgaccaactcttcagccagtgcatgcagggctctggaggtgatgccagcaggatctggaggctctccagaacatactgttccaatataatagcagctgggtctagttctgat

SEQ ID NO: 254389 - DNA, 120 bp, Artificial Sequence
  ENSG00000124181_68 (sequence is synthesized)
ttgcaaccctaacatcaaagtcaaagtaaggctgatatcagagaggttcatcatctgtgattcataaagaaatggtccttaattgcagctggctgagaaagccatgagaaaccaggatct

SEQ ID NO: 254390 - DNA, 89 bp, Artificial Sequence
  ENSG00000124181_69 (sequence is synthesized)
aattgcagctggctgagaaagccatgagaaaccaggatctcgctctgtaacccaggctctggaatgcagtggcacaaccacgctgatcc

SEQ ID NO: 254391 - DNA, 120 bp, Artificial Sequence
  ENSG00000124181_70 (sequence is synthesized)
actggaggtgaagaaggaagctcttgactctcctaaagctgatcccaaagtgaaggctttgaaggccaagaaggcagtgctgaaaggcatccacacagccaccaagaaaaaaaaaaaaaa

SEQ ID NO: 254392 - DNA, 120 bp, Artificial Sequence
  ENSG00000124181_71 (sequence is synthesized)
gaccactggggatgtccctgttttctcagtatatcagccaaggacctgaagaacatgctgtcccaggtcaactaccgggtccccaacatgcgcttcctccgagagcggctgacggacctg

SEQ ID NO: 254393 - DNA, 120 bp, Artificial Sequence
  ENSG00000124181_72 (sequence is synthesized)
aggagcccaggaaaggcaggtcagacagactgcaggccactggtgagggagagggtctgctgtgttgagagctacagaggtaaagacaggaacgataagaacttgcaagtgccctttgga

SEQ ID NO: 254394 - DNA, 120 bp, Artificial Sequence
  ENSG00000124181_73 (sequence is synthesized)
ttcagcagcagctaatagcccttgtgagacttttgagctgcatcagcagcatggctggcattagatggcagtgggcagcagggagtctggaatggcaaaagcagagcctttgtagggcct

SEQ ID NO: 254395 - DNA, 120 bp, Artificial Sequence
  ENSG00000124181_74 (sequence is synthesized)
ggtcttggatgtgccggcttgtcagattgcatggcgtcggtggcccactggtccctggatgttgctgccgactcacaggaggagctgcaggactgggtgaaaaagatccgtgaagtggcc

SEQ ID NO: 254396 - DNA, 120 bp, Artificial Sequence
  ENSG00000124181_75 (sequence is synthesized)
actagctagcttaccttctctccctgcagggctggggagcggccggagctttgccgagtgtcccttcctgagttccagcagttccttcttgactaccagggggtatggctgggctgacat

SEQ ID NO: 254397 - DNA, 86 bp, Artificial Sequence
  ENSG00000124181_76 (sequence is synthesized)
acctccccttcttggaagccagtactctgaggtttggtttggagtggggaggtggggttttccctgggcccccttcatctctccac

SEQ ID NO: 254398 - DNA, 120 bp, Artificial Sequence
  ENSG00000124181_77 (sequence is synthesized)
agtagggaaccatgctggaccattctgggaagctgtgctggctgggagttgggttctgccttccgtggggcaccttgttgtctgttgaccatactagctagcttaccttctctccctgca

SEQ ID NO: 254399 - DNA, 120 bp, Artificial Sequence
  ENSG00000124191_0 (sequence is synthesized)
cgcagccctggcgcagacgcgtgggctccgtggcgatgcggggtgttgcctgaggctccactgaagctatggcataatttgcagaatttgcacttcattacttttctgaaattcaaacaa

SEQ ID NO: 254400 - DNA, 120 bp, Artificial Sequence
  ENSG00000124191_1 (sequence is synthesized)
attctgaaactgcacgagttctggctgagagctgtggatctgtgcattttgatggtgacagtgcctacgtggggatgagtgacggaaacccagagctcctgtcaaccagccagacctaca

SEQ ID NO: 254401 - DNA, 120 bp, Artificial Sequence
  ENSG00000124191_2 (sequence is synthesized)
acggccagagcgagaacaacgaagactatgagatccccccgataacacctcccaacctcccggagccatccctcctgcacctgggggaccacgaagccagctaccactcgctgtgccacg

SEQ ID NO: 254402 - DNA, 120 bp, Artificial Sequence
  ENSG00000124191_3 (sequence is synthesized)
gcctcacccccaacggtctgctccctgcctactcctatcaggccatggacctcccagccatcatggtgtccaacatgctagcacaggacagccacctgctgtcgggccagctgcccacga

SEQ ID NO: 254403 - DNA, 120 bp, Artificial Sequence
  ENSG00000124191_4 (sequence is synthesized)
tccaggagatggtccactcggaagtggctgcctatgactcgggccggcccgggcccctgctgggtcgcccggcaatgctggccagccacatgagtgccctcagccagtcccagctcatct

SEQ ID NO: 254404 - DNA, 120 bp, Artificial Sequence
  ENSG00000124191_5 (sequence is synthesized)
cgcagatgggcatccggagcagcatcgcccacagctccccatcaccgccggggagcaagtcagcgaccccctctccctccagctccactcaggaagaggagtcggaagtgcatttcaaga

SEQ ID NO: 254405 - DNA, 120 bp, Artificial Sequence
  ENSG00000124191_6 (sequence is synthesized)
tctcgggagaaaagagaccttcagccgacccaggaaaaaaggccaagaacccgaagaagaagaaaaagaaggaccccaatgagccgcagaagcctgtgtcggcctacgcactcttcttca

SEQ ID NO: 254406 - DNA, 120 bp, Artificial Sequence
  ENSG00000124191_7 (sequence is synthesized)
gagacactcaggccgccatcaagggtcagaaccccagtgccactttcggtgacgtgtccaaaatcgtggcctccatgtgggacagcctgggagaggaacagaagcaggcctacaagagga

SEQ ID NO: 254407 - DNA, 120 bp, Artificial Sequence
  ENSG00000124191_8 (sequence is synthesized)
agacagaagcagcaaagaaggaatatctgaaggccctggcagcctaccgggctagcctcgtctccaagagctccccagatcaaggtgagaccaagagcactcaggcaaacccaccagcca

SEQ ID NO: 254408 - DNA, 120 bp, Artificial Sequence
  ENSG00000124191_9 (sequence is synthesized)
aaatgctcccacccaagcagcccatgtatgccatgccaggcctggcctccttcctgacgccgtcggacctgcaggccttccgcagtggggcctcccctgccagcctcgcccggacgctgg

SEQ ID NO: 254409 - DNA, 120 bp, Artificial Sequence
  ENSG00000124191_10 (sequence is synthesized)
agtccacctgttagcatgtccccagccccccagccccctgtcctgcccacccccatggcactccaggtgcagctggcgatgagcccctcacctccagggccacaggacttcccgcacatc

SEQ ID NO: 254410 - DNA, 120 bp, Artificial Sequence
  ENSG00000124191_11 (sequence is synthesized)
tctgagttccccagcagctcgggatcctgctcacctggcccatccaaccccaccagcagcggggactgggacagcagctaccccagtggggagtgtggcatcagcacctgcagcctgctc

SEQ ID NO: 254411 - DNA, 120 bp, Artificial Sequence
  ENSG00000124191_12 (sequence is synthesized)
cccagggacaaatcgctctacctcacctaatcccgcctccctaccatccctgaggctcgctggaaggcactgctcagagcctgaagggctgacagcagaaaagaggccctggccagaggc

SEQ ID NO: 254412 - DNA, 120 bp, Artificial Sequence
  ENSG00000124191_13 (sequence is synthesized)
agggtggcccatcggagagagcagtgacacacccattgcccgggggctgagtctcttcctcaacctcccaccagactctgcagaggcagcccactgcccaccaccagcccaaagaacctg

SEQ ID NO: 254413 - DNA, 120 bp, Artificial Sequence
  ENSG00000124191_14 (sequence is synthesized)
caggaaccttccgcccgctgacctgcttgctccagggtaactgtggaccctgtcctcgccctgcgcacggtaccctatgtctggacacccggccccagctccagccccagcccaggtggg

SEQ ID NO: 254414 - DNA, 120 bp, Artificial Sequence
  ENSG00000124191_15 (sequence is synthesized)
ccgcccctggcggggtcgcttaccaacggacacccaccccagatgcatgggccagagggccggcccccggcatagatgtgcacatcggttttccagtgtgaacaaaagattacgaaacct

SEQ ID NO: 254415 - DNA, 120 bp, Artificial Sequence
  ENSG00000124191_16 (sequence is synthesized)
agaaactgttggttccgtgtaagtagttgactacgtgttttagaactgtgctgaagacatctgtaagactattttgtgggggaaaaaagtagtttcctttaaggtaaaaagcattttata

SEQ ID NO: 254416 - DNA, 120 bp, Artificial Sequence
  ENSG00000124191_17 (sequence is synthesized)
tgatccttagcacatttttaagttttatcttaagggagacgcgcacaaaagcggctgccaaaccgtttcgtcatcctcacagcaaggaccggacgcttgctagccaccccggagcactgc

SEQ ID NO: 254417 - DNA, 120 bp, Artificial Sequence
  ENSG00000124191_18 (sequence is synthesized)
tctccttttaatcatgtattcatctattttaaattgccggcgacgacttttgtctatttatgaagaaaccttgagaacgaagttacagcttatcctaccgtgtgtgtggttttggggttt

SEQ ID NO: 254418 - DNA, 120 bp, Artificial Sequence
  ENSG00000124191_19 (sequence is synthesized)
cgtttgggtttgggttcttgacgtcgtttgcagctgtttcctggccctggcgagtgtctgtcttggtgcccagtgcttctctcaaatctctttataataaaacttctgaaaagctgaaaa

SEQ ID NO: 254419 - DNA, 120 bp, Artificial Sequence
  ENSG00000124191_20 (sequence is synthesized)
gccgcgcccgccatggacgtccgcctgtacccctcggcgcccgcggtgggcgcgcggcccggggccgagccggccggcctggcgcacctggactattaccacggcggcaagtttgatggt

SEQ ID NO: 254420 - DNA, 120 bp, Artificial Sequence
  ENSG00000124191_21 (sequence is synthesized)
accaggagctccgaacacgcaggcccaaattggaataggagatggattttgataaaagaggttaaataacaggtttttccatttcaccttatacgaatgggatggggggtgggggtgctg

SEQ ID NO: 254421 - DNA, 120 bp, Artificial Sequence
  ENSG00000124191_22 (sequence is synthesized)
ggcctccagccaatagaggaccaagagttgtcaggagggcttataaagcttgctatttctggcattttttcctctttctctgctgattatgcagcagactcgcacagaggctgtcgcggg

SEQ ID NO: 254422 - DNA, 120 bp, Artificial Sequence
  ENSG00000124191_23 (sequence is synthesized)
cgcgttctctcgctgcctgggcttctgtggaatgagactcgggctccttctacttgcaagacactggtgcattgcaggtgtgtttccgcagaagtttgatggtgacagtgcctacgtggg

SEQ ID NO: 254423 - DNA, 120 bp, Artificial Sequence
  ENSG00000124191_24 (sequence is synthesized)
gtttccaagagggaagcaggaggctggcttcacttggttcccagacatctcatgagtgccggctgcctgcccagccctctgcctggtgctgggaggcaggtgtctctgcacttgagcaga

SEQ ID NO: 254424 - DNA, 120 bp, Artificial Sequence
  ENSG00000124193_0 (sequence is synthesized)
attgtgtggctggactcggccgcccctgtggtgtgaggcgcgtgttcgggctcttgccgtccccgcacccgcaccgcggttactggcttgcggtccgccgttcgacaaccagcccttggg

SEQ ID NO: 254425 - DNA, 120 bp, Artificial Sequence
  ENSG00000124193_1 (sequence is synthesized)
tccccgcccgccacggacatgccgcgcgtctacataggacgcctgagctacaacgtccgggagaaggacatccagcgctttttcagtggctatggccgcctcctcgaagtagacctcaaa

SEQ ID NO: 254426 - DNA, 120 bp, Artificial Sequence
  ENSG00000124193_2 (sequence is synthesized)
aatgggtacggcttcgtggagttcgaggactcccgcgacgccgacgacgccgtttacgagctgaacggcaaggagctctgcggcgagcgcgtgatcgtagagcacgcccggggcccgcgt

SEQ ID NO: 254427 - DNA, 120 bp, Artificial Sequence
  ENSG00000124193_3 (sequence is synthesized)
cgcgatcgcgacggctacagctacggaagccgcagtggtggaggtggatacagcagtcggagaacatctggcagagacaaatacggaccacctgttcgtacagaatacaggcttattgta

SEQ ID NO: 254428 - DNA, 120 bp, Artificial Sequence
  ENSG00000124193_4 (sequence is synthesized)
gaaaatctttctagtcggtgcagttggcaagatttaaaggattttatgcgacaagcaggtgaagtaacctatgcggatgcccacaaggaacgaacaaatgagggtgtaattgagtttcgc

SEQ ID NO: 254429 - DNA, 120 bp, Artificial Sequence
  ENSG00000124193_5 (sequence is synthesized)
tcctactctgacatgaagcgtgctttggacaaactggatggcacagaaataaatggcagaaatattaggcttattgaagataagccacgcacaagccataggcgatcttactctggaagc

SEQ ID NO: 254430 - DNA, 120 bp, Artificial Sequence
  ENSG00000124193_6 (sequence is synthesized)
agatccaggtctcgatctagaagacggtcacgaagtaggagtcgcaggagcagccgcagtagatctcgaagtatctcaaaaagtcgctcccgttccaggtcgcggagcaaaggtcgatca

SEQ ID NO: 254431 - DNA, 120 bp, Artificial Sequence
  ENSG00000124193_7 (sequence is synthesized)
cgttctcgatcaaaaggcaggaaatctagatcaaagagcaaatctaagcccaagtctgatcggggctcccattcacattctcgaagcagatctaaggatgagtatgagaaatctcgaagc

SEQ ID NO: 254432 - DNA, 120 bp, Artificial Sequence
  ENSG00000124193_8 (sequence is synthesized)
aggtctcggtcccgatcccctaaagaaaatggaaagggtgatataaagtcaaaatccagatcaaggagccagtcccgttccaattcgccgctacctgttccaccctcaaaggcccgttct

SEQ ID NO: 254433 - DNA, 120 bp, Artificial Sequence
  ENSG00000124193_9 (sequence is synthesized)
gtgtcccctccaccaaaaagagctacttcaagatcccgttctagatctcgctcaaagtcaagatcaaggtccaggtcgagttccagagattaactcagaactccttgtttgcacattatt

SEQ ID NO: 254434 - DNA, 120 bp, Artificial Sequence
  ENSG00000124193_10 (sequence is synthesized)
atggaacactttcctacttaggcagttactcttccatgtttatacttggcctcttctgcaagaggaatctcttgaaaacaggggcacacagaaatttgatttgtggccaaattggatgaa

SEQ ID NO: 254435 - DNA, 120 bp, Artificial Sequence
  ENSG00000124193_11 (sequence is synthesized)
aaagatgaggctctaaggaaatggtggcatgaagaccctctcccttctttgtagaattaagataactttgattttatagcttttgagctaacgtaacttttgtaaagattaagctcattt

SEQ ID NO: 254436 - DNA, 120 bp, Artificial Sequence
  ENSG00000124193_12 (sequence is synthesized)
ttttttttttttttttttttagtatttcagcaggatctgctggcagggtttttttgttttatttgtttgcttatttttaaattaactgttttgagctttgaatacttaaggctttagagg

SEQ ID NO: 254437 - DNA, 120 bp, Artificial Sequence
  ENSG00000124193_13 (sequence is synthesized)
tttgaatacttaaggctttagagggagaacccaattttcaattatgttggctttttataaagcttgagttatgtaagatttaaataaaagtttgctaccaagatgattgccttattgaat

SEQ ID NO: 254438 - DNA, 120 bp, Artificial Sequence
  ENSG00000124193_14 (sequence is synthesized)
aggtcactattaaattcctttaaatgttgatatctgccatttgtggaaacaacgtaaattctacttaagtgtaaacaaggcaagcctcagaccagcaataaattactcagtttggataac

SEQ ID NO: 254439 - DNA, 120 bp, Artificial Sequence
  ENSG00000124193_15 (sequence is synthesized)
attattttgtgcagttaatcaaatttgccaaagtctttatctgcccctttaacaagttgagtaaaaataaaaggtattttttagtcaatgtgttccatgattttgcttaaattaatactt

SEQ ID NO: 254440 - DNA, 120 bp, Artificial Sequence
  ENSG00000124193_16 (sequence is synthesized)
ttaagtaatggaacttttttcaaaggcaaatttaaactatttaagaaatagctcctaatacttgggatcttgtttagagaatccactttctggaagttctcagcataattagtgttgaga

SEQ ID NO: 254441 - DNA, 120 bp, Artificial Sequence
  ENSG00000124193_17 (sequence is synthesized)
gtggttcagttgtctttaatgtttgtcatgtggaaatggaagtagcctctttttgttctgaaattgagtttattcaaagtgtaaaagcacatactgcattttctgctgaaagatcattat

SEQ ID NO: 254442 - DNA, 120 bp, Artificial Sequence
  ENSG00000124193_18 (sequence is synthesized)
tgccagttaagttccacccagtagtcagtcccctttgtagttagtgggattatttgataattggttagatcatacttgtaaattttaatgctttgtgtaattggtttgaaaaacagtgaa

SEQ ID NO: 254443 - DNA, 120 bp, Artificial Sequence
  ENSG00000124193_19 (sequence is synthesized)
atgggtaaacgcaaaacttttgtactttattacgagtaaagtgtaatgagtactgtggaaaccaaatttgaatactgcaaatttgtaggagttactaggttagcaattagtccatacatc

SEQ ID NO: 254444 - DNA, 120 bp, Artificial Sequence
  ENSG00000124193_20 (sequence is synthesized)
cataagcctgatgagttgaaattgcagtttgagaagtgaattaaccttacatccctttgttcagataccttaaaagttactttatttaaaagcatttattaatcttagtctgaaatcaaa

SEQ ID NO: 254445 - DNA, 120 bp, Artificial Sequence
  ENSG00000124193_21 (sequence is synthesized)
atatagattaattggctcagctttaatacctttctaggaggtgtcacaatgtagggtaccaagggttggattgtgatggggcatggtcgtacactgctcattgtgccacaggtgtgactg

SEQ ID NO: 254446 - DNA, 120 bp, Artificial Sequence
  ENSG00000124193_22 (sequence is synthesized)
gaaagcatgatattctagggttggtttgtagattcaaataatccagaaatatacctaataagattgagtgaaaaatttgagtcaaatatctagggcattcacagagtagctgtgagttct

SEQ ID NO: 254447 - DNA, 120 bp, Artificial Sequence
  ENSG00000124193_23 (sequence is synthesized)
tggtaatgtgaaaaaggccttgtttttcagaaattcctgggtttcctgttaaaaaatcttaaagcccaaccttaggaatatagtgccccaaaaggcggatgcttcttccattatcttatt

SEQ ID NO: 254448 - DNA, 120 bp, Artificial Sequence
  ENSG00000124193_24 (sequence is synthesized)
ttctttgatactttatttaattagatgtttataaagaaatgggtttatttttccagcataaacctcagaatttaaggaaagaaaatgatgtctgttgttatagttcattgttttgcctac

SEQ ID NO: 254449 - DNA, 120 bp, Artificial Sequence
  ENSG00000124193_25 (sequence is synthesized)
tcagcagaagtgatgactcttaaaaattggctttgaccaaagttctcttgttttcagggaaagaacataaaagctttttgaactacagcctttttaaaagagggatgggaggatattaca

SEQ ID NO: 254450 - DNA, 120 bp, Artificial Sequence
  ENSG00000124193_26 (sequence is synthesized)
gtaagaaattaggctttctaaaagtatgaaacatccttcaactgggctctcttgttaataggacatcatatggtaatagactggtttgactatattgttagctgccacagtaagcaggtc

SEQ ID NO: 254451 - DNA, 120 bp, Artificial Sequence
  ENSG00000124193_27 (sequence is synthesized)
attgtataggtaaatgcctgcacccataattttctagtaatagccacgaccaatttattaacagtcagggcctatccttgcctgtagttctcagtcactggatgcacaaaatcactgtgt

SEQ ID NO: 254452 - DNA, 120 bp, Artificial Sequence
  ENSG00000124193_28 (sequence is synthesized)
aacattggctcacttggtgagcatagggttgactgataaaatgtttaattcccttgctagcttgtgagaagaatgagttgatgacatgctccataccagtggctagatggagtattaagg

SEQ ID NO: 254453 - DNA, 120 bp, Artificial Sequence
  ENSG00000124193_29 (sequence is synthesized)
tggagcagaaaagaagtgagaacatcttgattcccctttcttttacttgatggtgtttatgaacatgccgtagtgcctttatggccagtttgagtcctgcctactttgacttttacgttc

SEQ ID NO: 254454 - DNA, 120 bp, Artificial Sequence
  ENSG00000124193_30 (sequence is synthesized)
ccattcctgtgttaccaccttcctcccgatttgttcacctattttgtgctttaaatctcaataaaatacttactgagggaaaggcttgttttgagtttattgcatatgcccacttaggac

SEQ ID NO: 254455 - DNA, 120 bp, Artificial Sequence
  ENSG00000124193_31 (sequence is synthesized)
cagattcttaacaaatgtttttttgaattggagtttgcattggcaagccattcctgtcttgagtatgagaacaggatcttgtgttcacttacccagaaacgtgagtttgggatttagtat

SEQ ID NO: 254456 - DNA, 120 bp, Artificial Sequence
  ENSG00000124193_32 (sequence is synthesized)
atggtttatgttgggcaactcattaatcactgtgcttcagtgtcatccatgaaactagggataaaacatgcatgggatgtgaagattaaaagtcaagaatatgaacagtacaagagagta

SEQ ID NO: 254457 - DNA, 120 bp, Artificial Sequence
  ENSG00000124193_33 (sequence is synthesized)
ccataacaaatacaattttatttacaaatatacatggttggaccataccttggaatctacttgctaatgcagctgctgttaacagttcttgtatctgctcaagagatttctatgatcata

SEQ ID NO: 254458 - DNA, 120 bp, Artificial Sequence
  ENSG00000124193_34 (sequence is synthesized)
taaaaatgcctttttaggttttcagtgttcatgccctgagtagtagtctgcagtttgctttaatacatggtaatacagagatcggctttaaatggctggctggttactgttgaatgaatg

SEQ ID NO: 254459 - DNA, 120 bp, Artificial Sequence
  ENSG00000124193_35 (sequence is synthesized)
tatgataaattttttttcagaaccaacagtgtgaataatcctttcagttgtctatcagcatgaatttaaaaattactttcaagattcaacattacacaataaaacttagagttcttgcaa

SEQ ID NO: 254460 - DNA, 120 bp, Artificial Sequence
  ENSG00000124193_36 (sequence is synthesized)
tgctgaaagcagagcaagtcccctagcccaaggccaaaaggattgggaggcaaataagttgcaccctcatctataaaacaagacctgctaatattgtgaaaagtaaatactattatcaaa

SEQ ID NO: 254461 - DNA, 120 bp, Artificial Sequence
  ENSG00000124193_37 (sequence is synthesized)
gcccggggcagccatgggacgccggagcgcggggattgggtttgggtgtttggttttgtttatttgccaagttgggagtgaccaatggggctgaggctgtgtccactgaggctaagatga

SEQ ID NO: 254462 - DNA, 120 bp, Artificial Sequence
  ENSG00000124193_38 (sequence is synthesized)
ctgcctttcctgattggccttggcttttccatacattgtgtgacccttgccctatgaccctttggctgaccttaccggaagccatgacgacagcagccttttgccattagacgcagggtg

SEQ ID NO: 254463 - DNA, 120 bp, Artificial Sequence
  ENSG00000124193_39 (sequence is synthesized)
atggtgaggattccaagggttagacaaaactggttaatctgaactaggtgactgttaccttgcgtgttttgtggccaaaccaccaccaaaaacctcacactgtgatgtggtggaggtgga

SEQ ID NO: 254464 - DNA, 120 bp, Artificial Sequence
  ENSG00000124194_0 (sequence is synthesized)
gcaggctcggcgaggccatgtgatgctgggcgagagagagccgccgcgccggagcctccttctttcctgcctctgattccgggctgtcatggcgacccccaacaatctgacccccaccaa

SEQ ID NO: 254465 - DNA, 120 bp, Artificial Sequence
  ENSG00000124194_1 (sequence is synthesized)
ctgcagctggtggcccatctccgcgctggagagcgatgcggccaagccagcggaggcccccgacgctcccgaggcggccagccccgcccattggcccagggagagcctggttctgtacca

SEQ ID NO: 254466 - DNA, 120 bp, Artificial Sequence
  ENSG00000124194_2 (sequence is synthesized)
ctggacccagtccttcagctcgcagaaggtgcggctggtgatcgccgagaagggcctggtgtgcgaggagcgggacgtgagcctgccacagagcgagcacaaggagccctggttcatgcg

SEQ ID NO: 254467 - DNA, 120 bp, Artificial Sequence
  ENSG00000124194_3 (sequence is synthesized)
gctcaacctgggcgaggaggtgcccgtcatcatccaccgcgacaacatcatcagtgactatgaccagatcattgactatgtggagcgcaccttcacaggagagcacgtggtggccctgat

SEQ ID NO: 254468 - DNA, 120 bp, Artificial Sequence
  ENSG00000124194_4 (sequence is synthesized)
gcccgaggtgggcagcctgcagcacgcacgggtgctgcagtaccgggagctgctggacgcactgcccatggatgcctacacgcatggctgcatcctgcatcccgagctcaccaccgactc

SEQ ID NO: 254469 - DNA, 120 bp, Artificial Sequence
  ENSG00000124194_5 (sequence is synthesized)
catgatccccaagtacgccacggccgagatccgcagacatttagccaatgccaccacggacctcatgaaactggaccatgaagaggagccccagctctccgagccctacctttctaaaca

SEQ ID NO: 254470 - DNA, 120 bp, Artificial Sequence
  ENSG00000124194_6 (sequence is synthesized)
aaagaagctcatggccaagatcttggagcatgatgatgtgagctacctgaagaagatcctcggggaactggccatggtgctggaccagattgaggcggagctggagaagaggaagctgga

SEQ ID NO: 254471 - DNA, 120 bp, Artificial Sequence
  ENSG00000124194_7 (sequence is synthesized)
gaacgaggggcagaaatgcgagctgtggctctgtggctgtgccttcaccctcgctgatgtcctcctgggagccaccctgcaccgcctcaagttcctgggactgtccaagaaatactggga

SEQ ID NO: 254472 - DNA, 120 bp, Artificial Sequence
  ENSG00000124194_8 (sequence is synthesized)
agatggcagccggcccaacctgcagtccttctttgagagggtccagagacgctttgccttccggaaagtcctgggtgacatccacaccaccctgctgtcggccgtcatccccaatgcttt

SEQ ID NO: 254473 - DNA, 120 bp, Artificial Sequence
  ENSG00000124194_9 (sequence is synthesized)
catctagggccaggcctggggcttggtgtctgactgtcggtgtctctgtgctgtgtgattccccgtgagctctcagtaactcactgtctcatgaacacttggacagccctccccgccctt

SEQ ID NO: 254474 - DNA, 120 bp, Artificial Sequence
  ENSG00000124194_10 (sequence is synthesized)
cgttctgagtaataataccgtcagtgtgaaaacattccgtagtttagaagtagacgttgccaatgctgtgactcaaggccacggctctactaaaagagagagaggaagcgagagagagag

SEQ ID NO: 254475 - DNA, 120 bp, Artificial Sequence
  ENSG00000124194_11 (sequence is synthesized)
agaaaaaacaaaaaacagaaaacacgaatgccttttctatcgattcaaggtctcaagatggaactgtggagactggttaggatctgaggtgagtcccaggatgtttcgtccaccagggcc

SEQ ID NO: 254476 - DNA, 120 bp, Artificial Sequence
  ENSG00000124194_12 (sequence is synthesized)
cagattctgggaggtgctggggactcagagggcctgacccctcacctccccttccctcttgcccagggaactcttccacaggacaaagccgacatcaagactcaactcctctaaccggta

SEQ ID NO: 254477 - DNA, 120 bp, Artificial Sequence
  ENSG00000124194_13 (sequence is synthesized)
cctctgaatggggctggataaccggagaccccatgggaggtccctgaagatcagaaggggcttcacgcttctcctggacatggactagcttgagccaaggcagtggcacccaaaaaccag

SEQ ID NO: 254478 - DNA, 120 bp, Artificial Sequence
  ENSG00000124194_14 (sequence is synthesized)
gctgcagtggggacggataccatgagcacaccctctcattgtccttctgatttggtccatgtgttgggtttggccttagtagaaatctctgaaggcagcagccatcatcctcttcctacc

SEQ ID NO: 254479 - DNA, 120 bp, Artificial Sequence
  ENSG00000124194_15 (sequence is synthesized)
ttgagtttttctaccctgtgaggtgggactttcagtaaaagccatgttgaccctctctcagaaggtcagtccagcccaagtgcaggggcggatctggaggtggacaaacctaggtccccc

SEQ ID NO: 254480 - DNA, 120 bp, Artificial Sequence
  ENSG00000124194_16 (sequence is synthesized)
tcctagcctctgtccaagccatctccttcaatatcccccccttcctgtcactcccggggctgtccctgtactacacggtgccatggagccggggagagcggggaagtctctgcatccatg

SEQ ID NO: 254481 - DNA, 120 bp, Artificial Sequence
  ENSG00000124194_17 (sequence is synthesized)
ccacccaccccagtcgggtctcactttcctgtgccttttgcatgttgggaaagggtcttggtgtcactgccgctcatgcatagaaaccaccaaaagccccaataaagcatccaggaggaa

SEQ ID NO: 254482 - DNA, 120 bp, Artificial Sequence
  ENSG00000124194_18 (sequence is synthesized)
gtggttaagaggatgggctatggagtcagactaaggttcaagtcataacttggccacttcctagcttagtaaatgtggtcaggttctcccctctctgaaattcagtttcccatctataaa

SEQ ID NO: 254483 - DNA, 120 bp, Artificial Sequence
  ENSG00000124194_19 (sequence is synthesized)
gaagggtagagatgtgaggtttcagtctcagttcttcacaagagcaagcaagagttgactgcctgtctcaagttgctgggtctggggctggcttccagactgactttccagggctctgac

SEQ ID NO: 254484 - DNA, 120 bp, Artificial Sequence
  ENSG00000124194_20 (sequence is synthesized)
cttaacatcaacccagctcatttaggctcagccctttacaggttacagggcatgtgtacaaccctttgttctcattaacctgtgcaagggccaggtgtagtgactcatatttataatccc

SEQ ID NO: 254485 - DNA, 120 bp, Artificial Sequence
  ENSG00000124194_21 (sequence is synthesized)
agtgctttgggaggccaaggcgggagaattgctccaggccaggagttcaagacaagcctgggcaatatagcgagaccccatctctagaaaataaaataaaataaacctatatatggacct

SEQ ID NO: 254486 - DNA, 120 bp, Artificial Sequence
  ENSG00000124194_22 (sequence is synthesized)
cagggggcacccagggcacatgccccccaccccaatttcccagagggaaaaatgtatttaaaatgcccaaagaacattaaatcaggagtataatgtgtagaatataaggcatggttttac

SEQ ID NO: 254487 - DNA, 120 bp, Artificial Sequence
  ENSG00000124194_23 (sequence is synthesized)
accttcacaggaggaccccgcctggcagcaagtctggagctgagaggagctaaccctcggggacagcttggcagagcccagtgaggagagatggccgggccaccactagaatcccctgtc

SEQ ID NO: 254488 - DNA, 120 bp, Artificial Sequence
  ENSG00000124194_24 (sequence is synthesized)
cgccagcagccaagcccgagcatgggggtgcccagggcctctgggcagagacatcttggggctcagggatgccgggggcaggtggccggggcaggtgcccctctggcttccctgcccagc

SEQ ID NO: 254489 - DNA, 120 bp, Artificial Sequence
  ENSG00000124194_25 (sequence is synthesized)
gcagggagcctgacactgagggctggcggcttttctggcgcgggccagggggaggaggagaaaggagctcccgggatcccctcgccccctcccccaactgcccggtgcggctggtgatcg

SEQ ID NO: 254490 - DNA, 120 bp, Artificial Sequence
  ENSG00000124196_0 (sequence is synthesized)
gacatcatagtatatccgtgagtcaagcggctgtgggtttttggctcttgcatctgctatagttctgtctcgggtgccatttgctaactctgttctctgtgtagctgcttttggcagctc

SEQ ID NO: 254491 - DNA, 120 bp, Artificial Sequence
  ENSG00000124196_1 (sequence is synthesized)
ctcatctctcttctaatccaccactcacagtcctagagaacagaccacaagttaagaccgtcacctacagaatcccaagggccaaaactgggcagaggacaactccatccttcttacaaa

SEQ ID NO: 254492 - DNA, 120 bp, Artificial Sequence
  ENSG00000124196_2 (sequence is synthesized)
agggcttctccacaagaagcatttccgttagactctagcagtgagataccctgcttcaagaatttctcatggagccagaagcctttgaaatttgcccttatgatcctcaccaccgaatcc

SEQ ID NO: 254493 - DNA, 120 bp, Artificial Sequence
  ENSG00000124196_3 (sequence is synthesized)
gaacatgaggctgtttgtgtcaacaggagcgctgtggaagaagaggacaccgagaaccctctgaaagtcagtcctcctagttcagagcagaacgatgacacccagcaggtctcaccctgc

SEQ ID NO: 254494 - DNA, 120 bp, Artificial Sequence
  ENSG00000124196_4 (sequence is synthesized)
cttcccagccccgatatctggaatgtcgatggcgctaattgccagcatgtgtttgtccttaagactttttttcctcaaaaggttgtttgtgaaaatgacacgaaagagtcagcaagagag

SEQ ID NO: 254495 - DNA, 120 bp, Artificial Sequence
  ENSG00000124196_5 (sequence is synthesized)
accagtccccagaagatcctcagaccaggacagtaaactgccagctgaggaaggagcacacgcctcatcaatgcatggaagaacgtgcaatgcatcagaataaaagacatgcaaagtaaa

SEQ ID NO: 254496 - DNA, 120 bp, Artificial Sequence
  ENSG00000124198_0 (sequence is synthesized)
cgctccaacatggcggcgccgtggggccgaggtgtcgcttcctgacggggcggcgcggacggacgcggccggtgccggccgggacgccgggcccgcagcctagctcgccatctcgctcac

SEQ ID NO: 254497 - DNA, 120 bp, Artificial Sequence
  ENSG00000124198_1 (sequence is synthesized)
tcgccatctcgctcacgccgcccgcccgcggggccgtcagcccccgccgggccggggccatgcaggagagccagaccaagagcatgttcgtgtcccgggccctggagaagatcctagccg

SEQ ID NO: 254498 - DNA, 120 bp, Artificial Sequence
  ENSG00000124198_2 (sequence is synthesized)
acaaggaggtgaagcggccccagcactcccagctgcgcagggcctgccaggtggcgctcgatgaaattaaagcagaaatagaaaagcagaggcttggcactgctgcaccaccaaaggcaa

SEQ ID NO: 254499 - DNA, 120 bp, Artificial Sequence
  ENSG00000124198_3 (sequence is synthesized)
acttcattgaagctgacaagtattttcttccattcgagctagcttgccagtccaagtccccaagggtagtcagcacatcccttgactgcttgcagaaactcatcgcatacgggcacatca

SEQ ID NO: 254500 - DNA, 120 bp, Artificial Sequence
  ENSG00000124198_4 (sequence is synthesized)
ctggcaacgcccctgacagtggagcccctgggaagcggctgatcgacagaattgttgaaaccatttgcagttgttttcagggccctcagactgatgaaggggttcagttacaaataatta

SEQ ID NO: 254501 - DNA, 120 bp, Artificial Sequence
  ENSG00000124198_5 (sequence is synthesized)
aggctcttctgactgcagtgacttccccacacattgaaattcatgagggtactatcctgcagacagtgagaacatgttacaatatctatttggccagcaaaaatctcatcaatcaaacca

SEQ ID NO: 254502 - DNA, 120 bp, Artificial Sequence
  ENSG00000124198_6 (sequence is synthesized)
ctgccaaggctacccttactcagatgctgaacgtcattttcacccgcatggaaaaccaagtgttgcaggaggccagagaactggaaaaaccaatccagtcaaaaccccagtcccctgtga

SEQ ID NO: 254503 - DNA, 120 bp, Artificial Sequence
  ENSG00000124198_7 (sequence is synthesized)
tccaagctgcagcagtatccccaaagttcgttcgtttgaagcacagtcaggcacaaagcaaaccaacaactcccgaaaaaacagatttaaccaacggtgaacatgccaggagtgattctg

SEQ ID NO: 254504 - DNA, 120 bp, Artificial Sequence
  ENSG00000124198_8 (sequence is synthesized)
gaaaagtaagcacagaaaatggagacgcacccagagaaagaggctcatcactgtcagggactgatgacggagcccaggaggtggtgaaggacatcttggaagatgtagtcacatctgcca

SEQ ID NO: 254505 - DNA, 120 bp, Artificial Sequence
  ENSG00000124198_9 (sequence is synthesized)
ttaaagaagcagcggaaaagcatggtctgacagaacctgagagagttctaggtgaactggagtgccaggaatgtgctattcccccaggagttgatgaaaactcacagaccaacgggatag

SEQ ID NO: 254506 - DNA, 120 bp, Artificial Sequence
  ENSG00000124198_10 (sequence is synthesized)
ccgatgacaggcagtccttgtcgtcagcagataatctggaatcggatgcacaaggacatcaagtggctgccaggttctcccacgttctgcagaaggatgccttccttgtgttccgctccc

SEQ ID NO: 254507 - DNA, 120 bp, Artificial Sequence
  ENSG00000124198_11 (sequence is synthesized)
tgtgcaagctgtccatgaaaccccttggtgaaggccctccagacccaaaatcccatgagctgcgttccaaggtggtttccctgcagctgctcctctctgtgttgcaaaatgctggccccg

SEQ ID NO: 254508 - DNA, 120 bp, Artificial Sequence
  ENSG00000124198_12 (sequence is synthesized)
tattcaggactcacgagatgttcatcaatgcaatcaagcaatatctctgtgtggccttgtccaaaaacggcgtctcttcagtgcctgatgtctttgagctctctcttgccatttttctta

SEQ ID NO: 254509 - DNA, 120 bp, Artificial Sequence
  ENSG00000124198_13 (sequence is synthesized)
ctcttctttcaaactttaaaatgcacttgaaaatgcagatagaggtctttttcaaagagattttcctgaacattttagaaacatcaacaagttcttttgagcacaggtggatggtcattc

SEQ ID NO: 254510 - DNA, 120 bp, Artificial Sequence
  ENSG00000124198_14 (sequence is synthesized)
agactctgacgaggatctgtgcagatgcccagtgtgttgtggatatttatgtcaactacgactgtgatttaaatgctgctaacatttttgagcgccttgtaaatgatttatccaaaattg

SEQ ID NO: 254511 - DNA, 120 bp, Artificial Sequence
  ENSG00000124198_15 (sequence is synthesized)
ctcagggaagaagtggacatgagctgggaatgacacctctgcaggagctcagcctgaggaagaaaggcctggagtgcctcgtgtccattctcaagtgcatggtggagtggagcaaagacc

SEQ ID NO: 254512 - DNA, 120 bp, Artificial Sequence
  ENSG00000124198_16 (sequence is synthesized)
tgtatgtgaatcccaaccaccagaccagcctcggtcaggagaggctcacggatcaggaaataggggatgggaaaggccttgacatggcaagacggtgtagtgtgacgtccatggagtcca

SEQ ID NO: 254513 - DNA, 120 bp, Artificial Sequence
  ENSG00000124198_17 (sequence is synthesized)
cagtgtcctcggggacccagacaactgttcaggatgaccctgagcaatttgaggtcatcaagcaacaaaaagaaatcattgaacacggcatcgagctgttcaacaagaaacccaagaggg

SEQ ID NO: 254514 - DNA, 120 bp, Artificial Sequence
  ENSG00000124198_18 (sequence is synthesized)
ggatccagtttctccaggagcagggcatgctgggaacgtcagttgaagacatagcccaattcctgcaccaggaggagcgcctggattccacccaagtaggcgattttctgggagatagcg

SEQ ID NO: 254515 - DNA, 120 bp, Artificial Sequence
  ENSG00000124198_19 (sequence is synthesized)
caaggttcaacaaggaggtgatgtatgcctacgtggaccaacttgacttctgtgaaaaagaatttgtctcagccctgcggacattcctagaaggtttccgcctacctggagaagcccaaa

SEQ ID NO: 254516 - DNA, 120 bp, Artificial Sequence
  ENSG00000124198_20 (sequence is synthesized)
agattgaccgattaatggagaagtttgccgcaagatacatagaatgcaaccaagggcaaactctgtttgctagtgctgacactgcttatgtcctagcgtattcaattattatgctgacta

SEQ ID NO: 254517 - DNA, 120 bp, Artificial Sequence
  ENSG00000124198_21 (sequence is synthesized)
cagacttgcacagtcctcaggtaaaaaataaaatgacgaaagagcagtatattaaaatgaatcggggtatcaatgatagtaaagatctgccagaagagtatctctcaagcatctatgaag

SEQ ID NO: 254518 - DNA, 120 bp, Artificial Sequence
  ENSG00000124198_22 (sequence is synthesized)
agatagaaggcaagaaaattgcaatgaaagaaacaaaagagctaacgattgcaaccaaatctactaagcagaatgtagctagtgaaaagcagcggcggctgctgtacaacttagagatgg

SEQ ID NO: 254519 - DNA, 120 bp, Artificial Sequence
  ENSG00000124198_23 (sequence is synthesized)
agcaaatggctaaaacagccaaagctctgatggaggctgtgagccatgccaaagccccgtttaccagtgccactcacctggaccatgtccggccaatgttcaaactggtgtggacgccac

SEQ ID NO: 254520 - DNA, 120 bp, Artificial Sequence
  ENSG00000124198_24 (sequence is synthesized)
tattggcagcctacagcatcggactccagaactgtgatgacactgaagtggcctccttgtgtttggaaggcatccgatgtgcaatccgaatcgcctgcatctttggaatgcagctggaac

SEQ ID NO: 254521 - DNA, 120 bp, Artificial Sequence
  ENSG00000124198_25 (sequence is synthesized)
gagatgcctatgttcaggctcttgctcgcttctccctactcacagccagctccagcatcacagaaatgaagcagaaaaacatcgacaccattaagacgcttatcacagtggctcacaccg

SEQ ID NO: 254522 - DNA, 120 bp, Artificial Sequence
  ENSG00000124198_26 (sequence is synthesized)
atggcaactaccttgggaattcctggcatgagatcttgaaatgcatcagccagctggagctcgctcagctgataggaaccggtgtgaagacgcgctacctgtctggatctgggcgtgaaa

SEQ ID NO: 254523 - DNA, 120 bp, Artificial Sequence
  ENSG00000124198_27 (sequence is synthesized)
gagaagggagcctgaagggccacacattggcaggagaagagttcatgggccttggcctcggtaatttggtgagtggcggagtggataaaagacagatggccagcttccaagaatcggttg

SEQ ID NO: 254524 - DNA, 120 bp, Artificial Sequence
  ENSG00000124198_28 (sequence is synthesized)
gtgagaccagctcgcagagtgtggttgtagctgtggacaggatttttactgggtctaccagactggatggaaatgcaatagttgactttgtccgctggctgtgtgctgtgtccatggatg

SEQ ID NO: 254525 - DNA, 120 bp, Artificial Sequence
  ENSG00000124198_29 (sequence is synthesized)
aactggcttccccccaccatcctcgcatgttcagcttgcagaagattgtggagatatcatactacaacatgaatcggatccgactacagtggtctcgaatatggcatgtgattggagatc

SEQ ID NO: 254526 - DNA, 120 bp, Artificial Sequence
  ENSG00000124198_30 (sequence is synthesized)
acttcaataaggttggctgcaaccctaatgaagatgtggctatctttgctgttgactcattaaggcaactctccatgaagtttcttgagaagggtgaattagccaacttccgtttccaga

SEQ ID NO: 254527 - DNA, 120 bp, Artificial Sequence
  ENSG00000124198_31 (sequence is synthesized)
aagattttctgaggccctttgagcatattatgaagaaaaacaggtctcccaccatccgggacatggcgatccgctgcattgcccagatggtgaactcccaggcggccaacatccgctcag

SEQ ID NO: 254528 - DNA, 120 bp, Artificial Sequence
  ENSG00000124198_32 (sequence is synthesized)
gttggaagaacatctttgccgtgttccaccaggcagcctctgatcatgatgggaacattgtggagctggccttccagaccacttgccacattgtcacaactattttccagcaccattttc

SEQ ID NO: 254529 - DNA, 120 bp, Artificial Sequence
  ENSG00000124198_33 (sequence is synthesized)
ctgcagccatcgattcctttcaggatgctgtgaagtgcttatcagagttcgcctgcaacgccgctttccctgacacgagcatggaagcgattcggctcatccgcttctgtggcaaatacg

SEQ ID NO: 254530 - DNA, 120 bp, Artificial Sequence
  ENSG00000124198_34 (sequence is synthesized)
tctctgagaggcctcgggtgctacaagaatacacaagtgatgacatgaatgtagctcctggtgacagagtctgggtccgaggctggttccccatcttattcgaactctcctgcatcatta

SEQ ID NO: 254531 - DNA, 120 bp, Artificial Sequence
  ENSG00000124198_35 (sequence is synthesized)
atagatgcaagttagatgtacgaacaaggggactcacagtcatgtttgagatcatgaagagctatggccacacctttgaaaagcactggtggcaggacctgttcagaatcgtgtttcgga

SEQ ID NO: 254532 - DNA, 120 bp, Artificial Sequence
  ENSG00000124198_36 (sequence is synthesized)
tttttgacaatatgaaactccctgagcaactgtcagagaaatctgagtggatgacaacaacctgcaatcacgcactttatgctatttgtgatgtttttacccagttttatgaagctttga

SEQ ID NO: 254533 - DNA, 120 bp, Artificial Sequence
  ENSG00000124198_37 (sequence is synthesized)
attgcagtggtgtgtcaaacaagataatgaacagttggcgcgatcaggtacaaattgcttagaaaacttagtaatatccaatggagagaaattcagtcctgaagtctgggatgaaacctg

SEQ ID NO: 254534 - DNA, 120 bp, Artificial Sequence
  ENSG00000124198_38 (sequence is synthesized)
caactgtatgttggatattttcaaaacaaccatcccacatgttttgctgacatggagacctgtaggaatggaggaagattcatcagaaaagcatttggatgtggatctggaccgccagtc

SEQ ID NO: 254535 - DNA, 120 bp, Artificial Sequence
  ENSG00000124198_39 (sequence is synthesized)
tttaagcagcatagataaaaatccctctgagaggggacagagccagctctctaacccaacagatgacagctggaagggtagaccatacgcaaatcagaaactgtttgccagcctcctcat

SEQ ID NO: 254536 - DNA, 120 bp, Artificial Sequence
  ENSG00000124198_40 (sequence is synthesized)
caagtgtgtggtccagttggaattgatacagaccattgacaacattgtgttctaccctgcgacgagcaaaaaggaggatgcagagcacatggttgccgcccagcaagacacgctggatgc

SEQ ID NO: 254537 - DNA, 120 bp, Artificial Sequence
  ENSG00000124198_41 (sequence is synthesized)
agatatccacatagagacggaggatcagggcatgtataagtacatgtcttcccagcacctcttcaagctgttggactgtttgcaggaatcccattcattctcaaaggccttcaactccaa

SEQ ID NO: 254538 - DNA, 120 bp, Artificial Sequence
  ENSG00000124198_42 (sequence is synthesized)
ttacgagcagcggactgtcctgtggcgagcaggttttaagggcaagtctaaacccaatcttctaaaacaagaaaccagcagcctggcctgttgtttgaggatcctgtttcgaatgtatgt

SEQ ID NO: 254539 - DNA, 120 bp, Artificial Sequence
  ENSG00000124198_43 (sequence is synthesized)
tgatgagaaccgcagggattcctgggaagaaatacagcagagacttttaactgtttgcagtgaagctcttgcctatttcatcactgtgaattctgagagccatcgggaggcctggacaag

SEQ ID NO: 254540 - DNA, 120 bp, Artificial Sequence
  ENSG00000124198_44 (sequence is synthesized)
tctcttgttgttacttctaactaaaaccctcaaaataaatgatgaaaagttcaaagcacatgcttcaatgtactacccctacttgtgtgaaattatgcagtttgacctgatccctgagct

SEQ ID NO: 254541 - DNA, 120 bp, Artificial Sequence
  ENSG00000124198_45 (sequence is synthesized)
ccgagcagttctgcggaagttcttcctacggataggtgttgtgtataagatatggataccagaagagccatcacaggtaccagcagcactgtcaccagtgtggtagccctggctgcccag

SEQ ID NO: 254542 - DNA, 120 bp, Artificial Sequence
  ENSG00000124198_46 (sequence is synthesized)
gccagtgctgcagctctgcagaatgttcagcatgccatttctgactggcacatctcgtgaagtttcatagaaacaaggagttggcatcttggatctcagaatggcctggaaacggatggc

SEQ ID NO: 254543 - DNA, 120 bp, Artificial Sequence
  ENSG00000124198_47 (sequence is synthesized)
ctctacgctgttccatcacagtctccaactaaggcttatggtatttcattaaactgttgcatacccagttagcacagtaggtggggagtctgcttcatttctatcattccatttttctga

SEQ ID NO: 254544 - DNA, 120 bp, Artificial Sequence
  ENSG00000124198_48 (sequence is synthesized)
ttaaactgtcaaatctgtcattgcatatgccatcgttttctagcaaaatcccatgattggctataaacgttttgtaagaagtcactctccttgaaaatactgaacatagctgtataggtt

SEQ ID NO: 254545 - DNA, 120 bp, Artificial Sequence
  ENSG00000124198_49 (sequence is synthesized)
tgtgattattagagaatatgttaataaaacttcttgtaacggctaactgccacctaaaatatgctgggttttctgttgtttgagtgtgttagagaaatttgaatgtttttgtcagttacg

SEQ ID NO: 254546 - DNA, 120 bp, Artificial Sequence
  ENSG00000124198_50 (sequence is synthesized)
agtcagccgtaattagattagtttaaggacaggtcaggattagagaagagttgtttttgtgttttgttaatgtctgagtgatttttaaagtattttacaaaaagatattgaaaatttggt

SEQ ID NO: 254547 - DNA, 120 bp, Artificial Sequence
  ENSG00000124198_51 (sequence is synthesized)
tgaaggcagagtttagtaattaagttagaattaagagttttgcgaggttaaaaaaatgtgcctcgtggatctccctgttttagtaacatggagagaaaaagtctacacgaaaaagtgaac

SEQ ID NO: 254548 - DNA, 120 bp, Artificial Sequence
  ENSG00000124198_52 (sequence is synthesized)
aatttaatgaagatgattagccttccttgaaataagtatttgtggatgggtgttaaattaaaatttccagaatacactgtccatctcacacactctgaaatctaatatatgaagtagtaa

SEQ ID NO: 254549 - DNA, 120 bp, Artificial Sequence
  ENSG00000124198_53 (sequence is synthesized)
tgaaaatgaagtagtaatttaaccagagttcatttatccttgaataaacctttttattttcacctcagaaaagtgagtgtactggcagttagtgtcactgctttgcacagtccccattaa

SEQ ID NO: 254550 - DNA, 120 bp, Artificial Sequence
  ENSG00000124198_54 (sequence is synthesized)
aggaccctccagagagggacagtaactgtgcatgagaagccgctcccataagcctcctcagccagatgtcatgggtggaactggagctgtgtcggggccagcacagctgaactgtgacaa

SEQ ID NO: 254551 - DNA, 120 bp, Artificial Sequence
  ENSG00000124198_55 (sequence is synthesized)
tggcaggaggtggcatgtgcccagcacttccattaatctgagcctaggagttgaattctttggcaaggttggattctgaggtccttattatgttaatgatggtgcaatactctcacctgc

SEQ ID NO: 254552 - DNA, 120 bp, Artificial Sequence
  ENSG00000124198_56 (sequence is synthesized)
agtagaactgagttctgctgcagcttgtgtaaaagtgggcagtacacaagtacgtcccaaagcctgtgagcagtatacgtggatgctcacccatgagaaggagcacacacgcctcattct

SEQ ID NO: 254553 - DNA, 120 bp, Artificial Sequence
  ENSG00000124198_57 (sequence is synthesized)
ctgccctcacccactgctcacctagagcatcgctgagcgttagacaaagtgttacacagaatgattaaaactttcagacttctacctatgctctttagtcctgtaaattgggttgtattg

SEQ ID NO: 254554 - DNA, 120 bp, Artificial Sequence
  ENSG00000124198_58 (sequence is synthesized)
atgtcaactctggtgccttagaagttagtagtttgggaacctatctgtaaaatcagatgttttttctttgtagagaaggatttctggtgcttttgcttactaagagaccgatattcttaa

SEQ ID NO: 254555 - DNA, 120 bp, Artificial Sequence
  ENSG00000124198_59 (sequence is synthesized)
gttgttttcttgttttaacagccttgagaaatgtttggttttggccagcagaattcttgtctacttttttctttcccaaaaagtgttttttaatttctctaccaaagaaaaaatgagcag

SEQ ID NO: 254556 - DNA, 120 bp, Artificial Sequence
  ENSG00000124198_60 (sequence is synthesized)
gtttaggtttttacatgacttatatacattagataaaaggagctgtataatttagcaggaagggactatgggagaatactttactgtgagtggaaaatgttagcacatttgactggtttg

SEQ ID NO: 254557 - DNA, 120 bp, Artificial Sequence
  ENSG00000124198_61 (sequence is synthesized)
ccctggaatccactgcacctttacactgcaccatgaaacctacactccctggtatcatagcgcgtcatcacctcaacaagtcagtcgtctccattgatatttgtacaaaaggtatacatg

SEQ ID NO: 254558 - DNA, 120 bp, Artificial Sequence
  ENSG00000124198_62 (sequence is synthesized)
gggaacacgtgttcattcattaagtccatcttgcgtgcagctatatccctgattggttatttttcctttccttctgaggttctcatgtcattttcttcatcggatgtgactaaaattttt

SEQ ID NO: 254559 - DNA, 120 bp, Artificial Sequence
  ENSG00000124198_63 (sequence is synthesized)
ctggtgtcttctgccctctctttaattttgcctcttgaggggtagcagatgtgtcagtgcattttattacttgctgaaacattcaggcttacatttcttattagtttagtattttaaaag

SEQ ID NO: 254560 - DNA, 120 bp, Artificial Sequence
  ENSG00000124198_64 (sequence is synthesized)
atttaattttctgaatgaggcatttgaattgtaccagcaatggacttttaaaaaattggatgtaaaaccattcagggtgatttttcttgtcagtggacagtgacgaacagagatttgaaa

SEQ ID NO: 254561 - DNA, 120 bp, Artificial Sequence
  ENSG00000124198_65 (sequence is synthesized)
tcccttacctccaataataagccattcagcctaaattcatttttatgaataaatctcttctttctcatggtaaatgtggcttgtgccactcaaacactagtgaaagggtatgtacaaccg

SEQ ID NO: 254562 - DNA, 120 bp, Artificial Sequence
  ENSG00000124198_66 (sequence is synthesized)
caacatcaggccaggacaccatttatttaaccaagtaatggaggagagtgaaacattttccaaggccttatttctttttcagaatgctttaagtgttgattatatgtgctgggtctctag

SEQ ID NO: 254563 - DNA, 120 bp, Artificial Sequence
  ENSG00000124198_67 (sequence is synthesized)
agaagtttttatttgttacaatactgctgctttgagcaattttgtttctcttcattgtctgttagggaaatcaccagctttggcatcttaacaacaaacagtggatgggtaatttttatt

SEQ ID NO: 254564 - DNA, 120 bp, Artificial Sequence
  ENSG00000124198_68 (sequence is synthesized)
tctgatacgcatctttagagtcaaatatatcttttccctgtactcctcatgtacaaccaaagaacatacattatgaaaattgtattataatatctggaaacacaacattttcctctggca

SEQ ID NO: 254565 - DNA, 120 bp, Artificial Sequence
  ENSG00000124198_69 (sequence is synthesized)
ggtgacttttgtacgaaatgaaaaaaaaaaaacctgtattttttttgttgttcttttgtgattaaggatatacatttagtagtctttgttattaaaggaacctgctgataagtacaagtg

SEQ ID NO: 254566 - DNA, 120 bp, Artificial Sequence
  ENSG00000124198_70 (sequence is synthesized)
tgaccatctcattcaaatgtttgttgttatgatgcaaatggatattggtttcaatagaagctggatccttaatactgcattttctgaattctgttttaatatttgtgttaaagtagacat

SEQ ID NO: 254567 - DNA, 120 bp, Artificial Sequence
  ENSG00000124198_71 (sequence is synthesized)
agctgaactcacatggaatcctggagttttgttatcagcagctttgcagtttgggaaacaaagaaaccaaagctgagtgttttaaagaatgaacatatctggaaatccttgctctcaaaa

SEQ ID NO: 254568 - DNA, 120 bp, Artificial Sequence
  ENSG00000124198_72 (sequence is synthesized)
caaaacaatataatctatcaaaggtgttttactcagtgttctaatttttaaaaaattttatctgcatatttgcatcaaatatttatgtgtaaaatgtatgttttacctccttaaaatgcc

SEQ ID NO: 254569 - DNA, 120 bp, Artificial Sequence
  ENSG00000124198_73 (sequence is synthesized)
taaaagttagttaatagttactttggtttaacctatacacaatgattaagtgcatttaatattggtaatttaatgaaaaccattccttgcccaatggatgtataaatttttgaaagaata

SEQ ID NO: 254570 - DNA, 120 bp, Artificial Sequence
  ENSG00000124198_74 (sequence is synthesized)
aaagaataagcagaattatataatatgaaatgctatgtaaagttttctatgtaaaaatattatgtataatactattaaaatatcccatgctttgatcaggtggtacatcaataaaatttt

SEQ ID NO: 254571 - DNA, 120 bp, Artificial Sequence
  ENSG00000124198_75 (sequence is synthesized)
ttacaggtgtgagccaccacacccggtctaatgtttattttgtctggaattatcttcctaggatttttactgggtctaccagactggatggaaatgcaatagttgactttgtccgctggc

SEQ ID NO: 254572 - DNA, 120 bp, Artificial Sequence
  ENSG00000124201_0 (sequence is synthesized)
gccccagcactcgccggcggcagtgaaaggacgcgccggagccggataacagaaagtaacgtgaaggaattcaggtgactcagacatggaggagagaagacctcatctggatgccaggcc

SEQ ID NO: 254573 - DNA, 120 bp, Artificial Sequence
  ENSG00000124201_1 (sequence is synthesized)
caggaattcccataccaaccacagaggccctgtggatggagagttaccaccaagagctagaaatcaggccaataacccaccagccaatgctctccgaggaggagccagccaccctggaag

SEQ ID NO: 254574 - DNA, 120 bp, Artificial Sequence
  ENSG00000124201_2 (sequence is synthesized)
gcatcctagggccaacaaccatcctgctgcttactggcagagggaagagagatttagggccatgggcaggaacccacatcaaggaaggaggaaccaggaggggcatgccagcgacgaagc

SEQ ID NO: 254575 - DNA, 120 bp, Artificial Sequence
  ENSG00000124201_3 (sequence is synthesized)
tagagaccaaagacatgaccaggagaatgacaccaggtggagaaatggcaaccaggactgtaggaaccgcagaccaccatggtccaatgacaacttccagcagtggcggactccccacca

SEQ ID NO: 254576 - DNA, 120 bp, Artificial Sequence
  ENSG00000124201_4 (sequence is synthesized)
gaagcctacagaacagccacagcaggcgaagaaactgggctacaagttcttagaaagtcttctgcagaaagacccttctgaggtggtcatcacacttgccacaagtttagggctgaaaga

SEQ ID NO: 254577 - DNA, 120 bp, Artificial Sequence
  ENSG00000124201_5 (sequence is synthesized)
gctcctttctcattcttccatgaaatctaacttccttgagctcatctgtcaggttcttcggaaggcttgtagctccaaaatggatcgccagagtgttctccatgtactgggcatattgaa

SEQ ID NO: 254578 - DNA, 120 bp, Artificial Sequence
  ENSG00000124201_6 (sequence is synthesized)
aaactccaaatttctcaaagtctgcctgcctgcttatgtggtagggatgatcactgaacccatccctgacatccgaaaccagtatccagagcacataagcaacatcatctccctcctcca

SEQ ID NO: 254579 - DNA, 120 bp, Artificial Sequence
  ENSG00000124201_7 (sequence is synthesized)
ggaccttgtaagtgtcttccctgccagctctgtgcaggaaacttccatgctggtttccctcctgccaacctctcttaatgctctgagagcctctggtgttgacatagaagaggaaacgga

SEQ ID NO: 254580 - DNA, 120 bp, Artificial Sequence
  ENSG00000124201_8 (sequence is synthesized)
gaagaacctggaaaaggtacagactatcattgaacatctgcaggaaaagaggcgagagggcactttgagagtggatacctacactctagtgcagcctgaggcagaagaccatgttgagag

SEQ ID NO: 254581 - DNA, 120 bp, Artificial Sequence
  ENSG00000124201_9 (sequence is synthesized)
ctaccgaaccatgcccatttaccctacctacaatgaagtgcacttggatgagaggcccttccttcgccccaatatcatttctggaaaatacgacagcactgctatctatctggataccca

SEQ ID NO: 254582 - DNA, 120 bp, Artificial Sequence
  ENSG00000124201_10 (sequence is synthesized)
cttccggctcctgcgagaagatttcgtcagacctttacgggaaggtattttggaacttctccaaagctttgaagaccagggcctgaggaagagaaagtttgatgacatccgaatctactt

SEQ ID NO: 254583 - DNA, 120 bp, Artificial Sequence
  ENSG00000124201_11 (sequence is synthesized)
tgacaccaggattatcacccccatgtgttcatcatcaggcatagtctacaaggtgcagtttgacacaaaaccactgaagtttgttcgctggcagaattccaaacgattgctctatgggtc

SEQ ID NO: 254584 - DNA, 120 bp, Artificial Sequence
  ENSG00000124201_12 (sequence is synthesized)
tttggtatgcatgtccaaggacaacttcgagacatttctttttgccaccgtatctaacagggagcaggaagatctctgccgaggaattgtccagctctgcttcaatgagcaaagccaaca

SEQ ID NO: 254585 - DNA, 120 bp, Artificial Sequence
  ENSG00000124201_13 (sequence is synthesized)
gctgctagcagaggtccagccctctgactctttcctcatggtagagacaactgcatactttgaggcctacaggcacgtcctggaaggactccaggaggtccaggaggaagatgttccctt

SEQ ID NO: 254586 - DNA, 120 bp, Artificial Sequence
  ENSG00000124201_14 (sequence is synthesized)
ccagaggaatatcgtggagtgtaactctcatgtgaaggagccaaggtacttgctaatggggggcagatacgactttacccccttaatagagaatccttcagccactggggaatttctaag

SEQ ID NO: 254587 - DNA, 120 bp, Artificial Sequence
  ENSG00000124201_15 (sequence is synthesized)
aaatgtcgagggtttgagacatcccagaattaatgtcttagatcctggccagtggccctcaaaagaagccctgaagctggatgactcccagatggaagccttgcagtttgctctcacaag

SEQ ID NO: 254588 - DNA, 120 bp, Artificial Sequence
  ENSG00000124201_16 (sequence is synthesized)
ggaactggctattattcaaggacctcctggaacaggcaaaacctatgtgggtctaaaaattgttcaggccctcctaaccaacgagtctgtttggcaaattagcctccagaagttccccat

SEQ ID NO: 254589 - DNA, 120 bp, Artificial Sequence
  ENSG00000124201_17 (sequence is synthesized)
cttggttgtgtgttatactaatcatgctttggaccagtttctggaaggcatctacaattgtcagaagaccagcattgtgcgggtgggtggaaggagcaacagtgaaatcctgaagcagtt

SEQ ID NO: 254590 - DNA, 120 bp, Artificial Sequence
  ENSG00000124201_18 (sequence is synthesized)
caccctaagggagctgaggaacaagcgggaattccgccgcaacctccccatgcacctccgaagggcctacatgagtatcatgacacagatgaaggagtcagagcaagagcttcatgaagg

SEQ ID NO: 254591 - DNA, 120 bp, Artificial Sequence
  ENSG00000124201_19 (sequence is synthesized)
agccaagaccctggagtgcaccatgcgtggtgtcctacgggaacagtacctgcagaagtacatctcaccccagcactgggaaagtctcatgaatggaccagtgcaggatagtgaatggat

SEQ ID NO: 254592 - DNA, 120 bp, Artificial Sequence
  ENSG00000124201_20 (sequence is synthesized)
ttgcttccagcactggaagcattccatgatgctggagtggctaggtcttggtgtcggttctttcacgcaaagtgtttctccagcaggacctgagaatacagcccaggcagaaggggatga

SEQ ID NO: 254593 - DNA, 120 bp, Artificial Sequence
  ENSG00000124201_21 (sequence is synthesized)
ggaggaagaaggggaggaggagagttcgctgatagagatcgcagaggaagctgacctgattcaagcagaccgggtgattgaggaggaagaggtggtgaggccccagcggcggaagaagga

SEQ ID NO: 254594 - DNA, 120 bp, Artificial Sequence
  ENSG00000124201_22 (sequence is synthesized)
agagagtggagcagaccaggagttggctaaaatgcttctggccatgaggctagaccattgtggcactgggacagcagctggacaggagcaagccacaggagagtggcagacccagcgcaa

SEQ ID NO: 254595 - DNA, 120 bp, Artificial Sequence
  ENSG00000124201_23 (sequence is synthesized)
ccagaaaaagaaaatgaaaaaaagagtgaaggatgagcttcgcaaactgaacaccatgactgcagccgaggccaacgagatcgaggatgtttggcagctggacctcagttctcgctggca

SEQ ID NO: 254596 - DNA, 120 bp, Artificial Sequence
  ENSG00000124201_24 (sequence is synthesized)
gctttataggctctggctacagttgtaccaggctgacacccgccggaagatcctcagctatgaacgccagtaccgcacatcagcagaaagaatggccgagctgagactccaggaagacct

SEQ ID NO: 254597 - DNA, 120 bp, Artificial Sequence
  ENSG00000124201_25 (sequence is synthesized)
gcacattcttaaagatgcccaggttgtaggaatgacaaccacaggtgctgccaaataccgccagatcctacagaaggtggagccgaggattgtcatagtggaagaagctgcggaagtcct

SEQ ID NO: 254598 - DNA, 120 bp, Artificial Sequence
  ENSG00000124201_26 (sequence is synthesized)
tgaggcccataccattgccacattgagcaaagcttgccagcacctcattttgattggggaccaccagcagctgcgccccagtgccaacgtgtatgatctggccaagaacttcaaccttga

SEQ ID NO: 254599 - DNA, 120 bp, Artificial Sequence
  ENSG00000124201_27 (sequence is synthesized)
ggtgtccctttttgaacggctagtgaaagtaaacattccctttgtccgtctgaattaccagcaccgtatgtgccctgaaattgcccgccttttgaccccccacatttaccaggatctgga

SEQ ID NO: 254600 - DNA, 120 bp, Artificial Sequence
  ENSG00000124201_28 (sequence is synthesized)
gaatcatccatctgttcttaagtatgagaagattaagggggtgtcttccaaccttttctttgtagaacacaactttcctgaacaggaaatccaagagggcaaaagccatcagaaccagca

SEQ ID NO: 254601 - DNA, 120 bp, Artificial Sequence
  ENSG00000124201_29 (sequence is synthesized)
tgaggctcactttgtggtagagctgtgcaagtacttcctgtgccaggaatacctgccttcccagatcaccatcctcactacctataccgggcagctcttctgcctgcgcaaactgatgcc

SEQ ID NO: 254602 - DNA, 120 bp, Artificial Sequence
  ENSG00000124201_30 (sequence is synthesized)
tgctggcgtcagggtccatgttgtggacaaataccaaggggaagagaatgacatcatcctcctctcgctagtgcggagcaaccaagaaggcaaggtgggttttctgcagatatccaaccg

SEQ ID NO: 254603 - DNA, 120 bp, Artificial Sequence
  ENSG00000124201_31 (sequence is synthesized)
catctgtgtggccttgtcccgagccaagaagggaatgtactgcatcggaaacatgcagatgctggccaaggtgcccctgtggagcaagatcattcatacacttcgagagaacaatcaaat

SEQ ID NO: 254604 - DNA, 120 bp, Artificial Sequence
  ENSG00000124201_32 (sequence is synthesized)
aggccccatgctccggctctgctgccagaaccaccctgaaacccacaccttagtatccaaagcttctgacttccaaaaagtacccgaaggaggctgcagcctgccctgcgagttccgcct

SEQ ID NO: 254605 - DNA, 120 bp, Artificial Sequence
  ENSG00000124201_33 (sequence is synthesized)
gggctgtgggcatgtctgcacccgtgcctgccacccttatgactcttcacacaaggagttccaatgcatgaagccatgccagaaggtcatctgtcaggaagggcaccggtgtccccttgt

SEQ ID NO: 254606 - DNA, 120 bp, Artificial Sequence
  ENSG00000124201_34 (sequence is synthesized)
ttgcttccaggagtgtcagccttgtcaggtgaaggtgcccaaaaccattcctcggtgcggccatgaacaaatggtcccttgttccgtgcctgagtcagatttctgctgccaggagccttg

SEQ ID NO: 254607 - DNA, 120 bp, Artificial Sequence
  ENSG00000124201_35 (sequence is synthesized)
ctccaagtctctgagatgtgggcacagatgcagccacccatgtggtgaggactgtgtgcagctgtgttcagaaatggtcaccataaaactcaagtgtgggcacagtcaaccggtaaaatg

SEQ ID NO: 254608 - DNA, 120 bp, Artificial Sequence
  ENSG00000124201_36 (sequence is synthesized)
tggtcatgtggaaggcctcctgtatggtggtctgctagtcaagtgtaccacaaagtgtggcactatcttggactgcgggcatccttgcccaggctcctgccacagctgcttcgaagggcg

SEQ ID NO: 254609 - DNA, 120 bp, Artificial Sequence
  ENSG00000124201_37 (sequence is synthesized)
tttccatgaacgctgtcagcagccctgcaagcgcctgcttatctgctcacacaagtgccaggaaccatgcattggtgagtgcccaccctgccagcggacctgtcagaaccgctgtgtcca

SEQ ID NO: 254610 - DNA, 120 bp, Artificial Sequence
  ENSG00000124201_38 (sequence is synthesized)
cagccagtgcaagaagaaatgtggggagctgtgtagtccctgcgtggaaccctgtgtctggcgctgccagcactaccagtgcaccaaactctgctctgagccctgcaaccgacccccatg

SEQ ID NO: 254611 - DNA, 120 bp, Artificial Sequence
  ENSG00000124201_39 (sequence is synthesized)
ctatgtgccttgtactaagctgctagtttgtggccacccctgcattggtctctgtggggagccatgccccaagaaatgccggatctgccacatggatgaggtcacccaaatattctttgg

SEQ ID NO: 254612 - DNA, 120 bp, Artificial Sequence
  ENSG00000124201_40 (sequence is synthesized)
ctttgaggatgagcctgatgcccgctttgtgcagctggaagactgcagccacatctttgaggtgcaagccctagaccgctacatgaatgaacagaaggatgatgaagtcgccatcagatt

SEQ ID NO: 254613 - DNA, 120 bp, Artificial Sequence
  ENSG00000124201_41 (sequence is synthesized)
gaaagtctgccctatctgccaggtgcccatccgcaaaaacctgaggtatggaactagcataaaacagcggctagaagagattgaaatcatcaaggaaaagatccagggctcagcagggga

SEQ ID NO: 254614 - DNA, 120 bp, Artificial Sequence
  ENSG00000124201_42 (sequence is synthesized)
aatagcaaccagccaggaacggcttaaggccctgctggagaggaagagcctcctccaccagctgcttcctgaagacttcctgatgttaaaggagaagctggcccagaaaaatctgtcagt

SEQ ID NO: 254615 - DNA, 120 bp, Artificial Sequence
  ENSG00000124201_43 (sequence is synthesized)
gaaggacctgggtctggttgagaattacatcagcttctatgaccacctggccagcctgtgggattccctgaaaaagatgcatgtcttagaagagaaaagagtgaggactcgactagaaca

SEQ ID NO: 254616 - DNA, 120 bp, Artificial Sequence
  ENSG00000124201_44 (sequence is synthesized)
ggtccatgagtggctggccaagaagcgcttgagcttcactagccaggaactaagtgacctccgaagtgaaatccagaggctcacatacctggtgaaccttctgacccgctacaagatagc

SEQ ID NO: 254617 - DNA, 120 bp, Artificial Sequence
  ENSG00000124201_45 (sequence is synthesized)
agagaagaaggtgaaagatagcatagcagtagaggtctatagtgtccagaatatccttgagaaaacatgtaagttcacccaagaggatgaacaacttgtgcaggaaaagatggaagctct

SEQ ID NO: 254618 - DNA, 120 bp, Artificial Sequence
  ENSG00000124201_46 (sequence is synthesized)
gaaagccacccttccctgctctggcctgggcatctcagaggaagagcgagtgcagattgtcagtgccataggttatcctcgtggtcactggttcaagtgccgcaatggccatatctatgt

SEQ ID NO: 254619 - DNA, 120 bp, Artificial Sequence
  ENSG00000124201_47 (sequence is synthesized)
gattggcgattgtgggggagccatggagaggggcacgtgtcctgactgtaaggaagtgattggtggcacaaatcatactctggaaagaagcaaccagcttgcttctgaaatggatggagc

SEQ ID NO: 254620 - DNA, 120 bp, Artificial Sequence
  ENSG00000124201_48 (sequence is synthesized)
ccagcatgctgcctggtctgacacggccaacaacctgatgaactttgaggagatccaggggatgatgtaggaagatggtacaccactgccttttgccctcgccactgaatgactggggcc

SEQ ID NO: 254621 - DNA, 88 bp, Artificial Sequence
  ENSG00000124201_49 (sequence is synthesized)
caccactgccttttgccctcgccactgaatgactggggccagctccctaatgaaggaactgaagtttgttttttattatcatcctttt

SEQ ID NO: 254622 - DNA, 88 bp, Artificial Sequence
  ENSG00000124201_50 (sequence is synthesized)
agatcatgccattgcactccagtctgggcgacacattctttttagtcttagcacctacttaaggatccacttttagggctcacccaca

SEQ ID NO: 254623 - DNA, 120 bp, Artificial Sequence
  ENSG00000124201_51 (sequence is synthesized)
tagcacctacttaaggatccacttttagggctcacccacatttgtttctagatttacccctgcgctagagtaagcactttatctccagaactgagagcaaagttaacaaatctcacccct

SEQ ID NO: 254624 - DNA, 120 bp, Artificial Sequence
  ENSG00000124201_52 (sequence is synthesized)
tctctcctgcaaattagtggacagactccctggaacatgtttggggcttccacctagggccacctagtggtatctctgggtctttacttggtcagatgtttattctacattgttccccag

SEQ ID NO: 254625 - DNA, 120 bp, Artificial Sequence
  ENSG00000124201_53 (sequence is synthesized)
gaacagagtatgagctcattgatgcagaccgattctaattgccaggccctaatttgcagactaactctcataataaacagaggcccatagttgtttatgaactgcttatcccttaaagga

SEQ ID NO: 254626 - DNA, 120 bp, Artificial Sequence
  ENSG00000124201_54 (sequence is synthesized)
gcacaagaacccctccctgccctccttgggcaccctgcctccaggagatggaggcacgtgataagacaaaagactgcaccaactcaccctgacacagttacatagtcactgagagtgggg

SEQ ID NO: 254627 - DNA, 120 bp, Artificial Sequence
  ENSG00000124201_55 (sequence is synthesized)
aagatgggacagcccacatgctgcataagatgggccttatgcagcaggcccaggtcgtcattaaggagtgacccctttcctgtaacctgcactttgggatggtagaagtttctttacctg

SEQ ID NO: 254628 - DNA, 120 bp, Artificial Sequence
  ENSG00000124201_56 (sequence is synthesized)
ctgacaggtttggtggcactgctggttacccctgggccctgaatggagctaaaatcacatttggtaccagcagcacctatcccaagtgtgatccttcatcccaacactccctcttggagc

SEQ ID NO: 254629 - DNA, 120 bp, Artificial Sequence
  ENSG00000124201_57 (sequence is synthesized)
tgttccctgggtagagctagcatgccagcagcttctgcaggctccaaacccaggccagaagccagacccaggcctgctgcctgcatctgcattccctccttccagtgttccttagaacag

SEQ ID NO: 254630 - DNA, 120 bp, Artificial Sequence
  ENSG00000124201_58 (sequence is synthesized)
acatttaggtatctcaggtcctttctaagtgtccctttcctatgtatgcatttcctttttttgtctttactatgcactttagcttataaagccaattaaaaacaatgattgagaaaatca

SEQ ID NO: 254631 - DNA, 120 bp, Artificial Sequence
  ENSG00000124201_59 (sequence is synthesized)
caagatcgtgtcattgcactccagcctggaggacaagagactctggtttttgcagcaagtaactaatttatggtgtcaaggctccttctgtccttttcgggcttccatttctccagcagc

SEQ ID NO: 254632 - DNA, 120 bp, Artificial Sequence
  ENSG00000124201_60 (sequence is synthesized)
tcgggcttccatttctccagcagcatttccacagcacagcagcaagaggccaagtcaaattcctgcagagctttggcaactgggatgagaagaaagcataagatttcagggatgatttta

SEQ ID NO: 254633 - DNA, 120 bp, Artificial Sequence
  ENSG00000124201_61 (sequence is synthesized)
tgctcctctcgggctcttggaccactgcctccttccccttctccaggagccgctttgctgtattgatctgtagagataacaaaaggatgcctgccgtgaaacccgtatctactaacacag

SEQ ID NO: 254634 - DNA, 120 bp, Artificial Sequence
  ENSG00000124201_62 (sequence is synthesized)
gaagccacgggctgcaaatgcctggggctctgatgggagaaacatttcagaagggcagcaccagcagggatgcagcagcttgcttactgagcagccttgtgaacaagatcccgcctcgca

SEQ ID NO: 254635 - DNA, 120 bp, Artificial Sequence
  ENSG00000124201_63 (sequence is synthesized)
gcctcacctgggcttctgactgctgcatctctttttcctccgcctctagctgcagaactgcatacacatctttctccattttctcaatcttgtcccggaatttgaggatgacatctcaat

SEQ ID NO: 254636 - DNA, 120 bp, Artificial Sequence
  ENSG00000124201_64 (sequence is synthesized)
ttcctcgccatgtcgcgcttcacacgcaccaaaccgctcgacgggttccccttcctctggggccggctgaggcccgcaaaggccttgggcgcagtcatctcccgccccccgcggtccgct

SEQ ID NO: 254637 - DNA, 120 bp, Artificial Sequence
  ENSG00000124201_65 (sequence is synthesized)
cggctccgccgccggggggagctgaggtgacgccctcctcgagggcggaggcgccggccgtgcctgggccaggccctcgtgctctccaccctgggcccccgcctcctccttctcctcctc

SEQ ID NO: 254638 - DNA, 120 bp, Artificial Sequence
  ENSG00000124201_66 (sequence is synthesized)
ccccgcctcctccttctcctcctctgggccgcccgcccggctccgcccagggtctgcggggaacggaaaccgaaagtgcgcggcgccgggcggggccaccgacctgcctgggccgaagcc

SEQ ID NO: 254639 - DNA, 83 bp, Artificial Sequence
  ENSG00000124201_67 (sequence is synthesized)
gtggctcacacctgtaacccggcactctgggagagccagcctgggcaacgtggccagactctgtctctacaaaaaaaaaaaaa

SEQ ID NO: 254640 - DNA, 90 bp, Artificial Sequence
  ENSG00000124201_68 (sequence is synthesized)
cgtctctattaaaaatacaaaaatcagctgggtgtgggggcacacgcctgtaatcccagctactactcagacgaggcggaggctgcagta

SEQ ID NO: 254641 - DNA, 69 bp, Artificial Sequence
  ENSG00000124201_69 (sequence is synthesized)
ggctgaggcaggagaactgcttgaacccacgaggcggaggctgcagtaagccaagatgacaccactatt

SEQ ID NO: 254642 - DNA, 120 bp, Artificial Sequence
  ENSG00000124201_70 (sequence is synthesized)
ggaggctgaggagaagaactgcttgaacccaggagttcgaggcaacagtaagctatgatcgcacccctgtaccccagcctgggcaacaaagcaagaccttatcttaaacaaaataaggca

SEQ ID NO: 254643 - DNA, 82 bp, Artificial Sequence
  ENSG00000124201_71 (sequence is synthesized)
taaataaaataaaataagggtgactactaatactgtgtaactgatgaaaataatttagctgtgcatttactgacataggaaa

SEQ ID NO: 254644 - DNA, 120 bp, Artificial Sequence
  ENSG00000124201_72 (sequence is synthesized)
gaaaggacgcgccggagccgggtgagtggccccgcaactgcccctgcccctgattcttccttgcctcgccgcgaaccccggcgcccgcgccgacccgccactgcctctgcccttttccag

SEQ ID NO: 254645 - DNA, 120 bp, Artificial Sequence
  ENSG00000124203_0 (sequence is synthesized)
atggaggttccagaacccacctgccctgcccctcctgcgagggaccagccagctcccactcctggccctccaggggccccaggtggccaggcctcacctcacctgaccctgggccctgtc

SEQ ID NO: 254646 - DNA, 120 bp, Artificial Sequence
  ENSG00000124203_1 (sequence is synthesized)
cttctgccgccagagcagggcctggccccccccactgtgttcctgaaggccctgcccatcccactgtaccacacggtgcctcccgggggcctccagccccgcgccccgctagtgacgggc

SEQ ID NO: 254647 - DNA, 120 bp, Artificial Sequence
  ENSG00000124203_2 (sequence is synthesized)
agcctagatgggggcaacgtgcccttcatactcagccctgtgctgcagcctgaagggcctggccccacccaggtggggaagccggcggcccctacgctgacggtgaacatcgtgggcact

SEQ ID NO: 254648 - DNA, 120 bp, Artificial Sequence
  ENSG00000124203_3 (sequence is synthesized)
ctgcctgtcctgtcgccgggcctgggccccacgctgggcagcccaggcaaggtgcggaatgcgggcaagtacctgtgtccgcactgtggtcgcgactgcctgaagcccagtgttctagag

SEQ ID NO: 254649 - DNA, 120 bp, Artificial Sequence
  ENSG00000124203_4 (sequence is synthesized)
aagcacatccggtcccacacgggtgagaggcccttcccgtgtgccacctgcggcatcgcctttaagacccagagcaatctctacaagcacaggcggacgcagacgcacctcaacaactcc

SEQ ID NO: 254650 - DNA, 120 bp, Artificial Sequence
  ENSG00000124203_5 (sequence is synthesized)
cggctgtcctcagagtccgagggcgccgggggcggcctcctggaggaaggggacaaggccggagagccccccagaccagagggcaggggcgagagcaggtgccaggggatgcacgaaggc

SEQ ID NO: 254651 - DNA, 120 bp, Artificial Sequence
  ENSG00000124203_6 (sequence is synthesized)
gcctcggagagacccctttctccgggtgcccacgtgcccctacttgccaagaacctggatgtgaggaccgaagctgctccctgtccagggtccgcatttgccgacagagaggctccttgg

SEQ ID NO: 254652 - DNA, 120 bp, Artificial Sequence
  ENSG00000124203_7 (sequence is synthesized)
gactctgcccccatggcgtcacctgggctcccagcggccagcacacaaccctggcgtaagttgccagagcagaagtcgccgaccgccgggaagccgtgcgccctgcagcggcagcaggcg

SEQ ID NO: 254653 - DNA, 120 bp, Artificial Sequence
  ENSG00000124203_8 (sequence is synthesized)
acggcagcggagaagccctgggatgccaaggcccccgagggccggctgcggaagtgtgagagcaccgactcggggtacctgtcgcgctccgacagcgcggagcagccgcatgcgccctgc

SEQ ID NO: 254654 - DNA, 120 bp, Artificial Sequence
  ENSG00000124203_9 (sequence is synthesized)
gcacagcctttcggagcacagcgccgagtccgagggggagggcggcccgggcccggggccaggggtcgcaggggccgagcccggggcgcgagaagccggcctggagctggagaagaagcg

SEQ ID NO: 254655 - DNA, 120 bp, Artificial Sequence
  ENSG00000124203_10 (sequence is synthesized)
aagaagcggctggaggagcgcatcgcccagctcatctcccacaaccaggcggtggtggacgatgcccagctggacaacgtgcggccccggaagaccgggctgtccaaacagggcagcatc

SEQ ID NO: 254656 - DNA, 120 bp, Artificial Sequence
  ENSG00000124203_11 (sequence is synthesized)
gacctgcccacgccctacacctacaaggactccttccactttgacatccgcgcgctggagccaggccgtaggagggccccgggccccgtgcgctccacctggacgcccccagacaagtct

SEQ ID NO: 254657 - DNA, 120 bp, Artificial Sequence
  ENSG00000124203_12 (sequence is synthesized)
cggcccctcttcttccactccgtccccactcagctctccaccaccgtggaatgtgtccccgtcaccaggagcaactcgctgcccttcgtcgagggctccaggacgtggctggagcccagg

SEQ ID NO: 254658 - DNA, 120 bp, Artificial Sequence
  ENSG00000124203_13 (sequence is synthesized)
gagccccgggacccctggtccaggacgcagaagcctctgagccccaggcccggcccagcccgcctgggctgccgctcgggactaagctcgactgacgttcccagtgggcatccccgggcc

SEQ ID NO: 254659 - DNA, 120 bp, Artificial Sequence
  ENSG00000124203_14 (sequence is synthesized)
ctggtcagacaggccgcggtggaggacctgccaggcacccccattggcgatgccctggtgcccgcagaggacacagacgcaaagagaactgctgcgcgggaggccatggccggcaagggc

SEQ ID NO: 254660 - DNA, 120 bp, Artificial Sequence
  ENSG00000124203_15 (sequence is synthesized)
agagcgggcggcaggaagtgcggccagagaaggctgaagatgttctcccaggagaagtggcaggtgtacggggatgagacgttcaaaaggatctaccagaaaatgaaagccagtccccat

SEQ ID NO: 254661 - DNA, 120 bp, Artificial Sequence
  ENSG00000124203_16 (sequence is synthesized)
ggaggcaagaaagccagggaggtgggaatgggcagtggggcagaactgggctttcctctgcagaaagaggcagcagggagctcaggcacagtccccacccaagacaggaggacccctgtc

SEQ ID NO: 254662 - DNA, 120 bp, Artificial Sequence
  ENSG00000124203_17 (sequence is synthesized)
catgaggacatatccgcaggggcaacgccagagccttggggaaatccaccagccctggaggcctccttggtgactgaacccactaagcatggggagacggtggccaggagaggagacagt

SEQ ID NO: 254663 - DNA, 120 bp, Artificial Sequence
  ENSG00000124203_18 (sequence is synthesized)
gaccgacccagggtggaagaggctgtgtcatcccctgcactgggtggcagagacagtccctgttcaggcagtaggagccccctggtctctccaaatgggaggctggaactggggtggcag

SEQ ID NO: 254664 - DNA, 120 bp, Artificial Sequence
  ENSG00000124203_19 (sequence is synthesized)
atgcccccagcacctggccccctcaaagggggtgatgtagaggctcccaggccagtttggccggaccccaagctggaaggaggtgcccgaggtgtgggggatgttcaggagacctgcctg

SEQ ID NO: 254665 - DNA, 120 bp, Artificial Sequence
  ENSG00000124203_20 (sequence is synthesized)
tgggcccagactgtcctgagatggcccagcaggggctcaggggaggacaagctcccctcagagaggaagaagctgaaagtggaggacctgcacagctggaagcaaccagagcctgtgagc

SEQ ID NO: 254666 - DNA, 120 bp, Artificial Sequence
  ENSG00000124203_21 (sequence is synthesized)
gcagagaccccaggtgggcccacgcagcctgcctctttgtcatcccagaagcaggatgccgatcccggggaggtgccagggggctcaaaggagagtgccaggcaggtgggcgagcctctg

SEQ ID NO: 254667 - DNA, 120 bp, Artificial Sequence
  ENSG00000124203_22 (sequence is synthesized)
gagtcctctggagcctccttggctgctgcttctgttgccctgaagagggtggggccaagggacaaggctaccccactgcatcctgcagccccagcccccgcagagcacccctcgctggcc

SEQ ID NO: 254668 - DNA, 120 bp, Artificial Sequence
  ENSG00000124203_23 (sequence is synthesized)
accccacctcaggctcctagagtgctctctgccctggcagataatgccttttcccccaagtacctcctcaggttacctcaggcagagacccccttaccactgcccattccctggggacca

SEQ ID NO: 254669 - DNA, 120 bp, Artificial Sequence
  ENSG00000124203_24 (sequence is synthesized)
aggcacagccaggactctctctgcagcagtgggtggcctgaagaacgggcatcatttgttgggtcaggactggggacccctctttctcccagcccagcctcaggcccctccccaggtgag

SEQ ID NO: 254670 - DNA, 120 bp, Artificial Sequence
  ENSG00000124203_25 (sequence is synthesized)
gcggacagcatcctggaggaccccagctgttccaggccacaggatgggagaaaaggggcacagttggggggggacaagggggacaggatggccactagcaggccagcagccagggagttg

SEQ ID NO: 254671 - DNA, 120 bp, Artificial Sequence
  ENSG00000124203_26 (sequence is synthesized)
cccatctcagcaccaggggctcccagggaggctacctcctccccgcccactccaacgtgtgaggcacacttagttcaggacatggagggtgacagccaccgtatccatcgcctctgcatg

SEQ ID NO: 254672 - DNA, 120 bp, Artificial Sequence
  ENSG00000124203_27 (sequence is synthesized)
ggcagcactttggcaagggccaggctctctggggatgtcctgaatccctgggtacccaactgggagctgggggagcctcctgggaatgccccagaagatccttcttcagggcccctggtg

SEQ ID NO: 254673 - DNA, 120 bp, Artificial Sequence
  ENSG00000124203_28 (sequence is synthesized)
ggccccgacccgtgttcccccctccagcctggctccttcctcactgccctcactcggcctcagggtgtgcccccaggctggccagagctggccttgtcttcccactcagggacgtcccgg

SEQ ID NO: 254674 - DNA, 120 bp, Artificial Sequence
  ENSG00000124203_29 (sequence is synthesized)
agccacagcacccgcagtccccacagcacccaaaacccctttccctcactgaaggctgagccgcggctcacgtggtgttgcctgagccgcagtgtccctctgcccgcggagcagaaggca

SEQ ID NO: 254675 - DNA, 120 bp, Artificial Sequence
  ENSG00000124203_30 (sequence is synthesized)
aaggcggcatctgtgtacttggcggtgcactttcctggtagcagcctccgagatgagggtcccaatggccctcctgggagcaatggaggatggacctggacaagccctggagaaggaggg

SEQ ID NO: 254676 - DNA, 120 bp, Artificial Sequence
  ENSG00000124203_31 (sequence is synthesized)
ccggcgcagatgtccaagttctcctacccaacagtcccaggggtgatgccccagcaccaggtgtctgagccagaatggaagaaaggcctgccttggagggcaaagatgtctcgtgggaac

SEQ ID NO: 254677 - DNA, 120 bp, Artificial Sequence
  ENSG00000124203_32 (sequence is synthesized)
agcaagcagagaaaactgaagatcaaccctaaaaggtacaaagggaatttcttgcagagctgtgttcagctgagagccagtagacttcgcacaccaacctgggtgcgaagaagaagccgc

SEQ ID NO: 254678 - DNA, 120 bp, Artificial Sequence
  ENSG00000124203_33 (sequence is synthesized)
caccctcccgcacttgagggactgaagccatgcaggacccctgggcagacctcttcagaaatagcaggtctgaatctgcaagaggagccatcttgtgccacctcagaatcacctccttgt

SEQ ID NO: 254679 - DNA, 120 bp, Artificial Sequence
  ENSG00000124203_34 (sequence is synthesized)
tgtgggaaggaagagaagaaggaaggtgactgcagacaaaccttaggaaccctctctcttggtacaagttcaagaattgtcagggaaatggacaaacgaactgtgaaggatatttctcca

SEQ ID NO: 254680 - DNA, 120 bp, Artificial Sequence
  ENSG00000124203_35 (sequence is synthesized)
tctgctggtgagcatggtgactgtactactcacagcactgctgccacatcaggattatctctgcaatctgacacctgcctggcagtggttaatgacgtgcctctaccccctggcaaaggt

SEQ ID NO: 254681 - DNA, 120 bp, Artificial Sequence
  ENSG00000124203_36 (sequence is synthesized)
cttgaccttgggttgctggagactcagctgctggcctcccaggattcagtctcaacagatcccaaaccatacatcttctcagatgctcaaaggccttcttcctttgggtccaaaggaact

SEQ ID NO: 254682 - DNA, 120 bp, Artificial Sequence
  ENSG00000124203_37 (sequence is synthesized)
tttccccaccatgacattgctacctctgtggctgccgtttgtatttctctgccagtgagaacagatcacatagcccaggaaattcacagtgctgaatcacgagaccacagccagactgca

SEQ ID NO: 254683 - DNA, 120 bp, Artificial Sequence
  ENSG00000124203_38 (sequence is synthesized)
gggaggactctgacatcaagctccccagacagcaaagtcacagaagagggcagagcacagaccctcttgccagggagaccttcatctggacaaagaatttcagattcggttccactggag

SEQ ID NO: 254684 - DNA, 120 bp, Artificial Sequence
  ENSG00000124203_39 (sequence is synthesized)
aagttcagctagttcacaccacaaggaagggagacacaagacgttttttccttccagaggccagtatgggtgtggggaaatgactgtcccctgcccctctttaggaagtgacggtaggaa

SEQ ID NO: 254685 - DNA, 120 bp, Artificial Sequence
  ENSG00000124203_40 (sequence is synthesized)
acgtcaggtatctggattaatcactcggaaagattctgtggttccttctaagccagagcagcccatagaaattcctgaagccccttctaaatccctcaagaagaggagtctggaaggaat

SEQ ID NO: 254686 - DNA, 120 bp, Artificial Sequence
  ENSG00000124203_41 (sequence is synthesized)
gagaaagcaaactcgagtagagttcagtgacaccagcagcgacgatgaagaccgattagttatagaaatatgaagcttccagagaaacatggtgtctggtcaaaaagactgttgacgctt

SEQ ID NO: 254687 - DNA, 120 bp, Artificial Sequence
  ENSG00000124203_42 (sequence is synthesized)
cacaagtaaatgttgtcaggctggcggaagaactaaactctatctgtgaaacacctacagattaggaaagccattttgagttatttacaagccaactccaaccaacttctgacccccaac

SEQ ID NO: 254688 - DNA, 120 bp, Artificial Sequence
  ENSG00000124203_43 (sequence is synthesized)
tcagccgcagcgttccccagctccccttgggagtgctctgctcatcttcaaatggtgccaggcagggcagacatggcaaggaagcaaactctgcaaatggtcaacgtgcacagtgactgg

SEQ ID NO: 254689 - DNA, 120 bp, Artificial Sequence
  ENSG00000124203_44 (sequence is synthesized)
gccttgactcccagcctcgtcttctgcacctgtcccccactgcctctctgcaatcaaatggcactaaccaagaaagccaccatcaacacatttctccacaagtggaccccacacagtcga

SEQ ID NO: 254690 - DNA, 120 bp, Artificial Sequence
  ENSG00000124203_45 (sequence is synthesized)
ggcaactggctttctccattagtaaactgaggatttgcttccaaggtggagagcacacttgggataattggagtagcttgacaaagagacgggggtgtgaactgggcacaaagatacttc

SEQ ID NO: 254691 - DNA, 120 bp, Artificial Sequence
  ENSG00000124203_46 (sequence is synthesized)
tgttcattttggagacaaaattcagatacattaaaaaactgaagcttgttcagagtaattcacgtccttggtggagttgtaaatacacttcaaaatgcctatgatccggtgacatgctga

SEQ ID NO: 254692 - DNA, 120 bp, Artificial Sequence
  ENSG00000124203_47 (sequence is synthesized)
ttacttttaaatgttgcacaaatggtcaatgcttatttatggtcagatgatgcaagcacatgctcttgtgcctggtgcgtttgctgtggagatctctgagactgtcggtttttctagttc

SEQ ID NO: 254693 - DNA, 120 bp, Artificial Sequence
  ENSG00000124203_48 (sequence is synthesized)
ttgcaaaggaacggtgttaaaagttaatagaactgtctctctgtaatgagtcattttttgagagggaaaaattcacttattttcctctgattcttcttgtcatattgtgctctgagcaat

SEQ ID NO: 254694 - DNA, 120 bp, Artificial Sequence
  ENSG00000124203_49 (sequence is synthesized)
ttcaattagagggttacattttagtaatctgtacagcttcaactgatgcctgctcgtcgtgacgggagccttttagatttccttcagaagcttcaaggatacaaaactaattggagtttt

SEQ ID NO: 254695 - DNA, 120 bp, Artificial Sequence
  ENSG00000124203_50 (sequence is synthesized)
gacgctgttttacatctcggtaattttattttcggggcttagtgttactttgctgtcaaattaaatcagcctctgtattgtgcacgtcagaactgcacagagaaaattccccagtattcc

SEQ ID NO: 254696 - DNA, 120 bp, Artificial Sequence
  ENSG00000124203_51 (sequence is synthesized)
aagccggtgcgcccctgtgcagaagaaaacagatctacgtcagccagcccggggggcaaagcctcagttccactgccttcctctccctctccttccacgggagaggagaaacttaaagag

SEQ ID NO: 254697 - DNA, 120 bp, Artificial Sequence
  ENSG00000124203_52 (sequence is synthesized)
gtttacattgctgcatttcaataaaattttatacttgcttttggtatgattttgtacaatttgaaatttgtagctgagctcttttggtgtaactttgatgtaatgatgttcatatgacat

SEQ ID NO: 254698 - DNA, 120 bp, Artificial Sequence
  ENSG00000124203_53 (sequence is synthesized)
cttgtacttcagagacacagcagcaatgcagagcatctcacacatgtgaatacacttcagtcagtctgtgcctgtgactaagtatggtcaaatttcaagtatcttcatgtgaattttcca

SEQ ID NO: 254699 - DNA, 120 bp, Artificial Sequence
  ENSG00000124203_54 (sequence is synthesized)
attttggtgtttttcatagaaaacttcaatgccagaccagcttccctggttacttagcatatatttgtgaccatttcatatgcactcataaatatccaaggatttcaggcccagccaaga

SEQ ID NO: 254700 - DNA, 120 bp, Artificial Sequence
  ENSG00000124203_55 (sequence is synthesized)
aaaacataagaagggaggtaaaaaggatgttggacattgacttagtgtactttttaaacccaacaaaagcgatgtggtgattatctcccttttcgaaggattcatgccactgtaatgaga

SEQ ID NO: 254701 - DNA, 120 bp, Artificial Sequence
  ENSG00000124203_56 (sequence is synthesized)
gaggcagtgtaggcaaatggtctgagccttggatggagattgaagtcctgactttagctgggaaatcttggttaagagtctttctgtaccttagtttccctaagtgagaataagagagtt

SEQ ID NO: 254702 - DNA, 120 bp, Artificial Sequence
  ENSG00000124203_57 (sequence is synthesized)
ggacaagacgaatgtatctccaggttccaatttttctgagaatggttgatagagaagctgctctctccttaaaatgcatggactcaatggcttgaagatattccccatggggaaccattg

SEQ ID NO: 254703 - DNA, 120 bp, Artificial Sequence
  ENSG00000124203_58 (sequence is synthesized)
ccacggaggccttgcatgcaagaagtttgggtggggacagtgaggaactgaaacacaagcaccttccaccaattattgctgtgaagaacctgagcctgaagaagctccatctaatttttt

SEQ ID NO: 254704 - DNA, 120 bp, Artificial Sequence
  ENSG00000124203_59 (sequence is synthesized)
ccccagagttccagattttagggtgcaatcatccagcctatacatgtggctcatagttcaaaaaattaaaagcaaaaccagaactctccagtaggaatggagaaaacctatctgtaggct

SEQ ID NO: 254705 - DNA, 120 bp, Artificial Sequence
  ENSG00000124203_60 (sequence is synthesized)
gaactggctcctttgtcttaggaggcactggtcaggggaaaaaagctgtcttccagacccctcctttctgggtggctactgtggaatcaacggggtcactggctgtaaatcagtaagtca

SEQ ID NO: 254706 - DNA, 120 bp, Artificial Sequence
  ENSG00000124203_61 (sequence is synthesized)
tagctccaaacagcaccaacttcaggatgatggtggaagctctgtccctataggagccaccgttgccagctgtcacatcccaacctaggtcaaatatggcggaatattgatttcgtctct

SEQ ID NO: 254707 - DNA, 120 bp, Artificial Sequence
  ENSG00000124203_62 (sequence is synthesized)
aactccctgtatctcttacaaaggtaaagcaggtagcgaagccaccttgcttccctggtctttgcctagtggctggcaatgtttacaagtgtaccttactttatatcaacatgaatttgt

SEQ ID NO: 254708 - DNA, 120 bp, Artificial Sequence
  ENSG00000124203_63 (sequence is synthesized)
gaaaaagctgtatgtcaatggattttttaaaaattaaaaatgtattttgaatgaccctaagggagctggctctttaaaagcatcctaaggtaaagattttttttaaatgaagaatctttt

SEQ ID NO: 254709 - DNA, 120 bp, Artificial Sequence
  ENSG00000124203_64 (sequence is synthesized)
tataaagcaatgaacaatctctgattttataaatcttaattttcctatgggttttcttaaagtgaaatacaattataagaatacattttaagggtaacattaacaacctagaacccagtt

SEQ ID NO: 254710 - DNA, 120 bp, Artificial Sequence
  ENSG00000124203_65 (sequence is synthesized)
tgggttactaaaaataaaatgtcagtattatcaattgataactaccacagttttatactctgcaagtgtgtactgcatgatggttaaggaaaaacaaatttattttagaacaaagcaaac

SEQ ID NO: 254711 - DNA, 120 bp, Artificial Sequence
  ENSG00000124203_66 (sequence is synthesized)
cagagtttaaagatcagggatttccttctttccccagtgctaattttcccagtgttaattttattatatctttaggtaagggtcttaaccaactgatgcctcagtttcttccacagagaa

SEQ ID NO: 254712 - DNA, 120 bp, Artificial Sequence
  ENSG00000124203_67 (sequence is synthesized)
tagttagagggatgctgtcatgaactaagggaagggcactgaatttttttttgccaatatcaaaagtgacatttccccatgatgttcaagactcaccaggtttctctctccacctgtacc

SEQ ID NO: 254713 - DNA, 120 bp, Artificial Sequence
  ENSG00000124203_68 (sequence is synthesized)
tacacccagctagatcttgtcgttaaagatgtatggagggaagaggtttcaatccttccctccttggcaacctacattgttaagtgactcaaagtcatgtgatttttggtggacaactgg

SEQ ID NO: 254714 - DNA, 120 bp, Artificial Sequence
  ENSG00000124203_69 (sequence is synthesized)
aatcctccttcttgtaaaacacattgaaaaacagctcatctctcctgttaggcttaacccttgagatttgagacaaagctaataatcccctttggttcacatctcacagtaaccaggaga

SEQ ID NO: 254715 - DNA, 120 bp, Artificial Sequence
  ENSG00000124203_70 (sequence is synthesized)
acctatggttcatttgccaagtgattaaaaaaaaagatggaggagggtgtctctgaattttaatggaaacactgccaatagcatggtgggtaacctagggcaagacagactttttcttcc

SEQ ID NO: 254716 - DNA, 120 bp, Artificial Sequence
  ENSG00000124203_71 (sequence is synthesized)
tgaaatcactcttctaaagctgagaccggaagaggaaccttgcagaagtgcactgtgaccacagttcttggcatgaaagataaacaatttgcagtctcatgccaaaaagtatttccttgc

SEQ ID NO: 254717 - DNA, 120 bp, Artificial Sequence
  ENSG00000124203_72 (sequence is synthesized)
atttacattcattacttagaatgatcacattattcatttttttccccagcacagaaatttgcattttgcacagaatttgcctggtgcagcagatctttatagttatggaaactgtcatca

SEQ ID NO: 254718 - DNA, 120 bp, Artificial Sequence
  ENSG00000124203_73 (sequence is synthesized)
ttatcggaatgtgctgctgctcaactccccagacataatttaatatggtgaggagaatatgacctgcctggctctatgggtgatcatatttctactgctgcagcaagctgggcttgtgta

SEQ ID NO: 254719 - DNA, 120 bp, Artificial Sequence
  ENSG00000124203_74 (sequence is synthesized)
tttttcctcacttcagttgttcttcccatagttcatgtagggaggcactttggcttttgaaacactacatttctcaatatttaagcacaatttattgtccttatttttcagaacccatta

SEQ ID NO: 254720 - DNA, 120 bp, Artificial Sequence
  ENSG00000124203_75 (sequence is synthesized)
aatataagggtcagaacctagaaaatcttatgtgctggatttctaccctgtatgattcttttcatccatgctttgcacttacgtaggaatatacataatttggtctgaagaagtatagga

SEQ ID NO: 254721 - DNA, 120 bp, Artificial Sequence
  ENSG00000124203_76 (sequence is synthesized)
acagttgagcacattacttcaccactggaagaataggaaccagggaaaaacatcagcctctgccacttggagcactagaggatgacggaatgtcttgtatatgcggtcaactgttcagga

SEQ ID NO: 254722 - DNA, 120 bp, Artificial Sequence
  ENSG00000124203_77 (sequence is synthesized)
tttactactcaattggttgttcacaatcagggaaatgattggcttcttggttgtttgttgaactttctttctttatatggttaaattattttgttttgataaaaataaaacttaaaatgc

SEQ ID NO: 254723 - DNA, 120 bp, Artificial Sequence
  ENSG00000124203_78 (sequence is synthesized)
acatttcagatgtgaacatcctgtctcaccaaaacaaccccagctaagaagttccgtcgggggtggaggactttttccaagcctttgtttctgtggagtctctgtgcatggcctgctgtg

SEQ ID NO: 254724 - DNA, 120 bp, Artificial Sequence
  ENSG00000124203_79 (sequence is synthesized)
atgagcagtcggtttttctctagagaaggcataaagagaagcagaggcagagatgggacgagcagggagaatgctcctgcctcatcggagccaccggttttcgggagagagcggcagccc

SEQ ID NO: 254725 - DNA, 120 bp, Artificial Sequence
  ENSG00000124203_80 (sequence is synthesized)
ccacctgcctgtggactgagcacttaaagggctggtgatgatcaacctcttctgacaatggagagagcatgcggtggatgttaggggaaccaaaccccaagagggaaccagcttcagtgg

SEQ ID NO: 254726 - DNA, 120 bp, Artificial Sequence
  ENSG00000124203_81 (sequence is synthesized)
aaagcggagtgcgtgcctccccgaggcagggcattgctgagccccagagaggagccctgggttccgctgcctcccccacaggacaaggcatgacagcacctgcattggaatatagactgt

SEQ ID NO: 254727 - DNA, 120 bp, Artificial Sequence
  ENSG00000124203_82 (sequence is synthesized)
gctttggagcctttggcatcagcttccacctggtgcgtaagtctgtggtctctccagcaagttcagggaagtgagggagtcgcagttctctgtcattcagcaggtgtggactgagggctg

SEQ ID NO: 254728 - DNA, 120 bp, Artificial Sequence
  ENSG00000124203_83 (sequence is synthesized)
gctctgtgccaggccctgtgctggatgctgggttccattgtgaggccaggcacagccaaggcagagacgaacattcctacagtcgctcacgacaccaagctccacagaccagagaatgga

SEQ ID NO: 254729 - DNA, 120 bp, Artificial Sequence
  ENSG00000124203_84 (sequence is synthesized)
cggatccacaggaacgaaagacaggctgtcaggtgcccagccctggggagactccagaagaggagagaggaccacccatcatggctgaccttgggaggacttgggtcttcacaaattgtg

SEQ ID NO: 254730 - DNA, 120 bp, Artificial Sequence
  ENSG00000124203_85 (sequence is synthesized)
ttccttggtatatataagagggttaaaatagacacaagaaatatccatctattcccattcatttatttgacacatactcttggggccatgagttcaattcccagaagaggatcatgatgg

SEQ ID NO: 254731 - DNA, 120 bp, Artificial Sequence
  ENSG00000124203_86 (sequence is synthesized)
tggggggaggaaggatgtggcgaggggccgtgcaggagcccagggggcttgtctcatggacgctcttgatcgaattcctctgaggccccagaggtgctccttcatccccagcttgcttgt

SEQ ID NO: 254732 - DNA, 120 bp, Artificial Sequence
  ENSG00000124203_87 (sequence is synthesized)
gaggctgcgttggctccccaaggccgagtttcctgctgagacccagccacacacttagccctgagtgtaccaggtggctccactcagagcgctgctccagcccctctccctggggcttcc

SEQ ID NO: 254733 - DNA, 120 bp, Artificial Sequence
  ENSG00000124203_88 (sequence is synthesized)
tgccacgtgactgcacatttggggtctggagaagggcccagggactgaactgcaaaggtgaagggtgtccctgctcctcctgaccacagcttctggactggcatgtgtgtctgatggtgc

SEQ ID NO: 254734 - DNA, 120 bp, Artificial Sequence
  ENSG00000124203_89 (sequence is synthesized)
aagaccagaggggcatggccaatgagagagttattctttctacccgtgagtctccctcggacacacaggatttctcatgtctcctcctggttttgctgctttttttttttttttctagct

SEQ ID NO: 254735 - DNA, 120 bp, Artificial Sequence
  ENSG00000124203_90 (sequence is synthesized)
ttaaaggtgagagaggactttgtgatttctttgtgcacctggagttctgggatgcaaggccagatgaagggatcttaatcattgagcctggtctgttgcctcccgagtgattctatcagg

SEQ ID NO: 254736 - DNA, 120 bp, Artificial Sequence
  ENSG00000124203_91 (sequence is synthesized)
tcaggtccccttgagatctcttgaaccaaggggcttctagcccctcctcctcacctttcagcacagccttgtaaacctcagatgtggatgaaggtgccgtcctgcctttgacttgacctg

SEQ ID NO: 254737 - DNA, 120 bp, Artificial Sequence
  ENSG00000124203_92 (sequence is synthesized)
ttgatttccaaccggggctgctggcccttcctctctagagtgagtagtgactcacacttttggggccctatgaaatggtcctccatccaaggggctttgggaagcctgtttccctggtgg

SEQ ID NO: 254738 - DNA, 120 bp, Artificial Sequence
  ENSG00000124203_93 (sequence is synthesized)
ccccaagcccagtaaccaaaagcaatcagacccagctgtccagctaatttttttaaaataggcttccttcctagtagaaatcaacaaagtctaaaatagaagggactctaataggaaatg

SEQ ID NO: 254739 - DNA, 120 bp, Artificial Sequence
  ENSG00000124203_94 (sequence is synthesized)
aagctgcagagttctgtgtggaatgcaacaggcagggacctcggcatggaaaatactaagtgcagattacatggctgacaaccatgggagcaggagaaggagtaatctccttgcttatcg

SEQ ID NO: 254740 - DNA, 120 bp, Artificial Sequence
  ENSG00000124205_0 (sequence is synthesized)
gcgcagggatgggcagcgcgctctgaaagtttatgaccgccgcagccaactcctggccggagctggagacgcagcgagcgatcggccggcctcgaacccccacagctggagggcgaggcc

SEQ ID NO: 254741 - DNA, 120 bp, Artificial Sequence
  ENSG00000124205_1 (sequence is synthesized)
agctgtacccggccccagtgccctttcgcggccacaagcggccgtcctcctggtccggtgctccggcgcctgatctaggttcatggagccggggctgtggctccttttcgggctcacagt

SEQ ID NO: 254742 - DNA, 120 bp, Artificial Sequence
  ENSG00000124205_2 (sequence is synthesized)
gacctccgccgcaggattcgtgccttgctcccagtctggggatgctggcaggcgcggcgtgtcccaggcccccactgcagccagatctgagggggactgtgaagagactgtggctggccc

SEQ ID NO: 254743 - DNA, 120 bp, Artificial Sequence
  ENSG00000124205_3 (sequence is synthesized)
tggcgaggagactgtggctggccctggcgaggggactgtggccccgacagcactgcagggtccaagccctggaagccctgggcaggagcaggcggccgagggggcccctgagcaccaccg

SEQ ID NO: 254744 - DNA, 120 bp, Artificial Sequence
  ENSG00000124205_4 (sequence is synthesized)
atccaggcgctgcacgtgcttcacctacaaggacaaggagtgtgtctactattgccacctggacatcatttggatcaacactcccgaacagacggtgccctatggactgtccaactacag

SEQ ID NO: 254745 - DNA, 120 bp, Artificial Sequence
  ENSG00000124205_5 (sequence is synthesized)
aggaagcttccggggcaagaggtctgcggggccacttccagggaatctgcagctctcacatcggccacacttgcgctgcgcttgtgtggggagatatgacaaggcctgcctgcacttttg

SEQ ID NO: 254746 - DNA, 120 bp, Artificial Sequence
  ENSG00000124205_6 (sequence is synthesized)
cacccaaactctggacgtcagcagtaattcaaggacggcagaaaaaacagacaaagaagaggaagggaaggttgaagtcaaggaccaacaaagcaagcaggctttagacctccaccatcc

SEQ ID NO: 254747 - DNA, 120 bp, Artificial Sequence
  ENSG00000124205_7 (sequence is synthesized)
aaagctcatgcccggcagtggactcgccctcgctccatctacctgcccccgctgcctctttcaggaaggagccccttaggaggacaggcctgcagcatcctggtctcgggaggcttctgt

SEQ ID NO: 254748 - DNA, 120 bp, Artificial Sequence
  ENSG00000124205_8 (sequence is synthesized)
cattgctcacacacagttcagatttccacctctttatagacaagaagtgaatttgcctggggcagaacacccacccaaagagtccccacttaacaataccccccccccacggcaagaatg

SEQ ID NO: 254749 - DNA, 120 bp, Artificial Sequence
  ENSG00000124205_9 (sequence is synthesized)
cccaaatccgaatgaccccagttttcctaatgagtaaaatgatcccagatgtgccccagagcatgacgcctgcagctccggtttcatgcaggaaattggttttggagagttttggcaagt

SEQ ID NO: 254750 - DNA, 120 bp, Artificial Sequence
  ENSG00000124205_10 (sequence is synthesized)
ctccaagctaactctttgcaaatgtaaacacatgtccatcttgtaataaatgcaaaatgcccgtgcagcagaagcatgcgactttcatatccttgcctagaataggctgcatggtgtatg

SEQ ID NO: 254751 - DNA, 120 bp, Artificial Sequence
  ENSG00000124205_11 (sequence is synthesized)
tcagtgagggccacgaggcgtcggctttagacacagatcatagctctacaggagtttatgaatttgaagcttatgggattttggcagagaaattttcagctgtgcttgatacccaccaaa

SEQ ID NO: 254752 - DNA, 120 bp, Artificial Sequence
  ENSG00000124205_12 (sequence is synthesized)
agaatgtatctcgaaagaatgaaggaagaagaaaaaaggatccttgatgtttgtgacaagaaaatgagaaagttagtatctgcaatacagagcttgttcctgttcagtgactgaccctct

SEQ ID NO: 254753 - DNA, 120 bp, Artificial Sequence
  ENSG00000124205_13 (sequence is synthesized)
gtattctgtatagacaccaggccgatacacagtggagttcccaggccttgtttgcaggaagccgactgtaaagacagccccagctcaaggctattaggttgaatatttgctttcatgagt

SEQ ID NO: 254754 - DNA, 120 bp, Artificial Sequence
  ENSG00000124205_14 (sequence is synthesized)
aaatgtggatctttggggaatggcttcaaaataagtcacgaacacaaattctttgtaaattatgtaaattcctgtttatataaattggcaacaacttataccgtctgacagttcaaaatc

SEQ ID NO: 254755 - DNA, 120 bp, Artificial Sequence
  ENSG00000124205_15 (sequence is synthesized)
tctttcagctgcgctcttcccaccgagccgagcttactgtgagtgtggagatgttatcccaccatgtaaagtcgcctgcgcaggggagggctgcccatctccccaacccagtcacagaga

SEQ ID NO: 254756 - DNA, 120 bp, Artificial Sequence
  ENSG00000124205_16 (sequence is synthesized)
gataggaaacggcatttgagtgggtgtccagggccccgtagagagacatttaagatggtgtatgacagagcattggccttgaccaaatgttaaatcctctgtgtgtatttcataagttat

SEQ ID NO: 254757 - DNA, 120 bp, Artificial Sequence
  ENSG00000124205_17 (sequence is synthesized)
tacaggtataaaagtgatgacctatcatgaggaaatgaaagtggctgatttgctggtaggattttgtacagtttagagaagcgattatttattgtgaaactgttctccactccaactcct

SEQ ID NO: 254758 - DNA, 120 bp, Artificial Sequence
  ENSG00000124205_18 (sequence is synthesized)
ttatgtggatctgttcaaagtagtcactgtatatacgtatagagaggtagataggtaggtagattttaaattgcattctgaatacaaactcatactccttagagcttgaattacattttt

SEQ ID NO: 254759 - DNA, 120 bp, Artificial Sequence
  ENSG00000124205_19 (sequence is synthesized)
aaaatgcatatgtgctgtttggcaccgtggcaagatggtatcagagagaaacccatcaattgctcaaatactcagaaagtactgtcaaaagcctaataaaaaacctaaagtttgctctga

SEQ ID NO: 254760 - DNA, 120 bp, Artificial Sequence
  ENSG00000124205_20 (sequence is synthesized)
cctggccagctccccccagcgcctgggaggcgacccccagtgcgcccgggttcaaaggcccggcgaggcagttccagcccctctggggggcggggaggcgacgggggtggtgcagaagcc

SEQ ID NO: 254761 - DNA, 120 bp, Artificial Sequence
  ENSG00000124205_21 (sequence is synthesized)
aagaggaagggaaggtgacctgaaggaaggctgggaggagccatagggatgagtgagggaaagggatttcaggttgaagtcaaggaccaacaaagcaagcaggctttagacctccaccat

SEQ ID NO: 254762 - DNA, 120 bp, Artificial Sequence
  ENSG00000124205_22 (sequence is synthesized)
cggggagcaaactcttgcctgggctctgcactcgtgaagacgcctgggggagggctggggagcagaagcggcgcgcaacgactacccgcacgggctccgggagttgcagcccgcgcactg

SEQ ID NO: 254763 - DNA, 120 bp, Artificial Sequence
  ENSG00000124205_23 (sequence is synthesized)
gctggagacctgctgcctgggccgacttggtcaatttttcatgaaactggggacttttcagaaagtttgcgaactattcagaggctgtgccaaaccctggcaaagtttgcagaaagtatg

SEQ ID NO: 254764 - DNA, 120 bp, Artificial Sequence
  ENSG00000124205_24 (sequence is synthesized)
caaaatgcatgcaagttttcaacgggtgcagatagcttgcaagcttttcacagagtgtgcagatagcttggaaacttttcagaaactgcgcagagctttggaaactttgcagacattttg

SEQ ID NO: 254765 - DNA, 120 bp, Artificial Sequence
  ENSG00000124207_0 (sequence is synthesized)
gtcgcgccattttgccggggtttgaatgtgaggcggagcggcggcaggagcgggtagtgccagctacggtccgcggctggggttccctcctccgtttctgtatccccacgagatcctata

SEQ ID NO: 254766 - DNA, 120 bp, Artificial Sequence
  ENSG00000124207_1 (sequence is synthesized)
gcaatggaactcagcgatgcaaatctgcaaacactaacagaatatttaaagaaaacacttgatcctgatcctgccatccgacgtccagctgagaaatttcttgaatctgttgaaggaaat

SEQ ID NO: 254767 - DNA, 120 bp, Artificial Sequence
  ENSG00000124207_2 (sequence is synthesized)
cagaattatccactgttgcttttgacattactggagaagtcccaggataatgttatcaaagtatgtgcttcagtaacattcaaaaactatattaaaaggaactggagaattgttgaagat

SEQ ID NO: 254768 - DNA, 120 bp, Artificial Sequence
  ENSG00000124207_3 (sequence is synthesized)
gaaccaaacaaaatttgtgaagccgatcgagtggccattaaagccaacatagtgcacttgatgcttagcagcccagagcaaattcagaagcagttaagtgatgcaattagcattattggc

SEQ ID NO: 254769 - DNA, 120 bp, Artificial Sequence
  ENSG00000124207_4 (sequence is synthesized)
agagaagattttccacagaaatggcctgacttgctgacagaaatggtgaatcgctttcagagtggagatttccatgttattaatggagtcctccgtacagcacattcattatttaaaaga

SEQ ID NO: 254770 - DNA, 120 bp, Artificial Sequence
  ENSG00000124207_5 (sequence is synthesized)
taccgtcatgaatttaagtcaaacgagttatggactgaaattaagcttgttctggatgcctttgctttgcctttgactaatctttttaaggccactattgaactctgcagtacccatgca

SEQ ID NO: 254771 - DNA, 120 bp, Artificial Sequence
  ENSG00000124207_6 (sequence is synthesized)
aatgatgcctctgccctgaggattctgttttcttccctgatcctgatctcaaaattgttctatagtttaaactttcaggatctccctgaattttttgaagataatatggaaacttggatg

SEQ ID NO: 254772 - DNA, 120 bp, Artificial Sequence
  ENSG00000124207_7 (sequence is synthesized)
aataattttcatactctcttaacattggataataagcttttacaaactgatgatgaagaggaagccggcttattggagctcttaaaatcccagatttgtgataatgccgcactctatgca

SEQ ID NO: 254773 - DNA, 120 bp, Artificial Sequence
  ENSG00000124207_8 (sequence is synthesized)
caaaagtacgatgaagaattccagcgatacctgcctcgttttgttacagccatctggaatttactagttacaacgggtcaagaggttaaatatgatttgttggtaagtaatgcaattcaa

SEQ ID NO: 254774 - DNA, 120 bp, Artificial Sequence
  ENSG00000124207_9 (sequence is synthesized)
tttctggcttcagtttgtgagagacctcattataagaatctatttgaggaccagaacacgctgacaagtatctgtgaaaaggttattgtgcctaacatggaatttagagctgctgatgaa

SEQ ID NO: 254775 - DNA, 120 bp, Artificial Sequence
  ENSG00000124207_10 (sequence is synthesized)
gaagcatttgaagataattctgaggagtacataaggagagatttggaaggatctgatattgatactagacgcagggctgcttgtgatctggtacgaggattatgcaagttttttgaggga

SEQ ID NO: 254776 - DNA, 120 bp, Artificial Sequence
  ENSG00000124207_11 (sequence is synthesized)
cctgtgacaggaatcttctctggttatgttaattccatgctgcaggaatacgcaaaaaatccatctgtcaactggaaacacaaagatgcagccatctacctagtgacatctttggcatca

SEQ ID NO: 254777 - DNA, 120 bp, Artificial Sequence
  ENSG00000124207_12 (sequence is synthesized)
aaagcccaaacacagaagcatggaattacacaagcaaatgaacttgtaaacctaactgagttctttgtgaatcacatcctccctgatttaaaatcagctaatgtgaatgaatttcctgtc

SEQ ID NO: 254778 - DNA, 120 bp, Artificial Sequence
  ENSG00000124207_13 (sequence is synthesized)
cttaaagctgacggtatcaaatatattatgatttttagaaatcaagtgccaaaagaacatcttttagtctcgattcctctcttgattaatcatcttcaagctgaaagtattgttgttcat

SEQ ID NO: 254779 - DNA, 120 bp, Artificial Sequence
  ENSG00000124207_14 (sequence is synthesized)
ctgcagaaatcgcaccgtttgttgagattctgctaacaaaccttttcaaagctctcacacttcctggctcttcagaaaatgaatatattatgaaagctatcatgagaagtttttctctcc

SEQ ID NO: 254780 - DNA, 120 bp, Artificial Sequence
  ENSG00000124207_15 (sequence is synthesized)
tacaagaagccataatcccctacatccctactctcatcactcagcttacacagaagctattagctgttagtaagaacccaagcaaacctcactttaatcactacatgtttgaagcaatat

SEQ ID NO: 254781 - DNA, 120 bp, Artificial Sequence
  ENSG00000124207_16 (sequence is synthesized)
gtttatccataagaataacttgcaaagctaaccctgctgctgttgtaaattttgaggaggctttgtttttggtgtttactgaaatcttacaaaatgatgtgcaagaatttattccatacg

SEQ ID NO: 254782 - DNA, 120 bp, Artificial Sequence
  ENSG00000124207_17 (sequence is synthesized)
tctttcaagtgatgtctttgcttctggaaacacacaaaaatgacatcccgtcttcctatatggccttatttcctcatctccttcagccagtgctttgggaaagaacaggaaatattcctg

SEQ ID NO: 254783 - DNA, 120 bp, Artificial Sequence
  ENSG00000124207_18 (sequence is synthesized)
ctctagtgaggcttcttcaagcattcttagaacgcggttcaaacacaatagcaagtgctgcagctgacaaaattcctgggttactaggtgtctttcagaagctgattgcatccaaagcaa

SEQ ID NO: 254784 - DNA, 120 bp, Artificial Sequence
  ENSG00000124207_19 (sequence is synthesized)
atgaccaccaaggtttttatcttctaaacagtataatagagcacatgcctcctgaatcagttgaccaatataggaaacaaatcttcattctgctattccagagacttcagaattccaaaa

SEQ ID NO: 254785 - DNA, 120 bp, Artificial Sequence
  ENSG00000124207_20 (sequence is synthesized)
caaccaagtttatcaagagttttttagtctttattaatttgtattgcataaaatatggggcactagcactacaagaaatatttgatggtatacaaccaaaaatgtttggaatggttttgg

SEQ ID NO: 254786 - DNA, 120 bp, Artificial Sequence
  ENSG00000124207_21 (sequence is synthesized)
aaaaaattattattcctgaaattcagaaggtatctggaaatgtagagaaaaagatctgtgcggttggcataaccaaattactaacagaatgtcccccaatgatggacactgagtatacca

SEQ ID NO: 254787 - DNA, 120 bp, Artificial Sequence
  ENSG00000124207_22 (sequence is synthesized)
aactgtggactccattattacagtctttgattggtctttttgagttacccgaagatgataccattcctgatgaggaacattttattgacatagaagatacaccaggatatcagactgcct

SEQ ID NO: 254788 - DNA, 120 bp, Artificial Sequence
  ENSG00000124207_23 (sequence is synthesized)
tctcacagttggcatttgctgggaaaaaagagcatgatcctgtaggtcaaatggtgaataaccccaaaattcacctggcacagtcacttcacaagttgtctaccgcctgtccaggaaggg

SEQ ID NO: 254789 - DNA, 120 bp, Artificial Sequence
  ENSG00000124207_24 (sequence is synthesized)
ttccatcaatggtgagcaccagcctgaatgcagaagcgctccagtatctccaagggtaccttcaggcagccagtgtgacactgctttaaactgcatttttctaatgggctaaacccagat

SEQ ID NO: 254790 - DNA, 120 bp, Artificial Sequence
  ENSG00000124207_25 (sequence is synthesized)
ggtttcctaggaaatcacaggcttctgagcacagctgcattaaaacaaaggaagttctccttttgaacttgtcacgaattccatcttgtaaaggatattaaatgttgctttaacctgaac

SEQ ID NO: 254791 - DNA, 120 bp, Artificial Sequence
  ENSG00000124207_26 (sequence is synthesized)
cttgagcaaattagttggtttgtgtgatcatacagttatgtgggtggcttctagtttgcaacttcaagggacaagtattaatagttcagtgtatggcgttggtttgtgttgagcgtttgc

SEQ ID NO: 254792 - DNA, 120 bp, Artificial Sequence
  ENSG00000124207_27 (sequence is synthesized)
acggtttggataatcttaaattttgacggacactgtggagactttctgttactaaatccttttgttttgaagctgttgctatttgtatttctcttgtcctttatattttttgtctgttta

SEQ ID NO: 254793 - DNA, 120 bp, Artificial Sequence
  ENSG00000124207_28 (sequence is synthesized)
tttacgcttttattggaaatgtgaataagtaaagaattacttgtgttacttgccaagcagtgcacatttcatagtttcaaatctgtaatcagcaataaaaatcctaaaatatgtacctaa

SEQ ID NO: 254794 - DNA, 80 bp, Artificial Sequence
  ENSG00000124209_0 (sequence is synthesized)
aggtgacgcggccggcgtcccaagatggcggcggcggcggctcccggaaggccgcggcggcgtcccggctgctaaggcgg

SEQ ID NO: 254795 - DNA, 120 bp, Artificial Sequence
  ENSG00000124209_1 (sequence is synthesized)
ggaggacgggcggcagccgcctctgcgcggaccggggctgggccgtgcggcggcagcggcgccaggggatgctcttgctgggcctggcctctcccttctcaacttagggcggcggcgggc

SEQ ID NO: 254796 - DNA, 120 bp, Artificial Sequence
  ENSG00000124209_2 (sequence is synthesized)
ccgcgcccctggctcccgggccatggcgctgagggagctcaaagtgtgtctgctcggggatacaggtgtaggtaaatcgagtattgtgtggcggtttgtggaagacagttttgatccaaa

SEQ ID NO: 254797 - DNA, 120 bp, Artificial Sequence
  ENSG00000124209_3 (sequence is synthesized)
catcaacccaacaataggggcatcttttatgaccaagactgtccagtaccaaaatgagctacataaattcctaatctgggatacagctggacaagaacgatttcgtgccttagcaccaat

SEQ ID NO: 254798 - DNA, 120 bp, Artificial Sequence
  ENSG00000124209_4 (sequence is synthesized)
gtactatcgagggtcggctgcagctataatcgtttatgatatcacaaaagaagagacattttcaacattaaagaattgggtgaaagagcttcgacagcatggcccacctaatattgtagt

SEQ ID NO: 254799 - DNA, 120 bp, Artificial Sequence
  ENSG00000124209_5 (sequence is synthesized)
tgccattgcaggaaataaatgtgatcttatcgatgtaagagaagtcatggagagagatgcaaaggactacgccgactctattcatgcaatttttgtagagaccagcgcaaaaaacgcgat

SEQ ID NO: 254800 - DNA, 120 bp, Artificial Sequence
  ENSG00000124209_6 (sequence is synthesized)
aaacataaatgaactctttatagaaattagtcgaagaattccatccactgacgccaacctgccatctggcggtaagggcttcaaactccgaagacagccttcagagccaaagcggagctg

SEQ ID NO: 254801 - DNA, 120 bp, Artificial Sequence
  ENSG00000124209_7 (sequence is synthesized)
ctgctgaccgaacctcagcctctcagacttgatgatgaagtaggtggtcctgaaagttaacaggagggctggggtccctgccaccagttttcacctagccagtcttgagtcttctccgtg

SEQ ID NO: 254802 - DNA, 120 bp, Artificial Sequence
  ENSG00000124209_8 (sequence is synthesized)
caaaaaggattcacagaaatggaccagttctgttctccaaagactgcagcaatgatatttcagtctgtgaacttctattatgtaaagaatctctagtgtacaaagggactacatcgttgg

SEQ ID NO: 254803 - DNA, 120 bp, Artificial Sequence
  ENSG00000124209_9 (sequence is synthesized)
cttttgaccttgctgaaaaggaacatataattgtatggatggtaggattaagttgttgagtagttttgtaatcaagattttatgtaacatttgtaaagggaaaattagcacttttgtggt

SEQ ID NO: 254804 - DNA, 120 bp, Artificial Sequence
  ENSG00000124209_10 (sequence is synthesized)
tcttaagggaaaagaaacagaccttgtggagattataatttccttggtttctgttaccactgttagagggagttgtatcatttaacatatagtaggatagtttaagtgtagggaggacaa

SEQ ID NO: 254805 - DNA, 120 bp, Artificial Sequence
  ENSG00000124209_11 (sequence is synthesized)
ttattgtctgaagctaaaatgggttatttataggactgatggaaatgatttcatctctgccatctctaaagcacttttcattgaacatgttagcctaggatacgtacagtaaattaacaa

SEQ ID NO: 254806 - DNA, 120 bp, Artificial Sequence
  ENSG00000124209_12 (sequence is synthesized)
tgatagcagcagatgcctagctcatcctgggtttgcttctgaccttgtcatgtgtgtgccaccaaacacgttattggcacctttttaaataagctctcatgatcaagatggtgatggtag

SEQ ID NO: 254807 - DNA, 120 bp, Artificial Sequence
  ENSG00000124209_13 (sequence is synthesized)
agaagctgcccggaataaactgaatttcatatgttctaaaatgactagcaatggtttaaaaaggaagaagagtggaagtgaagaaggtggtataaatgctgtcaatttttttttaaccca

SEQ ID NO: 254808 - DNA, 120 bp, Artificial Sequence
  ENSG00000124209_14 (sequence is synthesized)
agtattttggtggggaaaagcaagtatctattgcttagcatatgtaaagttgtagtctatatttatggggccattgcttaaagattataaattatgtaaatacattaataaattctaagt

SEQ ID NO: 254809 - DNA, 120 bp, Artificial Sequence
  ENSG00000124209_15 (sequence is synthesized)
ttcatttgacattccattgaatctcgcacccagtcttgcgtatgcctgcccagttttcagcctcttaacgggagactcaagcacattggtattgtataaaggtatagagcacttagctta

SEQ ID NO: 254810 - DNA, 120 bp, Artificial Sequence
  ENSG00000124209_16 (sequence is synthesized)
caatctttaaaggtttctctgccttcccttctacccacccgcctcccaccagatcccatctggaaatcataataaagacatatgccactttgacaaacctgactagtccttactagcctg

SEQ ID NO: 254811 - DNA, 120 bp, Artificial Sequence
  ENSG00000124209_17 (sequence is synthesized)
agggtaaaagattaagctccaacctcaagtcatttacctggtcttggtaataagtttcttttagcttgtacagcatcctcagaccaactgaggagctttccttgttaacaatttagctta

SEQ ID NO: 254812 - DNA, 120 bp, Artificial Sequence
  ENSG00000124209_18 (sequence is synthesized)
tctttctgtttcctttatttttcccctgcctctgttagtggttaacactcttttccctcagggagcctaatgaggtttttaatatcatctaaaaataaagcattgaagtgaagttggtga

SEQ ID NO: 254813 - DNA, 120 bp, Artificial Sequence
  ENSG00000124209_19 (sequence is synthesized)
aaatttgttcctggtctaatttggcacccttccaacctgagtattgtaggggaaggaaatttacaagatttaataggaaatgaaacagcttgaatttcaaactaaattgtattttcagag

SEQ ID NO: 254814 - DNA, 120 bp, Artificial Sequence
  ENSG00000124209_20 (sequence is synthesized)
ctatcctgaaactgaacagctgaaactttaaaaaataattggtattattttgtgccccccacttaatatggatagattttaatgggaaaattataattcagattaaataaaaaacaattc

SEQ ID NO: 254815 - DNA, 120 bp, Artificial Sequence
  ENSG00000124209_21 (sequence is synthesized)
ccttttccctgttgtatatcttaagcatttggaattttttttatcttctgaaatcatataaaaagaatgtcattagtaaaaattctaacttcgttttgtttaaaagacatgtggatgctc

SEQ ID NO: 254816 - DNA, 120 bp, Artificial Sequence
  ENSG00000124209_22 (sequence is synthesized)
catgcccctaggattttgcttcctccccggtgctaaattagcaagctcctagagaagccatgtgattcccagagccaggcgctttacacctaaagtagtttgactttcttctgtatacat

SEQ ID NO: 254817 - DNA, 120 bp, Artificial Sequence
  ENSG00000124209_23 (sequence is synthesized)
ccagatggatcccaggcatccgggcaccaccctggtgtgtccctagaattcccactgctgggcctctatctccatgacaacaaaataaaaacagaggttgcttgactcattaccaaagag

SEQ ID NO: 254818 - DNA, 120 bp, Artificial Sequence
  ENSG00000124209_24 (sequence is synthesized)
gcaaagcatgtgcgaccctttctgtcttattttaccaaaagatggtgcaaatctatgaccttcacattttttccaccacacccaccagtagctgttggtgattgcatggtgtctcggtgc

SEQ ID NO: 254819 - DNA, 120 bp, Artificial Sequence
  ENSG00000124209_25 (sequence is synthesized)
atggggaaaggcaaggtcttctgagctcatcttaactggtgaggcatctggatgtgtctgatcttactgtgatgttttactgtaccgagcccaatgtgggtccatctcatcagccctttg

SEQ ID NO: 254820 - DNA, 120 bp, Artificial Sequence
  ENSG00000124209_26 (sequence is synthesized)
ctgatttcatgatttctcaccctccctcccatatgtagggtgtgattctgttttattatagccacatgttttattaacagaatgagtgatatgaagcttgtacttatgcatttctcgggc

SEQ ID NO: 254821 - DNA, 120 bp, Artificial Sequence
  ENSG00000124209_27 (sequence is synthesized)
ctcttccctcattttcatcagtctgtctaagaacttgactcggcactgtttctcgtgtaatatccttctaatgcttagcaacaacaacaaaaaattgctctctcagatccataatccata

SEQ ID NO: 254822 - DNA, 120 bp, Artificial Sequence
  ENSG00000124209_28 (sequence is synthesized)
ctcagtgaaagcagggaaaaaatattttcacttattttatttgcttctaaaatgcaaagatgaatactaaagtcagaagcagtgtttcattttgaacacattttggattattaagctgac

SEQ ID NO: 254823 - DNA, 120 bp, Artificial Sequence
  ENSG00000124209_29 (sequence is synthesized)
taagcaatgatctaatacacatttcatattttctttataataatttcttatggagaagaggctatatttcaaaggaattgagacatactcccatctataaacatgtttggttttcttacg

SEQ ID NO: 254824 - DNA, 120 bp, Artificial Sequence
  ENSG00000124209_30 (sequence is synthesized)
atacagggccatttttttaaaactctcaggactgaacagaagagaaaaattattaattagctgctactgtatgttgattcttttcggagaaattgaaataagctctttgcaggcgtccaa

SEQ ID NO: 254825 - DNA, 120 bp, Artificial Sequence
  ENSG00000124209_31 (sequence is synthesized)
tcctagaaaccaatggtctccagaactctcacacaagtgtttttctgattctatgataactaattaaccatcatctggtgattaaaagaacataaagtaagattatgattaagtgtccat

SEQ ID NO: 254826 - DNA, 120 bp, Artificial Sequence
  ENSG00000124209_32 (sequence is synthesized)
cacctgcctgtcagccgtggtcagaataagttttacacgaagcaggtgaaagatttagttcttttcaaagtaacttattttcttgtgacccgtttatgatgttgtttgaagtccctgttt

SEQ ID NO: 254827 - DNA, 120 bp, Artificial Sequence
  ENSG00000124209_33 (sequence is synthesized)
cccattgtgtacgcactttctggatgtctggaaggatcgggacttttgtgtgagaggcttgagcgcctcctctatgtgggctggtgtccttcttgaagttgtcaattcctcttattctta

SEQ ID NO: 254828 - DNA, 120 bp, Artificial Sequence
  ENSG00000124209_34 (sequence is synthesized)
aatatctaaagggaaaggaaaccaactttaatttcagaacttctctttacgtcttgtatgtatttcttttctgttctcaaggaggaaaattggtctaggaagccttctaaattaaactct

SEQ ID NO: 254829 - DNA, 120 bp, Artificial Sequence
  ENSG00000124209_35 (sequence is synthesized)
gggaaatatagtaatgaaaatatcctttagctaactttcctgtaactgtcaaaccaaaatgtcagtatttttagggcattgtgttaaaataagcagtttagattccgacgacactgcact

SEQ ID NO: 254830 - DNA, 120 bp, Artificial Sequence
  ENSG00000124209_36 (sequence is synthesized)
cagcctccagctcagaaaggcatttgctcatggttacaggcatcttttagattctaagagtgagttacagaattctttttggtactttcacttattctttcagaatacatcaaggatgtg

SEQ ID NO: 254831 - DNA, 120 bp, Artificial Sequence
  ENSG00000124209_37 (sequence is synthesized)
atttatgggcccttaagagtataagatataggtgcacagtatgttacttaagtaacggatgagcccccctaaacatccacgtgtctctgcaggaacctgtgtaagtattgtgaaaaccct

SEQ ID NO: 254832 - DNA, 120 bp, Artificial Sequence
  ENSG00000124209_38 (sequence is synthesized)
tttcttccagggaaaaattattggaaattccttaactgagctatacttggtacttgctctagaacatttgggaaatgacaaactcaggctggctctcctctctaacctcactgggctata

SEQ ID NO: 254833 - DNA, 120 bp, Artificial Sequence
  ENSG00000124209_39 (sequence is synthesized)
aatgttccttctaactctgtaatgaaagttcagtgacaaactagatagtgaacctgtgaaagtcattatttacatttgctttaaagggacagttttaccgttcaacttcaagagtttttc

SEQ ID NO: 254834 - DNA, 120 bp, Artificial Sequence
  ENSG00000124209_40 (sequence is synthesized)
tacctctttaacagttaatattttttaaaggaagaaatggaatgtaccttcaggggtcaagctgttaactgtatacctgcctctagttagcttggtttatcaaaaggatttttaaatgat

SEQ ID NO: 254835 - DNA, 120 bp, Artificial Sequence
  ENSG00000124209_41 (sequence is synthesized)
tcaaggtaatgtttaggatatttgttttaactcctgctgtgctgtgatttaaaaaaaaatagtctaagaaacaaatttatccatgagataaacatcatattttatagttttagaaaaaag

SEQ ID NO: 254836 - DNA, 120 bp, Artificial Sequence
  ENSG00000124209_42 (sequence is synthesized)
ggttgggggtggaatttagcctagaacttaaagaaacaacctctgcgaatttctcttgacagcggagttgcttgtcttgacttctaataatataaatccaggcagtttgattatccgatt

SEQ ID NO: 254837 - DNA, 120 bp, Artificial Sequence
  ENSG00000124209_43 (sequence is synthesized)
tgcaagaaactttaatggaattctggggcatttgtcctgttttatgtgcaaatgaaagtctaaaaaatatgaggaagatattacatttttcaggagcctccattttttcagtctaagaga

SEQ ID NO: 254838 - DNA, 120 bp, Artificial Sequence
  ENSG00000124209_44 (sequence is synthesized)
atgataagtgagaggcctattgtgatgaagttgcattggacataatgtgggaagtgaataaatagaaccaagaatcttcatctatctctgttggtctttcaggattctcttagcatatag

SEQ ID NO: 254839 - DNA, 120 bp, Artificial Sequence
  ENSG00000124209_45 (sequence is synthesized)
gaaaatgatttaccttccagatctcgaaggacttccaatagcatagatcaggtttaatttgatggtctataccatcagaaataactaatatctgttttctttccttttagagtataatca

SEQ ID NO: 254840 - DNA, 120 bp, Artificial Sequence
  ENSG00000124209_46 (sequence is synthesized)
attatggataggccagaatatttttggcttcaaaacaaaaggattcataagcttaaaaaaacaaaaatcccaaaccttccatctatcccttttattacgttgaacattttagatagtaag

SEQ ID NO: 254841 - DNA, 120 bp, Artificial Sequence
  ENSG00000124209_47 (sequence is synthesized)
attaagatgtatcattagtatatggtgaaattaaaaccgtggtgtctaacagatttaacaaaaagtgtttaatttactgcaagttcatttttagatctgtatggtgcccagtactccaca

SEQ ID NO: 254842 - DNA, 120 bp, Artificial Sequence
  ENSG00000124209_48 (sequence is synthesized)
cacaaaatgcatcataattgaaacaacaaaattattttcatgagcaagaattcaagtatcaaggcctatcagccaattaaaagccgtaagatagtaatgattttttttcttttttttttt

SEQ ID NO: 254843 - DNA, 120 bp, Artificial Sequence
  ENSG00000124209_49 (sequence is synthesized)
ggattacagacgtgagccaccgcgcccaaccagtaacgatttttttaaagggcctttcttaattgacagttttaagctgtagacattaatattataacaaacaaaacatgccagttttac

SEQ ID NO: 254844 - DNA, 120 bp, Artificial Sequence
  ENSG00000124209_50 (sequence is synthesized)
aacatgccagttttactgattccgctttttgcttgattcaggaacttttcattgtttggggaagcttttgaatgcagtactgtggaggaaatcatccttaaaatagcatttcacacatag

SEQ ID NO: 254845 - DNA, 120 bp, Artificial Sequence
  ENSG00000124209_51 (sequence is synthesized)
ggccaaaattgaaattgtcaaggaaacccctcagcatctaacgtcatcttgtagaagagctgggcatacctcttcctctaggccaattcagaggccactggccacccaagtagagtgggg

SEQ ID NO: 254846 - DNA, 120 bp, Artificial Sequence
  ENSG00000124209_52 (sequence is synthesized)
cccactggcatgagtagtccctgtgcccatgcccatggtggtgcttgactttgctttggggcttaatcctagtatcatttggccattaatttttaattaagtttatacttgaataatcag

SEQ ID NO: 254847 - DNA, 120 bp, Artificial Sequence
  ENSG00000124209_53 (sequence is synthesized)
ttttactcctgaaaaattttgaagccagcactgactttgtttatattcacttaccttgtatatgaacttatgacattagagtttgtgaaactgtcttaacgtggctcatacacgtgatgt

SEQ ID NO: 254848 - DNA, 120 bp, Artificial Sequence
  ENSG00000124209_54 (sequence is synthesized)
gtggctcatacacgtgatgtcagagggactggtcagttctttacagggtgaattaatcggcagctggctagtcagagcaactgatgggtggcttttttttctttttttttttgagacgga

SEQ ID NO: 254849 - DNA, 120 bp, Artificial Sequence
  ENSG00000124209_55 (sequence is synthesized)
tggtggccctatttttaaaccattcgttacgctgtgtagacagagctttattgccctggaaaagattttttttttaactctcatgcagttcagtctttccatcatttcactttgtgagtc

SEQ ID NO: 254850 - DNA, 120 bp, Artificial Sequence
  ENSG00000124209_56 (sequence is synthesized)
actcacataattgtcaatcattcctctgaccttcttaagaatttacaccttaccgtctctgtgattgaagcagacttctcgctttatttcccttaggctcatttttctgtgggctctccc

SEQ ID NO: 254851 - DNA, 120 bp, Artificial Sequence
  ENSG00000124209_57 (sequence is synthesized)
ttaaagacacatggccacagacacctccttcgcatatgtaatctgccttcccctgcggccttccgtggtcacagcaacagggactgctcaccccctccagctggggcttttctaacaagc

SEQ ID NO: 254852 - DNA, 120 bp, Artificial Sequence
  ENSG00000124209_58 (sequence is synthesized)
acagtcagaaatgcgcaggcctggggttggggatgaacagaagttgattagtgggcacagaaatacagttagatagaaggaatagttccagcattcgatattacagtagggagactgcat

SEQ ID NO: 254853 - DNA, 120 bp, Artificial Sequence
  ENSG00000124209_59 (sequence is synthesized)
ttaacaataattgattgtatatttgaaaacagctagaagaataagaatattcccaacacaaagaaaagataagcgaggtgaaggaaatcccagttaccctcattcagtccattacacatt

SEQ ID NO: 254854 - DNA, 120 bp, Artificial Sequence
  ENSG00000124209_60 (sequence is synthesized)
cgatacaggtatcaaaatatcataggcacctcaaagacatgtacaactcttaatttaacatttttgaaagaaaaaaaaaccggccagagcattaaaacaaataaaataagaaacacagag

SEQ ID NO: 254855 - DNA, 120 bp, Artificial Sequence
  ENSG00000124209_61 (sequence is synthesized)
gccagtgttaggtgaagaactccgctgcttcagaaagagaatagcagcgctcgcttaccgtgggaacacggccagttaacaaaatgggttttggttttttgttttgttttgttttaccat

SEQ ID NO: 254856 - DNA, 120 bp, Artificial Sequence
  ENSG00000124209_62 (sequence is synthesized)
tggtaataagatagttaacataagtggtcagaacttcgctgaatttgtaataaagcatttgttaagcgtgtaaaagtccaaattaaaagtcttgaagaaaaacagctatggcaatgagcc

SEQ ID NO: 254857 - DNA, 120 bp, Artificial Sequence
  ENSG00000124209_63 (sequence is synthesized)
tagacatttttcaaaaaaaaaagctaagccgtcctaccagcaatctctctttctcctaagaatgtcatgccttctcaagacctgatgaaaggaataagatatttgtgcctttttataaaa

SEQ ID NO: 254858 - DNA, 120 bp, Artificial Sequence
  ENSG00000124209_64 (sequence is synthesized)
gcatctattacgaaagtaaaattcagttgcttacagttttggccgctttgtagcactattataaacagcccaaatttatggccttggacttactgcatgacacatggcctggttacctgt

SEQ ID NO: 254859 - DNA, 120 bp, Artificial Sequence
  ENSG00000124209_65 (sequence is synthesized)
catggaatgctgcagtggtggtttgccaagcttctgtggatgtttgaagactttatttttgcagtcttaaccttgggctggacctaagtgtatgtaaaccatatgatgcctgtattgttt

SEQ ID NO: 254860 - DNA, 120 bp, Artificial Sequence
  ENSG00000124209_66 (sequence is synthesized)
atagatgctgacaaaagaaaactagaccttttgttttttgttgtaagatttttgttttcatgcctatgctcatagtagatagtttgcaaatgaaagttgatttgccatacttttaaataa

SEQ ID NO: 254861 - DNA, 120 bp, Artificial Sequence
  ENSG00000124209_67 (sequence is synthesized)
tattgttttagcttgaatattctataatacacttttatagagtataacatgctaaatcactgttttgttgtaagaagggtgtaaacattttgttaataaaatgctatgtttacaaatata

SEQ ID NO: 254862 - DNA, 120 bp, Artificial Sequence
  ENSG00000124209_68 (sequence is synthesized)
gacaggagaggagcaccacctgatgagcacacactccagccagttgttgctgggcgtgagcacatgtccagggttgccaaagcgcagtgctgaggaaagccacacacctgacagctaccc

SEQ ID NO: 254863 - DNA, 120 bp, Artificial Sequence
  ENSG00000124209_69 (sequence is synthesized)
acaaattgtttgaaatgctgggaggatcacacaagacacgtcttgtaagcctgtctgggtcagggactgcccgtttatcctgggcagtgcattgaaggtccagaatgtgccatccacagc

SEQ ID NO: 254864 - DNA, 120 bp, Artificial Sequence
  ENSG00000124209_70 (sequence is synthesized)
caggctctattttcacctcctcccaccagtctgtcctctagtacaaactgcgtgctgttctccagcatgccatagtttcacaccctcatgcccttccacaactctattcagccttcagaa

SEQ ID NO: 254865 - DNA, 120 bp, Artificial Sequence
  ENSG00000124209_71 (sequence is synthesized)
ccaacctccaatgtcacctaaagggggctttcctgccatccctgctctcggacaagtaaccacatcgccacactgccgtgttgctctagacccatatctggaggcctccctgggttcctc

SEQ ID NO: 254866 - DNA, 120 bp, Artificial Sequence
  ENSG00000124212_0 (sequence is synthesized)
gccagccccgccagccccgcgatggcttgggccgcgctcctcggcctcctggccgcactgttgctgctgctgctactgagccgccgccgcacgcggcgacctggtgagcctcccctggac

SEQ ID NO: 254867 - DNA, 120 bp, Artificial Sequence
  ENSG00000124212_1 (sequence is synthesized)
ctgggcagcatcccctggttggggtatgccttggactttggaaaagatgctgccagcttcctcacgaggatgaaggagaagcacggtgacatctttactatactggttgggggcaggtat

SEQ ID NO: 254868 - DNA, 120 bp, Artificial Sequence
  ENSG00000124212_2 (sequence is synthesized)
gtcaccgttctcctggacccacactcctacgacgcggtggtgtgggagcctcgcaccaggctcgacttccatgcctatgccatcttcctcatggagaggatttttgatgtgcagcttcca

SEQ ID NO: 254869 - DNA, 120 bp, Artificial Sequence
  ENSG00000124212_3 (sequence is synthesized)
cattacagccccagtgatgaaaaggccaggatgaaactgactcttctccacagagagctccaggcactcacagaagccatgtataccaacctccatgcagtgctgttgggcgatgctaca

SEQ ID NO: 254870 - DNA, 120 bp, Artificial Sequence
  ENSG00000124212_4 (sequence is synthesized)
gaagcaggcagtggctggcacgagatgggtctcctcgacttctcctacagcttcctgctcagagccggctacctgactctttacggaattgaggcgctgccacgcacccatgaaagccag

SEQ ID NO: 254871 - DNA, 120 bp, Artificial Sequence
  ENSG00000124212_5 (sequence is synthesized)
gcccaggaccgcgtccactcagctgatgtcttccacacctttcgccagctcgaccggctgctccccaaactggcccgtggctccctgtcagtgggggacaaggaccacatgtgcagtgtc

SEQ ID NO: 254872 - DNA, 120 bp, Artificial Sequence
  ENSG00000124212_6 (sequence is synthesized)
aaaagtcgcctgtggaagctgctatccccagccaggctggccaggcgggcccaccggagcaaatggctggagagttacctgctgcacctggaggagatgggtgtgtcagaggagatgcag

SEQ ID NO: 254873 - DNA, 120 bp, Artificial Sequence
  ENSG00000124212_7 (sequence is synthesized)
gcacgggccctggtgctgcagctgtgggccacacaggggaatatgggtcccgctgccttctggctcctgctcttccttctcaagaatcctgaagccctggctgctgtccgcggagagctc

SEQ ID NO: 254874 - DNA, 120 bp, Artificial Sequence
  ENSG00000124212_8 (sequence is synthesized)
gagagtatcctttggcaagcggagcagcctgtctcgcagacgaccactctcccacagaaggttctagacagcacacctgtgcttgatagcgtgctgagtgagagcctcaggcttacagct

SEQ ID NO: 254875 - DNA, 120 bp, Artificial Sequence
  ENSG00000124212_9 (sequence is synthesized)
gcccccttcatcacccgcgaggttgtggtggacctggccatgcccatggcagacgggcgagaattcaacctgcgacgtggtgaccgcctcctcctcttccccttcctgagcccccagaga

SEQ ID NO: 254876 - DNA, 120 bp, Artificial Sequence
  ENSG00000124212_10 (sequence is synthesized)
gacccagaaatctacacagacccagaggtatttaaatacaaccgattcctgaaccctgacggatcagagaagaaagacttttacaaggatgggaaacggctgaagaattacaacatgccc

SEQ ID NO: 254877 - DNA, 120 bp, Artificial Sequence
  ENSG00000124212_11 (sequence is synthesized)
tggggggcggggcacaatcactgcctggggaggagttatgcggtcaacagcatcaaacaatttgtgttccttgtgctggtgcacttggacttggagctgatcaacgcagatgtggagatc

SEQ ID NO: 254878 - DNA, 120 bp, Artificial Sequence
  ENSG00000124212_12 (sequence is synthesized)
cctgagtttgacctcagcaggtacggcttcggtctgatgcagccggaacacgacgtgcccgtccgctaccgcatccgcccatgacacagggagcagatggatccacgtgctcgcctctgc

SEQ ID NO: 254879 - DNA, 120 bp, Artificial Sequence
  ENSG00000124212_13 (sequence is synthesized)
ccagcctgccccagcctgccccagcctcccagctttctgtgtgcacagttggcccgggtgcaggtgctagcattaccacttccctgcttttctcccagaaggctgggtccaggggaggga

SEQ ID NO: 254880 - DNA, 120 bp, Artificial Sequence
  ENSG00000124212_14 (sequence is synthesized)
aaagctaagagggtgaacaaagaaaagacattgaaagctctatggattatccactgcaaagttttctttccaaaatcaggctttgtctgctcccaattcacctcgttactctcacctcgt

SEQ ID NO: 254881 - DNA, 120 bp, Artificial Sequence
  ENSG00000124212_15 (sequence is synthesized)
gatatccacaaatgctattcagataaggcagaactaggagtcttcactgctctgcccccaactcccggaggtgtcaccttcctagttcttatgagctagcatggcccgggccttatccag

SEQ ID NO: 254882 - DNA, 120 bp, Artificial Sequence
  ENSG00000124212_16 (sequence is synthesized)
tcaaagcggatgctggccacagaaaggccactcaggatgtcctttgtgtccattgatgtcattcagcagtcagtcccccaataatccttaaactagctaaaaccaaaggagtcccttaga

SEQ ID NO: 254883 - DNA, 120 bp, Artificial Sequence
  ENSG00000124212_17 (sequence is synthesized)
agatctgcttccctggggccccatttgccagattgccccattgctcacactacttgagaaaatgcaggagagcttcccccaaggctgatgcattcccggtgcagaacaggggcaccctcc

SEQ ID NO: 254884 - DNA, 120 bp, Artificial Sequence
  ENSG00000124212_18 (sequence is synthesized)
aaacactgggctctgaggagtggagttctctgttctagagtgacaggcaccagatgggatgggctttctcagtgtcagcactcaggtagggagctaaggaagacacagcccagacaagat

SEQ ID NO: 254885 - DNA, 120 bp, Artificial Sequence
  ENSG00000124212_19 (sequence is synthesized)
ggctggaaggagccagccaggactccttagactgatcaagccaaaaaagaaggtgccgatttcatgcattctagtgcagaagccccaactgtgatcacgatccagtctgcagacgtgttt

SEQ ID NO: 254886 - DNA, 120 bp, Artificial Sequence
  ENSG00000124212_20 (sequence is synthesized)
tgtttggacttcacttaaaaaaatgccttagttgttatcatctttgggagagttcattcaaaatgtccagcttctcttgaaaacttggtatatctggccacactgggctcacattcccaa

SEQ ID NO: 254887 - DNA, 120 bp, Artificial Sequence
  ENSG00000124212_21 (sequence is synthesized)
gggtaactcttggccagagctgagtggcagccgcctcccttatgcaggacatgtgctctcggcttcaccagggttctgaccgggtctgcttctgcattcacagcgcctcctggacctgaa

SEQ ID NO: 254888 - DNA, 120 bp, Artificial Sequence
  ENSG00000124212_22 (sequence is synthesized)
ggcatctgagtgtgagaccctgttctaactcttagaagtgacattgtaagaggtggtggggaccagctaattggtccaacccagcctgagtgcaccaccctttgaacaaatgtatcagtg

SEQ ID NO: 254889 - DNA, 120 bp, Artificial Sequence
  ENSG00000124212_23 (sequence is synthesized)
taaataaataattaattaaaataaaaaacagcttaaagagaaaaatggcctgcaaaccttttttatgatgctatttttattaatataaagtcctgtttattgagaccctttaaatgcctg

SEQ ID NO: 254890 - DNA, 120 bp, Artificial Sequence
  ENSG00000124212_24 (sequence is synthesized)
cgagagaccctacagacagtatgtctactcctcacagcatctctatgaagagaaggagggttgtgcccacttcatagatgagaaaactgagaggtgaggtgacttgcctggggccacata

SEQ ID NO: 254891 - DNA, 120 bp, Artificial Sequence
  ENSG00000124212_25 (sequence is synthesized)
gctcataagctgtagaactctgcaggcagatttactgtcccaggagcaaatgctggatgagcaactcctgttctttgggctcaaggggactggtgatgggacaattcttctcgacttcag

SEQ ID NO: 254892 - DNA, 120 bp, Artificial Sequence
  ENSG00000124212_26 (sequence is synthesized)
gagctgacagagccagaggcacctaaacttgggtacatcttgtaagacacataatgaggtccctctagctttagctggagggagataaaagaaccccagacctctgaatgtcccagaggc

SEQ ID NO: 254893 - DNA, 120 bp, Artificial Sequence
  ENSG00000124212_27 (sequence is synthesized)
tagtctcttctcagagcagcactggggtttgggggcttccctgggcctcagcctccaggcacccccaggattcccagagagacgctgtgattggcaggaggcaggatatccccagggaaa

SEQ ID NO: 254894 - DNA, 120 bp, Artificial Sequence
  ENSG00000124212_28 (sequence is synthesized)
cccatcttcacgcctgggtgacccccactgccgcctccttcttaactctgcaggaaatcagagctggcagcctccagtgggaggacagagccggtttccgtggcaaccctcagctgcctc

SEQ ID NO: 254895 - DNA, 120 bp, Artificial Sequence
  ENSG00000124212_29 (sequence is synthesized)
atcgtggctgggaagggaaggaagcaagccggcagaaatagctatggaaggtcttgcgcaggctgcaaccctggtgtgctgggcgaaaacccttatgactccccccttccaaatcaggct

SEQ ID NO: 254896 - DNA, 120 bp, Artificial Sequence
  ENSG00000124212_30 (sequence is synthesized)
gggttgtcactgagactagattctcacctgccttcaaagaagggccaattccctttaaaggtcgcacctccttggaaccacagtcattagtgaattacactcaaggaaaagatgtgctcc

SEQ ID NO: 254897 - DNA, 120 bp, Artificial Sequence
  ENSG00000124212_31 (sequence is synthesized)
caccaggcagctccagctgttacctgagatactgaagtgcagctcaggagacgattatttaaacctgcccttgttttaatcgttatttttctctttaaaaaaaatagaagctataaagaa

SEQ ID NO: 254898 - DNA, 120 bp, Artificial Sequence
  ENSG00000124212_32 (sequence is synthesized)
aagagggagagatgagtgggttagctacctgctatgcgctagttaggaagttacctggatgccattgtatttcttcatcccttgcttaagaatcaaaattactggacatatgttaggaat

SEQ ID NO: 254899 - DNA, 89 bp, Artificial Sequence
  ENSG00000124212_33 (sequence is synthesized)
cttgcttaagaatcaaaattactggacatatgttaggaatactctttctttctttctttctttttaagctcagtggcaagaatgaaata

SEQ ID NO: 254900 - DNA, 120 bp, Artificial Sequence
  ENSG00000124212_34 (sequence is synthesized)
atactcttaagttgatctaatgaagtgtttccttaccattgtgattattgttactattatttgctatattttaatattgttgtttaccaaatattctcctttaaacagactcgcttttta

SEQ ID NO: 254901 - DNA, 120 bp, Artificial Sequence
  ENSG00000124212_35 (sequence is synthesized)
aggcatgagccaccatgcccggcctaaactttgtttttaaaatgaactttttttccccccaattgctgccaatagtggataacatgtatcactcactgccaaaaatagaaagtgaccatg

SEQ ID NO: 254902 - DNA, 120 bp, Artificial Sequence
  ENSG00000124212_36 (sequence is synthesized)
tgtatcactcactgccaaaaatagaaagtgaccatgaaaaataaattcgctggggaagggggctccatgctggtgtggccaaggctgagagctctctcttctctgttacaaaacgagata

SEQ ID NO: 254903 - DNA, 120 bp, Artificial Sequence
  ENSG00000124212_37 (sequence is synthesized)
agcaagtgttagaattgccttaaggccacactggcatctccctgaccttctccagggacagaagcaggagtaagtttctcatcccatgggcgaccagggccatctcctcccaccagtggc

SEQ ID NO: 254904 - DNA, 120 bp, Artificial Sequence
  ENSG00000124212_38 (sequence is synthesized)
ccccactcacagggagctggcaatgccctacctgcctgttctccagatggagaaacaggctctgagatttcacaggtcttgcccaaagtcattgattttgatgattaaaaagaataaaca

SEQ ID NO: 254905 - DNA, 120 bp, Artificial Sequence
  ENSG00000124212_39 (sequence is synthesized)
cagtgtttcctgagtagcagtgattgttatgccttgctattttaataaagattctattttcgtataacattgtcaagtggaaacatgctgaaatctattaaaccatctttgtttgtggaa

SEQ ID NO: 254906 - DNA, 120 bp, Artificial Sequence
  ENSG00000124214_0 (sequence is synthesized)
cgcctgagcggctcttcagcgtttgcgccggcggctgccgcgtctctctcggctcccgcttcctttgaccgcctcccccccccggcccggcggcgcccgcctcctccacggccactccgc

SEQ ID NO: 254907 - DNA, 120 bp, Artificial Sequence
  ENSG00000124214_1 (sequence is synthesized)
ctcctccacggccactccgcctcttccctcccttcgtcccttcttcctctcccttttttccttcttccttcccctcctcgccgccaccgcccaggaccgccggccgggggacgagctcgg

SEQ ID NO: 254908 - DNA, 120 bp, Artificial Sequence
  ENSG00000124214_2 (sequence is synthesized)
agcagcagccagagtttattaaccacttaacctctcagaactgaacaaagacaacattgttcctggaacgccctctttttaaaaaaggtagaactttagacttcatagcactgaattaac

SEQ ID NO: 254909 - DNA, 120 bp, Artificial Sequence
  ENSG00000124214_3 (sequence is synthesized)
ctgcactgaaagctgtttacctgcatttgttcacttttgttgaaagtgaccatgtctcaagttcaagtgcaagttcagaacccatctgctgctctctcagggagccaaatactgaacaag

SEQ ID NO: 254910 - DNA, 120 bp, Artificial Sequence
  ENSG00000124214_4 (sequence is synthesized)
aaccagtctcttctctcacagcctttgatgagtattccttctactactagctctctgccctctgaaaatgcaggtagacccattcaaaactctgctttaccctctgcatctattacatcc

SEQ ID NO: 254911 - DNA, 120 bp, Artificial Sequence
  ENSG00000124214_5 (sequence is synthesized)
accagtgcagctgcagaaagcataacccctactgtagaactaaatgcactgtgcatgaaacttggaaaaaaaccaatgtataagcctgttgacccttactctcggatgcagtccacctat

SEQ ID NO: 254912 - DNA, 120 bp, Artificial Sequence
  ENSG00000124214_6 (sequence is synthesized)
aactacaacatgagaggaggtgcttatcccccgaggtacttttacccatttccagttccacctttactttatcaagtggaactttctgtgggaggacagcaatttaatggcaaaggaaag

SEQ ID NO: 254913 - DNA, 120 bp, Artificial Sequence
  ENSG00000124214_7 (sequence is synthesized)
acaagacaggctgcgaaacacgatgctgctgccaaagcgttgaggatcctgcagaatgagcccctgccagagaggctggaggtgaatggaagagaatccgaagaagaaaatctcaataaa

SEQ ID NO: 254914 - DNA, 120 bp, Artificial Sequence
  ENSG00000124214_8 (sequence is synthesized)
tctgaaataagtcaagtgtttgagattgcacttaaacggaacttgcctgtgaatttcgaggtggcccgggagagtggcccaccccacatgaagaactttgtgaccaaggtttcggttggg

SEQ ID NO: 254915 - DNA, 120 bp, Artificial Sequence
  ENSG00000124214_9 (sequence is synthesized)
gagtttgtgggggaaggtgaagggaaaagcaagaagatttcaaagaaaaatgccgccatagctgttcttgaggagctgaagaagttaccgcccctgcctgcagttgaacgagtaaagcct

SEQ ID NO: 254916 - DNA, 120 bp, Artificial Sequence
  ENSG00000124214_10 (sequence is synthesized)
agaatcaaaaagaaaacaaaacccatagtcaagccacagacaagcccagaatatggccaggggatcaatccgattagccgactggcccagatccagcaggcaaaaaaggagaaggagcca

SEQ ID NO: 254917 - DNA, 120 bp, Artificial Sequence
  ENSG00000124214_11 (sequence is synthesized)
gagtacacgctcctcacagagcgaggcctcccgcgccgcagggagtttgtgatgcaggtgaaggttggaaaccacactgcagaaggaacgggcaccaacaagaaggtggccaagcgcaat

SEQ ID NO: 254918 - DNA, 120 bp, Artificial Sequence
  ENSG00000124214_12 (sequence is synthesized)
gcagccgagaacatgctggagatccttggtttcaaagtcccgcaggcgcagcccaccaaacccgcactcaagtcagaggagaagacacccataaagaaaccaggggatggaagaaaagta

SEQ ID NO: 254919 - DNA, 120 bp, Artificial Sequence
  ENSG00000124214_13 (sequence is synthesized)
accttttttgaacctggctctggggatgaaaatgggactagtaataaagaggatgagttcaggatgccttatctaagtcatcagcagctgcctgctggaattcttcccatggtgcccgag

SEQ ID NO: 254920 - DNA, 120 bp, Artificial Sequence
  ENSG00000124214_14 (sequence is synthesized)
gtcgcccaggctgtaggagttagtcaaggacatcacaccaaagattttaccagggcagctccgaatcctgccaaggccacggtaactgccatgatagcccgagagttgttgtatgggggc

SEQ ID NO: 254921 - DNA, 120 bp, Artificial Sequence
  ENSG00000124214_15 (sequence is synthesized)
caactggactatctttccagagtccagggattccaggttgaatacaaagacttccccaaaaacaacaagaacgaatttgtatctcttatcaattgctcctctcagccacctctgatcagc

SEQ ID NO: 254922 - DNA, 120 bp, Artificial Sequence
  ENSG00000124214_16 (sequence is synthesized)
catggtatcggcaaggatgtggagtcctgccatgatatggctgcgctgaacatcttaaagttgctgtctgagttggaccaacaaagtacagagatgccaagaacaggaaacggaccaatg

SEQ ID NO: 254923 - DNA, 120 bp, Artificial Sequence
  ENSG00000124214_17 (sequence is synthesized)
tctgtgtgtgggaggtgctgaaccttttctggccatgaaccattataaaatcccaacatatatactgaaaatactgaaactgctttgaaaatttggaatttctgatacctccagtgggcc

SEQ ID NO: 254924 - DNA, 120 bp, Artificial Sequence
  ENSG00000124214_18 (sequence is synthesized)
gagagacacggtgggtaaaggatgtgggcagcagcagggaagacaacagaaacacaaggaggcggctgtggccgggctggactgtgctggggtttgttgtgatggccactcggtgacctg

SEQ ID NO: 254925 - DNA, 120 bp, Artificial Sequence
  ENSG00000124214_19 (sequence is synthesized)
gcggtccctacgcaatagcagctgcctgtggggaagaagggctgcccagccagctggttctcccgggacaccagcagatccacaccctgggcacctccgtgtttggtcttttttttcccc

SEQ ID NO: 254926 - DNA, 120 bp, Artificial Sequence
  ENSG00000124214_20 (sequence is synthesized)
tgtgtgaaagaagaaacggcacgaccccttctcaagctggctcactcagacacattgggacaaaccctggacagccatgccagagagaggcctttgaccggccccagagctaaaagcacc

SEQ ID NO: 254927 - DNA, 120 bp, Artificial Sequence
  ENSG00000124214_21 (sequence is synthesized)
agagaaaatcaaatgcttcctactcagcgtgacccaacttttctagtgtgccacggccccaccacctcctgcagtacccacaccatcaccactgctttctcttccaacagtgatctgtat

SEQ ID NO: 254928 - DNA, 120 bp, Artificial Sequence
  ENSG00000124214_22 (sequence is synthesized)
tcttagtttcattattttcttttgattgatatgacactatataaaattttcatttgagaatttctcaattgtatctagttaaatagcacagtttggaaacttgtctgagactgactttat

SEQ ID NO: 254929 - DNA, 120 bp, Artificial Sequence
  ENSG00000124214_23 (sequence is synthesized)
caataatctaaccgacaaagatcatatccatgtgtatgtggttagacatttttatttcattgactaacccaggacagtttcagtgatgcaaattgtgtgccctctggttcagctgaaaca

SEQ ID NO: 254930 - DNA, 120 bp, Artificial Sequence
  ENSG00000124214_24 (sequence is synthesized)
gtcctggactttcaaaaaccttgaataagtctcccacagttgtataaattggacaatttaggaattttaaactttagatgatcatttggttccatttttatttcatttttatttttgtta

SEQ ID NO: 254931 - DNA, 120 bp, Artificial Sequence
  ENSG00000124214_25 (sequence is synthesized)
atgcaaacaggacttaaatgaactttgatctctgttttaaagattattaaaaaacattgtgtatctatacatatggctcttgaggacttagctttcactacactacaggatatgatctcc

SEQ ID NO: 254932 - DNA, 120 bp, Artificial Sequence
  ENSG00000124214_26 (sequence is synthesized)
atgtagtccatataaacctgcagagtgattttccagagtgctcgatactgttaattacatctccattagggctgaaaagaatgacctacgtttctgtatacagctgtgttgcttttgatg

SEQ ID NO: 254933 - DNA, 120 bp, Artificial Sequence
  ENSG00000124214_27 (sequence is synthesized)
ttgtgttactgtacacagaagtgtgtgcactgaggctctgcgtgtggtccgtatggaaagcctggtagccctgcgagttaagtactgcttccattcattgtttacgctggaatttttctc

SEQ ID NO: 254934 - DNA, 120 bp, Artificial Sequence
  ENSG00000124214_28 (sequence is synthesized)
cccatggaatgtaagtaaaacttaagtgtttgtcatcaataaatggtaatactaaatttttttgttaatttattctcaaatgccactactgctaggttggtcccctcccaacttgcccct

SEQ ID NO: 254935 - DNA, 120 bp, Artificial Sequence
  ENSG00000124214_29 (sequence is synthesized)
atcctttttttatttttaagaaaaaaactttgtaatgcttgtgattccatctgggcaaaagtctgaagatctgaaataactttatatcaaaccattgatcaataaacagctactaatgaa

SEQ ID NO: 254936 - DNA, 120 bp, Artificial Sequence
  ENSG00000124214_30 (sequence is synthesized)
aaataagtcaagtgtttgagattgcacttaaacggaacttgcctgtgaatttcgagtctttccctctgaaacaggtggcccgggagagtggcccaccccacatgaagaactttgtgacca

SEQ ID NO: 254937 - DNA, 120 bp, Artificial Sequence
  ENSG00000124214_31 (sequence is synthesized)
agatccttggtttcaaagtcccgcagcgcagccaccaaacccgcactcaagtcagaggagaagacacccataaagaaaccaggggatggaagaaaagtaacctttttctggctctgggga

SEQ ID NO: 254938 - DNA, 120 bp, Artificial Sequence
  ENSG00000124214_32 (sequence is synthesized)
ttaaccacttaacctctcagaactgaacaaagacaacattgttcctggaacgccctctttttaaaaaagctttttccccttcagcatttatccatgagacaatcaccaagatgacccagg

SEQ ID NO: 254939 - DNA, 120 bp, Artificial Sequence
  ENSG00000124214_33 (sequence is synthesized)
gattgtactgcgttgcaggcttctgccatttgaccttcctgcctgccagggttttgagttcatgctgttgtttgtacttaaatgagtagcctgatggactgcagaacatataataaagga

SEQ ID NO: 254940 - DNA, 120 bp, Artificial Sequence
  ENSG00000124215_0 (sequence is synthesized)
agccagtcttttgtgtacgtgcaggaccatggtggctttagtttctaccccacccttcctaggaactctacttgtggcaaacgtatgttcaagcttacaagtcagcccaccccactctga

SEQ ID NO: 254941 - DNA, 120 bp, Artificial Sequence
  ENSG00000124215_1 (sequence is synthesized)
taaatgcaagaaaagctgaaaagggaggagcaagatgggatgaaagcatctgggccaaagtgacctgaaaacctttagagaagaagctgctggctgagaaggaggtgtgtggctccggtg

SEQ ID NO: 254942 - DNA, 120 bp, Artificial Sequence
  ENSG00000124215_2 (sequence is synthesized)
agaccaccagcttggaggactggtcatcagctgcacgttctgggtctgtcttgggtattcccatatggccatgagatccgggaggcacccctcgctgctgctgcttctagtgctgctgct

SEQ ID NO: 254943 - DNA, 120 bp, Artificial Sequence
  ENSG00000124215_3 (sequence is synthesized)
gtggctgctgcaggtcagtatcattgacagtgttcaacaggaaacagatgatcttactaagcaaacaaaggaaaagatctaccagcctctacggcgatccaagagaagatgggttatcac

SEQ ID NO: 254944 - DNA, 120 bp, Artificial Sequence
  ENSG00000124215_4 (sequence is synthesized)
caccttggagctggaggaggaagacccgggaccctttcccaaactcattggtgagctgttcaataatatgtcttataacatgtcactaatgtatctaatcagtggacctggtgtggatga

SEQ ID NO: 254945 - DNA, 120 bp, Artificial Sequence
  ENSG00000124215_5 (sequence is synthesized)
atatccagagattggtttgttttctctagaagatcatgagaacggaaggatatatgttcaccgccctgtcgatcgagaaatgacaccatctttcacggtttattttgatgttgtggagcg

SEQ ID NO: 254946 - DNA, 120 bp, Artificial Sequence
  ENSG00000124215_6 (sequence is synthesized)
ctcaacaggaaaaattgtggatacatccttgattttcaacattaggatcagtgatgtgaatgatcatgcaccccagtttccagagaaggaatttaacatcactgtgcaagaaaaccaatc

SEQ ID NO: 254947 - DNA, 120 bp, Artificial Sequence
  ENSG00000124215_7 (sequence is synthesized)
tgcagggcaacctatttttcagatgttagcagtcgatttggatgaagaaaacactccaaattctcaagtcctttacttcctcatttctcaaacaccattactgaaagaaagtggtttccg

SEQ ID NO: 254948 - DNA, 120 bp, Artificial Sequence
  ENSG00000124215_8 (sequence is synthesized)
ggttgatcgccttagtggagaaatacgactctctggctgcttagattatgagaccgctcctcagtttacactgctaatcagagccagggactgtggagaaccgtcactgtcatccacgac

SEQ ID NO: 254949 - DNA, 120 bp, Artificial Sequence
  ENSG00000124215_9 (sequence is synthesized)
caccgttcacgtggatgtgcaagaaggcaacaaccacaggcctgcatttacccaggagaactataaggttcagattcctgaaggccgagccagccagggcgtgttgcgtctcctggttca

SEQ ID NO: 254950 - DNA, 120 bp, Artificial Sequence
  ENSG00000124215_10 (sequence is synthesized)
agatcgagattctccatttacatcagcttggagagcaaaattcaacatattgcatggcaatgaagaggggcattttgacatttcgactgaccctgagaccaacgaagggatattaaatgt

SEQ ID NO: 254951 - DNA, 120 bp, Artificial Sequence
  ENSG00000124215_11 (sequence is synthesized)
tatcaagcctttggattatgagactcgcccagcgcaaagcctcatcattgtcgtggagaatgaggagaggctcgtcttctgtgagagaggaaagcttcagccgccaaggaaggcagcagc

SEQ ID NO: 254952 - DNA, 120 bp, Artificial Sequence
  ENSG00000124215_12 (sequence is synthesized)
cagcgccactgtgagtgtgcaggtgacagacgccaacgacccaccagcctttcacccccagagcttcattgtcaataaagaggagggcgccaggcctgggaccctgttgggaacttttaa

SEQ ID NO: 254953 - DNA, 120 bp, Artificial Sequence
  ENSG00000124215_13 (sequence is synthesized)
tgccatggatccagacagccagataagatatgaactggttcatgacccagcaaattgggtcagcgtcgacaaaaactccggagtggtcatcaccgtggagccaattgaccgagaatcccc

SEQ ID NO: 254954 - DNA, 120 bp, Artificial Sequence
  ENSG00000124215_14 (sequence is synthesized)
tcatgtaaataacagtttttatgtaatcatcattcacgctgttgatgatggcttcccaccgcagactgctacagggaccctaatgctcttcctgtctgacatcaatgacaacgtcccgac

SEQ ID NO: 254955 - DNA, 120 bp, Artificial Sequence
  ENSG00000124215_15 (sequence is synthesized)
tctccggccacgttcccgctacatggaggtctgtgagtctgctgtgcatgagcccctccacatcgaggcagaggatccggacctggagccgttctctgacccatttacatttgaattgga

SEQ ID NO: 254956 - DNA, 120 bp, Artificial Sequence
  ENSG00000124215_16 (sequence is synthesized)
caatacctggggaaatgcggaggacacatggaagttggggagaaattggggtcaatcagttgaacttttaaccttgagaagcctgccacgtggtaattacttggtgccactcttcattgg

SEQ ID NO: 254957 - DNA, 120 bp, Artificial Sequence
  ENSG00000124215_17 (sequence is synthesized)
agacaaacagggactttcccagaagcaaactgtccatgtaaggatctgcccctgtgccagtgggctcacatgtgtggagcttgcagatgcagaagtggggcttcatgtgggggccctgtt

SEQ ID NO: 254958 - DNA, 120 bp, Artificial Sequence
  ENSG00000124215_18 (sequence is synthesized)
ccctgtctgtgcagcatttgtggctctggcagtggctctgctttttctgttgcgatgctattttgtgcttgaacctaagaggcatggatgctctgtatccaatgatgaaggccaccaaac

SEQ ID NO: 254959 - DNA, 120 bp, Artificial Sequence
  ENSG00000124215_19 (sequence is synthesized)
gacatggtcagatgttgaaggccagaggccggctctgctcatctgcacagctgcagcaggacccacgcagggagttaaggatctcgaggaagtgcctccatctgcagcgagtcagtcagc

SEQ ID NO: 254960 - DNA, 120 bp, Artificial Sequence
  ENSG00000124215_20 (sequence is synthesized)
ccaagcacgctgtgctctggggagctggggttatggcaagccctttgagccaagaagtgtgaaaaacatacactctactcctgcttacccagatgccacaatgcacagacaactcctggc

SEQ ID NO: 254961 - DNA, 120 bp, Artificial Sequence
  ENSG00000124215_21 (sequence is synthesized)
tccggtggaaggaaggatggcagagacattgaatcagaaactccatgttgccaatgtgctggaagatgaccccggctacctacctcacgtctacagcgaggaaggggagtgtggaggggc

SEQ ID NO: 254962 - DNA, 120 bp, Artificial Sequence
  ENSG00000124215_22 (sequence is synthesized)
cccatccctcagctctctggccagcttggaacaggagttgcaacctgatttgctggactctttgggttcaaaagcgactccgtttgaggaaatatattcagagtcaggtgttccttccta

SEQ ID NO: 254963 - DNA, 120 bp, Artificial Sequence
  ENSG00000124215_23 (sequence is synthesized)
aaaaaaaaagtctattttggagaattgaaataattcatggaagggaatcactattcagggatttttcccctttgctcttcttttccctccttaaaagaaaaattaccttctagtcctagg

SEQ ID NO: 254964 - DNA, 120 bp, Artificial Sequence
  ENSG00000124215_24 (sequence is synthesized)
atgaggacacactattagtttgaattaaatgctttgatattctcagatcagccatcttgaaccaaagcaaaaccacaagttacactttcttaaaatttgatttgtcatattttctagaga

SEQ ID NO: 254965 - DNA, 120 bp, Artificial Sequence
  ENSG00000124215_25 (sequence is synthesized)
aacttgaatttaattgtgttattcttagcttccactggcagcctagctttgagggtaaatgaaaatataacccatagattacccagccacttgggaacagcaggtaatactgaagaaaaa

SEQ ID NO: 254966 - DNA, 120 bp, Artificial Sequence
  ENSG00000124215_26 (sequence is synthesized)
taaaaatagattttgaaaacgttacttacatttctatgattatgattctgcttccatttaagggaaaacttaggtaaatagagaaattttttctataacatttgtagtcagtatttgaag

SEQ ID NO: 254967 - DNA, 120 bp, Artificial Sequence
  ENSG00000124215_27 (sequence is synthesized)
tgattttttaaaaaataagtattggtccctgttcactttttgattagataaatagataaaatatgttatcttgagaaaaatgattatgctgaaagctttataaacagtatactctttaaa

SEQ ID NO: 254968 - DNA, 120 bp, Artificial Sequence
  ENSG00000124215_28 (sequence is synthesized)
aaatgaagagctgacataatttaacttgtatgtattatgtaagtaaaagagttaggagcctttgaatgagtaagttctgattagattttatctttaaacaaaaccacaaaatttaattgg

SEQ ID NO: 254969 - DNA, 120 bp, Artificial Sequence
  ENSG00000124215_29 (sequence is synthesized)
tttttacttgtccacttactgctagtgtcagtttcaggggaagaaatggtttcttttaaaaatcttaataggggacatatgccctaaaaatagtcagttttctagtctgagtaatagata

SEQ ID NO: 254970 - DNA, 120 bp, Artificial Sequence
  ENSG00000124215_30 (sequence is synthesized)
agagactgactaagcaaagtttaaaatgctatttggacactttaatgcacatattggatatctaaaagtctacagccatataaaaattttatataattaatgagcaaatgccgtctctca

SEQ ID NO: 254971 - DNA, 120 bp, Artificial Sequence
  ENSG00000124215_31 (sequence is synthesized)
tgccctaaaataaatcagtagaaacatgtttgctggtgaatcagtgaagcattatgttaaacagtgagttacagctcagagttaaaactttctccttctttttgaagaagctgtgcaaat

SEQ ID NO: 254972 - DNA, 120 bp, Artificial Sequence
  ENSG00000124215_32 (sequence is synthesized)
acttctttttaaggagatctggccttttcctacctggttacctcagtcttcctctgctttgggaagctgaaaaagaagaaaaatcacatttaaagcactggaatgtctgaatgggacgct

SEQ ID NO: 254973 - DNA, 120 bp, Artificial Sequence
  ENSG00000124215_33 (sequence is synthesized)
tgaatgtgtagaacagctgtactgatcctagcatgactcagaggacagtctagggcattttctgggtaattcaggataaaagtatttttttttttaagaaaaatacatgtttttggacaa

SEQ ID NO: 254974 - DNA, 120 bp, Artificial Sequence
  ENSG00000124215_34 (sequence is synthesized)
caaaacaaagtaaacattagtttattcgattgcctccttatacttgcctctttcattctgtcccctgtagatttttaaaaaattatctcattttaaaactttattatttcattttaaata

SEQ ID NO: 254975 - DNA, 120 bp, Artificial Sequence
  ENSG00000124215_35 (sequence is synthesized)
attgacatataataattgtacatatttagggggtacatagtcatgtttcaatacatttacagtgatcagatcagggtggttaacgtaatcattggctcaaacatttttcatttctttgta

SEQ ID NO: 254976 - DNA, 120 bp, Artificial Sequence
  ENSG00000124215_36 (sequence is synthesized)
ttggtacggagcattcaatatccatcccccttctagctatctaaaactatgtattattgttaactataggcaacatataatggtatagagtgctagaacgtattcctcctaggaataatt

SEQ ID NO: 254977 - DNA, 120 bp, Artificial Sequence
  ENSG00000124215_37 (sequence is synthesized)
tgctgtaattttgtatcctttaataaatctctccctatccctctttccccccacccttcccagctgctgtgtcctctgttctaccttctacttccgagataaacttggttttagcttcca

SEQ ID NO: 254978 - DNA, 120 bp, Artificial Sequence
  ENSG00000124215_38 (sequence is synthesized)
tggcaaggctaataagaaagcagcttttccaagaaacaatacaatattactggccagatagtattattgattaattcaacaaacagttatgtagcatctactggtaccctggaactgtgc

SEQ ID NO: 254979 - DNA, 120 bp, Artificial Sequence
  ENSG00000124215_39 (sequence is synthesized)
atccctggcctccgcccagtagatgtcagtagcacccctcagctgtgacaaccaaaagtgtcaccagacattgccaaatgtccctcagggagaagaatcacccttgggtgagaagtctgc

SEQ ID NO: 254980 - DNA, 120 bp, Artificial Sequence
  ENSG00000124215_40 (sequence is synthesized)
taaagagagaaatcgcttcagcctcagcaggggctgcatcatcccccagggaagagccacagctgggcgaggattgccacaagacatttacaaggagatgatgccacggagactaacgca

SEQ ID NO: 254981 - DNA, 120 bp, Artificial Sequence
  ENSG00000124215_41 (sequence is synthesized)
gactggtaaacggaaacacggggctttggctcgaacaccctctttcaagaaagttgtttatgaccacaaggaagatgaggagaacaaggctgggagaaagcaaaggagccacttgtttaa

SEQ ID NO: 254982 - DNA, 120 bp, Artificial Sequence
  ENSG00000124215_42 (sequence is synthesized)
ggttatgcagctgagaaatgaacaaggtggggttcgagtccagagtgcgcattccccatcaccccttaacaaaaaggcatgtttcccaggagactacagaggagaatcggcaggtggtca

SEQ ID NO: 254983 - DNA, 120 bp, Artificial Sequence
  ENSG00000124215_43 (sequence is synthesized)
caattgcagggctgtctcaggctgagcagagagtacggtggaggggcatgggcctgctgttggcggtgagggccttggaaatggcttcctggaggagatggcaattatccaggtagacaa

SEQ ID NO: 254984 - DNA, 120 bp, Artificial Sequence
  ENSG00000124215_44 (sequence is synthesized)
tgtgtgtgtgtgtgtgtgtgtgtgtgatcatgaagaagaaataatgtgcaaagccctggtcataaataacttttcctctgcaaactgtggatggcagttcaccatgtttctcaccactgg

SEQ ID NO: 254985 - DNA, 120 bp, Artificial Sequence
  ENSG00000124215_45 (sequence is synthesized)
accactggcctggtcactgcttatccaatatgcatgtaagaattactttttctcttttttcccttctataaattctcatagaacttcctttaatgcattaaaaaagcaactagcatgttc

SEQ ID NO: 254986 - DNA, 120 bp, Artificial Sequence
  ENSG00000124216_0 (sequence is synthesized)
attgcgccgcggcacggcctagcgagtggttcttctgcgctactgctgcgcgaatcggcgaccccagtgcctcgaccactatgccgcgctctttcctcgtcaggaagccctccgacccca

SEQ ID NO: 254987 - DNA, 120 bp, Artificial Sequence
  ENSG00000124216_1 (sequence is synthesized)
atcggaagcctaactacagcgagctgcaggactctaatccagagtttaccttccagcagccctacgaccaggcccacctgctggcagccatcccacctccggagatcctcaaccccaccg

SEQ ID NO: 254988 - DNA, 120 bp, Artificial Sequence
  ENSG00000124216_2 (sequence is synthesized)
cctcgctgccaatgctcatctgggactctgtcctggcgccccaagcccagccaattgcctgggcctcccttcggctccaggagagtcccagggtggcagagctgacctccctgtcagatg

SEQ ID NO: 254989 - DNA, 120 bp, Artificial Sequence
  ENSG00000124216_3 (sequence is synthesized)
aggacagtgggaaaggctcccagccccccagcccaccctcaccggctccttcgtccttctcctctacttcagtctcttccttggaggccgaggcctatgctgccttcccaggcttgggcc

SEQ ID NO: 254990 - DNA, 120 bp, Artificial Sequence
  ENSG00000124216_4 (sequence is synthesized)
aagtgcccaagcagctggcccagctctctgaggccaaggatctccaggctcgaaaggccttcaactgcaaatactgcaacaaggaatacctcagcctgggtgccctcaagatgcacatcc

SEQ ID NO: 254991 - DNA, 120 bp, Artificial Sequence
  ENSG00000124216_5 (sequence is synthesized)
gaagccacacgctgccctgcgtctgcggaacctgcgggaaggccttctctaggccctggctgctacaaggccatgtccggacccacactggcgagaagcccttctcctgtccccactgca

SEQ ID NO: 254992 - DNA, 120 bp, Artificial Sequence
  ENSG00000124216_6 (sequence is synthesized)
gccgtgccttcgctgaccgctccaacctgcgggcccacctccagacccactcagatgtcaagaagtaccagtgccaggcgtgtgctcggaccttctcccgaatgtccctgctccacaagc

SEQ ID NO: 254993 - DNA, 120 bp, Artificial Sequence
  ENSG00000124216_7 (sequence is synthesized)
tccccgctgaccctcgaggctccctcttcctctccatacctgcccctgcctgacagccttccccagctccagcaggaaggaccccacatccttctcactgccatggaattccctcctgag

SEQ ID NO: 254994 - DNA, 120 bp, Artificial Sequence
  ENSG00000124216_8 (sequence is synthesized)
tgccccacttctggccacatcagccccacaggactttgatgaagaccattttctggttctgtgtcctctgcctgggctctggaagaggccttcccatggccatttctgtggagggagggc

SEQ ID NO: 254995 - DNA, 120 bp, Artificial Sequence
  ENSG00000124216_9 (sequence is synthesized)
agctggcccccagccctgggggattcctgagctggcctgtctgcgtgggtttttgtatccagagctgtttggatacagctgctttgagctacaggacaaaggctgacagactcactggga

SEQ ID NO: 254996 - DNA, 120 bp, Artificial Sequence
  ENSG00000124216_10 (sequence is synthesized)
agctcccaccccactcaggggaccccactcccctcacacacacccccccacaaggaaccctcaggccaccctccacgaggtgtgactaactatgcaataatccacccccaggtgcagccc

SEQ ID NO: 254997 - DNA, 120 bp, Artificial Sequence
  ENSG00000124216_11 (sequence is synthesized)
cagggcctgcggaggcggtggcagactagagtctgagatgccccgagcccaggcagctatttcagcctcctgtttggtggggtggcacctgtttcccgggcaatttaacaatgtctgaaa

SEQ ID NO: 254998 - DNA, 120 bp, Artificial Sequence
  ENSG00000124216_12 (sequence is synthesized)
agggactgtgagtaatggctgtcacttgtcgggggcccaagtggggtgctctggtctgaccgatgtgtctcccagaactattctgggggcccgacaggtgggcctgggaggaagatgttt

SEQ ID NO: 254999 - DNA, 120 bp, Artificial Sequence
  ENSG00000124216_13 (sequence is synthesized)
agatgtttacatttttaaaggtacactggtatttatatttcaaacattttgtatcaaggaaacgttttgtatagttatatgtacagtttattgatattcaataaagcagttaatttatat

SEQ ID NO: 255000 - DNA, 120 bp, Artificial Sequence
  ENSG00000124217_0 (sequence is synthesized)
acgacaacttccggaagaggtcgccatggcttcccgggaggaggtactcgccttacaagctgaagttgcccaacgtgaggaggaattgaattcgctgaagcagaagctggcgtcggctct

SEQ ID NO: 255001 - DNA, 120 bp, Artificial Sequence
  ENSG00000124217_1 (sequence is synthesized)
tttggctgagcaggaaccgcagccagaacggctggttccggtgtcgccgctgccgccgaaggccgctctgtcccgagatgagattctgcgctatagccggcagctagtgctgcccgagct

SEQ ID NO: 255002 - DNA, 120 bp, Artificial Sequence
  ENSG00000124217_2 (sequence is synthesized)
gggcgtgcacggacagctgcgcctggggaccgcgtgcgtgctaatcgtgggctgcggtgggctcggctgtccactagcgcagtacttggcagcggccggcgtgggccgccttggccttgt

SEQ ID NO: 255003 - DNA, 120 bp, Artificial Sequence
  ENSG00000124217_3 (sequence is synthesized)
ggactatgacgtggtagagatgagcaacctggcccgccaagtgctgcatggcgaggcactggctggccaggccaaggccttttcggccgccgcctcgctgcgccgcctcaattcggcagt

SEQ ID NO: 255004 - DNA, 120 bp, Artificial Sequence
  ENSG00000124217_4 (sequence is synthesized)
ggaatgcgtgccgtacactcaggcccttacgccagccactgccctagacctggtccgccgatatgatgtggtggctgactgctcggacaacgtgcccactcgctacctggttaatgacgc

SEQ ID NO: 255005 - DNA, 120 bp, Artificial Sequence
  ENSG00000124217_5 (sequence is synthesized)
atgtgtgctggcgggtcggcccctcgtgtctgccagtgccttgcgcttcgagggccaaatcacagtctaccattatgacggtggcccttgctatcgctgcatattcccccaaccaccccc

SEQ ID NO: 255006 - DNA, 120 bp, Artificial Sequence
  ENSG00000124217_6 (sequence is synthesized)
agcggagacagtgaccaactgcgcggacggcggggtgctcggtgtcgttaccggggtcctgggctgcctgcaggccttggaagtgctgaaaatcgctgcgggtctgggcccctcttacag

SEQ ID NO: 255007 - DNA, 120 bp, Artificial Sequence
  ENSG00000124217_7 (sequence is synthesized)
tggcagcttgttgctctttgatgccctgagagggcatttccgctctattcggctgcggagccgcaggctcgactgtgcagcttgcggggaacggcccactgtgactgatctgctggacta

SEQ ID NO: 255008 - DNA, 120 bp, Artificial Sequence
  ENSG00000124217_8 (sequence is synthesized)
tgaagccttctgtggctcctcagccactgataaatgccgctccctgcaactactgagcccagaggagcgtgtttctgtcaccgactataagcgactgctggattctggggcattccacct

SEQ ID NO: 255009 - DNA, 120 bp, Artificial Sequence
  ENSG00000124217_9 (sequence is synthesized)
gttgctggacgtcaggcctcaggtggaggtggacatttgtcgtttgcctcatgccctacacatccctctgaaacatttggaacgcagggatgcggagagcctgaaactcttaaaagaagc

SEQ ID NO: 255010 - DNA, 120 bp, Artificial Sequence
  ENSG00000124217_10 (sequence is synthesized)
aatctgggaagagaagcagggcacacaagaaggggctgctgtccccatttatgtgatttgcaaactgggaaatgactcacagaaagccgtgaagatcctccagtccttatcagcagctca

SEQ ID NO: 255011 - DNA, 120 bp, Artificial Sequence
  ENSG00000124217_11 (sequence is synthesized)
agagttagaccctttaacagttcgggatgttgtggggggcctcatggcctgggctgccaaaatcgatggaacatttccacagtactgaggtgactggtatagtctgatgagaaagatgtg

SEQ ID NO: 255012 - DNA, 120 bp, Artificial Sequence
  ENSG00000124217_12 (sequence is synthesized)
gattgccataatacctcaaagatacacttgtttgcatttttcggtaatatacataggagctggggattctacagtatctgtgaatacgtggactcctttttataaggagttttaaaaatt

SEQ ID NO: 255013 - DNA, 120 bp, Artificial Sequence
  ENSG00000124217_13 (sequence is synthesized)
gttatgtattggatgaatgacttattaatggattataccgtttctgagaaccatcattttttttttcagcacacggaggatgtcttggacatgtgagatgtaacgtgacaggattttgca

SEQ ID NO: 255014 - DNA, 120 bp, Artificial Sequence
  ENSG00000124217_14 (sequence is synthesized)
ttttaaactgcagatcatttacatgtccttattttccacctcccccagtcaaaatgctttctaaatcattttcacagattatatacttcggatctgtttactgttcagttaagaaattct

SEQ ID NO: 255015 - DNA, 120 bp, Artificial Sequence
  ENSG00000124217_15 (sequence is synthesized)
tggatcttattaatatttcagatgatagaatacatcctacagaaatacatgtttaaaatgtaaattgttttaattattcagaaagagggtcattctatttggccttttgaattagtatca

SEQ ID NO: 255016 - DNA, 120 bp, Artificial Sequence
  ENSG00000124217_16 (sequence is synthesized)
gggattacaggcgtgagccaccacaccctcccgagatctttaaagtttaccaaaataaaggaaaccacctttgtagtctgtcagtgtctcttataaattgctactgttttcttaaagtta

SEQ ID NO: 255017 - DNA, 120 bp, Artificial Sequence
  ENSG00000124217_17 (sequence is synthesized)
tcttataaattgctactgttttcttaaagttaacttcagggtccaccttatgttgcacacatatcacatcgtttaaattgcatactatggtttgacttgctttggaattttcaagtcaaa

SEQ ID NO: 255018 - DNA, 120 bp, Artificial Sequence
  ENSG00000124217_18 (sequence is synthesized)
gtcccaaccctttgcctctccccctttaatttgccttttctcttttgatttaatgtttttttattccagcattttatactaatgtaaaatgtttttatgtttgtttacttaacattttca

SEQ ID NO: 255019 - DNA, 120 bp, Artificial Sequence
  ENSG00000124217_19 (sequence is synthesized)
gcctatcagtggccagatgaactaatggcttgtcagaagggggcctgtgacctcctgcttgctgcatgcaggcttataatcatcaattgctgctgttgtttttttaagaatggcagaaat

SEQ ID NO: 255020 - DNA, 120 bp, Artificial Sequence
  ENSG00000124217_20 (sequence is synthesized)
cacagatacaactataaaatctttgtatttctgttaaccattttttttaaagcttaaatgtatcataagccagcaaaaaccctttgtagaccagatttacttaccagtttgcaatttgtg

SEQ ID NO: 255021 - DNA, 120 bp, Artificial Sequence
  ENSG00000124217_21 (sequence is synthesized)
atatagaatcttgttttattataagagggtggtatttaacaaattcaaaattagtcatcactttttaactgtgaaacattgtaactaattctttgaacaggtatacttaaagtatggtat

SEQ ID NO: 255022 - DNA, 120 bp, Artificial Sequence
  ENSG00000124217_22 (sequence is synthesized)
acccttctgttataaagatgaagcaggtctcttatgactgttcctgccaacgagttatggaggtaaatgactgtgacctggagtggagaacaaagatggctggcctgtgtttttcatctc

SEQ ID NO: 255023 - DNA, 120 bp, Artificial Sequence
  ENSG00000124217_23 (sequence is synthesized)
cttcttccagggacaactgattctgatacatagcaggaaacaaatagcgacacacaggaacaatttcatattctaaagactgaagtcctaaagttatagacagttgtagttcctataaac

SEQ ID NO: 255024 - DNA, 120 bp, Artificial Sequence
  ENSG00000124217_24 (sequence is synthesized)
ctggttgtcacaggggacaggcaagagaagctgactagctaagtgttaaaaggtttactaaagtgataggaggtgcttttgagaattttggggacagattcaaggctgtacttctaggaa

SEQ ID NO: 255025 - DNA, 120 bp, Artificial Sequence
  ENSG00000124217_25 (sequence is synthesized)
tgatgcccgaaatcatgcacaaaactggccttaggagaacagtgtctatgttgtgctgccctatcaagtaccggaggaaacgccactacagtctcaccagtttcacttgacgtgcccccc

SEQ ID NO: 255026 - DNA, 120 bp, Artificial Sequence
  ENSG00000124217_26 (sequence is synthesized)
caactctcccagaaagcccaacacttcagccacagtccatgtgtcgagaaacagagtcactacattattcttttctgagtcaagccttatgagggtgcctggtaggcagagtctaattac

SEQ ID NO: 255027 - DNA, 120 bp, Artificial Sequence
  ENSG00000124217_27 (sequence is synthesized)
atgcctacatcttagctgcaagagaggctgggaatttgtgttttgatatctacaataggaagacagaactcatgatgtgggattttcccaaatagtgaaatatttttcaaaagatgggct

SEQ ID NO: 255028 - DNA, 120 bp, Artificial Sequence
  ENSG00000124217_28 (sequence is synthesized)
gttaagaatataacagatacccagtacacaacccagatctatttcagtatttgttttttgttgttgttgttttggagacagagtctcgctctatcccccaggctggatggagtgcagcgg

SEQ ID NO: 255029 - DNA, 66 bp, Artificial Sequence
  ENSG00000124217_29 (sequence is synthesized)
gaactcctgacctcaggtgatctgtatatattagtatttgaaatttggttttctctggggattgta

SEQ ID NO: 255030 - DNA, 120 bp, Artificial Sequence
  ENSG00000124217_30 (sequence is synthesized)
tatattagtatttgaaatttggttttctctggggattgtagctaggtttttatggtgagataggatttgaacataatttgttttttgagacgaagtcttgcttcgtcgcccagggtggag

SEQ ID NO: 255031 - DNA, 79 bp, Artificial Sequence
  ENSG00000124217_31 (sequence is synthesized)
tgaattacagttgtatgccaccatgcctagccattttttaatttaaaaattttttggtagcaatggggtctgaatatgt

SEQ ID NO: 255032 - DNA, 90 bp, Artificial Sequence
  ENSG00000124217_32 (sequence is synthesized)
ttgaattacagttgtatgccaccatgcctagccattttttaatttaaaaattttttggtagcaatggggtctgaatatgtggccttccct

SEQ ID NO: 255033 - DNA, 120 bp, Artificial Sequence
  ENSG00000124217_33 (sequence is synthesized)
aggcaccatgcccagcctgaacttgatttttttgttgtttccttttcataacaaacatcaaatgccttcagtgtactagttcttctaggttctggaataaaaatgagcaagaggtttcct

SEQ ID NO: 255034 - DNA, 120 bp, Artificial Sequence
  ENSG00000124217_34 (sequence is synthesized)
gttgtagaggagtttatatttaaatggtgataagtaaattactgataagtgccataaaagaaatgaaactgtgacatattagggtgggggaggggatctgttttgaatagcttaattatg

SEQ ID NO: 255035 - DNA, 120 bp, Artificial Sequence
  ENSG00000124217_35 (sequence is synthesized)
gaaggcctcagagatgacattaaacccaaaacctgaaaggtgagaaagagccagttacagaagatctgaggaaaattctatactgggagaaaaataactgtaaagacctcaaggtaaata

SEQ ID NO: 255036 - DNA, 120 bp, Artificial Sequence
  ENSG00000124217_36 (sequence is synthesized)
aacttggaatgttccgttcaagaaactgcagaggcaagttgggttgcaaacaattagggagagtgggacagggtgaggtttgagaagcagggaacatcataaactttgtagaccatagta

SEQ ID NO: 255037 - DNA, 120 bp, Artificial Sequence
  ENSG00000124217_37 (sequence is synthesized)
gtttggtttttattctaaatacaataatagctaatattttgagcacttactgtgttatttgggatttgaatccagatgctctggttgaagagcccattccctaagtgtcatgctatactg

SEQ ID NO: 255038 - DNA, 120 bp, Artificial Sequence
  ENSG00000124217_38 (sequence is synthesized)
actctaagcaaaactttgccattgcttcatatgtgttcatgccctgtcagggcatagaaagcaatctatgtcctgacaatcacggaagtgtattccagatacaatagaaatgtactctga

SEQ ID NO: 255039 - DNA, 120 bp, Artificial Sequence
  ENSG00000124222_0 (sequence is synthesized)
agatccggggatggagggagccggagaagaggagtgagaaggccggggaggcaggccctgctgtcttcctgcaggccggcagcctgctggcagtggaggaccaggccgtccaggaaagga

SEQ ID NO: 255040 - DNA, 120 bp, Artificial Sequence
  ENSG00000124222_1 (sequence is synthesized)
aggggtcaggaggtcgggcagggcctcagcaggttcagacaagtccccagaagggagctgcaggcgccctcgagtccaggccccaagcctggctccggttgtccaaagagggcctaggcc

SEQ ID NO: 255041 - DNA, 120 bp, Artificial Sequence
  ENSG00000124222_2 (sequence is synthesized)
aggcctctggtgcggaaactgagtcacagccagacctcagggcacggcctagacgcttacgagccaaagttaggggtagagagcagagacctccggggggtctcagggagtagggggctt

SEQ ID NO: 255042 - DNA, 120 bp, Artificial Sequence
  ENSG00000124222_3 (sequence is synthesized)
cagggcctcccagtctagagccggattggcgagttagacgcttgtagatccaaggttggattggggtggggtctctgggacgttggatcgctacgcaaggattggggggattcaagtgct

SEQ ID NO: 255043 - DNA, 120 bp, Artificial Sequence
  ENSG00000124222_4 (sequence is synthesized)
tagagatcgaagtctgccctgggtagggggagtcagacaattggaaagcctaggtagttatttggggaggggtctctacgccttggcgaagcgcacagctgcatctttttggcttgaggc

SEQ ID NO: 255044 - DNA, 120 bp, Artificial Sequence
  ENSG00000124222_5 (sequence is synthesized)
ctgaggccttgtcgagaagcttccgtgaaagggtgggccagccgggccacgagaaagaaagtgaataaatcaggaatataagtgggcggggggcccctgagaggggggtcgcaaagggtg

SEQ ID NO: 255045 - DNA, 120 bp, Artificial Sequence
  ENSG00000124222_6 (sequence is synthesized)
agacatggccaccaggcgtttaaccgacgctttcttgttgttgcggaataattccatccaaaaccggcagctgttagccgagcaagtgagtagtcacatcacctccagccctctgcattc

SEQ ID NO: 255046 - DNA, 120 bp, Artificial Sequence
  ENSG00000124222_7 (sequence is synthesized)
acgtagcattgctgcggagctggacgagcttgctgatgaccgtatggcactggtgtcaggcatcagcttagatccagaagcagcgattggtgtgacaaaacggccacctcctaagtgggt

SEQ ID NO: 255047 - DNA, 120 bp, Artificial Sequence
  ENSG00000124222_8 (sequence is synthesized)
ggatggagtggatgaaattcagtatgatgttggccggattaagcagaagatgaaagaattggccagccttcatgacaagcatttaaacagacccaccctggatgacagcagcgaagagga

SEQ ID NO: 255048 - DNA, 120 bp, Artificial Sequence
  ENSG00000124222_9 (sequence is synthesized)
acatgccattgagataactacccaagagatcactcagctcttccacaggtgccagcgtgccgtgcaggccctgccgagccgggcccgggcctgctccgagcaggaggggcggctgcttgg

SEQ ID NO: 255049 - DNA, 120 bp, Artificial Sequence
  ENSG00000124222_10 (sequence is synthesized)
gaacgtggtggcctcgctggcgcaggccctgcaggaactctccaccagcttccggcacgcacagtcaggctacctcaaacgcatgaagaatcgagaggaaagatcccagcattttttcga

SEQ ID NO: 255050 - DNA, 120 bp, Artificial Sequence
  ENSG00000124222_11 (sequence is synthesized)
cacatcagtaccactaatggatgatggagacgataacactctttaccatcggggttttacagaggaccagttagttctggtggagcagaacacactgatggtggaagagcgggaacgaga

SEQ ID NO: 255051 - DNA, 120 bp, Artificial Sequence
  ENSG00000124222_12 (sequence is synthesized)
gattcgccagattgtacagtccatttctgacctgaatgaaatattcagggacttaggggcgatgattgtagaacagggtacagtccttgacagaattgactataacgttgaacagtcctg

SEQ ID NO: 255052 - DNA, 120 bp, Artificial Sequence
  ENSG00000124222_13 (sequence is synthesized)
tatcaaaactgaagatggtttgaaacagcttcacaaggcagaacagtatcaaaagaagaatcggaagatgcttgtgattttaatattatttgtcatcatcattgtgctcattgttgtcct

SEQ ID NO: 255053 - DNA, 120 bp, Artificial Sequence
  ENSG00000124222_14 (sequence is synthesized)
cgttggcgtgaagtctcgataagtggcattgggttttcgtgtgtgccgcgcgtgtggatctcccgggtgtgaggggcttggcctgcgccccgccagctgcccgcagaggtgcagcctcga

SEQ ID NO: 255054 - DNA, 120 bp, Artificial Sequence
  ENSG00000124222_15 (sequence is synthesized)
ggaatctgagggcgtcggggcagcgaacctttgcatccacggactcctccttccctagtcctgctcaagcggtccggggaatgggtttttgtttttccttcattgttgagaatttaagga

SEQ ID NO: 255055 - DNA, 120 bp, Artificial Sequence
  ENSG00000124222_16 (sequence is synthesized)
cctttgatactgctgcacaatagagattgagttctgggatcagttataatatatattttttttagaaagagaaaatgagctgagagtttacaggcactgcagaagctgttcagtattata

SEQ ID NO: 255056 - DNA, 120 bp, Artificial Sequence
  ENSG00000124222_17 (sequence is synthesized)
tgtgtatatgctatttttttagcagccatgtctgagcagaatgttaacataatttttggaaaaattttctttaaaccatctggtttttaagaaatttggtaccaaaaattgatgagtaga

SEQ ID NO: 255057 - DNA, 120 bp, Artificial Sequence
  ENSG00000124222_18 (sequence is synthesized)
ggcaaaaatgccccttcatctttctctatatattttccagttgaaaacaaactaagaagtcctttaagaatttataatccgttccccattaacttaatttagcttttccatcactgttaa

SEQ ID NO: 255058 - DNA, 120 bp, Artificial Sequence
  ENSG00000124222_19 (sequence is synthesized)
tgatcagagtaacaaagtgtgaaaaataagaaaccatcattgatgttaattaacacatttagatgggccagttaaaacagcttcataagttttaaattaattgtaaatggaatattcctc

SEQ ID NO: 255059 - DNA, 120 bp, Artificial Sequence
  ENSG00000124222_20 (sequence is synthesized)
tgcattttctactgtaaaccaaaagaggttactaagcaaaaccacctaaatttaagttggtgatttaaatgaatctcacattaaaagaaagcttgacagtgttatgaaagccaccagact

SEQ ID NO: 255060 - DNA, 120 bp, Artificial Sequence
  ENSG00000124222_21 (sequence is synthesized)
cagccagtgtgtccccatgggtatccccagccatccttgctcaatccattacttatatactaactacataatgacctgttcaaaccagactctatttaatgaactgtgaatttacacaga

SEQ ID NO: 255061 - DNA, 120 bp, Artificial Sequence
  ENSG00000124222_22 (sequence is synthesized)
ggccattttaaatgggtcaccccatttaggattagtggatctcaaattattaaccaaacatcactccatttcaaagtaaaatattccaccagcgatttgatttattggctcttccattgc

SEQ ID NO: 255062 - DNA, 120 bp, Artificial Sequence
  ENSG00000124222_23 (sequence is synthesized)
cactgagcaatgcccaggaagcaggcacattgccaaggactgggggcatcttgactaggaagctcctcgtttgtgtgagcgtgggtcagaccgccaaagtaggacttcatcgtttaccta

SEQ ID NO: 255063 - DNA, 120 bp, Artificial Sequence
  ENSG00000124222_24 (sequence is synthesized)
cctattatcaatatggtgcttgaatatattcctataactgtagaacagtgtggaaagtgatggtaactttgaagttgttcatgttttattggctttgttttaattgacactagtagagtt

SEQ ID NO: 255064 - DNA, 120 bp, Artificial Sequence
  ENSG00000124222_25 (sequence is synthesized)
ttaatggtctttgtgtaaattttaatggcttttccattgtttttgcttctcttaaaaagtttaagaagaatatgacctcattaaatgtgctgttttatttggaccagtcacacaaaatgt

SEQ ID NO: 255065 - DNA, 120 bp, Artificial Sequence
  ENSG00000124222_26 (sequence is synthesized)
ctctctagagttgactttaaagttgtttacagaaatttaaactcaattccagagattgaagttgtccaaacagctcatgggcttagtgtccaaacccctgcccagccttccctttccaag

SEQ ID NO: 255066 - DNA, 120 bp, Artificial Sequence
  ENSG00000124222_27 (sequence is synthesized)
ttggtgccacctccaggtagccattggtggttttcctattactgatgtggctgtggaatgataaggtcctagaggggccctggcatttcaggaagcggacctggtattccctgacaaaca

SEQ ID NO: 255067 - DNA, 120 bp, Artificial Sequence
  ENSG00000124222_28 (sequence is synthesized)
ttgcttaggaaagagggccggagaataagaagccagcacctcatcagtcagccctgcaatgtgagacttccgtagctgttgagagtcactgcaggtgttctttcatcccatctgatttta

SEQ ID NO: 255068 - DNA, 120 bp, Artificial Sequence
  ENSG00000124222_29 (sequence is synthesized)
acccatggttgagacgttccaagttagatctgctgctcttaggtgtggggctgtccacattagggaacttgcctcaaaaacagtccacagtggcaataccggacttctgttcaagctttt

SEQ ID NO: 255069 - DNA, 120 bp, Artificial Sequence
  ENSG00000124222_30 (sequence is synthesized)
taaagtgctgagccttacaaacccctgaaggaaagtgaccctttaagagaggatcatctttttttatatttattttcaccaaatagggtgatgagggttggtttttgttccctcaaccca

SEQ ID NO: 255070 - DNA, 86 bp, Artificial Sequence
  ENSG00000124222_31 (sequence is synthesized)
aaatagggtgatgagggttggtttttgttccctcaacccatttgggtaaaataacggatctgattagaaactgttttaaggaggac

SEQ ID NO: 255071 - DNA, 66 bp, Artificial Sequence
  ENSG00000124222_32 (sequence is synthesized)
ttttagcgctgggtttcccaaggtgggagagacagacccagcctggagctggcccctggcctgtgt

SEQ ID NO: 255072 - DNA, 120 bp, Artificial Sequence
  ENSG00000124222_33 (sequence is synthesized)
gagagacagacccagcctggagctggcccctggcctgtgtgctgacttcttggggtcctcaaaccactgtatttttctgttgagcctgtacttggggagagatcagtagcatttgaggaa

SEQ ID NO: 255073 - DNA, 120 bp, Artificial Sequence
  ENSG00000124222_34 (sequence is synthesized)
gtaagagaaaagaatcatggtacctcagggtttctttccctttactcgctggcagccattgtctgtgggcacctcatgtttttccacactctactgggccgtggaggtaacgatcaccca

SEQ ID NO: 255074 - DNA, 120 bp, Artificial Sequence
  ENSG00000124222_35 (sequence is synthesized)
ggccagtctcctctgcctgggatgcgccctctgagaggaggcctagcagggcaggctccctctgggcatccctggatgcagcctctggacacatgcctcctttaaagtgtccgggtgcag

SEQ ID NO: 255075 - DNA, 120 bp, Artificial Sequence
  ENSG00000124222_36 (sequence is synthesized)
ctcaggttgagtggaggtagaaggagaaacagacatgtttaccacgcgttttccaaagctcctgatctttcccaagattgtaactgaaaactgctgtctcttgttttgttcgttttgggg

SEQ ID NO: 255076 - DNA, 120 bp, Artificial Sequence
  ENSG00000124222_37 (sequence is synthesized)
gtggtggtgctggctgggccatgcttgtgaagtgatgtgtgtctctgatttaacggattcactgttttctctgctaattgagagagcgttatttacattatttatttgttttgacacaag

SEQ ID NO: 255077 - DNA, 120 bp, Artificial Sequence
  ENSG00000124222_38 (sequence is synthesized)
tgctttcagtgttttatcctagctaatggcttcttaaaggtaataaaacccttccaacgtaattggtcagataaaactttttttcttgtatgcttaaataaagcaattagtgaagcactt

SEQ ID NO: 255078 - DNA, 120 bp, Artificial Sequence
  ENSG00000124222_39 (sequence is synthesized)
ctatccaaaatgacttttttgtccttttttaaaaccaatttactgttactggaaactttttgtacaataaagcaatcacgcagattaaagaacatcctgcaatcctagtattaattttaa

SEQ ID NO: 255079 - DNA, 120 bp, Artificial Sequence
  ENSG00000124222_40 (sequence is synthesized)
gggcctcagcagctgttagccgagcaaccagatcaagtcaaatttacgttctgaagtatgtccaaggaaattaagagctggtgcatgaaaagataggaaaacaatccaaatcctagcagt

SEQ ID NO: 255080 - DNA, 120 bp, Artificial Sequence
  ENSG00000124222_41 (sequence is synthesized)
ggagtgagaaggccggggaggcaggccctgctgtcttcctgcaggccggcagcctgctggcagtggaggaccaggccgtccaggaaaggaagggctgttagccgagcaagagctggacga

SEQ ID NO: 255081 - DNA, 120 bp, Artificial Sequence
  ENSG00000124225_0 (sequence is synthesized)
gtcagaccgtctgcctgcctccgaccgcggtctcggagcgaaacccgatctccttggacttgaatgaggaggaggaggcggcggcggcggcggcggcggaggcgctcggctggggaaagc

SEQ ID NO: 255082 - DNA, 80 bp, Artificial Sequence
  ENSG00000124225_1 (sequence is synthesized)
tagcggcagaggctcagccccggcggcagcgcgcgccccgctgccagcccattttccggacgccacccgcgggcactgcc

SEQ ID NO: 255083 - DNA, 120 bp, Artificial Sequence
  ENSG00000124225_2 (sequence is synthesized)
agccccccgcgccccgcgccgcgccgccgcgccgtccatgcaccgcttgatgggggtcaacagcaccgccgccgccgccgccgggcagcccaatgtctcctgcacgtgcaactgcaaacg

SEQ ID NO: 255084 - DNA, 120 bp, Artificial Sequence
  ENSG00000124225_3 (sequence is synthesized)
gcagcccaatgtctcctgcacgtgcaactgcaaacgctctttgttccagagcatggagatcacggagctggagtttgttcagatcatcatcatcgtggtggtgatgatggtgatggtggt

SEQ ID NO: 255085 - DNA, 120 bp, Artificial Sequence
  ENSG00000124225_4 (sequence is synthesized)
ggtgatcacgtgcctgctgagccactacaagctgtctgcacggtccttcatcagccggcacagccaggggcggaggagagaagatgccctgtcctcagaaggatgcctgtggccctcgga

SEQ ID NO: 255086 - DNA, 120 bp, Artificial Sequence
  ENSG00000124225_5 (sequence is synthesized)
gagcacagtgtcaggcaacggaatcccagagccgcaggtctacgccccgcctcggcccaccgaccgcctggccgtgccgcccttcgcccagcgggagcgcttccaccgcttccagcccac

SEQ ID NO: 255087 - DNA, 120 bp, Artificial Sequence
  ENSG00000124225_6 (sequence is synthesized)
ctatccgtacctgcagcacgagatcgacctgccacccaccatctcgctgtcagacggggaggagcccccaccctaccagggcccctgcaccctccagcttcgggaccccgagcagcagct

SEQ ID NO: 255088 - DNA, 120 bp, Artificial Sequence
  ENSG00000124225_7 (sequence is synthesized)
ggaactgaaccgggagtcggtgcgcgcacccccaaacagaaccatcttcgacagtgacctgatggatagtgccaggctgggcggcccctgcccccccagcagtaactcgggcatcagcgc

SEQ ID NO: 255089 - DNA, 120 bp, Artificial Sequence
  ENSG00000124225_8 (sequence is synthesized)
cacgtgctacggcagcggcgggcgcatggaggggccgccgcccacctacagcgaggtcatcggccactacccggggtcctccttccagcaccagcagagcagtgggccgccctccttgct

SEQ ID NO: 255090 - DNA, 120 bp, Artificial Sequence
  ENSG00000124225_9 (sequence is synthesized)
ggaggggacccggctccaccacacacacatcgcgcccctagagagcgcagccatctggagcaaagagaaggataaacagaaaggacaccctctctagggtccccaggggggccgggctgg

SEQ ID NO: 255091 - DNA, 120 bp, Artificial Sequence
  ENSG00000124225_10 (sequence is synthesized)
ggctgcgtaggtgaaaaggcagaacactccgcgcttcttagaagaggagtgagaggaaggcggggggcgcagcaacgcatcgtgtggccctcccctcccacctccctgtgtataaatatt

SEQ ID NO: 255092 - DNA, 83 bp, Artificial Sequence
  ENSG00000124225_11 (sequence is synthesized)
tgtttctttgttgagctgtgtcttgaaggcaaaagaaaaaaaatttctacagtagtctttcttgtttctagttgagctgcgtg

SEQ ID NO: 255093 - DNA, 120 bp, Artificial Sequence
  ENSG00000124225_12 (sequence is synthesized)
tttctacagtagtctttcttgtttctagttgagctgcgtgcgtgaatgcttattttcttttgtttatgataatttcacttaactttaaagacatatttgcacaaaacctttgtttaaaga

SEQ ID NO: 255094 - DNA, 120 bp, Artificial Sequence
  ENSG00000124225_13 (sequence is synthesized)
tctgcaatattatatatataaatatatataagataagagaaactgtatgtgcgagggcaggagtatttttgtattagaagaggcctattaaaaaaaaaagttgttttctgaactagaaga

SEQ ID NO: 255095 - DNA, 120 bp, Artificial Sequence
  ENSG00000124225_14 (sequence is synthesized)
ggaaaaaaatggcaatttttgagtgccaagtcagaaagtgtgtattaccttgtaaagaaaaaaattacaaagcaggggtttagagttatttatataaatgttgagattttgcactatttt

SEQ ID NO: 255096 - DNA, 120 bp, Artificial Sequence
  ENSG00000124225_15 (sequence is synthesized)
ttaatataaatatgtcagtgcttgcttgatggaaacttctcttgtgtctgttgagactttaagggagaaatgtcggaatttcagagtcgcctgacggcagagggtgagcccccgtggagt

SEQ ID NO: 255097 - DNA, 120 bp, Artificial Sequence
  ENSG00000124225_16 (sequence is synthesized)
ctgcagagaggccttggccaggagcggcgggctttcccgaggggccactgtccctgcagagtggatgcttctgcctagtgacaggttatcaccacgttatatattccctaccgaaggaga

SEQ ID NO: 255098 - DNA, 120 bp, Artificial Sequence
  ENSG00000124225_17 (sequence is synthesized)
caccttttcccccctgacccagaacagcctttaaatcacaagcaaaataggaaagttaaccacggaggcaccgagttccaggtagtggttttgcctttcccaaaaatgaaaataaactgt

SEQ ID NO: 255099 - DNA, 120 bp, Artificial Sequence
  ENSG00000124225_18 (sequence is synthesized)
taccgaaggaattagtttttcctcttcttttttccaactgtgaaggtccccgtggggtggagcatggtgcccctcacaagccgcagcggctggtgcccgggctaccagggacatgccaga

SEQ ID NO: 255100 - DNA, 120 bp, Artificial Sequence
  ENSG00000124225_19 (sequence is synthesized)
tggttgttcagctggctaaaggttcaccggtgaaggcaggtgcggtaactgccgcactggaccctaggaagccccaggtattcgcaatctgacctcctcctgtctgtttcccttcacgga

SEQ ID NO: 255101 - DNA, 120 bp, Artificial Sequence
  ENSG00000124225_20 (sequence is synthesized)
tcaattctcacttaagaggccaataaacaacccaacatgaaaaggtgacaagcctgggtttctcccaggataggtgaaagggttaaaatgagtaaagcagttgagcaaacaccaacccga

SEQ ID NO: 255102 - DNA, 120 bp, Artificial Sequence
  ENSG00000124225_21 (sequence is synthesized)
gcttcgggcgcagaattcttcaccttctcttcccctttccatctcctttccccgcggaaacaacgcttcccttctggtgtgtctgttgatctgtgttttcatttacatctctcttagact

SEQ ID NO: 255103 - DNA, 120 bp, Artificial Sequence
  ENSG00000124225_22 (sequence is synthesized)
ccgctcttgttctccaggttttcaccagatagatttggggttggcgggacctgctggtgacgtgcaggtgaaggacaggaaggggcatgtgagcgtaaatagaggtgaccagaggagagc

SEQ ID NO: 255104 - DNA, 120 bp, Artificial Sequence
  ENSG00000124225_23 (sequence is synthesized)
atgaggggtggggctttgggacccaccggggccagtggctggagcttgacgtctttcctccccatgggggtgggagggcccccagctggaagagcagactcccagctgctaccccctccc

SEQ ID NO: 255105 - DNA, 120 bp, Artificial Sequence
  ENSG00000124225_24 (sequence is synthesized)
ttcccatgggagtggctttccattttgggcagaatgctgactagtagactaacataaaagatataaaaggcaataactattgtttgtgagcaacttttttataacttccaaaacaaaaac

SEQ ID NO: 255106 - DNA, 120 bp, Artificial Sequence
  ENSG00000124225_25 (sequence is synthesized)
ctgagcacagttttgaagttctagccactcgagctcatgcatgtgaaacgtgtgctttacgaaggtggcagctgacagacgtgggctctgcatgccgccagcctagtagaaagttctcgt

SEQ ID NO: 255107 - DNA, 120 bp, Artificial Sequence
  ENSG00000124225_26 (sequence is synthesized)
tcattggcaacagcagaacctgcctctccgtgaagtcgtcagcctaaaatttgtttctctcttgaagaggattctttgaaaaggtcctgcagagaaatcagtacaggttatcccgaaagg

SEQ ID NO: 255108 - DNA, 120 bp, Artificial Sequence
  ENSG00000124225_27 (sequence is synthesized)
tacaaggacgcacttgtaaagatgattaaaacgtatctttcctttatgtgacgcgtctctagtgccttactgaagaagcagtgacactcccgtcgctcggtgaggacgttcccggacagt

SEQ ID NO: 255109 - DNA, 120 bp, Artificial Sequence
  ENSG00000124225_28 (sequence is synthesized)
gcctcactcacctgggactggtatcccctcccagggtccaccaagggctcctgcttttcagacaccccatcatcctcgcgcgtcctcaccctgtctctaccagggaggtgcctagcttgg

SEQ ID NO: 255110 - DNA, 120 bp, Artificial Sequence
  ENSG00000124225_29 (sequence is synthesized)
tgaggttactcctgctcctccaacctttttttgccaaggtttgtacacgactcccatctaggctgaaaacctagaagtggaccttgtgtgtgtgcatggtgtcagcccaaagccaggctg

SEQ ID NO: 255111 - DNA, 120 bp, Artificial Sequence
  ENSG00000124225_30 (sequence is synthesized)
agacagtcctcatatcctcttgagccaaactgtttgggtctcgttgcttcatggtatggtctggatttgtgggaatggctttgcgtgagaaaggggaggagagtggttgctgccctcagc

SEQ ID NO: 255112 - DNA, 120 bp, Artificial Sequence
  ENSG00000124225_31 (sequence is synthesized)
cggcttgaggacagagcctgtccctctcatgacaactcagtgttgaagcccagtgtcctcagcttcatgtccagtggatggcagaagttcatggggtagtggcctctcaaaggctgggcg

SEQ ID NO: 255113 - DNA, 120 bp, Artificial Sequence
  ENSG00000124225_32 (sequence is synthesized)
catcccaagacagccagcaggttgtctctggaaacgaccagagttaagctctcggcttctctgctgagggtgcaccctttcctctagatggtagttgtcacgttatctttgaaaactctt

SEQ ID NO: 255114 - DNA, 120 bp, Artificial Sequence
  ENSG00000124225_33 (sequence is synthesized)
ggactgctcctgaggaggccctcttttccagtaggaagttagatgggggttctcagaagtggctgattggaaggggacaagcttcgtttcaggggtctgccgttccatcctggttcagag

SEQ ID NO: 255115 - DNA, 120 bp, Artificial Sequence
  ENSG00000124225_34 (sequence is synthesized)
aaggccgagcgtggctttctctagccttgtcactgtctccctgcctgtcaatcaccacctttcctccagaggaggaaaattatctcccctgcaaagcccggttctacacagatttcacaa

SEQ ID NO: 255116 - DNA, 120 bp, Artificial Sequence
  ENSG00000124225_35 (sequence is synthesized)
attgtgctaagaaccgtccgtgttctcagaaagcccagtgtttttgcaaagaatgaaaagggaccccatatgtagcaaaaatcagggctgggggagagccgggttcattccctgtcctca

SEQ ID NO: 255117 - DNA, 120 bp, Artificial Sequence
  ENSG00000124225_36 (sequence is synthesized)
ttggtcgtccctatgaattgtacgtttcagagaaattttttttcctatgtgcaacacgaagcttccagaaccataaaatatcccgtcgataaggaaagaaaatgtcgttgttgttgtttt

SEQ ID NO: 255118 - DNA, 120 bp, Artificial Sequence
  ENSG00000124225_37 (sequence is synthesized)
tctggaaactgcttgaaatcttgctgtactatagagctcagaaggacacagcccgtcctcccctgcctgcctgattccatggctgttgtgctgattccaatgctttcacgttggttcctg

SEQ ID NO: 255119 - DNA, 120 bp, Artificial Sequence
  ENSG00000124225_38 (sequence is synthesized)
gcgtgggaactgctctcctttgcagccccatttcccaagctctgttcaagttaaacttatgtaagctttccgtggcatgcggggcgcgcacccacgtccccgctgcgtaagactctgtat

SEQ ID NO: 255120 - DNA, 120 bp, Artificial Sequence
  ENSG00000124225_39 (sequence is synthesized)
ttggatgccaatccacaggcctgaagaaactgcttgttgtgtatcagtaatcattagtggcaatgatgacattctgaaaagctgcaatacttatacaataaattttacaattctttggaa

SEQ ID NO: 255121 - DNA, 120 bp, Artificial Sequence
  ENSG00000124225_40 (sequence is synthesized)
ctgaacctccctctgggctgggcacgcttggactcctccaaagagcttggaccagcctgagccacatccctgggcttgacttctccagaacaagcctcctggtctttctgggagagctct

SEQ ID NO: 255122 - DNA, 120 bp, Artificial Sequence
  ENSG00000124225_41 (sequence is synthesized)
ggcagcatcactgtgcctgtgcagggagagcgggaacccacttcctgcaccggctttctctgagttcttcaggatgaattcgctctggtctagcggagctggagtttgttcagatcatca

SEQ ID NO: 255123 - DNA, 120 bp, Artificial Sequence
  ENSG00000124225_42 (sequence is synthesized)
acgcgagttcccgtctttcctggtcgtcctccttgggttcgggtgaaagcgcttgggggttcagtgggccatgatccccgagctgctggagaactgaaggcggacagtctcctgcgaaac

SEQ ID NO: 255124 - DNA, 120 bp, Artificial Sequence
  ENSG00000124225_43 (sequence is synthesized)
tggtcgtcctccttgggttcgggtgaaagcgcttgggggttcagtgggccatgatccccgagctgctggagaactgaaggcggacagtctcctgcgaaaccagcggagctggagtttgtt

SEQ ID NO: 255125 - DNA, 120 bp, Artificial Sequence
  ENSG00000124225_44 (sequence is synthesized)
ctgcacgtgcaactgcaaacgctctttgttccagagcatggagatcagttgtcatggattcccagtatgcaagtcgcatcagcatcaggagtggaagagtctctgctggtccttaaggtc

SEQ ID NO: 255126 - DNA, 120 bp, Artificial Sequence
  ENSG00000124225_45 (sequence is synthesized)
atcactggctttgggagcatgaaagtgacaaatccagccatgaatttgcctgagtgtcagtggttaagaatacaaaaagcggagctggagtttgttcagatcatcatcatcgtggtggtg

SEQ ID NO: 255127 - DNA, 120 bp, Artificial Sequence
  ENSG00000124225_46 (sequence is synthesized)
ctctccaggcccctgccacctgtttgcacatgaccctctacacccgccatagcaatggagaccccgcctcctgctacagttaattaatccttcttttttgcttcacaataaaaatagcat

SEQ ID NO: 255128 - DNA, 120 bp, Artificial Sequence
  ENSG00000124225_47 (sequence is synthesized)
ggctcttctgattgtaaaaagtgatatacactccttatttaacgaaaaattcaaagaatttgataaatgacaggcgaaaagtcaaaatgcctgcaattccagcacatggagcggagctgg

SEQ ID NO: 255129 - DNA, 120 bp, Artificial Sequence
  ENSG00000124226_0 (sequence is synthesized)
gcagagcggcagcaagatggcggcgcaacagcgggactgcgggggtgctgcgcagctggcggggccggcggcggaggctgaccccctaggacgcttcacgtgtcccgtgtgcttagaggt

SEQ ID NO: 255130 - DNA, 120 bp, Artificial Sequence
  ENSG00000124226_1 (sequence is synthesized)
gtacgagaagccggtacaggtgccctgcggacacgtcttttgctctgcatgcctgcaggaatgtctgaagccgaagaagcctgtctgtggggtgtgtcgcagcgctctggcacctggcgt

SEQ ID NO: 255131 - DNA, 120 bp, Artificial Sequence
  ENSG00000124226_2 (sequence is synthesized)
ccgagccgtggagctcgagcggcagatcgagagcacagagacttcttgccatggctgccgtaagaatttcttcctgtccaagatccggtcccacgtggctacttgttccaaataccagaa

SEQ ID NO: 255132 - DNA, 120 bp, Artificial Sequence
  ENSG00000124226_3 (sequence is synthesized)
ttacatcatggaaggtgtgaaggccaccattaaggatgcatctcttcagccaaggaatgttccaaaccgttacacctttccttgtccttactgtcctgagaagaactttgatcaggaagg

SEQ ID NO: 255133 - DNA, 120 bp, Artificial Sequence
  ENSG00000124226_4 (sequence is synthesized)
acttgtggaacactgcaaattattccatagcacggataccaaatctgtggtttgtccgatatgtgcctcgatgccctggggagaccccaactaccgcagcgccaacttcagagagcacat

SEQ ID NO: 255134 - DNA, 120 bp, Artificial Sequence
  ENSG00000124226_5 (sequence is synthesized)
ccagcgccggcaccggttttcttatgacacttttgtggattatgatgttgatgaagaggacatgatgaatcaggtgttgcagcgctccatcatcgaccagtgagcagagtccgtgcttgc

SEQ ID NO: 255135 - DNA, 120 bp, Artificial Sequence
  ENSG00000124226_6 (sequence is synthesized)
tatctgtctcatgttacagagcttccattacatattaaacgtgaaatctatgactcctgtaccttacctgttcaacagacctgaaaatgagccatggcattgggacagggtcacttctga

SEQ ID NO: 255136 - DNA, 120 bp, Artificial Sequence
  ENSG00000124226_7 (sequence is synthesized)
caggggaagtgggtccccaggtcagcccttctcttccctttgggctcttgccaaagctgtcttcccctactgttaaccttgtttgtcacacggtcgagttcgtattggttctcggctact

SEQ ID NO: 255137 - DNA, 120 bp, Artificial Sequence
  ENSG00000124226_8 (sequence is synthesized)
tcctggagcttctgccgcctcctgtggaagataatctagcttctccacctcttgtttcacactcattcctcccatccagtgtttgtctctcgggtccttcaagccagccaggaccttttc

SEQ ID NO: 255138 - DNA, 120 bp, Artificial Sequence
  ENSG00000124226_9 (sequence is synthesized)
tgggtcatgaatagcacaatgaagcaagtgtctcctttccttgtccccaaggtgtgcagactttggcagccgtgcacctgaccagagctgaagctcccgctgggctgtggggttgccaga

SEQ ID NO: 255139 - DNA, 120 bp, Artificial Sequence
  ENSG00000124226_10 (sequence is synthesized)
tttgtaccatctgatgctggaagttttgattagtgatattttctactactacatatttagagttcactggttcagtcttaaatgcctgcatggtgcctttttaggataaggtataaccat

SEQ ID NO: 255140 - DNA, 120 bp, Artificial Sequence
  ENSG00000124226_11 (sequence is synthesized)
acatttttggtggaagtgtttctgggttagggaagttaaagtctgtttatccgtaagtggggaggagggtcagctaagagaagtgggagggccagagctttttggttctgatttacaaat

SEQ ID NO: 255141 - DNA, 120 bp, Artificial Sequence
  ENSG00000124226_12 (sequence is synthesized)
taatgaagtagtttcaaacaacgcggtcatgtttacctctccatttgggagcctgcctacattcttgttctagaagcacaaaaaatcctcagatgaattagaagaaagaggtttggggac

SEQ ID NO: 255142 - DNA, 120 bp, Artificial Sequence
  ENSG00000124226_13 (sequence is synthesized)
tcagcggatactagttcttttaccttctgcttggtaacttagattaaactgagcattgtttttctgtcacaaatgttttccttatgacactggtttcgacatgtaaaatgtgtttgaaaa

SEQ ID NO: 255143 - DNA, 120 bp, Artificial Sequence
  ENSG00000124226_14 (sequence is synthesized)
cctgctttgtagatgcagagagaagctataggaaacccagtaccacccctggtctgttctgacgagacatcgttcataaggcacagcacatcgcaagatgaacagttgttaataaaagct

SEQ ID NO: 255144 - DNA, 120 bp, Artificial Sequence
  ENSG00000124226_15 (sequence is synthesized)
gttgctggaaacttgctttaggaacagctcaagaaccttggagttcatatttcacaaatattaataaatataagtccaagagctgtcagcctaatctgtaggagcagaacctctgattga

SEQ ID NO: 255145 - DNA, 120 bp, Artificial Sequence
  ENSG00000124226_16 (sequence is synthesized)
ccaaaaggcatatgggtttaggttggttttttgatgtcatatgtctctgatggggctgcaagtgctacctcgcgcttgtacactgctgctgtggggctccgcgcctgccggtgaagagct

SEQ ID NO: 255146 - DNA, 120 bp, Artificial Sequence
  ENSG00000124226_17 (sequence is synthesized)
gcagatgccgagaagccagcaaacacagggcccactggaaaaaaatagttttttcattagtatttctcgggaggacccaaaagttaaggtcagcttgttcactgtaatttctggaagaag

SEQ ID NO: 255147 - DNA, 120 bp, Artificial Sequence
  ENSG00000124226_18 (sequence is synthesized)
ttcactcagaccttcctgaattcagatcatctcagaagtctggagggaaatctggcgaaaccttcgtttgagggactgatgtgagtgtatgtccacctcactggtggcaccgagaaactt

SEQ ID NO: 255148 - DNA, 120 bp, Artificial Sequence
  ENSG00000124226_19 (sequence is synthesized)
acttccttgtattaagtgcacttcttgtatttctaataagatgactttccagaaagtgagatttgttatgttctggcttttaaaaggtaaaatataaataaatttcataacttaatctaa

SEQ ID NO: 255149 - DNA, 120 bp, Artificial Sequence
  ENSG00000124226_20 (sequence is synthesized)
acgagaagccggtacaggtgccctgcggacacgtcgctttgccttcacctgtaatgatagcagctcccgtttgtggtgcgttttgtaagggctggacactctgccaggggtctgctatac

SEQ ID NO: 255150 - DNA, 75 bp, Artificial Sequence
  ENSG00000124226_21 (sequence is synthesized)
ttgcacccggtctcttcatctttatttatgcatgcataatgtggtttttggttttgttttgttttttttctgaga

SEQ ID NO: 255151 - DNA, 120 bp, Artificial Sequence
  ENSG00000124226_22 (sequence is synthesized)
atgcatgcataatgtggtttttggttttgttttgttttttttctgagacagggtctggctttgttgcccgggctggagtgcaattgcgtggtctcagctcactgaaacctctgcctccca

SEQ ID NO: 255152 - DNA, 120 bp, Artificial Sequence
  ENSG00000124226_23 (sequence is synthesized)
gctgggactacaggcatgtgtcaccacgcctgcctaatttttttgtattttcagtagagacgagttttgcatgttgcccatgctgatctcgaactcgggagcgtgaagtgatggcccacc

SEQ ID NO: 255153 - DNA, 120 bp, Artificial Sequence
  ENSG00000124226_24 (sequence is synthesized)
actcgggagcgtgaagtgatggcccacctcagcctccctcaggattacaggtgtgagccaccgtactccgcccatgatgggctttttgtttgttttactgtatgcttttgcttttctcca

SEQ ID NO: 255154 - DNA, 120 bp, Artificial Sequence
  ENSG00000124226_25 (sequence is synthesized)
ttttcaagattagtgattgtactgttggcatgcctcagaaaatgtttttctttcctttatcttccctcttttcttcaattcttaaaactttctttctttttagaaaacctgtaatgaagc

SEQ ID NO: 255155 - DNA, 120 bp, Artificial Sequence
  ENSG00000124226_26 (sequence is synthesized)
actattctctgggttttcttctctttctgttttactgttgcacagcctagattttatatgaaaggctgggccgggcgtggtagctcacgcctgtaaacccagcactttggcaggctgagg

SEQ ID NO: 255156 - DNA, 120 bp, Artificial Sequence
  ENSG00000124226_27 (sequence is synthesized)
tttacctaaaggatcacttttctctgctgcacataacagaatgtggtttttggcttgctgtaaggagactagtttaaatgctagtatagaaaacttttaaaaacatcctagatttggagc

SEQ ID NO: 255157 - DNA, 120 bp, Artificial Sequence
  ENSG00000124226_28 (sequence is synthesized)
ttgtctgtgagcagacagcctatcatgaataggagcaaacctctaggagagttattttagagtggaagtggatatcctgatttagtcgaataaaatagcagccttggtattaatgggaaa

SEQ ID NO: 255158 - DNA, 120 bp, Artificial Sequence
  ENSG00000124226_29 (sequence is synthesized)
tctgcaataatcagggtttcagccccatcagcgtagtcaggagtttggtgagattatttgccagggtggtgtaggtctagttttctttgtgcccttgtttgggactatattttgcctgtt

SEQ ID NO: 255159 - DNA, 120 bp, Artificial Sequence
  ENSG00000124226_30 (sequence is synthesized)
agagtccatgtctttccatgataagttggggtaaaacgtacagctgccatgttgttgctgaagttagagcatgactaggtcactaacagcacgcgtgcatgccaattacctgtggtgatg

SEQ ID NO: 255160 - DNA, 120 bp, Artificial Sequence
  ENSG00000124226_31 (sequence is synthesized)
gctgggctggtttgttttcataaccttactggtttttgtttctttttttaagagttggttaagtatatattttaggtttgaaagccatagaaatcagttatcccagttttttcctataaa

SEQ ID NO: 255161 - DNA, 80 bp, Artificial Sequence
  ENSG00000124227_0 (sequence is synthesized)
gcggcggggccaactgggggcgcctctcgcctgcaccccaatgcgggacgcaggagcggtgcgcgggccggggctcaggg

SEQ ID NO: 255162 - DNA, 120 bp, Artificial Sequence
  ENSG00000124227_1 (sequence is synthesized)
gtgggctcggcggactcgcgggccctccccgcgcagcccctggcctgtgcccgcggccggagccagcggctcgtctgtgacccgaaggccgcgagtgccttgcccgacttggcccctgac

SEQ ID NO: 255163 - DNA, 120 bp, Artificial Sequence
  ENSG00000124227_2 (sequence is synthesized)
aaggccgcgagtgccttgcccgacttggcccctgacgtcttcgtcctgcgggtgcggctggaggagacgggggagatgttccgagtggcaaactgccgcggcgacatgaccgtgcgggag

SEQ ID NO: 255164 - DNA, 120 bp, Artificial Sequence
  ENSG00000124227_3 (sequence is synthesized)
ctcaaagaggagctggacctgatggtcggcatccccttcaacctccagcggctccagtacctcgacgaaggagttttgatggatgacactaccctgaagttccatgatgttgttcctgga

SEQ ID NO: 255165 - DNA, 120 bp, Artificial Sequence
  ENSG00000124227_4 (sequence is synthesized)
aagctatcttgtctcgggcttactgaagattccttctaccgaaccgcaaattcagaacattttgagggtgagaagtggaagcactggacgtctcagagggcgtttgtggcgttgtatgtg

SEQ ID NO: 255166 - DNA, 120 bp, Artificial Sequence
  ENSG00000124227_5 (sequence is synthesized)
gcctcacacagaggccactttgatgctgtgcagtaccttctagaacacggagccagctgcctcagcagatcccccctgggcaggacacccctgcatgtggctgcagctatgggccggtca

SEQ ID NO: 255167 - DNA, 120 bp, Artificial Sequence
  ENSG00000124227_6 (sequence is synthesized)
gactgtataatcctcctgctccagcacggggcctccatccacgacagagatgccaagggggagacccccatctccattgcacaccgcctgaaccacacactgagcgagaggcagatggtc

SEQ ID NO: 255168 - DNA, 120 bp, Artificial Sequence
  ENSG00000124227_7 (sequence is synthesized)
ctcctccaccggatagcaaagtcggggataagggatctgaatgacttggtcatgaagaatgctttgcagagggtcaagtctgggtttaggtctgagaagatgacgatgacccctcattag

SEQ ID NO: 255169 - DNA, 120 bp, Artificial Sequence
  ENSG00000124228_0 (sequence is synthesized)
aagtgacgcatggtacttgcgcaaagacgacgaggaggctgcgaaaagttaagggccggaccgcaggctgtgctcgcttccggaagtggcttctgcgacaacatgcttgcggacctcggc

SEQ ID NO: 255170 - DNA, 120 bp, Artificial Sequence
  ENSG00000124228_1 (sequence is synthesized)
ttaatcggaaccataggcgaggatgacgaggtgccggtggagcccgagtctgactccggggacgaggaagaggaggggcccattgtgctgggcagacgacaaaaagctttggggaagaac

SEQ ID NO: 255171 - DNA, 120 bp, Artificial Sequence
  ENSG00000124228_2 (sequence is synthesized)
cgcagtgctgatttcaaccctgatttcgttttcactgagaaggaggggacgtacgatggcagctgggccctggctgatgtcatgagccaactcaagaagaagagggcagccactacatta

SEQ ID NO: 255172 - DNA, 120 bp, Artificial Sequence
  ENSG00000124228_3 (sequence is synthesized)
gatgagaagattgagaaagttcgaaagaaaaggaaaacagaggataaagaagccaagtctgggaagttggaaaaggagaaagaagcaaaggaaggctctgaaccaaaggagcaggaagac

SEQ ID NO: 255173 - DNA, 120 bp, Artificial Sequence
  ENSG00000124228_4 (sequence is synthesized)
cttcaagagaatgatgaggaaggctcagaagatgaagcctcggagactgactactcatcagctgatgagaacatcctcaccaaagcagatacactcaaagtaaaggatcggaagaagaag

SEQ ID NO: 255174 - DNA, 120 bp, Artificial Sequence
  ENSG00000124228_5 (sequence is synthesized)
aagaagaaaggacaggaagcaggaggattttttgaagatgcatctcagtacgatgaaaacctctcgttccaggacatgaacctttcccgccctcttctgaaggccattacagccatgggc

SEQ ID NO: 255175 - DNA, 120 bp, Artificial Sequence
  ENSG00000124228_6 (sequence is synthesized)
ttcaagcagcccaccccgatccagaaggcgtgcatacctgtgggtctattggggaaggacatctgtgcctgtgcagccactgggacaggtaaaactgccgcctttgccctgcctgttttg

SEQ ID NO: 255176 - DNA, 120 bp, Artificial Sequence
  ENSG00000124228_7 (sequence is synthesized)
gagcgtctgatttataaaccccgccaggctccagtcacccgcgtgctggtgctagtgcccacccgagagctgggcatccaggtgcactctgtcaccagacagctggcccagttctgcaac

SEQ ID NO: 255177 - DNA, 120 bp, Artificial Sequence
  ENSG00000124228_8 (sequence is synthesized)
atcaccacctgcctggctgtgggcggcttggatgtgaagtctcaggaagcagctcttcgggcagcgcctgacatcctcatcgccaccccaggccggctcatcgatcacctccacaactgc

SEQ ID NO: 255178 - DNA, 120 bp, Artificial Sequence
  ENSG00000124228_9 (sequence is synthesized)
ccttccttccacctgagcagcatcgaggtgctcatcctggacgaggctgacaggatgctggatgagtactttgaggagcagatgaaggagatcatccgaatgtgttcccaccaccgccag

SEQ ID NO: 255179 - DNA, 120 bp, Artificial Sequence
  ENSG00000124228_10 (sequence is synthesized)
accatgctcttctcggccaccatgacagacgaggtgaaagatctggcttctgtctccttgaagaatcctgtccggatatttgtgaacagcaacacagatgtggctcccttcctgcggcag

SEQ ID NO: 255180 - DNA, 120 bp, Artificial Sequence
  ENSG00000124228_11 (sequence is synthesized)
ttcatccggatccggcctaatcgtgaaggagaccgggaagccatcgtggcagctttgttgacgaggaccttcactgaccatgtgatgctgttcacgcaaaccaagaagcaggcccaccgc

SEQ ID NO: 255181 - DNA, 120 bp, Artificial Sequence
  ENSG00000124228_12 (sequence is synthesized)
atgcacatcctcctggggctcatggggctgcaggtgggtgagctccatggcaacttgtcacagacgcagcggctggaggccctccggcgttttaaggatgaacagattgacatcctcgtg

SEQ ID NO: 255182 - DNA, 120 bp, Artificial Sequence
  ENSG00000124228_13 (sequence is synthesized)
gccactgatgtggcagcccgtggacttgacattgagggggtcaaaacggtaatcaacttcacaatgcctaataccatcaaacattatgtccaccgggtggggcgaacagcacgtgctggc

SEQ ID NO: 255183 - DNA, 120 bp, Artificial Sequence
  ENSG00000124228_14 (sequence is synthesized)
agggctgggcgctcagtctctctggtgggagaagatgagcggaagatgctgaaggagattgtaaaagctgccaaggcccctgtgaaggccaggatacttccccaagatgtcatcctcaaa

SEQ ID NO: 255184 - DNA, 120 bp, Artificial Sequence
  ENSG00000124228_15 (sequence is synthesized)
ttccgggacaagattgagaaaatggagaaagatgtgtatgcagttctgcagctagaggcggaggaaaaagagatgcagcagtcagaagcccagatcaatacagcaaagcggctcctggag

SEQ ID NO: 255185 - DNA, 120 bp, Artificial Sequence
  ENSG00000124228_16 (sequence is synthesized)
aaggggaaggaggcagtggtccaagagcccgagaggagctggttccagaccaaagaagagaggaagaaggagaaaattgccaaagctctgcaggaatttgacttggccttaagaggaaag

SEQ ID NO: 255186 - DNA, 120 bp, Artificial Sequence
  ENSG00000124228_17 (sequence is synthesized)
aagaaaaggaagaagtttatgaaggatgccaaaaaaaagggggagatgacagcagaggaaaggtctcagtttgaaatcctcaaggcgcagatgtttgctgaacggctagcgaagaggaat

SEQ ID NO: 255187 - DNA, 120 bp, Artificial Sequence
  ENSG00000124228_18 (sequence is synthesized)
cgcagagccaagcgggcccgagcaatgcccgaggaggagccagtgagaggtcctgccaagaagcaaaagcaggggaagaaatctgtatttgatgaagaactcaccaacacaagcaagaag

SEQ ID NO: 255188 - DNA, 120 bp, Artificial Sequence
  ENSG00000124228_19 (sequence is synthesized)
gccctgaaacagtatcgagctggcccttcctttgaagaaaggaaacagttgggcttgccccaccagagacgaggaggaaactttaaatctaaatccagatacaagaggaggaagtagctg

SEQ ID NO: 255189 - DNA, 120 bp, Artificial Sequence
  ENSG00000124228_20 (sequence is synthesized)
tcgtggcctgaagaaattcatgggggcagcccttaaatcccttccctgtgggaagtcatcctggctggtctgtcttttctccatttgtttaaaaaaaaaacaaaaacaaaaaacaacact

SEQ ID NO: 255190 - DNA, 120 bp, Artificial Sequence
  ENSG00000124228_21 (sequence is synthesized)
ttggtgtggtggtatggtacgtagctattttcctaagcatgtctgtcaatctcccttcttgctgattagctttcatatgactatattaaatggaagtatttttgggaaaagagaaaccaa

SEQ ID NO: 255191 - DNA, 120 bp, Artificial Sequence
  ENSG00000124228_22 (sequence is synthesized)
tgcactaatgatgatccgctgcctctcttctccacgggtccttcctccctttgctttatcgcctcaccaatcctctttgtgtcctgttcaactcccaaccacttggcatcagctgctgtt

SEQ ID NO: 255192 - DNA, 120 bp, Artificial Sequence
  ENSG00000124228_23 (sequence is synthesized)
gtacccgtcagtccagaccactgttctctgtcgcctggatcgttgcgcagcctcttgctcgagctccctgcttccactcggccttttgtgactctctgcattgcagagcatttacaatga

SEQ ID NO: 255193 - DNA, 120 bp, Artificial Sequence
  ENSG00000124228_24 (sequence is synthesized)
ttgcttgcagaagacattcgtacttattatgtccttatttgaacaccctgcggtggcttccattggtcttagactaaaatccaaacatcttagttttttaggactcttcgggcctggccc

SEQ ID NO: 255194 - DNA, 120 bp, Artificial Sequence
  ENSG00000124228_25 (sequence is synthesized)
cgggcctggcccttgcctgcccgggatcccagccttggaggcttgctcatggctccagccacattcgcctgcttgcacttttttttttttttctttgaggcagagtcttgctctgtcgcc

SEQ ID NO: 255195 - DNA, 120 bp, Artificial Sequence
  ENSG00000124228_26 (sequence is synthesized)
ccagccgcctgcttgcacttctcactataagctggttcctgcctccgggccttcatgtttgccatttcctctgtctagaatcttcccctggatcttcccatggatcatctgccttgtcat

SEQ ID NO: 255196 - DNA, 120 bp, Artificial Sequence
  ENSG00000124228_27 (sequence is synthesized)
tcaacctaatgtcacctcttcagagaggccagcccttagctgcttccccctcgtccctgcactctctctcacagcatttttcaccccccaggaattggcttctctgtatccaccctggaa

SEQ ID NO: 255197 - DNA, 120 bp, Artificial Sequence
  ENSG00000124228_28 (sequence is synthesized)
tttgagttccacaggacagggacagtgcctgtctatccagtgccaggcacagtgaccatactttgtggatgaggagggggtacatgttgaataagagcctagaaacagctgccagctcag

SEQ ID NO: 255198 - DNA, 120 bp, Artificial Sequence
  ENSG00000124228_29 (sequence is synthesized)
gaccctgagcattctattagaacattagcaggggacacatagcatgatcttggccttgaacattttaacctaaccactgtgaggtcatgtcttagatgtgtttagaactctaacttcata

SEQ ID NO: 255199 - DNA, 120 bp, Artificial Sequence
  ENSG00000124228_30 (sequence is synthesized)
gtcagagatgaccctcatgtccttggatgcttgtccctagcatgggagctgttgtgtggcgtgacagaggaagctggcttggaaaggcaacacatggtctcttcttggaagctttctgag

SEQ ID NO: 255200 - DNA, 120 bp, Artificial Sequence
  ENSG00000124228_31 (sequence is synthesized)
agtggtgaacattcctgggtctgattgaacaagatttagagtcaaagttagcagccattacttgagcatctactttgccaggcactgtgctgcgtgctttccatgtgatttcttgtttag

SEQ ID NO: 255201 - DNA, 120 bp, Artificial Sequence
  ENSG00000124228_32 (sequence is synthesized)
tcctcagagaatggcatcaaggtggttggcaaggaggaaccctttagaactctccacctaaccctgttcatcagtgggtgctgaaaggtgtttgttaaagataggctgatttaaactgag

SEQ ID NO: 255202 - DNA, 120 bp, Artificial Sequence
  ENSG00000124228_33 (sequence is synthesized)
tgctgttagcagatacagaactacgtttgctctgtatgatgggttgttgaagggtgggtgtaaatatcccatgtgctcacatttagaatctatccctatttttttttttttttgagacgg

SEQ ID NO: 255203 - DNA, 120 bp, Artificial Sequence
  ENSG00000124228_34 (sequence is synthesized)
ccagcctctatccccattttaatgccctgttctgtcctctgctggctcaggctcttgtggagcattattaggggagggtgtctggatgaacagctgtttgtgactgtttctaggcgtttt

SEQ ID NO: 255204 - DNA, 120 bp, Artificial Sequence
  ENSG00000124228_35 (sequence is synthesized)
tttggaggggcataggttttgggattagagataaaaacctttcatggaaaagaagcttctccatcctcattctggtcttaactctgattttcttacagatacaagaggaggaagtagctg

SEQ ID NO: 255205 - DNA, 120 bp, Artificial Sequence
  ENSG00000124228_36 (sequence is synthesized)
aacatcctcaccaaagcaggcaagttacttcaccatgctgccacaaagtgtcctcatctgtgaaacaaggttgacgatggtcacccctcagaggctgaagtgtggcattggcacttagga

SEQ ID NO: 255206 - DNA, 120 bp, Artificial Sequence
  ENSG00000124228_37 (sequence is synthesized)
gagttcatccggatccggcctaatcgtgaaggagaccgggaagccatcgtggcaggtggcagcacagggcaagcctgggcagggtgggctggtcagcttccttgagctcgtagtatccat

SEQ ID NO: 255207 - DNA, 120 bp, Artificial Sequence
  ENSG00000124232_0 (sequence is synthesized)
ggggtgtgcagggttccagcgacagcagcactggactcgtccagagggcggcgggtgagcggctggggccccgtggagccaccatggaccccgcaggggcagcagacccctcagtgcctc

SEQ ID NO: 255208 - DNA, 120 bp, Artificial Sequence
  ENSG00000124232_1 (sequence is synthesized)
ccaatcctttgactcacctgagcctgcaggacagatcagagatgcagctgcagagcgaagccgacaggcggagcctcccgggcacttggaccaggtcatccccagagcacaccaccattc

SEQ ID NO: 255209 - DNA, 120 bp, Artificial Sequence
  ENSG00000124232_2 (sequence is synthesized)
tgaggggaggcgtgcgcaggtgcctgcagcaacagtgtgaacagactgtgcggatcctgcatgccaaggtggcccagaaatcatacggaaatgagaagcggttcttctgccccccgccct

SEQ ID NO: 255210 - DNA, 120 bp, Artificial Sequence
  ENSG00000124232_3 (sequence is synthesized)
gtgtctacctctcggggcctggctggagggtgaagccagggcaggatcaagctcaccaggcgggggaaacggggcccacggtctgcggttacatgggactggacagcgcgtccggcagcg

SEQ ID NO: 255211 - DNA, 120 bp, Artificial Sequence
  ENSG00000124232_4 (sequence is synthesized)
ccactgagacgcagaagctgaatttcgagcagcagccggactccagggaattcggctgcgccaagaccctgtacatctcagatgcagacaagaggaagcactttcggctggtgctgcggc

SEQ ID NO: 255212 - DNA, 120 bp, Artificial Sequence
  ENSG00000124232_5 (sequence is synthesized)
tggtgctgcgcgggggccgggagctgggtaccttccacagccgccttatcaaggtcatctcgaagccctcgcagaagaagcagtcgctgaaaaacaccgatctgtgcatatcctccggct

SEQ ID NO: 255213 - DNA, 120 bp, Artificial Sequence
  ENSG00000124232_6 (sequence is synthesized)
caaaggtctccctcttcaaccgcctgcgctctcagacggtctccacacgctacctctctgtggaggatggggcctttgtggccagtgcacgacagtgggctgccttcacgctccacctgg

SEQ ID NO: 255214 - DNA, 120 bp, Artificial Sequence
  ENSG00000124232_7 (sequence is synthesized)
ctgatgggcactctgcccaaggagacttcccaccgcgagagggctacgttcgctatggctccctggtgcagctcgtctgcacggtcaccggcatcacactacctcccatgatcatccgta

SEQ ID NO: 255215 - DNA, 120 bp, Artificial Sequence
  ENSG00000124232_8 (sequence is synthesized)
aagtagcaaaacagtgtgcgctccttgatgtggatgagcccatctcccagctgcacaagtgtgcattccagtttccaggcagtcccccaggagggggtggcacctacttatgccttgcca

SEQ ID NO: 255216 - DNA, 120 bp, Artificial Sequence
  ENSG00000124232_9 (sequence is synthesized)
cagagaaggtggtgcaatttcaggcctctccctgccccaaggaggcgaacagggctctgcttaacgacagctcttgctggaccatcatcggcaccgagtcggtggaattttccttcagca

SEQ ID NO: 255217 - DNA, 120 bp, Artificial Sequence
  ENSG00000124232_10 (sequence is synthesized)
agaacttccacgcggggctcaaggtgtggtttggggacgtggaggcagaaaccatgtacaggagcccgcggtccctggtgtgcgtggtgccggacgtggcggccttctgcagcgactggc

SEQ ID NO: 255218 - DNA, 120 bp, Artificial Sequence
  ENSG00000124232_11 (sequence is synthesized)
gctggctgcgcgctcccatcacaatccccatgagcctggtgcgcgccgacgggctcttctaccctagtgccttctccttcacctacaccccggaatacagcgtgcggccgggtcaccccg

SEQ ID NO: 255219 - DNA, 120 bp, Artificial Sequence
  ENSG00000124232_12 (sequence is synthesized)
gcgtccccgagcccgccaccgacgccgacgcgctcctggagagcatccatcaggagttcacgcgcaccaacttccacctcttcatccagacttaggcgcgcccggtagccccggctgccc

SEQ ID NO: 255220 - DNA, 120 bp, Artificial Sequence
  ENSG00000124232_13 (sequence is synthesized)
accctggagggctgcgcccgcgccaggcgcggggacgtgtttctgggttctaggccctgcttccttgcccctttgctgcagaagggcagctgaaggctcaccctagaaaccgggcctggt

SEQ ID NO: 255221 - DNA, 120 bp, Artificial Sequence
  ENSG00000124232_14 (sequence is synthesized)
gggtcttacccggctcactccctcccttgtccttacacatacaggaagacaagacctgagtggtgctgtctttgtgtccgtcgtgtatggctctccctgtcttcatttcttctcactctg

SEQ ID NO: 255222 - DNA, 120 bp, Artificial Sequence
  ENSG00000124232_15 (sequence is synthesized)
tctctaaacctctctctctctcccttccccctcagtacttagtctacagacctatgtgcgtgtccctatccttctgtccttttctctcttcagctctccctgcctctcacacacaatttt

SEQ ID NO: 255223 - DNA, 120 bp, Artificial Sequence
  ENSG00000124232_16 (sequence is synthesized)
acatgccccgaggagccaagtttgggacatttaccctccaggcatctgtgtcccctcttgaagagaaaacacacagcttcacacatccaggcatagggggcaagctcttggggcatcagg

SEQ ID NO: 255224 - DNA, 120 bp, Artificial Sequence
  ENSG00000124232_17 (sequence is synthesized)
accctggagcaccaggtccttcctggaatattagatccacctggagcaccgggtctctctaagtctcacctggggaattcggtcccacctggggcaccagttcccacctagagcactgtg

SEQ ID NO: 255225 - DNA, 120 bp, Artificial Sequence
  ENSG00000124232_18 (sequence is synthesized)
tcctgccctagagcacaaagacctgctcctcccgagactctctctgactgcagccaggcatagtacctttgcctgtgtttgctccctggtccacagatttggtggctgggcaggtgcctg

SEQ ID NO: 255226 - DNA, 120 bp, Artificial Sequence
  ENSG00000124232_19 (sequence is synthesized)
gacagtgatgaggtcttgccgccttaactgtcccccccagtcacttctcccacaggcccagcaggacgcagtcctgaggatcagggattctacagctgcattaaaatcaatcctatccaa

SEQ ID NO: 255227 - DNA, 120 bp, Artificial Sequence
  ENSG00000124232_20 (sequence is synthesized)
aaaagaaaaggaaggaaggaaggaaaataaagaaaaaagaaagaagaaagaagaaagaagaaatcagctagctcaacaagctttcttaacgctaagtgagagaacttaagggcactgtcc

SEQ ID NO: 255228 - DNA, 120 bp, Artificial Sequence
  ENSG00000124232_21 (sequence is synthesized)
aagctgaggggacaagtgaaccccagagcctaggattagtatccagttcggtctaacgcagaagcccacgcgccatgctggctccctacactggtggccaccatgagaagcttcggcctc

SEQ ID NO: 255229 - DNA, 120 bp, Artificial Sequence
  ENSG00000124233_0 (sequence is synthesized)
agacaaggttttccaagcaagatgaagcccaacatcatctttgtactttccctgctcctcatcttggagaagcaagcagctgtgatgggacaaaaaggtggatcaaaaggccgattacca

SEQ ID NO: 255230 - DNA, 120 bp, Artificial Sequence
  ENSG00000124233_1 (sequence is synthesized)
agtgaattttcccaatttccacacggacaaaagggccagcactattctggacaaaaaggcaagcaacaaactgaatccaaaggcagtttttctattcaatacacatatcatgtagatgcc

SEQ ID NO: 255231 - DNA, 120 bp, Artificial Sequence
  ENSG00000124233_2 (sequence is synthesized)
aatgatcatgaccagtcccgaaaaagtcagcaatatgatttgaatgccctacataagacgacaaaatcacaacgacatctaggtggaagtcaacaactgctccataataaacaagaaggc

SEQ ID NO: 255232 - DNA, 120 bp, Artificial Sequence
  ENSG00000124233_3 (sequence is synthesized)
agagaccatgataaatcaaaaggtcattttcacagggtagttatacaccataaaggaggcaaagctcatcgtgggacacaaaatccttctcaagatcaggggaatagcccatctggaaag

SEQ ID NO: 255233 - DNA, 120 bp, Artificial Sequence
  ENSG00000124233_4 (sequence is synthesized)
ggaatatccagtcaatattcaaacacagaagaaaggctgtgggttcatggactaagtaaagaacaaacttccgtctctggtgcacaaaaaggtagaaaacaaggcggatcccaaagcagt

SEQ ID NO: 255234 - DNA, 120 bp, Artificial Sequence
  ENSG00000124233_5 (sequence is synthesized)
tatgttctccaaactgaagagctagtagctaacaaacaacaacgtgagactaaaaattctcatcaaaataaagggcattaccaaaatgtggttgaagtgagagaggaacattcaagtaaa

SEQ ID NO: 255235 - DNA, 120 bp, Artificial Sequence
  ENSG00000124233_6 (sequence is synthesized)
ttctacccaagatgagctcctagtatataacaagaatcaacaccagacaaaaaatctcaatcaagatcaacagcatggccgaaaggcaaataaaatatcataccaatcttcaagtacaga

SEQ ID NO: 255236 - DNA, 120 bp, Artificial Sequence
  ENSG00000124233_7 (sequence is synthesized)
agaaagacgactccactatggagaaaatggtgtgcagaaagatgtatcccaaagcagtatttatagccaaactgaagagaaagcacagggcaagtctcaaaaacagataacaattcccag

SEQ ID NO: 255237 - DNA, 120 bp, Artificial Sequence
  ENSG00000124233_8 (sequence is synthesized)
tcaagagcaagagcatagccaaaaggcaaataaaatatcataccaatcttcaagtacggaagaaagacgactccactatggagaaaatggtgtgcagaaagatgtatcccaacgcagtat

SEQ ID NO: 255238 - DNA, 120 bp, Artificial Sequence
  ENSG00000124233_9 (sequence is synthesized)
ttatagccaaactgaaaagctagtagcaggcaagtctcaaatccaggcaccaaatcctaagcaagagccatggcatggtgaaaatgcaaaaggagagtctggccaatctacaaatagaga

SEQ ID NO: 255239 - DNA, 120 bp, Artificial Sequence
  ENSG00000124233_10 (sequence is synthesized)
acaagacctactcagtcatgaacaaaaaggcagacaccaacatggatctcatgggggattggatattgtaattatagagcaggaagatgacagtgatcgtcatttggcacaacatcttaa

SEQ ID NO: 255240 - DNA, 120 bp, Artificial Sequence
  ENSG00000124233_11 (sequence is synthesized)
caacgaccgaaacccattatttacataaacctaccattcggtaaccatgtgaaaggatggaccaatatcaaggtgtcagttgacctcagtgaattctgtgatgtttctgagatgcagact

SEQ ID NO: 255241 - DNA, 120 bp, Artificial Sequence
  ENSG00000124233_12 (sequence is synthesized)
cccgtgtagtttcagattcttggtccatggatgacaccacctgcccatgcttccttgaattaggctttcctaacctgaagcgccttcaaacttccaataaagagatcattttctgcttca

SEQ ID NO: 255242 - DNA, 120 bp, Artificial Sequence
  ENSG00000124237_0 (sequence is synthesized)
aggagacgcgagacgctgagcccagggccagagcttgcggggcgcacagagcccccaggcctcatggcgcagaaacctctcagcaccgcggcggctgaacgcatgaaccttgtgggtcag

SEQ ID NO: 255243 - DNA, 120 bp, Artificial Sequence
  ENSG00000124237_1 (sequence is synthesized)
gatgagatctggaaataccgtctgaaggctgaatcggaagcacggcagaactggccccagaactgggggtttttaacaaccccttttgaggagttgatcaagtgtgaagaagatctcccc

SEQ ID NO: 255244 - DNA, 120 bp, Artificial Sequence
  ENSG00000124237_2 (sequence is synthesized)
accccaaagcccaaaatcgagcttcctgagcgtttccgcatccggccggtgaccccagtggagaagtacatcaaggtctttccatcccccccagtcccacagaccacccagggcttcatc

SEQ ID NO: 255245 - DNA, 120 bp, Artificial Sequence
  ENSG00000124237_3 (sequence is synthesized)
agctgtgctggcccaagcagggcgtgcactgaatccagacggagttctgcccaggggtgctgcatatcggtcaccaggcacccagggccatgccagggaaaggaagagctcccctgaatc

SEQ ID NO: 255246 - DNA, 120 bp, Artificial Sequence
  ENSG00000124237_4 (sequence is synthesized)
ccgaggacacagtcccctgcgtacttgctcatgggatgttgcaaagaacacaaagtgtgccttagacattctcaagtcatcagcgtcacccttccagaatgttcacgtccacacccattc

SEQ ID NO: 255247 - DNA, 120 bp, Artificial Sequence
  ENSG00000124237_5 (sequence is synthesized)
ttggctaatgtaatgaataaggcttctctcatttgtttttgataccttgggaatttctatgcagggctttaaaaaaaaataagtgattcaattttaaaaatatttgtctaggtccttcaa

SEQ ID NO: 255248 - DNA, 120 bp, Artificial Sequence
  ENSG00000124243_0 (sequence is synthesized)
atgcagcggaccgggggcggggctccgaggcccgggcgcaaccacgggctcccaggcagcctccgccagccggaccccgtcgccctcctgatgctgctcgtggacgctgatcagccggag

SEQ ID NO: 255249 - DNA, 120 bp, Artificial Sequence
  ENSG00000124243_1 (sequence is synthesized)
cccatgcgcagcggggcgcgcgagctcgcgctcttcctgacccccgagcctggggccgaggcgaaggaggtggaggagaccatcgagggcatgctcctcaggctggaagagttttgcagc

SEQ ID NO: 255250 - DNA, 120 bp, Artificial Sequence
  ENSG00000124243_2 (sequence is synthesized)
ctggctgacctgatcaggagtgatacttcacagatcctggaggaaaacatcccagtccttaaggccaaactgacagaaatgcgtggcatctatgccaaagtggaccggctagaggccttc

SEQ ID NO: 255251 - DNA, 120 bp, Artificial Sequence
  ENSG00000124243_3 (sequence is synthesized)
gtcaagatggttggacaccacgtcgccttcctggaagcagacgtgcttcaggctgagcgggaccatggggccttccctcaggccctgcggaggtggctgggatccgcagggctcccctcc

SEQ ID NO: 255252 - DNA, 120 bp, Artificial Sequence
  ENSG00000124243_4 (sequence is synthesized)
ttcaggaacaagtcacctgcaccggtgcccgtgacgtacgagctgcccacactgtataggacggaggactattttcctgtggacgccggggaagcacagcaccacccccgcacctgccct

SEQ ID NO: 255253 - DNA, 120 bp, Artificial Sequence
  ENSG00000124243_5 (sequence is synthesized)
cggcctttgtgagctttgtggtcttcccatcaggaacgctggaaagtgacattgtgtacacactgcagcttgggggttttttctttgtattgctgtttattttatattttaaaaatattt

SEQ ID NO: 255254 - DNA, 79 bp, Artificial Sequence
  ENSG00000124243_6 (sequence is synthesized)
ttctttgtattgctgtttattttatattttaaaaatatttaaaaaaatgtcgagatggggtctcactatgttgtccaga

SEQ ID NO: 255255 - DNA, 120 bp, Artificial Sequence
  ENSG00000124243_7 (sequence is synthesized)
cccaggctgctgccattttcaaatttcctccctgcctcatgtgagaccacagggtttggagaagcagttggaacccacgtgtggtgatgcctcccacatcggcctgcttggggttctaca

SEQ ID NO: 255256 - DNA, 120 bp, Artificial Sequence
  ENSG00000124243_8 (sequence is synthesized)
ggggttgagggaccaggcctggccggggctgatggacagtggggactttccttctctccatgatggctttgcaggggctccatggtccttctctctgtgatgggtttttgcacggggtgt

SEQ ID NO: 255257 - DNA, 120 bp, Artificial Sequence
  ENSG00000124243_9 (sequence is synthesized)
gctctgccactgtggtgggtgggtggatgctgcttctgttgcctccagacctcggtgcccacagccttgaggatccttccaataaaggtgtcaagagctcagccctggtctggtgtgaga

SEQ ID NO: 255258 - DNA, 120 bp, Artificial Sequence
  ENSG00000124243_10 (sequence is synthesized)
atgacggggagtgatagtttccttttcacctgtgcagtgttttctagaaggttcctcctgtgcctcacctgcgagggcctgatcctgggcacctgctgatgaggctccagctgagggagg

SEQ ID NO: 255259 - DNA, 120 bp, Artificial Sequence
  ENSG00000124243_11 (sequence is synthesized)
ggtagtcccggcctttggatttccagcaagagtgcagaggtcattaggacccccagggtcttcaaaggcttgtttacccacatttcttcccatgcagatgagtttcctgctattgtccta

SEQ ID NO: 255260 - DNA, 120 bp, Artificial Sequence
  ENSG00000124243_12 (sequence is synthesized)
acactccggatttctcactgtggcttcaacctgcaatgggtatttctggaattcctcgaagagccaagaacacacacataattcccctatgcacatacaggactgaactgtaaatctgca

SEQ ID NO: 255261 - DNA, 120 bp, Artificial Sequence
  ENSG00000124243_13 (sequence is synthesized)
ttagaatttcaagataatctgcctgggcaaggtgactcatgcctgtaatcccagcatcttgggaggctgaggcaggagggtcgcttatgcacagggtcaagactgcagtgagccgtgatt

SEQ ID NO: 255262 - DNA, 120 bp, Artificial Sequence
  ENSG00000124243_14 (sequence is synthesized)
gttctactgcaccctagcatgtgcaacagagcaagaccctgtcccccacaccccaaaaaagtttttcaaggaagcctaaaataatgaatctggcaagatagagtagaggccaggtgcagc

SEQ ID NO: 255263 - DNA, 78 bp, Artificial Sequence
  ENSG00000124243_15 (sequence is synthesized)
aggcagatatatctctaccaaaaatacaaaaattagcctggcgtgctggtgcacatctgtggtcccagctacttggga

SEQ ID NO: 255264 - DNA, 120 bp, Artificial Sequence
  ENSG00000124243_16 (sequence is synthesized)
gtaaccaagtgagatcttggctaaaaatgtttttaaaaattaaaaacagaaaagcagggaaatagtttagacaatttttggaattcagagatataggtagaccccttgtttctggaaaag

SEQ ID NO: 255265 - DNA, 79 bp, Artificial Sequence
  ENSG00000124243_17 (sequence is synthesized)
gaattcagagatataggtagaccccttgtttctggaaaagtcagcatttttattctctttttagtgcggtggcatgatc

SEQ ID NO: 255266 - DNA, 82 bp, Artificial Sequence
  ENSG00000124243_18 (sequence is synthesized)
gcatttttttattgaggtgacttttacaattttttttttctttaaatgagacacctgtcacccagcctggagtgcagtggtg

SEQ ID NO: 255267 - DNA, 87 bp, Artificial Sequence
  ENSG00000124243_19 (sequence is synthesized)
ttttattgaggtgacttttacaattttttttttctttaaatgagacacatggctccctgaaacctcaagctcctgggctcaagtgat

SEQ ID NO: 255268 - DNA, 120 bp, Artificial Sequence
  ENSG00000124243_20 (sequence is synthesized)
ttttgtagagacagggtctccctatgttgttcaggctggtcttgaacttctgggctcaggggaccctcctgtttcggcctcccaaaatgtagtgttggcacaaacctttattgaagtata

SEQ ID NO: 255269 - DNA, 120 bp, Artificial Sequence
  ENSG00000124243_21 (sequence is synthesized)
cccaaaatgtagtgttggcacaaacctttattgaagtataatttatattacagaaaggggtgcctaagtggttcactaaatttttcacaaactgagtgtatctatttaagcctcaccaga

SEQ ID NO: 255270 - DNA, 120 bp, Artificial Sequence
  ENSG00000124243_22 (sequence is synthesized)
ctgagcaaccaacattatcagcactgagcagccccctcatgcccgcttctggtccatgcccatacccacccccaccccaggctgacagcatactgacatctaaccatatggactggagtt

SEQ ID NO: 255271 - DNA, 120 bp, Artificial Sequence
  ENSG00000124243_23 (sequence is synthesized)
tcttgtttctgtgctctgtataaagagaggacacacgggatgtgtacctacggtgtgtcatctcttgtctctggcctcaccggcttgatgttaccttgggaggtgtcactgttgctgtgt

SEQ ID NO: 255272 - DNA, 120 bp, Artificial Sequence
  ENSG00000124243_24 (sequence is synthesized)
cactgtagatcattcccatggctgtgttgtattggctgggactgtttttatcgaagggagcttggacactctgcatgccccagtgtgctcagggagagcacacgttggatggaaagttgg

SEQ ID NO: 255273 - DNA, 72 bp, Artificial Sequence
  ENSG00000124243_25 (sequence is synthesized)
ctaaaaatacaaaaattagccaggtgctgtggtgcacctctgggaggtggaggttgcagcaagccaagatcg

SEQ ID NO: 255274 - DNA, 74 bp, Artificial Sequence
  ENSG00000124243_26 (sequence is synthesized)
gaagaaaaaggagaaagctaatgttaattttttagacaagcagttgaggacactcatttccggaagggtgagta

SEQ ID NO: 255275 - DNA, 120 bp, Artificial Sequence
  ENSG00000124243_27 (sequence is synthesized)
gacaagcagttgaggacactcatttccggaagggtgagtatctgctgagtgttgggcactcccaggcttctttctcctcccagcccctgaaacaggggccagggagagttggaaggaaat

SEQ ID NO: 255276 - DNA, 120 bp, Artificial Sequence
  ENSG00000124243_28 (sequence is synthesized)
cccatgtgattaagccgcagcaacgttgagtgtcctaaagcagggacccacaggccccacgctaggagcatggccctgaggttagcctgcctggcagcactgtccgctcccatgcctctt

SEQ ID NO: 255277 - DNA, 120 bp, Artificial Sequence
  ENSG00000124243_29 (sequence is synthesized)
agctgtgtgagctgggcttttcacttgctctctctgagtccagctgcccctgcggtaagacatgaggatggctctggtctgatgggttgtggtgagggtgacatgaggtgagctgtgtgc

SEQ ID NO: 255278 - DNA, 120 bp, Artificial Sequence
  ENSG00000124243_30 (sequence is synthesized)
atgctgggcacactggcgaggggctctcagtaatgggaggctgctgttgcagggcccgggctgtgatggggaaagggttgattgtcctgcgtttctcagttgaccagcggcatccgaggg

SEQ ID NO: 255279 - DNA, 120 bp, Artificial Sequence
  ENSG00000124243_31 (sequence is synthesized)
cctgaacagcgagtgactcagggactgcccttacgtgtcagagttagaagtcatgggagaatggaggctgctctctctgggtttccctgtcctgttaggaggggtgaggttgcacaggaa

SEQ ID NO: 255280 - DNA, 120 bp, Artificial Sequence
  ENSG00000124243_32 (sequence is synthesized)
atctatggggaaaaggtgacaagtgaactggaagtagccgttccaaagttcctaggatttgcactgccaaacaatgagctttaagggacgcttggaaacatctggggagaaggaaggccg

SEQ ID NO: 255281 - DNA, 120 bp, Artificial Sequence
  ENSG00000124243_33 (sequence is synthesized)
ggacactgcgccctgccatcaccaacccctaacctcagtcctctgagcggctccactgtccctgtgccaggtgacttcatgtgcgtcctcattaaagcaaagtgcctgacatttccattg

SEQ ID NO: 255282 - DNA, 120 bp, Artificial Sequence
  ENSG00000124243_34 (sequence is synthesized)
tccagtcaatgatgtcctcggttgctgactattgatggcctctaaccccttggtaagggtaactgcagcctaggaaagggtgatctgatctttctcttttttaaacagagacggggtttt

SEQ ID NO: 255283 - DNA, 120 bp, Artificial Sequence
  ENSG00000124243_35 (sequence is synthesized)
acctcctgggctcaagcgatcctcctaccttggccacccaaagtattgggattacagtcgtgagccaccgaggcctgccagtctttttcttttgtggctgatgttggacagggacaccag

SEQ ID NO: 255284 - DNA, 120 bp, Artificial Sequence
  ENSG00000124243_36 (sequence is synthesized)
gctgatgttggacagggacaccagtagaaaggtcactgcagatttcttcccaagagcaaggctcttcggtcaaccccctttcccactttcccagcggatgtgaacttcgtgctcaccaaa

SEQ ID NO: 255285 - DNA, 120 bp, Artificial Sequence
  ENSG00000124243_37 (sequence is synthesized)
gcaagaggtttcaaggtagcagcccatggggttgtatctgattggcagaaatgtgtggtttgccctgaattgttttaagatgttttcatgttgtgacaattgggtaaacttctggaaaaa

SEQ ID NO: 255286 - DNA, 120 bp, Artificial Sequence
  ENSG00000124243_38 (sequence is synthesized)
atagagctccatacctcactcagcacacctggattgtaaatcgattaggagcttaatgtataaaatgaatctattggccgggtgcagtggctcacacctgaatcctaccactttgggagg

SEQ ID NO: 255287 - DNA, 120 bp, Artificial Sequence
  ENSG00000124243_39 (sequence is synthesized)
gagttcaagaccagcatgggcaacatagcaaaaccccttctctgtaaaaaatagaaaaattagccaggcatggtggtgcttgcctatagacccagctacttggtgggaggtgggaagatt

SEQ ID NO: 255288 - DNA, 83 bp, Artificial Sequence
  ENSG00000124243_40 (sequence is synthesized)
agaaaaattagccaggcatggtggtgcttgcctatagacccagctacttggtgggaggtgggaagattgctcgagccagggaa

SEQ ID NO: 255289 - DNA, 120 bp, Artificial Sequence
  ENSG00000124243_41 (sequence is synthesized)
aaaataaaacgaatctattgaagaaataggttaaaaacattggcgaagtgtacaaaatcgagaagccataaaagaggtcaatttgattatataaaatttttaaacttctgcatggcaaaa

SEQ ID NO: 255290 - DNA, 120 bp, Artificial Sequence
  ENSG00000124243_42 (sequence is synthesized)
ccaacggaaaactcaaccaaaaaatcccaaaacaacaaaatcctaagcaaattcaaaagatagatgacaaattgggaaaatatatttgcatctcatgctacaaagggataatctccctaa

SEQ ID NO: 255291 - DNA, 120 bp, Artificial Sequence
  ENSG00000124243_43 (sequence is synthesized)
aaaatgtcacctacaaaaaagggaaacagtagcaaaacaggcaaaggctatgaacaggagtttcacagaaaatgcaaaacatgaaaagatactcaaccttaatgtatgccaataagtatg

SEQ ID NO: 255292 - DNA, 120 bp, Artificial Sequence
  ENSG00000124243_44 (sequence is synthesized)
tcaaccttaatgtatgccaataagtatggaaaaataccctgagatttttcacatttcaggctggcaaggattaaaatttttgatgacactattgaatttttttttttttttgagacagag

SEQ ID NO: 255293 - DNA, 120 bp, Artificial Sequence
  ENSG00000124243_45 (sequence is synthesized)
ggtcttgctggtgatattttgaagaaacatattcttgtacattgatggtgggacaccattctcatgggggggcaattggcatacctaacaaaattagaaatggtcctagctactcagtag

SEQ ID NO: 255294 - DNA, 69 bp, Artificial Sequence
  ENSG00000124243_46 (sequence is synthesized)
acaaaacccaatctcttaaaaaaaaaagggggggttgcggggggaaatgtcctcagacccagtaattcc

SEQ ID NO: 255295 - DNA, 120 bp, Artificial Sequence
  ENSG00000124243_47 (sequence is synthesized)
gggggttgcggggggaaatgtcctcagacccagtaattccacccctaggaatccagcttacacacacaagaaagaaaagataaatgtacaaggttagtcactgcacagtgagacagcaaa

SEQ ID NO: 255296 - DNA, 120 bp, Artificial Sequence
  ENSG00000124243_48 (sequence is synthesized)
agattagaaagaacccaagtgattattgatctgggttttattcctttatagcccaaccatatgatggaatactataatgttgtaaaaatgggttaagagttctttatgaattggtgtgga

SEQ ID NO: 255297 - DNA, 120 bp, Artificial Sequence
  ENSG00000124243_49 (sequence is synthesized)
aacatcgccaagatatgaaagccaaatgcagaaaaatatatgtggtatgctattatctatgtgaaaaagacattactattctctggaaggataaacacaaatttgagaatggtggatatc

SEQ ID NO: 255298 - DNA, 120 bp, Artificial Sequence
  ENSG00000124243_50 (sequence is synthesized)
tggggtgagaggtatccttttcactgttctttaaaagttttgatattttggtgtttgcctattcaaaaaaatggttaaaatcagttgccaccaattaaaaattaggagaatgcatataaa

SEQ ID NO: 255299 - DNA, 120 bp, Artificial Sequence
  ENSG00000124243_51 (sequence is synthesized)
attcgcctgcttgcttctcctgttcaatcgtttctttggaaggcagtggatttttctcttgcgtctctgtcttcttcagtttcgacttatcgaatttctcgatctcagccatatcggatt

SEQ ID NO: 255300 - DNA, 120 bp, Artificial Sequence
  ENSG00000124243_52 (sequence is synthesized)
tgtcagacatggttacggaggagaagcggagcgaggcacgcgagaacgagcgaagtctggtctgcgtagtggccaccactgagttgtccaattttatttatttttttgagacggagtttc

SEQ ID NO: 255301 - DNA, 120 bp, Artificial Sequence
  ENSG00000124243_53 (sequence is synthesized)
cctgtctctctgttgctggccctcctgcctccctcttgtaaggacccttgagattacgttgggcctacctggatgattcacagtgacctcccattccaagatccttaacttaatcacacc

SEQ ID NO: 255302 - DNA, 120 bp, Artificial Sequence
  ENSG00000124243_54 (sequence is synthesized)
tgcaggatcccttttgccaaggaaggtgacatattcacaggttctgggactaggacatgaacatctttgggagccatcgttctgctgcccacacttctccaggatttgctttcattaggc

SEQ ID NO: 255303 - DNA, 120 bp, Artificial Sequence
  ENSG00000124249_0 (sequence is synthesized)
acacggagcaggttgggaccgcggcgggtaccggggccggggcgccatgcggaggccgagcgtgcgcgcggccgggctggtcctgtgcaccctgtgttacctgctggtgggcgctgctgt

SEQ ID NO: 255304 - DNA, 120 bp, Artificial Sequence
  ENSG00000124249_1 (sequence is synthesized)
cttcgacgcgctcgagtccgaggcggaaagcggccgccagcgactgctggtccagaagcggggcgctctccggaggaagttcggcttctcggccgaggactaccgcgagctggagcgcct

SEQ ID NO: 255305 - DNA, 120 bp, Artificial Sequence
  ENSG00000124249_2 (sequence is synthesized)
ggcgctccaggctgagccccaccgcgccggccgccagtggaagttccccggctccttctacttcgccatcaccgtcatcactaccatcgagtacggccacgccgcgccgggtacggactc

SEQ ID NO: 255306 - DNA, 120 bp, Artificial Sequence
  ENSG00000124249_3 (sequence is synthesized)
cggcaaggtcttctgcatgttctacgcgctcctgggcatcccgctgacgctggtcactttccagagcctgggcgaacggctgaacgcggtggtgcggcgcctcctgttggcggccaagtg

SEQ ID NO: 255307 - DNA, 120 bp, Artificial Sequence
  ENSG00000124249_4 (sequence is synthesized)
ctgcctgggcctgcggtggacgtgcgtgtccacggagaacctggtggtggccgggctgctggcgtgtgccgccaccctggccctcggggccgtcgccttctcgcacttcgagggctggac

SEQ ID NO: 255308 - DNA, 120 bp, Artificial Sequence
  ENSG00000124249_5 (sequence is synthesized)
cttcttccacgcctactactactgcttcatcaccctcaccaccatcggcttcggcgacttcgtggcactgcagagcggcgaggcgctgcagaggaagctcccctacgtggccttcagctt

SEQ ID NO: 255309 - DNA, 120 bp, Artificial Sequence
  ENSG00000124249_6 (sequence is synthesized)
cctctacatcctcctggggctcacggtcattggcgccttcctcaacctggtggtcctgcgcttcctcgttgccagcgccgactggcccgagcgcgctgcccgcacccccagcccgcgccc

SEQ ID NO: 255310 - DNA, 120 bp, Artificial Sequence
  ENSG00000124249_7 (sequence is synthesized)
cccgggggcgcccgagagccgtggcctctggctgccccgccgcccggcccgctccgtgggctccgcctctgtcttctgccacgtgcacaagctggagaggtgcgcccgcgacaacctggg

SEQ ID NO: 255311 - DNA, 120 bp, Artificial Sequence
  ENSG00000124249_8 (sequence is synthesized)
cttttcgcccccctcgagcccgggggtcgtgcgtggcgggcaggctcccaggcttggggcccggtggaagtccatctgacaaccccacccaggccagggtcgaatctggaatgggagggt

SEQ ID NO: 255312 - DNA, 120 bp, Artificial Sequence
  ENSG00000124249_9 (sequence is synthesized)
ctggcttcagctatcagggcaccctccccagggattggaaacggatgacgggcctctaggcggtcttctgccacgagcagtttctcattactgtctgtggctaagtcccctccctccttt

SEQ ID NO: 255313 - DNA, 120 bp, Artificial Sequence
  ENSG00000124249_10 (sequence is synthesized)
gagaggctctgcacaggtccacctcagagccgaccctccagagcaacttttctgttgtgaagaggctggttttctgagtaacggttgaaatgtgcaactttcaacactggaatcttcgct

SEQ ID NO: 255314 - DNA, 120 bp, Artificial Sequence
  ENSG00000124249_11 (sequence is synthesized)
gcaattagtgaggtcagatgctcacactacgagaagcatggggaacaaaggtggaccaaatgggaccgtgtacagtccagtgttgacaagggggtcaatctcttgcgctaaacgatctca

SEQ ID NO: 255315 - DNA, 120 bp, Artificial Sequence
  ENSG00000124249_12 (sequence is synthesized)
ttctctgcccagtgtatagagtggaatcagcccatgtgtgaatgatggcctctttcccccagacagctgatgctctttgtccctggccagccccacttcaggatgagggaggccttgctg

SEQ ID NO: 255316 - DNA, 120 bp, Artificial Sequence
  ENSG00000124249_13 (sequence is synthesized)
tcacccacccaccatgtcactggggccacttggacacagcagaatgccatgggacgagctctcttccgggtcctgtcaatcaccagcaatatgaccttggagaatcgcatcctctcccag

SEQ ID NO: 255317 - DNA, 120 bp, Artificial Sequence
  ENSG00000124249_14 (sequence is synthesized)
ggcctcagtttccacatctgtagaatgacggggttcatccagaaccctgctccctcttacgcatctctggcaggactttctggaacaggcccctgcaccataagggggcagagacaaagc

SEQ ID NO: 255318 - DNA, 120 bp, Artificial Sequence
  ENSG00000124249_15 (sequence is synthesized)
ccgaggtgtggcatcctggcaccccgtggcactcagccacttcccctggcttcccagatagggctgtctcaacacaaagcatgaacgagccaggttagaaaagccaaaaactttaatttc

SEQ ID NO: 255319 - DNA, 120 bp, Artificial Sequence
  ENSG00000124249_16 (sequence is synthesized)
aacatgagctacatggtcatgaacacaatgcaacgcgaccccactccaacccaagggccccagaaaccctccctccctaaaggcctgggcggctgctgctccaagagagggaatgaggga

SEQ ID NO: 255320 - DNA, 120 bp, Artificial Sequence
  ENSG00000124249_17 (sequence is synthesized)
aaggtgggtggatggagagaggcccccagcctaaggacccaggctcctgccttcccaccacccgtccaggaagcagtcataaagtgaaagggctccagaggtgatgctcacagccctggg

SEQ ID NO: 255321 - DNA, 120 bp, Artificial Sequence
  ENSG00000124249_18 (sequence is synthesized)
ttcggctccattctgacctccctgaagcgctgggttagacgggcaccatcagcccacctcacaggctcggcgtcgggtgagctcgtggacgctaatgctttctgtccactctgaggtgct

SEQ ID NO: 255322 - DNA, 120 bp, Artificial Sequence
  ENSG00000124249_19 (sequence is synthesized)
gctccagatgtggggccctcccagagggcctcggagacaccataggggaacagggagaggggctcggtccctgggcctgacacagcactgctgctcaataaataaatgcaggtgaccttg

SEQ ID NO: 255323 - DNA, 120 bp, Artificial Sequence
  ENSG00000124251_0 (sequence is synthesized)
agcctgagtgctggctgaactgagaggaacagggttggtgcctggcactggtgttgctccattcatctctgaggtctcacagccccagcatgagtccatcagcaaagaagaggcccaaga

SEQ ID NO: 255324 - DNA, 120 bp, Artificial Sequence
  ENSG00000124251_1 (sequence is synthesized)
acagcagggtttccaagatgcaagatgagaaactgcgggacgagacagagcagcctgtgagcaaagtaattgagcggaaccgtctgagaacggtgttaaaaaacttgtcgctcttgaagc

SEQ ID NO: 255325 - DNA, 120 bp, Artificial Sequence
  ENSG00000124251_2 (sequence is synthesized)
tactcaagagctcaaaccgccggatccaagaactgcataagctggccaaaaggtgttggcattcactgctcagtgttccaaagattctccgcatctcctctggggaaaacagtgcctgca

SEQ ID NO: 255326 - DNA, 120 bp, Artificial Sequence
  ENSG00000124251_3 (sequence is synthesized)
ataaaacaaaacaaaataatgaagagttccaggagatcgggtgctccgagaaggaactcaagtccaagaaattagagtccacaggggaccctaagaaaaaagagtacaaggagtggaagt

SEQ ID NO: 255327 - DNA, 120 bp, Artificial Sequence
  ENSG00000124251_4 (sequence is synthesized)
cccaggtgcagtcagggatgaggaacaaggagaaaacgtcattggcggcaatgccacggaaagaaaagcatatagagcctgaggttccaaggacatcgagggatgatagcttgaaccctg

SEQ ID NO: 255328 - DNA, 120 bp, Artificial Sequence
  ENSG00000124251_5 (sequence is synthesized)
gagtccaggggaggcaaccactcaccgagggcccccgagtcatcttcattaagccctaccgcaatagaactcccatggggcacatgaagcagctggatgtagccgaccagtggatctggt

SEQ ID NO: 255329 - DNA, 120 bp, Artificial Sequence
  ENSG00000124251_6 (sequence is synthesized)
ttgaggggctgcccacacgaatccacctcccggcgcccagggtgatgtgcagatcctccaccctgcgttgggtcaagcgccgctgcacccgcttctgctccgcatcacttgaaatgccta

SEQ ID NO: 255330 - DNA, 120 bp, Artificial Sequence
  ENSG00000124251_7 (sequence is synthesized)
tgtggcatccatacaaggttgatgtgacctggacgagagccagaggtgcgagcagagggtggagatcgcgccatcagctgaaggggaggaatgggtggcgaaattcacgagtctacaaat

SEQ ID NO: 255331 - DNA, 120 bp, Artificial Sequence
  ENSG00000124251_8 (sequence is synthesized)
aagatcttccatatggcacctaagacgaatactgcttactctgcctgtttgtctggggctgggaaggatgaaggaaagaggccttcggtagagggagcctgtgtcgcgacttcaggcttc

SEQ ID NO: 255332 - DNA, 120 bp, Artificial Sequence
  ENSG00000124251_9 (sequence is synthesized)
tctagaaccaaagaagccagcgagcagcacccctcccccacctccgcgagctagtctcctgagtggcgcgctctgtgaagtcagggcgctcgtgtgcttcctgggtgcaaagtgcctcac

SEQ ID NO: 255333 - DNA, 120 bp, Artificial Sequence
  ENSG00000124251_10 (sequence is synthesized)
aatcgccccgcgagctcgcaagaggaaaccgcggcgcggaggcagcaagtaacttgcccaggctcactcagctagaaagtggcaggagcaagggctcctggttgctccccattccatttt

SEQ ID NO: 255334 - DNA, 120 bp, Artificial Sequence
  ENSG00000124251_11 (sequence is synthesized)
cccaagaaagggaaaaggcgaaatgagagcctgctcagaagtcacgaggcaggcggaatagccccagcaccctgtaggtcatgcgcgtgcattgcgacctgattgtcaaaaattgattgt

SEQ ID NO: 255335 - DNA, 120 bp, Artificial Sequence
  ENSG00000124251_12 (sequence is synthesized)
caaaaactgattgcactgtggctggtgtcaaaaagtggatgtcagctgggcctccaaatgtgtcctgccttggtcacagatcacagaaggcaccggatcaggagggggagctggtactgc

SEQ ID NO: 255336 - DNA, 120 bp, Artificial Sequence
  ENSG00000124251_13 (sequence is synthesized)
atctctactgctccagggtgacatggcaggtccaccctcaatctgaagacctcaaccccaagccctggtcgaccccatctggccggggtcaccctctgtcggtaggagtcacagggtcct

SEQ ID NO: 255337 - DNA, 120 bp, Artificial Sequence
  ENSG00000124251_14 (sequence is synthesized)
aaccatgccgttggggagaggaaagccaagggagcccgagttttctccggacgaagacctccatattccccagaggcaggctgcatggagtgggcgccctcgggagagcagtggagccat

SEQ ID NO: 255338 - DNA, 120 bp, Artificial Sequence
  ENSG00000124251_15 (sequence is synthesized)
cgaggggcacagagctctccgggattgggggtcagggcagcgatgcagatagatctccagtttgggacagagggagaacgattggatggactctccccccctcccaccccgcccactcac

SEQ ID NO: 255339 - DNA, 120 bp, Artificial Sequence
  ENSG00000124251_16 (sequence is synthesized)
acactcctccccaccattactgggcaccaagactgggcatcagctgccgcgcggaccagcctgggcggagccacagcgcggggactgcttagcacctcatagtggctgctgcgtgctccc

SEQ ID NO: 255340 - DNA, 120 bp, Artificial Sequence
  ENSG00000124251_17 (sequence is synthesized)
gagctcctgctcccagcgcaatcttcctggagctcccctacggtcggtgcctacctccgcccccaccaccccgctaattcccgtgcaaattccaccccagtaaccactttcagcggtctt

SEQ ID NO: 255341 - DNA, 120 bp, Artificial Sequence
  ENSG00000124251_18 (sequence is synthesized)
cccacccagcttgcactccagcccatttcctgaacagtctcccttgcagttcccttgctgggtattttcaatcccatcaactttcgaaaataatctctactcactcttccattccatcaa

SEQ ID NO: 255342 - DNA, 120 bp, Artificial Sequence
  ENSG00000124251_19 (sequence is synthesized)
aaacccttgctctgaagtcacaggcctgacttccagactaggctctgcccctaaggaaatcacctttctggtcttagtctccccatctgaaaatggcataaccaacctacctgcctcaaa

SEQ ID NO: 255343 - DNA, 120 bp, Artificial Sequence
  ENSG00000124251_20 (sequence is synthesized)
tacaagaccctgcttgtgaagcgtctcctggctcagaccagtgctagaagtgtccagtctagcagctcctggaccaagactccgtggccattcccttcctcctgccttccatccaccccc

SEQ ID NO: 255344 - DNA, 120 bp, Artificial Sequence
  ENSG00000124251_21 (sequence is synthesized)
ggccgggcgggtcagagctggaagggtgggccgctacgccgcgccccccgacgccggcaaggagccagcacctccacggtgctaagaggggcgctgcgctgctggccaggcgggggtgga

SEQ ID NO: 255345 - DNA, 120 bp, Artificial Sequence
  ENSG00000124251_22 (sequence is synthesized)
caacccttttatcctgtgcctgttccccttttatcctgttgtagttttcatcttctaagaactatttcattgggttggtttgattcttatttctcattaatggatagagtagatacttca

SEQ ID NO: 255346 - DNA, 120 bp, Artificial Sequence
  ENSG00000124253_0 (sequence is synthesized)
acggccttcccactgggaacacaaacttgctggcgggaagagcccggaaagaaacctgtggatctcccttcgagatcatccaaagagaagaaaggtgacctcacattcgtgccccttagc

SEQ ID NO: 255347 - DNA, 120 bp, Artificial Sequence
  ENSG00000124253_1 (sequence is synthesized)
agcactctgcagaaatgcctcctcagctgcaaaacggcctgaacctctcggccaaagttgtccagggaagcctggacagcctaccccaggcagtgagggagtttctcgagaataacgctg

SEQ ID NO: 255348 - DNA, 120 bp, Artificial Sequence
  ENSG00000124253_2 (sequence is synthesized)
agctgtgtcagcctgatcacatccacatctgtgacggctctgaggaggagaatgggcggcttctgggccagatggaggaagagggcatcctcaggcggctgaagaagtatgacaactgct

SEQ ID NO: 255349 - DNA, 120 bp, Artificial Sequence
  ENSG00000124253_3 (sequence is synthesized)
ggttggctctcactgaccccagggatgtggccaggatcgaaagcaagacggttatcgtcacccaagagcaaagagacacagtgcccatccccaaaacaggcctcagccagctcggtcgct

SEQ ID NO: 255350 - DNA, 120 bp, Artificial Sequence
  ENSG00000124253_4 (sequence is synthesized)
ggatgtcagaggaggattttgagaaagcgttcaatgccaggttcccagggtgcatgaaaggtcgcaccatgtacgtcatcccattcagcatggggccgctgggctcgcctctgtcaaaga

SEQ ID NO: 255351 - DNA, 120 bp, Artificial Sequence
  ENSG00000124253_5 (sequence is synthesized)
tcggcatcgagctgacggattcaccctacgtggtggccagcatgcggatcatgacgcggatgggcacgcccgtcctggaagcagtgggcgatggggagtttgtcaaatgcctccattctg

SEQ ID NO: 255352 - DNA, 120 bp, Artificial Sequence
  ENSG00000124253_6 (sequence is synthesized)
tggggtgccctctgcctttacaaaagcctttggtcaacaactggccctgcaacccggagctgacgctcatcgcccacctgcctgaccgcagagagatcatctcctttggcagtgggtacg

SEQ ID NO: 255353 - DNA, 120 bp, Artificial Sequence
  ENSG00000124253_7 (sequence is synthesized)
gcgggaactcgctgctcgggaagaagtgctttgctctcaggatggccagccggctggccaaggaggaagggtggctggcagagcacatgctgattctgggtataaccaaccctgagggtg

SEQ ID NO: 255354 - DNA, 120 bp, Artificial Sequence
  ENSG00000124253_8 (sequence is synthesized)
agaagaagtacctggcggccgcatttcccagcgcctgcgggaagaccaacctggccatgatgaaccccagcctccccgggtggaaggttgagtgcgtcggggatgacattgcctggatga

SEQ ID NO: 255355 - DNA, 120 bp, Artificial Sequence
  ENSG00000124253_9 (sequence is synthesized)
agtttgacgcacaaggtcatttaagggccatcaacccagaaaatggctttttcggtgtcgctcctgggacttcagtgaagaccaaccccaatgccatcaagaccatccagaagaacacaa

SEQ ID NO: 255356 - DNA, 120 bp, Artificial Sequence
  ENSG00000124253_10 (sequence is synthesized)
tctttaccaatgtggccgagaccagcgacgggggcgtttactgggaaggcattgatgagccgctagcttcaggtgtcaccatcacgtcctggaagaataaggagtggagctcagaggatg

SEQ ID NO: 255357 - DNA, 120 bp, Artificial Sequence
  ENSG00000124253_11 (sequence is synthesized)
gggaaccttgtgcccaccccaactcgaggttctgcacccctgccagccagtgccccatcattgatgctgcctgggagtctccggaaggtgttcccattgaaggcattatctttggaggcc

SEQ ID NO: 255358 - DNA, 120 bp, Artificial Sequence
  ENSG00000124253_12 (sequence is synthesized)
gtagacctgctggtgtccctctagtctatgaagctctcagctggcaacatggagtctttgtgggggcggccatgagatcagaggccacagcggctgcagaacataaaggcaaaatcatca

SEQ ID NO: 255359 - DNA, 120 bp, Artificial Sequence
  ENSG00000124253_13 (sequence is synthesized)
tgcatgacccctttgccatgcggcccttctttggctacaacttcggcaaatacctggcccactggcttagcatggcccagcacccagcagccaaactgcccaagatcttccatgtcaact

SEQ ID NO: 255360 - DNA, 120 bp, Artificial Sequence
  ENSG00000124253_14 (sequence is synthesized)
ggttccggaaggacaaggaaggcaaattcctctggccaggctttggagagaactccagggtgctggagtggatgttcaaccggatcgatggaaaagccagcaccaagctcacgcccatag

SEQ ID NO: 255361 - DNA, 120 bp, Artificial Sequence
  ENSG00000124253_15 (sequence is synthesized)
gctacatccccaaggaggatgccctgaacctgaaaggcctggggcacatcaacatgatggagcttttcagcatctccaaggaattctgggagaaggaggtggaagacatcgagaagtatc

SEQ ID NO: 255362 - DNA, 120 bp, Artificial Sequence
  ENSG00000124253_16 (sequence is synthesized)
tggaggatcaagtcaatgccgacctcccctgtgaaatcgagagagagatccttgccttgaagcaaagaataagccagatgtaatcagggcctgagtgctttacctttaaaatcattccct

SEQ ID NO: 255363 - DNA, 120 bp, Artificial Sequence
  ENSG00000124253_17 (sequence is synthesized)
ttcccatccataaggtgcagtaggagcaagagagggcaagtgttcccaaattgacgccaccataataatcatcaccacaccgtgagcagatctgaaaggcacactttgatttttttaagg

SEQ ID NO: 255364 - DNA, 120 bp, Artificial Sequence
  ENSG00000124253_18 (sequence is synthesized)
ataagaaccacagaacactgggtagtagctaatgaaattgagaagggaaatcttagcatgcctccaaaaattcacatccaatgcatagtttgttcaaatttaaggttactcaggcattga

SEQ ID NO: 255365 - DNA, 120 bp, Artificial Sequence
  ENSG00000124253_19 (sequence is synthesized)
aatttaaggttactcaggcattgatcttttcagtgttttttcactttagctatgtggattagctagaatgcacaccaaaaaaatacttgagctgtatatatatatgtgtgtgtgtgtgtg

SEQ ID NO: 255366 - DNA, 120 bp, Artificial Sequence
  ENSG00000124253_20 (sequence is synthesized)
tatgtgcacatgtgtctgtgtggtatatttgtgtatgtgtatttgtatgtactgttattgaaaatatatttaatacctttggaaaaatcttgggcaagatgacctactagttttccttga

SEQ ID NO: 255367 - DNA, 120 bp, Artificial Sequence
  ENSG00000124253_21 (sequence is synthesized)
aaaaaagttgctttgttattaatattgtgcttaaattatttttatacaccattgttccttacctttacataattgcaatatttcccccttactacttcttggaaaaaaattacaaaatga

SEQ ID NO: 255368 - DNA, 120 bp, Artificial Sequence
  ENSG00000124253_22 (sequence is synthesized)
agttttatagaaaagatggatttgctttgcttggtttttcttatttgagctaccaagaggagagaactctgattaaatatcttgtgatttaaatcctgccccctccccaagaaggtgggg

SEQ ID NO: 255369 - DNA, 120 bp, Artificial Sequence
  ENSG00000124253_23 (sequence is synthesized)
acgttcagaatcacacttgaagagggggtgcattgcctggtcccagggagaaggagggagcagatggggaggaatgaggcagggaaccatggttggggttttctgaatttgctgaagcca

SEQ ID NO: 255370 - DNA, 120 bp, Artificial Sequence
  ENSG00000124253_24 (sequence is synthesized)
ctagttggcatcctttaacaattctacaaacctttagatggtgaggcttatgtggcaggactgggagggtttaatgcatgctttttgacagtttggatctggaggggtctcaggcttcca

SEQ ID NO: 255371 - DNA, 120 bp, Artificial Sequence
  ENSG00000124253_25 (sequence is synthesized)
caaaaattacattgtggacagtttcataggattttgccttttaactcttcaaagcaacagttttctcaactgtcatccccgcgggggagcagaggaagacaagtgagaaggaaaagggga

SEQ ID NO: 255372 - DNA, 120 bp, Artificial Sequence
  ENSG00000124253_26 (sequence is synthesized)
caggatctgggttgagcaagcattaattgagcgccttctgtatcccggacatcatgccaacaccatgggctgcccgagaagagaggtgggtggtttggtccccagctctgccttgaaccc

SEQ ID NO: 255373 - DNA, 120 bp, Artificial Sequence
  ENSG00000124253_27 (sequence is synthesized)
tcacctgctctcctctactcccagtgtttattggatattccagaacagtccaaacgaaccataaactttatatcacagattcaatctgtgtaaatactattatcttcaagttgtagtttc

SEQ ID NO: 255374 - DNA, 120 bp, Artificial Sequence
  ENSG00000124253_28 (sequence is synthesized)
tttcttgggcccaggctgtgaaattggcttcacccctaccacaccccagcgggcaggcttgttcttatgtcacactccacccctccagtctcctcaactggaaaacttgcctcttttcct

SEQ ID NO: 255375 - DNA, 120 bp, Artificial Sequence
  ENSG00000124253_29 (sequence is synthesized)
cacttcctctgctccttacaatggcttcatatggaaggtgaagctgagatcaccccaattttacaggtgaggaaactgaggtcaagctaggagcgtccagcggggctgagaaattgccag

SEQ ID NO: 255376 - DNA, 120 bp, Artificial Sequence
  ENSG00000124253_30 (sequence is synthesized)
gatttccttccccattaaggagctgagagtcttagctccagacacgttggcttgttagaatatcaaaaccaccgaaggggaaaaaccacttactggaattaaatgctatctgctgtatta

SEQ ID NO: 255377 - DNA, 120 bp, Artificial Sequence
  ENSG00000124253_31 (sequence is synthesized)
gtttaaatcagtggcgttcaaacttgtttctccttttcactgcggaacacgttcttgacatgtacttgactcagagtcccatgtctaaaggagacagagcccaaggcagcccacctgaag

SEQ ID NO: 255378 - DNA, 120 bp, Artificial Sequence
  ENSG00000124253_32 (sequence is synthesized)
ctggggagggagtccaaagtgcaagccacctggtctccatttccccgccccttgggggcctttgggcagctccttggacccctgaaagaggccaccaggataaactttgttaaaatgcat

SEQ ID NO: 255379 - DNA, 120 bp, Artificial Sequence
  ENSG00000124253_33 (sequence is synthesized)
gccttgtgccccactgtcctattacgggctttcagtagtctccactccctcggcaggcaaagacactggccatctccaaattccctcccctcctgcacagcatcagccacctggcaagca

SEQ ID NO: 255380 - DNA, 120 bp, Artificial Sequence
  ENSG00000124253_34 (sequence is synthesized)
gtctcacataggaccatttgccagcaggccctgcaagcctgggggacagcctagaggaggtgacttacatacacagcataagagttttcaggagaccaaaaagattcaatatatgtcatt

SEQ ID NO: 255381 - DNA, 120 bp, Artificial Sequence
  ENSG00000124253_35 (sequence is synthesized)
aactcctgactcagtttccccaaaccatgcctcctgagtgctccctctgtctccaaatcctgatttttgtgcgcggacccctgtctacaataaacaggatcctatgacttctttcttcaa

SEQ ID NO: 255382 - DNA, 120 bp, Artificial Sequence
  ENSG00000124253_36 (sequence is synthesized)
atttaaagctgggaggttctgccaccaagcacggccttcccactgggaacacaaacttgctggcgggaagagcccggaaagaaacctgtggatctcccttcgagatcatccaaagagaag

SEQ ID NO: 255383 - DNA, 120 bp, Artificial Sequence
  ENSG00000124253_37 (sequence is synthesized)
aaaggtaagtagagctttgcatttacattttgaaaaattacaaagatgaactcatttttttcctgagagcaataactatttggcaatgcacagccctggcaaaaggccgtcgaatgtgtt

SEQ ID NO: 255384 - DNA, 120 bp, Artificial Sequence
  ENSG00000124253_38 (sequence is synthesized)
gctcccctgcgtctcctgggagttggtggagaaaggtgaatgaaggccttcgggtagtttcagactcttgagaagatgaatgcaatggtcagaaccatacagacttgaattttgtgacat

SEQ ID NO: 255385 - DNA, 120 bp, Artificial Sequence
  ENSG00000124253_39 (sequence is synthesized)
tagtgggccagcccaagctttaaatgaggtgtgtgcacaaaagctctgccaactagattcctgattaaaaaaaaggcagcccctctcctacagaccaggtcctagtggagtaaatgtcca

SEQ ID NO: 255386 - DNA, 120 bp, Artificial Sequence
  ENSG00000124253_40 (sequence is synthesized)
cctggccatgtcttagatggtctgtgtgttcacactgatggactgttgttagcgtgctcagcactctgctaggcatggaaagccacggtactgaaggagatggttcgctgcccgtggtgc

SEQ ID NO: 255387 - DNA, 120 bp, Artificial Sequence
  ENSG00000124253_41 (sequence is synthesized)
aaaacagcagagagccttttcttatttacatctatcctaatggtaattcaaacaataatggaagctcccaccacctcagatgtctttcagttccatacatgaagttggcaatgtattgaa

SEQ ID NO: 255388 - DNA, 120 bp, Artificial Sequence
  ENSG00000124253_42 (sequence is synthesized)
aatgcacatccctcttctgcttttacagactgtcttatacaaacgtgaaaactagttccatgcatatgggttttaaatagcttggtgggacccaattgcacatttatgaaaactctttaa

SEQ ID NO: 255389 - DNA, 120 bp, Artificial Sequence
  ENSG00000124253_43 (sequence is synthesized)
tttcagcaggctgttcactttccagtggcctcttctaacccagggggctggtgaccagcagggtgtggtggtgttagtggaacaccgtgaaaatgggtctacctgggaaaaaaatgctgg

SEQ ID NO: 255390 - DNA, 120 bp, Artificial Sequence
  ENSG00000124253_44 (sequence is synthesized)
gtgccctctgcctttacaaagtaagtgtattatttcagaatcaaaagtcaaaataaaaaagaaagctgaacgcaaaccccagtgagtgcctcggggacccccaagcagggccctggcgca

SEQ ID NO: 255391 - DNA, 120 bp, Artificial Sequence
  ENSG00000124253_45 (sequence is synthesized)
tgcagatgagaggcctggggggtggcagaaacaaacagcattacagttcccacccgtcagcacacctctctgagcgtgcaggttcccggacagatcgggaaaccccaccagtaatgatta

SEQ ID NO: 255392 - DNA, 120 bp, Artificial Sequence
  ENSG00000124253_46 (sequence is synthesized)
gtttacacatatacatcgcttttgaaggcccccaaacaccaggggaccatagagatcctttggacttcatgattctgggagtgtttgtttgcactgatacctgaagaaatagatcttgag

SEQ ID NO: 255393 - DNA, 120 bp, Artificial Sequence
  ENSG00000124253_47 (sequence is synthesized)
taacgattggactcaagcgaatcgttggccttcgaaacatgtcacattctcctcagtccagtgtttggatttttaaactctgttagtccagagttggccaagccttagaaatatggatcc

SEQ ID NO: 255394 - DNA, 120 bp, Artificial Sequence
  ENSG00000124253_48 (sequence is synthesized)
tgtaagaattcttcaacttaatattcaatctggattgaaactgggccatatgttgctgtttgtttacatacatacatttgtttaaatggtattggtggaaaattgtggaggaagcaagag

SEQ ID NO: 255395 - DNA, 120 bp, Artificial Sequence
  ENSG00000124253_49 (sequence is synthesized)
tcgtaaacgtatcaaagttgcatatgatgcttggatgaaaagagataaatgcatattctagggagggaaaaaagatttgagaagttggcatagaaattagtccggcaatatataagagta

SEQ ID NO: 255396 - DNA, 120 bp, Artificial Sequence
  ENSG00000124253_50 (sequence is synthesized)
aggggcttcctttcttgagcttccttcccaaagatccagaataattggcaagttcaaatgtagaaccaacccttctggtcacctggaacctttctgaatccctgatctattgtagcttga

SEQ ID NO: 255397 - DNA, 120 bp, Artificial Sequence
  ENSG00000124253_51 (sequence is synthesized)
tcaaattttactttttactttgtggcctcagtcatgtaactttgagttagcagttttctgcaatttagcttggtgaacgcaaaactagctcgattacaaagttattgtcttgccgtgtct

SEQ ID NO: 255398 - DNA, 120 bp, Artificial Sequence
  ENSG00000124256_0 (sequence is synthesized)
agagctgcaagaagcaccaggctcggccacttcagaagccccagcctcgacctagcccaccctctcagggccacagtgcagaagcctgcacacctgccaagtctctccgactccttgcag

SEQ ID NO: 255399 - DNA, 120 bp, Artificial Sequence
  ENSG00000124256_1 (sequence is synthesized)
ctgctgtcagcatggcccaggctcctgctgacccgggcagagaaggccaccttgaacaaagaatcctgcaggtgctgacagaggctggctccccggtgaaacttgcccagctggtgaagg

SEQ ID NO: 255400 - DNA, 120 bp, Artificial Sequence
  ENSG00000124256_2 (sequence is synthesized)
aatgccaagcacccaagagggagctcaaccaagtcctctaccgaatgaaaaaggagttgaaagtctccctcacatcccctgccacctggtgcttgggcgggactgatcctgaaggcgagg

SEQ ID NO: 255401 - DNA, 120 bp, Artificial Sequence
  ENSG00000124256_3 (sequence is synthesized)
gtcctgcagagctggccttgtccagccctgccgagaggccccagcaacatgcagctacaattccagagacccctggccctcagttcagccaacaacgggaggaagacatctacaggtttc

SEQ ID NO: 255402 - DNA, 120 bp, Artificial Sequence
  ENSG00000124256_4 (sequence is synthesized)
tcaaagacaatggtccccagagggccctggtcatcgcccaagcactgggaatgaggacagcaaaagatgtgaaccgagacttgtacaggatgaagagcaggcaccttctggacatggatg

SEQ ID NO: 255403 - DNA, 120 bp, Artificial Sequence
  ENSG00000124256_5 (sequence is synthesized)
agcagtccaaagcatggacgatttaccgcccagaagattctggaagaagagcaaagtcagcctcaattatttaccagcacaatccaatcaacatgatctgccagaatggacccaacagct

SEQ ID NO: 255404 - DNA, 120 bp, Artificial Sequence
  ENSG00000124256_6 (sequence is synthesized)
ggatttccattgcaaactccgaagccatccagattggacacgggaacatcattacaagacagacagtctccagggaggacggttccgccggtccacgccacctcccttcaatggcaccag

SEQ ID NO: 255405 - DNA, 120 bp, Artificial Sequence
  ENSG00000124256_7 (sequence is synthesized)
gtgattcctcaacttgggggaccctagttgatccctgggggccccaggacatccacatggagcagtccatactgagacgggtgcagctgggacacagcaatgagatgaggctccacggcg

SEQ ID NO: 255406 - DNA, 120 bp, Artificial Sequence
  ENSG00000124256_8 (sequence is synthesized)
gaactcaccctgagggggaagccgcccagagaatccacatgaaatcgtgctttctcgaggacgccaccatcggcaacagcaacaaaatgtctatcagcccaggggtggctggcccaggag

SEQ ID NO: 255407 - DNA, 120 bp, Artificial Sequence
  ENSG00000124256_9 (sequence is synthesized)
gagtcgcagggtctggagagggggagccaggggaggacgcaggtcgtcgtcccgcagacacacaatccagaagtcactttcctcgagacattggtcagcccatcactcccagccactcga

SEQ ID NO: 255408 - DNA, 120 bp, Artificial Sequence
  ENSG00000124256_10 (sequence is synthesized)
agctcacccccaagctggaaactatgactcttggaaacaggagtcacaaagctgcagaaggcagccactatgtggatgaagcctcacacgaggggagctggtggggaggtgggatttagt

SEQ ID NO: 255409 - DNA, 120 bp, Artificial Sequence
  ENSG00000124256_11 (sequence is synthesized)
gcacagcctcacgtggggcttggacacaggctgggggtgggcgcatgctagggagactagcctgctgctctctgcattccttagcgtcttgtttgacctgcttgcttccagacataacct

SEQ ID NO: 255410 - DNA, 120 bp, Artificial Sequence
  ENSG00000124256_12 (sequence is synthesized)
gcatgaatcagttttgggggaatggacctggcatggggatgggttcaggccaggtcttttgatggccaggagtagatgacagggagttgccttggggaacctttggtgtgccaagaggag

SEQ ID NO: 255411 - DNA, 120 bp, Artificial Sequence
  ENSG00000124256_13 (sequence is synthesized)
gtgggtagatgggagtggggctcggtcccccaggcccaggggactctctccactctttcctgggctcggggcatctgcctggagttaccttccatcatggctacctgctgtggtttgaat

SEQ ID NO: 255412 - DNA, 79 bp, Artificial Sequence
  ENSG00000124256_14 (sequence is synthesized)
ggagttaccttccatcatggctacctgctgtggtttgaatgtttgagtcccaacaaaattcatatcaaaacataatccc

SEQ ID NO: 255413 - DNA, 120 bp, Artificial Sequence
  ENSG00000124256_15 (sequence is synthesized)
ctcggtggggagccaccggatcctctgggtgggggcaaagggtagggatggggagtggggggattctgccctccaaggggaaagggttgcttccagacccccacagtccacctttacggc

SEQ ID NO: 255414 - DNA, 120 bp, Artificial Sequence
  ENSG00000124256_16 (sequence is synthesized)
cgtcctgagaatgaggacacctggatcaaagctctcctgatttccctgtactctgatactttctacctcattttaaagtttaatttaatttttatttttctaataaaattttaaaattaa

SEQ ID NO: 255415 - DNA, 120 bp, Artificial Sequence
  ENSG00000124256_17 (sequence is synthesized)
ggttttgatttttaagagctgcctcaggaggagcaggggccatttggagaattcctccttgaacctcttggggtcctgcttagtcctcattaaactcaggccaggaaacagcagcacatt

SEQ ID NO: 255416 - DNA, 120 bp, Artificial Sequence
  ENSG00000124256_18 (sequence is synthesized)
gccaactggccaaggagaagctacccgggccctgcccagggtctattgggtaaacgtctgtccctagagacagacactcactcattcagtcctttttttttttttttccagagatggggt

SEQ ID NO: 255417 - DNA, 120 bp, Artificial Sequence
  ENSG00000124256_19 (sequence is synthesized)
cttgtccaggctggagtgcagtggtgcattcatagctcactgcaactgctacctcctagattcaagcgatcctcccacttttagcctcttaagcagctgggactacaggcatatgccatc

SEQ ID NO: 255418 - DNA, 83 bp, Artificial Sequence
  ENSG00000124256_20 (sequence is synthesized)
cctctaggggtcctcccatctcagccttctgatgtgctaggattacaagtgtgagccaccactcctggccccattcattcatt

SEQ ID NO: 255419 - DNA, 120 bp, Artificial Sequence
  ENSG00000124256_21 (sequence is synthesized)
tacaagtgtgagccaccactcctggccccattcattcattcattcattcactcagtcactcatacattcaactgccatttcctgagcacctactgtgtgcccagcactgtgctagatgct

SEQ ID NO: 255420 - DNA, 120 bp, Artificial Sequence
  ENSG00000124256_22 (sequence is synthesized)
gaaggtacaacagtgagccatgcaagcacagcaggggacactaggggaagttctgcaggggacccacacacaagcagcgtcccagccactctgggacacagagacaggctttccctagga

SEQ ID NO: 255421 - DNA, 120 bp, Artificial Sequence
  ENSG00000124256_23 (sequence is synthesized)
agtggcatctgaggaggcctggaggttgagtagacatcatacaggttggggcgtgagggaagggtgctcctggcagcaggaacagtgtgcacaaaggggctggggagagtggggctgaag

SEQ ID NO: 255422 - DNA, 120 bp, Artificial Sequence
  ENSG00000124256_24 (sequence is synthesized)
ggagcacagacaggccagcacttggagggaagttgggggcaggtgcaggccaagctgggtggttggcagagccagatctggagggtacctgactggagctggcgggccaacggggagcct

SEQ ID NO: 255423 - DNA, 120 bp, Artificial Sequence
  ENSG00000124256_25 (sequence is synthesized)
atcactgtacctaggagatggtgaagaggaagggggtggtgctggcagaaaagagaggagtggggggattccagagaatccaggaatggcatttccagggctccacgactgggcactggg

SEQ ID NO: 255424 - DNA, 120 bp, Artificial Sequence
  ENSG00000124256_26 (sequence is synthesized)
ggaaaggtctgtttctgatgtctggtcggtctctggcttggatggatagtggcgccatggatggatggtgagctgagaggagggcactcccggggaggatggcgatgggcatcaggtaaa

SEQ ID NO: 255425 - DNA, 120 bp, Artificial Sequence
  ENSG00000124256_27 (sequence is synthesized)
cccaggcaggcgtcccaggcaggacttgcctttgcgctcccaggtccccctgcctccctctggctccgtccttctgccctctactcccctctgccctgaggacacctgagagctgaggaa

SEQ ID NO: 255426 - DNA, 120 bp, Artificial Sequence
  ENSG00000124256_28 (sequence is synthesized)
ccccactgccctctggaacccacacccggggagggcacaggcgaggtggcacctcccctggccaccaggctgcgcagccaaggccgtttctgatcagcctgcatgcctccctctgggcag

SEQ ID NO: 255427 - DNA, 120 bp, Artificial Sequence
  ENSG00000124256_29 (sequence is synthesized)
atgcagctgccctactgctcttagggggcatctgctggggtccttgccctttcctctgccctggacccctctcaaaaaggggcctacgtgcctcctggagcctccagcctgggctcaact

SEQ ID NO: 255428 - DNA, 120 bp, Artificial Sequence
  ENSG00000124256_30 (sequence is synthesized)
gaatctgaactctgccacatgggagctcacaggtttcctctctctgtgccttggtttctttttctggttgatggagctcacagcagggctgcttggtaggggttgctgagaggaggccct

SEQ ID NO: 255429 - DNA, 120 bp, Artificial Sequence
  ENSG00000124256_31 (sequence is synthesized)
cccagccctgcacacaggaggtactctgcagaacactaacaattataatagaaaatcatcatgatggagacagcaatgacgccatggtcccaatcacagaacatatgcagtcccaccagc

SEQ ID NO: 255430 - DNA, 120 bp, Artificial Sequence
  ENSG00000124256_32 (sequence is synthesized)
cccccttttctagctttacagcccacagccagaaggagctgccatttatcatgcacttaagattagccaggcactgttttggggttcacccagccctcacacaaccccaggaggcaaagg

SEQ ID NO: 255431 - DNA, 120 bp, Artificial Sequence
  ENSG00000124256_33 (sequence is synthesized)
aggctgagccccggagaagttaatcggcaggaagccgcagctgccagggcgcaggcaggatttgaagtcaagtgtgttgaactctggagtctgagtttgcaactaccggcattgccactt

SEQ ID NO: 255432 - DNA, 120 bp, Artificial Sequence
  ENSG00000124256_34 (sequence is synthesized)
aagcaggcagcagaggagagaggagctgaatcccagaggaagacactgacgtccagatcagccgggcgggatcagtggggcagacccactgcgggatcagtggagcagaaagacgcttcc

SEQ ID NO: 255433 - DNA, 120 bp, Artificial Sequence
  ENSG00000124256_35 (sequence is synthesized)
tttttttttctttcaaaagacgaacagagaagtttcattttctttttctcctgaaaccgaatctggccggcctggctaggcatctatttccgggctgtaagcagctgacacctgcccagt

SEQ ID NO: 255434 - DNA, 120 bp, Artificial Sequence
  ENSG00000124256_36 (sequence is synthesized)
cgtgctttctcgaggacgccaccatcggcaacagcaacaaaatgtctatcagcccaggggtggctggcccaggaggagtcgcagggtctggagagggggagccaggggaggacgcagttg

SEQ ID NO: 255435 - DNA, 120 bp, Artificial Sequence
  ENSG00000124256_37 (sequence is synthesized)
taacggcatgtagattggtgatcttttccagaagattttcaacttactttgcccagatccatctgaggaatcactctgtgttgcacttatgccctcataaaatatatttattgaagaata

SEQ ID NO: 255436 - DNA, 120 bp, Artificial Sequence
  ENSG00000124257_0 (sequence is synthesized)
cttcctcccgccccttctttggtccctacggacctggggggcggtggcggtcaatgccgggtcaaggtccgcgggcctcgcagatcgtagcccgggcgcacgcgatcagatgatcctgtt

SEQ ID NO: 255437 - DNA, 120 bp, Artificial Sequence
  ENSG00000124257_1 (sequence is synthesized)
gtggacggctaagttgtaggcgggatggctgagaaagcggcgctaggacccccgggcagaggctcggggaagggagtcaggggggaaatgccttacaaggtcgccttgcggtcaccatca

SEQ ID NO: 255438 - DNA, 120 bp, Artificial Sequence
  ENSG00000124257_2 (sequence is synthesized)
ttgcccgccgcccaaaatagcccccggcgccagctggcctgccctatggccgagagatggctgctgcctccgagcccgtggattcgggtgcactctggggactcgagcgcccggagcccc

SEQ ID NO: 255439 - DNA, 120 bp, Artificial Sequence
  ENSG00000124257_3 (sequence is synthesized)
ctcccacccgcttccatcgggtgcacggtgccaacatccgcgtggacccctctgggacgcgggccacacgcgtggagagcttcgcccacggcgtgtgcttcagccgcgagccgctggccc

SEQ ID NO: 255440 - DNA, 120 bp, Artificial Sequence
  ENSG00000124257_4 (sequence is synthesized)
cgggccaggtcttcctggtcgagatcgaggagaaagagctgggctggtgcggacatctgcgtctcggtctgaccgcgctggaccccgccagtctggcccccgttcccgagttttctctgc

SEQ ID NO: 255441 - DNA, 120 bp, Artificial Sequence
  ENSG00000124257_5 (sequence is synthesized)
cggaggcggaggcagcggcccccagccgacctccaaccctcctcgtggaaccatatctgcgcattgagcagtttcgcattccccgggaccgcctggtgggccgcagccggccagggctct

SEQ ID NO: 255442 - DNA, 120 bp, Artificial Sequence
  ENSG00000124257_6 (sequence is synthesized)
acagccatctcttggaccagctctatgagctgaacgtgctgcctccgaccgcgcgccgtagccgcctgggtgtcctcttttgcccgcgccccgatggcacggccgacatgcacatcatca

SEQ ID NO: 255443 - DNA, 120 bp, Artificial Sequence
  ENSG00000124257_7 (sequence is synthesized)
tcaacggcgaggacatgggcccgagcgcccggggactgccagctgcgcagcccctctacgcggtggtggacgtgtttgcttccacaaagagcgtgcgccttgtccagctcgagtatggct

SEQ ID NO: 255444 - DNA, 120 bp, Artificial Sequence
  ENSG00000124257_8 (sequence is synthesized)
tgccatccctgcagactctgtgccgcctagtgatacaaaggagcatggtgcaccggctggccattgatgggctccacctgcccaaagaacttaaggatttctgcaagtatgagtgaagac

SEQ ID NO: 255445 - DNA, 120 bp, Artificial Sequence
  ENSG00000124257_9 (sequence is synthesized)
ccacagtgcaccagagcacagctgcatcctggagccccagacctgtggctggctggtccgaagttggccacattgctgccagccaagaccagaaataaacagccgatgctgacatcttga

SEQ ID NO: 255446 - DNA, 120 bp, Artificial Sequence
  ENSG00000124260_0 (sequence is synthesized)
actaacttacgcctcggggatcagagagaagcgaggttctcgttctgagggacaggcttgagatcggctgaagagagcgggcccaggctctgtgaggaggcaagggaggtgagaaccttg

SEQ ID NO: 255447 - DNA, 120 bp, Artificial Sequence
  ENSG00000124260_1 (sequence is synthesized)
ctctcagagggtgactcaagtcaacacagggaacccctcttttctacagacacagtgggtcgcaggatctgacaagagtccaggagctccagggactgtgaggtgaggccttggtctaag

SEQ ID NO: 255448 - DNA, 120 bp, Artificial Sequence
  ENSG00000124260_2 (sequence is synthesized)
gcagtgttttcaggtcacagagcagaaagggcccagacagtgccaggagtcaaggttctcaggggacagggagagcaagaggtcaagagctgtgggacaccacagagcagcactgaagga

SEQ ID NO: 255449 - DNA, 120 bp, Artificial Sequence
  ENSG00000124260_3 (sequence is synthesized)
gaagacctgcctgtgggtccccatcgcccaagtcctgcccacactcccacctgctaccctgatcagagtcatcatgcctcgagctccaaagcgtcagcgctgcatgcctgaagaagatct

SEQ ID NO: 255450 - DNA, 120 bp, Artificial Sequence
  ENSG00000124260_4 (sequence is synthesized)
tcaatcccaaagtgagacacagggcctcgagggtgcacaggctcccctggctgtggaggaggatgcttcatcatccacttccaccagctcctcttttccatcctcttttccctcctcctc

SEQ ID NO: 255451 - DNA, 120 bp, Artificial Sequence
  ENSG00000124260_5 (sequence is synthesized)
ctcttcctcctcctcctcctgctatcctctaataccaagcaccccagaggaggtttctgctgatgatgagacaccaaatcctccccagagtgctcagatagcctgctcctccccctcggt

SEQ ID NO: 255452 - DNA, 120 bp, Artificial Sequence
  ENSG00000124260_6 (sequence is synthesized)
cgttgcttcccttccattagatcaatctgatgagggctccagcagccaaaaggaggagagtccaagcaccctacaggtcctgccagacagtgagtctttacccagaagtgagatagatga

SEQ ID NO: 255453 - DNA, 120 bp, Artificial Sequence
  ENSG00000124260_7 (sequence is synthesized)
aaaggtgactgatttggtgcagtttctgctcttcaagtatcaaatgaaggagccgatcacaaaggcagaaatactggagagtgtcataagaaattatgaagaccacttccctttgttgtt

SEQ ID NO: 255454 - DNA, 120 bp, Artificial Sequence
  ENSG00000124260_8 (sequence is synthesized)
tagtgaagcctccgagtgcatgctgctggtctttggcattgatgtaaaggaagtggatcccactggccactcctttgtccttgtcacctccctgggcctcacctatgatgggatgctgag

SEQ ID NO: 255455 - DNA, 120 bp, Artificial Sequence
  ENSG00000124260_9 (sequence is synthesized)
tgatgtccagagcatgcccaagactggcattctcatacttatcctaagcatagtcttcatagagggctactgcacccctgaggaggtcatctgggaagcactgaatatgatggggctgta

SEQ ID NO: 255456 - DNA, 120 bp, Artificial Sequence
  ENSG00000124260_10 (sequence is synthesized)
tgatgggatggagcacctcatttatggggagcccaggaagctgctcacccaagattgggtgcaggaaaactacctggagtaccggcaggtgcctggcagtgatcctgcacggtatgagtt

SEQ ID NO: 255457 - DNA, 120 bp, Artificial Sequence
  ENSG00000124260_11 (sequence is synthesized)
atgaggaggctttgaaagatgaggaagagagagcccaggacagaattgccaccacagatgatactactgccatggccagtgcaagttctagcgctacaggtagcttctcctaccctgaat

SEQ ID NO: 255458 - DNA, 120 bp, Artificial Sequence
  ENSG00000124260_12 (sequence is synthesized)
aaagtaagacagattcttcactgtgttttaaaaggcaagtcaaataccacatgattttactcatatgtggaatctaaaaaaaaaaaaaaaaaaagttggtatcatggaagtagagagtag

SEQ ID NO: 255459 - DNA, 120 bp, Artificial Sequence
  ENSG00000124260_13 (sequence is synthesized)
agcagtagttacattacaattaaataggaggaataagttctagtgttctattgcacagtaggatgactatagttaacattaagatattgtatattacaaaacagctagaaggaaggcttt

SEQ ID NO: 255460 - DNA, 120 bp, Artificial Sequence
  ENSG00000124260_14 (sequence is synthesized)
tcaatattgtcaccaaaaagaaatgataaatgcatgaggtgatggatacactacctgatttgatcattatactacatatacatgaatcagaacatcaaattgtacctcataaatatctac

SEQ ID NO: 255461 - DNA, 120 bp, Artificial Sequence
  ENSG00000124260_15 (sequence is synthesized)
aattacatgtcagtttttgtttatgtttttgtttttttttaatttatgaaaacaaatgagaatggaaatcaatgatgtatgtggtggagggccaggctgaggctgaggaaaatacagtgc

SEQ ID NO: 255462 - DNA, 120 bp, Artificial Sequence
  ENSG00000124260_16 (sequence is synthesized)
ctgaggctgaggaaaatacagtgcataacatctttgtcttactgttttctttggataacctggggacttcttttcttttcttcttggtattttattttctttttcttcttcttctttttt

SEQ ID NO: 255463 - DNA, 120 bp, Artificial Sequence
  ENSG00000124260_17 (sequence is synthesized)
ggtgtgagccactgcacccagcctcttcttggtattttaaaatgttgttacttttactagaatgtttatgagcttcagaatctaaggtcacacgttcgtttctgtttatccagtttaaga

SEQ ID NO: 255464 - DNA, 120 bp, Artificial Sequence
  ENSG00000124260_18 (sequence is synthesized)
aacagttttgctattttgtaaaacaaattgggaacccttccatcatatttgtaatctgtaataaaataacatggaattggaatagtaattttcttggaaatatgaaaaaaatagtaaaat

SEQ ID NO: 255465 - DNA, 120 bp, Artificial Sequence
  ENSG00000124260_19 (sequence is synthesized)
agtaaaatagagaaaataattttaagtgttagtatttttatttctttattatttttagtttatcatcctgcaaaattaaaagttatatccctggatcttgttaagtcgaaattaaactgt

SEQ ID NO: 255466 - DNA, 120 bp, Artificial Sequence
  ENSG00000124275_0 (sequence is synthesized)
ggagctttctattggtcctgggtaccgagcatgggcgctgcgtcagtgcgcgctggcgcaaggttggtggaagtcgcgttgtgcagtttcactgttacatgccttgaagtgatgaggagg

SEQ ID NO: 255467 - DNA, 120 bp, Artificial Sequence
  ENSG00000124275_1 (sequence is synthesized)
tttctgttactatatgctacacagcagggacaggcaaaggccatcgcagaagaaatatgtgagcaagctgtggtacatggattttctgcagatcttcactgtattagtgaatccgataag

SEQ ID NO: 255468 - DNA, 120 bp, Artificial Sequence
  ENSG00000124275_2 (sequence is synthesized)
tatgacctaaaaaccgaaacagctcctcttgttgttgtggtttctaccacgggcaccggagacccacccgacacagcccgcaagtttgttaaggaaatacagaaccaaacactgccggtt

SEQ ID NO: 255469 - DNA, 120 bp, Artificial Sequence
  ENSG00000124275_3 (sequence is synthesized)
gatttctttgctcacctgcggtatgggttactgggtctcggtgattcagaatacacctacttttgcaatggggggaagataattgataaacgacttcaagagcttggagcccggcatttc

SEQ ID NO: 255470 - DNA, 120 bp, Artificial Sequence
  ENSG00000124275_4 (sequence is synthesized)
tatgacactggacatgcagatgactgtgtaggtttagaacttgtggttgagccgtggattgctggactctggccagccctcagaaagcattttaggtcaagcagaggacaagaggagata

SEQ ID NO: 255471 - DNA, 120 bp, Artificial Sequence
  ENSG00000124275_5 (sequence is synthesized)
agtggcgcactcccggtggcatcacctgcatcctcgaggacagaccttgtgaagtcagagctgctacacattgaatctcaagtcgagcttctgagattcgatgattcaggaagaaaggat

SEQ ID NO: 255472 - DNA, 120 bp, Artificial Sequence
  ENSG00000124275_6 (sequence is synthesized)
tctgaggttttgaagcaaaatgcagtgaacagcaaccaatccaatgttgtaattgaagactttgagtcctcacttacccgttcggtacccccactctcacaagcctctctgaatattcct

SEQ ID NO: 255473 - DNA, 120 bp, Artificial Sequence
  ENSG00000124275_7 (sequence is synthesized)
ggtttacccccagaatatttacaggtacatctgcaggagtctcttggccaggaggaaagccaagtatctgtgacttcagcagatccagtttttcaagtgccaatttcaaaggcagttcaa

SEQ ID NO: 255474 - DNA, 120 bp, Artificial Sequence
  ENSG00000124275_8 (sequence is synthesized)
cttactacgaatgatgccataaaaaccactctgctggtagaattggacatttcaaatacagacttttcctatcagcctggagatgccttcagcgtgatctgccctaacagtgattctgag

SEQ ID NO: 255475 - DNA, 120 bp, Artificial Sequence
  ENSG00000124275_9 (sequence is synthesized)
gtacaaagcctactccaaagactgcagcttgaagataaaagagagcactgcgtccttttgaaaataaaggcagacacaaagaagaaaggagctaccttaccccagcatatacctgcggga

SEQ ID NO: 255476 - DNA, 120 bp, Artificial Sequence
  ENSG00000124275_10 (sequence is synthesized)
tgttctctccagttcatttttacctggtgtcttgaaatccgagcaattcctaaaaaggcatttttgcgagcccttgtggactataccagtgacagtgctgaaaagcgcaggctacaggag

SEQ ID NO: 255477 - DNA, 120 bp, Artificial Sequence
  ENSG00000124275_11 (sequence is synthesized)
ctgtgcagtaaacaaggggcagccgattatagccgctttgtacgagatgcctgtgcctgcttgttggatctcctcctcgctttcccttcttgccagccaccactcagtctcctgctcgaa

SEQ ID NO: 255478 - DNA, 120 bp, Artificial Sequence
  ENSG00000124275_12 (sequence is synthesized)
catcttcctaaacttcaacccagaccatattcgtgtgcaagctcaagtttatttcacccaggaaagctccattttgtcttcaacattgtggaatttctgtctactgccacaacagaggtt

SEQ ID NO: 255479 - DNA, 120 bp, Artificial Sequence
  ENSG00000124275_13 (sequence is synthesized)
tgttggttgcttcagttcttcagccaaacatacatgcatcccatgaagacagcgggaaagccctggctcctaagatatccatctctcctcgaacaacaaattctttccacttaccagatg

SEQ ID NO: 255480 - DNA, 120 bp, Artificial Sequence
  ENSG00000124275_14 (sequence is synthesized)
acccctcaatccccatcataatggtgggtccaggaaccggcatagccccgtttattgggttcctacaacatagagagaaactccaagaacaacacccagatggaaattttggagcaatgt

SEQ ID NO: 255481 - DNA, 120 bp, Artificial Sequence
  ENSG00000124275_15 (sequence is synthesized)
ggttgttttttggctgcaggcataaggatagggattatctattcagaaaagagctcagacatttccttaagcatgggatcttaactcatctaaaggtttccttctcaagagatgctcctg

SEQ ID NO: 255482 - DNA, 120 bp, Artificial Sequence
  ENSG00000124275_16 (sequence is synthesized)
ttggggaggaggaagccccagcaaagtatgtgcaagacaacatccagcttcatggccagcaggtggcgagaatcctcctccaggagaacggccatatttatgtgtgtggagatgcaaaga

SEQ ID NO: 255483 - DNA, 120 bp, Artificial Sequence
  ENSG00000124275_17 (sequence is synthesized)
atatggccaaggatgtacatgatgcccttgtgcaaataataagcaaagaggttggagttgaaaaactagaagcaatgaaaaccctggccactttaaaagaagaaaaacgctaccttcagg

SEQ ID NO: 255484 - DNA, 120 bp, Artificial Sequence
  ENSG00000124275_18 (sequence is synthesized)
atatttggtcataaaaccagaaattaaagaaagaggattaagcttttttgactgaaagtactaaaagtcagctttactagtgccaaacctttaaattttcaaaagaaaattttctttcaa

SEQ ID NO: 255485 - DNA, 120 bp, Artificial Sequence
  ENSG00000124275_19 (sequence is synthesized)
catttcttgaaggacatggagtggagattggatcatttaacaatataacaaaacttcctgatttgattttacgtatcttctatctacgcccttcctgtgcctgtgactctccccaaattg

SEQ ID NO: 255486 - DNA, 120 bp, Artificial Sequence
  ENSG00000124275_20 (sequence is synthesized)
ccctgttgccttgagctcttctgagctaaggcagccttcagtccctatcagcgcctcctttacttcccagagaacttcacagagactctgtccttccatgcaaaggcttcctgaaatagg

SEQ ID NO: 255487 - DNA, 120 bp, Artificial Sequence
  ENSG00000124275_21 (sequence is synthesized)
gagactgactgagtagctcattcttgtgacttacagtgccaacatttaaaaaagtatgaaaatgatttatttttatatgatgtatacccataaagaatgctcatattaatgtacttaaat

SEQ ID NO: 255488 - DNA, 120 bp, Artificial Sequence
  ENSG00000124275_22 (sequence is synthesized)
tacacatgtagagcatatctgttatatgtttatgtaactatcaaatggttatttgttactaaagctatatttctgataaaaaatattttaggataattgcctacagagggatttattttt

SEQ ID NO: 255489 - DNA, 120 bp, Artificial Sequence
  ENSG00000124275_23 (sequence is synthesized)
atgatgctggaaatatgaaatgtattttaaaatttcactctggcatatgatttatctatcaccattacttttttttaagtcacaatttcagaattttgggacatttgcattcaatttaca

SEQ ID NO: 255490 - DNA, 120 bp, Artificial Sequence
  ENSG00000124275_24 (sequence is synthesized)
ggtaccagtacgtacatattttaatagaaagatacaacctttttattttcactccttttatttctgctgcttggcacatttttgagttttcccacattatttgtctccatgataccactc

SEQ ID NO: 255491 - DNA, 120 bp, Artificial Sequence
  ENSG00000124275_25 (sequence is synthesized)
aagcagtgtgctggacctaaaatactgactttagttagtatccttggatttttagattcccagtgtctaattccctgttataatttgcacaaacaaaacaaaatgttatgataatctttc

SEQ ID NO: 255492 - DNA, 120 bp, Artificial Sequence
  ENSG00000124275_26 (sequence is synthesized)
tccactgttctaatatatattgtatttttatttgatagcttgggatttaaaacatctctgttgaaggcttttgatccttttgagaaataaagatctgaaagaaatggcataatcttaaaa

SEQ ID NO: 255493 - DNA, 120 bp, Artificial Sequence
  ENSG00000124275_27 (sequence is synthesized)
gctccagggtggagcgaccctcccctcctccctcccggcccctcgactacacctggggtctctccttccttcctcctcgggaggagcccgactgggagacgccgcggggactacccattt

SEQ ID NO: 255494 - DNA, 120 bp, Artificial Sequence
  ENSG00000124275_28 (sequence is synthesized)
ccagcccgctcacctttcccatgcagcagcccctgcttcactcactgatcactccttcgcgagaccattagtgactgagcacctagcgcatggtgtgtcaggagctggagattgagcctt

SEQ ID NO: 255495 - DNA, 120 bp, Artificial Sequence
  ENSG00000124275_29 (sequence is synthesized)
acatgatgagagccacgtgtgtcgtttcttatttgactcagtggcagagatccttcaatccagactgtgaagaaaacccttgagttaagacattagacatctgtgcaactcataacttcc

SEQ ID NO: 255496 - DNA, 120 bp, Artificial Sequence
  ENSG00000124275_30 (sequence is synthesized)
caaaagcataatcacagatgtctctgtctcatcagtgtgttcaccatttcgtagacactttacacattctgcctttaacagccctgagccacttttccatagtacaagttcatttattca

SEQ ID NO: 255497 - DNA, 120 bp, Artificial Sequence
  ENSG00000124275_31 (sequence is synthesized)
taaaattgctattaatgttattgaatgtagagctctctctagatctcacagtgtgatactttgaattgtcctcattttgtgtatgtcggatgtagctgcctctccacacacttgcctagt

SEQ ID NO: 255498 - DNA, 120 bp, Artificial Sequence
  ENSG00000124275_32 (sequence is synthesized)
agatggattttacaaatccgtctgagtttgttggtggtagttcctaatgaaagagattggttttacatattctttatatcacacacctaaactttttttttttccacttagagagaaact

SEQ ID NO: 255499 - DNA, 120 bp, Artificial Sequence
  ENSG00000124275_33 (sequence is synthesized)
tcagcattgttaactcatactctttgtttcattagaaaaaacagtgttgtctcacccacatcattcattactgtcataagaaaatttatgctgttcttgaattttaaaatctctattgca

SEQ ID NO: 255500 - DNA, 120 bp, Artificial Sequence
  ENSG00000124275_34 (sequence is synthesized)
agagcagaaaactgtttacttccatgtactctttaactagtgtgtgtattttctgaatgtataaagcatgaattttatatagtacggtctttgcttgtcctattcatggaaaagaagacc

SEQ ID NO: 255501 - DNA, 120 bp, Artificial Sequence
  ENSG00000124275_35 (sequence is synthesized)
taagaccgtgttgctgaatgaggctgctcttctcaccatcctgtcctcaggctggccctctcaccctcttcagtgaagtcttcgagaaccatcagcaggaataggatgacagaacacagg

SEQ ID NO: 255502 - DNA, 120 bp, Artificial Sequence
  ENSG00000124275_36 (sequence is synthesized)
ggagctttctattggtcctgggtaccgagcatgggcgctgcgtcagtgcgcgctggcgcaaggttggtggaagtcgcgttgtgcaggttcgtgcccggctggcgcggcgtggtttcactg

SEQ ID NO: 255503 - DNA, 120 bp, Artificial Sequence
  ENSG00000124275_37 (sequence is synthesized)
ctccagggcagcgctgtccaatagaaacatgatgagagccacgtgtgtcgtttcttatttgactcagaggaactgactgcttccgttttcccagaattctatcaaatatctttcaagtgt

SEQ ID NO: 255504 - DNA, 120 bp, Artificial Sequence
  ENSG00000124275_38 (sequence is synthesized)
ccacatgtacccaagcgacgcacattcctcacatagaggaaggcaaggaaaggtggcagagatccttcaatccagactgtgaagaaaacccttgagttaagacattagacatctgtgcaa

SEQ ID NO: 255505 - DNA, 120 bp, Artificial Sequence
  ENSG00000124275_39 (sequence is synthesized)
ccaagcgacgcacattcctcacatagaggaaggcaaggaaagaatcatatctatttttttcaccttcttgagaaaaagataccgctgcttattagcctcaacgagtcttgtaatgtgaaa

SEQ ID NO: 255506 - DNA, 120 bp, Artificial Sequence
  ENSG00000124275_40 (sequence is synthesized)
aacacaacattttcctgtaccttttatggatatcttcattagctgtggatggcaatacaaatccttcttcatctaatttaatttcaacatctggtgagagaagaaaggaaaaattcctcg

SEQ ID NO: 255507 - DNA, 120 bp, Artificial Sequence
  ENSG00000124275_41 (sequence is synthesized)
gaaggcttttgatccttttgagaaataaagatctgaaagaaatggcataatcttaaaacttgaatttcatccaggacatcacattgcatttcgttttttgcctcctgagtcttctccagt

SEQ ID NO: 255508 - DNA, 120 bp, Artificial Sequence
  ENSG00000124275_42 (sequence is synthesized)
taactgtgaaaagactgttcctgatgttatgatttgctcactgtgaagcttttcatgcactacagacaaatgttggaaagtctgtctcaacttcaagggcagtgaattctgaaagttaat

SEQ ID NO: 255509 - DNA, 120 bp, Artificial Sequence
  ENSG00000124275_43 (sequence is synthesized)
gtggacacaagagtttcttctcagatttcctcctctgctgcattttttttttgagttatcttcttttctggtatgaaattgtaaatcaagtaagtcagatataaaaatatttgcaaacag

SEQ ID NO: 255510 - DNA, 120 bp, Artificial Sequence
  ENSG00000124275_44 (sequence is synthesized)
gggcctagtaatagacttgacttgggaagtggtgactttttcagcccatgtttgctcacaaccagtatcgagccagatagtgtaatgttttatacttaaggaaataaagtaccctttcct

SEQ ID NO: 255511 - DNA, 120 bp, Artificial Sequence
  ENSG00000124275_45 (sequence is synthesized)
gagtagctcattcttgtgacttacagtgccaacatttaaaaaacttgggatttaaaacatctctgttgaaggcttttgatccttttgagaaataaagatctgaaagaaatggcataatct

SEQ ID NO: 255512 - DNA, 120 bp, Artificial Sequence
  ENSG00000124275_46 (sequence is synthesized)
taggatcaaataagaaccaagaatcctatcattttaatatagtttttacttttatctttttttaaaaagaggaaaccaaaagctatttaagactgttgtgaatgatactgtggctcaagt

SEQ ID NO: 255513 - DNA, 80 bp, Artificial Sequence
  ENSG00000124275_47 (sequence is synthesized)
tcccggattccggccgctcgccctgcactaatctcctgggagaggcggcccggggcgggggtgggcagccggcttgcgcc

SEQ ID NO: 255514 - DNA, 120 bp, Artificial Sequence
  ENSG00000124275_48 (sequence is synthesized)
gcgcgggctggggctcggacttggcctttggcctttggctttggtgtccccgggagcgtgtccttgggctcggcgtcggcctctgccgcgggaggcccctgggcggcgtggggtctctcc

SEQ ID NO: 255515 - DNA, 120 bp, Artificial Sequence
  ENSG00000124275_49 (sequence is synthesized)
ttccaggcctagggaaaccgcactcggggacgcggggaactggggaacatgccgggttggggcggcgcgctccggggaacccgggacgttccgagcgcccacccggcgggacgcggccgt

SEQ ID NO: 255516 - DNA, 120 bp, Artificial Sequence
  ENSG00000124275_50 (sequence is synthesized)
gagttctgcccgcggccgtgagctctgcccaccgcctccgcgccgcttccggggctgctggggcccgggcctccgctgagagtcgtgggaagtttcactgttacatgccttgaagtgatg

SEQ ID NO: 255517 - DNA, 120 bp, Artificial Sequence
  ENSG00000124275_51 (sequence is synthesized)
atgaaatagtattattttagatattttatttacctagtctttgtgtccttaaatttaaactttattgtgcattaattatgtatttgggttctctaggtctcggtgattcagaatacacct

SEQ ID NO: 255518 - DNA, 120 bp, Artificial Sequence
  ENSG00000124275_52 (sequence is synthesized)
tcagtgacatctttttatgttttgatacggcactcagcagaatttcgagaccacgtgtgtaggcaacagtttaaagttgtccacaagaatggttgaaataaagcaacatttcaggcttta

SEQ ID NO: 255519 - DNA, 120 bp, Artificial Sequence
  ENSG00000124279_0 (sequence is synthesized)
acgacgcccaggcgcttccgcgaccacccggagtgattgcccggcagagcgcgatactcgtttgtagtttcataaacattgatgttgggtcaatcatgttctcaatgtatttaaccatgt

SEQ ID NO: 255520 - DNA, 120 bp, Artificial Sequence
  ENSG00000124279_1 (sequence is synthesized)
gtttttaaattttttaatttagttatcaaattgagaatctgatggtatggcattaatcaccttgaggaagaacctttatcgtttatctgattttcagatgcatagagctctggctgcttt

SEQ ID NO: 255521 - DNA, 120 bp, Artificial Sequence
  ENSG00000124279_2 (sequence is synthesized)
aaaaaataaacctctaaatcatgttcacaaggtagtcaaggagcgtctgtgcccttggttgtgttcacgacaacctgagcctttcggggtcaaattccatcatgcccattgtaaaaagtt

SEQ ID NO: 255522 - DNA, 120 bp, Artificial Sequence
  ENSG00000124279_3 (sequence is synthesized)
tcattcgaaaaatggaaatgaccttcatccactcggtggaccagtgttctctcaagtatctgactgcgacaggcttgaacaaaatgttaaaaatgaggagagtcagatgttttacaggag

SEQ ID NO: 255523 - DNA, 120 bp, Artificial Sequence
  ENSG00000124279_4 (sequence is synthesized)
actgagcaacttgacttcatcagaagaagtgctaagttttataagcacgatggaaaccctgcctgacactatggcagcaggagctttacaacgaatttgtgaagtggaaaaaaaggatgg

SEQ ID NO: 255524 - DNA, 120 bp, Artificial Sequence
  ENSG00000124279_5 (sequence is synthesized)
tgatcaagggctgccaaaagaaatactggagaatagcatctttcaagctttatgctttcagtttgaaaaggagccctcacagctgtcaaacactagtttagtgactgctttgcaagctct

SEQ ID NO: 255525 - DNA, 120 bp, Artificial Sequence
  ENSG00000124279_6 (sequence is synthesized)
gattctgttgcatgtggatcctcaaagtagcctgttgctgaacctggtggcagaatgccaaaatcgtctcagaaaaggtggcatggaagttcgcaatctttgtattcttggggaaagtct

SEQ ID NO: 255526 - DNA, 120 bp, Artificial Sequence
  ENSG00000124279_7 (sequence is synthesized)
gattacactgcacagttcaggttgtgtgacactagaactcattataaatcaacttcaaggtgaaaaattggaaacatttaccccggaggatattgtggccctttatagaatcttgcaggc

SEQ ID NO: 255527 - DNA, 120 bp, Artificial Sequence
  ENSG00000124279_8 (sequence is synthesized)
atgtactgaaaaagtggatgaacaccaaacatttttaaataagataaacaacttttccctatcaatagtttccaacctgagtcctaaattgattagccaaatgctcactgccctggtggt

SEQ ID NO: 255528 - DNA, 120 bp, Artificial Sequence
  ENSG00000124279_9 (sequence is synthesized)
tcttgatcaaagtcaagcatttcctctgattataaaattgggcaaatatgtcgtgaggcatgtcccacatttcactaacgaggagcttaggagagtcttggaggcgttcatatattttgg

SEQ ID NO: 255529 - DNA, 120 bp, Artificial Sequence
  ENSG00000124279_10 (sequence is synthesized)
gagcatcgtgtagctgcggtgtgcctcacgttggatcctgaagttgtctgcagggtcatggagtactgcagtagagaactgattctttcaaaacccatcctcaatgcagtggcagaaact

SEQ ID NO: 255530 - DNA, 120 bp, Artificial Sequence
  ENSG00000124279_11 (sequence is synthesized)
tttgtttgccaaacagaaaaattttcacctcgtcagatttctgccttaatggaaccatttgggaaactcaattatttgccaccaaatgcctctgctttatttagaaagctggaaaacgtg

SEQ ID NO: 255531 - DNA, 120 bp, Artificial Sequence
  ENSG00000124279_12 (sequence is synthesized)
ctattcactcatttcaattattttccacccaaatcattattgaaacttcttcattcatgttcacttaatgaatgccatccagtcaactttctggcaaaaatattcaagcctcttttcctt

SEQ ID NO: 255532 - DNA, 120 bp, Artificial Sequence
  ENSG00000124279_13 (sequence is synthesized)
caacggctgcaaggtaaagaatctcatttggacacattgagtcgggcacaactgacccaacttttcttagcctcagtcctggaatgccctttctataagggtccaaaactccttcctaaa

SEQ ID NO: 255533 - DNA, 120 bp, Artificial Sequence
  ENSG00000124279_14 (sequence is synthesized)
tatcaagtgaagtcatttcttaccccatgctgttccctggagacccctgtggattctcagctttatagatatgtgaagattgggctgactaaccttttaggagcaagattatattttgct

SEQ ID NO: 255534 - DNA, 120 bp, Artificial Sequence
  ENSG00000124279_15 (sequence is synthesized)
ccaaaagtgttgacaccctattgttatacaatagatgttgaaattaaattagatgaagaaggatttgtattgccatccacagctaatgaagatatccataaaaggatagcactgtgtatt

SEQ ID NO: 255535 - DNA, 120 bp, Artificial Sequence
  ENSG00000124279_16 (sequence is synthesized)
gatggtccaaaaaggttttgctccaatagcaaacacttactggggaaagaagctattaaacaaagacacctacagttactcggttatcaagttgttcagatcccctatcatgagattggg

SEQ ID NO: 255536 - DNA, 120 bp, Artificial Sequence
  ENSG00000124279_17 (sequence is synthesized)
atgctaaaatcaagacgtgaattggtggaatatttacaaagaaaactgttttctcaaaacactgttcattggttgcaagaatgaatactgacttcagaactcaaacaatggaagaacttg

SEQ ID NO: 255537 - DNA, 120 bp, Artificial Sequence
  ENSG00000124279_18 (sequence is synthesized)
catttttatggaactcagtattaaaagaaaaatataatgtgaattagccactttgcagaatatgttctagactggtgatctgaaagcatctgtagttttccttatactatgtatacattt

SEQ ID NO: 255538 - DNA, 120 bp, Artificial Sequence
  ENSG00000124279_19 (sequence is synthesized)
attgtggtaaaatttaaaattaattttaatttaatactagtgtcatagatactttttgtacatcaaacaattgatcatgtgctgtaaaggaattcaatgaataaatgttatttttaagta

SEQ ID NO: 255539 - DNA, 120 bp, Artificial Sequence
  ENSG00000124279_20 (sequence is synthesized)
tttcttctcactctctcctcactcctttttaccttccttctttacttttctttctgtttatggtaaccagtgactactgtaaaaacacatataaaagacattttgaactattagacttgc

SEQ ID NO: 255540 - DNA, 120 bp, Artificial Sequence
  ENSG00000124279_21 (sequence is synthesized)
actgtaagaagagaagtttgcattatcattttgagagagatgcctgtcccaattcctggaaaagtatcatgcctataaagtaatgttatatcaaacttttctacctaggtaaccttcaat

SEQ ID NO: 255541 - DNA, 120 bp, Artificial Sequence
  ENSG00000124299_0 (sequence is synthesized)
gcacttcacgtgacgccggtgccgggcgaacatggcggcggccaccggaccctcgttttggctggggaatgaaaccctgaaggtgccgctggcgctctttgccttgaaccggcagcgcct

SEQ ID NO: 255542 - DNA, 120 bp, Artificial Sequence
  ENSG00000124299_1 (sequence is synthesized)
gtgtgagcggctgcggaagaaccctgctgtgcaggccggctccatcgtggtcctgcagggcggggaggagactcagcgctactgcaccgacaccggggtcctcttccgccaggagtcctt

SEQ ID NO: 255543 - DNA, 120 bp, Artificial Sequence
  ENSG00000124299_2 (sequence is synthesized)
ctttcactgggcgttcggtgtcactgagccaggctgctatggtgtcatcgatgttgacactgggaagtcgaccctgtttgtgcccaggcttcctgccagccatgccacctggatgggaaa

SEQ ID NO: 255544 - DNA, 120 bp, Artificial Sequence
  ENSG00000124299_3 (sequence is synthesized)
gatccattccaaggagcacttcaaggagaagtatgccgtggacgacgtccagtacgtagatgagattgccagcgtcctgacgtcacagaagccctctgtcctcctcactttgcgtggcgt

SEQ ID NO: 255545 - DNA, 120 bp, Artificial Sequence
  ENSG00000124299_4 (sequence is synthesized)
caacacggacagcggcagtgtctgcagggaggcctcctttgacggcatcagcaagttcgaagtcaacaataccattcttcacccagagatcgttgagtgccgagtgtttaagacggatat

SEQ ID NO: 255546 - DNA, 120 bp, Artificial Sequence
  ENSG00000124299_5 (sequence is synthesized)
ggagctggaggttctgcgctataccaataaaatctccagcgaggcccaccgtgaggtaatgaaggctgtaaaagtgggaatgaaagaatatgagttggaaagcctcttcgagcactactg

SEQ ID NO: 255547 - DNA, 120 bp, Artificial Sequence
  ENSG00000124299_6 (sequence is synthesized)
ctactcccggggcggcatgcgccacagctcctacacctgcatctgcggcagtggtgagaactcagccgtgctacactacggacacgccggagctcccaacgaccgaacgatccagaatgg

SEQ ID NO: 255548 - DNA, 120 bp, Artificial Sequence
  ENSG00000124299_7 (sequence is synthesized)
atgaggcagtgctgcggagctcccgtgccgtcatgggtgccatgaagccaggtgtctggtggcctgacatgcaccgcctggctgaccgcatccacctggaggagctggcccacatgggca

SEQ ID NO: 255549 - DNA, 120 bp, Artificial Sequence
  ENSG00000124299_8 (sequence is synthesized)
tcctgagcggcagcgtggacgccatggtccaggctcacctgggggccgtgtttatgcctcacgggcttggccacttcctgggcattgacgtgcacgacgtgggaggctacccagagggcg

SEQ ID NO: 255550 - DNA, 120 bp, Artificial Sequence
  ENSG00000124299_9 (sequence is synthesized)
tggagcgcatcgacgagcccggcctgcggagcctgcgcactgcacggcacctgcagccaggcatggtgctcaccgtggagccgggcatctacttcatcgaccacctcctggatgaggccc

SEQ ID NO: 255551 - DNA, 120 bp, Artificial Sequence
  ENSG00000124299_10 (sequence is synthesized)
tggcggacccggcccgcgcctccttccttaaccgcgaggtcctgcagcgctttcgcggttttggcggggtccgcatcgaggaggacgtcgtggtgactgacagcggcatagagctgctga

SEQ ID NO: 255552 - DNA, 120 bp, Artificial Sequence
  ENSG00000124299_11 (sequence is synthesized)
cctgcgtgccccgcactgtggaagagattgaagcatgcatggcaggctgtgacaaggcctttacccccttctctggccccaagtagagccagccagaaatcccagcgcacctgggggcct

SEQ ID NO: 255553 - DNA, 120 bp, Artificial Sequence
  ENSG00000124299_12 (sequence is synthesized)
ggccttgcaacctcttttcgtgatgggcagcctgctggtcagcactccagtagcgagagacggcacccagaatcagatcccagcttcggcatttgatcagaccaaacagtgctgtttccc

SEQ ID NO: 255554 - DNA, 120 bp, Artificial Sequence
  ENSG00000124299_13 (sequence is synthesized)
ggggaggaaacacttttttaattacccttttgcaggctcccacctttaatctgttttataccttgcttattaaatgagcgacttaaaatgattgaaaataatgctgttctttagtagcaa

SEQ ID NO: 255555 - DNA, 120 bp, Artificial Sequence
  ENSG00000124299_14 (sequence is synthesized)
ctaaaatgtgtcttgctgtcatttatattccttttcccaggaaagaagcatttctgatactttctgtcaaaaatcaatatgcagaatggcatttgcaataaaaggtttcctaaaatggtc

SEQ ID NO: 255556 - DNA, 120 bp, Artificial Sequence
  ENSG00000124299_15 (sequence is synthesized)
agaatccggggggcgtcttgcctgcctgcacgtggcagagaggcagggttgagctggacgtgtggtgctgctggacgccctgttgtgggcccgggggtggggatacaggtggactcaggc

SEQ ID NO: 255557 - DNA, 120 bp, Artificial Sequence
  ENSG00000124299_16 (sequence is synthesized)
acatgcctgacacagcatcagggagggctcccagcagggtagaggagctgccaggctgccccctgccaaactacgggaggatgagctggggagtcgagtgctgaggggaagggatgtctg

SEQ ID NO: 255558 - DNA, 120 bp, Artificial Sequence
  ENSG00000124299_17 (sequence is synthesized)
aagatgaatcttgctgtcgtcctcctctccaatacgcagctgcttccgccccagttgcctctcactgctctgatgaagctgcttgttcccggcattgtcctttttgacccttttaaatgt

SEQ ID NO: 255559 - DNA, 120 bp, Artificial Sequence
  ENSG00000124299_18 (sequence is synthesized)
gttggaaaggtaagccaccatgtttctccgggtaaaattaaaaggtaaaaaacagtaatttatgttccctgagtgagtaacagatgagacgccgcagtggcacacacaccgtgagcggag

SEQ ID NO: 255560 - DNA, 120 bp, Artificial Sequence
  ENSG00000124299_19 (sequence is synthesized)
attatgaacagggcttcaggatcacaagcaaagattatttttcttctgactgcgcccgcctccctggctcttggcagagtgtttgatgtaatggttttcgatgacttttcagggtggttt

SEQ ID NO: 255561 - DNA, 120 bp, Artificial Sequence
  ENSG00000124299_20 (sequence is synthesized)
agtgccccaccattctactctcggactttgtttctgccatttgcaggaaactttaccaaattgctgctcttatgactctgaaagccgccagtaaaacagcttgccgtttttatgtgtaaa

SEQ ID NO: 255562 - DNA, 120 bp, Artificial Sequence
  ENSG00000124299_21 (sequence is synthesized)
gtcattatgaaggaatggtggcatgtcatcttcattaggcttagtggtgcctctaaagtgggtttttctttccgaccttctagattgccagcgtcctgacgtcacagaagccctctgtcc

SEQ ID NO: 255563 - DNA, 120 bp, Artificial Sequence
  ENSG00000124299_22 (sequence is synthesized)
tcgcggttttggcggggatggagcctcacccctcagtaggaacagacagagatcctgcaaaacccctgcccgctccaggggctcccatccacctggcaaagacagggtccgcatcgagga

SEQ ID NO: 255564 - DNA, 120 bp, Artificial Sequence
  ENSG00000124299_23 (sequence is synthesized)
gtttcactgaggcaggagctctggctggtgccccctaccctgcatgccgtgggccttgacatggggccccagcctttgcctccagctgctcccagccgcttccctgtggacagtcttgtc

SEQ ID NO: 255565 - DNA, 120 bp, Artificial Sequence
  ENSG00000124299_24 (sequence is synthesized)
ggcgttcggtgtcactgagccaggctgctatggtgtcatcgatgttgacactgggaagtcgaccctgtttgtgcccaggcttcctgccagccatgccacctggatgggaaaattgccagc

SEQ ID NO: 255566 - DNA, 120 bp, Artificial Sequence
  ENSG00000124299_25 (sequence is synthesized)
cttacgtgaactgctaattggagtctgatgttcttggcccccaaacagtcagaaatgacagctcccgctccagcagctgggcttcctggggagggagtgcagccgggcagggcaggctca

SEQ ID NO: 255567 - DNA, 120 bp, Artificial Sequence
  ENSG00000124299_26 (sequence is synthesized)
tcccctgaccagaaagcatactcgtgcccactggctcagaggccctggccgccggccggatggtgccccggggacctgaggcgagcaggagctctcctgtaattcccagagcacccgctg

SEQ ID NO: 255568 - DNA, 120 bp, Artificial Sequence
  ENSG00000124299_27 (sequence is synthesized)
ccctcagccaagctgaggccccctcagctgtgcctgtgagtggacaaggccaggctgggtgtgcactggggcagtgtggggcgcagacaggggcccctgcagggagcggctctaccactg

SEQ ID NO: 255569 - DNA, 120 bp, Artificial Sequence
  ENSG00000124299_28 (sequence is synthesized)
tccctcaggcgttctccaaggctgggggctatttcccagggccctgccgtaaggccccgagctctcctctgggagccacacctgccaagccacgcgcacacggcacatttgcactggcgc

SEQ ID NO: 255570 - DNA, 120 bp, Artificial Sequence
  ENSG00000124299_29 (sequence is synthesized)
actaaggctggcagacccaccctgatgacggcacctgtcctccctggacagtcacacggaaaatctgggcctcggcctaggggagctgggaccacgacttctggggccagtttctacttg

SEQ ID NO: 255571 - DNA, 120 bp, Artificial Sequence
  ENSG00000124299_30 (sequence is synthesized)
ggctgcctggaaggaaagctgtggccccaaggggcttcacagccgccttaagagcttttttggcttcagtggtttggcatctgccactcctctggccagcagcggggcctggctaagggc

SEQ ID NO: 255572 - DNA, 120 bp, Artificial Sequence
  ENSG00000124299_31 (sequence is synthesized)
agcccaaccctcagccagccccacaggcctgtctgggcagcttgccccgggtgtgtgcacatgggtggccacagggcttctcaagcaagccctagggtagtgtggccagggacactcaag

SEQ ID NO: 255573 - DNA, 120 bp, Artificial Sequence
  ENSG00000124299_32 (sequence is synthesized)
caatggtcaagagagcccacgagactggcaccggccctcacatgcccatctctcctgatgaggccacggtgagccctggagctgctcatcaggcccctcacctctgttccccacagggcg

SEQ ID NO: 255574 - DNA, 120 bp, Artificial Sequence
  ENSG00000124302_0 (sequence is synthesized)
gggactcgtcccagagtttgctgccgccgccgccgctgccattagagcggttttaattagctgcaggatttttaatgagctgaaatcaagaagagccccatctcagaagtaagcgagagc

SEQ ID NO: 255575 - DNA, 120 bp, Artificial Sequence
  ENSG00000124302_1 (sequence is synthesized)
cgcgcgcagggaagaactagtctgacaaaacagaaggaggtggtgctctcgggggactgggctgtaggctcccaccgatcgatcggcgacgagcagatgagttcccgaggccaggaggct

SEQ ID NO: 255576 - DNA, 120 bp, Artificial Sequence
  ENSG00000124302_2 (sequence is synthesized)
gaggagggaagccagggctcagagaccagcgcccggtgcagagtccccgctgctgccaccgcggcagaaggcacggtgccggattcaaggtgacggcagtgcctggctccattctcctca

SEQ ID NO: 255577 - DNA, 120 bp, Artificial Sequence
  ENSG00000124302_3 (sequence is synthesized)
agttgccatagcagcctctctcccaacaagcagcttctccgggagccctcagccgggagggacgtcattgttctctcctgcccgtgtggtgcaaggagacccaccggacagagaactttc

SEQ ID NO: 255578 - DNA, 120 bp, Artificial Sequence
  ENSG00000124302_4 (sequence is synthesized)
ccgagcccggggtccgctgaccacgtgggtgcacccatgctgcctggagccaggcacagggacaggtccccacggccacagggaatcctctgggcagctgaggggagcgtccaggcccag

SEQ ID NO: 255579 - DNA, 120 bp, Artificial Sequence
  ENSG00000124302_5 (sequence is synthesized)
aagcagctgcagccaagcgtgtccttggagccgtccatgcgtctgtccgcctgctgccggtcgccactggagatctcggcctgatggacgcctggtgtggacgatgagggaagaacgtgc

SEQ ID NO: 255580 - DNA, 120 bp, Artificial Sequence
  ENSG00000124302_6 (sequence is synthesized)
cccccacacccaagaggtgacccctgagccagccccggatgaccctgcgacctggaacaatgcggctggcctgcatgttctcttccatcctgctgttcggagctgcaggcctcctcctct

SEQ ID NO: 255581 - DNA, 120 bp, Artificial Sequence
  ENSG00000124302_7 (sequence is synthesized)
tcatcagcctgcaggaccctacggagctcgccccccagcaggtgccaggaataaagttcaacatcaggccaaggcagccccaccacgacctcccaccaggcggctcccaggatggtgact

SEQ ID NO: 255582 - DNA, 120 bp, Artificial Sequence
  ENSG00000124302_8 (sequence is synthesized)
tgaaggaacccacagagagggtcactcgggacttatccagtggggccccgaggggccgcaacctgccagcgcctgaccagcctcaacccccgctgcagaggggaacccgtctgcggctcc

SEQ ID NO: 255583 - DNA, 120 bp, Artificial Sequence
  ENSG00000124302_9 (sequence is synthesized)
gccagcgccgtcgccgtctgctcatcaagaaaatgccagctgcggcgaccatcccggccaacagctcggacgcgcccttcatccggccgggacccgggacgctggatggccgctgggtca

SEQ ID NO: 255584 - DNA, 120 bp, Artificial Sequence
  ENSG00000124302_10 (sequence is synthesized)
ggccgtcacgccccgccacgtgtcccgtatcttcgtggaggaccgccaccgcgtgctctactgcgaggtgcccaaggccggctgctccaattggaagcgggtgctcatggtgctggccgg

SEQ ID NO: 255585 - DNA, 120 bp, Artificial Sequence
  ENSG00000124302_11 (sequence is synthesized)
cctggcctcgtccactgccgacatccagcacaacaccgtccactatggcagcgctctcaagcgcctggacaccttcgaccgccagggtatcttgcaccgtctcagcacctacaccaagat

SEQ ID NO: 255586 - DNA, 120 bp, Artificial Sequence
  ENSG00000124302_12 (sequence is synthesized)
gctctttgtccgcgagcccttcgagaggctggtgtccgccttccgcgacaagtttgagcaccccaacagctactatcacccggtcttcggcaaggccatcctggcccggtaccgcgccaa

SEQ ID NO: 255587 - DNA, 120 bp, Artificial Sequence
  ENSG00000124302_13 (sequence is synthesized)
tgcctctcgggaggccctgcggaccggctctggggtgcgttttcccgagttcgtccagtacctgctggacgtgcaccggcccgtggggatggacattcactgggaccatgtcagccggct

SEQ ID NO: 255588 - DNA, 120 bp, Artificial Sequence
  ENSG00000124302_14 (sequence is synthesized)
ctgcagcccctgcctcatcgactacgatttcgtaggcaagttcgagagcatggaggacgatgccaacttcttcctgagcctcatccgcgcgccgcggaacctgaccttcccccggttcaa

SEQ ID NO: 255589 - DNA, 120 bp, Artificial Sequence
  ENSG00000124302_15 (sequence is synthesized)
ggaccggcactcgcaggaggcgcggaccacagcgaggatcgcccaccagtacttcgcccaactctcggccctgcaaaggcagcgcacctacgacttctactacatggattacctgatgtt

SEQ ID NO: 255590 - DNA, 120 bp, Artificial Sequence
  ENSG00000124302_16 (sequence is synthesized)
caactattccaagccctttgcagatctgtactgaggggcgccgcagctggccggggccgccctgccccggtcactcacctgtgctcccgggcatcctcctgtccctggctcctcatcctg

SEQ ID NO: 255591 - DNA, 120 bp, Artificial Sequence
  ENSG00000124302_17 (sequence is synthesized)
ggagcaacagggctctgaggacgtgaggagccatcgctgtgggaggcagcaggccccgggtggggggcagaggcgcccagccttggatggggaccccagcccctggcctgtacctgtttc

SEQ ID NO: 255592 - DNA, 120 bp, Artificial Sequence
  ENSG00000124302_18 (sequence is synthesized)
ctcattccttggctgagggagaggctgagaactgggcagacacccctggagctcagccgacagttttgatgagcagggaagtctgaggcccagaggacggggggcccagcggtaagggat

SEQ ID NO: 255593 - DNA, 120 bp, Artificial Sequence
  ENSG00000124302_19 (sequence is synthesized)
gtcccgcactcccttagccattgccttggaccaaaccacgtggtttgcagcttttctacgagccaggggggaggttcccttggattaaggttccaaataaagcacatggtttccagagca

SEQ ID NO: 255594 - DNA, 120 bp, Artificial Sequence
  ENSG00000124302_20 (sequence is synthesized)
ttcgctgggagccttcccggcgcgcaagccggatccggcagtgctgcggggaggagagaggacgaggcggcggcggcagcaggaggtgggggaccgatcgcgccgggggccgaagaggaa

SEQ ID NO: 255595 - DNA, 120 bp, Artificial Sequence
  ENSG00000124302_21 (sequence is synthesized)
aagaggaacgccgccccgcgccctctcgctccccgcacgctccggctgccggccccacgctgctcgcccacagatcgcactgggttccgcttggagcgggcggaggcaccgggcccgagc

SEQ ID NO: 255596 - DNA, 120 bp, Artificial Sequence
  ENSG00000124302_22 (sequence is synthesized)
aggtcctctccgccgcctgcgcgccccaagcagaggatccgccgcggagaaccgctcccggactggaggcgcccgcggcctcgggtgcgtccgctgcgccaggtttaaaggtcaacaaga

SEQ ID NO: 255597 - DNA, 120 bp, Artificial Sequence
  ENSG00000124302_23 (sequence is synthesized)
agaccaccagcctgtattgcagagggtggcgtgcttctgcagcccagaagattagaggaaatctgggaattcaagactttcacaggcatcgacctacagtccccaacgcatttctcaggg

SEQ ID NO: 255598 - DNA, 120 bp, Artificial Sequence
  ENSG00000124313_0 (sequence is synthesized)
tccttctagggaagggctggggaggagggggtggtgacacggtggagacaccggctaggccagggggcctgcccttgggacaggtccagacccatggagccccccgggaggagcagcagg

SEQ ID NO: 255599 - DNA, 120 bp, Artificial Sequence
  ENSG00000124313_1 (sequence is synthesized)
tccacagcgtctcatactctacaccagtattgctgtcctactcaggtccttgactccatgaagcttaccccctcaggcaggctggcagagagcagtgtggagggtgatgccccaggcagt

SEQ ID NO: 255600 - DNA, 120 bp, Artificial Sequence
  ENSG00000124313_2 (sequence is synthesized)
gacctgagcacagcggttgatagtcctgggagccaacccccctaccggctgagccagctgcccccctccagcagccacatggggggcccccctgctggagtgggccttccctgggctcag

SEQ ID NO: 255601 - DNA, 120 bp, Artificial Sequence
  ENSG00000124313_3 (sequence is synthesized)
cgggcacgcctccagccagccagtgtcgccctgaggaagcaggaggaggaggagataaagcgctccaaggccctatcggacagctatgaactctccacagacctgcaggacaagaaggtg

SEQ ID NO: 255602 - DNA, 120 bp, Artificial Sequence
  ENSG00000124313_4 (sequence is synthesized)
gaaatgctggagaggaagtatgggggctccttcctgagccgcagggctgccaggaccatccagacagccttccgccagtaccgcatgaacaagaactttgagcggctacgcagctcagcc

SEQ ID NO: 255603 - DNA, 120 bp, Artificial Sequence
  ENSG00000124313_5 (sequence is synthesized)
tcagagagccgcatgtcccgccgcatcatcctttccaacatgcggatgcagttctcctttgaggagtatgagaaggcacagaaccccgcgtacttcgagggcaagcctgcctcgctggac

SEQ ID NO: 255604 - DNA, 120 bp, Artificial Sequence
  ENSG00000124313_6 (sequence is synthesized)
gagggtgccatggctggtgcccggagccaccggcttgaacgggggctcccatatggaggctcctgtggtgggggcatcgatggtggtggaagctccgtcaccacatctggagagttttct

SEQ ID NO: 255605 - DNA, 120 bp, Artificial Sequence
  ENSG00000124313_7 (sequence is synthesized)
aatgacatcacagaacttgaggactccttctccaaacaggtaaagtctctggctgaatccatcgacgaagccctgaactgccacccgtcagggcccatgtctgaggagccagggtcagcc

SEQ ID NO: 255606 - DNA, 120 bp, Artificial Sequence
  ENSG00000124313_8 (sequence is synthesized)
cagctggagaagcgggagtcaaaggaacagcaagaggacagctcagccacatccttcagtgatcttcccctctacctggatgacacagttccccaacaatcccctgagcgactgcccagc

SEQ ID NO: 255607 - DNA, 120 bp, Artificial Sequence
  ENSG00000124313_9 (sequence is synthesized)
acagaacccccaccccagggccggcccgagttctgggcgccagcccctctcccgccagttcctccaccagtgccatcaggaacccgggaagacggtagccgtgaggaaggcactcgcagg

SEQ ID NO: 255608 - DNA, 120 bp, Artificial Sequence
  ENSG00000124313_10 (sequence is synthesized)
ggtcccgggtgcttggagtgccgggatttccggctgcgggctgcccaccttcccctgcttaccattgagcctcctagtgacagctccgtggacctgagtgaccgctcagatcgcggctct

SEQ ID NO: 255609 - DNA, 120 bp, Artificial Sequence
  ENSG00000124313_11 (sequence is synthesized)
gtccaccgccagctggtgtatgaggctgatggctgcagcccccatgggaccctgaagcacaaggggccaccaggcagggccccgatcccacaccgccactacccagcccctgaaggccca

SEQ ID NO: 255610 - DNA, 120 bp, Artificial Sequence
  ENSG00000124313_12 (sequence is synthesized)
gccccagccccaccagggcccctgccaccagcccccaacagtggcactgggcccagtggtgtggctgggggtcggaggttggggaagtgcgaggcagcaggcgagaactctgatggtgga

SEQ ID NO: 255611 - DNA, 120 bp, Artificial Sequence
  ENSG00000124313_13 (sequence is synthesized)
gataacgagagccttgagagctccagcaattccaatgagaccatcaactgcagctccggctcctcttctcgggacagtctaagggagcctccggctaccggcctgtgcaagcagacttac

SEQ ID NO: 255612 - DNA, 120 bp, Artificial Sequence
  ENSG00000124313_14 (sequence is synthesized)
cagcgggagacaaggcatagctgggactcgccagctttcaacaatgatgtggtccagaggcggcactaccgaatcggcctcaacctcttcaacaagaagccagagaagggtatccagtat

SEQ ID NO: 255613 - DNA, 120 bp, Artificial Sequence
  ENSG00000124313_15 (sequence is synthesized)
ctgatcgagcggggcttcctgtcagacacaccggtgggagtggctcacttcatcctggagcggaaaggcctcagccggcagatgataggggaattcctagggaaccggcagaagcagttc

SEQ ID NO: 255614 - DNA, 120 bp, Artificial Sequence
  ENSG00000124313_16 (sequence is synthesized)
ctccatggatctggatgatgcgctccggaagttccagtcccatatccgggttcagggtgaggcccagaaagtggagcgactcatcgaagccttcagccagcggtactgtgtctgtaaccc

SEQ ID NO: 255615 - DNA, 120 bp, Artificial Sequence
  ENSG00000124313_17 (sequence is synthesized)
agccctcgtgcgccagttccggaacccagacaccatcttcatccttgcttttgccatcatcctcctcaataccgacatgtacagtcccagcgtcaaagctgaacgaaagatgaaactaga

SEQ ID NO: 255616 - DNA, 120 bp, Artificial Sequence
  ENSG00000124313_18 (sequence is synthesized)
tgacttcatcaagaacctgagaggggttgacaatggtgaagacatcccccgagacctcctggtgggcatctaccagcgcatccaggggcgtgaactgcggaccaacgatgaccatgtgtc

SEQ ID NO: 255617 - DNA, 120 bp, Artificial Sequence
  ENSG00000124313_19 (sequence is synthesized)
ccaggtgcaggctgtggagcgcatgattgttggaaagaaaccagtcctgtctctccctcaccgtcgactggtttgctgctgccagctctacgaggtgccagatccaaaccgcccccagag

SEQ ID NO: 255618 - DNA, 120 bp, Artificial Sequence
  ENSG00000124313_20 (sequence is synthesized)
gctagggttgcatcagcgggaggtcttcctcttcaatgatctccttgtggtcaccaaaattttccagaagaagaagatcttggtgacgtacagtttccgtcagtctttccccctcgtgga

SEQ ID NO: 255619 - DNA, 120 bp, Artificial Sequence
  ENSG00000124313_21 (sequence is synthesized)
aatgcacatgcagctcttccagaattcatattaccagtttgggatcaagttgctgtctgcagtacctggtggggagcgaaaagtcctcatcatcttcaatgcccccagcctccaggaccg

SEQ ID NO: 255620 - DNA, 120 bp, Artificial Sequence
  ENSG00000124313_22 (sequence is synthesized)
gctgcgctttacatccgacctgcgcgagtccattgcggaggtgcaggagatggagaaataccgtgtggagtcggagctggagaagcagaaaggtatgatgcggcctaacgcctcacagcc

SEQ ID NO: 255621 - DNA, 120 bp, Artificial Sequence
  ENSG00000124313_23 (sequence is synthesized)
tggaggggccaaggactcagtgaatgggacgatggcccgcagtagcctggaggacacttacggggcaggcgatgggctcaaacggggcgcactcagcagttccctgcgagacctctctga

SEQ ID NO: 255622 - DNA, 120 bp, Artificial Sequence
  ENSG00000124313_24 (sequence is synthesized)
tgcaggggtctgttattagcagtccacgccctcaccagaggatgccacctccgcccccacccccgccgccagaggagtacaagagccagaggcccgtctccaactcctcatccttcctgg

SEQ ID NO: 255623 - DNA, 120 bp, Artificial Sequence
  ENSG00000124313_25 (sequence is synthesized)
gctccctatttggaagcaagcggggcaaggggcccttccagatgccaccaccgccaacaggccaggcctctgcctcctcttcatctgcttcttccacgcaccaccaccaccaccaccacc

SEQ ID NO: 255624 - DNA, 120 bp, Artificial Sequence
  ENSG00000124313_26 (sequence is synthesized)
atcatggccatagccacggtggcctgggggtgctgcctgatgggcagtccaagctccaggccctgcatgcccagtattgccaaggaccgggccctgccccgccaccctacctcccacccc

SEQ ID NO: 255625 - DNA, 120 bp, Artificial Sequence
  ENSG00000124313_27 (sequence is synthesized)
agcagccctctcttcccccacctccccagcagcccccacccttgccccagctgggctccattccaccgcctcccgcctcagccccacctgtggggccacatcgccacttccacgcccatg

SEQ ID NO: 255626 - DNA, 120 bp, Artificial Sequence
  ENSG00000124313_28 (sequence is synthesized)
gcccagtcccagggccccaacactataccttgggccggccaggcagggcacccagacggggggctggaggacaccctcagtttgctccacatggccgccaccccctgcaccagcccacat

SEQ ID NO: 255627 - DNA, 120 bp, Artificial Sequence
  ENSG00000124313_29 (sequence is synthesized)
ccccactgcccctgtacagtcctgccccccagcaccctccagcccacaaacagggccctaagcacttcatcttcagccaccacccacagatgatgccagcagcaggcgcggctgggggcc

SEQ ID NO: 255628 - DNA, 120 bp, Artificial Sequence
  ENSG00000124313_30 (sequence is synthesized)
ctggatcccggccaccagggggctcctactcccacccccaccacccccagtcaccattgtcaccacactcacccatcccaccccacccctcctatccacccctccccccaccctcccctc

SEQ ID NO: 255629 - DNA, 120 bp, Artificial Sequence
  ENSG00000124313_31 (sequence is synthesized)
acaccccgcactcaccccttccacccacctccccccatggcccgctgcacgcctctgggccccctggcacagccaacccccccagtgcaaaccccaaggccaagccaagccggatcagca

SEQ ID NO: 255630 - DNA, 120 bp, Artificial Sequence
  ENSG00000124313_32 (sequence is synthesized)
ccgtggtctgatgaatggagagagtgagctggggaacaggaaagtctggggagccacaggagagggaccttgcaccctctttgcttcctcggttttttcaaaaatatatatacacatagc

SEQ ID NO: 255631 - DNA, 80 bp, Artificial Sequence
  ENSG00000124313_33 (sequence is synthesized)
agtggctgtggtggtggtggtggcggcggcagcctcagctcctgctccccgtgccgccggccccagcgctgtctcccggg

SEQ ID NO: 255632 - DNA, 120 bp, Artificial Sequence
  ENSG00000124313_34 (sequence is synthesized)
agggtggcgccgtgagagagcggggacagggctctcctgcccgttcccctgcccctgggccgccaggatggaggcggggtcggggcccccgggcggcccgggatccgagagcccaaatcg

SEQ ID NO: 255633 - DNA, 120 bp, Artificial Sequence
  ENSG00000124313_35 (sequence is synthesized)
cggggcccccgggcggcccgggatccgagagcccaaatcgggccgtggagtacctgctggagctgaacaacatcatcgagagccagcagcagctgctggaaacccagcggcggcgcatcg

SEQ ID NO: 255634 - DNA, 120 bp, Artificial Sequence
  ENSG00000124313_36 (sequence is synthesized)
aggagctggagggccagctggaccagctcacccaggagaaccgcgacctgcgagaggagagccagctgcaccgcggggagctgcaccgggacccccacggcgcgcgggatagcccgggcc

SEQ ID NO: 255635 - DNA, 120 bp, Artificial Sequence
  ENSG00000124313_37 (sequence is synthesized)
gcgagagccagtaccagaacctgcgcgagacccagttccaccaccgcgagctgcgggagagccagttccaccaggcggcccgggacgtgggctacccgaaccgggaaggcgcctaccaga

SEQ ID NO: 255636 - DNA, 120 bp, Artificial Sequence
  ENSG00000124313_38 (sequence is synthesized)
atcgggaggctgtgtatcgggacaaggagcgggacgcctcctacccgctccaggacactaccggttacacagcccgcgagcgtgacgtggcccagtgccacctgcaccacgagaacccag

SEQ ID NO: 255637 - DNA, 120 bp, Artificial Sequence
  ENSG00000124313_39 (sequence is synthesized)
cagtgccacctgcaccacgagaacccagccctgggtcgcgagcgtggcgggcgggaggccgggccggcgcacccgggccgcgagaaggaagcgggctattcggcggcggtgggcgtgggg

SEQ ID NO: 255638 - DNA, 120 bp, Artificial Sequence
  ENSG00000124313_40 (sequence is synthesized)
tgagccgtggcgcatccaggagctccagtcccggcgccggcggaggccacagcaccagtaccagcaccagcccggccacgaccctccagagaaaatctgatggtgagaattccagaacag

SEQ ID NO: 255639 - DNA, 120 bp, Artificial Sequence
  ENSG00000124313_41 (sequence is synthesized)
acccgtcctctcacccccagcagttgccatggggtttccttccagattcgaggatccttgccacttgaagcctggactcagggtgctccagcgctggggagtggtgagggccttccagag

SEQ ID NO: 255640 - DNA, 120 bp, Artificial Sequence
  ENSG00000124313_42 (sequence is synthesized)
atcctcgtactctttctcccgtcttcttcttccccacttttccctggaggtctagctctgtggcctcagacctctgggcctgtgtgagctctctgtgagctctggctggcggagaagggc

SEQ ID NO: 255641 - DNA, 120 bp, Artificial Sequence
  ENSG00000124313_43 (sequence is synthesized)
aggtgtccggagctgtcggggtgaaggcttccctggggctcctctggccgtgtggggctaggagagcgctctgtagagttgtggccaaacttcagctggcttggccctctctctgacctc

SEQ ID NO: 255642 - DNA, 120 bp, Artificial Sequence
  ENSG00000124313_44 (sequence is synthesized)
agggcctggccacacacttccatgtgtctttttgcctgctggaggacacggaccattgatgcacttggtgggtgggaccctgcttgtgttggccccacgtggggcagtgcttcctctctc

SEQ ID NO: 255643 - DNA, 120 bp, Artificial Sequence
  ENSG00000124313_45 (sequence is synthesized)
gagccagtctatgccctttctccagtaggccccagcccagacctcttcggcttcaggaacttgcctcgccctgcaacgttcttatcctgatcaaagtccagacaggttttggggggggct

SEQ ID NO: 255644 - DNA, 120 bp, Artificial Sequence
  ENSG00000124313_46 (sequence is synthesized)
caggtctgggatgagaagggcactgccctccctcacccatattgcatgcccccccgccattcccttacacctaccccacctacaactgaagacaatgcactttacagatatcacccacac

SEQ ID NO: 255645 - DNA, 120 bp, Artificial Sequence
  ENSG00000124313_47 (sequence is synthesized)
acacctcgctggggcaggggcacccagcatcagccctggggagagaggctcccaaagggccaccatgagcccaagatatccttcctgaggcagagattgaagccatcagagctggggttg

SEQ ID NO: 255646 - DNA, 120 bp, Artificial Sequence
  ENSG00000124313_48 (sequence is synthesized)
ggagccagaatgcctgagtccttctgtccgtcagaatctccgctgcctctccagcccttttgcagccctgtttatttattataaatatattttttacaagccccagctcctcttcttgcc

SEQ ID NO: 255647 - DNA, 120 bp, Artificial Sequence
  ENSG00000124313_49 (sequence is synthesized)
ccgcatatccagctcctcactcagctcctgcctccctctcccctctccaccatgggctgcagtatagacagacagatggaccctggctgtacgaagggccagggccactggggcttgggg

SEQ ID NO: 255648 - DNA, 120 bp, Artificial Sequence
  ENSG00000124313_50 (sequence is synthesized)
gcgggggagggtggcagtgggaggggctgtatggagaggagctggggttcaggcattgtcttttttcctccttgtatataagaatgtatatttgatgcctcataaaagaccttgtgctca

SEQ ID NO: 255649 - DNA, 120 bp, Artificial Sequence
  ENSG00000124313_51 (sequence is synthesized)
agactgtgcagagctgagacccaaaatctggcctcctgattcctgattcatgctctttgtacttccttgagcctctagatggaaaggctgaacttccttcggcctaagatctaccgtatt

SEQ ID NO: 255650 - DNA, 120 bp, Artificial Sequence
  ENSG00000124313_52 (sequence is synthesized)
ctcccaccttctagattctcctcacccttctctggccaggcctctgcctccttttcatctgtttcttccacgcaccaccaccactaccaccatcacggtcacagccacggtggcctgggg

SEQ ID NO: 255651 - DNA, 120 bp, Artificial Sequence
  ENSG00000124313_53 (sequence is synthesized)
gtgctgcccgatgggcagtccaagctccaggccctgcatgccccatattgccaaggactgggccctgccccaccactctacctcccaccccagcagctcccttttccctcacctcctcca

SEQ ID NO: 255652 - DNA, 120 bp, Artificial Sequence
  ENSG00000124313_54 (sequence is synthesized)
ctcctggtgagggcaaacgacaggaagagcatttgaccagagtcagcaacttcctgtgtatcattgggcaagttgtttaatctttctggaacttggttcctcatctacagactgggtaaa

SEQ ID NO: 255653 - DNA, 120 bp, Artificial Sequence
  ENSG00000124313_55 (sequence is synthesized)
ttcacctacatctttctgaagactgttgcaaagattaagggaaataattggtatgaactagccatgtaggcaattagatgcttatccatgtgagaggctagtgatattactgtgattagc

SEQ ID NO: 255654 - DNA, 120 bp, Artificial Sequence
  ENSG00000124313_56 (sequence is synthesized)
atcactttgcctagttttcctgcttcctgtccagacagctgttcagttggatcatccacctgtgtttctggtggagaggggctgaggtttcccctgacacctagaaaactagaaagatgt

SEQ ID NO: 255655 - DNA, 120 bp, Artificial Sequence
  ENSG00000124313_57 (sequence is synthesized)
aggtaatataaggattcaggtgataaaaaaaaaaatacaaaagcactagcacagtgtctgacacaaaggagattcttaatgagttttggcatattggttgttgactctcagaaataaaaa

SEQ ID NO: 255656 - DNA, 120 bp, Artificial Sequence
  ENSG00000124313_58 (sequence is synthesized)
taacagctaccagatactgagggcctgctatgtgccaagtacacaacaattctgcaaggtatgtattatccccatttcagttacagaagttgggacttgttcaaggttacaaactagaaa

SEQ ID NO: 255657 - DNA, 120 bp, Artificial Sequence
  ENSG00000124313_59 (sequence is synthesized)
atggcagagctggtgggactgcaaggcatgactcttttgagcccagggcatgagctccttcctacctgtgtgccctgttccctcagccaggatgtccttagctcagtcctgaagtaggca

SEQ ID NO: 255658 - DNA, 120 bp, Artificial Sequence
  ENSG00000124313_60 (sequence is synthesized)
ggatggacctaattggcacagtatctgattaggaacagttaactgcacgaaggtatgacactccctatctgcctcgagcttacagtggatgtttaatatgttaaacaggaaatgtttgca

SEQ ID NO: 255659 - DNA, 120 bp, Artificial Sequence
  ENSG00000124313_61 (sequence is synthesized)
aaaagtattcatatttttcagtcaatatatactaaggacatttattcatttttcttttgtttactcaacattcatttactgcttaacatgccaagtgctaaggatgtataaggccacatg

SEQ ID NO: 255660 - DNA, 120 bp, Artificial Sequence
  ENSG00000124313_62 (sequence is synthesized)
gtccctgcccttaaggaattcatagtctgatgggggaaaacaaaattacttaatcagcatgtacgcaagtactcaaatatttgcacagtaggtgttcaaactatatgcagtaggtccaca

SEQ ID NO: 255661 - DNA, 120 bp, Artificial Sequence
  ENSG00000124313_63 (sequence is synthesized)
gctgatgaatgacacagatgatcctccaatcagtagatgcctgatgtatatgtacaaagtactggtttgatgatactcattcaaagtactgtagttgcaatgaacctattcagaaactgc

SEQ ID NO: 255662 - DNA, 120 bp, Artificial Sequence
  ENSG00000124313_64 (sequence is synthesized)
tcaaggaacatgcacacgataggactaaatgtacatacagttggtaccaaatgcacaggggctatacacaataaatacaataaaagtacacggatgtttggtaagtgcactgtaggctca

SEQ ID NO: 255663 - DNA, 120 bp, Artificial Sequence
  ENSG00000124313_65 (sequence is synthesized)
caaatgggcaaacaggtgttttacacagttgacactggataaatacgccgttgctaaacatccaatagttaaagtatacatacacacaggcttattttgtaggagtatatgccacaaatg

SEQ ID NO: 255664 - DNA, 120 bp, Artificial Sequence
  ENSG00000124313_66 (sequence is synthesized)
tgtacatggtaaaagtgaatacagaacagttgaaagcgttcattaaaatgctgactcccagtgacttttggggggtaagaatcgaaaccccatctctctacctgtaaccttggatgaaat

SEQ ID NO: 255665 - DNA, 120 bp, Artificial Sequence
  ENSG00000124313_67 (sequence is synthesized)
attttctatgcagaagcaaaagccttaaccagcccctccttccccccacccacccccccgcagattcccccatgggaccctgtcccctgcttcaggaaccagatgggcaagcatcgtgcc

SEQ ID NO: 255666 - DNA, 120 bp, Artificial Sequence
  ENSG00000124313_68 (sequence is synthesized)
ccttcctccccccaccttcttcttggaattcccatccccactgctgtctcctctggactccagcccctgaattaaagagagctggagccctaggtccgactaaaatgtgggagaagcaga

SEQ ID NO: 255667 - DNA, 120 bp, Artificial Sequence
  ENSG00000124313_69 (sequence is synthesized)
cagcaccatcgaagtgtcccagggaagacaactagcaaaagcagcagctggggccacctacgcatttgatgccgcctcatggaccagacttgagggtttgaagagcttagacccacaggg

SEQ ID NO: 255668 - DNA, 120 bp, Artificial Sequence
  ENSG00000124313_70 (sequence is synthesized)
tcctgaatcaagtccaatcaacattttttagttttcttccctgctggaccaagctgcacgatcatttccccaccttcaacttgattctggttgcatttttccaaagctcagcttttagcg

SEQ ID NO: 255669 - DNA, 120 bp, Artificial Sequence
  ENSG00000124313_71 (sequence is synthesized)
ctcaaatcctggctcggtgacttgcctgtgctgcatttggcaagtcacctagcccttcagagcctggccttccacctgtaagatggggataacaaccttgcaggacagttaacagatgca

SEQ ID NO: 255670 - DNA, 120 bp, Artificial Sequence
  ENSG00000124313_72 (sequence is synthesized)
tgtgaagtgcctacctcatgccagacacacagtaagccacctacagaaaccccttatcttgacatgggaggtgttccacaaggtggcccagccaatctctgtggtcctaactctcattcc

SEQ ID NO: 255671 - DNA, 120 bp, Artificial Sequence
  ENSG00000124313_73 (sequence is synthesized)
tcacccacacattggccatccacttactattccccaaaaatgcctctgtgtactttccaaactcagcattttacttgtggctttcccccctgccacaatactccccccaacatccctgat

SEQ ID NO: 255672 - DNA, 120 bp, Artificial Sequence
  ENSG00000124313_74 (sequence is synthesized)
gaaggttttcccaacccttgcaagatgggcttgaagaacccatccttcacaaaatgtgcccttcatcacatactctgagatccttccccaccaggccttaagtggcttgggagtgacact

SEQ ID NO: 255673 - DNA, 120 bp, Artificial Sequence
  ENSG00000124313_75 (sequence is synthesized)
actaaaattttgttgatcaaatgaatgaatgaatgaatggttctaagtctcagagttagatatctttgcattggttgatttattgattgatgcaacctgtgtaccaagtttccgggcccc

SEQ ID NO: 255674 - DNA, 120 bp, Artificial Sequence
  ENSG00000124313_76 (sequence is synthesized)
tctgggagctcctcatgcttccttcaactgtttcctacgttcttctcctccagtcctcattgcagtcccagcgctgggctgtccatgctcctcactccctccacccctccagaaatgcac

SEQ ID NO: 255675 - DNA, 120 bp, Artificial Sequence
  ENSG00000124313_77 (sequence is synthesized)
tgtccagactgtggagggggtagttcatctcctcacctccccatttctctgaggacccaaagacagcaagcccactgactattcttacatcaaaggtgctgctgccaatccctctgggga

SEQ ID NO: 255676 - DNA, 82 bp, Artificial Sequence
  ENSG00000124313_78 (sequence is synthesized)
attcttacatcaaaggtgctgctgccaatccctctggggatgcagatggggacagacaacacataacaaagaacagaaccga

SEQ ID NO: 255677 - DNA, 120 bp, Artificial Sequence
  ENSG00000124313_79 (sequence is synthesized)
gtctcaaaaacaaacaaacaaacaaaaacaaaggacaaaggtcctagcatctcagagttcttatgtttgttctctagtgctgtccaataggtctgtctgtgataagcaaaatgtcccata

SEQ ID NO: 255678 - DNA, 120 bp, Artificial Sequence
  ENSG00000124313_80 (sequence is synthesized)
catacctgtgctgttcagtacggtaaccactagccacatgtggctactgagcactcgaaacatggctagtgcaactaaggaactgcacttttcattttattcaatgtaaatgtaaataaa

SEQ ID NO: 255679 - DNA, 120 bp, Artificial Sequence
  ENSG00000124313_81 (sequence is synthesized)
taagcacatgtgggtaagtagctgccacgtcagacagtgtaggataagagtttcaggagtggacagagcctggtggggataatgtgaagatgataaaataagtgcaggcccagaaggaag

SEQ ID NO: 255680 - DNA, 120 bp, Artificial Sequence
  ENSG00000124313_82 (sequence is synthesized)
ccctgggtatgtgggaacacagaggaggggaaaacccaacttggggtgtgtgggtggggtcaggcaccattttctggagccgctccttttagtggagtagtcttgaagggcgagtaggac

SEQ ID NO: 255681 - DNA, 120 bp, Artificial Sequence
  ENSG00000124313_83 (sequence is synthesized)
ttagcctgatagagaagggagggagggagcagcgcatgaaaaggcctggagatgcgagagaatgcaatgtgttagtggcaccgtaagaaaggaatgggagctggagctccagcggtgggc

SEQ ID NO: 255682 - DNA, 120 bp, Artificial Sequence
  ENSG00000124313_84 (sequence is synthesized)
acagcacatggcaccgcgtggagacaggcgggtctccccagccactccctgttactctgttgccaacagatttgtcacgctggcctcagcagcagctaaagtaagaccagataacaaatt

SEQ ID NO: 255683 - DNA, 120 bp, Artificial Sequence
  ENSG00000124313_85 (sequence is synthesized)
gggctatctagtacctgcactgtaaagttaccactttccccgttgtagtggatgagtatcttgtggagacatgaatggaaatgttgttactccttaaattttactcactagttttagcgt

SEQ ID NO: 255684 - DNA, 120 bp, Artificial Sequence
  ENSG00000124313_86 (sequence is synthesized)
ttactcactagttttagcgttcgctggaacaattattatggctgaggctgtcaaatggtgattttcaaatgccgtcattctttcaatatgtcttttttttttcttttttgagacagggtc

SEQ ID NO: 255685 - DNA, 120 bp, Artificial Sequence
  ENSG00000124313_87 (sequence is synthesized)
tggtgcgatcatagctcactgcagcttcgaactcctggattcaagcgatcctcccacctcagccttccatgtagctgggaccacagccacacaccaccatgcccagctaatttaaaaatt

SEQ ID NO: 255686 - DNA, 70 bp, Artificial Sequence
  ENSG00000124313_88 (sequence is synthesized)
ccacagccacacaccaccatgcccagctaatttaaaaattttttgtagagatggaggtcttgctaggtta

SEQ ID NO: 255687 - DNA, 120 bp, Artificial Sequence
  ENSG00000124313_89 (sequence is synthesized)
agcctgggcatgtcttagttggctttccactataagggagggctttcccttctacatttatttatttatatccttatggacttaatgattgtttattttactcaatgggttatatataac

SEQ ID NO: 255688 - DNA, 120 bp, Artificial Sequence
  ENSG00000124313_90 (sequence is synthesized)
ccattaacatcattctttattttgatgttcacagccccagatttggccagtaggaagccctctaagcccctgtgtcctgtggcacatctccatctttttctgagcccttccaaggagccc

SEQ ID NO: 255689 - DNA, 120 bp, Artificial Sequence
  ENSG00000124313_91 (sequence is synthesized)
cggttctttttagtagagaatgacatttagaaaccaagatttgggcactaggtgttacagcaatattttaagagcttgctcttttattttgcaaaggtttgagcatccattgatgatttc

SEQ ID NO: 255690 - DNA, 120 bp, Artificial Sequence
  ENSG00000124313_92 (sequence is synthesized)
tagctccatcattccttctatataatttagaattctactttcccttttctctcactttatttacttatatcaatgtggagtcatggatttttattttaaccagtgagttgtaatccacta

SEQ ID NO: 255691 - DNA, 120 bp, Artificial Sequence
  ENSG00000124313_93 (sequence is synthesized)
cagtgagttgtaatccactactatcataattcattttgaattaacattactttggataaatcattttattgttatgtatatgtataagcacatactatacatctatatttctatactaga

SEQ ID NO: 255692 - DNA, 120 bp, Artificial Sequence
  ENSG00000124313_94 (sequence is synthesized)
ggaggagggggtggtgacacggtggagacaccggctaggccagggggcctgcccttgggacaggtccagacccatggagccccccgggaggagcagcagggaagaggaggaggaggagga

SEQ ID NO: 255693 - DNA, 120 bp, Artificial Sequence
  ENSG00000124313_95 (sequence is synthesized)
gaacctggatcctcccgtacccgcactcccacttcccaggcaccctggagcctgccactactggagaggtctccaaatgacatcccaaggacctacctctgtcctctgtgagcacaaaca

SEQ ID NO: 255694 - DNA, 120 bp, Artificial Sequence
  ENSG00000124313_96 (sequence is synthesized)
gagatgcagggtgcctagggctcagaggaccagacgggggcaggacccagcctgcctagttccctgtcgtttgttcccttgctgtggccattgctgccatctcctccactgcttgaaggc

SEQ ID NO: 255695 - DNA, 120 bp, Artificial Sequence
  ENSG00000124313_97 (sequence is synthesized)
ctcaccccatgccctctgccactcccatagtgctctgtaaatattatcaggaggaaaaggcctctcagagtgcgtgttgctgtgtacaaaggaatttccatcaataaaagctgatctctt

SEQ ID NO: 255696 - DNA, 120 bp, Artificial Sequence
  ENSG00000124313_98 (sequence is synthesized)
gagtagcccagccatgtctcctccctgctctcctgaaacagtaccctgcagaaaccaagaatcctatcctcagagaatctcagagttgagggttagcttgtccaaccttcccatcctcat

SEQ ID NO: 255697 - DNA, 120 bp, Artificial Sequence
  ENSG00000124313_99 (sequence is synthesized)
ttcaagaattcttcagcctctgcttgaataccttcagtgacaaggggctcattacctcccaaccccattattatcctgaactctaattatgagccaactattccttctagtgaaaggtat

SEQ ID NO: 255698 - DNA, 120 bp, Artificial Sequence
  ENSG00000124313_100 (sequence is synthesized)
cagggagaagaatcagagtattggaggtaggactatagttttagatcccaggtatactactcattatctgggtgaactgcagcaaattgcctaacctgccaagccccagtttcttcctat

SEQ ID NO: 255699 - DNA, 120 bp, Artificial Sequence
  ENSG00000124313_101 (sequence is synthesized)
ggctggcagagagcagggaagaggaggaggaggaggagactgaggaagaggaagaggaagacgctcaccagttctgctgtccggcctccgagtgcagtagtccctcctctcgcccctgaa

SEQ ID NO: 255700 - DNA, 120 bp, Artificial Sequence
  ENSG00000124313_102 (sequence is synthesized)
cttctagggaagggctggggaggagggggtggtgacacggtggagacaccggctaggccagggggcctgcccttgggacaggtccagacccatggagccccccgggaggagcagcagtgt

SEQ ID NO: 255701 - DNA, 120 bp, Artificial Sequence
  ENSG00000124313_103 (sequence is synthesized)
gtgacacggtggagacaccggctaggccagggggcctgcccttgggacaggtccagacccatggagccccccgggaggagcagcagccttcccttttcccctcccgcactcactctcacc

SEQ ID NO: 255702 - DNA, 120 bp, Artificial Sequence
  ENSG00000124313_104 (sequence is synthesized)
ttcttgcccccatcgcccaccctgccacttccctccctccctgtctctctctctgtctctctctgtctcttgctgtctctcaggtccacagcgtctcatactctacaccagtattgctgt

SEQ ID NO: 255703 - DNA, 120 bp, Artificial Sequence
  ENSG00000124313_105 (sequence is synthesized)
gtccattgcggaggtgcaggagatggagaaataccgtgtggagtttttctcttctccaggctaagcagtcacagttaagtaacatggtgttaaggagaaagaggcaggcagacagagacg

SEQ ID NO: 255704 - DNA, 120 bp, Artificial Sequence
  ENSG00000124313_106 (sequence is synthesized)
aggcggcggacagctccttgcggagctggagaagcagaaaggtatgatgcggcctaacgcctcacagcctggaggggccaaggactcagtgaatgggacgatggcccgcagtagcctgga

SEQ ID NO: 255705 - DNA, 120 bp, Artificial Sequence
  ENSG00000124313_107 (sequence is synthesized)
ttgggatctatctaatttgtccttccttaaaaaaatccttccctagagacctgccccaaaaggcctgagtggttggtcctagactatgtgataatccagcttttttaaaggatgaatagg

SEQ ID NO: 255706 - DNA, 120 bp, Artificial Sequence
  ENSG00000124313_108 (sequence is synthesized)
aggatgaataggagtttgccagttggatagactgaggaagggcagttaggcagagggaacaatctgcccatatctttgcagaatgttatttcttttttttttttctgagatggagtcttg

SEQ ID NO: 255707 - DNA, 120 bp, Artificial Sequence
  ENSG00000124333_0 (sequence is synthesized)
ggcgtccggtcccagcctcctctgggagcgggcagttggcgaccctgcactgacccgcgtccctccgtcccgagcccgcgcgccctcagagggtgcccggacagactgaagccatggcga

SEQ ID NO: 255708 - DNA, 120 bp, Artificial Sequence
  ENSG00000124333_1 (sequence is synthesized)
ttctttttgctgttgttgccagggggaccactatccttgccaaacatgcttggtgtggaggaaacttcctggaggtgacagagcagattctggctaagataccttctgaaaataacaaac

SEQ ID NO: 255709 - DNA, 120 bp, Artificial Sequence
  ENSG00000124333_2 (sequence is synthesized)
taacgtactcacatggcaattatttgtttcattacatctgccaagacaggattgtatatctttgtatcactgatgatgattttgaacgttcccgagcctttaattttctgaatgagataa

SEQ ID NO: 255710 - DNA, 120 bp, Artificial Sequence
  ENSG00000124333_3 (sequence is synthesized)
agaagaggttccagactacttacggttcaagagcacagacagcacttccatatgccatgaatagcgagttctcaagtgtcttagctgcacagctgaagcatcactctgagaataagggcc

SEQ ID NO: 255711 - DNA, 120 bp, Artificial Sequence
  ENSG00000124333_4 (sequence is synthesized)
tagacaaagtgatggagactcaagcccaagtggatgaactgaaaggaatcatggtcagaaacatagatctggtagctcagcgaggagaaagattggaattattgattgacaaaacagaaa

SEQ ID NO: 255712 - DNA, 120 bp, Artificial Sequence
  ENSG00000124333_5 (sequence is synthesized)
atcttgtggattcttctgtcaccttcaaaactaccagcagaaatcttgctcgagccatgtgtatgaagaacctcaagctcactattatcatcatcatcgtatcaattgtgttcatctata

SEQ ID NO: 255713 - DNA, 120 bp, Artificial Sequence
  ENSG00000124333_6 (sequence is synthesized)
tcattgtttcacctctctgtggtggatttacatggccaagctgtgtgaagaaataggaaagaagaagttaccattaaccaaggatatgagagaacaaggagttaaaagcaatccatgtga

SEQ ID NO: 255714 - DNA, 120 bp, Artificial Sequence
  ENSG00000124333_7 (sequence is synthesized)
ctcaagcctttcacatactgacagatggtatctgccagtctcttcaaccctcttctcactttttaaaatcttgttccatgcctccaggtttatctttgtcttatctaccagtttattcct

SEQ ID NO: 255715 - DNA, 120 bp, Artificial Sequence
  ENSG00000124333_8 (sequence is synthesized)
gtgaacttcagattgaaccattcattgcagcagtagccttaaaaaggcttttgtttatttctttggtttgttaactagtgtcatctatttagagaaacatttttgtttttaattgctcaa

SEQ ID NO: 255716 - DNA, 120 bp, Artificial Sequence
  ENSG00000124333_9 (sequence is synthesized)
agctgtcgccgctagtcttatgagctatctactaaaactatggagaaactttgtatgtgcacacaaaagtattcaagagacagtattgctaacatctcatcttaatgtcttttgttattg

SEQ ID NO: 255717 - DNA, 120 bp, Artificial Sequence
  ENSG00000124333_10 (sequence is synthesized)
tgcttccttctaagagctcagacaagtaaagtatgaaacattcttatttcagttagatggggaacattttgctagcccattagaagcacacagaattatccttgtcctcctaatattgac

SEQ ID NO: 255718 - DNA, 120 bp, Artificial Sequence
  ENSG00000124333_11 (sequence is synthesized)
tttcaggaataaagttcagtgtgctgatcattcacaatacagtggatagcttgatatcttctgttttcccattgcagttgatttgagaagatgaaggtttaaatattgttgaaagttgca

SEQ ID NO: 255719 - DNA, 120 bp, Artificial Sequence
  ENSG00000124333_12 (sequence is synthesized)
gttttttaaatgtgttcctttttcttctgtgaatatttagggcaatcgtgtcgctaatagaatatgtagtagagggggtggggaggtaaattcctctgacttgccaaagaaaaagaaggg

SEQ ID NO: 255720 - DNA, 120 bp, Artificial Sequence
  ENSG00000124333_13 (sequence is synthesized)
aaccacagtggatatgctagcattttagctgtgcaaagggaggtagtgtgggaaaagtgtttccattctgggaaaagcccaaaccgaatacggtcagcagtcaactccagggtttgggct

SEQ ID NO: 255721 - DNA, 120 bp, Artificial Sequence
  ENSG00000124333_14 (sequence is synthesized)
tgattcctgttgaataatagttttgagcattctttgtggttaaataaattcttaaatctgcctagttttgatgaattcttttgtgaaacttgaaagagaatagacagtatgacatataga

SEQ ID NO: 255722 - DNA, 120 bp, Artificial Sequence
  ENSG00000124333_15 (sequence is synthesized)
attaatacaaaacagtttaacaaccatttaactgcagtgtaagaaaattggactgtaatcatatcgctactggcatctgttatctagtatgcatttctggtgtgtatctgaaaggaagac

SEQ ID NO: 255723 - DNA, 120 bp, Artificial Sequence
  ENSG00000124333_16 (sequence is synthesized)
attttctaccctagatccaattgcatttatttatcaataagtgccattaaattgaaattatattacattttacactttctcaatgaatgaacaaattagtctgtagaatctagccacctg

SEQ ID NO: 255724 - DNA, 120 bp, Artificial Sequence
  ENSG00000124333_17 (sequence is synthesized)
tttagcctagtcatgtgccttgaacatatatgtgtcccataatctggctcatggtacctgttcttctatccaaacctttcaattcatgctacctgattcatttatttgacatagatctta

SEQ ID NO: 255725 - DNA, 120 bp, Artificial Sequence
  ENSG00000124333_18 (sequence is synthesized)
ggcccacttgaactcttttcttgtttatctagcatagcacaaacgtttttccagtcttctttatcaacactaatgcctcttaattgcatcagtatttcctattggaaaatacatctgttc

SEQ ID NO: 255726 - DNA, 120 bp, Artificial Sequence
  ENSG00000124333_19 (sequence is synthesized)
cagaaaaacatttggcattcctgaataatttccaaatgtttttaatccaaagaaaaaggtttaaagcttatttccctttcttatacacacctgaataaaattgatgtgcatgttttaggg

SEQ ID NO: 255727 - DNA, 120 bp, Artificial Sequence
  ENSG00000124333_20 (sequence is synthesized)
atcaattacctaactgttccttggtctatttatgtataagaatgctttttaaagcacatgtctcattttaaatgacgcacaaactgaagatgttaataaaatttaagagtaatacaatga

SEQ ID NO: 255728 - DNA, 120 bp, Artificial Sequence
  ENSG00000124334_0 (sequence is synthesized)
agcagctctgtaatgcgcttgtggtttcagatgtgggcggcctgtgtgaacctgtcgtgcaaagctcacgtcaccaactgctgcagttatctcctgaatcaggctgagggtctttgctgt

SEQ ID NO: 255729 - DNA, 120 bp, Artificial Sequence
  ENSG00000124334_1 (sequence is synthesized)
gcacccagagatagttgggtgacaaatcacctccaggttggggatgcctcagacttgtgatgggactgggcagatgcatctgggaaggctggaccttggagagtgaggccctgaggcgag

SEQ ID NO: 255730 - DNA, 120 bp, Artificial Sequence
  ENSG00000124334_2 (sequence is synthesized)
acatgggcacctggctcctggcctgcatctgcatctgcacctgtgtctgcttgggagtctctgtcacaggggaaggacaagggccaaggtctagaaccttcacctgcctcaccaacaaca

SEQ ID NO: 255731 - DNA, 120 bp, Artificial Sequence
  ENSG00000124334_3 (sequence is synthesized)
ttctcaggatcgattgccactggtctgccccagagctgggacagggctccagcccctggctcctcttcaccagcaaccaggctcctggcggcacacataagtgcatcttgcggggcagtg

SEQ ID NO: 255732 - DNA, 120 bp, Artificial Sequence
  ENSG00000124334_4 (sequence is synthesized)
agtgcaccgtcgtgctgccacctgaggcagtgctcgtgccatctgacaatttcaccatcactttccaccactgcatgtctgggagggagcaggtcagcctggtggacccggagtacctgc

SEQ ID NO: 255733 - DNA, 120 bp, Artificial Sequence
  ENSG00000124334_5 (sequence is synthesized)
cccggagacacgttaagctggacccgccctctgacttgcagagcaacatcagttctggccactgcatcctgacctggagcatcagtcctgccttggagccaatgaccacacttctcagct

SEQ ID NO: 255734 - DNA, 120 bp, Artificial Sequence
  ENSG00000124334_6 (sequence is synthesized)
atgagctggccttcaagaagcaggaagaggcctgggagcaggcccagcacagggatcacattgtcggggtgacctggcttatacttgaagcctttgagctggaccctggctttatccatg

SEQ ID NO: 255735 - DNA, 120 bp, Artificial Sequence
  ENSG00000124334_7 (sequence is synthesized)
aggccaggctgcgtgtccagatggccacactggaggatgatgtggtagaggaggagcgttatacaggccagtggagtgagtggagccagcctgtgtgcttccaggctccccagagacaag

SEQ ID NO: 255736 - DNA, 120 bp, Artificial Sequence
  ENSG00000124334_8 (sequence is synthesized)
ggccaggcaacacccttgttgctgtgtccatctttctcctgctgactggcccgacctacctcctgttcaagctgtcgcccagggtgaagagaatcttctaccagaacgtgccctctccag

SEQ ID NO: 255737 - DNA, 120 bp, Artificial Sequence
  ENSG00000124334_9 (sequence is synthesized)
cgatgttcttccagcccctctacagtgtacacaatgggaacttccagacttggatgggggcccacggggccggtgtgctgttgagccaggactgtgctggcaccccacagggagccttgg

SEQ ID NO: 255738 - DNA, 120 bp, Artificial Sequence
  ENSG00000124334_10 (sequence is synthesized)
agccctgcgtccaggaggccactgcactgctcacttgtggcccagcgcgtccttggaaatctgtggccctggaggaggaacaggagggccctgggaccaggctcccggggaacctgagct

SEQ ID NO: 255739 - DNA, 120 bp, Artificial Sequence
  ENSG00000124334_11 (sequence is synthesized)
cagaggatgtgctgccagcagggtgtacggagtggagggtacagacgcttgcctatctgccacaggaggactgggcccccacgtccctgactaggccggctcccccagactcagagggca

SEQ ID NO: 255740 - DNA, 120 bp, Artificial Sequence
  ENSG00000124334_12 (sequence is synthesized)
gcaggagcagcagcagcagcagcagcagcaacaacaacaactactgtgccttgggctgctatgggggatggcacctctcagccctcccaggaaacacacagagctctgggcccatcccag

SEQ ID NO: 255741 - DNA, 120 bp, Artificial Sequence
  ENSG00000124334_13 (sequence is synthesized)
ccctggcctgtggcctttcttgtgaccatcagggcctggagacccagcaaggagttgcctgggtgctggctggtcactgccagaggcctgggctgcatgaggacctccagggcatgttgc

SEQ ID NO: 255742 - DNA, 120 bp, Artificial Sequence
  ENSG00000124334_14 (sequence is synthesized)
tcccttctgtcctcagcaaggctcggtcctggacattctaggtccctgactcgccagatgcatcatgtccattttgggaaaatggactgaagtttctggagcccttgtctgagactgaac

SEQ ID NO: 255743 - DNA, 120 bp, Artificial Sequence
  ENSG00000124334_15 (sequence is synthesized)
ctcctgagaaggggcccctagcagcggtcagaggtcctgtctggatggaggctggaggctcccccctcaacccctctgctcagtgcctgtggggagcagcctctaccctcagcatcctgg

SEQ ID NO: 255744 - DNA, 120 bp, Artificial Sequence
  ENSG00000124334_16 (sequence is synthesized)
cctccttctgcgaaggtgtctgtcctgtggccatggggaagggtctgtggtgtgtgtgctgcccttggggctctcactgcctctgggctcctgctctgcctggtcccctggtctccccgg

SEQ ID NO: 255745 - DNA, 120 bp, Artificial Sequence
  ENSG00000124334_17 (sequence is synthesized)
caggttggggatgcctcagacttgtgatgggactgggcagatgcatctgggaaggtcctggtggtgactccaaccctgccctcacatatcccaagagcaggctgactgccttccccattc

SEQ ID NO: 255746 - DNA, 120 bp, Artificial Sequence
  ENSG00000124334_18 (sequence is synthesized)
ggtgtttcatgctgtggctggtggttccaggctgcacgctccattctaggaaagggctggaccttggagagtgaggccctgaggcgagacatgggcacctggctcctggcctgcatctgc

SEQ ID NO: 255747 - DNA, 120 bp, Artificial Sequence
  ENSG00000124334_19 (sequence is synthesized)
cagagatagttgggtgacaaatcacctccaggttggggatgcctcagacttgtgatgggactgggcagatgcatctgggaagtaactgctgcaagaacggacagacactgctgcagagaa

SEQ ID NO: 255748 - DNA, 120 bp, Artificial Sequence
  ENSG00000124334_20 (sequence is synthesized)
cttgccacggtgtttcatgctgtggctggtggttccaggctgcacgctccattctaggaaaggggccctcagcccagtcccttgcaggctggaccttggagagtgaggccctgaggcgag

SEQ ID NO: 255749 - DNA, 120 bp, Artificial Sequence
  ENSG00000124334_21 (sequence is synthesized)
cccttaaagggccagcctgggcccagtggacacaggtaaggcaccatgaccacctggtgtgacctctctgtgccttactgaggcacctttctagagattaaaaggggcttgatggctgtt

SEQ ID NO: 255750 - DNA, 120 bp, Artificial Sequence
  ENSG00000124343_0 (sequence is synthesized)
gtgcctacactggtcccacaggttttcagctgtggagtttgggatctgagcttggagcccatttgtttctggcagttccgctcatattttccacttgaagacatcgcctcccttccttcc

SEQ ID NO: 255751 - DNA, 120 bp, Artificial Sequence
  ENSG00000124343_1 (sequence is synthesized)
aagctgggagaccagaagtcaacaacaggagggtggagaggccgggtctcacaatccgcttggctggggagtccactgaggttcttgcatcctgaagcaaaccatggagagctggtgggg

SEQ ID NO: 255752 - DNA, 120 bp, Artificial Sequence
  ENSG00000124343_2 (sequence is synthesized)
acttccctgtcttgcgttcctgtgttttctaatgcacgcccgaggtcaaagagactttgatttggcagatgcccttgatgaccctgaacccaccaagaagccaaactcagatatctaccc

SEQ ID NO: 255753 - DNA, 120 bp, Artificial Sequence
  ENSG00000124343_3 (sequence is synthesized)
aaagccaaaaccaccttactacccacagcccgagaatcccgacagcggtggaaatatctacccaaggccaaagccacgccctcaaccccagcctggcaattccggcaacagtggaggtta

SEQ ID NO: 255754 - DNA, 120 bp, Artificial Sequence
  ENSG00000124343_4 (sequence is synthesized)
cttcaatgatgtggaccgtgatgacggacgctacccgcccaggcccaggccacggccgcctgcaggaggtggcggcggtggctactccagttatggcaactccgacaacacgcacggtgg

SEQ ID NO: 255755 - DNA, 120 bp, Artificial Sequence
  ENSG00000124343_5 (sequence is synthesized)
agatcaccattcaacgtatggcaatccagaaggcaatatggtagcaaaaatcgtgtctcccatcgtatccgtggtggtggtgacactgctgggagcagcagccagttatttcaaactaaa

SEQ ID NO: 255756 - DNA, 120 bp, Artificial Sequence
  ENSG00000124343_6 (sequence is synthesized)
caataggagaaattgtttcaggacccatgaaccagaaaatgtctgaagatgttaagatcccctgattactttgagaaaaacaactaaaacaagaaccgtgtttatcactgttgtggagat

SEQ ID NO: 255757 - DNA, 120 bp, Artificial Sequence
  ENSG00000124343_7 (sequence is synthesized)
ttccttttattcttgacacaatttgatgacctaaagtgtgttttcttctgtgtaaagtacatgagctgcctcactaagcattcccaactcattgaatgtgatgtggttataaagataagt

SEQ ID NO: 255758 - DNA, 120 bp, Artificial Sequence
  ENSG00000124343_8 (sequence is synthesized)
taggcagctagaccctgcgttctaaaaaaggattgcttgcaatgttggtttggctattcatttgcacaaagagactgtggctctctgttgtgagatcttcagctacctcatggtgcaata

SEQ ID NO: 255759 - DNA, 120 bp, Artificial Sequence
  ENSG00000124343_9 (sequence is synthesized)
agcggtgagcagtagggaggtagaatatcttggtggggaggggatgttatcagcttctgggagatgaagaatattgttgaggttccaaagatgctggacctgtgctaaattcttcagtga

SEQ ID NO: 255760 - DNA, 120 bp, Artificial Sequence
  ENSG00000124343_10 (sequence is synthesized)
tatgaaaaaatcattgagcattcattattgcgaatgaagtggggatgcattatttctgacacccacaagcagggtttgatcatcctttcagctttgagatatctgcacataaaattatta

SEQ ID NO: 255761 - DNA, 120 bp, Artificial Sequence
  ENSG00000124343_11 (sequence is synthesized)
ttacctgaagaaaataaggctgcattttgaaatgttaagtgcaaaatgactgatgttaaaaccatctgggggaaatcttgggatgctttttcctaggaaatcatatggttgtgatatgtt

SEQ ID NO: 255762 - DNA, 120 bp, Artificial Sequence
  ENSG00000124343_12 (sequence is synthesized)
ttggcgcataggagacagaaatagtgattatcaggcgttgagcctttttgtagtatttttagtctttgatactctgtaagtgctagttcctaaggcaccaacattgcattccttggttta

SEQ ID NO: 255763 - DNA, 120 bp, Artificial Sequence
  ENSG00000124343_13 (sequence is synthesized)
tactttttctattcatcagggtaggaagtcttaaatccttaggcatccaagaagtatactagctttttgcttctcttttagaaatacttgtggggagagaaaaaaggatggtttgggcat

SEQ ID NO: 255764 - DNA, 120 bp, Artificial Sequence
  ENSG00000124343_14 (sequence is synthesized)
attggtatagtttgagtaaactaaggttaatgttcatataacatttagactttgccataaatatcagaaccaaagatcaagacattcatgtacagtctggaatgtatatatggggcccat

SEQ ID NO: 255765 - DNA, 120 bp, Artificial Sequence
  ENSG00000124343_15 (sequence is synthesized)
aaaaattcccagtatgcatgttttatgctcaccattatgaattggggtcttcaaagagagaaggttgaaagtggaaagcacttgaaagggctccccggtttgtaaaatatctttaatcat

SEQ ID NO: 255766 - DNA, 120 bp, Artificial Sequence
  ENSG00000124343_16 (sequence is synthesized)
tcacattaggtacctcggagttgcgggtctcaaatgtggattcatgcatcatttgtgcagtttgaagatagtccatatttcctatttcagtattaggtcctgcaacacttttcaattctt

SEQ ID NO: 255767 - DNA, 120 bp, Artificial Sequence
  ENSG00000124343_17 (sequence is synthesized)
gtagaaggtttttttcaggagtggtgatgtctgatgctcaattactattttccctataagagtttcagcatgagcttaattaaattcttgtgaaaaaacctgtgtttttagttacacaca

SEQ ID NO: 255768 - DNA, 120 bp, Artificial Sequence
  ENSG00000124343_18 (sequence is synthesized)
cacacacacacacacctacttaaatggaatctaaacatttttagcctttaatccattccattttctaaaactgtcataaactatttttaatcattttaaataaatgtaaaagaaaaataa

SEQ ID NO: 255769 - DNA, 120 bp, Artificial Sequence
  ENSG00000124343_19 (sequence is synthesized)
agctgtgaatatgatgccataaatctcttttaaagctcaagatagactatgaacatatgaaatacatagttacctaatcatgagactaaattcacctgggtgacaaggctaacgttcaag

SEQ ID NO: 255770 - DNA, 120 bp, Artificial Sequence
  ENSG00000124343_20 (sequence is synthesized)
ctacttaagatgaaaatatttgaatcatgattgcttgggggaacctctctttgaggggtcatgaggaccacctgctgggcattctgttttcatgctgagaaggtgagaattgaacagatg

SEQ ID NO: 255771 - DNA, 120 bp, Artificial Sequence
  ENSG00000124343_21 (sequence is synthesized)
agaaaagccttgataaaacgtcatctccatgtaatttagagaaggataaccttgactgtacagctgacccttgaacaacacagggctgaactgcacatgtccacctgtatgtgagtttgc

SEQ ID NO: 255772 - DNA, 120 bp, Artificial Sequence
  ENSG00000124343_22 (sequence is synthesized)
ttctggctctgccattactgagacagcaggaccaaccctccatctactcaatgggaagatgataaggatgaagacctttatggtgatccgcttccacttaataaatagtaaattcattaa

SEQ ID NO: 255773 - DNA, 120 bp, Artificial Sequence
  ENSG00000124343_23 (sequence is synthesized)
gagcacactctcctagatcagtgctgggaggagctgtgtgggcttctgtttcccaacctcatgactttcacggagcactcatactttgtatgtatataaagtagctcctgaataaaaata

SEQ ID NO: 255774 - DNA, 120 bp, Artificial Sequence
  ENSG00000124343_24 (sequence is synthesized)
ccctgtcttgcgttcctgtgttttctaatgcacgcccgaggtcaaagagactttgatttggcagatgcccttgatgaccctgaacccaccaagaagccaaactcaggtgagtgtctcttc

SEQ ID NO: 255775 - DNA, 120 bp, Artificial Sequence
  ENSG00000124343_25 (sequence is synthesized)
tgggaaaaactgaggcaacgtccttgaactgatgcttacggaggggatggttgaggatgttttacagaactgtggggtatatgaaagagatgcaacaactgtaccagatagcagatattg

SEQ ID NO: 255776 - DNA, 120 bp, Artificial Sequence
  ENSG00000124343_26 (sequence is synthesized)
aaagcaaaatgtggtgattagggaaatgcaaatcacaaccacagtgaagcaccacttcgtccccactgagatggctaaaatctaaaatggaaaataacaagtgttggcaaggatgtgatg

SEQ ID NO: 255777 - DNA, 120 bp, Artificial Sequence
  ENSG00000124356_0 (sequence is synthesized)
atagacagacgaacgggagtgggcggagcgggcgccggatgtgacgtttccggaacctccgggtgtcatccgcggggaaagaacttggtcctgatgtctgaccatggagatgtgagcctc

SEQ ID NO: 255778 - DNA, 120 bp, Artificial Sequence
  ENSG00000124356_1 (sequence is synthesized)
ccgcccgaagaccgggtgagggctctctcccagctgggtagtgcggtagaggtgaatgaagacattccaccccgtcggtacttccgctctggagttgagattatccgaatggcatccatt

SEQ ID NO: 255779 - DNA, 120 bp, Artificial Sequence
  ENSG00000124356_2 (sequence is synthesized)
tactctgaggaaggcaacattgaacatgccttcatcctctataacaagtatatcacgctctttattgagaaactaccaaaacatcgagattacaaatctgctgtcattcctgaaaagaaa

SEQ ID NO: 255780 - DNA, 120 bp, Artificial Sequence
  ENSG00000124356_3 (sequence is synthesized)
gacacagtaaagaaattaaaggagattgcatttcccaaagcagaagagctgaaggcagagctgttaaaacgatataccaaagaatatacagaatataatgaagaaaagaagaaggaagca

SEQ ID NO: 255781 - DNA, 120 bp, Artificial Sequence
  ENSG00000124356_4 (sequence is synthesized)
gaggaattggcccggaacatggccatccagcaagagctggaaaaggaaaaacagagggtagcacaacagaagcagcagcaattggaacaggaacagttccatgccttcgaggagatgatc

SEQ ID NO: 255782 - DNA, 120 bp, Artificial Sequence
  ENSG00000124356_5 (sequence is synthesized)
cggaaccaggagctagaaaaagagcgactgaaaattgtacaggagtttgggaaggtagaccctggcctaggtggcccgctagtgcctgacttggagaagccctccttagatgtgttcccc

SEQ ID NO: 255783 - DNA, 120 bp, Artificial Sequence
  ENSG00000124356_6 (sequence is synthesized)
accttaacagtctcatccatacagccttcagactgtcacacaactgtaaggccagctaagccacctgtggtggacaggtccttgaaacctggagcactgagcaactcagaaagtattccc

SEQ ID NO: 255784 - DNA, 120 bp, Artificial Sequence
  ENSG00000124356_7 (sequence is synthesized)
acaatcgatggattgcgccatgtggtggtgcctgggcggctgtgcccacagtttctccagttagccagtgccaacactgcccggggagtggagacatgtggaattctctgtggaaaactg

SEQ ID NO: 255785 - DNA, 120 bp, Artificial Sequence
  ENSG00000124356_8 (sequence is synthesized)
atgaggaatgaatttaccattacccatgttctcatccccaagcaaagtgctgggtctgattactgcaacacagagaacgaagaagaacttttcctcatacaggatcagcagggcctcatc

SEQ ID NO: 255786 - DNA, 120 bp, Artificial Sequence
  ENSG00000124356_9 (sequence is synthesized)
acactgggctggattcatactcaccccacacagaccgcgtttctctccagtgtcgacctacacactcactgctcttaccagatgatgttgccagagtcagtagccattgtttgctccccc

SEQ ID NO: 255787 - DNA, 120 bp, Artificial Sequence
  ENSG00000124356_10 (sequence is synthesized)
aagttccaggaaactggattctttaaactaactgaccatggactagaggagatttcttcctgtcgccagaaaggatttcatccacacagcaaggatccacctctgttctgtagctgcagc

SEQ ID NO: 255788 - DNA, 120 bp, Artificial Sequence
  ENSG00000124356_11 (sequence is synthesized)
cacgtgactgttgtggacagagcagtgaccatcacagaccttcgatgagcgtttgagtccaacaccttccaagaacaacaaaaccatatcagtgtactgtagccccttaatttaagcttt

SEQ ID NO: 255789 - DNA, 120 bp, Artificial Sequence
  ENSG00000124356_12 (sequence is synthesized)
ctagaaagctttggaagtttttgtagatagtagaaaggggggcatcacctgagaaagagctgattttgtatttcaggtttgaaaagaaataactgaacatattttttaggcaagtcagaa

SEQ ID NO: 255790 - DNA, 120 bp, Artificial Sequence
  ENSG00000124356_13 (sequence is synthesized)
agagaacatggtcacccaaaagcaactgtaactcagaaattaagttactcagaaattaagtagctcagaaattaagaaagaatggtataatgaacccccatatacccttccttctggatt

SEQ ID NO: 255791 - DNA, 120 bp, Artificial Sequence
  ENSG00000124356_14 (sequence is synthesized)
caccaattgttaacatttttttcctctcagctatccttctaatttctctctaatttcaatttgtttatatttacctctgggctcaataagggcatctgtgcagaaatttggaagccattt

SEQ ID NO: 255792 - DNA, 120 bp, Artificial Sequence
  ENSG00000124356_15 (sequence is synthesized)
agaaaatcttttggattttcctgtggtttatggcaatatgaatggagcttattactggggtgagggacagcttactccatttgaccagattgtttggctaacacatcccgaagaatgatt

SEQ ID NO: 255793 - DNA, 120 bp, Artificial Sequence
  ENSG00000124356_16 (sequence is synthesized)
ttgtcaggaattattgttatttaataaatatttcaggatatttttcctctacaataaagtaacaattaacttatgtttttgtgcttcagagtgatccatttgatcaagcattgtataaac

SEQ ID NO: 255794 - DNA, 120 bp, Artificial Sequence
  ENSG00000124356_17 (sequence is synthesized)
aggttaaaaaaaaggtatggttgttttggaaaggtgaaggaaaaatggaatttgagatatactgacactgatggtgtgtcccagttcacttttaattactccttgttttttatctgcctg

SEQ ID NO: 255795 - DNA, 120 bp, Artificial Sequence
  ENSG00000124356_18 (sequence is synthesized)
ttgccatcttccagaggtgttgtgaagtcatctctgttcttttggtgctgtctcaaatgggtcaaccattcacttcctccttatgccctccatgcttttggctgaggataatgaagcctt

SEQ ID NO: 255796 - DNA, 120 bp, Artificial Sequence
  ENSG00000124356_19 (sequence is synthesized)
tgtttggagtaccaggttacactccaataaatgattacatttcccagccaccccaccctaccaatttcattgtgttggctgttcttttctgactaaggcaatacctaggaaaacgcttga

SEQ ID NO: 255797 - DNA, 120 bp, Artificial Sequence
  ENSG00000124356_20 (sequence is synthesized)
agcagcaattgttactgcaattttctgtgagctgagcctggtgttctaggtggcctagaaataatggtgtcatttgtgacacctcgagtgagggcaggagagtaaatactttggctagga

SEQ ID NO: 255798 - DNA, 120 bp, Artificial Sequence
  ENSG00000124356_21 (sequence is synthesized)
gaagagtgatttattctttatcagaattctaggtgggggagggagaatctgtgaatgcataaagttttcttcatttttaaattttgtctcagtctttattgcttaggttagtggtccttg

SEQ ID NO: 255799 - DNA, 120 bp, Artificial Sequence
  ENSG00000124356_22 (sequence is synthesized)
aacttgtcccctgaaagagcccagttctctatattctttttcttctcttgggttcttaattccccatatagtggaaattccttctttgctgttttggtatgggtgggtctgggggccagc

SEQ ID NO: 255800 - DNA, 120 bp, Artificial Sequence
  ENSG00000124356_23 (sequence is synthesized)
tgggcttggacaagccatttcctgctgcagcccagagcagcctggctgttccaccttgctctaaacagtcctgaaattgcccagtcctctgcttttgggaaatccatccccttcttccca

SEQ ID NO: 255801 - DNA, 120 bp, Artificial Sequence
  ENSG00000124356_24 (sequence is synthesized)
ttctttgtctaccacttagcttagggctttcttaccttttatttcgactgtagccgttggcttttaccaagtctctttgtttttagcatttcttcattccagtctgttctgcacactttg

SEQ ID NO: 255802 - DNA, 120 bp, Artificial Sequence
  ENSG00000124356_25 (sequence is synthesized)
atcaggagaagcttctcacattccagccatgttcatgttttctctcttgctcaaaaacctgcaatagcttcccattgctgaaaatctaaatttagcttttagtcagaactttccacttaa

SEQ ID NO: 255803 - DNA, 120 bp, Artificial Sequence
  ENSG00000124356_26 (sequence is synthesized)
agcaatttaaaaaatactgatgcctgtgttctaccccccaccaattaaagctgaatctctagggtggagcctcagatgttgtttctgcatttgtctttcaagctgctagaattctcaagt

SEQ ID NO: 255804 - DNA, 120 bp, Artificial Sequence
  ENSG00000124356_27 (sequence is synthesized)
acaaccagggttgacaaccactgcattggtctttgatacctaagaattgtgagctctcttatccgtctctgcccaccaaagacattcagccaggtcaacaacatatcatacgttgcaacc

SEQ ID NO: 255805 - DNA, 120 bp, Artificial Sequence
  ENSG00000124356_28 (sequence is synthesized)
acattgatcacagactgatcaccaaactgctatattttcttttctcttcctctaggcacaagatatcttagtggctagatgggtgcaggaaatcagtctgtagatccctcttcatatctg

SEQ ID NO: 255806 - DNA, 120 bp, Artificial Sequence
  ENSG00000124356_29 (sequence is synthesized)
ctgcagcctagccactgcagaggcactctgcataggatggtctaagtgtctctgtcttcatcttacctctgtggaggagacgtggaatcaagccagcccacaagccctgagactggatag

SEQ ID NO: 255807 - DNA, 120 bp, Artificial Sequence
  ENSG00000124356_30 (sequence is synthesized)
gccggagagaaagaggagtagccagagcggtcgggaaaagaggaaaggaatactgtgggtaaaagggacaaagaccacgcaacctgaggaaagacattgtattgaaagggtaatgactat

SEQ ID NO: 255808 - DNA, 120 bp, Artificial Sequence
  ENSG00000124356_31 (sequence is synthesized)
ttggctaaagggactgactcctgggttcccgaggctcaaagaccaggagacttttccactcttgcaagctgcacaagtaccatacttagtgttctgggctgagaggggagacaaaagcat

SEQ ID NO: 255809 - DNA, 120 bp, Artificial Sequence
  ENSG00000124356_32 (sequence is synthesized)
cgtcaggttgccaaacaatgtcccagttgccctgggaggcacaaacctaccaaagtgccataggccaggtgcagagagaatcagaggagctgatttgcttggggtcagagcagagctggg

SEQ ID NO: 255810 - DNA, 120 bp, Artificial Sequence
  ENSG00000124356_33 (sequence is synthesized)
ttttttcagatgatcactttcacatactccttgttaaatgggaccaaaggggaagaagaagaaacccttaagcttttgtaatattgtcttgggtaccagataccataaaaggcagcatga

SEQ ID NO: 255811 - DNA, 120 bp, Artificial Sequence
  ENSG00000124356_34 (sequence is synthesized)
gagaaacattcccttgggccagtgtcatggtggattttcttgcttgagaggcaaggatttcagctttcatttggtaccacagaatttaaaattgtaagtgcctatcccttttgactgttg

SEQ ID NO: 255812 - DNA, 120 bp, Artificial Sequence
  ENSG00000124356_35 (sequence is synthesized)
atggcttctttggggttttagttaccccagttgaaagagaaatttttcatattggggttgagaagaatggaggctattaggagcaaagctttaatgagtgaaagtctggtgaatcctgca

SEQ ID NO: 255813 - DNA, 120 bp, Artificial Sequence
  ENSG00000124356_36 (sequence is synthesized)
attttgatatgtttccagtggattttgagaacacagttttaggaccagagtagatgttgttccctagaaaatagagtcagctattgatattgtgcctcccatccctcatatctcagtgtt

SEQ ID NO: 255814 - DNA, 120 bp, Artificial Sequence
  ENSG00000124356_37 (sequence is synthesized)
ttaaccccacctgagtttggagaccagtttgtccaaggatctttcaaacatgtgagcccagagtagaacttctgagtcaaggatcatgtctttttctgaggagctttgcttggggcactg

SEQ ID NO: 255815 - DNA, 120 bp, Artificial Sequence
  ENSG00000124356_38 (sequence is synthesized)
gaaatcctgtttagatcaggactattggaatattatcctctccaggggaagtgccaggttgaacatttaaggctttgcttctaggcccagctatacattcaccagcaaatcacttaactt

SEQ ID NO: 255816 - DNA, 120 bp, Artificial Sequence
  ENSG00000124356_39 (sequence is synthesized)
cctaaatttctttaaaatctgtaaaatgggatcagtctaatatgcctacctcaaatgatgacagaatgacatctatatgcatatgaggcctacgttagttgaaagatgctataaagatat

SEQ ID NO: 255817 - DNA, 120 bp, Artificial Sequence
  ENSG00000124356_40 (sequence is synthesized)
aagggatttgttacttgtctttcttgaaatgttacagttggggtgcggttgcttctatcttctggacctctgcccattcagcatacagctagaggaatctttgggcagatccacattctt

SEQ ID NO: 255818 - DNA, 120 bp, Artificial Sequence
  ENSG00000124356_41 (sequence is synthesized)
tagcactagctaggctttgactccaaagctatctggtctaccttgatgttctgagcaggaaaactgaggacctcaagaaccattccaaatttctactcattctccctaagacccagagca

SEQ ID NO: 255819 - DNA, 120 bp, Artificial Sequence
  ENSG00000124356_42 (sequence is synthesized)
gacccaggacctaaagaaattacatcatctctattttcccttggctccagcccactcttgtttgaacctcccacttttgttgttccaactacttcttgagatgaaggaagggcagaacat

SEQ ID NO: 255820 - DNA, 120 bp, Artificial Sequence
  ENSG00000124356_43 (sequence is synthesized)
tggccctcttcactgaagtcttcaccccttaatccagggttcaatttttagttcaccttagcctgtttgagattagaagctgggccttaacttacaggtgtgtccggcatcattcaatca

SEQ ID NO: 255821 - DNA, 120 bp, Artificial Sequence
  ENSG00000124356_44 (sequence is synthesized)
gcctgttagatccagaatccagcactgtgacgctacataaccatgggctctgtccttccagttcctttagtgccttccctcactggtaggttcactctgagggcttccttccttgaactc

SEQ ID NO: 255822 - DNA, 120 bp, Artificial Sequence
  ENSG00000124356_45 (sequence is synthesized)
cagtggcaactatagtctgtttcccacaatttgttgtgtgtgttttttgttgttttgcagcgttttcatattgtcttttatgtaagtcatgtttctgaactatcgtataaatttcattag

SEQ ID NO: 255823 - DNA, 120 bp, Artificial Sequence
  ENSG00000124356_46 (sequence is synthesized)
ggtaagaatcatgtttgctttatgcactgtgtaacatgccttgcagtcagtataggcacttaaccttattgatcagttgttccttggtgttgaataatgtgttaggtagccaggtggacc

SEQ ID NO: 255824 - DNA, 120 bp, Artificial Sequence
  ENSG00000124356_47 (sequence is synthesized)
tgtgtcctagcctggagaagctctatgtcaccttgtaggaagccatctgaatttgactcagcatcatatgctgggcctgtgctgcacttgagctttctttccagccgccaggagggatgg

SEQ ID NO: 255825 - DNA, 120 bp, Artificial Sequence
  ENSG00000124356_48 (sequence is synthesized)
ttgtcctggccaacagcgaatttaatgggtggtcaaaagaagatgtgcctgcatagaaggctgaaagagggagctggaagtaggaggagacaaggagatagtgacaccagtatcttgtca

SEQ ID NO: 255826 - DNA, 120 bp, Artificial Sequence
  ENSG00000124356_49 (sequence is synthesized)
cagaaatcaaggaaggcaacagtttaaaggaggggagggagatcagtggtgccaactggctcagaagaggtttgctgggttaaatctcaagatgagcccatgagatctggtggttagcag

SEQ ID NO: 255827 - DNA, 120 bp, Artificial Sequence
  ENSG00000124356_50 (sequence is synthesized)
aggcctttcctgacaaccccattttaagcacctcttccccatcactctatctcatcactgttactgtctgtgtagccctgtcatgagctaaaatcatcctgtttgtttattgctagctta

SEQ ID NO: 255828 - DNA, 120 bp, Artificial Sequence
  ENSG00000124356_51 (sequence is synthesized)
tgtgtctaaagtatactccttgagaacagcaactttgtctttttcacctttgtactgagtcccctgacatggaataagatatgaataaatgcacagacttgtccaaaatcatccaattaa

SEQ ID NO: 255829 - DNA, 120 bp, Artificial Sequence
  ENSG00000124356_52 (sequence is synthesized)
gtttccggaacctccgggtgtcatccgcggggaaaggtggggaagggtcccgggaacgtggtggggcagggcctccgagcgtggttggactttgaaggggatcggccgccgtgagtgtgg

SEQ ID NO: 255830 - DNA, 120 bp, Artificial Sequence
  ENSG00000124356_53 (sequence is synthesized)
ggcctgcagcctactctccccgagtcccctgcccggcctgcctcgctcgaggcacccgacggcttctgtctccgcgggctggcgcctgaccagccaggcccagcggttccccgcctactg

SEQ ID NO: 255831 - DNA, 120 bp, Artificial Sequence
  ENSG00000124356_54 (sequence is synthesized)
catttgaaagatcccgaaaaccctggatgattgtgcctggggttggcaagttcgtcttgagtgccttcaagaagggttcctcaagcagttgtcgatagagccctccctactgtatacgcc

SEQ ID NO: 255832 - DNA, 120 bp, Artificial Sequence
  ENSG00000124356_55 (sequence is synthesized)
ccctccgctcattcctgctacttcctttctcctcctcgtatttccccctcggtcctttacgccgcctttccccctcatttgcagatgctgcatcccctttttggaattgctcaaccaggt

SEQ ID NO: 255833 - DNA, 120 bp, Artificial Sequence
  ENSG00000124356_56 (sequence is synthesized)
gcggggaaaggtggggaagggtcccgggaacgtggtggggcagggcctccgagcgtggttggactttgaaggggatcggccgccatgctgcatcccctttttggaattgctcaaccaggt

SEQ ID NO: 255834 - DNA, 120 bp, Artificial Sequence
  ENSG00000124356_57 (sequence is synthesized)
atggattcccactttacagtggagaaggagcttgcagtaaccacaaaagtttctgtataagcaaatttagggaattgaacttcagacagtgtggttgtctccttacttatgaacttggga

SEQ ID NO: 255835 - DNA, 120 bp, Artificial Sequence
  ENSG00000124356_58 (sequence is synthesized)
atacttacttaggtaacaactaacatcagaggtttttgatctgtagcctttctttctgtccataattagctaatagcttctgctgtacaaacacaaaccattccctgtccaagaaaatta

SEQ ID NO: 255836 - DNA, 120 bp, Artificial Sequence
  ENSG00000124356_59 (sequence is synthesized)
ctctttagggggatagagatgggaaaggagcatggcccagctgggtgtattagctctccctccgctgcacttctggaacctttcatataagggcttcaggataagggggttgcatagctt

SEQ ID NO: 255837 - DNA, 120 bp, Artificial Sequence
  ENSG00000124356_60 (sequence is synthesized)
tagggtcttatggacatttggaccatttgcttcataatcattttgaactgtttccttaggctctttattgagaaactaccaaaacatcgagattacaaatctgctgtcattcctgaaaag

SEQ ID NO: 255838 - DNA, 120 bp, Artificial Sequence
  ENSG00000124356_61 (sequence is synthesized)
aaagacacagtaaaggtgggtcttcactttcattgttgcccatctaaaagcttcagagcagcacagactgacttcaagataaaagtagtagtctctgcatctgagtaccagatcctgcaa

SEQ ID NO: 255839 - DNA, 120 bp, Artificial Sequence
  ENSG00000124356_62 (sequence is synthesized)
gggaaaggtggggaagggtcccgggaacgtggtggggcagggcctccgagcgtggttggactttgaaggggatcggccgccaacttggtcctgatgtctgaccatggagatgtgagcctc

SEQ ID NO: 255840 - DNA, 120 bp, Artificial Sequence
  ENSG00000124357_0 (sequence is synthesized)
gcaaacggcgggaccagcagcgacggtagcagcagcatggccgcgatctatgggggtgtagaggggggaggcacacgatccgaggtccttttagtctcagaggatgggaagatcctggca

SEQ ID NO: 255841 - DNA, 120 bp, Artificial Sequence
  ENSG00000124357_1 (sequence is synthesized)
gaagcagatggactgagcacaaaccactggctgatcgggacagacaagtgtgtggagaggatcaatgagatggtgaacagggccaaacggaaagcaggggtggatcctctggtaccgctg

SEQ ID NO: 255842 - DNA, 120 bp, Artificial Sequence
  ENSG00000124357_2 (sequence is synthesized)
cgaagcttgggcctatctctgagcggtggggaccaggaggacgcggggaggatcctgatcgaggagctgagggaccgatttccctacctgagtgaaagctacttaatcaccaccgatgcc

SEQ ID NO: 255843 - DNA, 120 bp, Artificial Sequence
  ENSG00000124357_3 (sequence is synthesized)
gccggctccatcgccacagctacaccggatggtggagttgtgctcatatctggaacaggctccaactgcaggctcatcaaccctgatggctccgagagtggctgcggcggctggggccat

SEQ ID NO: 255844 - DNA, 120 bp, Artificial Sequence
  ENSG00000124357_4 (sequence is synthesized)
atgatgggtgatgagggttcagcctactggatcgcacaccaagcagtgaaaatagtgtttgactccattgacaacctagaggcggctcctcatgatatcggctacgtcaaacaggccatg

SEQ ID NO: 255845 - DNA, 120 bp, Artificial Sequence
  ENSG00000124357_5 (sequence is synthesized)
ttccactatttccaggtgccagatcggctagggatactcactcacctgtatagggactttgataaatgcaggtttgctgggttttgccggaaaattgcagaaggtgctcagcagggagac

SEQ ID NO: 255846 - DNA, 120 bp, Artificial Sequence
  ENSG00000124357_6 (sequence is synthesized)
cccctttcccgctatatcttcaggaaggctggggagatgctgggcagacacatcgtagcagtgttgcccgagattgacccggtcttgttccagggcaagattggactccccatcctgtgc

SEQ ID NO: 255847 - DNA, 120 bp, Artificial Sequence
  ENSG00000124357_7 (sequence is synthesized)
gtgggctctgtgtggaagagctgggagctgctgaaggaaggttttcttctggcgctgacccagggcagagagatccaggctcagaacttcttctccagcttcaccctgatgaagctgagg

SEQ ID NO: 255848 - DNA, 120 bp, Artificial Sequence
  ENSG00000124357_8 (sequence is synthesized)
cactcctccgctctgggtggggccagcctaggggccaggcacatcgggcacctcctccccatggactatagcgccaatgccattgccttctattcctacaccttttcctagggggctggt

SEQ ID NO: 255849 - DNA, 120 bp, Artificial Sequence
  ENSG00000124357_9 (sequence is synthesized)
gaagaaaataaatgcactttatccactccccaattggactgcattatcaaacacatgtgctatgtacatcctcagtgcacctgccagcagatatcctggagggctcatgagtgaatttag

SEQ ID NO: 255850 - DNA, 120 bp, Artificial Sequence
  ENSG00000124357_10 (sequence is synthesized)
tccaagatttaaagccctgcccccaggtgctcagcctgtgatctgtatccactcagcatgcacttgggcagatgatttgtctgtgtgctacccttccccccatattaccatacatatgca

SEQ ID NO: 255851 - DNA, 120 bp, Artificial Sequence
  ENSG00000124357_11 (sequence is synthesized)
ctgtgtggctgccagttaatctgtgacctgttttctcctgtcgtgtcaagtgggtaacgatccctggcgaccacagtcagcagaaacaagtgctcaccattcagaacatcacagggagta

SEQ ID NO: 255852 - DNA, 120 bp, Artificial Sequence
  ENSG00000124357_12 (sequence is synthesized)
accttaggtatatcacaccctctcctgagactcccagcaagatttaggggctagagtacaattctagactgggagcatctttacctcactggatttagtaactgcaggtaagcaggacat

SEQ ID NO: 255853 - DNA, 120 bp, Artificial Sequence
  ENSG00000124357_13 (sequence is synthesized)
tttgaagtttttcctatgaatgagtttttgaaaggttatgaggatggctgagatccaagaagaccaactaggtaccgctcacctcggtagctgacctattcctggctactactagcctgg

SEQ ID NO: 255854 - DNA, 120 bp, Artificial Sequence
  ENSG00000124357_14 (sequence is synthesized)
ctctgcttacagcgtgacactatgtgttgtgtgttcctgggaatgaggagcatcagtgaagagcagacatgattcctgccctctgggtaccatagttcagccagtgaaggcaaacctgaa

SEQ ID NO: 255855 - DNA, 120 bp, Artificial Sequence
  ENSG00000124357_15 (sequence is synthesized)
gcttcggttccacagcctgtgctgcttggtgaagactaaggacaggagtctcgatccacaatagctgcctctccaggtgttttattagaggcatgtggatcatgtcctgcacatcagttc

SEQ ID NO: 255856 - DNA, 86 bp, Artificial Sequence
  ENSG00000124357_16 (sequence is synthesized)
tttattagaggcatgtggatcatgtcctgcacatcagttctccaacttacagacatcagttattctagagtttgttttaaaacacg

SEQ ID NO: 255857 - DNA, 120 bp, Artificial Sequence
  ENSG00000124357_17 (sequence is synthesized)
gcgcacgcgcaacctaacgcgggactgccagcaacttccgggcgtttacaggcaggcaggtcagtgatgtgtcctaagggtccgaccgacctagatacccctctttgattcctcctcttg

SEQ ID NO: 255858 - DNA, 120 bp, Artificial Sequence
  ENSG00000124357_18 (sequence is synthesized)
ggattagtgtccatctctggaagcaggatccaggaggacgggaggggccgctgcggaccgcagtcgctccacctggaggagacaccagaaggaagacagcctgagggacgcagccatccc

SEQ ID NO: 255859 - DNA, 120 bp, Artificial Sequence
  ENSG00000124357_19 (sequence is synthesized)
gggggaggcacacgatccgaggtccttttagtctcagaggatgggaagatcctggcagaagcagatggactgagcacaaaccactgggtaaaaaccacactgaggggatcagagggcttg

SEQ ID NO: 255860 - DNA, 120 bp, Artificial Sequence
  ENSG00000124357_20 (sequence is synthesized)
ctggacgagctgctgaccctgctctccagcagtgacttgcacccaggactcagattcatccctcagcacaggggcctgcctgtgttgacttgctgtccttagggaggagttgaaactgag

SEQ ID NO: 255861 - DNA, 120 bp, Artificial Sequence
  ENSG00000124357_21 (sequence is synthesized)
ggtaaggccatagatgccaggagatgccataccagtctgctaggggaaagggtgtagaagcccttccaacatcacctctctctaggtagtgtgtgtttattttcataggggcccttgagg

SEQ ID NO: 255862 - DNA, 120 bp, Artificial Sequence
  ENSG00000124357_22 (sequence is synthesized)
tgacaacagactgaccttgccttatccttgggtaggagctggtgtgacacagcctcacctattctgttttccccctccaactttcccttatcttggtcagtcagatacagtttgatagag

SEQ ID NO: 255863 - DNA, 120 bp, Artificial Sequence
  ENSG00000124357_23 (sequence is synthesized)
accctcccacccccctctcccaccccctgccacccctggctgggaatcaggaaacctaatttgtataaaattcaagcagatcactaacctgtctggatctgagtttccctcctcgtgagc

SEQ ID NO: 255864 - DNA, 120 bp, Artificial Sequence
  ENSG00000124357_24 (sequence is synthesized)
gaaaggaggactggggctgggtgaacagggtatggccagatggggagaacaggaatcaggcatcaggagggggcgggggttgagaaaagagctggggctggggctctgcacactcgctca

SEQ ID NO: 255865 - DNA, 120 bp, Artificial Sequence
  ENSG00000124357_25 (sequence is synthesized)
cagcagcgacggtagcagcagcatggccgcgatctatgggggtgtagaggggtgagtgcggcccggcggagggagcctgggcccgaaggcggggcggaaggccgtggccagcctggcaag

SEQ ID NO: 255866 - DNA, 120 bp, Artificial Sequence
  ENSG00000124357_26 (sequence is synthesized)
ctggtggccttgatcctcggcgtccgggcactttgggcggcgggaccttgcggtgaagaggtgtgtgcacgcgcaggggcgccctggagcgcacagctgtatgccttacggggactctgc

SEQ ID NO: 255867 - DNA, 120 bp, Artificial Sequence
  ENSG00000124357_27 (sequence is synthesized)
ctgtgcaacagccacaccccgggttggggatcctttgtgtttcttggcggaaccacgcccctttcttccacgaaacacccactccgctgtcttcagctggagaagcagctcctttttcct

SEQ ID NO: 255868 - DNA, 120 bp, Artificial Sequence
  ENSG00000124357_28 (sequence is synthesized)
gatccccagttgggagattgagtggggttcagacaggactgacaacaattttcctctcaccaagtgacctcagttctctgccaccactggccttggtggtggtgggccttggggtggagg

SEQ ID NO: 255869 - DNA, 120 bp, Artificial Sequence
  ENSG00000124357_29 (sequence is synthesized)
acagagcgagactctgcctcaaaaaaaataaaaaaaatattctggggaaccattggttcctcaggaccttagaggtgttaaagatgtataagtttgttgggattggaaggacctaccttc

SEQ ID NO: 255870 - DNA, 120 bp, Artificial Sequence
  ENSG00000124357_30 (sequence is synthesized)
tgtataagtttgttgggattggaaggacctaccttctgtggtcaaataagttttgggagaaacaaattgatttcttgattgcaggacttctcagagcctttaatttgctaatgtgcattg

SEQ ID NO: 255871 - DNA, 120 bp, Artificial Sequence
  ENSG00000124357_31 (sequence is synthesized)
tgactccccaagggagagttacaatatgcaatattccttggattcctttgaccaaagaaatcttttcaagagcaccccaacccagctactcaggaggctgacgtgggaggattgcttaag

SEQ ID NO: 255872 - DNA, 120 bp, Artificial Sequence
  ENSG00000124357_32 (sequence is synthesized)
aggaaaaaaaaaaaattacaaaaaaagagcagctcaagaaactataggaaacactttggttaacacaaatctgttctctgtgctgccttcaaactaatctataagaaataatgaagtcca

SEQ ID NO: 255873 - DNA, 120 bp, Artificial Sequence
  ENSG00000124357_33 (sequence is synthesized)
gccttcaaactaatctataagaaataatgaagtccatgttagggaacacagataacttttctcaaatgagaaatctcaaatccctgtactttggagttaaaaaaaattattctagctttt

SEQ ID NO: 255874 - DNA, 120 bp, Artificial Sequence
  ENSG00000124357_34 (sequence is synthesized)
gaggaatttatgaagcagttgtcctttggacaaatctataactttcttttcctagccaattatactcaaagaactaggggattatagagaggttaggcatattttgttgggtgtcaggag

SEQ ID NO: 255875 - DNA, 120 bp, Artificial Sequence
  ENSG00000124357_35 (sequence is synthesized)
atgctgaacagagggcttgtatatctgtacattgctctttctccactgtgaggtccatcctgccttaatttgggttcctgcagcctcagggcattctagggctctcttagatcctgctgg

SEQ ID NO: 255876 - DNA, 120 bp, Artificial Sequence
  ENSG00000124357_36 (sequence is synthesized)
actgagtcccctctagaaaagaagcaggaacaggctaaccaacagcagactgttagaagttggtggagggcactgacaggagtaccagccagctgttcagctaggatcctgggtccccag

SEQ ID NO: 255877 - DNA, 120 bp, Artificial Sequence
  ENSG00000124357_37 (sequence is synthesized)
agctgacagcctcataggaacagacttacagtaactcagtgtgagctggatgcatactaggtgccagtgcattcctttagtgggtgctgccctcccttcctgagttgggggcctgagtga

SEQ ID NO: 255878 - DNA, 120 bp, Artificial Sequence
  ENSG00000124357_38 (sequence is synthesized)
gcacctctgtacagggcacccctctacagagggaggtagctggtatgtttgtcagtggagacttgcttctccacctgccacgaggcgggcatccatccggcagtagactcctagctcagg

SEQ ID NO: 255879 - DNA, 120 bp, Artificial Sequence
  ENSG00000124357_39 (sequence is synthesized)
ggagtggggagaagcgggacaaagatcttggctgaggttatccgggagctggagcagctgcgagccagagtactaggttgtcctgatgtctgaaaaccgctccatccctgttggccttcc

SEQ ID NO: 255880 - DNA, 120 bp, Artificial Sequence
  ENSG00000124357_40 (sequence is synthesized)
atgctgctttcactagattgcatttttctgctcagaagcttgtttactgaactttttgtaatagctctgcccctgggtatgaccatggacaagatatttaccctccctgggctacagtta

SEQ ID NO: 255881 - DNA, 120 bp, Artificial Sequence
  ENSG00000124357_41 (sequence is synthesized)
ccgtatgtgcaaagtgaggatagggataaataagatcgctatgtccctgccagtggcaacattctgtgaatctgagtttgtcaaatcagggaataatgggggtcgctggcctctcagcca

SEQ ID NO: 255882 - DNA, 120 bp, Artificial Sequence
  ENSG00000124357_42 (sequence is synthesized)
gggcactgtactttcgaatctgtgattgttttcacttctctggcagccacaccccactgctgattcacagaccccaaagtcttttcacatgaattgttaggaatgatctttcccatcctg

SEQ ID NO: 255883 - DNA, 120 bp, Artificial Sequence
  ENSG00000124357_43 (sequence is synthesized)
tatttgtagcacttaaaaaaaacagtataggagtctgcattcatccttgttatagtcatctgtaagatatgacccgtttcttccagttcgtcaagacatgcttttggatgtggaatctgc

SEQ ID NO: 255884 - DNA, 120 bp, Artificial Sequence
  ENSG00000124357_44 (sequence is synthesized)
cacctcatgtattaactacccccttgaaatttcatgtcctctttgagtttgatgagcggtcttcagtgtcttcttctgccattcctaaaagtaatgatcaataaagaaacatatatccca

SEQ ID NO: 255885 - DNA, 120 bp, Artificial Sequence
  ENSG00000124357_45 (sequence is synthesized)
tcaccacagatctccctgtgaactactgtgacccccagtaatcaacatttgaaggtttagttgcttaagtatgtatgaagtcaccctgccatctggtcagcatttctagcaaaggtgtct

SEQ ID NO: 255886 - DNA, 120 bp, Artificial Sequence
  ENSG00000124357_46 (sequence is synthesized)
tgaagaccttggcagctggatcttgaaatgcagtctttagctattgtgagggaagcagagagatgtgccatttttcttaggagtgtttgctgagcattgcctgtgccagctcctgtgctc

SEQ ID NO: 255887 - DNA, 120 bp, Artificial Sequence
  ENSG00000124357_47 (sequence is synthesized)
gttctgagagggtaagtaagtgatcaggagcttgacccagtggagcttgaagtctagtgagaggcggacacaaagcgtctgaacacacacttcatacagaggagactttaataactttgg

SEQ ID NO: 255888 - DNA, 120 bp, Artificial Sequence
  ENSG00000124357_48 (sequence is synthesized)
aggcactatgaaggtttaactaacggagacttaactaattcgttggggtgggccacacctcagaaaaggtttcgaggactaggtgaagcgtaagtagagtcttgcaggataaggaggaca

SEQ ID NO: 255889 - DNA, 120 bp, Artificial Sequence
  ENSG00000124357_49 (sequence is synthesized)
tccccaagggaagaggagtgagaattatgtttcagttaaagagcactcaaacactgaaccacagaggcgggtttgggagtggtgattgagtttgtcgaagctgtctcctccatcatactg

SEQ ID NO: 255890 - DNA, 120 bp, Artificial Sequence
  ENSG00000124357_50 (sequence is synthesized)
gtttggactagatgagtttgatgactgcagagggaaagacctccaagacttagtccctggtgtcaaaactgtcataatctcacccagtctcatggcttcagttgccacctacaaactaca

SEQ ID NO: 255891 - DNA, 120 bp, Artificial Sequence
  ENSG00000124357_51 (sequence is synthesized)
aatgtgttggaagagcacagggctttggagagctgctgagaccttggtttgaatcccagctttgctgctcagtatctgcgtaaccctgtgtaggttactcaccttctctaagcctcagtt

SEQ ID NO: 255892 - DNA, 120 bp, Artificial Sequence
  ENSG00000124357_52 (sequence is synthesized)
tgcaaagtggttagtatagagcctgacccataagcactcattaaatgttagctattatttactcctggttcagatctttctcccaagttgcggtagctccagctactccctggacatata

SEQ ID NO: 255893 - DNA, 120 bp, Artificial Sequence
  ENSG00000124357_53 (sequence is synthesized)
tgtgagatgttctgcagacacaggcaaacctcgtgtataccaaaccaagcttacctctctccatctcccctcaccttgccccgctgcctgatctttctgttaagagcactactgcccttc

SEQ ID NO: 255894 - DNA, 120 bp, Artificial Sequence
  ENSG00000124357_54 (sequence is synthesized)
gatgagggttcaggtgagctcactgactggcccagctccaggtcctggatctgctccttccttcactccctgtctttctctccttagccttggctcactgagcccttggggcttcctggg

SEQ ID NO: 255895 - DNA, 120 bp, Artificial Sequence
  ENSG00000124357_55 (sequence is synthesized)
cggctcctaccggcgccccgccccgcgcatgcgcacgcgcacagggagtcagctggctgcgcgggaggtcacgggaagtggggcggtgcccagacagctggagggaaggaggtgtcaggc

SEQ ID NO: 255896 - DNA, 120 bp, Artificial Sequence
  ENSG00000124357_56 (sequence is synthesized)
taagatggtttagggtatgagtgaatatcactgtgagaacgggtctagcacaatcccagtaaagcaggtagagtcactggaagaccggctgggcaaggagccacattccctctaagaggt

SEQ ID NO: 255897 - DNA, 120 bp, Artificial Sequence
  ENSG00000124357_57 (sequence is synthesized)
gcaggcttgcatttctctttgtccccctagacgagggcgttatgggattagagtttttctgagacccaggctctcaccctcaggcaggaaactagctgggctcagttttctcctctacag

SEQ ID NO: 255898 - DNA, 120 bp, Artificial Sequence
  ENSG00000124357_58 (sequence is synthesized)
gaaggacagaacgtttacagcagttgtctacggctgcctctgtgttctgaagaccccatgcacccctcgtcccttctgggttgggcctggcagtcccgtaggctgtctttcccttgcttt

SEQ ID NO: 255899 - DNA, 120 bp, Artificial Sequence
  ENSG00000124357_59 (sequence is synthesized)
caagtgctcagtattcacatatggatactgtgcaggacagcacacactaattggtccatgggcgcaggtccctgagcccacagcttcgcgggggtctggccgagcatgcgtcacaaccta

SEQ ID NO: 255900 - DNA, 120 bp, Artificial Sequence
  ENSG00000124357_60 (sequence is synthesized)
cgcggccaagagcagtgcgcacgcgcaacctaacgcgggactgccagcaacttccgggcgtttacaggcaggcaggtcagtgatgtgtcctaagggtccgaccgacctagatacccctct

SEQ ID NO: 255901 - DNA, 120 bp, Artificial Sequence
  ENSG00000124370_0 (sequence is synthesized)
gctttccaaaatggcgcgggtgctgaaggctgcagccgcgaatgccgtagggcttttttccagacttcaagctcccattccaacagtaagagcttcttccacatcacagcccttggatca

SEQ ID NO: 255902 - DNA, 120 bp, Artificial Sequence
  ENSG00000124370_1 (sequence is synthesized)
agtgacaggttctgtgtggaacctgggtcgactcaaccatgtagccatagcagtgccagatttggaaaaggctgcagcattttataagaatattctgggggcccaggtaagtgaagcggt

SEQ ID NO: 255903 - DNA, 120 bp, Artificial Sequence
  ENSG00000124370_2 (sequence is synthesized)
ccctcttcctgaacatggagtatctgttgtttttgtcaacctgggaaataccaagatggaactgcttcatccattgggacgtgacagtccaattgcaggttttctgcagaaaaacaaggc

SEQ ID NO: 255904 - DNA, 120 bp, Artificial Sequence
  ENSG00000124370_3 (sequence is synthesized)
gagcacatggaaaaccagtgatttttctccatcctaaagactgtggtggagtccttgtggaactggagcaagcttgatttatatttgcaagcaactaaattaattgacctgaaaaagcct

SEQ ID NO: 255905 - DNA, 120 bp, Artificial Sequence
  ENSG00000124370_4 (sequence is synthesized)
atcaaatactatcaaaatgtactatgacattgagtccttcactgcttccatcatgtaaaagttcacagttaaagactgaattacagaaagattaaaatatatacatatataaatacataa

SEQ ID NO: 255906 - DNA, 120 bp, Artificial Sequence
  ENSG00000124370_5 (sequence is synthesized)
gggcagcggcagcaaggagtgggagagccagagcaggatcttttttgacagcatatattccttaggaaagaaaaaatttataacttcaaagtaacaggctagtgagatggggaagctgag

SEQ ID NO: 255907 - DNA, 77 bp, Artificial Sequence
  ENSG00000124370_6 (sequence is synthesized)
taacttcaaagtaacaggctagtgagatggggaagctgaggaccaaagaggttatgagatgtacctgaagattgtga

SEQ ID NO: 255908 - DNA, 120 bp, Artificial Sequence
  ENSG00000124370_7 (sequence is synthesized)
ttctccgtcaagtatagagagacacatctgctcctcctagagtgtccataagtggataatattaatgcagctgtgatggatttgaaaaaaaagaagatccgcagtctaagtgaagaggtc

SEQ ID NO: 255909 - DNA, 120 bp, Artificial Sequence
  ENSG00000124370_8 (sequence is synthesized)
gcgggtgctgaaggctgcagccgcgaatgccgtaggtgaataccgggcaccggcgaccttcgccatgggacagggagcgtgggaacggcggtcgggggcggaggaggcctcggcgtggcc

SEQ ID NO: 255910 - DNA, 120 bp, Artificial Sequence
  ENSG00000124370_9 (sequence is synthesized)
aaagcaccttgatctaatgtcctcccccgggggcgcgttccacagcagctgctgtcacttaggcagagggtgccttccagaagcgccaccgcttagtagcggggattgccttgtgcatga

SEQ ID NO: 255911 - DNA, 120 bp, Artificial Sequence
  ENSG00000124370_10 (sequence is synthesized)
gtcccatttccatccgagagctgtgcgccttgggctctgcaccttccagtatgtgggcgggagagtcgagggaacttgcccggcaggtcaggcagggcagggacagaagtaaatagaagc

SEQ ID NO: 255912 - DNA, 120 bp, Artificial Sequence
  ENSG00000124370_11 (sequence is synthesized)
gtggcgggttgctttccaaaatggcgcgggtgctgaaggctgcagccgcgaatgccgtagactggggagaaaccagaaaggagagcacgttccgtaaaaacaacaactactagtcggccg

SEQ ID NO: 255913 - DNA, 120 bp, Artificial Sequence
  ENSG00000124370_12 (sequence is synthesized)
ctgggtcgactcaaccatgtagccatagcagtgccagatttggaaaaggctgcagcattttataagaatattctgggggcccaggtggataatattaatgcagctgtgatggatttgaaa

SEQ ID NO: 255914 - DNA, 120 bp, Artificial Sequence
  ENSG00000124374_0 (sequence is synthesized)
agtgtgcagtaagagataacctggcaagtggtagtggcgcttctcgggtgctgtgcttcacgttttggtactaaaggccgagactgttgtggcgacggcgacctctacggcaacggctta

SEQ ID NO: 255915 - DNA, 120 bp, Artificial Sequence
  ENSG00000124374_1 (sequence is synthesized)
agctctcggaggagtggcagagtacgatctgaaggaggggcttctggttagcccaggttccatcataatgaatggatccaatatggcaaatacatcaccgagtgtaaaatccaaagagga

SEQ ID NO: 255916 - DNA, 120 bp, Artificial Sequence
  ENSG00000124374_2 (sequence is synthesized)
ccaggggttaagtgggcacgatgaaaaggaaaacccatttgcagagtacatgtggatggagaatgaagaggatttcaacagacaggtggaggaggaactgcaggagcaagacttcttgga

SEQ ID NO: 255917 - DNA, 120 bp, Artificial Sequence
  ENSG00000124374_3 (sequence is synthesized)
ccgctgcttccaagagatgctggatgaagaagaccaagactggtttattccctcacgagacctgcctcaggccatgggacagttgcaacagcagttaaatggactgtcagtcagtgaagg

SEQ ID NO: 255918 - DNA, 120 bp, Artificial Sequence
  ENSG00000124374_4 (sequence is synthesized)
tcatgattctgaagatattttgagcaaaagtaacctgaacccagatgccaaggagtttattccaggagagaagtactgagccgagaaagctttgaggaagacttgtctgtccccacatct

SEQ ID NO: 255919 - DNA, 120 bp, Artificial Sequence
  ENSG00000124374_5 (sequence is synthesized)
ggggatagtaatgcacaaaatggtggagctgaagagggggatggggcgggcgaggggtgcacagcgggaaggggagtggtggtctcacaatactgtgactctgagtaactaatatgctca

SEQ ID NO: 255920 - DNA, 120 bp, Artificial Sequence
  ENSG00000124374_6 (sequence is synthesized)
gtcttattctaagcctctgagtatttctattttgttctgctgacttttgtttggggagtttcctgttttgtttttttaaatagctctttcgagttaaggaaattgcattttccccccttc

SEQ ID NO: 255921 - DNA, 120 bp, Artificial Sequence
  ENSG00000124374_7 (sequence is synthesized)
atcagaagtgttccgcggtgtgtatttaaacaaaataagctgactaagaaaaactggatatttaggaaatgcccctctcaccctgctgtatacttatcagggacagtgagcacctggaga

SEQ ID NO: 255922 - DNA, 120 bp, Artificial Sequence
  ENSG00000124374_8 (sequence is synthesized)
gctttttgtggaatctattgagttggatgggaaaagggacaagcagaaagagcaggtggtgcaaactggaatttgaggctcagctgccccacccccggggtctcctgcaatgaactcgga

SEQ ID NO: 255923 - DNA, 120 bp, Artificial Sequence
  ENSG00000124374_9 (sequence is synthesized)
taaccaatgtgctgtcaagcccttgcctgtttgtcctgaaccccattcaagaaaacacagacttaaagtacttagtttacagtaacttttgatgattgttgaaagttgtaaatcagaagg

SEQ ID NO: 255924 - DNA, 120 bp, Artificial Sequence
  ENSG00000124374_10 (sequence is synthesized)
tagggctgtgatggtggttgtcacttgagtcatttagttactgttgtcctgttcataagcctgtgttcaccaccaccatcagactcaccatttataagtagaagagcactagggttgatc

SEQ ID NO: 255925 - DNA, 120 bp, Artificial Sequence
  ENSG00000124374_11 (sequence is synthesized)
tgccacctcatctttcatgaagtctattccccagcctcctttttaagaaaagatactgctaccaaaggcataggggaggcctgctgtgctggcaattagcatgagcctgcagaagtcatc

SEQ ID NO: 255926 - DNA, 120 bp, Artificial Sequence
  ENSG00000124374_12 (sequence is synthesized)
cttgaatctgttgtgtcttaattttatttggacagtttttttttccagcctcatcaacacttggtcttcctggtgtcttaattccctcagacaagtttatgcacttttttaaggaaatat

SEQ ID NO: 255927 - DNA, 120 bp, Artificial Sequence
  ENSG00000124374_13 (sequence is synthesized)
ttttcaggacactagtaagaagctcagttcacagtttggatatttcttcccacattacagaattatggaaaggaactcaaaatcagcctaggaaagtgagtcctgcttgacccatgtgac

SEQ ID NO: 255928 - DNA, 120 bp, Artificial Sequence
  ENSG00000124374_14 (sequence is synthesized)
tgtgtacctgaccttctgggatcttttcagctattaaaacattttactgttcccacatacccagctttgcaagttttgtagattgacctcttagggtgtgtttctttgtctttcctgcct

SEQ ID NO: 255929 - DNA, 120 bp, Artificial Sequence
  ENSG00000124374_15 (sequence is synthesized)
ttaacttgctggggtcttttgttgctacccctaaggaactaaactgggtgccaggagctaccttcgtgtatagagatgtagatggcagtgtggggtacaggagagccatccaggccattc

SEQ ID NO: 255930 - DNA, 120 bp, Artificial Sequence
  ENSG00000124374_16 (sequence is synthesized)
tcccagggatgaggaattggagagccctgaagataatagtggcttctttctgattgctactgtgctgtgtgataggcctaatagggaaaagatatgtaacttgaaacaaagttggtataa

SEQ ID NO: 255931 - DNA, 120 bp, Artificial Sequence
  ENSG00000124374_17 (sequence is synthesized)
attcagtatgtggctgtgggacagaggttggaaggaaaggactagggtatggaaagctgaagaaattctccttatgagctctcgttgactttttgaacagtgataagctaatgccagatt

SEQ ID NO: 255932 - DNA, 120 bp, Artificial Sequence
  ENSG00000124374_18 (sequence is synthesized)
taaaatacacattttttcctatttgagtctttaggattatatcatttgaaaaaattgccttccttgttaggtcacatgtcataggagagtagcttagagaacttgcattaccagacagac

SEQ ID NO: 255933 - DNA, 120 bp, Artificial Sequence
  ENSG00000124374_19 (sequence is synthesized)
acattaattcccaaagcctctatgttgagagaatgaaactgttaactctttttcagagaggactatgaataaagaaacttctttattcaagcttcagctttcagctgggttgtttcctct

SEQ ID NO: 255934 - DNA, 120 bp, Artificial Sequence
  ENSG00000124374_20 (sequence is synthesized)
aaaagggaaagggcattgcaagtgcatagaggaaatctctcccttctgggactgcttttcctccttcatcctcgtgagcctgtccaagctcagaattccgaaggctgttagaaatgcgtt

SEQ ID NO: 255935 - DNA, 120 bp, Artificial Sequence
  ENSG00000124374_21 (sequence is synthesized)
gggattgcagagagaaaggagcttgtctttccttctgctgtgctggtctgttttggatgtcagtcttcaggactatgaaaacttcctgccagtttagcatggacactgagggctggcatt

SEQ ID NO: 255936 - DNA, 120 bp, Artificial Sequence
  ENSG00000124374_22 (sequence is synthesized)
tctagtcttcttcagacactgaacatactgactccaggtataggaagcagctagcaaattgattcttttttaaatgcataggactctgcttccggcggttcctcttgtagtccaactctt

SEQ ID NO: 255937 - DNA, 120 bp, Artificial Sequence
  ENSG00000124374_23 (sequence is synthesized)
tttgccatctatttatgttgggaggtaggggcacaattgtcactcacaacacaggctagttagagtttgctaccttcttagcagaaaatgcatgtgtgtcttgttggaccttcactgggg

SEQ ID NO: 255938 - DNA, 120 bp, Artificial Sequence
  ENSG00000124374_24 (sequence is synthesized)
aaaggctgggagcctctggctgtcagtgacttttctcacagaagaagaaccagcaagccagactggacacctttaccctttaatggtaagacttgtatttataaggggtaattttgatgt

SEQ ID NO: 255939 - DNA, 120 bp, Artificial Sequence
  ENSG00000124374_25 (sequence is synthesized)
tgaatttaagccactactttgtttaaacttttttaaattggcaactagaagtttgagaatttgtatagaaatggaacatgtatttctaacagttgccaatctggctggtcccaatgttag

SEQ ID NO: 255940 - DNA, 120 bp, Artificial Sequence
  ENSG00000124374_26 (sequence is synthesized)
gaaaataatttatctctttcttttcaagggaaaaaacccaaatgaatgcattttcagtttctccaggcctttgaactgcagcagaaaattcaaggatacagcctaggcctgggcaaatgc

SEQ ID NO: 255941 - DNA, 120 bp, Artificial Sequence
  ENSG00000124374_27 (sequence is synthesized)
agccctgggtctttgggccagtttctgacaataatagttgagttttgggaatcacataagggtgaaaccagaaacgatcctaaggaaaggcttgacctttgttaacacctttagtttcca

SEQ ID NO: 255942 - DNA, 63 bp, Artificial Sequence
  ENSG00000124374_28 (sequence is synthesized)
ccatagctcactgcagcatcaaattcctaggctcaagcaatcctcccatcttagcctcccgag

SEQ ID NO: 255943 - DNA, 120 bp, Artificial Sequence
  ENSG00000124374_29 (sequence is synthesized)
ttcctaggctcaagcaatcctcccatcttagcctcccgagtagctgggacaacaggtacgcaccaccacggccagctaattatttttattatttttattttttgtagagactggatcttg

SEQ ID NO: 255944 - DNA, 80 bp, Artificial Sequence
  ENSG00000124374_30 (sequence is synthesized)
gatgggtgtggtgagccaccccagcctggggtctctttaattaaggttataatgctaaccatggcttaaaatactaagca

SEQ ID NO: 255945 - DNA, 120 bp, Artificial Sequence
  ENSG00000124374_31 (sequence is synthesized)
ttaaggttataatgctaaccatggcttaaaatactaagcaacattttccaaattgtttattactattgctttgattttggagaagctgggaagtaaggaggtgaggtgaatactctgata

SEQ ID NO: 255946 - DNA, 120 bp, Artificial Sequence
  ENSG00000124374_32 (sequence is synthesized)
attaacacgtgttagagaggaaagttgtgtgaagaggctgccaaagtaaacagcacgaatgaatcttcttgtactagggctgctgcaaaccccaggtagacaaatgacagcccaggctcc

SEQ ID NO: 255947 - DNA, 120 bp, Artificial Sequence
  ENSG00000124374_33 (sequence is synthesized)
tgaaccatcaggaacccaggaatctacccaactgtgaggagggggcaggccttcgtcaataagggtcccaccatcacgggctaataatctttctcagtttaggtgatattgaggtattga

SEQ ID NO: 255948 - DNA, 120 bp, Artificial Sequence
  ENSG00000124374_34 (sequence is synthesized)
aactgttagaaatctgacagatttgaccaagatttggagacgtccacataattgggaaggactgagtgtccctagccactctcctctgggataacgcggacgtcattagtttgcgaagtg

SEQ ID NO: 255949 - DNA, 120 bp, Artificial Sequence
  ENSG00000124374_35 (sequence is synthesized)
ggtggggagaacaggaggattgactctaatttggtgtgtagtgggggccttgatgtccttctgcctctgtccacatttccccatgtgactcattgcaccctgcattgctcacagggatca

SEQ ID NO: 255950 - DNA, 120 bp, Artificial Sequence
  ENSG00000124374_36 (sequence is synthesized)
ttagttctcccggtagacagagcacctctgcagcctctgctctgctgccttgtgaatttcctacacagacttggttagttacaatttggaaacagtttttttgggtttttttcctttgtt

SEQ ID NO: 255951 - DNA, 120 bp, Artificial Sequence
  ENSG00000124374_37 (sequence is synthesized)
ttaatcttctcacaatgaagctgctattggtgacagggacaggggagcaggaagccaacccagggaaacatgcgagtttcctgcacaccacttagtcacctgccctcactggccaacccc

SEQ ID NO: 255952 - DNA, 120 bp, Artificial Sequence
  ENSG00000124374_38 (sequence is synthesized)
ctactgctgttcccagtcagtctggtttttagaggcatcgtggcaatagaatagctggatacactaatctctacaaggtgtcaggcaggagattcaccttccccagtcccaggggacagg

SEQ ID NO: 255953 - DNA, 120 bp, Artificial Sequence
  ENSG00000124374_39 (sequence is synthesized)
agagaaatctgtaaagggacagatgcaccatctttatttcaaaagaaaaagctccctcagattgtgttactaggagtctcttttgtgacatttactgagctttctccccaatcttacctt

SEQ ID NO: 255954 - DNA, 120 bp, Artificial Sequence
  ENSG00000124374_40 (sequence is synthesized)
cctattggctactttttaaataaaaataaacattttaggctaatatgacaaaaatgagataaaatcttaaaaacattgtactagtgtacagttactaaaatgtgcttactacaaaacagt

SEQ ID NO: 255955 - DNA, 120 bp, Artificial Sequence
  ENSG00000124374_41 (sequence is synthesized)
aaaatatttcactctgtaaatcatcactaagtagttattctgtcctgttgattatgagcctccaaaaatgtttaatgcttgaaggatggtttgggaggcagggaatccttttcttaaaac

SEQ ID NO: 255956 - DNA, 120 bp, Artificial Sequence
  ENSG00000124374_42 (sequence is synthesized)
aactttaatgaggcatatgttacatatcataaaacacccatttcaagtgtacatttcagtgattttagtaacttccctcagtggtgtagctgtaactattactcagttttagaacatttt

SEQ ID NO: 255957 - DNA, 120 bp, Artificial Sequence
  ENSG00000124374_43 (sequence is synthesized)
tatccctcccaataagatccttcatgctcttttacagttaatcctgttcttacccccggcaaccactaatctactttctctataaatttgccctttctggacagttcaaatcaatggaat

SEQ ID NO: 255958 - DNA, 120 bp, Artificial Sequence
  ENSG00000124374_44 (sequence is synthesized)
catacaatatgtggtcccttgggtctggcttttttacttagctaatgtttttgaggtttgtccatgacagataacgtcttggtagtttgttccttttattgctgagtagaattctgttga

SEQ ID NO: 255959 - DNA, 120 bp, Artificial Sequence
  ENSG00000124374_45 (sequence is synthesized)
tggatgtaccacattttgtcagcagagagccttttaaacttggattccaacttcctgttgtctaaacggaaccctccgaacgtaggacttataggggaagctgctgtgcatgtcaaaaaa

SEQ ID NO: 255960 - DNA, 120 bp, Artificial Sequence
  ENSG00000124374_46 (sequence is synthesized)
actactaatcagaatgagctttgtcatccagagccagaactgctgcagaaatttttataattttgcaacttctttttttacaaggaacttttgtgctactacacatcaggacttttgaag

SEQ ID NO: 255961 - DNA, 120 bp, Artificial Sequence
  ENSG00000124374_47 (sequence is synthesized)
catccaataaatccatttaataagtatgagcatgtgtctgagtggacaagaaagtgaaaccatccatgctacattggataatttttcctcccccagactggacagggaatctcagctttc

SEQ ID NO: 255962 - DNA, 120 bp, Artificial Sequence
  ENSG00000124374_48 (sequence is synthesized)
aaaacagagtaacctggctccacttacaaagctgcacaggcattaaagatcgtgctgcctttgttaggcagatttggaggggaggcccaacagcaaagatggagaggaaaaagggagtgg

SEQ ID NO: 255963 - DNA, 120 bp, Artificial Sequence
  ENSG00000124374_49 (sequence is synthesized)
agcttgtggaacaggaagccccccagggtctgtgcagggctgctcagctcttgaggatgttgtggatggtgaagtggtgatggtgtcccggagcagcccagcacctccactgggcccaga

SEQ ID NO: 255964 - DNA, 120 bp, Artificial Sequence
  ENSG00000124374_50 (sequence is synthesized)
aggtcttgacttcggacacttacccctgtttcacaagtgtttataaagctgtttttgctttttttcccctaatcattacttggtagttattaatccttctttgggggagggacagggctt

SEQ ID NO: 255965 - DNA, 120 bp, Artificial Sequence
  ENSG00000124374_51 (sequence is synthesized)
taaaactgaagaaaataattttcataaaaatatcaaaaatggaaaaaagttactttgtaaaaaatttgctatacaaaccaaatggcagctgttgagaatctcaataaaatgttaaatgca

SEQ ID NO: 255966 - DNA, 120 bp, Artificial Sequence
  ENSG00000124380_0 (sequence is synthesized)
acagttgtttccgggaagcgggactccaaatgggtcgcagtcgcagccgctctccacggagggaacgtaggcgttcccggtccacatcccgggagagagaacgcaggcgccgagaaaggt

SEQ ID NO: 255967 - DNA, 120 bp, Artificial Sequence
  ENSG00000124380_1 (sequence is synthesized)
ccaggtctcgggagagagatcggagaaggagccgctcgcgatccccgcaccgaagacgctcccgatctccaagacgacatagatccacatctccttccccttctcgactgaaagaaagaa

SEQ ID NO: 255968 - DNA, 120 bp, Artificial Sequence
  ENSG00000124380_2 (sequence is synthesized)
gagatgaggaaaagaaagaaacaaaagaaacaaagagcaaagaacggcagattactgaggaagacttagagggcaaaacagaggaagaaatagaaatgatgaagttaatgggatttgcct

SEQ ID NO: 255969 - DNA, 120 bp, Artificial Sequence
  ENSG00000124380_3 (sequence is synthesized)
cctttgactccacaaaaggtaagaaggtggatggctctgtaaatgcctatgccataaatgtctctcagaagaggaagtacaggcagtacatgaatcgaaaaggtggattcaacagacctt

SEQ ID NO: 255970 - DNA, 120 bp, Artificial Sequence
  ENSG00000124380_4 (sequence is synthesized)
tggatttcattgcatgagaattgaagtgttgaaggatgattttttttcccctcatcttggtcagagagtggattttgtattttgtatttaacttgcattcaaaaaacaggatctcagttc

SEQ ID NO: 255971 - DNA, 120 bp, Artificial Sequence
  ENSG00000124380_5 (sequence is synthesized)
atcatttgtggcaggcgtcaaccccattttatttgtccttattcctgtggaagcagtatatgttttcttcctgaatgctcattaggacttcttaaaaaacatgaaagtaatttggaagta

SEQ ID NO: 255972 - DNA, 120 bp, Artificial Sequence
  ENSG00000124380_6 (sequence is synthesized)
agtttatccaataaagcagtatttctacccttttagatttgataaatatttttattactaaagaatctccccagacattttcttttttttttcacacatagatttaagtatcttgattgt

SEQ ID NO: 255973 - DNA, 120 bp, Artificial Sequence
  ENSG00000124380_7 (sequence is synthesized)
tagtagtctaaaaatgggaagaatgaaaaagcataactagatttttctatcttctgtggtcgcccgcccccccccaaaaaaataccatttatggttctctccgcaagtataaaagcatta

SEQ ID NO: 255974 - DNA, 120 bp, Artificial Sequence
  ENSG00000124380_8 (sequence is synthesized)
catgcaaaaaaaagatctcagagaaaacaaaagtaaaagaaaagcagaaaatcacctgttatctactcccagaaataatcaatttcaacattttggtatatgtttttccaggcttctttg

SEQ ID NO: 255975 - DNA, 120 bp, Artificial Sequence
  ENSG00000124380_9 (sequence is synthesized)
ggttgatcccacctatgagatcagaatatgtatgcagttctttctttaacccttttttctcctatgtactgtgaacatttaaaaagtacttttaaatattctttggaaacttagctttta

SEQ ID NO: 255976 - DNA, 120 bp, Artificial Sequence
  ENSG00000124380_10 (sequence is synthesized)
gtaactacttggttgtatcataatttattaactaatgttttattggtaaacattggcttgcctcccatgacttgccattataattaaaactgtgactactatctgtctccattacataca

SEQ ID NO: 255977 - DNA, 120 bp, Artificial Sequence
  ENSG00000124380_11 (sequence is synthesized)
ttttttacttcaaactttattatgagataatcatgtttgtaggaaatgtagcagttttccatactgttccttgtttgaatgaaatattcattgcttatattctggtgtgttaaaattgtt

SEQ ID NO: 255978 - DNA, 120 bp, Artificial Sequence
  ENSG00000124380_12 (sequence is synthesized)
gtatctctggctaaaaggtaacagccaactctatccagtaaagtatgagcattcttgtttcagatacatgtacaaatattaagtgtaaaatttgttttaaagtttcctacctgatgggta

SEQ ID NO: 255979 - DNA, 120 bp, Artificial Sequence
  ENSG00000124380_13 (sequence is synthesized)
aaataatggtactatttggttttgtatttttgtttcatttctagggaggatgaatattttttaaatgtattagccatatttcttttgtaacatgctaattttaaatcttggatctattaa

SEQ ID NO: 255980 - DNA, 120 bp, Artificial Sequence
  ENSG00000124383_0 (sequence is synthesized)
atgctgcattgtgtcgggagttgctgacagccatggcgccgcaggtctggcgtcgacggaccctggagcggtgtctgacggaagtcggcaaagccacgggtcggcccgagtgcttcctca

SEQ ID NO: 255981 - DNA, 120 bp, Artificial Sequence
  ENSG00000124383_1 (sequence is synthesized)
cgattcaagagggattggcatcaaagttcacttctttaacaaaagtgctttatgactttaataaaatattagagaatggtaggatccatggaagccccttgcaaaaacttgtgatagaaa

SEQ ID NO: 255982 - DNA, 120 bp, Artificial Sequence
  ENSG00000124383_2 (sequence is synthesized)
attttgatgatgagcagatttggcaacaactggaattgcaaaatgaaccaattttacaatactttcagaatgcagttagtgaaacaattaatgatgaagatatcagtcttctcccagaga

SEQ ID NO: 255983 - DNA, 120 bp, Artificial Sequence
  ENSG00000124383_3 (sequence is synthesized)
gtgaagaacaggaacgtgaagaggatggttcagagatagaggctgatgacaaggaggacctagaagatttagaggaggaggaagtgtccgacatgggtaatgatgatcctgaaatgggtg

SEQ ID NO: 255984 - DNA, 120 bp, Artificial Sequence
  ENSG00000124383_4 (sequence is synthesized)
agagagctgaaaactcaagcaaatctgatctgaggaaaagccccgttttcagtgatgaggattctgaccttgactttgatatcagcaaattggaacagcagagcaaggtgcaaaacaaag

SEQ ID NO: 255985 - DNA, 120 bp, Artificial Sequence
  ENSG00000124383_5 (sequence is synthesized)
gacagggaaaaccaagagaaaagtccatagtagatgataaattcttcaaactctctgaaatggaggcctatttagaaaacatagaaaaagaagaggaacgaaaagatgataatgatgagg

SEQ ID NO: 255986 - DNA, 120 bp, Artificial Sequence
  ENSG00000124383_6 (sequence is synthesized)
aggaggaagatattgatttttttgaagatattgattctgatgaagatgaagggggactgtttggaagtaaaaaacttaagtcaggtaaaagttccagaaatctgaaatacaaagattttt

SEQ ID NO: 255987 - DNA, 120 bp, Artificial Sequence
  ENSG00000124383_7 (sequence is synthesized)
ttgatccagttgaaagtgatgaagacataacaaatgttcatgatgatgagctggattcaaacaaagaagatgatgaaattgctgaagaagaagcagaagaactaagtatttcggaaacgg

SEQ ID NO: 255988 - DNA, 120 bp, Artificial Sequence
  ENSG00000124383_8 (sequence is synthesized)
atgaagatgatgaccttcaagaaaatgaagacaataaacaacataaagaaagcttgaaaagagtgacctttgctttaccagatgatgcggaaactgaagatacaggtgttttaaatgtaa

SEQ ID NO: 255989 - DNA, 120 bp, Artificial Sequence
  ENSG00000124383_9 (sequence is synthesized)
aaattctgatgaagttaaatcctcctttgaaaaaagacaggaaaagatgaatgaaaaaattgcatctttagaaaaagagttgttagaaaaaaagccgtggcagcttcagggggaagtgac

SEQ ID NO: 255990 - DNA, 120 bp, Artificial Sequence
  ENSG00000124383_10 (sequence is synthesized)
agcacagaagaggccagagaacagcctcctggaggagaccctacactttgaccatgctgtccggatggcacctgtgattacagaggaaaccacccttcaactggaagatatcattaaaca

SEQ ID NO: 255991 - DNA, 120 bp, Artificial Sequence
  ENSG00000124383_11 (sequence is synthesized)
gaggataagagatcaggcttgggatgatgtagtacgtaaagaaaaacctaaagaggatgcatatgaatataaaaagcgtttaaccttagaccatgagaagagtaaattgagccttgctga

SEQ ID NO: 255992 - DNA, 120 bp, Artificial Sequence
  ENSG00000124383_12 (sequence is synthesized)
aatttatgaacaggagtacatcaaactcaaccagcaaaaaacagcagaagaagaaaatccagaacatgtagaaattcagaagatgatggattccctcttcttaaaattggatgccctctc

SEQ ID NO: 255993 - DNA, 120 bp, Artificial Sequence
  ENSG00000124383_13 (sequence is synthesized)
aaacttccactttatccctaaaccgcctgtaccagagattaaagttgtgtcaaatctgccagccataaccatggaggaagtagccccagtgagtgttagtgatgcagctctcctggcccc

SEQ ID NO: 255994 - DNA, 120 bp, Artificial Sequence
  ENSG00000124383_14 (sequence is synthesized)
agaggagatcaaggagaaaaataaagctggagatataaaaacagctgctgaaaaaacagctacagacaagaaacgagagcgaaggaaaaagaaatatcaaaagcgtatgaaaataaaaga

SEQ ID NO: 255995 - DNA, 120 bp, Artificial Sequence
  ENSG00000124383_15 (sequence is synthesized)
gaaggagaagcggagaaaactgcttgaaaagagcagtgtagatcaagcagggaaatacagcaaaacagtagcttcggagaagttaaaacagctgaccaaaactggcaaagcttccttcat

SEQ ID NO: 255996 - DNA, 120 bp, Artificial Sequence
  ENSG00000124383_16 (sequence is synthesized)
aaaggatgaaggtaaagacaaggccttaaagtcctctcaagcattcttttctaaattacaagatcaagtaaaaatgcaaatcaatgatgcaaagaaaacagaaaagaaaaagaagaaaag

SEQ ID NO: 255997 - DNA, 120 bp, Artificial Sequence
  ENSG00000124383_17 (sequence is synthesized)
acaggatatttctgttcataaattaaagctgtaatatattttgaatataatgtaaatattaatgtgtaagcttatattgtgtcattgttctgttttataataaaattcttgagaaccttc

SEQ ID NO: 255998 - DNA, 120 bp, Artificial Sequence
  ENSG00000124383_18 (sequence is synthesized)
agcctcctggaggagaccctacactttgaccatgctgtccggatgggtatggtgccctcttctgtagttttcatgtctgtgctttttccatggttccatttcatacaaagatttggggtg

SEQ ID NO: 255999 - DNA, 120 bp, Artificial Sequence
  ENSG00000124383_19 (sequence is synthesized)
catggttccatttcatacaaagatttggggtggtgtttcttttccctcaactttttattttaaaaacttgtaaacacatggcttggcatggtagctcacacctgtaatcccggcactttg

SEQ ID NO: 256000 - DNA, 77 bp, Artificial Sequence
  ENSG00000124383_20 (sequence is synthesized)
ctctactaaaaatacaaaaatcagccagatacggtggcagatttcagaatcccaaggggaggttgcagtgagccaag

SEQ ID NO: 256001 - DNA, 120 bp, Artificial Sequence
  ENSG00000124383_21 (sequence is synthesized)
attgcttgaacccagaaaggggaggttgcagtgagccaaggttgtgccagtgtgctccagcgtgggcagcctgggcaacagagcgacactctgtcaaaaaagaaaaaatcaacttataaa

SEQ ID NO: 256002 - DNA, 120 bp, Artificial Sequence
  ENSG00000124383_22 (sequence is synthesized)
cacagaagagttgaaaaaatactacagtgaacacctatatgctattcaattggattcaccagttaccattttgttatatttgctttctctccctagcatatgtaagattgtatatgtgcc

SEQ ID NO: 256003 - DNA, 120 bp, Artificial Sequence
  ENSG00000124383_23 (sequence is synthesized)
ctttttttaagtaagttgccaatctcatggcacttcacttttaagtacttttgcagatatcgtctaagaactaggacattctcctatgtaatcacagtaccattaatccacccaaaaaat

SEQ ID NO: 256004 - DNA, 120 bp, Artificial Sequence
  ENSG00000124383_24 (sequence is synthesized)
ttaacaatacgctaatgatacctaatgtatagtttgtaatcagctttcttgtagtaatctgttttgaaggcttgcatcctgtcatggtccactgattaaattttgaacttcaacctgaaa

SEQ ID NO: 256005 - DNA, 120 bp, Artificial Sequence
  ENSG00000124383_25 (sequence is synthesized)
acatcacatctctggtaggtgctggaaccctcatggtactgctgcttttaattttgcttttggaatgtttctttgtagctgaagctttagtgatgagaagttagaaatactctcattgac

SEQ ID NO: 256006 - DNA, 120 bp, Artificial Sequence
  ENSG00000124383_26 (sequence is synthesized)
ggtaagaagccaatgttgaaaccttaaatgtctgttacaagttagttgatcatagccagactccatttatttgacgtcatttgccttgcacttgtagttcttattccaatgtatctcagc

SEQ ID NO: 256007 - DNA, 120 bp, Artificial Sequence
  ENSG00000124383_27 (sequence is synthesized)
agtttctaagtataagcaaactagtaatgttataatattcaaataccagtctcctatattctggctttattatgaggtacaggtttgagagttactgtaagagcagttttaaaatagcta

SEQ ID NO: 256008 - DNA, 120 bp, Artificial Sequence
  ENSG00000124383_28 (sequence is synthesized)
gtatcaatatcttattataatccaatctgaatactagcagtgatgttaagttgaaaacaaatggcttgcattgcatatatactagcaatagtttagtgtcagcatttcccccttatttta

SEQ ID NO: 256009 - DNA, 120 bp, Artificial Sequence
  ENSG00000124383_29 (sequence is synthesized)
ttcatgtaatgctaattagtaatggaatctgaatctagaatcgagcatttggttatcagaagaggctagatatatcaaatgcagcaatccctgccatgtgaacattgaagcttatgcctt

SEQ ID NO: 256010 - DNA, 120 bp, Artificial Sequence
  ENSG00000124383_30 (sequence is synthesized)
acacagtaataatggtttctgccaggtgctcatcttcctggctggcttagcagcagggccttctttttccctcctcacttgatttgctacacctacactcaccccttctgtctgagcctc

SEQ ID NO: 256011 - DNA, 120 bp, Artificial Sequence
  ENSG00000124383_31 (sequence is synthesized)
tgccacctcagtgcaggtgacagccctggcaggataggctggcagctgaggagaaaagagatagaattgatcctcactagagagatgtttcccttcccttcctctgttccttggtctctg

SEQ ID NO: 256012 - DNA, 120 bp, Artificial Sequence
  ENSG00000124383_32 (sequence is synthesized)
gtcattagcagctcagagctgaggctgcctctggcatgtccctgaagcccattggaatctaaatgctgtggagggctggctcctcttgtgctgttaggttgagaacccaactctccatgt

SEQ ID NO: 256013 - DNA, 120 bp, Artificial Sequence
  ENSG00000124383_33 (sequence is synthesized)
tgccttcttgtgaattagtttgggaactgaaccgtcactataagagtctgtgcctgtcaaagaatgcatttcaggttttaaagagctgagttaccaacgctcattggaatgcaggtgggg

SEQ ID NO: 256014 - DNA, 120 bp, Artificial Sequence
  ENSG00000124383_34 (sequence is synthesized)
attgctctgcatctttgtgcatttggccacagatgcacagcctgcttgctggctaccctgcagtttcttccattccagtttcctagttgttaaacttgatgaatgaatatgttggtggtt

SEQ ID NO: 256015 - DNA, 120 bp, Artificial Sequence
  ENSG00000124391_0 (sequence is synthesized)
aggtgcacctgtgggattgccgccaggtgtgcaggccgctccaagcccagcctgccccgctgccgccaccatgacgctcctccccggcctcctgtttctgacctggctgcacacatgcct

SEQ ID NO: 256016 - DNA, 120 bp, Artificial Sequence
  ENSG00000124391_1 (sequence is synthesized)
ggcccaccatgacccctccctcagggggcacccccacagtcacggtaccccacactgctactcggctgaggaactgcccctcggccaggcccccccacacctgctggctcgaggtgccaa

SEQ ID NO: 256017 - DNA, 120 bp, Artificial Sequence
  ENSG00000124391_2 (sequence is synthesized)
gtgggggcaggctttgcctgtagccctggtgtccagcctggaggcagcaagccacagggggaggcacgagaggccctcagctacgacccagtgcccggtgctgcggccggaggaggtgtt

SEQ ID NO: 256018 - DNA, 120 bp, Artificial Sequence
  ENSG00000124391_3 (sequence is synthesized)
ggaggcagacacccaccagcgctccatctcaccctggagataccgtgtggacacggatgaggaccgctatccacagaagctggccttcgccgagtgcctgtgcagaggctgtatcgatgc

SEQ ID NO: 256019 - DNA, 120 bp, Artificial Sequence
  ENSG00000124391_4 (sequence is synthesized)
cccacacctggggcctttgccttccacaccgagttcatccacgtccccgtcggctgcacctgcgtgctgccccgttcagtgtgaccgccgaggccgtggggcccctagactggacacgtg

SEQ ID NO: 256020 - DNA, 120 bp, Artificial Sequence
  ENSG00000124391_5 (sequence is synthesized)
tgctccccagagggcaccccctatttatgtgtatttattgttatttatatgcctcccccaacactacccttggggtctgggcattccccgtgtctggaggacagccccccactgttctcc

SEQ ID NO: 256021 - DNA, 120 bp, Artificial Sequence
  ENSG00000124391_6 (sequence is synthesized)
tcatctccagcctcagtagttgggggtagaaggagctcagcacctcttccagcccttaaagctgcagaaaaggtgtcacacggctgcctgtaccttggctccctgtcctgctcccggctt

SEQ ID NO: 256022 - DNA, 120 bp, Artificial Sequence
  ENSG00000124391_7 (sequence is synthesized)
cccttaccctatcactggcctcaggcccccgcaggctgcctcttcccaacctccttggaagtacccctgtttcttaaacaattatttaagtgtacgtgtattattaaactgatgaacaca

SEQ ID NO: 256023 - DNA, 120 bp, Artificial Sequence
  ENSG00000124391_8 (sequence is synthesized)
ccgccaggtgtgcaggccgctccaagcccagcctgccccgctgccgccaccatgacggtgagcctctccacatgccgctcggatggatgctgcttggatgtgcagcctggcatggaaggg

SEQ ID NO: 256024 - DNA, 120 bp, Artificial Sequence
  ENSG00000124391_9 (sequence is synthesized)
ctggggttctctgagcctgggaggagggtgttgggatggggtctgggaaacccctcagtctgggggtaggggaggcagctgcagatcctcggagcgctggcatgctgggtgtcttgggct

SEQ ID NO: 256025 - DNA, 120 bp, Artificial Sequence
  ENSG00000124391_10 (sequence is synthesized)
gaagggctagcctctctgggcttcagtttccccatctatagagggagggctgtactccatctttccgctgggaacaaggaaagctgaggtggaagtgaggtgccccctgccctgggcacc

SEQ ID NO: 256026 - DNA, 120 bp, Artificial Sequence
  ENSG00000124406_0 (sequence is synthesized)
ccaccttcgccgccaccgctgcctttctcctcctcctgtcggcgtgcgggggccgcgcccggcggcagctctgccctaggtgggcggcggcgcggcccaggctgcagctgagcgctctgc

SEQ ID NO: 256027 - DNA, 120 bp, Artificial Sequence
  ENSG00000124406_1 (sequence is synthesized)
cggcccaggctgcagctgagcgctctgcgcggcgcagccgggtctcccgcgtgtaccacgccgtgacaggtgcagagtccgggctgaggacccacctgcagccgccgccgcgatgcccac

SEQ ID NO: 256028 - DNA, 120 bp, Artificial Sequence
  ENSG00000124406_2 (sequence is synthesized)
catgcggaggaccgtgtcggagatccgctcgcgcgccgaaggttatgagaagacagatgatgtttcagagaagacctcactggctgaccaggaggaagtaaggactattttcatcaacca

SEQ ID NO: 256029 - DNA, 120 bp, Artificial Sequence
  ENSG00000124406_3 (sequence is synthesized)
gccccagctgacaaaattctgcaataaccatgtcagcactgcaaaatacaacataatcacattccttccaagatttctctactctcagttcagaagagctgctaattcattttttctctt

SEQ ID NO: 256030 - DNA, 120 bp, Artificial Sequence
  ENSG00000124406_4 (sequence is synthesized)
tattgcactgctgcagcaaatacctgatgtgtcaccaacaggtcgttatacaacactggttcctctcttatttattttagctgtggcagctatcaaagagataatagaagatattaaacg

SEQ ID NO: 256031 - DNA, 120 bp, Artificial Sequence
  ENSG00000124406_5 (sequence is synthesized)
acataaagctgataatgcagtgaacaagaaacaaacgcaagttttgagaaatggtgcttgggaaattgtccactgggaaaaggtggcagtaggggagatagtgaaagtgaccaatgggga

SEQ ID NO: 256032 - DNA, 120 bp, Artificial Sequence
  ENSG00000124406_6 (sequence is synthesized)
acatctcccagcagatctcatcagtctgtcctcaagtgagccccaagccatgtgctacattgaaacatccaacttagatggtgaaacaaacttgaaaattagacagggcttaccagcaac

SEQ ID NO: 256033 - DNA, 120 bp, Artificial Sequence
  ENSG00000124406_7 (sequence is synthesized)
atcagatatcaaagacgttgacagtttgatgaggatttctggcagaattgagtgtgaaagtccaaacagacatctctacgattttgttggaaacataaggcttgatggacatggcaccgt

SEQ ID NO: 256034 - DNA, 120 bp, Artificial Sequence
  ENSG00000124406_8 (sequence is synthesized)
tccactgggagcagatcagattcttcttcgaggagctcagttgagaaatacacagtgggttcatggaatagttgtctacactggacatgacaccaagctgatgcagaattcaacaagtcc

SEQ ID NO: 256035 - DNA, 120 bp, Artificial Sequence
  ENSG00000124406_9 (sequence is synthesized)
accacttaagctctcaaatgtggaacggattacaaatgtacaaattttgattttattttgtatcttaattgccatgtctcttgtctgttctgtgggctcagccatttggaatcgaaggca

SEQ ID NO: 256036 - DNA, 120 bp, Artificial Sequence
  ENSG00000124406_10 (sequence is synthesized)
ttctggaaaagactggtatctcaatctaaactatggtggcgctagtaattttggactgaatttcttgaccttcatcatccttttcaacaatctcattcctatcagcttattggttacatt

SEQ ID NO: 256037 - DNA, 120 bp, Artificial Sequence
  ENSG00000124406_11 (sequence is synthesized)
agaagttgtgaaatttacccaggcatacttcataaattgggatcttgacatgcactatgaacccacagacactgctgctatggctcgaacatctaatctgaatgaggaacttggccaggt

SEQ ID NO: 256038 - DNA, 120 bp, Artificial Sequence
  ENSG00000124406_12 (sequence is synthesized)
taaatacatattttctgacaaaactggtactctgacatgcaatgtaatgcagtttaagaagtgcaccatagcgggagttgcttatggccatgtccctgaacctgaggattatggctgctc

SEQ ID NO: 256039 - DNA, 120 bp, Artificial Sequence
  ENSG00000124406_13 (sequence is synthesized)
tcctgatgaatggcagaactcacagtttggagatgaaaaaacatttagtgattcatcattgctggaaaatctccaaaataatcatccaactgcacctataatatgtgaatttcttacaat

SEQ ID NO: 256040 - DNA, 120 bp, Artificial Sequence
  ENSG00000124406_14 (sequence is synthesized)
gatggcagtctgtcacacagcagtgccagagcgagaaggtgacaagattatttatcaagcagcatctccagatgagggagcattggtcagagcagccaagcaattgaattttgttttcac

SEQ ID NO: 256041 - DNA, 120 bp, Artificial Sequence
  ENSG00000124406_15 (sequence is synthesized)
tggaagaacacccgactcggtgattatagattcactggggcaggaagaaagatatgaattgctcaatgtcttggagtttaccagtgctaggaaaagaatgtcagtgattgttcgcactcc

SEQ ID NO: 256042 - DNA, 120 bp, Artificial Sequence
  ENSG00000124406_16 (sequence is synthesized)
atctggaaagttacgactctactgcaaaggagctgacactgtaatttatgatcgactggcagagacgtcaaaatacaaagaaattaccctaaaacatttagagcagtttgctacagaagg

SEQ ID NO: 256043 - DNA, 120 bp, Artificial Sequence
  ENSG00000124406_17 (sequence is synthesized)
gttaagaactttatgttttgctgtggctgagatttcagagagcgactttcaggagtggcgagcagtctatcagcgagcatctacatctgtgcagaacaggctactcaaactcgaagagag

SEQ ID NO: 256044 - DNA, 120 bp, Artificial Sequence
  ENSG00000124406_18 (sequence is synthesized)
ttatgagttgattgaaaagaatcttcagctacttggagcaacagccattgaggataaattacaagatcaagtgcctgaaaccatagaaacgctaatgaaagcagacatcaaaatctggat

SEQ ID NO: 256045 - DNA, 120 bp, Artificial Sequence
  ENSG00000124406_19 (sequence is synthesized)
ccttacaggggacaagcaagaaactgccattaacatcggacactcctgcaaactgttgaagaagaacatgggaatgattgttataaatgaaggctctcttgatggaacaagggaaactct

SEQ ID NO: 256046 - DNA, 120 bp, Artificial Sequence
  ENSG00000124406_20 (sequence is synthesized)
cagtcgtcactgtactacccttggtgatgctctccggaaagagaatgattttgctcttataattgatgggaaaaccctcaaatatgccttaacctttggagtacgacagtatttcctgga

SEQ ID NO: 256047 - DNA, 120 bp, Artificial Sequence
  ENSG00000124406_21 (sequence is synthesized)
cttagctttgtcatgcaaagctgtcatttgctgtcgggtttctcctcttcaaaaatctgaagttgttgagatggttaagaaacaagtcaaagtcgtaacgcttgcaatcggtgatggagc

SEQ ID NO: 256048 - DNA, 120 bp, Artificial Sequence
  ENSG00000124406_22 (sequence is synthesized)
aaatgatgtcagcatgatacagacagcgcacgttggtgttggtatcagtggcaatgaaggcctgcaggcagctaattcctctgactactccatagctcagttcaaatatttgaagaattt

SEQ ID NO: 256049 - DNA, 120 bp, Artificial Sequence
  ENSG00000124406_23 (sequence is synthesized)
actgatgattcatggtgcctggaactataacagagtctccaagtgcatcttatactgcttctacaagaatatagtgctctatattatcgagatctggtttgcctttgttaatggcttttc

SEQ ID NO: 256050 - DNA, 120 bp, Artificial Sequence
  ENSG00000124406_24 (sequence is synthesized)
tggacagatcctctttgaaagatggtgtataggtctctataacgtgatgtttacagcaatgcctcctttaactcttggaatatttgagagatcatgcagaaaagagaacatgttgaagta

SEQ ID NO: 256051 - DNA, 120 bp, Artificial Sequence
  ENSG00000124406_25 (sequence is synthesized)
ccctgaattatacaaaacatctcagaatgccctggacttcaacaccaaggttttctgggttcattgtttaaatggcctcttccactcagttattctgttttggtttccactaaaagccct

SEQ ID NO: 256052 - DNA, 120 bp, Artificial Sequence
  ENSG00000124406_26 (sequence is synthesized)
tcagtatggtactgcatttggaaatgggaaaacctcggattatctgctactgggaaactttgtgtacacttttgtggtgataactgtgtgtttgaaagctggattggagacatcatattg

SEQ ID NO: 256053 - DNA, 120 bp, Artificial Sequence
  ENSG00000124406_27 (sequence is synthesized)
gacatggttcagccacatagcgatatgggggagcatcgcactctgggtggtgttttttggaatctactcatctctgtggcctgccattccgatggcccctgatatgtcaggagaggcagc

SEQ ID NO: 256054 - DNA, 120 bp, Artificial Sequence
  ENSG00000124406_28 (sequence is synthesized)
catgttgttcagttctggagtcttttggatgggcttgttattcatccctgtggcatctctgctccttgatgtggtgtacaaggttatcaagaggactgcttttaaaacattggtcgatga

SEQ ID NO: 256055 - DNA, 120 bp, Artificial Sequence
  ENSG00000124406_29 (sequence is synthesized)
agttcaggagctggaggcaaaatctcaagacccaggagcagttgtacttggaaaaagcctgaccgagagggcgcaactgctcaagaacgtctttaagaagaaccacgtgaacttgtaccg

SEQ ID NO: 256056 - DNA, 120 bp, Artificial Sequence
  ENSG00000124406_30 (sequence is synthesized)
ctctgaatccttgcaacaaaatctgctccatgggtatgcgttctctcaagatgaaaatggaatcgtttcacagtctgaagtgataagagcatatgataccacgaaacagaggcccgacga

SEQ ID NO: 256057 - DNA, 120 bp, Artificial Sequence
  ENSG00000124406_31 (sequence is synthesized)
atggtgatggggagagcctgaaaggcaggctctgttacctctctaaggagagctaccaggttgtcaccgcagtctgctaaccaattccagtctggtccatgaagaggaaaggtagatctg

SEQ ID NO: 256058 - DNA, 120 bp, Artificial Sequence
  ENSG00000124406_32 (sequence is synthesized)
agctcatctcgctgatggacattcagattcatgtatattatagacataagcactgtgcaactgtactgtaacaccatctcttttggatttttttaaggtatttgctaagtctttgtaaac

SEQ ID NO: 256059 - DNA, 120 bp, Artificial Sequence
  ENSG00000124406_33 (sequence is synthesized)
ggaaattgaaaatgacctggtatcttgccagagggctttcttaaacggagaataagtcagtattcttatgccattactgtggggctgtaactgactgtcagtttattggctgtaccacaa

SEQ ID NO: 256060 - DNA, 120 bp, Artificial Sequence
  ENSG00000124406_34 (sequence is synthesized)
ctcaccttcctgagcaaaatttctaaacaagcatttgtgtccaaaattgtcttgataaatgtttgccaaagaggttcagtaagtgtttttctagttcagtagtcatatgcccagaaatgt

SEQ ID NO: 256061 - DNA, 120 bp, Artificial Sequence
  ENSG00000124406_35 (sequence is synthesized)
aagagaaagtttacttccagttccgctgtaagatctgcatgcctgactttccaaatgtaagagtgatttacaaaaatgaatatttcaaggcatttgctactaaaatcggtgatgttgcac

SEQ ID NO: 256062 - DNA, 120 bp, Artificial Sequence
  ENSG00000124406_36 (sequence is synthesized)
ctttggccttacaaatgcttctttgttgtttgtcgtgtttatttgttagaggacacacgtgttaatgtgactctgttgttatgacactgatttttcaaactatgtatgtttcaggtattt

SEQ ID NO: 256063 - DNA, 120 bp, Artificial Sequence
  ENSG00000124406_37 (sequence is synthesized)
ctgatgaagtttcatcatcatttagatttttctaaaaatctggctaatgcagtagattgagtgatgtcattttgtcttaaagtttttcctcttaagaaacatatgctacgtatttacgtg

SEQ ID NO: 256064 - DNA, 120 bp, Artificial Sequence
  ENSG00000124406_38 (sequence is synthesized)
ggatttccaaagcttctgttgcaatatttggaataacatgtcagataaatgcatgggcttttgtcctgtgttccagttcccactagagatgcctgtgtcttgtgtagcacacccagtgtt

SEQ ID NO: 256065 - DNA, 120 bp, Artificial Sequence
  ENSG00000124406_39 (sequence is synthesized)
atggtgactgccccctatactgaagactgaaaattatttcacagttcactcatcaaatagttcccaaaattcgtcacatgctgcttattgggacaaataggtagtacattttccccattt

SEQ ID NO: 256066 - DNA, 120 bp, Artificial Sequence
  ENSG00000124406_40 (sequence is synthesized)
aaaaaatgcggattttactcaggccggtaactttacagtcagaggacacgttcatcatgagtagcttttgttagtatgttttaaaatgtatcttcagttcaattattttcagcatttaca

SEQ ID NO: 256067 - DNA, 120 bp, Artificial Sequence
  ENSG00000124406_41 (sequence is synthesized)
agacatctgaaaatggctattttgctaccaacagtaaatgaaggggctgtttaaaaaccacaaccagttttctacactattttttaaataatactttcatttgaaaaaaaggaattagtt

SEQ ID NO: 256068 - DNA, 120 bp, Artificial Sequence
  ENSG00000124406_42 (sequence is synthesized)
ttcagatacacttcagagattgaagcaaactatttgccttttactcaaaagcctgcttgcctttacatggacttaccagcaaaataggtagaactttctcttttaaaaaaagtcaactag

SEQ ID NO: 256069 - DNA, 120 bp, Artificial Sequence
  ENSG00000124406_43 (sequence is synthesized)
aattgagaagaggtgattttttttcagatcgcttctcgagtttaatattttcacattcttttcaccctttttctcaatctagatttaaaattaggatatatgtcatttccttgtctgtat

SEQ ID NO: 256070 - DNA, 120 bp, Artificial Sequence
  ENSG00000124406_44 (sequence is synthesized)
ttgtagctccttagttaccagtatgcctctccattttctacaaataagaggttataacacatatacataattctaaccttaagggaacacacgtttacatactttacttcccaagccctt

SEQ ID NO: 256071 - DNA, 120 bp, Artificial Sequence
  ENSG00000124406_45 (sequence is synthesized)
cctgtttggggtacagattgagagagtcatgaatcaacacatctagcaagaccacaggtgtaagagtctaagatcgtcttcaaaattctgaagtcccagtctttacctgtccagtgaatg

SEQ ID NO: 256072 - DNA, 120 bp, Artificial Sequence
  ENSG00000124406_46 (sequence is synthesized)
aatattcagagcagcttttcctgggcttcccagtggtgatagctgaggtcaaaccacaaaaaataagaaagcaagagtgaaatgcacccctccagagaaacactttgtagtgtttaattc

SEQ ID NO: 256073 - DNA, 120 bp, Artificial Sequence
  ENSG00000124406_47 (sequence is synthesized)
tgttaatagagaagagctgcttctgtttgcgctcacttcatcagtggcacccttctgcagaattttaatataaaaacattatggatataatagaactggattttctgacttaaaaatgta

SEQ ID NO: 256074 - DNA, 120 bp, Artificial Sequence
  ENSG00000124406_48 (sequence is synthesized)
agttttattttaatcttgaaacgtggattgtttctgtggagctcttaaacatgagaagaatacttacggttgataatgtgtaacatgatctgaaatgtgactaatttgagcctctttgtc

SEQ ID NO: 256075 - DNA, 120 bp, Artificial Sequence
  ENSG00000124406_49 (sequence is synthesized)
ccatcgtcctgtttttgaattattgacattgtcagtctctttgcttcctgggtgagacttggggtttgagggacagggaatgaccttcttggtgaaacttaaaatataacattgcaattg

SEQ ID NO: 256076 - DNA, 120 bp, Artificial Sequence
  ENSG00000124406_50 (sequence is synthesized)
cagtgactttacagtgttaaattagagaaaatagtctgattttttaaaccttccttaactggaaaaaagtcacatggttttaccaggattgaaataaacagtcaatgtgacttttaacat

SEQ ID NO: 256077 - DNA, 120 bp, Artificial Sequence
  ENSG00000124406_51 (sequence is synthesized)
gtgtttttttgaaataaagggcacgtactcttcaattaaaaagttccttatagggactctggcaaatgctaacacagttgctttacaatgtttacaattcagacaatacgacttataata

SEQ ID NO: 256078 - DNA, 120 bp, Artificial Sequence
  ENSG00000124406_52 (sequence is synthesized)
gaaaatcctcattcatttagcattgaaaagctggaagttgcttctttaatgttgaatagtatacagtggtattgagcatggactttctaaatgttttatatatacatataaaaatatatt

SEQ ID NO: 256079 - DNA, 120 bp, Artificial Sequence
  ENSG00000124406_53 (sequence is synthesized)
ggtgtctcacacccagaaagatgttatattgtagatattattaggaaaacagtgtttctcaggaacgttgtaaattttaaatgatatatgtacttcccgtcctcccacctccactctgtg

SEQ ID NO: 256080 - DNA, 120 bp, Artificial Sequence
  ENSG00000124406_54 (sequence is synthesized)
ctctaatgtgagactgcttcagcagtgttgctaagttaatggaaaactttttctaatcaagtcaggtgaatgtgtattctgctaaataatgttagccatttacatgaattgtatggtcat

SEQ ID NO: 256081 - DNA, 120 bp, Artificial Sequence
  ENSG00000124406_55 (sequence is synthesized)
taaatggaatcagtgattcctctttaatttccagaggggaaatgaattatggaaatcagtcagcattctgatcattaaattttatactttaattttgccgttcagcattctaaatatcca

SEQ ID NO: 256082 - DNA, 120 bp, Artificial Sequence
  ENSG00000124406_56 (sequence is synthesized)
atgtgaaagtcacatgataatttgttttgcattgcgtgcactgtacaacacttacaacttgtcatttaaaatgttttctcgggaaatgaatgctagtcagaaagtaatagattgtattat

SEQ ID NO: 256083 - DNA, 120 bp, Artificial Sequence
  ENSG00000124406_57 (sequence is synthesized)
tcatagttttaaaattatgacaatgtcataattactacaaagctaaataatcgtgtttatttttgtgcagttgccctttgatagttcctggttttaaaacctattaagtgtataatctta

SEQ ID NO: 256084 - DNA, 120 bp, Artificial Sequence
  ENSG00000124406_58 (sequence is synthesized)
caaatagtcatctacaaaatttatggagaaagtgcccagcccattcacatcacatggaccaggaattcttttgtaaatgacttaaggtaacatcatgcagttcagtgcctaataaatgct

SEQ ID NO: 256085 - DNA, 120 bp, Artificial Sequence
  ENSG00000124406_59 (sequence is synthesized)
ttttaatgatgaacatttctataatgactcgtaagataccatagtctgatttttctcacattaaaataactgaagtcacttgtgtaacgtagttatactttgctgcattttaattaacct

SEQ ID NO: 256086 - DNA, 120 bp, Artificial Sequence
  ENSG00000124406_60 (sequence is synthesized)
tcaacagctattaaagtggaatgtaagttaaattttgaaggaaaggaaataaatgttttccatatttcgtcttgatttactttctgtatgagaacagctgtgtttttgataggtttatgg

SEQ ID NO: 256087 - DNA, 120 bp, Artificial Sequence
  ENSG00000124406_61 (sequence is synthesized)
tttgcatgagttcatatttaaagtgatccaggccaatgcatggctattgctgtaaatcttgatgtttatttctgccttgtaaagttctatcacggcctacctggaatttaaaattcagta

SEQ ID NO: 256088 - DNA, 120 bp, Artificial Sequence
  ENSG00000124406_62 (sequence is synthesized)
gacaaattaattggtcctctgcacaacttttttaataagtagattattttacaaagaaatttgaacaaatttaattgaatcttttgtttagcttgcctctaagaacttttcttaataaag

SEQ ID NO: 256089 - DNA, 120 bp, Artificial Sequence
  ENSG00000124406_63 (sequence is synthesized)
ctcccaaaacttctcagcaaataaatctcccttaagtaggaaagctagatttcatatttgcttactttgaattaacagcaactttccacaggtaaatctgttcttgcaaagatgtgagca

SEQ ID NO: 256090 - DNA, 120 bp, Artificial Sequence
  ENSG00000124406_64 (sequence is synthesized)
gaatagttaaaaataatatttttatgtttcatggttctaaatggaagccataaatgcagtaaatactatctgttgtttaactactttaatcgtcattttttacattttcaagtttattag

SEQ ID NO: 256091 - DNA, 120 bp, Artificial Sequence
  ENSG00000124406_65 (sequence is synthesized)
gttaagaaaaacagggcagccttggaaggcagctactacagaaaactgcagttttgcgttaaagataaagtagtattttcagctccctgaaaaaccattcctgctgaaactgctgtagaa

SEQ ID NO: 256092 - DNA, 120 bp, Artificial Sequence
  ENSG00000124406_66 (sequence is synthesized)
attgtgaagctgcatgagtggagagtattgaatctgtggttatagtagttttctcaggtttgtttatcttgatgtttgatgcactgtgttttatagttattaaaattgagtaatattatt

SEQ ID NO: 256093 - DNA, 120 bp, Artificial Sequence
  ENSG00000124406_67 (sequence is synthesized)
tctatgcagtgttatgtgtcattggccttttgtgaatgtgcatgttttaaactgcaaattttaaacattttgtcctctaattgttattaaaaatgaaataaactttaccattacttaaaa

SEQ ID NO: 256094 - DNA, 120 bp, Artificial Sequence
  ENSG00000124406_68 (sequence is synthesized)
cattttagaatgcttgaatatattttgtgatacaatcatgaaatctgtgatgtcttacttagaaatgcaggccaaattacatttaatttattgagggtttggagacataacactttactc

SEQ ID NO: 256095 - DNA, 120 bp, Artificial Sequence
  ENSG00000124406_69 (sequence is synthesized)
gtaataactaattttttattctaaaaattgccatgcttagaatatatgtagtcagtttttaaaagtgaataacactactgttgttttgtatttttttattttaattgtgttatactggct

SEQ ID NO: 256096 - DNA, 120 bp, Artificial Sequence
  ENSG00000124406_70 (sequence is synthesized)
gttatactggctctgtgttgccatttgacttaaatataactgagtggggggtggtgaggagatcctactttttactgggagaaggattattggggaccaaactccttagggagaaaatgg

SEQ ID NO: 256097 - DNA, 120 bp, Artificial Sequence
  ENSG00000124406_71 (sequence is synthesized)
tctcgagcaatcttttgtttaagtctaactctctttggtggtcctgtgggcacactggggtctctgccgagttgataattcatttcacacatttgcacctgctctgcagcctgaccgaga

SEQ ID NO: 256098 - DNA, 120 bp, Artificial Sequence
  ENSG00000124406_72 (sequence is synthesized)
ttaaatataatgtgcaaatctattcatttgcattatcttgaagaccattactgattgttgtcaggaaattgcttttgggtccttctggctgaaaagctaatccgtgagttgtcatgcatg

SEQ ID NO: 256099 - DNA, 120 bp, Artificial Sequence
  ENSG00000124406_73 (sequence is synthesized)
ggttctgcctcacagcatcttgctgttagaatgaaaatcatcaagaagctaagtaactattactttgtctagaacgaaaggctttagtgagtctgagcatttaaataagttattattatg

SEQ ID NO: 256100 - DNA, 120 bp, Artificial Sequence
  ENSG00000124406_74 (sequence is synthesized)
aagataccaggaatttaaagccactgccagcaataaatctgcttataaaaagttaattttataaaataagaatgtccaacttgtcgctttttaaatctaaattgacagcaataaagtaga

SEQ ID NO: 256101 - DNA, 120 bp, Artificial Sequence
  ENSG00000124406_75 (sequence is synthesized)
aaaattctgcaataaccatgtcaggtaagaactaccaaagaatgccatgagaccagccagcagagcagagctggttaggtcaaaatgaaaatgcttgcaaagagctttcagtgcagtcag

SEQ ID NO: 256102 - DNA, 120 bp, Artificial Sequence
  ENSG00000124406_76 (sequence is synthesized)
ttaatatttgagagctccctgttggcagtgtgaataggctgtttccccatcttctctcccatagagaaatattcataagaatctggaaatagcgaggagcagaaagaataagcacccatc

SEQ ID NO: 256103 - DNA, 120 bp, Artificial Sequence
  ENSG00000124406_77 (sequence is synthesized)
ctctgccgatgctgcatagatattgaataatgaaagctgcttatgtgtaaatgcctctgtcctaaacctgttaatagagcgatgcgttactggttttggttagcaagttttaacatttta

SEQ ID NO: 256104 - DNA, 120 bp, Artificial Sequence
  ENSG00000124406_78 (sequence is synthesized)
gaagaggtctttgcaattctgcaccaagaattccttctggttatatagtctttaagtattggtttttgatagttgtgaagtttagtatggtgtggaggaatggagggctgtgcgaattac

SEQ ID NO: 256105 - DNA, 120 bp, Artificial Sequence
  ENSG00000124406_79 (sequence is synthesized)
ttcactgcactgttgtgttttcattccaacaataatgtaaaaagtatctgtgtaagcactggccacttatgcggcttctgggaccacataaacaccttcaataccaataaagtgtttctc

SEQ ID NO: 256106 - DNA, 120 bp, Artificial Sequence
  ENSG00000124406_80 (sequence is synthesized)
cagtggcagagttaactagatttgagaagtgcccacttaatatgtacaatttcaaattctagaggaacatttctcaatttgggtaatgtggcatgtgtctgctttaatctcctttctatt

SEQ ID NO: 256107 - DNA, 120 bp, Artificial Sequence
  ENSG00000124406_81 (sequence is synthesized)
ttagtgtggatttctagccatgttcctggagtggcagtgaagaaaattcaaacagaaccccagagatctccctgaaattatccaggaaaggcatctctgtttacagtgtctggtcaaatt

SEQ ID NO: 256108 - DNA, 120 bp, Artificial Sequence
  ENSG00000124406_82 (sequence is synthesized)
gctcaaattgctgatttcggggttcttttggcaagattttattttctagtcacacgttgtactctgtcttatggagggctggagccctttaactccaaagttgctcttctttgtaagcta

SEQ ID NO: 256109 - DNA, 120 bp, Artificial Sequence
  ENSG00000124406_83 (sequence is synthesized)
cttctagtaatgttaagcagaataattggccaaataggacaaaagattatgcaaaaaaaaaaaaatctgtggtattcatgctttaccatttatttaaccttttcactctttttcatttag

SEQ ID NO: 256110 - DNA, 120 bp, Artificial Sequence
  ENSG00000124406_84 (sequence is synthesized)
gttaatgaccctttgcaatattctcccaatttgaaacagccggcaaatgttccttatctaactttttatatgttagtaacagaactttgtaagtgtgggtgctaattatggagaagtttt

SEQ ID NO: 256111 - DNA, 120 bp, Artificial Sequence
  ENSG00000124406_85 (sequence is synthesized)
atgctacttttcatttttgttttctagcactgcaaaatacaacataatcacattccttccaagatttctctactctcagttcagaagagctgctaattcattttttctctttattgcact

SEQ ID NO: 256112 - DNA, 120 bp, Artificial Sequence
  ENSG00000124406_86 (sequence is synthesized)
gctgcaggtaaagtcacgtcataaaaccttgtcaaatgttcaggtactaataaatgttaagcccgtgaccaatcccctgaggtttatgtaaatgccgagagataagctggttttggtgga

SEQ ID NO: 256113 - DNA, 120 bp, Artificial Sequence
  ENSG00000124406_87 (sequence is synthesized)
catttctggctcctgctgcaagcagtgttggaatccactaccttttccagccttttgattcatttttatcagcttattttgggtgttctataaatttgatgtggcaaggactgttcattt

SEQ ID NO: 256114 - DNA, 120 bp, Artificial Sequence
  ENSG00000124406_88 (sequence is synthesized)
tgggtggtaaaggggatgggacgttttcttaaaatgctaattttcatagtaaaagtatcaactctgaaccttagaatgcaagaagttaaatcttgtgcttctctttgtatttaaattagt

SEQ ID NO: 256115 - DNA, 120 bp, Artificial Sequence
  ENSG00000124406_89 (sequence is synthesized)
tgtagtcagaaaaagttttagtttattaaaaagtagcatattgaacatatgcttaaatttgaaaaaatattttcattgaacttgaaaataaaaaatttttaaaacaccacaaaacacaag

SEQ ID NO: 256116 - DNA, 120 bp, Artificial Sequence
  ENSG00000124422_0 (sequence is synthesized)
cttgcagcctcccctcggcgatcgcgcagccccatctttgtccggcctccgcgctttgttctcggcgcccgggccttggccagcctggccagccgccgagcagcccccacgccgcgctgg

SEQ ID NO: 256117 - DNA, 120 bp, Artificial Sequence
  ENSG00000124422_1 (sequence is synthesized)
gcgcgcggccgggccttgccccccatggtgtcccggccagagcccgagggcgaggccatggacgccgagctggcggtagcgccgccgggctgctcgcacctgggcagcttcaaggtggac

SEQ ID NO: 256118 - DNA, 120 bp, Artificial Sequence
  ENSG00000124422_2 (sequence is synthesized)
gctgctcgcacctgggcagcttcaaggtggacaactggaagcagaacctgcgggccatctaccagtgcttcgtgtggagcggcacggctgaggcccgcaagcgcaaggccaagtcctgta

SEQ ID NO: 256119 - DNA, 120 bp, Artificial Sequence
  ENSG00000124422_3 (sequence is synthesized)
tctgccatgtctgtggcgtccacctcaacaggctgcattcctgcctctactgtgtcttcttcggctgtttcacaaagaagcatattcacgagcatgcgaaggcgaagcggcacaacctgg

SEQ ID NO: 256120 - DNA, 120 bp, Artificial Sequence
  ENSG00000124422_4 (sequence is synthesized)
ccattgatctgatgtacggaggcatctactgttttctgtgccaggactacatctatgacaaagacatggaaataatcgccaaggaggagcagcgaaaagcttggaaaatgcaaggcgttg

SEQ ID NO: 256121 - DNA, 120 bp, Artificial Sequence
  ENSG00000124422_5 (sequence is synthesized)
gagagaagttttcaacttgggaaccaaccaaacgggagcttgaactgctgaagcacaacccgaaaaggagaaagatcacctcgaactgcaccataggtctgcgtgggctgatcaaccttg

SEQ ID NO: 256122 - DNA, 120 bp, Artificial Sequence
  ENSG00000124422_6 (sequence is synthesized)
ggaacacatgcttcatgaactgcatcgtgcaggccctgacccacacgccacttctgcgggacttcttcctgtctgacaggcaccgctgtgagatgcagagccccagctcctgtctggtct

SEQ ID NO: 256123 - DNA, 120 bp, Artificial Sequence
  ENSG00000124422_7 (sequence is synthesized)
gtgagatgtcctcactgtttcaggagttttactctggacaccggtcccctcacatcccgtataagttgctgcacctggtgtggacccacgcgaggcacctagcaggctacgagcagcagg

SEQ ID NO: 256124 - DNA, 120 bp, Artificial Sequence
  ENSG00000124422_8 (sequence is synthesized)
acgcccacgagttcctcatcgcggccctggacgtgctccaccgacactgcaaaggtgatgacaatgggaagaaggccaacaaccccaaccactgcaactgcatcatagaccagatcttca

SEQ ID NO: 256125 - DNA, 120 bp, Artificial Sequence
  ENSG00000124422_9 (sequence is synthesized)
caggcgggttgcagtcagacgtcacctgccaagtctgccatggagtctccaccaccatcgaccccttctgggacatcagcttggatctccccggctcttccaccccattctggcccctga

SEQ ID NO: 256126 - DNA, 120 bp, Artificial Sequence
  ENSG00000124422_10 (sequence is synthesized)
gcccagggagcgagggcaacgtggtaaacggggaaagccacgtgtcgggaaccaccacgctcacggactgcctgcgacgattcaccagaccagagcacttgggcagcagcgccaagatca

SEQ ID NO: 256127 - DNA, 120 bp, Artificial Sequence
  ENSG00000124422_11 (sequence is synthesized)
agtgcagcggttgccatagctaccaggagtccacaaagcagctcactatgaagaaactgcccatcgtagcctgttttcatctcaaacgatttgaacactcagccaagctgcggcggaaga

SEQ ID NO: 256128 - DNA, 120 bp, Artificial Sequence
  ENSG00000124422_12 (sequence is synthesized)
tcaccacgtatgtgtccttccccctggagctggacatgacccctttcatggcctccagcaaagagagcaggatgaatggacagtaccagcagcccacggacagtctcaacaatgacaaca

SEQ ID NO: 256129 - DNA, 120 bp, Artificial Sequence
  ENSG00000124422_13 (sequence is synthesized)
agtattccctgtttgctgttgttaaccatcaagggaccttggagagtggccactacaccagctttatccggcagcacaaagaccagtggttcaagtgtgacgatgccatcatcaccaagg

SEQ ID NO: 256130 - DNA, 120 bp, Artificial Sequence
  ENSG00000124422_14 (sequence is synthesized)
ccagcatcaaggacgtcctggacagcgaagggtacttgctgttctatcacaaacagttcctggaatacgagtagccttatctgcagctggtcagaaaaacaaaggcaatgcattggcaag

SEQ ID NO: 256131 - DNA, 120 bp, Artificial Sequence
  ENSG00000124422_15 (sequence is synthesized)
cctcacaaagtgatcctccctggcccccccctcccccaagtctcccgccgcctccccggcctggtgacaccacctcccatgcagatgtggcccctctgcacctgggacccatcgggtcgg

SEQ ID NO: 256132 - DNA, 120 bp, Artificial Sequence
  ENSG00000124422_16 (sequence is synthesized)
gatggaccacacggacggggaggctcctggagctgctttgaagatggatgagatgaggggtgtgctctgggtgggaggagcagcgtacacccgtcaccagaacatctcttgtgtcatgac

SEQ ID NO: 256133 - DNA, 120 bp, Artificial Sequence
  ENSG00000124422_17 (sequence is synthesized)
atgggggtgcaacgggggcctcacagcacagagtgaccgctgcctggcgttccccagcactcggtgtggaaaggcccctacctgctgtaagattatgggtccatgaaagcagtaagctgg

SEQ ID NO: 256134 - DNA, 120 bp, Artificial Sequence
  ENSG00000124422_18 (sequence is synthesized)
acacagaggtgtagtgtgcgggacagagggccttgcagatgcctttctgttggtgttttagtgttaaaatacggagagtatggaactcttcacctccattttctcagcggctgtgaagca

SEQ ID NO: 256135 - DNA, 120 bp, Artificial Sequence
  ENSG00000124422_19 (sequence is synthesized)
gcctcctagcttcggaagtacggacactacgtcgcgttttcaagcgtgtctgttctgcaggtaacagcatcaagctgcacgtggaagcatctcgcggttttctagaaacaggcattttct

SEQ ID NO: 256136 - DNA, 120 bp, Artificial Sequence
  ENSG00000124422_20 (sequence is synthesized)
tatccctctcccgctcctttttccacaaaggtgaatttcataaatgtaatactagtaaagtgaatgaattactgagtttatacagaaatttaggtaacttctcctttagtctcaagagcg

SEQ ID NO: 256137 - DNA, 120 bp, Artificial Sequence
  ENSG00000124422_21 (sequence is synthesized)
gttgctgcccgccctgtgtgcctggctcctctgggtgccttggtgtctgctggtggctggcagtgggcgcagcggaggagagttgtgctgcagctcatacggtgtgtctgtcatctcagt

SEQ ID NO: 256138 - DNA, 120 bp, Artificial Sequence
  ENSG00000124422_22 (sequence is synthesized)
ctggagtaaatgcagtgtctgccggtgtctgatgggttctgtccctcgtattttctttgccttctatcccattgcctggctaccgctgcctggcagccaagggtgttggtcgcgaagctg

SEQ ID NO: 256139 - DNA, 120 bp, Artificial Sequence
  ENSG00000124422_23 (sequence is synthesized)
gagtggcctctggtggagcctgcatcttgtctcgtctgcctctgctttacatttggtgtactttcgggcgtggtggcagtaaaatgacaccgtgattgagcttgtcagcagagctgaaag

SEQ ID NO: 256140 - DNA, 120 bp, Artificial Sequence
  ENSG00000124422_24 (sequence is synthesized)
agaaagtagaaggatgtgcattgtttcttgtaagatatcttgcatgtatctgtgtattcaaattcaaacagagatggtttgtccatttgtccactgagaaattagaaactagggacaagg

SEQ ID NO: 256141 - DNA, 120 bp, Artificial Sequence
  ENSG00000124422_25 (sequence is synthesized)
gggaggaaaagtactgaaatacagtttatgaagcaagtgtgtctcgggctgtgcttgtcccaggagccccagcagcatctgaactgaggcttcttcagtcctgcaggaacaggatcatct

SEQ ID NO: 256142 - DNA, 120 bp, Artificial Sequence
  ENSG00000124422_26 (sequence is synthesized)
gtctcagcggtgggcagatgttttcatagacagccagggagtaaacactgttggctctgtgggctgtatggtctctgccataaatagtacagagatgtggctgtgtctagtacaactttt

SEQ ID NO: 256143 - DNA, 120 bp, Artificial Sequence
  ENSG00000124422_27 (sequence is synthesized)
agacacagaaatctgaatgacatatattgttctgtgtcaagaaacttagattttttttttaactatttaaaaacgtgaaacctattcttagctcacaggccatggagaagctggtgggga

SEQ ID NO: 256144 - DNA, 120 bp, Artificial Sequence
  ENSG00000124422_28 (sequence is synthesized)
ccagacccagctccttagctggctgggctggggagggggtagtgacagtggcagctgctactcactgctcagtgtggaaaacacaggacttggcaatcacagcccgcagaaccatcatgt

SEQ ID NO: 256145 - DNA, 120 bp, Artificial Sequence
  ENSG00000124422_29 (sequence is synthesized)
gtggcagaagcctgagggatgcggtttcttgcccacgtgctctgttcattttctgttgtttttctgcacttaaagaattcacatggaagcatgttttataaaatgaattaccagagaaac

SEQ ID NO: 256146 - DNA, 120 bp, Artificial Sequence
  ENSG00000124422_30 (sequence is synthesized)
agagatgggccgagattttcagaaatggtcccatgtgaccaagttctgctgtttgggtgacagtgctttgaagatctcctttgaggatgtgcagtctttttttttttttttttgagatgg

SEQ ID NO: 256147 - DNA, 64 bp, Artificial Sequence
  ENSG00000124422_31 (sequence is synthesized)
tttttttttttttttttgagatggagtttgttgcccaggctggagtgtgccgcagcctcccaag

SEQ ID NO: 256148 - DNA, 120 bp, Artificial Sequence
  ENSG00000124422_32 (sequence is synthesized)
ccaccgcacctggcctatgagtggtcttttaattaggaacaaatctaatggaaaggagagttgactgaagttggcccacaggattgtgagctgggcagtgccttcatgaaggcttgccac

SEQ ID NO: 256149 - DNA, 120 bp, Artificial Sequence
  ENSG00000124422_33 (sequence is synthesized)
cttgggacgccccagtttactggggtgtcttgcggagtgcagaaggctttctggcagctgcctgggtttggccagaccctgcctcccctcccgccggccaacccctagtccccttcctgt

SEQ ID NO: 256150 - DNA, 120 bp, Artificial Sequence
  ENSG00000124422_34 (sequence is synthesized)
ctccacttgcattcaggggtggctgctgttctgagaacattagaactgggaagagagatggagtcacatggatttttggtgggcattattctaaactttcgtatccaagttagtccccct

SEQ ID NO: 256151 - DNA, 120 bp, Artificial Sequence
  ENSG00000124422_35 (sequence is synthesized)
tattccactgtggcattgccgttctaagcagttacctgatgcctgctgctgaagagctgctcacaggaggcggcggcggccctggcactgccccttgcattaggtcttgtgtttgatgtg

SEQ ID NO: 256152 - DNA, 120 bp, Artificial Sequence
  ENSG00000124422_36 (sequence is synthesized)
ttcttgtgaatttactttgtcagaacaaaatatttacgcgttgggttcaggaatttcttttagctccccatctggctgtgaaattcaggaaacctcccgttgcctagtaatcaccccatg

SEQ ID NO: 256153 - DNA, 120 bp, Artificial Sequence
  ENSG00000124422_37 (sequence is synthesized)
taggtgtacattgtgacaaagtgcatctgaccactaaggggcccccttggtgaccccagcacattcacagcagtgttaaaatggcctgcattttggagatgctggctggcctttcagtgc

SEQ ID NO: 256154 - DNA, 120 bp, Artificial Sequence
  ENSG00000124422_38 (sequence is synthesized)
ctcccaggaagacacatggcctttccctcttcagatgcctgaagggagtgctttgaggcaggtgatgtgctgggagtgtgggcggcctccctctggccccggggccctctgtggaccttg

SEQ ID NO: 256155 - DNA, 120 bp, Artificial Sequence
  ENSG00000124422_39 (sequence is synthesized)
gctccctccgtggacctgggcttcgtggtgagcactgcagcctccctgggcattccctccagcgccagcaccactgcaacatatagacctgagtgctattgtattttggcttggtgtgta

SEQ ID NO: 256156 - DNA, 120 bp, Artificial Sequence
  ENSG00000124422_40 (sequence is synthesized)
tgctcttcattgtgtaaaattgctgttcttttgacaatttaagtgattgttttgtttactgtaagtttgaaaataaaaatgaagaaaaaaattccaatgactgtgctgtggttggagact

SEQ ID NO: 256157 - DNA, 120 bp, Artificial Sequence
  ENSG00000124422_41 (sequence is synthesized)
ttatttaccaagatgtttactcttcctttccccttccattttgaggagctgtgtcactcctcctcccccccagtgctttgtagtctctcctatgtcataataaagctacattttctctga

SEQ ID NO: 256158 - DNA, 120 bp, Artificial Sequence
  ENSG00000124422_42 (sequence is synthesized)
aaagcatacaatggctgaagtgggaggggtccatggtggtggacattcttcaataccgttcatgtaaaagtggcataaaaactagcagaatgcgatatctcatcgtgttctggcttgaat

SEQ ID NO: 256159 - DNA, 120 bp, Artificial Sequence
  ENSG00000124422_43 (sequence is synthesized)
atggcgccgggttggccctcactatcagcgggctcccgacaggaggcgccccagcttgcggccgggggcagcgcctaccaggcagttggcaggcagttccagccccgggccacggcactg

SEQ ID NO: 256160 - DNA, 120 bp, Artificial Sequence
  ENSG00000124422_44 (sequence is synthesized)
cagggcccgagccaggttacggcaaccgggggccctgcaaacagctcccgattagggggtgcttttgggtgggaaagcgcaggccctggatggaggcccgacctgcggcgctccagctca

SEQ ID NO: 256161 - DNA, 120 bp, Artificial Sequence
  ENSG00000124422_45 (sequence is synthesized)
tcgccccgcctctttgcggcagagctcaggccggcgcaaaccggttcagtgctaggactgacgtctcgcgccgcccaaccgcagcacgcccccgcctccccagtcctctggaagagacag

SEQ ID NO: 256162 - DNA, 120 bp, Artificial Sequence
  ENSG00000124422_46 (sequence is synthesized)
gcccatgagtttatcctcctcccaagtccctcagtgactgtgatggtctccagactgggaagtccttgcttgaggagcgcccctcgccttccgagttcacacacacccctccccagggcc

SEQ ID NO: 256163 - DNA, 120 bp, Artificial Sequence
  ENSG00000124422_47 (sequence is synthesized)
accttgggagccaggacacgttgggtgtgagcactgctgctcttgctcctgccccatcccacctgagtgtcactgtgacaaagggcacagcggggaagggatgtgggaacggcttccacc

SEQ ID NO: 256164 - DNA, 120 bp, Artificial Sequence
  ENSG00000124422_48 (sequence is synthesized)
tcctgaggggctgtgatcctatcaggacaggaatccagctcggagctcctattaagatgactgttggccgggtgcagtggctcccgcctgtaatcccagcacttcaggaggtcgaagcgg

SEQ ID NO: 256165 - DNA, 62 bp, Artificial Sequence
  ENSG00000124422_49 (sequence is synthesized)
ctcccgcctgtaatcccagcacttcaggaggtcgaagcgggcagatcatgaggtcaacagat

SEQ ID NO: 256166 - DNA, 120 bp, Artificial Sequence
  ENSG00000124422_50 (sequence is synthesized)
ctccaccgacactgcaaaggtgggccctgggctctgcaccctccaccagggcaggatgttttccttgaaggggaaggaagcaaagcgagtgtatgcactcgtgcaaaaaggggcacaggt

SEQ ID NO: 256167 - DNA, 120 bp, Artificial Sequence
  ENSG00000124422_51 (sequence is synthesized)
gtcctcacgaaacatggggagatttctgcctgaagcataaagtgcacctcggtgcagcatctgcatggtcaagcttggataagtgttggtttcacgagagccttgtgtctctgggcctga

SEQ ID NO: 256168 - DNA, 120 bp, Artificial Sequence
  ENSG00000124429_0 (sequence is synthesized)
gccagacctgctcttgctgctgctcaggtagaacatctgggaggtcccttgctgaccactggaagaagatgagctcgagctattggagtgagacgagcagcagcagctgtggaacccagc

SEQ ID NO: 256169 - DNA, 120 bp, Artificial Sequence
  ENSG00000124429_1 (sequence is synthesized)
agctcccagaggtgctgcagtgccagccccagcattaccactgctaccatcagtcaagccaagcccagcagcctccagaaaaaaatgtagtgtatgagcgagtgaggacctacagtgggc

SEQ ID NO: 256170 - DNA, 120 bp, Artificial Sequence
  ENSG00000124429_2 (sequence is synthesized)
ccatgaacaaggtggtgcaggccttggaccccttcaactcacgggaagtgctctcccctctcaaaaccacctcctcctaccaaaatttggtttggagcgaccattctcaggaactccatt

SEQ ID NO: 256171 - DNA, 120 bp, Artificial Sequence
  ENSG00000124429_3 (sequence is synthesized)
ctccaactttaaaaatatctacatgtgccccaagtactctacatataacccaaaatactgaacaggaacttcattctccaacagtgaaacttactacatatccacagaccactattagga

SEQ ID NO: 256172 - DNA, 120 bp, Artificial Sequence
  ENSG00000124429_4 (sequence is synthesized)
aatatgtagtacaaaatcctgaacaggaaccactgtctcaattcctaagaggaagccatttcttcccaggaaacaatgttatttatgaaaaaacaataagaaaagtggagaagctaaata

SEQ ID NO: 256173 - DNA, 120 bp, Artificial Sequence
  ENSG00000124429_5 (sequence is synthesized)
ctgatcaggggtgccatcctcaggctcaatgccatcatcacattatccaacagccccaggtcatccactctgcacactggcaacaacctgattctagccagcaaatccaagccatcacag

SEQ ID NO: 256174 - DNA, 120 bp, Artificial Sequence
  ENSG00000124429_6 (sequence is synthesized)
gaaataatccaatttctacacatattggaaatgaactgtgccatagtggatcaagccagatttgtgagcaggtgataattcaggatgatggccctgaaaaattggaccccagatattttg

SEQ ID NO: 256175 - DNA, 120 bp, Artificial Sequence
  ENSG00000124429_7 (sequence is synthesized)
gagagttgcttgctgatctgagccgtaagaatacggatctatatcactgcttattagaacatttgcagagaattggaggaagcaaacaggactttgagtctacagatgagtcggaagaca

SEQ ID NO: 256176 - DNA, 120 bp, Artificial Sequence
  ENSG00000124429_8 (sequence is synthesized)
ttgaatcattgattcctaaaggattatcagagtttacaaaacagcaaatacgctacattctgcagatgaggggtatgtctgataagtcactccgactagtgctgtccacatttagcaaca

SEQ ID NO: 256177 - DNA, 120 bp, Artificial Sequence
  ENSG00000124429_9 (sequence is synthesized)
tacgggaggagcttggacatcttcaaaatgatatgacatcactggaaaatgacaagatgagacttgagaaagatttatcattcaaagacactcaattaaaagagtacgaagaactcttgg

SEQ ID NO: 256178 - DNA, 120 bp, Artificial Sequence
  ENSG00000124429_10 (sequence is synthesized)
catcagtgagagcaaataatcaccagcagcagcaaggacttcaagactcaagttcaaaatgccaggcattggaagaaaacaatctctctcttcgacatacactatcagacatggaataca

SEQ ID NO: 256179 - DNA, 120 bp, Artificial Sequence
  ENSG00000124429_11 (sequence is synthesized)
gactaaaagaactggaatattgtaaacgtaatttagagcaagagaatcaaaaccttagaatgcaggtttctgagacttgcacaggcccaatgttgcaggctaaaatggatgagattggca

SEQ ID NO: 256180 - DNA, 120 bp, Artificial Sequence
  ENSG00000124429_12 (sequence is synthesized)
accactacacggagatggtaaaaaacttgagaatggagaaagatagagagatctgcagactgaggtcccaattaaaccagtaccataaagatgtttcaaagagagaaggaagttgtagtg

SEQ ID NO: 256181 - DNA, 120 bp, Artificial Sequence
  ENSG00000124429_13 (sequence is synthesized)
acttccaatttaagcttcatgaactgacaagcttgctggaagagaaggattccctcataaagcgtcagtcagaggaactctccaagttgcggcaagaaatatattcctctcataaccaac

SEQ ID NO: 256182 - DNA, 120 bp, Artificial Sequence
  ENSG00000124429_14 (sequence is synthesized)
cctccactggtggaaggactactattaccactaaaaagtacaggacacaatatccaatcctaggcctcctatatgatgactacgaatatataccaccaggtagtgaaacacagactattg

SEQ ID NO: 256183 - DNA, 120 bp, Artificial Sequence
  ENSG00000124429_15 (sequence is synthesized)
tgattgagaaaacagaagacaaatacacttgtccatgaatggatccactttaaagtattacaactcaaagccgttttttttttgtgtgtgtgtctctgcattagtactttgttatttttc

SEQ ID NO: 256184 - DNA, 120 bp, Artificial Sequence
  ENSG00000124429_16 (sequence is synthesized)
ttggaaccatgctgctacccaagaaatctaatggaatgaattagttctgtagatgacaatttcttcacccatttatgagacctaaatcttttccataacactcatgtattcagtataaca

SEQ ID NO: 256185 - DNA, 120 bp, Artificial Sequence
  ENSG00000124429_17 (sequence is synthesized)
acatactaactgaaagagggacctgattgtttaaagtttgattgcagacactgtagaacataactcattatgtttcagataaggtaactcctagatatcaaactaatttgttggggtaga

SEQ ID NO: 256186 - DNA, 120 bp, Artificial Sequence
  ENSG00000124429_18 (sequence is synthesized)
gattttacaagtcatgccattagaagattttctctgatattatatgtgcagttcagttacaagatgaaatcatgtttttttaacaaaagagataaaatacaattgaagcaaaaaataaca

SEQ ID NO: 256187 - DNA, 120 bp, Artificial Sequence
  ENSG00000124429_19 (sequence is synthesized)
gctagtatataatatatacagtctgtatttgcttttcacagtaggcctgatgactaaaagatatgctttattacacgctattttcacctcttgaaagtcaaaggtgatgattaatttcat

SEQ ID NO: 256188 - DNA, 120 bp, Artificial Sequence
  ENSG00000124429_20 (sequence is synthesized)
ttagcagggaagtggaataatatcttttgaaataactaagtccactaaattatacagtatgctattctggttctaagtacatattagtcccttggcaaatctgttctttcaaagcatacc

SEQ ID NO: 256189 - DNA, 120 bp, Artificial Sequence
  ENSG00000124429_21 (sequence is synthesized)
ttccccaaatgagcctacctacttcttaaaaaacatataacacaatgtggtagtagtaggtgtaaggaaggtaagttttttcatagtggtatgcaaacatatcattgaaatattacatag

SEQ ID NO: 256190 - DNA, 120 bp, Artificial Sequence
  ENSG00000124429_22 (sequence is synthesized)
atataaagacttagggaataaaaatagcagcaacaaatacttgatagatttatcctacttgggagaaatattttgtagcagagtatttagtatacttagaagttgatttagcaattaggc

SEQ ID NO: 256191 - DNA, 120 bp, Artificial Sequence
  ENSG00000124429_23 (sequence is synthesized)
tttaatgaccttacaaagtgaacataactgaacacaagtattttttcaatgcaagatgaggatgaaaattttacatttcaacccatctggctaaagttaagacttagcaaaaattaaaat

SEQ ID NO: 256192 - DNA, 120 bp, Artificial Sequence
  ENSG00000124429_24 (sequence is synthesized)
gttgcctttgtccaagtatagattaaggcaacaaacatatttgggtgtgtaatttgaagttttggactgaaatatctttgcaagtatccacataaaattctgtaatgccttataattata

SEQ ID NO: 256193 - DNA, 120 bp, Artificial Sequence
  ENSG00000124429_25 (sequence is synthesized)
ttctaataattatgcattatactaagacaccattaagaacagttgaggcactacactaaatcaaaccataaatgaggaaaaaacttttaatgttcttttctagaagtgttcaaataggtc

SEQ ID NO: 256194 - DNA, 120 bp, Artificial Sequence
  ENSG00000124429_26 (sequence is synthesized)
ttgatatgaagctaaaagccttatttatattatcttaatatttcggctaaaatgttaagctccataacatgaattgatacaattccaattttatcaatattttgtgatagaaaaatgtta

SEQ ID NO: 256195 - DNA, 120 bp, Artificial Sequence
  ENSG00000124429_27 (sequence is synthesized)
atattattcatgagctatacagtccttacattttttcccttggtgtaggaacaacggaggagtttctcctctgctaactattcatatatgtaactgtaacaaaagtgtactatgttatgc

SEQ ID NO: 256196 - DNA, 120 bp, Artificial Sequence
  ENSG00000124429_28 (sequence is synthesized)
acacattacaaataatataaggggaagttttattagcttagtaggaaattgttattattaaggtttaaaaatgagaacaggtgtgagttttccaaaatacttaaaaataatagtgtcaaa

SEQ ID NO: 256197 - DNA, 120 bp, Artificial Sequence
  ENSG00000124429_29 (sequence is synthesized)
aattcaggggcagttaaggagtcatggatggaactagaggtcactatattaagtgacataagccagaaacagacaaacattgcatgttctcaattatttgcgggatctaaaagtcaaaac

SEQ ID NO: 256198 - DNA, 120 bp, Artificial Sequence
  ENSG00000124429_30 (sequence is synthesized)
aattgaactcatggatatagagagtagaaggatggttactagtggctgggaaaaggggtgtgcgaggggaactggggatgcttaatgtgtacaaaaactatgtagttagaaagtataaat

SEQ ID NO: 256199 - DNA, 120 bp, Artificial Sequence
  ENSG00000124429_31 (sequence is synthesized)
gtacaaaaactatgtagttagaaagtataaataagacctagtatttgatagcacaaccgggtgagtatagtcaataatagcttaattgtacaaataactaagagtataattggattgttt

SEQ ID NO: 256200 - DNA, 120 bp, Artificial Sequence
  ENSG00000124429_32 (sequence is synthesized)
tgattgagaaaacagaagacaaatacacttgtgtaagttcacttgggcatttttagccctattttgacgatatatgtacagccttttaaaattgaggtaaaatatcaaatgaactaaaaa

SEQ ID NO: 256201 - DNA, 120 bp, Artificial Sequence
  ENSG00000124440_0 (sequence is synthesized)
ccgagggctccggagcggcgactggcgagccatggcgctggggctgcagcgcgcaaggtcgaccacggagctgcgcaaggaaaagtcccgggatgcggcccgcagccggcgcagccagga

SEQ ID NO: 256202 - DNA, 120 bp, Artificial Sequence
  ENSG00000124440_1 (sequence is synthesized)
gaccgaggtgctgtaccagctggctcacacgctgcccttcgcccgcggcgtcagcgcccacctggacaaggcctctatcatgcgcctcaccatcagctacctgcgcatgcaccgcctctg

SEQ ID NO: 256203 - DNA, 120 bp, Artificial Sequence
  ENSG00000124440_2 (sequence is synthesized)
cgccgcaggggagtggaaccaggtgggagcagggggagaaccactggatgcctgctacctgaaggccctggagggcttcgtcatggtgctcaccgccgagggagacatggcttacctgtc

SEQ ID NO: 256204 - DNA, 120 bp, Artificial Sequence
  ENSG00000124440_3 (sequence is synthesized)
ggagaatgtcagcaaacacctgggcctcagtcagctggagctcattggacacagcatctttgatttcatccacccctgtgaccaagaggagcttcaggacgccctgaccccccagcagac

SEQ ID NO: 256205 - DNA, 120 bp, Artificial Sequence
  ENSG00000124440_4 (sequence is synthesized)
cctgtccaggaggaaggtggaggcccccacggagcggtgcttctccttgcgcatgaagagtacactcaccagccgcgggcgcaccctcaacctcaaggcggccacctggaaggtgctgaa

SEQ ID NO: 256206 - DNA, 120 bp, Artificial Sequence
  ENSG00000124440_5 (sequence is synthesized)
ctgctctggacatatgagggcctacaagccacctgcgcagacttctccagctgggagccctgactcagagcccccgctgcagtgcctggtgctcatctgcgaagccatcccccacccagg

SEQ ID NO: 256207 - DNA, 120 bp, Artificial Sequence
  ENSG00000124440_6 (sequence is synthesized)
cagcctggagcccccactgggccgaggggccttcctcagccgccacagcctggacatgaagttcacctactgtgacgacaggattgcagaagtggctggctatagtcccgatgacctgat

SEQ ID NO: 256208 - DNA, 120 bp, Artificial Sequence
  ENSG00000124440_7 (sequence is synthesized)
cggctgttccgcctacgagtacatccacgcgctggactccgatgcggtcagcaagagcatccacaccttgctgagcaagggccaggcagtaacagggcagtatcgcttcctggcccggag

SEQ ID NO: 256209 - DNA, 120 bp, Artificial Sequence
  ENSG00000124440_8 (sequence is synthesized)
tggtggctacctgtggacccagacccaggccacagtggtgtcagggggacggggcccccagtcggagagtatcgtctgtgtccattttttaatcagccaggtggaagagaccggagtggt

SEQ ID NO: 256210 - DNA, 120 bp, Artificial Sequence
  ENSG00000124440_9 (sequence is synthesized)
gctgtccctggagcaaacggagcaacactctcgcagacccattcagcggggcgccccctctcagaaggacacccctaaccctggggacagccttgacacccctggcccccggatccttgc

SEQ ID NO: 256211 - DNA, 120 bp, Artificial Sequence
  ENSG00000124440_10 (sequence is synthesized)
cttcctgcacccgccttccctgagcgaggctgccctggccgctgacccccgccgtttctgcagccctgacctccgtcgcctcctgggacccatcctggatggggcttcagtagcagccac

SEQ ID NO: 256212 - DNA, 120 bp, Artificial Sequence
  ENSG00000124440_11 (sequence is synthesized)
tcccagcaccccgctggccacacggcacccccaaagtcctctttcggctgatctcccagatgaactacctgtgggcaccgagaatgtgcacagactcttcacctccgggaaagacactga

SEQ ID NO: 256213 - DNA, 120 bp, Artificial Sequence
  ENSG00000124440_12 (sequence is synthesized)
ggcagtggagacagatttagatatagctcaggatgctgatgctctggatttggagatgctggccccctacatctccatggatgatgacttccagctcaacgccagcgagcagctacccag

SEQ ID NO: 256214 - DNA, 120 bp, Artificial Sequence
  ENSG00000124440_13 (sequence is synthesized)
ggcctaccacagacctctgggggctgtcccccggccccgtgctcggagcttccatggcctgtcacctccagcccttgagccctccctgctaccccgctgggggagtgacccccggctgag

SEQ ID NO: 256215 - DNA, 120 bp, Artificial Sequence
  ENSG00000124440_14 (sequence is synthesized)
ctgctccagcccttccagaggggacccctcagcatcctctcccatggctggggctcggaagaggaccctggcccagagctcagaggacgaggacgagggagtggagctgctgggagtgag

SEQ ID NO: 256216 - DNA, 120 bp, Artificial Sequence
  ENSG00000124440_15 (sequence is synthesized)
acctcccaaaaggtcccccagcccagaacacgaaaactttctgctctttcctctcagcctgagtttccttctgacaggaggaccagccccagggagcctgcaggaccccagcaccccact

SEQ ID NO: 256217 - DNA, 120 bp, Artificial Sequence
  ENSG00000124440_16 (sequence is synthesized)
cctgaacctgaatgagcccctgggcctgggcccctcactgctctctccgtactcagacgaggacactacccagcccgggggccccttccagccaagggcaggctcagcccaggctgactg

SEQ ID NO: 256218 - DNA, 120 bp, Artificial Sequence
  ENSG00000124440_17 (sequence is synthesized)
agccggctcctctccccatctgccttctcctcccccagaaaggacctcaaccacactccacgccggcagccaacgcacaggatgggggcgccaggagaggggcccctctctcctctatgt

SEQ ID NO: 256219 - DNA, 120 bp, Artificial Sequence
  ENSG00000124440_18 (sequence is synthesized)
accccctgcccacctcgggcctacctcagccctcacccctctgcctgctcccaatctgggggctctctggggtggtctcagctcagtgacctctgggaggtggtccctggccccctcctc

SEQ ID NO: 256220 - DNA, 120 bp, Artificial Sequence
  ENSG00000124440_19 (sequence is synthesized)
cttctctcaggatttctcttggggttctcaatacttggttacctcattatccctttctctgcctctcttggctttattttggggaatcaggggtgaggagggttgggggggtcatatctg

SEQ ID NO: 256221 - DNA, 120 bp, Artificial Sequence
  ENSG00000124440_20 (sequence is synthesized)
tgtttccaggttctggggagaacaatgatccacgggtcaacgtgatcacatttccttctatccttcttgtattattatttttatttttgtcaatttcatgatatggtttttaatcatgat

SEQ ID NO: 256222 - DNA, 120 bp, Artificial Sequence
  ENSG00000124440_21 (sequence is synthesized)
gaattgcctggggtctgtaagaatgtgggactctgatcttccccctcttcaggtgtcagtgcggagaggctctgggccagacctcacccccagtgacttccgattgaggccaaagacccc

SEQ ID NO: 256223 - DNA, 120 bp, Artificial Sequence
  ENSG00000124440_22 (sequence is synthesized)
aagctgcccgccagctctgactgccccttgcgctctgggcttcctgccgcccccagctttgcctggacactgacttcattcatggtcctcctacttcaggggcagcctcccagttcctct

SEQ ID NO: 256224 - DNA, 120 bp, Artificial Sequence
  ENSG00000124440_23 (sequence is synthesized)
gcttccaaactatgcaacctccaacctgctccagttccagactgtataacctctgacctgcactggttctagaccacacaacctccaatgtggtctgctttagatcaccttcttcttctt

SEQ ID NO: 256225 - DNA, 90 bp, Artificial Sequence
  ENSG00000124440_24 (sequence is synthesized)
gcgatttcagcttactgcagcctccgcgcttcccaaatagccgggactacgggcatgtgccacattgcccggctaatttttgtattttta

SEQ ID NO: 256226 - DNA, 120 bp, Artificial Sequence
  ENSG00000124440_25 (sequence is synthesized)
cccggctagaactcactttctccaaatccctctgcttcgaatttcaccgtcttcagctctttctagttctgggcctcaccagcctctcattctgcctgttttcaaaccttacgatcccca

SEQ ID NO: 256227 - DNA, 120 bp, Artificial Sequence
  ENSG00000124440_26 (sequence is synthesized)
aaaattgtctggttctgggcctctaactccctctggctctatagtctatgactaccagattcttttggttctagaattcactaacttcctctggttctagacctcttcctataaattaat

SEQ ID NO: 256228 - DNA, 120 bp, Artificial Sequence
  ENSG00000124440_27 (sequence is synthesized)
ccctcttgttttagatctcacaccctccaacgccctccggttccagatcttatattcagtgatttcctctggttctggaccccacaactccaagcttcctattggttccagttctcctga

SEQ ID NO: 256229 - DNA, 77 bp, Artificial Sequence
  ENSG00000124440_28 (sequence is synthesized)
cccacaactccaagcttcctattggttccagttctcctgatcggtaatacatttggttccaaatccagacctcttaa

SEQ ID NO: 256230 - DNA, 75 bp, Artificial Sequence
  ENSG00000124440_29 (sequence is synthesized)
agtgagcctggccagacttcttaatttctaaatcacttttgttttagaccttatgaggctcagcttattcttctg

SEQ ID NO: 256231 - DNA, 120 bp, Artificial Sequence
  ENSG00000124440_30 (sequence is synthesized)
cttttgttttagaccttatgaggctcagcttattcttctgcagttctctataaccaagactcattttctctcatcaaaaacaagtacagagagtttgatgtgtttatctcttttttcttc

SEQ ID NO: 256232 - DNA, 87 bp, Artificial Sequence
  ENSG00000124440_31 (sequence is synthesized)
tctctctctgttgcccaggctggagtataatggtgccatctaggctcactgcaacctccgcctcctattggtgggattacaggagcc

SEQ ID NO: 256233 - DNA, 87 bp, Artificial Sequence
  ENSG00000124440_32 (sequence is synthesized)
aacctccgcctcctattggtgggattacaggagcccaccaccacatccggctacctttgtgtattttttagtagagacggggttttg

SEQ ID NO: 256234 - DNA, 120 bp, Artificial Sequence
  ENSG00000124440_33 (sequence is synthesized)
gattacaggcataagccaccgtgcccgaccctgtccttatcttataataaccagttcttctagaaccagacgatgctctagttctcctagattctgaacctcatgacctgtaccactcac

SEQ ID NO: 256235 - DNA, 120 bp, Artificial Sequence
  ENSG00000124440_34 (sequence is synthesized)
gttctcctagattctgaacctcatgacctgtaccactcactagttccagactacacaacttctagaaggtgccacctccagggtcctgattcaagatctggtgatctgctgtttctctgg

SEQ ID NO: 256236 - DNA, 120 bp, Artificial Sequence
  ENSG00000124440_35 (sequence is synthesized)
ttctagaactgacttacaagtgccttctgattctagacctcattccgtaagttcccttggctctagacttcatcatttccagctcctcctcactcaagatctgactccaaattaccctgg

SEQ ID NO: 256237 - DNA, 120 bp, Artificial Sequence
  ENSG00000124440_36 (sequence is synthesized)
gtctagaattcagccttcaaatatcttctgattttagactttgccttatacatttctctggttttagatcttaccaccctcaactccttctgattctagatcttatggttcccaaatctc

SEQ ID NO: 256238 - DNA, 120 bp, Artificial Sequence
  ENSG00000124440_37 (sequence is synthesized)
attctagatcttatggttcccaaatctctctggttctagaactcagattttaggcttttgtttttccttttttttgttaaaaaaaaaaaaatagagacggggtttcaccatgttgcccag

SEQ ID NO: 256239 - DNA, 120 bp, Artificial Sequence
  ENSG00000124440_38 (sequence is synthesized)
agtgctgggactacaggcatgagccactgagcccagccaggctttttctaattctatgctttattctataaattcctctgcttctaagcctcacagcttccaactgcctttgatttcaga

SEQ ID NO: 256240 - DNA, 120 bp, Artificial Sequence
  ENSG00000124440_39 (sequence is synthesized)
cttccaactgcctttgatttcagatccaaattcctctgattctataattcagcctccaaatgcttctgattctggaatctagacttttccctaaagattcctctggttctgaatcttata

SEQ ID NO: 256241 - DNA, 120 bp, Artificial Sequence
  ENSG00000124440_40 (sequence is synthesized)
acctcaactccctaattccagaccccagcctcctaaatctattctgggcttcccaccccactgaacttacccaattccttctttcagtcttaagttttcccattctaaacccctaccctc

SEQ ID NO: 256242 - DNA, 120 bp, Artificial Sequence
  ENSG00000124440_41 (sequence is synthesized)
taggctgtgctgctcctggacttcatgcctctccattctcattgcctacaatctctgtgccccagaaccccctccacttcccaccccagccctccagacatgcacttaccttgactttac

SEQ ID NO: 256243 - DNA, 120 bp, Artificial Sequence
  ENSG00000124440_42 (sequence is synthesized)
cccacatgtttggggcacctggggctccctcaccccttgggtggtttgcaatctgaagacttctccagccacacaggcacatgcacaggcacggtgctgtctgcatattgccaggtgggg

SEQ ID NO: 256244 - DNA, 120 bp, Artificial Sequence
  ENSG00000124440_43 (sequence is synthesized)
agagaagccaggacccctcagctgtctgccaccatctatgtgcctcccttaccccccagctttctttctacagatggtgctactcttggtctcccacaggaaaaggcctccccccttctt

SEQ ID NO: 256245 - DNA, 120 bp, Artificial Sequence
  ENSG00000124440_44 (sequence is synthesized)
agccccatttaccccgtttgtggaaggcactgctcgctctgttttgtcagagagtggcctatccagattggtgctatgggggggtctgacccctccctcctccctctggaggtgatgtgg

SEQ ID NO: 256246 - DNA, 120 bp, Artificial Sequence
  ENSG00000124440_45 (sequence is synthesized)
gccctcaatggagggaattgtgctgggctagggaaaggggagggactagactggccacactggctctgaaactcaccaatctctatacaccataaagacctcaccttggtaggcaccaga

SEQ ID NO: 256247 - DNA, 120 bp, Artificial Sequence
  ENSG00000124440_46 (sequence is synthesized)
agataagtcagggaggggacagagcggccctaggcgcgccacagagaggagcgaggcgccagaggcaccatggactggcaagaccacaggtcgaccacggagctgcgcaaggaaaagtcc

SEQ ID NO: 256248 - DNA, 120 bp, Artificial Sequence
  ENSG00000124440_47 (sequence is synthesized)
aggaactgtctccttccttgccccctcatacccagtccccagatatttctctccccatttgcccccttggtggccctgatccctcccgatccccctcctcagtgctgagcaagggccagg

SEQ ID NO: 256249 - DNA, 120 bp, Artificial Sequence
  ENSG00000124440_48 (sequence is synthesized)
ttttaatcaggtaagcaggaggaggggctggggtggctgtgtgtgggcctgatctgcatgtgtggacaggtgtgtgtgtgtgtgtgtgtgtgtgcgtatgagcatgcatgtgtatcatgc

SEQ ID NO: 256250 - DNA, 120 bp, Artificial Sequence
  ENSG00000124440_49 (sequence is synthesized)
ataagtgtatgtgagggagtgtgcacgtgtacacatatgaggaatgtgtgtcaccatgtaaatgccggtgtgtgtgtctgcatggacacaggtatgtgtatgggtgtgtagactgttaat

SEQ ID NO: 256251 - DNA, 78 bp, Artificial Sequence
  ENSG00000124440_50 (sequence is synthesized)
acctctgcttaagtggattgttaattcaaattagaaaggggtctttatttggcctggcatggtggctcatgcctgtaa

SEQ ID NO: 256252 - DNA, 90 bp, Artificial Sequence
  ENSG00000124440_51 (sequence is synthesized)
aactactcgggaggctgaggcacgagaatcattagaacccaggtggtggaggctgcagtgagccgagattgcgtcagtgcactctggcct

SEQ ID NO: 256253 - DNA, 84 bp, Artificial Sequence
  ENSG00000124440_52 (sequence is synthesized)
gactctatattcaagttaaaataagaagtgtaacagaatcatggggtcttttttgctttttaaattttgatgtggctcacacct

SEQ ID NO: 256254 - DNA, 120 bp, Artificial Sequence
  ENSG00000124440_53 (sequence is synthesized)
cctgtggagtcatctcaccgccgtgcgcacccactcgtaactcgcacccgggtcctggctgcaccgcatcccctcctgcaccccctggatggcccttcagccaacgggggcctgggcgat

SEQ ID NO: 256255 - DNA, 120 bp, Artificial Sequence
  ENSG00000124440_54 (sequence is synthesized)
gtgtgttgggggattaatgggattctctggccctcattacctagctggcttaaacctactgttttatagataggaaaccagagaggggcaggggctggttgagggtcatacagaaagtca

SEQ ID NO: 256256 - DNA, 120 bp, Artificial Sequence
  ENSG00000124440_55 (sequence is synthesized)
gtgggccagctgagactaaagcctgatcttctagtttcactaatgggtattaaaaacctctgcagtgaactgagattgcgccactgcaccccagcatgagcgacagaatgggaccttgtc

SEQ ID NO: 256257 - DNA, 120 bp, Artificial Sequence
  ENSG00000124440_56 (sequence is synthesized)
cttgggaatccaggccactaggatgtacccccacttccttgggggtgcatgtaagtttctctgaatgaggaaaggcagagggaggctagcccagggtcagtccataattcagaccataac

SEQ ID NO: 256258 - DNA, 120 bp, Artificial Sequence
  ENSG00000124440_57 (sequence is synthesized)
gacctcctgggctcaagtgatcctcctacttcagctcccacaagtagctgggactgcagctatgtgccatcatgcctggctgatgtttatatgttttgtagagacgaggtttcaccatgt

SEQ ID NO: 256259 - DNA, 71 bp, Artificial Sequence
  ENSG00000124440_58 (sequence is synthesized)
tcttgaactcctgagatgaaccaccacgcccgacagtaaatatgttttgaatgaataaactctcataaatg

SEQ ID NO: 256260 - DNA, 120 bp, Artificial Sequence
  ENSG00000124440_59 (sequence is synthesized)
tcacctactgtgacgacaggaatggtgactctggattcagcctgcttgagtgtcagtcttggctgtgtatccttagccaaatgacttcacctctctgtgccacaatttcctcacctatac

SEQ ID NO: 256261 - DNA, 120 bp, Artificial Sequence
  ENSG00000124444_0 (sequence is synthesized)
aaaactgaggcctgggagcaggaacctgtaggcagcgcttgagggtagcgggatagcagctgcaagcgcgcgtgggaggcgggggctctgggcggaacaaaaatcacaggatgtcagagg

SEQ ID NO: 256262 - DNA, 120 bp, Artificial Sequence
  ENSG00000124444_1 (sequence is synthesized)
atgtttcccgggaagaactgggataaaggaagggtcccagcaccatggaggacccgaaccctgaagagaacatgaagcagcaggattcacccaaggagagaagtccccagagcccaggag

SEQ ID NO: 256263 - DNA, 120 bp, Artificial Sequence
  ENSG00000124444_2 (sequence is synthesized)
gcaacatctgccacctgggggccccgaagtgcacccgctgcctcatcaccttcgcagattccaagttccaggagcgtcacatgaagcgggagcacccagcggacttcgtggcccagaagc

SEQ ID NO: 256264 - DNA, 120 bp, Artificial Sequence
  ENSG00000124444_3 (sequence is synthesized)
tgcagggggtcctcttcatctgcttcacctgcgcccgctccttcccctcctccaaagccctaatcacccaccagcgcagccacggtccagccgccaagcccaccctgccggttgcaacca

SEQ ID NO: 256265 - DNA, 120 bp, Artificial Sequence
  ENSG00000124444_4 (sequence is synthesized)
ctactgcccagcccaccttcccttgtcctgactgtggcaagacctttgggcaggctgtttctctgaggcggcaccgccagatgcatgaggtccgtgcccctcctggcaccttcgcctgca

SEQ ID NO: 256266 - DNA, 120 bp, Artificial Sequence
  ENSG00000124444_5 (sequence is synthesized)
cagagtgcggtcaggactttgctcaggaagcagggctgcatcaacactacattcggcatgcccggggggagctctgagtgcagcttaagcctctccacggtgacgggtggctctgtggct

SEQ ID NO: 256267 - DNA, 120 bp, Artificial Sequence
  ENSG00000124444_6 (sequence is synthesized)
ggtaggactcacccatgatatggggtgcaggaactctgggggccctgaaggatttgcttccctcccctgggaaggcagagggctcttaataaagaggacccagaagattcttatttagag

SEQ ID NO: 256268 - DNA, 120 bp, Artificial Sequence
  ENSG00000124444_7 (sequence is synthesized)
cttcagtctttggagcacacagggccttcgtgagacagtgaaatcagataataatgagatcttttgttaaaaaaaaaaaatgggaagggagtgcgggagagaaatggtttgtgtctccct

SEQ ID NO: 256269 - DNA, 120 bp, Artificial Sequence
  ENSG00000124444_8 (sequence is synthesized)
tattcccagttaaatacctagctgcagattgtgccatcacccttcattcttcccagatggatgccatgggctatgggagcaaattgccctggacctttgcctgaatgggggcaggaaagg

SEQ ID NO: 256270 - DNA, 120 bp, Artificial Sequence
  ENSG00000124444_9 (sequence is synthesized)
tgaggtgttgctggcctgtaatgccaccaggtgagttccagatgtggagcaacttgggcttttggggatggggcagcaaagttgggagctggaccccaattgagtgggggtagcaattgg

SEQ ID NO: 256271 - DNA, 120 bp, Artificial Sequence
  ENSG00000124444_10 (sequence is synthesized)
tagatggcactagtcccccgataatttatgtctcgttgaaataattttgtatatcattctagtcctgaaatatttttttcatatgtgtaggtgaaatggtatgaataagctaacaggaat

SEQ ID NO: 256272 - DNA, 120 bp, Artificial Sequence
  ENSG00000124444_11 (sequence is synthesized)
agtatctaaaaacagaaaacatccatattaaaatgtctaaacagggagctctggcttttgagtgggaatttccagagaacataagggtgtgggcaggtgggggaactcaggccagagttg

SEQ ID NO: 256273 - DNA, 120 bp, Artificial Sequence
  ENSG00000124444_12 (sequence is synthesized)
gcctcgctttgtggggaaactggtttggaatcaaacagagataccttctgtttcgggttttatttggccaacactgggagatttcccattaagatcctattttcagctctcttgaaaggc

SEQ ID NO: 256274 - DNA, 120 bp, Artificial Sequence
  ENSG00000124444_13 (sequence is synthesized)
ccaacctaggctgacattgtcagcaggggcaggacagaagttacaacaggctggagggagcagtgggtgtcaccctcaactggagatgagtcccaccaggccagttttacccccttagtt

SEQ ID NO: 256275 - DNA, 120 bp, Artificial Sequence
  ENSG00000124444_14 (sequence is synthesized)
acctgccctgcacctgcagacaatggtcgatgccttgcatataatacttatagactctgtttatgttgagggatgtttttaaagcccacaggtgaggtggatgtggtagactgatcactg

SEQ ID NO: 256276 - DNA, 120 bp, Artificial Sequence
  ENSG00000124444_15 (sequence is synthesized)
tctctgtttttagctaggcacacagtagctgaaaagactgcatttcccagattcctttgcagctagatgtggccttgtgactgatttctggctaaattcctgggtagaacagtcaagctt

SEQ ID NO: 256277 - DNA, 65 bp, Artificial Sequence
  ENSG00000124444_16 (sequence is synthesized)
ctgatttctggctaaattcctgggtagaacagtcaagcttaagaaagggcggtggatcacctgag

SEQ ID NO: 256278 - DNA, 120 bp, Artificial Sequence
  ENSG00000124444_17 (sequence is synthesized)
acttcagcctgggtgacagagtgagactgtttaaaaaaaaagaaaagaaagggacataccttttttccaccttcctaactgtaatacggaaatggtatccagccatctcagaccataagg

SEQ ID NO: 256279 - DNA, 120 bp, Artificial Sequence
  ENSG00000124444_18 (sequence is synthesized)
atctcagaccataaggataagagcaacacgtgggaagacagagcaacaagataggagcctgggtctctcgtcaatttcaaggagcacagccaccataccagcccacttccatattgctat

SEQ ID NO: 256280 - DNA, 120 bp, Artificial Sequence
  ENSG00000124444_19 (sequence is synthesized)
ctaagaaagaaacttctatcttatttaagccaccattattttgggtctctgtcacatgcaacagaatttacagcctaagacaggggtctgcaaactatggccaactctagcctgctgcct

SEQ ID NO: 256281 - DNA, 120 bp, Artificial Sequence
  ENSG00000124444_20 (sequence is synthesized)
attttgaggaccgggctggtgcgactatactactgccggatggcaaatccgggatctcggctccgagaggctcatctggcaaaagggcgcggaaaccacgggggccctgagactgagtgg

SEQ ID NO: 256282 - DNA, 120 bp, Artificial Sequence
  ENSG00000124444_21 (sequence is synthesized)
gacacttgagattgggatgacgctggtgtcaaagatcaaggcttccacgctgagttcagggagttagtttgatgcagcaggtcataggtcacaccagtgagaagactctaggggagtccc

SEQ ID NO: 256283 - DNA, 120 bp, Artificial Sequence
  ENSG00000124444_22 (sequence is synthesized)
aaacccaggaaatccagtcctttgggaggtttgaagcttcttttagcaagaactccatcaattagagttcaaggagatagtatgtcgtaggggtcaaaggcaggcaaggagagcctctgg

SEQ ID NO: 256284 - DNA, 120 bp, Artificial Sequence
  ENSG00000124444_23 (sequence is synthesized)
gcggaaaccacgggggccctgagactgagtggtccctatcccacttctctctggggcggcgctgtagccagcggctgacaggcgcagcgaaaggcagccctctgctggtcccagcaccat

SEQ ID NO: 256285 - DNA, 120 bp, Artificial Sequence
  ENSG00000124444_24 (sequence is synthesized)
ggctgtaatggtccctgagctgctctagcaggaagtgcatctcctcacaccagcttatgtggccagagtactcaccctcctctggccacataagcaggattgcaatgcttatgcattcag

SEQ ID NO: 256286 - DNA, 120 bp, Artificial Sequence
  ENSG00000124444_25 (sequence is synthesized)
agggatagggtggcttccaggagaggcttgggttggagatgtggctgggaatggttctattgggagagaaaccccaagattctggtcccaactctgccctagactttcagtgtaacttgg

SEQ ID NO: 256287 - DNA, 120 bp, Artificial Sequence
  ENSG00000124449_0 (sequence is synthesized)
ggctaagagggaaggagatcctatcagtggggagagtgtgaggggagagggagagcctgcagggcaggcgctgaggatcacgcatcctgtgactctcccctgtcccccgccaccctctga

SEQ ID NO: 256288 - DNA, 120 bp, Artificial Sequence
  ENSG00000124449_1 (sequence is synthesized)
accactggccaccatggctacttcaaagttgcccgtggtgcctggggaggaggaaaacaccatccttatggccaaggaaaggctggaggccctgcgcacagcctttgagtcgggtgacct

SEQ ID NO: 256289 - DNA, 120 bp, Artificial Sequence
  ENSG00000124449_2 (sequence is synthesized)
cccccaggccgcctctcacctccaggagctgctggcctccacggaaagcatccgcctggaggtgggcgtcacgggcgagtcgggcgcgggcaagtcctccctcatcaatgccctgcgtgg

SEQ ID NO: 256290 - DNA, 120 bp, Artificial Sequence
  ENSG00000124449_3 (sequence is synthesized)
cctggaggccgaggaccctggcgcggctctcacgggcgtcatggagaccacgatgcaaccgtcgccctatccacacccacagttccctgacgtgaccctctgggacctgccaggagccgg

SEQ ID NO: 256291 - DNA, 120 bp, Artificial Sequence
  ENSG00000124449_4 (sequence is synthesized)
ctctccaggctgcccggctgacaagtacctaaagcaggtagacttcagccgctatgacttcttcctgctggtctccccccgccgctgcggggccgtcgagacccgcctggccgctgagat

SEQ ID NO: 256292 - DNA, 120 bp, Artificial Sequence
  ENSG00000124449_5 (sequence is synthesized)
cctgtgccagggcaagaagttctactttgtgcgcaccaaggtggacgaggacctggcggccacgcgcacccagcggccgtcgggcttcagagaggccgctgtcctgcaggagatccgaga

SEQ ID NO: 256293 - DNA, 120 bp, Artificial Sequence
  ENSG00000124449_6 (sequence is synthesized)
tgaccctcgcatcttcctggtgtccaacctctcgccggcccgctacgactttcccacgctggtgtccacctgggagcacgacctgccctcccaccggcgccacgctggcctgctgtcgct

SEQ ID NO: 256294 - DNA, 120 bp, Artificial Sequence
  ENSG00000124449_7 (sequence is synthesized)
ccccgacatctcgctggaggccttgcagaagaagaaggccatgcttcaagagcaagtcctcaagaccgccctggtgttgggcgtcatccaggccctgccggtcccagggctggcggccgc

SEQ ID NO: 256295 - DNA, 120 bp, Artificial Sequence
  ENSG00000124449_8 (sequence is synthesized)
ctacgatgatgcgttgctcatccactcactgcgtggctaccaccgcagctttggtctggacgacgactcgctggccaagctggccgagcaggtgggcaaacaggcaggtgacctgcgctc

SEQ ID NO: 256296 - DNA, 120 bp, Artificial Sequence
  ENSG00000124449_9 (sequence is synthesized)
ggtcatccgctccccactggccaacgaggtctcgcctgagactgtcctgcggctctattcccagtcgtccgacggcgccatgcgggtggcccgcgcctttgagaggggcatccctgtgtt

SEQ ID NO: 256297 - DNA, 120 bp, Artificial Sequence
  ENSG00000124449_10 (sequence is synthesized)
tgggacgctggtggctggcggcatcagctttggcgctgtctacaccatgctccagggctgcctcaacgagatggctgaggacgcccagcgtgtccgcatcaaggccctggaggatgacga

SEQ ID NO: 256298 - DNA, 120 bp, Artificial Sequence
  ENSG00000124449_11 (sequence is synthesized)
gccgcagccggaggtcagcttggaagtggccagtgacaatggcgtggaaaaggggggctccggggagggaggtggggaggaagccccactctcaacctgcaggaagctcggcctccttct

SEQ ID NO: 256299 - DNA, 120 bp, Artificial Sequence
  ENSG00000124449_12 (sequence is synthesized)
taagtacattctggacagctggaagaaacacgactcagaagagaaataaagagtgcagccccgcccccctgcctcacccacaaactaagtcttaacaaaatccaaattaccaacaaaaaa

SEQ ID NO: 256300 - DNA, 120 bp, Artificial Sequence
  ENSG00000124449_13 (sequence is synthesized)
agtgtgaggggagagggagagcctgcagggcaggaaaaagagagctgtgggcttccagggcgactcccttcacatccgtggtatctgtctctccctgccccatgccaaggcccaggaggt

SEQ ID NO: 256301 - DNA, 120 bp, Artificial Sequence
  ENSG00000124459_0 (sequence is synthesized)
gggcacttccgcggcaagaggttgagagcgcggccttcattcctctcgtggaagtgagtgagtcctgggaccccgcgacctgttttaacttttatggtttggtcgtaggatcagcagggc

SEQ ID NO: 256302 - DNA, 120 bp, Artificial Sequence
  ENSG00000124459_1 (sequence is synthesized)
tcgcacttcggtcagcaggaaaagacgctgcggcgagcagcggagggcggagttgaatggctgggcagctgattgccttactgtatccggagctgctgcgttcggggcggttcgggagtc

SEQ ID NO: 256303 - DNA, 120 bp, Artificial Sequence
  ENSG00000124459_2 (sequence is synthesized)
ccctggttggaagtggacctgaatggggaggcgtctgaggatctcctgggctctcagcggcccgacccgccttcccccacctcccacagctctgtagcttcctagcggtgtaacgttggg

SEQ ID NO: 256304 - DNA, 120 bp, Artificial Sequence
  ENSG00000124459_3 (sequence is synthesized)
aaaggaggctgttcttggactatgcctgacccgttttttaagaaagagtgcatcactcaacaggtggcgtctggagttatcctctgtggattttccaggatctcagacaagatcgtgcaa

SEQ ID NO: 256305 - DNA, 120 bp, Artificial Sequence
  ENSG00000124459_4 (sequence is synthesized)
tctcccagcctcctttccttcccctgccctgacttctgaaagaatgctgcgggagaggaggaaggagagcatcctggcttctggcagcagagccccactgtgacaggacctagcattcac

SEQ ID NO: 256306 - DNA, 120 bp, Artificial Sequence
  ENSG00000124459_5 (sequence is synthesized)
cttcctcttctgttccgagtgcgagaagacttcagggacctctgtttcatggacattatcatattcttctcaagagtacccagcaagaggtttgcaaagaggagttattcagtgaaatca

SEQ ID NO: 256307 - DNA, 120 bp, Artificial Sequence
  ENSG00000124459_6 (sequence is synthesized)
gaatcataccctgagagctacaagaactccatttttcactgtgcagaggctctctgctgaagggtcaagtggaatctggaatccagcccatgtttccccatcatcaagccatgtgaagct

SEQ ID NO: 256308 - DNA, 120 bp, Artificial Sequence
  ENSG00000124459_7 (sequence is synthesized)
gcagactccaagcaacagagagacaagatttagaatactggctctggtatgaaagctggattcaggtactgttcctgcctcttgacctcaccaagcctcagcttcctcgcctgttaaatg

SEQ ID NO: 256309 - DNA, 120 bp, Artificial Sequence
  ENSG00000124459_8 (sequence is synthesized)
gatacaattgtcgtcattatcatctgttgagaactccctaaaatgccagctgagcataggcacagaagtttaggtgtttggaccaaggtcacacaactgatacaacagtagcttcttcac

SEQ ID NO: 256310 - DNA, 120 bp, Artificial Sequence
  ENSG00000124459_9 (sequence is synthesized)
agacttggcacttctccagaaggaggaggacaaaatgacgaagtctaaggaggcagtgacattcaaggacgtggctgtggtcttctctgaggaggagctgcaactgctggaccttgccca

SEQ ID NO: 256311 - DNA, 120 bp, Artificial Sequence
  ENSG00000124459_10 (sequence is synthesized)
gaggaagctgtaccgagatgtgatgctggagaacttcaggaatgtggtctcagtggggcatcagtccacaccagatggcctaccacagttagagagagaagaaaagctgtggatgatgaa

SEQ ID NO: 256312 - DNA, 120 bp, Artificial Sequence
  ENSG00000124459_11 (sequence is synthesized)
gatggcaacccagagagataactcctcaggagccaagaatctaaaagagatggagactcttcaagaagtaggattaaggtacctgcctcatgaagagcttttctgctcccagatctggca

SEQ ID NO: 256313 - DNA, 120 bp, Artificial Sequence
  ENSG00000124459_12 (sequence is synthesized)
acagattacaagagagttaatcaagtatcaagattctgtggtaaatattcaaagaacaggctgccagttggaaaaacgagatgatttgcactataaagatgagggattcagtaatcagag

SEQ ID NO: 256314 - DNA, 120 bp, Artificial Sequence
  ENSG00000124459_13 (sequence is synthesized)
ttcccatcttcaagttcacagagtccacactggtgaaaaaccctacaaaggagaacattgtgtgaaaagtttcagctggagctctcatcttcaaattaaccaaagggctcatgcaggaga

SEQ ID NO: 256315 - DNA, 120 bp, Artificial Sequence
  ENSG00000124459_14 (sequence is synthesized)
gaagccctacaaatgtgaaaaatgtgataatgccttccgtcggttttcaagtcttcaagcccatcagagagtccacagtagagcaaaatcatacacaaatgatgcaagttacaggagttt

SEQ ID NO: 256316 - DNA, 120 bp, Artificial Sequence
  ENSG00000124459_15 (sequence is synthesized)
tagtcagaggtcacatcttccccatcatcagagagttcccactggagagaatccatacaaatatgaagagtgtgggaggaatgttgggaaaagctcacattgtcaagctcctctgatagt

SEQ ID NO: 256317 - DNA, 120 bp, Artificial Sequence
  ENSG00000124459_16 (sequence is synthesized)
acactggaaagaaaccatataagtgtgaagagtgtgggaagagcttcagttggcgttcacgactgcaggctcatgagcgaatccacactggcgagaaaccatacaaatgcaatgcatgtg

SEQ ID NO: 256318 - DNA, 120 bp, Artificial Sequence
  ENSG00000124459_17 (sequence is synthesized)
gcaagagctttagttacagctcacaccttaatattcattgtagaatccacacaggagagaaaccctataagtgtgaggagtgtgggaaaggtttcagtgtgggttcacaccttcaggccc

SEQ ID NO: 256319 - DNA, 120 bp, Artificial Sequence
  ENSG00000124459_18 (sequence is synthesized)
atcagataagccacactggagagaagccatacaaatgtgaggagtgtgggaaaggcttctgccgggcctcaaatctgctggaccatcaaagaggccatactggagagaaaccgtatcagt

SEQ ID NO: 256320 - DNA, 120 bp, Artificial Sequence
  ENSG00000124459_19 (sequence is synthesized)
gtgatgcatgtggtaagggcttcagtcgtagctcagattttaacattcattttagagtccatacaggggaaaaaccctataaatgtgaggagtgtggcaagggcttcagccaggcctcaa

SEQ ID NO: 256321 - DNA, 120 bp, Artificial Sequence
  ENSG00000124459_20 (sequence is synthesized)
atcttctggcccatcaaagaggccacactggagagaaaccctacaaatgtggtacatgtgggaagggcttcagtcggagctcagatcttaatgtacactgtagaatccacacaggagaga

SEQ ID NO: 256322 - DNA, 120 bp, Artificial Sequence
  ENSG00000124459_21 (sequence is synthesized)
aaccctataaatgcgagaggtgtggtaaggccttcagtcagttctccagccttcaggtgcatcagagagttcacactggagagaaaccatatcagtgtgcagagtgtgggaagggcttca

SEQ ID NO: 256323 - DNA, 120 bp, Artificial Sequence
  ENSG00000124459_22 (sequence is synthesized)
gtgtaggttcacagcttcaagcccatcagaggtgccacactggagagaaaccctatcaatgtgaggagtgtgggaagggcttctgtcgggcctccaattttctggcacatcgtggagtcc

SEQ ID NO: 256324 - DNA, 120 bp, Artificial Sequence
  ENSG00000124459_23 (sequence is synthesized)
acacaggagaaaaaccataccgatgtgatgtgtgtggtaagcgcttcagacagagatcctaccttcaagcccaccagagggtccacacaggagagagaccatacaaatgtgaggaatgtg

SEQ ID NO: 256325 - DNA, 120 bp, Artificial Sequence
  ENSG00000124459_24 (sequence is synthesized)
ggaaagtcttcagctggagctcataccttcaagcccatcaaagagttcacaccggagaaaaaccatacaaatgtgaggagtgtgggaagggcttcagttggagctcaagtcttatcattc

SEQ ID NO: 256326 - DNA, 120 bp, Artificial Sequence
  ENSG00000124459_25 (sequence is synthesized)
atcagcgagtccatgctgatgatgagggtgacaaggactttccttcatcagaggattcacacaggaaaactcgataaaatatgttttactatctcagatgggtgctgaaatattttaata

SEQ ID NO: 256327 - DNA, 120 bp, Artificial Sequence
  ENSG00000124459_26 (sequence is synthesized)
atcagagctatcatagacaaaacatttgttttatagagtcagtagttcagccaagtgattgggagaccacacagcagagaagcctcacaagagtggagacatatggactgcattcagaac

SEQ ID NO: 256328 - DNA, 120 bp, Artificial Sequence
  ENSG00000124459_27 (sequence is synthesized)
attgaccattagctgatacatgcagacaagaggatcaggaaggatgagtctgatctggagtaaatcagaagtactaagatagaaatgctgaattctgttccactagaatataagatccaa

SEQ ID NO: 256329 - DNA, 120 bp, Artificial Sequence
  ENSG00000124459_28 (sequence is synthesized)
gagggcagggactttgttgactgccaaatctactctgccttttcagtgcctaatacgttgtaatttttcagtagtatttgaaattactgtcatatttgaaattcagtaatatttgacatt

SEQ ID NO: 256330 - DNA, 120 bp, Artificial Sequence
  ENSG00000124459_29 (sequence is synthesized)
tttatttatctctagaagtttctctaaaattgtactcagaagaattctgcaaggcttggaggatatataagttagtcatatggcctgattttcccatttttgcagatctcgtggacaagt

SEQ ID NO: 256331 - DNA, 120 bp, Artificial Sequence
  ENSG00000124459_30 (sequence is synthesized)
gtttatcaaactgaaggttgcagcttgttagtgggttcagaaatcagtttctggctagcaactagaagttttgtatgttaacagtactttattgaggtgtaatctgcatgcagtaacatg

SEQ ID NO: 256332 - DNA, 120 bp, Artificial Sequence
  ENSG00000124459_31 (sequence is synthesized)
cacaagtctcaagttcatggctttctgaattttgacaaatgtaatcatcaccaagatcaatgtatacaatatgtctattaaaccaaaaagttttcttgtgcccatttccagtcaatccca

SEQ ID NO: 256333 - DNA, 120 bp, Artificial Sequence
  ENSG00000124459_32 (sequence is synthesized)
tatccacagtccttgtctgttatctcacgtttggtgggctgtagaatccatcaactttttcagggtattcaaaagttgatgaacaattgtggataatattgtcaagatctaaaacaaact

SEQ ID NO: 256334 - DNA, 120 bp, Artificial Sequence
  ENSG00000124466_0 (sequence is synthesized)
acatccaggggggacgccaagggagcaggacggagccatggaccccgccaggaaagcaggtgcccaggccatgatctggactgcaggctggctgctgctgctgctgcttcgcggaggagc

SEQ ID NO: 256335 - DNA, 120 bp, Artificial Sequence
  ENSG00000124466_1 (sequence is synthesized)
gcaggccctggagtgctacagctgcgtgcagaaagcagatgacggatgctccccgaacaagatgaagacagtgaagtgcgcgccgggcgtggacgtctgcaccgaggccgtgggggcggt

SEQ ID NO: 256336 - DNA, 120 bp, Artificial Sequence
  ENSG00000124466_2 (sequence is synthesized)
ggagaccatccacggacaattctcgctggcagtgcggggttgcggttcgggactccccggcaagaatgaccgcggcctggatcttcacgggcttctggcgttcatccagctgcagcaatg

SEQ ID NO: 256337 - DNA, 120 bp, Artificial Sequence
  ENSG00000124466_3 (sequence is synthesized)
cgctcaggatcgctgcaacgccaagctcaacctcacctcgcgggcgctcgacccggcaggtaatgagagtgcatacccgcccaacggcgtggagtgctacagctgtgtgggcctgagccg

SEQ ID NO: 256338 - DNA, 120 bp, Artificial Sequence
  ENSG00000124466_4 (sequence is synthesized)
ggaggcgtgccagggtacatcgccgccggtcgtgagctgctacaacgccagcgatcatgtctacaagggctgcttcgacggcaacgtcaccttgacggcagctaatgtgactgtgtcctt

SEQ ID NO: 256339 - DNA, 120 bp, Artificial Sequence
  ENSG00000124466_5 (sequence is synthesized)
gcctgtccggggctgtgtccaggatgaattctgcactcgggatggagtaacaggcccagggttcacgctcagtggctcctgttgccaggggtcccgctgtaactctgacctccgcaacaa

SEQ ID NO: 256340 - DNA, 120 bp, Artificial Sequence
  ENSG00000124466_6 (sequence is synthesized)
accacttctacctcggccccagtgagacccacatccaccaccaaacccatgccagcgccaaccagtcagactccgagacagggagtagaacacgaggcctcccgggatgaggagcccagg

SEQ ID NO: 256341 - DNA, 120 bp, Artificial Sequence
  ENSG00000124466_7 (sequence is synthesized)
ttgactggaggcgccgctggccaccaggaccgcagcaattcagggcagtatcctgcaaaaggggggccccagcagccccataataaaggctgtgtggctcccacagctggattggcagcc

SEQ ID NO: 256342 - DNA, 120 bp, Artificial Sequence
  ENSG00000124466_8 (sequence is synthesized)
cttctgttggccgtggctgctggtgtcctactgtgagcttctccacctggaaatttccctctcacctacttctctggccctgggtacccctcttctcatcacttcctgttcccaccactg

SEQ ID NO: 256343 - DNA, 120 bp, Artificial Sequence
  ENSG00000124466_9 (sequence is synthesized)
gactgggctggcccagcccctgtttttccaacattccccagtatccccagcttctgctgcgctggtttgcggctttgggaaataaaataccgttgtatatattctgccaggggtgttcta

SEQ ID NO: 256344 - DNA, 120 bp, Artificial Sequence
  ENSG00000124466_10 (sequence is synthesized)
gctttttgaggacagctcctgtatccttctcatccttgtctctccgcttgtcctcttgtgatgttaggacagagtgagagaagtcagctgtcacggggaaggtgagagagaggatgctaa

SEQ ID NO: 256345 - DNA, 120 bp, Artificial Sequence
  ENSG00000124466_11 (sequence is synthesized)
gcttcctactcactttctcctagccagcctggactttggagcgtggggtgggtgggacaatggctccccactctaagcactgcctcccctactccccgcatctttggggaatcggttccc

SEQ ID NO: 256346 - DNA, 120 bp, Artificial Sequence
  ENSG00000124466_12 (sequence is synthesized)
catatgtcttccttactagactgtgagctcctcgagggcagggaccgtgccttatgtctgtgtgtgatcagtttctggcacataaatgcctcaataaagatttaattactttgtatagtg

SEQ ID NO: 256347 - DNA, 120 bp, Artificial Sequence
  ENSG00000124466_13 (sequence is synthesized)
ctggccacgcccctttaacgcggccccacccctccctttcagcctggccgggaccctacgacacagccttgcaggccaggccttctctattaacaattacaagcgcgaggagcagagagt

SEQ ID NO: 256348 - DNA, 120 bp, Artificial Sequence
  ENSG00000124466_14 (sequence is synthesized)
tgagaactgggtggggcggacggggagagctcgggtttggaacgaggtcacgtcctatgcactttttctgctccaccaatgagacctccccatccctgcctgtcaaccaggctgtctcct

SEQ ID NO: 256349 - DNA, 120 bp, Artificial Sequence
  ENSG00000124466_15 (sequence is synthesized)
cgctcctccctgcttcggtcgttctttccgctctgagcggctctttgggggcgtccatccgccaattcctgcctgtcggtcctgtggtgttggcctatttgaggccccgcccctcccaga

SEQ ID NO: 256350 - DNA, 120 bp, Artificial Sequence
  ENSG00000124466_16 (sequence is synthesized)
ctcaggatcgctgcaacgccaagctcaacctcacctcgcgggcgctcgacccggcaggtccgtgggggccgggccgtagctgcgggggcggagccacattcgggcctgccaagatagagg

SEQ ID NO: 256351 - DNA, 120 bp, Artificial Sequence
  ENSG00000124466_17 (sequence is synthesized)
tggagccgtggcagaggcgggagtactcgacctgggctgggggtggggtcacactctggggcggggccaagaggcagcaggagggactttctggctgtaggcgccgcgaggttgcgcgct

SEQ ID NO: 256352 - DNA, 120 bp, Artificial Sequence
  ENSG00000124467_0 (sequence is synthesized)
agaaggaggcaggacagcactgctgagagctgtgctcaggaagcttctggatcctaggctcatctccacagaggagaacacacagacagcagagaccatggggctcctctcagcccctcc

SEQ ID NO: 256353 - DNA, 120 bp, Artificial Sequence
  ENSG00000124467_1 (sequence is synthesized)
ctgcacacagcgcatcacctggaaggggctcctgctcacagcatcacttttaaacttctggaacccacccacgactgcccaagtcacgattgaagcccagccaaccaaagtttctgaggg

SEQ ID NO: 256354 - DNA, 120 bp, Artificial Sequence
  ENSG00000124467_2 (sequence is synthesized)
gaaggatgttcttctacttgtccacaatttgccccagaatcttactggctacatctggtacaaagggcaaatcagggacctctaccattacattacatcatatgtagtagacggtcaaat

SEQ ID NO: 256355 - DNA, 120 bp, Artificial Sequence
  ENSG00000124467_3 (sequence is synthesized)
aattatatatgggcctgcatacagtggacgagaaacaatatattccaatgcatccctgctgatccagaatgtcacccaggaagacgcaggatcctacaccttacacatcataatgggagg

SEQ ID NO: 256356 - DNA, 120 bp, Artificial Sequence
  ENSG00000124467_4 (sequence is synthesized)
tgatgagaatagaggagtaactggacatttcaccttcaccttatatctggagactcccaagccctccatctccagcagcaaattaaaccccagggaggccatggaggctgtgagcttaac

SEQ ID NO: 256357 - DNA, 120 bp, Artificial Sequence
  ENSG00000124467_5 (sequence is synthesized)
ctgtgatcctgagactccggacgcaagctacctgtggtggatgaatggtcagagcctccctatgtctcacaggttgcagttgtctgaaaccaacaggaccctctttctattgggtgtcac

SEQ ID NO: 256358 - DNA, 120 bp, Artificial Sequence
  ENSG00000124467_6 (sequence is synthesized)
aaagtacactgcaggaccctatgaatgtgaaatacggaacccagtgagtgccagccgcagtgacccattcaccctgaatctcctcccgaagctgcccaagccctacatcaccatcaacaa

SEQ ID NO: 256359 - DNA, 120 bp, Artificial Sequence
  ENSG00000124467_7 (sequence is synthesized)
cttaaaacccagggagaataaggatgtcttaaacttcacctgtgaacctaagagtgagaactacacctacatttggtggctaaatggtcagagcctcccggtcagtcccagggtaaagcg

SEQ ID NO: 256360 - DNA, 120 bp, Artificial Sequence
  ENSG00000124467_8 (sequence is synthesized)
acccattgaaaacaggatcctcattctacccagtgtcacgagaaatgaaacaggaccctatcaatgtgaaataagggaccaatatggtggcatccgcagttacccagtcaccctgaatgt

SEQ ID NO: 256361 - DNA, 120 bp, Artificial Sequence
  ENSG00000124467_9 (sequence is synthesized)
cctctatggtccagacctccccagaatttacccttcattcacctattaccgttcaggagaagtcctctacttgtcctgttctgcggactctaacccaccggcacagtattcttggacaat

SEQ ID NO: 256362 - DNA, 120 bp, Artificial Sequence
  ENSG00000124467_10 (sequence is synthesized)
taatgggaagtttcagctatcaggacaaaagctctttatcccccaaattactacaaagcatagcgggctctatgcttgctctgttcgtaactcagccactggcaaggaaagctccaaatc

SEQ ID NO: 256363 - DNA, 120 bp, Artificial Sequence
  ENSG00000124467_11 (sequence is synthesized)
catgacagtaaaagtctctggtaagcggatcccagtatccttggcaatagggatttaggtggagtctatctggccttcagggaagagtcaggaaaacatttttattcccagcctgcgtcc

SEQ ID NO: 256364 - DNA, 120 bp, Artificial Sequence
  ENSG00000124467_12 (sequence is synthesized)
ctataagctggaggtggacaactcaatgtaaatttcatgggaaaacccttgtacctgaagggtgagccactcagaactcactaaaatgttcgacaccataacaacagatgctcaaactgt

SEQ ID NO: 256365 - DNA, 120 bp, Artificial Sequence
  ENSG00000124467_13 (sequence is synthesized)
aaaccaggacaacaagtggatgacttcacactgtggacagtttttcccaagatgtcagaacaagactccccatcatgatgaggctctcacccctcttaactgtccttgctcatgcctgcc

SEQ ID NO: 256366 - DNA, 120 bp, Artificial Sequence
  ENSG00000124467_14 (sequence is synthesized)
tctttcacttggcaggataatgcagtcattagaatttcacatgtagtagcttctgagggtaacaatagagtgtcagatatgtcatctcaacccaaacttttacataacatctcaggggga

SEQ ID NO: 256367 - DNA, 120 bp, Artificial Sequence
  ENSG00000124467_15 (sequence is synthesized)
aatgtggctctctccaccttgcatacaggactcccaatagaaatgaacacagagatattgcccgtgtgtttgcagataagatggtttctatgaagaggtaggaaagctgaaattataata

SEQ ID NO: 256368 - DNA, 120 bp, Artificial Sequence
  ENSG00000124467_16 (sequence is synthesized)
gagtcccctttaaatgcacattctgtggatggctctcgccatttcctaagagatacattgtaaaatgtgacagtaatactgattctagcagaataaaacatgtaccacatttgctaatac

SEQ ID NO: 256369 - DNA, 120 bp, Artificial Sequence
  ENSG00000124467_17 (sequence is synthesized)
acagccgtgctcaggaagtttctggaacctaggctcatctccacagaggagaacacacaagcagcagagaccatggggcccctctcagcccctccctgcacacagcacatcaaatggaag

SEQ ID NO: 256370 - DNA, 120 bp, Artificial Sequence
  ENSG00000124467_18 (sequence is synthesized)
cagcgcatcacctggaaggggctcctgctcacagaggtcactggctcaagtcagccactatgagacacctgggaaaactgcgccaccttgtggctccactgcctgatgactgaactgacc

SEQ ID NO: 256371 - DNA, 120 bp, Artificial Sequence
  ENSG00000124467_19 (sequence is synthesized)
gacttgactctgttctcccctgtgttatttctgctgaagtacccagtcccaggccaggctttccagtacccaaagggtttaaagacaattggaagttccatcacccatctctaggatgtc

SEQ ID NO: 256372 - DNA, 120 bp, Artificial Sequence
  ENSG00000124467_20 (sequence is synthesized)
cttggcaagggaagctgcagagaaaacataccttgggcggcaaagtaagactgaaactaagaagattccagcactgcatgctccaagtgaggaccacaagtggagactcccaagccctcc

SEQ ID NO: 256373 - DNA, 120 bp, Artificial Sequence
  ENSG00000124467_21 (sequence is synthesized)
accttcaccttatatcgtgagtgattccacatgatccctgggtgttgggggacaggggtcacttctacttcacacacacaggattgtcaggcctggacattgcctgtgtccctctctgca

SEQ ID NO: 256374 - DNA, 120 bp, Artificial Sequence
  ENSG00000124467_22 (sequence is synthesized)
tctctgcattatgtcccatgctggggtttgggcatttagtgcaggacacacacagaggagacaaatttcaacagatcagaattcctttcccgcatccagaccctgcagacactcgctgca

SEQ ID NO: 256375 - DNA, 120 bp, Artificial Sequence
  ENSG00000124467_23 (sequence is synthesized)
tccagcagatccttcccaccctttctaccagtcagtgctgcatttgcaaatgtccacatatatttctggaaagatccacatggtcctcacctgccctctgcagaaggagaggaaacttga

SEQ ID NO: 256376 - DNA, 120 bp, Artificial Sequence
  ENSG00000124467_24 (sequence is synthesized)
acgcaggacaggcaacatagttctgctccaaagccaccagctcttgcctgtcgccttcactctttctagatcattccttgcactctgctctatctttagaggtcactggttcaagtaagt

SEQ ID NO: 256377 - DNA, 83 bp, Artificial Sequence
  ENSG00000124467_25 (sequence is synthesized)
ttctggtctcccctgtgttatttctgctgaaacatccagtcccaggccaggctgctcagtatcttcagggtttcaggaccatg

SEQ ID NO: 256378 - DNA, 120 bp, Artificial Sequence
  ENSG00000124467_26 (sequence is synthesized)
aggccaggctgctcagtatcttcagggtttcaggaccatgggtagtcccatcattactcatctctagaatgtccttggaaatggaagctgcagagaaatcacatctagggggacaatgta

SEQ ID NO: 256379 - DNA, 120 bp, Artificial Sequence
  ENSG00000124467_27 (sequence is synthesized)
ggatggaatttggaaggggcccaccagttgcacattccaggtaaggaacccagggtgagccagccagtcaactgattagggagggactgggagggataccaggggctgtgacttccactg

SEQ ID NO: 256380 - DNA, 120 bp, Artificial Sequence
  ENSG00000124467_28 (sequence is synthesized)
acgtgtctgtccatgacccaacactgctgctcaattgacacttgagaaagtctgtgcttccctaagacagagcagctggcctcatagtctttgagcccttagatcatcatgcatctgtct

SEQ ID NO: 256381 - DNA, 120 bp, Artificial Sequence
  ENSG00000124467_29 (sequence is synthesized)
tgtgacacacgcaccagctattggctttcaaggactcgggtgggctgagaagtgggagatgccaactctgattgaaggatgcctgtggaggaatcaaaggtgccacacaggacaatcttc

SEQ ID NO: 256382 - DNA, 120 bp, Artificial Sequence
  ENSG00000124467_30 (sequence is synthesized)
gggaaaacctgggtaggcacagccttaaccaagagtataaggggagtggacgctcttgtcatgggagacttggggcccacagcttgtgatgggagaaacaggtgaatacctgaggattcg

SEQ ID NO: 256383 - DNA, 120 bp, Artificial Sequence
  ENSG00000124467_31 (sequence is synthesized)
gctcagtgaacatagagggggttgggctgggacttgagggtgtgtcttggctcagagggtcactgtgtccctttaagagaccaggaacatccccttccctcagatgacatcacctgtggc

SEQ ID NO: 256384 - DNA, 120 bp, Artificial Sequence
  ENSG00000124469_0 (sequence is synthesized)
aaaggaggaaggacagcacagctgacagccgtgctcagaaagtttctggatcccaggctcatctccacagaggagaacacgcaggcagcagagaccatggggcccatctcagccccttcc

SEQ ID NO: 256385 - DNA, 120 bp, Artificial Sequence
  ENSG00000124469_1 (sequence is synthesized)
tgcagatggcgcatcccctggcaggggctcctgctcacagcctcacttttcaccttctggaacccgcccaccactgctcagctcactattgaagctgtgccatccaatgctgcagagggg

SEQ ID NO: 256386 - DNA, 120 bp, Artificial Sequence
  ENSG00000124469_2 (sequence is synthesized)
aaggaggttcttctacttgtccacaatctgccccaggaccctcgtggctacaactggtacaaaggggaaacagtggatgccaaccgtcgaattataggatatgtaatatcaaatcaacag

SEQ ID NO: 256387 - DNA, 120 bp, Artificial Sequence
  ENSG00000124469_3 (sequence is synthesized)
attaccccagggcctgcatacagcaatcgagagacaatataccccaatgcatccctgctgatgcggaacgtcaccagaaatgacacaggatcctacaccctacaagtcataaagctaaat

SEQ ID NO: 256388 - DNA, 120 bp, Artificial Sequence
  ENSG00000124469_4 (sequence is synthesized)
cttatgagtgaagaagtaactggccagttcagcgtacatccggagactcccaagccctccatctccagcaacaactccaaccccgtggaggacaaggatgctgtggccttcacctgtgaa

SEQ ID NO: 256389 - DNA, 120 bp, Artificial Sequence
  ENSG00000124469_5 (sequence is synthesized)
cctgagactcagaacacaacctacctgtggtgggtaaatggtcagagtctcccggtcagtcccaggctgcagctgtccaatggcaacaggaccctcactctactcagtgtcacaaggaat

SEQ ID NO: 256390 - DNA, 120 bp, Artificial Sequence
  ENSG00000124469_6 (sequence is synthesized)
gacgtaggaccctatgaatgtgaaatacagaacccagcgagtgcaaacttcagtgacccagtcaccctgaatgtcctctatggcccagatgcccccaccatttccccttcagacacctat

SEQ ID NO: 256391 - DNA, 120 bp, Artificial Sequence
  ENSG00000124469_7 (sequence is synthesized)
taccatgcaggggtaaatctcaacctctcctgccatgcggcctctaatccaccctcacagtattcttggtctgtcaatggcacattccagcaatacacacaaaagctctttatccccaac

SEQ ID NO: 256392 - DNA, 120 bp, Artificial Sequence
  ENSG00000124469_8 (sequence is synthesized)
atcactacaaagaacagcggatcctatgcctgccacaccactaactcagccactggccgcaacaggaccacagtcaggatgatcacagtctctgatgctttagtacaaggaagttctcct

SEQ ID NO: 256393 - DNA, 120 bp, Artificial Sequence
  ENSG00000124469_9 (sequence is synthesized)
cactgtcagcatcatgattggagtactggccagggtggctctgatatagtagctctggtgtagtttctgcatttcaagaagactggcagacagttgtttttattcttcctcaaagcattt

SEQ ID NO: 256394 - DNA, 120 bp, Artificial Sequence
  ENSG00000124469_10 (sequence is synthesized)
gcaatcagctaccattcaaaattgcttcttcttcaagatttatggaaaatactctgacgagtactcttgaacacaagttcctgataactttaagatcacgccactggactgtctatgaac

SEQ ID NO: 256395 - DNA, 120 bp, Artificial Sequence
  ENSG00000124469_11 (sequence is synthesized)
ttgcaaacaggctgatacctttgtgaagttgcccaccaaaacacagaaggaaaaaaacatgaatttcattgaactaaataataatgaggataatgtttttaagatttttttttttttttt

SEQ ID NO: 256396 - DNA, 120 bp, Artificial Sequence
  ENSG00000124469_12 (sequence is synthesized)
ttacaggtgtgagccaccgcgcccagcccgtttttaagattttttatttgaaaaattgccaattctttaagtgttttctttttcagatttatgaatttctttatcttttaagctatctat

SEQ ID NO: 256397 - DNA, 120 bp, Artificial Sequence
  ENSG00000124469_13 (sequence is synthesized)
ctataccttactgcaatttggtaaagcagacttttgtgaacaaaaattataacatttacttttgctccctacctgactgccacagaactgggcaactattcatgagtattcatatgttta

SEQ ID NO: 256398 - DNA, 120 bp, Artificial Sequence
  ENSG00000124469_14 (sequence is synthesized)
tggtaattcagttatttgcacaagttcagtgagaatctgctgtctttataatgggatatagtttaaaacattggttatattaccaaggctttgattgggatgttatatttgagaaaatac

SEQ ID NO: 256399 - DNA, 120 bp, Artificial Sequence
  ENSG00000124469_15 (sequence is synthesized)
agagaatgatagattaacggagtgtctaatctatcgtgtcaaccccaaatttttacgtatgagatcctttagtccacccaatggctgacagtaacagcatctttaacacaactctttgtt

SEQ ID NO: 256400 - DNA, 120 bp, Artificial Sequence
  ENSG00000124469_16 (sequence is synthesized)
caaatgtactatggtctcttttagagtcagactcctagactcacttgttctcactgtctgttttaatttaacccaggcatgcaatgctagataataaaattgctccctattggctgatca

SEQ ID NO: 256401 - DNA, 120 bp, Artificial Sequence
  ENSG00000124469_17 (sequence is synthesized)
agacagaaaataaagggaaaggagggacagggaggcaggactgagaggggaggggacagagaggtgtcctgggcacagaccccgcccatgagcctgagaagtgctcctgccccgggaaga

SEQ ID NO: 256402 - DNA, 120 bp, Artificial Sequence
  ENSG00000124469_18 (sequence is synthesized)
tatgatggcctttcctcttgtcctgtttcctgcagggctgaccgccatgcttgggagagagacctgtatcccgggaatggatctcctcctcctcccaataaactcctgcttctcagcact

SEQ ID NO: 256403 - DNA, 120 bp, Artificial Sequence
  ENSG00000124479_0 (sequence is synthesized)
agaagaacaaaagcatttggaagtaacaggacctctttctagctctcagaaaagtctgagaagaaaggagccctgcgttcccctaagctgtgcagcagatactgtgatgatggattgcaa

SEQ ID NO: 256404 - DNA, 120 bp, Artificial Sequence
  ENSG00000124479_1 (sequence is synthesized)
gtgcaaagagtaagacaaaactccagcacataaaggacaatgacaaccagaaagcttcagcccgatcctgccctttccttgaacgggactggatcctaggaggtgaagccatttccaatt

SEQ ID NO: 256405 - DNA, 120 bp, Artificial Sequence
  ENSG00000124479_2 (sequence is synthesized)
ttttgtcctctgcctccctctgctgttcttctagagaagtttttccttacaacaatgagaaaacatgtactagctgcatccttttctatgctctccctgctggtgataatgggagataca

SEQ ID NO: 256406 - DNA, 120 bp, Artificial Sequence
  ENSG00000124479_3 (sequence is synthesized)
gacagtaaaacggacagctcattcataatggactcggaccctcgacgctgcatgaggcaccactatgtggattctatcagtcacccattgtacaagtgtagctcaaagatggtgctcctg

SEQ ID NO: 256407 - DNA, 120 bp, Artificial Sequence
  ENSG00000124479_4 (sequence is synthesized)
gccaggtgcgaggggcactgcagccaggcgtcacgctccgagcctttggtgtcgttcagcactgtcctcaagcaacccttccgttcctcctgtcactgctgccggccccagacttccaag

SEQ ID NO: 256408 - DNA, 120 bp, Artificial Sequence
  ENSG00000124479_5 (sequence is synthesized)
ctgaaggcactgcggctgcgatgctcagggggcatgcgactcactgccacctaccggtacatcctctcctgtcactgcgaggaatgcaattcctgaggcccgctgctgtgtgtggcttct

SEQ ID NO: 256409 - DNA, 120 bp, Artificial Sequence
  ENSG00000124479_6 (sequence is synthesized)
ggatgggacaactgtagaggcagttcgaccagccagggaaagactggcaagaaaagagttaaggcaaaaaaggatgcaacaattctcccgggactctgcatattctagtaataaagactc

SEQ ID NO: 256410 - DNA, 120 bp, Artificial Sequence
  ENSG00000124479_7 (sequence is synthesized)
tttgcagttcccatctcctttctctggtacaatttcttttggttcattttcagattcaggcattttcccccttggctctcaatgctgtttgggtttccaacaattcagcattagtgggaa

SEQ ID NO: 256411 - DNA, 120 bp, Artificial Sequence
  ENSG00000124479_8 (sequence is synthesized)
aaagtgggccctcatacacaagcgtgtcaggctgtcagtgtttggtgcacgctggggaagaatttactttggaaagtagaaaagcccagcttttcctgggacatcttctgttattgttga

SEQ ID NO: 256412 - DNA, 120 bp, Artificial Sequence
  ENSG00000124479_9 (sequence is synthesized)
tgtttttttttaccttgtcattttggtctaaggttgccattgctgctaaaggttaccgatttcaaagtccagataccaagcatgtggatatgtttagctacgtttactcacagccagcga

SEQ ID NO: 256413 - DNA, 120 bp, Artificial Sequence
  ENSG00000124479_10 (sequence is synthesized)
actgacattaaaataactaacaaacagattcttttatgtgatgctggaactcttgacagctataattattattcagaaatgactttttgaaagtaaaagcagcataaagaatttgtcaca

SEQ ID NO: 256414 - DNA, 120 bp, Artificial Sequence
  ENSG00000124479_11 (sequence is synthesized)
ggaaggctgtctcagataaattatggtaaaattttgtaagggagcagacttttaaagacttgcacaaatacggatcctgcactgactctggaaaaggcatatatgtactagtggcatgga

SEQ ID NO: 256415 - DNA, 120 bp, Artificial Sequence
  ENSG00000124479_12 (sequence is synthesized)
gaatgcaccatactcatgcatgcaaattagacaaccaagtatgaatctatttgtgggtgtgctatagctttagccgtgtcacgggcatcattctctaatatccacttgtccatgtgaaac

SEQ ID NO: 256416 - DNA, 120 bp, Artificial Sequence
  ENSG00000124479_13 (sequence is synthesized)
atgttgccaaaatggtggcctggcttgtcttctgaacgtttggttcaaatgtgttttggtcctggaggctcaaattttgagttattcccacgttttgaaataaaaagagtatattcaaaa

SEQ ID NO: 256417 - DNA, 120 bp, Artificial Sequence
  ENSG00000124479_14 (sequence is synthesized)
gggacagaagaacaaaagcatttggaagtaacaggacctctttctagctctcagaaaagtctgagaagaaaggagccctgcgttcccctaagggagaatgtacattcatgcattttggca

SEQ ID NO: 256418 - DNA, 120 bp, Artificial Sequence
  ENSG00000124486_0 (sequence is synthesized)
gcggccgccttagcgcccggtgcttgggtcggcgccgggagcgaggagcgagctacttcaaagccaccaggcctggagcggggacagaggcggcgactaggggaaggtgaagccgtcgct

SEQ ID NO: 256419 - DNA, 120 bp, Artificial Sequence
  ENSG00000124486_1 (sequence is synthesized)
gcaggaggaggagcaggaggaggtgacgcaggagaaacgcaccgcccggagcccgtctgagctcagcgagagccccagcctgaggggagaaggggaagagggccgtcgccggccaaggag

SEQ ID NO: 256420 - DNA, 120 bp, Artificial Sequence
  ENSG00000124486_2 (sequence is synthesized)
gaggaggaggcgggcgcggcgaggagcgagttccggcgccggtgtgcagccttttggttgagacgcccgcagccccgagcccggccgccgcagcctttcgatacactttgttgccggtca

SEQ ID NO: 256421 - DNA, 120 bp, Artificial Sequence
  ENSG00000124486_3 (sequence is synthesized)
cccccgggcctgggatgcacccagggtaggtctcgtcccgggaccgagccccaccgtcgcctggtgcctcccgcctccgtgtgccctggttgtgagaagacgtctgtgtcgtgcggttat

SEQ ID NO: 256422 - DNA, 120 bp, Artificial Sequence
  ENSG00000124486_4 (sequence is synthesized)
gcaatggtctctgcaagatggtttattcttgaattggacctttttaagactgacaaatgctggtacttcatcttctataagtggactataatttcttttctcaagacaactacataagca

SEQ ID NO: 256423 - DNA, 120 bp, Artificial Sequence
  ENSG00000124486_5 (sequence is synthesized)
gacaaaattgcaaagatctgccctgtgtcgagtatgacagccacgactcgtggctctccggtcggagggaatgacaaccagggccaggctcctgatggacagtctcagccccccctccaa

SEQ ID NO: 256424 - DNA, 120 bp, Artificial Sequence
  ENSG00000124486_6 (sequence is synthesized)
cagaatcagacttcatcgcctgattcttccaatgaaaattccccggcaactcccccagatgagcaaggtcaaggtgatgccccaccacagcttgaagatgaggaacctgcatttccacat

SEQ ID NO: 256425 - DNA, 120 bp, Artificial Sequence
  ENSG00000124486_7 (sequence is synthesized)
actgacttggccaagttggatgacatgatcaacaggcctcgatgggtggttccagttttgccgaaaggggaattagaagtgcttttagaagctgctattgatcttagtaaaaagggcctt

SEQ ID NO: 256426 - DNA, 120 bp, Artificial Sequence
  ENSG00000124486_8 (sequence is synthesized)
gatgttaaaagtgaagcatgtcagcgatttttccgtgatgggctaacaatatcattcactaaaattcttacagatgaagcagtgagtggctggaagtttgaaattcataggtgtattatt

SEQ ID NO: 256427 - DNA, 120 bp, Artificial Sequence
  ENSG00000124486_9 (sequence is synthesized)
aacaatactcatcgtctggtggagctatgtgtggccaagttgtcccaagactggtttccacttttagaacttcttgccatggccttaaatcctcattgcaaattccatatctacaatggt

SEQ ID NO: 256428 - DNA, 120 bp, Artificial Sequence
  ENSG00000124486_10 (sequence is synthesized)
acacgtccatgtgaatcagtttcctcaagtgttcagttgcctgaagatgaactctttgctcgttctccagatcctcgatcaccaaagggttggctagtggatcttctcaacaaatttggc

SEQ ID NO: 256429 - DNA, 120 bp, Artificial Sequence
  ENSG00000124486_11 (sequence is synthesized)
actttaaatgggttccagattttgcatgatcgttttattaatggatcagcattaaacgttcaaataattgcagcccttattaaaccatttgggcaatgctatgagtttctcactcttcat

SEQ ID NO: 256430 - DNA, 120 bp, Artificial Sequence
  ENSG00000124486_12 (sequence is synthesized)
acagtgaaaaagtactttcttccaataatagaaatggttccacagtttttagaaaacttaactgatgaagaactgaaaaaagaagcaaagaatgaagccaaaaatgatgctctttcaatg

SEQ ID NO: 256431 - DNA, 120 bp, Artificial Sequence
  ENSG00000124486_13 (sequence is synthesized)
attattaaatctttgaagaatttagcttcaagggttccaggacaagaagaaactgttaaaaacttagaaatatttaggttaaaaatgatacttagattattgcaaatttcttctttcaat

SEQ ID NO: 256432 - DNA, 120 bp, Artificial Sequence
  ENSG00000124486_14 (sequence is synthesized)
ggaaagatgaatgcactgaatgaagttaataaggtgatatctagtgtatcatactatactcatcgacatggtaatcctgaggaggaagagtggctcacagctgaacgaatggcagaatgg

SEQ ID NO: 256433 - DNA, 120 bp, Artificial Sequence
  ENSG00000124486_15 (sequence is synthesized)
atacagcagaacaatatcttatccatagtgttgcgagatagtcttcatcagccacagtatgtagaaaagttagagaagattcttcgttttgtcatcaaagaaaaagctctgaccttacag

SEQ ID NO: 256434 - DNA, 120 bp, Artificial Sequence
  ENSG00000124486_16 (sequence is synthesized)
gatcttgataatatctgggcagcacaggcagggaaacatgaagccattgtgaagaatgtacatgatctcctggcaaaattggcatgggatttttctcctgaacaacttgatcatcttttt

SEQ ID NO: 256435 - DNA, 120 bp, Artificial Sequence
  ENSG00000124486_17 (sequence is synthesized)
gattgttttaaggccagttggacaaatgcgagtaaaaagcaacgtgaaaagctacttgagctgatacgtcgtcttgcagaagatgataaagatggtgtgatggcacacaaagtgttgaac

SEQ ID NO: 256436 - DNA, 120 bp, Artificial Sequence
  ENSG00000124486_18 (sequence is synthesized)
cttctgtggaatctggctcacagtgatgatgtgcctgtagatatcatggacctggctctcagtgcccacataaaaatactagattacagttgctcccaggaccgtgatacacaaaagatc

SEQ ID NO: 256437 - DNA, 120 bp, Artificial Sequence
  ENSG00000124486_19 (sequence is synthesized)
caatggatagatcgctttatagaagaacttcgcacaaatgacaaatgggttattcccgcactgaaacaaattagagaaatttgtagtttgtttggtgaagcgcctcaaaatttgagtcaa

SEQ ID NO: 256438 - DNA, 120 bp, Artificial Sequence
  ENSG00000124486_20 (sequence is synthesized)
actcagcgaagtccccatgtgttttatcgccatgacttaatcaatcaacttcaacacaatcatgccctagttactttggtagcagaaaaccttgcaacttacatggaaagcatgagacta

SEQ ID NO: 256439 - DNA, 120 bp, Artificial Sequence
  ENSG00000124486_21 (sequence is synthesized)
tatgctagagaccatgaagattatgacccacaaactgtgaggctgggaagtagatatagtcatgttcaagaagttcaagaacggcttaacttccttagatttttattgaaggatggtcag

SEQ ID NO: 256440 - DNA, 120 bp, Artificial Sequence
  ENSG00000124486_22 (sequence is synthesized)
ctgtggctatgtgctcctcaggcaaaacaaatatggaaatgcttagctgagaatgcagtttacctttgtgatcgtgaagcctgttttaagtggtattccaagttgatgggggatgaacca

SEQ ID NO: 256441 - DNA, 120 bp, Artificial Sequence
  ENSG00000124486_23 (sequence is synthesized)
gacttagatcctgatattaataaggacttctttgaaagtaatgtgcttcagcttgatccttctctgttaactgaaaatggaatgaagtgttttgagcgattcttcaaagctgtgaattgt

SEQ ID NO: 256442 - DNA, 120 bp, Artificial Sequence
  ENSG00000124486_24 (sequence is synthesized)
cgagaaggaaaactagtagcaaaaaggagagcctatatgatggatgacttggagttaataggattagattacctttggagggtcgtgattcagagtaatgatgatattgccagcagagct

SEQ ID NO: 256443 - DNA, 120 bp, Artificial Sequence
  ENSG00000124486_25 (sequence is synthesized)
atagatctcctcaaagagatatacacgaaccttggtccaagactacaagtcaatcaggtggtgatccatgaagacttcattcagtcttgttttgatcgtctgaaggcttcctatgacaca

SEQ ID NO: 256444 - DNA, 120 bp, Artificial Sequence
  ENSG00000124486_26 (sequence is synthesized)
ttgtgtgttttggatggtgacaaagacagtgttaattgtgcaagacaggaagctgttcgaatggttcgagtattaactgttttaagggaatatataaatgaatgtgacagtgattatcat

SEQ ID NO: 256445 - DNA, 120 bp, Artificial Sequence
  ENSG00000124486_27 (sequence is synthesized)
gaggaaagaacaattctccctatgtcgagagcattccgcggtaaacacctctcttttgtagttcgatttccaaaccagggcagacaggttgatgacttggaggtatggtctcatacaaat

SEQ ID NO: 256446 - DNA, 120 bp, Artificial Sequence
  ENSG00000124486_28 (sequence is synthesized)
gatacaattggttcagtacgacgatgtattctcaatcgtattaaagccaacgtagcccatacaaaaattgagctctttgtgggcggtgagctgatagatcctgcagatgatagaaagttg

SEQ ID NO: 256447 - DNA, 120 bp, Artificial Sequence
  ENSG00000124486_29 (sequence is synthesized)
attggacaattaaacttaaaagataaatcgcttattacagccaaacttacacagataagttccaatatgccttcaagccctgatagctcttctgattcctccactggatctcctggaaac

SEQ ID NO: 256448 - DNA, 120 bp, Artificial Sequence
  ENSG00000124486_30 (sequence is synthesized)
catggtaatcattacagtgatggtcccaatccagaagtggaaagctgtttgcctggagtgataatgtcactgcatcccagatacatctcttttctttggcaagttgcagacttaggtagc

SEQ ID NO: 256449 - DNA, 120 bp, Artificial Sequence
  ENSG00000124486_31 (sequence is synthesized)
agcctaaatatgccaccccttagagatggagcaagagtacttatgaaacttatgccgccagatagcacaacgatagaaaaattaagagctatttgtttagaccatgccaaacttggagaa

SEQ ID NO: 256450 - DNA, 120 bp, Artificial Sequence
  ENSG00000124486_32 (sequence is synthesized)
agcagccttagtccatctcttgactcacttttctttggtccttcagcctcacaagtgctatatctaacagaggtagtctatgccttgttaatgcctgctggtgcacctctggctgatgat

SEQ ID NO: 256451 - DNA, 120 bp, Artificial Sequence
  ENSG00000124486_33 (sequence is synthesized)
tcctctgattttcagtttcacttcttgaaaagtggtggcctaccccttgtactgagtatgctaaccagaaataacttcctaccgaatgcagatatggaaactcgaaggggtgcctacctc

SEQ ID NO: 256452 - DNA, 120 bp, Artificial Sequence
  ENSG00000124486_34 (sequence is synthesized)
aatgctcttaaaatagccaagcttttgctaactgccattggctatggtcatgttcgagctgtggcagaagcttgtcagccaggtgtagaaggtgtgaatcccatgacacagatcaaccaa

SEQ ID NO: 256453 - DNA, 120 bp, Artificial Sequence
  ENSG00000124486_35 (sequence is synthesized)
gttacccatgatcaagcagtggtgctacaaagtgcccttcagagcattcctaatccatcatccgagtgcatgcttagaaatgtgtcagttcgtcttgctcagcagatatctgatgaggct

SEQ ID NO: 256454 - DNA, 120 bp, Artificial Sequence
  ENSG00000124486_36 (sequence is synthesized)
tcaagatatatgcctgatatttgtgtaattagagctatacaaaaaattatctgggcatcaggatgtgggtcgttacagctagtatttagcccaaatgaagaaatcactaaaatttatgag

SEQ ID NO: 256455 - DNA, 120 bp, Artificial Sequence
  ENSG00000124486_37 (sequence is synthesized)
aagaccaatgcaggcaatgagccagacttggaagacgaacaggtttgctgtgaagcattggaagtgatgaccttatgttttgccttgattccaacagccttagatgctcttagtaaagaa

SEQ ID NO: 256456 - DNA, 120 bp, Artificial Sequence
  ENSG00000124486_38 (sequence is synthesized)
aaggcttggcagacattcatcattgacttactattgcactgtcacagcaaaactgttcgtcaggtggcacaggagcagttctttttaatgtgcaccagatgttgcatgggacaccggcct

SEQ ID NO: 256457 - DNA, 120 bp, Artificial Sequence
  ENSG00000124486_39 (sequence is synthesized)
ctacttttcttcattactctactctttactgttttggggagcacagcaagagagagagctaaacactcaggcgactactttactcttttaagacaccttcttaattacgcttacaatagt

SEQ ID NO: 256458 - DNA, 120 bp, Artificial Sequence
  ENSG00000124486_40 (sequence is synthesized)
aatattaatgtacccaatgctgaagttcttctcaataatgaaattgattggcttaaaagaattagggatgatgttaaaagaacaggagaaacgggtattgaagagacgatcttagagggc

SEQ ID NO: 256459 - DNA, 120 bp, Artificial Sequence
  ENSG00000124486_41 (sequence is synthesized)
caccttggagtgacaaaggagttactggcctttcaaacttctgagaaaaaatttcatattggttgtgaaaaaggaggtgctaatctcattaaagaattaattgatgatttcatatttcct

SEQ ID NO: 256460 - DNA, 120 bp, Artificial Sequence
  ENSG00000124486_42 (sequence is synthesized)
gcatccaatgtttacctacagtatatgagaaatggagagcttccagctgaacaggctattccggtctgtggttcaccacctacaattaatgctggttttgaattacttgtagcattagct

SEQ ID NO: 256461 - DNA, 120 bp, Artificial Sequence
  ENSG00000124486_43 (sequence is synthesized)
gttggctgtgtgaggaatctcaaacaaatagtagattctttgactgaaatgtattacattggcacagcaataactacttgtgaagcacttactgagtgggaatatctgccacctgttgga

SEQ ID NO: 256462 - DNA, 120 bp, Artificial Sequence
  ENSG00000124486_44 (sequence is synthesized)
ccccgcccacccaaaggattcgtggggctgaaaaatgccggtgctacttgttacatgaattctgtgattcagcaactctacatgattccttccattaggaacggtattcttgccattgaa

SEQ ID NO: 256463 - DNA, 120 bp, Artificial Sequence
  ENSG00000124486_45 (sequence is synthesized)
ggcacaggtagtgatgtagatgatgatatgtctggggatgagaagcaggacaatgagagcaatgttgatcccagggatgatgtatttggatatcctcaacaatttgaagataaaccagca

SEQ ID NO: 256464 - DNA, 120 bp, Artificial Sequence
  ENSG00000124486_46 (sequence is synthesized)
ttaagtaaaactgaagatagaaaagagtacaacattggtgtcctaagacaccttcaggtcatctttggtcatttagctgcttctcgactgcaatactatgtgcccagaggattttggaaa

SEQ ID NO: 256465 - DNA, 120 bp, Artificial Sequence
  ENSG00000124486_47 (sequence is synthesized)
cagttcaggctttggggtgagcctgttaatctgcgtgaacaacacgatgctttagaattttttaattcattggtggatagtttagatgaagctttaaaagctttaggacatccagctatg

SEQ ID NO: 256466 - DNA, 120 bp, Artificial Sequence
  ENSG00000124486_48 (sequence is synthesized)
ctaagtaaagtcttaggaggttcctttgctgatcagaagatctgccaaggctgcccacataggtacgaatgtgaagaatcttttacgaccctaaacgtagacattagaaatcaccaaaat

SEQ ID NO: 256467 - DNA, 120 bp, Artificial Sequence
  ENSG00000124486_49 (sequence is synthesized)
cttcttgattctttggaacagtatgtcaaaggagatttactagaaggtgcaaatgcatatcattgtgaaaaatgcaataaaaaggttgataccgtaaagcgcttgctgattaaaaaatta

SEQ ID NO: 256468 - DNA, 120 bp, Artificial Sequence
  ENSG00000124486_50 (sequence is synthesized)
cctcctgttcttgctatacaactaaagcgatttgactatgactgggaaagagaatgtgcaatcaagttcaatgattattttgaatttcctcgagagctggacatggaaccttacacagtt

SEQ ID NO: 256469 - DNA, 120 bp, Artificial Sequence
  ENSG00000124486_51 (sequence is synthesized)
gagtcagttgatacaacagagtgagcagtctgaaagtgagacagcaggaagcacaaaatacagacttgtgggtgtgctcgtacacagtggtcaagcgagtggggggcattattattctta

SEQ ID NO: 256470 - DNA, 120 bp, Artificial Sequence
  ENSG00000124486_52 (sequence is synthesized)
catcatccaaaggaatggtggagatggtgagagaaatcgctggtataaatttgatgatggtgatgtaacagaatgtaaaatggatgatgacgaagaaatgaaaaaccagtgttttggtgg

SEQ ID NO: 256471 - DNA, 120 bp, Artificial Sequence
  ENSG00000124486_53 (sequence is synthesized)
agagtacatgggagaagtgtttgatcacatgatgaagcgtatgtcatacaggcgccagaaaaggtggtggaatgcttatatacttttttatgaacgaatggacacaatagaccaagatga

SEQ ID NO: 256472 - DNA, 120 bp, Artificial Sequence
  ENSG00000124486_54 (sequence is synthesized)
tgagttgataagatatatatcagagcttgctatcaccaccagacctcatcagattattatgccatcagccattgagagaagtgtacggaaacagaacgtacaattcatgcataaccgaat

SEQ ID NO: 256473 - DNA, 120 bp, Artificial Sequence
  ENSG00000124486_55 (sequence is synthesized)
gcagtacagtatggagtattttcagtttatgaaaaaactgcttacatgtaatggcgtttacttaaaccctcctcccgggcaagatcacctgttgcctgaagcagaagaaatcactatgat

SEQ ID NO: 256474 - DNA, 120 bp, Artificial Sequence
  ENSG00000124486_56 (sequence is synthesized)
cagtattcaacttgctgctaggttcctctttactacaggatttcacacaaagaaagtagtccgtggctctgccagtgattggtatgatgcattgtgtattctccttcgtcacagcaagaa

SEQ ID NO: 256475 - DNA, 120 bp, Artificial Sequence
  ENSG00000124486_57 (sequence is synthesized)
tgtacgtttttggtttgctcataacgtcctttttaatgtttcaaatcgcttctccgaataccttctggagtgccctagtgcagaagtgaggggtgcgtttgcaaaacttatagtctttat

SEQ ID NO: 256476 - DNA, 120 bp, Artificial Sequence
  ENSG00000124486_58 (sequence is synthesized)
tgcacatttttccttgcaagatgggccatgtccttcaccttttgcctctcctggaccttctagtcaggcttatgacaacttaagcttgagtgatcacttactaagagcagtactaaatct

SEQ ID NO: 256477 - DNA, 120 bp, Artificial Sequence
  ENSG00000124486_59 (sequence is synthesized)
cttgagaagggaagtttcagagcatgggcgtcatttacagcagtatttcaacctgtttgtaatgtatgccaatttaggtgtggcagagaagacacagcttctgaaattgagtgtacctgc

SEQ ID NO: 256478 - DNA, 120 bp, Artificial Sequence
  ENSG00000124486_60 (sequence is synthesized)
tacttttatgcttgtgtctttagatgaaggtccaggtcctccaatcaaataccagtatgctgaattaggcaaattatactcagtagtgtcacagctgatccgctgttgcaatgtctcttc

SEQ ID NO: 256479 - DNA, 120 bp, Artificial Sequence
  ENSG00000124486_61 (sequence is synthesized)
aagaatgcagtcttcaatcaatggtaatcctcctcttcccaatccttttggtgatcctaatttatcacaacctataatgccaattcagcagaatgtggcagacattttatttgtgagaac

SEQ ID NO: 256480 - DNA, 120 bp, Artificial Sequence
  ENSG00000124486_62 (sequence is synthesized)
aagttatgtgaagaaaatcattgaagactgcagtaattcagaggaaaccgtcaaattgcttcgtttttgctgctgggagaatcctcagttctcatctactgtcctcagtgaacttctctg

SEQ ID NO: 256481 - DNA, 120 bp, Artificial Sequence
  ENSG00000124486_63 (sequence is synthesized)
gcaggttgcatattcctatacctatgaactgcggccctatttggatctgcttttgcaaatcttactgattgaggactcctggcaaactcacagaattcataatgcactgaaaggaattcc

SEQ ID NO: 256482 - DNA, 120 bp, Artificial Sequence
  ENSG00000124486_64 (sequence is synthesized)
agatgaccgagatgggctgtttgacacaatccagcgctctaagaatcactatcaaaaaagagcataccagtgtataaaatgtatggtagctctatttagtaactgtcctgttgcttacca

SEQ ID NO: 256483 - DNA, 120 bp, Artificial Sequence
  ENSG00000124486_65 (sequence is synthesized)
aatcctgcagggcaatggagatcttaaaagaaagtggacctgggcagtggaatggcttggagatgaacttgaaagaagaccatatactggcaatcctcagtacacttacaacaattggtc

SEQ ID NO: 256484 - DNA, 120 bp, Artificial Sequence
  ENSG00000124486_66 (sequence is synthesized)
tcccccagtgcaaagcaatgaaacgtccaatggttatttcttggagagatcacatagtgctaggatgacacttgcaaaagcttgtgaactctgtccagaggaggtaaaaaaagccaccag

SEQ ID NO: 256485 - DNA, 120 bp, Artificial Sequence
  ENSG00000124486_67 (sequence is synthesized)
tgtgcagcagatagaaatggaagagagcaaagagccagatgaccaagatgctccagatgaacatgagtcgcctccacctgaagatgccccattgtacccccattcacctggatctcagta

SEQ ID NO: 256486 - DNA, 120 bp, Artificial Sequence
  ENSG00000124486_68 (sequence is synthesized)
tcaacagaataaccatgtgcatggacagccatatacaggcccagcagcacatcacatgaacaaccctcagagaactggccaacgagcacaagaaaattatgaaggcagtgaagaagtatc

SEQ ID NO: 256487 - DNA, 120 bp, Artificial Sequence
  ENSG00000124486_69 (sequence is synthesized)
cccacctcaaaccaaggatcaatgaaatgcacataattaactggttccatcaagactgtgcacccaggccttacagtccaacctttttctgtgtctggctaatatttaaaactagaaaaa

SEQ ID NO: 256488 - DNA, 120 bp, Artificial Sequence
  ENSG00000124486_70 (sequence is synthesized)
ctattcctaatcaacatggagtggagagtttattcactgtcttatctgcagaaatttgctgtcaatatataacccgcctgcagtggaaagtgtatagtgttttgtaataaatggcctgat

SEQ ID NO: 256489 - DNA, 120 bp, Artificial Sequence
  ENSG00000124486_71 (sequence is synthesized)
gctaatgtgtaaatggcaaaggtgtatatagtatattaatgttgactgttaattcttaagcaagaaacttttttcttgatgagactcacagatctacacaaactacaaaagttaattttc

SEQ ID NO: 256490 - DNA, 120 bp, Artificial Sequence
  ENSG00000124486_72 (sequence is synthesized)
ttgttacacccactgcactctgcaaccagtgttgcctgcctcatggcagttggatcagctcctttacaaaaaagaaaaaaaaaaaaccaacagcaacaaaacagagcccatccatgtcag

SEQ ID NO: 256491 - DNA, 120 bp, Artificial Sequence
  ENSG00000124486_73 (sequence is synthesized)
ccacaccaatagtttcatgttaattctttgccactggagtcaattttgctatgagcaatgtaaggctggtaacctttaaattatttggttgatgtggaaaattggtgatgtaacactgtt

SEQ ID NO: 256492 - DNA, 120 bp, Artificial Sequence
  ENSG00000124486_74 (sequence is synthesized)
tctagatttttttcattgcctttttattctgatattaggttaatcactttgaagctatagttatgctgtaacatttagcatggcttcacaccaagttagtgtagccaatgaggaaaaagt

SEQ ID NO: 256493 - DNA, 120 bp, Artificial Sequence
  ENSG00000124486_75 (sequence is synthesized)
taccataatgacagcagttgtccgagaagtgacagctgtattactcagagcttttacttcttacacctagaatattaaaatataaaacaaggggagaaatgtgacagtctattttcagtt

SEQ ID NO: 256494 - DNA, 120 bp, Artificial Sequence
  ENSG00000124486_76 (sequence is synthesized)
gcacatatgttccttatatataatgtttgacagttcaatctctgggtggaataaagaacacttacgtatcagtaatgggaatttttaaagatttaaaacaaatatgcaaaaatttgctat

SEQ ID NO: 256495 - DNA, 120 bp, Artificial Sequence
  ENSG00000124486_77 (sequence is synthesized)
gccaagatgctggagcataatataagactgtatttggtgtgcttgttttgtttctttggtagagtttattaggtgaatcttctaaaactttccttctgttggatcccagtgacgtggaag

SEQ ID NO: 256496 - DNA, 120 bp, Artificial Sequence
  ENSG00000124486_78 (sequence is synthesized)
tcatcagaaccccacggtacttggagtacctctctgcaccaagatagctggctgattttctgctcagtcacaattttacttgaaagcaagaattgtcctagctccttttccattattcca

SEQ ID NO: 256497 - DNA, 120 bp, Artificial Sequence
  ENSG00000124486_79 (sequence is synthesized)
aaacgtttaacgttcaaagcagggtctcattaaaaaagaaactactggttgatataattgagatattacaatttcagaataaacatttgattaaaaataaggaaatcctcagttcatact

SEQ ID NO: 256498 - DNA, 120 bp, Artificial Sequence
  ENSG00000124486_80 (sequence is synthesized)
gtatttaaaagagaattggtaacttgaatgtgtgtaattttttggaacctgtctaaaaaccaaatacccctgcaaacagatacagcccaccctattctatttaaatattttgctgtttta

SEQ ID NO: 256499 - DNA, 120 bp, Artificial Sequence
  ENSG00000124486_81 (sequence is synthesized)
ttttatagaaattattttgctgaattcacaaatagaatttgatttaagaagaactttttgtcctgtggtgtgtttttggttttttttttggttactttttttgtcctttttttttttttt

SEQ ID NO: 256500 - DNA, 120 bp, Artificial Sequence
  ENSG00000124486_82 (sequence is synthesized)
taaaagaggactgcatattaaaattcattctgtgcatagcatgcctaggcatgacactgattcaggatttcagtcacatcaagtttttgtgcacagaaagatttgacctttggccctcta

SEQ ID NO: 256501 - DNA, 120 bp, Artificial Sequence
  ENSG00000124486_83 (sequence is synthesized)
ctgaagattttgagaaatcaggatgttgacactgtaaaagtttcctaacataatcttgtactttttgtatgttttttatatacatgtatatttaatgagcacaagcttggttgtattttt

SEQ ID NO: 256502 - DNA, 120 bp, Artificial Sequence
  ENSG00000124486_84 (sequence is synthesized)
tacaattcagttaatagggaaatgttttgtcaaaaggctacacttggaactgaacaaagcagaaacaaaattgagcattgcattattttgtgattaaaaggggcaggtatttaagataaa

SEQ ID NO: 256503 - DNA, 120 bp, Artificial Sequence
  ENSG00000124486_85 (sequence is synthesized)
gctttgggtatcttatttgtagtactgtatagtcaacctgtgcttctaggtgttcctgtaggacattttgacaccgatactttgagtgaaagtcacacacggtgtttgcaattccaactg

SEQ ID NO: 256504 - DNA, 79 bp, Artificial Sequence
  ENSG00000124486_86 (sequence is synthesized)
cagttgatagtttttttaatttaaaagttcctcaattccaagctctttaaacgagtgaaataggttaactttatttgga

SEQ ID NO: 256505 - DNA, 120 bp, Artificial Sequence
  ENSG00000124486_87 (sequence is synthesized)
aagctctttaaacgagtgaaataggttaactttatttggatgagttaggtgtaccatctcaccatctgagaggagatttatatatttcctgctgctccttaacaaaatatgtaatgtact

SEQ ID NO: 256506 - DNA, 120 bp, Artificial Sequence
  ENSG00000124486_88 (sequence is synthesized)
taaaaactttaacgacttcctagttgagagaaaacttgacatataaaaggctgtgaatttttctgcttggaggaagagcccaaccttggttgctttgaagttacaagcccccttgtgcca

SEQ ID NO: 256507 - DNA, 120 bp, Artificial Sequence
  ENSG00000124486_89 (sequence is synthesized)
ggtgaggggcttgtgagtcatttttgtctccatttgaggaagagtggtattcgttgtgactaggagcaagggaaagtggagttatttttgtttgtgcaaattattttctatatttaactc

SEQ ID NO: 256508 - DNA, 120 bp, Artificial Sequence
  ENSG00000124486_90 (sequence is synthesized)
aagcattaatgtataaccagaaatttaaagatgcatgttgttgcaagagcaacataatggtgattttgaggtctttttctgaacacaagtggcacattttaaatttcaagtcttcaaagt

SEQ ID NO: 256509 - DNA, 120 bp, Artificial Sequence
  ENSG00000124486_91 (sequence is synthesized)
gcctaaggattatttagttctccctcaactgattttttgagccatatatttcctattttaaatgtttgcggaatcgccagtcttcctttgaaagaaacagcccccagaattctaaatgac

SEQ ID NO: 256510 - DNA, 120 bp, Artificial Sequence
  ENSG00000124486_92 (sequence is synthesized)
acgattatagaagacagtagaatgtgttaccataaagactgaagatattttagttgtaaaaccatgtgaacaagggcttttgccctattgtatctaagtatttcagtgcacaacttgtta

SEQ ID NO: 256511 - DNA, 120 bp, Artificial Sequence
  ENSG00000124486_93 (sequence is synthesized)
aaccatgttgctgctgtttctaagccctccaccaactgaactttcatgtttagcattgtagaggcagaaataacatactaggttttttttttctttcattgatttttctcctggtgataa

SEQ ID NO: 256512 - DNA, 120 bp, Artificial Sequence
  ENSG00000124486_94 (sequence is synthesized)
tttcccagccttgtgtcttttagctgttgtgtatacaaatttagaattaaaatgttttctatttttttcatgattaacttagtgaataacttaaatccttaatcctcgtagtggttagaa

SEQ ID NO: 256513 - DNA, 120 bp, Artificial Sequence
  ENSG00000124486_95 (sequence is synthesized)
agatgaggagacttttttgacttacatttgtaaatgaaaacaagtctgtgaatattcagatgactacttcgaagtaattcagtttttttattagtatttttccagcttatgttttcccat

SEQ ID NO: 256514 - DNA, 120 bp, Artificial Sequence
  ENSG00000124486_96 (sequence is synthesized)
gagctattttactttgctgaattttgtgggtaatttggtggatatatcctgccttatttaggattatagctggataagaaaattgccttttcattgtaagtgcccagttttggtctctag

SEQ ID NO: 256515 - DNA, 120 bp, Artificial Sequence
  ENSG00000124486_97 (sequence is synthesized)
tttgaaggtactacatactgccgataaaggaaaacactcccctacaccccagtttttgtgttaccaagaaaaaaaaaacagtattggtttcatagtaggactcaaccagaattggtccta

SEQ ID NO: 256516 - DNA, 120 bp, Artificial Sequence
  ENSG00000124486_98 (sequence is synthesized)
catatatgtgagtgttcagtttttgcaaataaggtttttgagtgtgataaaacactacagaagtgctaagtgtattgagaatttgctgctgattgtatttataacaattacttgacgttt

SEQ ID NO: 256517 - DNA, 120 bp, Artificial Sequence
  ENSG00000124486_99 (sequence is synthesized)
gcagaaatttagcactttccctccaaatttataggtgtaagagaagcgggggcaaggtgcaccacattttaaaactgcaaatgtgtgaaaatttatttagagattcagattcctaaaagg

SEQ ID NO: 256518 - DNA, 120 bp, Artificial Sequence
  ENSG00000124486_100 (sequence is synthesized)
aaatttcaccacccaagtcatgcacttcttagccttttacaagccaacagactgacatgaagattgttcacagttcctaagatttagcacatatacaaaaataaaactttataaattcaa

SEQ ID NO: 256519 - DNA, 120 bp, Artificial Sequence
  ENSG00000124486_101 (sequence is synthesized)
gtttgccggatccgccatattgacgaggacgggcatccgcggctgcggacgctagtctccgccgccgccggagccgcaacctctccgcacccggccccgtcagggcctctgtcgcgccta

SEQ ID NO: 256520 - DNA, 120 bp, Artificial Sequence
  ENSG00000124486_102 (sequence is synthesized)
ggcacgtgcctgtagttgggctgaggcaggagagaggcgtgaacctgggaggcaggacttgaagtaagccgagatggcgccactgcactccagcccaggccgtctcaaaaaaaataaata

SEQ ID NO: 256521 - DNA, 120 bp, Artificial Sequence
  ENSG00000124486_103 (sequence is synthesized)
aataaaaaataaaggtttaataatagtacctattgtctaatgttagattaaatgactaaaagacattattgagtggcacatagtaggcactcagtatatattagctattagattttagat

SEQ ID NO: 256522 - DNA, 120 bp, Artificial Sequence
  ENSG00000124486_104 (sequence is synthesized)
ttactatgctaatgctacactatattatctatctttcttacacatggtcagggttatttggttatgataactaatatgtgaaatggtggggataaacactaaataactaaaaatttataa

SEQ ID NO: 256523 - DNA, 120 bp, Artificial Sequence
  ENSG00000124486_105 (sequence is synthesized)
attgaaaagtgctttggaaatgagcataataggaatacaaatcatttgttcaataactgcttggcatttgtctcaacgtattttattatactttagctcattggtgacattttttggttt

SEQ ID NO: 256524 - DNA, 120 bp, Artificial Sequence
  ENSG00000124486_106 (sequence is synthesized)
ctcttatttcctgtcaactaatttgaatttcttcttgagtgtctcacttggttatcaagatattaaattatagggttaaataatagtggtcaaagcgtattttatttttacaaaaatgta

SEQ ID NO: 256525 - DNA, 120 bp, Artificial Sequence
  ENSG00000124486_107 (sequence is synthesized)
cctttcattcttaaattattcagagactttcattttgcatttattaccctttcttttggtctgtgcttctcacttaattttacttgattatcaaagtcaacttaccattaaatcattgaa

SEQ ID NO: 256526 - DNA, 120 bp, Artificial Sequence
  ENSG00000124486_108 (sequence is synthesized)
atatttattgtctctatggcatattggtattgaggaaaattttattatttaagagtgttttgcttaacctaaatgtttggttttagtctctgcaaatgccaatattaattgtcaaagcat

SEQ ID NO: 256527 - DNA, 120 bp, Artificial Sequence
  ENSG00000124486_109 (sequence is synthesized)
gatttttttctaatcttagaatttagttttacctgggaggtatatagattagcctatttctaaaaatctagtttgcaagatttaaatcatataggacattagcctcctatcttagattcc

SEQ ID NO: 256528 - DNA, 120 bp, Artificial Sequence
  ENSG00000124486_110 (sequence is synthesized)
tagatgccaggttttttttaaagccaaacagaatttgatatgaaatttgtaagacagggtcattgtaagaacttttgcagtttacactgataataaagatcagttataaagctcatgttt

SEQ ID NO: 256529 - DNA, 120 bp, Artificial Sequence
  ENSG00000124486_111 (sequence is synthesized)
aattctgtggaaggccaaaaagatgcataaggttattgtagtagagcatttggtatatagaggaacatttccagcctgttccaagaaagaggtgttagaagaactgttcgtcaggtggca

SEQ ID NO: 256530 - DNA, 120 bp, Artificial Sequence
  ENSG00000124490_0 (sequence is synthesized)
gcagctcctcaacgccgcaacgcgccggcccaactgcaggaaggtctgtgctctggagccagggtaaatggttataaaattatacaccatggccctcctaaagacactctaggaaaacca

SEQ ID NO: 256531 - DNA, 120 bp, Artificial Sequence
  ENSG00000124490_1 (sequence is synthesized)
tgtcatcctgatcttaaaacacctgcaagaaagagcacagtacttcaccattaataaagtagatatttcatcctgctcagaaaaccaacatttccagcaatggctttactaccggtgttg

SEQ ID NO: 256532 - DNA, 120 bp, Artificial Sequence
  ENSG00000124490_2 (sequence is synthesized)
tttctggttactgtgctgcttccatctttacctgcagaaggaaaggatcccgcttttactgctttgttaaccacccagttgcaagtgcaaagggagattgtaaataaacacaatgaacta

SEQ ID NO: 256533 - DNA, 120 bp, Artificial Sequence
  ENSG00000124490_3 (sequence is synthesized)
aggaaagcagtctctccacctgccagtaacatgctaaagatggaatggagcagagaggtaacaacgaatgcccaaaggtgggcaaacaagtgcactttacaacatagtgatccagaggac

SEQ ID NO: 256534 - DNA, 120 bp, Artificial Sequence
  ENSG00000124490_4 (sequence is synthesized)
cgcaaaaccagtacaagatgtggtgagaatctctatatgtcaagtgaccctacttcctggtcttctgcaatccaaagctggtatgacgagatcctagattttgtctatggtgtaggacca

SEQ ID NO: 256535 - DNA, 120 bp, Artificial Sequence
  ENSG00000124490_5 (sequence is synthesized)
tactcgacttaccaggtaggctgtggaattgcctactgtcccaatcaagatagtctaaaatactactatgtttgccaatattgtcctgctggtaataatatgaatagaaagaataccccg

SEQ ID NO: 256536 - DNA, 120 bp, Artificial Sequence
  ENSG00000124490_6 (sequence is synthesized)
taccaacaaggaacaccttgtgccggttgccctgatgactgtgacaaaggactatgcaccaatagttgccagtatcaagatctcctaagtaactgtgattccttgaagaatacagctggc

SEQ ID NO: 256537 - DNA, 120 bp, Artificial Sequence
  ENSG00000124490_7 (sequence is synthesized)
tgtgaacatgagttactcaaggaaaagtgcaaggctacttgcctatgtgagaacaaaatttactgatttacctagtgagcattgtgcaagactgcatggataagggctgcatcatttaat

SEQ ID NO: 256538 - DNA, 120 bp, Artificial Sequence
  ENSG00000124490_8 (sequence is synthesized)
tgcgacataccagtggaaattgtatgtatgttagtgacaaatttgatttcaaagagcaatgcatcttctcccccagatcatcacagaaatcactttcaggcaatgatttacaaaagtagc

SEQ ID NO: 256539 - DNA, 120 bp, Artificial Sequence
  ENSG00000124490_9 (sequence is synthesized)
atagtagatgatgacaactgtgaactctgacataaatttagtgctttataacgaactgaatcaggttgaggattttgaaaactgtataaccataggatttaggtcactaggactttggat

SEQ ID NO: 256540 - DNA, 120 bp, Artificial Sequence
  ENSG00000124490_10 (sequence is synthesized)
caaaatggtgcattacgtatttcctgaaacatgctaaagaagaagactgtaacatcattgccattcctactacctgagtttttacttgcataaacaataaattcaaagctttacatctgc

SEQ ID NO: 256541 - DNA, 120 bp, Artificial Sequence
  ENSG00000124490_11 (sequence is synthesized)
acacgtggcgcctggcaagtgaacaatcgcggtgagaggggcgcgccgcagctcctcaacgccgcaacgcgccggcccaactgcaggaagggttataaaattatacaccatggccctcct

SEQ ID NO: 256542 - DNA, 120 bp, Artificial Sequence
  ENSG00000124491_0 (sequence is synthesized)
aagggcgcacctgccgggataacaggccagatgaagtaaatagaaaatcctctgagctcccctactggctccagctgtggagaagggggaggagaaaaccctgtgggacaggggaggagg

SEQ ID NO: 256543 - DNA, 120 bp, Artificial Sequence
  ENSG00000124491_1 (sequence is synthesized)
gtgagggctcctcttaggaagttatttaagagccaactgtcttgtctttcccgagtccgtttgaggaagtccccgaggcgcacagagcaagcccacgcgagggcacctctggaggggagc

SEQ ID NO: 256544 - DNA, 120 bp, Artificial Sequence
  ENSG00000124491_2 (sequence is synthesized)
gcctgcaggaccttgtaaagtcaaaaatgtcagaaacttccaggaccgcctttggaggcagaagagcagttccacccaataactctaatgcagcggaagatgacctgcccacagtggagc

SEQ ID NO: 256545 - DNA, 120 bp, Artificial Sequence
  ENSG00000124491_3 (sequence is synthesized)
ttcagggcgtggtgccccggggcgtcaacctgcaagagtttcttaatgtcacgagcgttcacctgttcaaggagagatgggacactaacaaggtggaccaccacactgacaagtatgaaa

SEQ ID NO: 256546 - DNA, 120 bp, Artificial Sequence
  ENSG00000124491_4 (sequence is synthesized)
acaacaagctgattgtccgcagagggcagtctttctatgtgcagattgacttcagtcgtccatatgaccccagaagggatctcttcagggtggaatacgtcattggtcgctacccacagg

SEQ ID NO: 256547 - DNA, 120 bp, Artificial Sequence
  ENSG00000124491_5 (sequence is synthesized)
agaacaagggaacctacatcccagtgcctatagtctcagagttacaaagtggaaagtggggggccaagattgtcatgagagaggacaggtctgtgcggctgtccatccagtcttccccca

SEQ ID NO: 256548 - DNA, 120 bp, Artificial Sequence
  ENSG00000124491_6 (sequence is synthesized)
aatgtattgtggggaaattccgcatgtatgttgctgtctggactccctatggcgtacttcgaaccagtcgaaacccagaaacagacacgtacattctcttcaatccttggtgtgaagatg

SEQ ID NO: 256549 - DNA, 120 bp, Artificial Sequence
  ENSG00000124491_7 (sequence is synthesized)
atgctgtgtatctggacaatgagaaagaaagagaagagtatgtcctgaatgacatcggggtaattttttatggagaggtcaatgacatcaagaccagaagctggagctatggtcagtttg

SEQ ID NO: 256550 - DNA, 120 bp, Artificial Sequence
  ENSG00000124491_8 (sequence is synthesized)
aagatggcatcctggacacttgcctgtatgtgatggacagagcacaaatggacctctctggaagagggaatcccatcaaagtcagccgtgtggggtctgcaatggtgaatgccaaagatg

SEQ ID NO: 256551 - DNA, 120 bp, Artificial Sequence
  ENSG00000124491_9 (sequence is synthesized)
acgaaggtgtcctcgttggatcctgggacaatatctatgcctatggcgtccccccatcggcctggactggaagcgttgacattctattggaataccggagctctgagaatccagtccggt

SEQ ID NO: 256552 - DNA, 120 bp, Artificial Sequence
  ENSG00000124491_10 (sequence is synthesized)
atggccaatgctgggtttttgctggtgtctttaacacatttttacgatgccttggaataccagcaagaattgttaccaattatttctctgcccatgataatgatgccaatttgcaaatgg

SEQ ID NO: 256553 - DNA, 120 bp, Artificial Sequence
  ENSG00000124491_11 (sequence is synthesized)
acatcttcctggaagaagatgggaacgtgaattccaaactcaccaaggattcagtgtggaactaccactgctggaatgaagcatggatgacaaggcctgaccttcctgttggatttggag

SEQ ID NO: 256554 - DNA, 120 bp, Artificial Sequence
  ENSG00000124491_12 (sequence is synthesized)
gctggcaagctgtggacagcaccccccaggaaaatagcgatggcatgtatcggtgtggccccgcctcggttcaagccatcaagcacggccatgtctgcttccaatttgatgcaccttttg

SEQ ID NO: 256555 - DNA, 120 bp, Artificial Sequence
  ENSG00000124491_13 (sequence is synthesized)
tttttgcagaggtcaacagcgacctcatttacattacagctaagaaagatggcactcatgtggtggaaaatgtggatgccacccacattgggaaattaattgtgaccaaacaaattggag

SEQ ID NO: 256556 - DNA, 120 bp, Artificial Sequence
  ENSG00000124491_14 (sequence is synthesized)
gagatggcatgatggatattactgatacttacaaattccaagaaggtcaagaagaagagagattggccctagaaactgccctgatgtacggagctaaaaagcccctcaacacagaaggtg

SEQ ID NO: 256557 - DNA, 120 bp, Artificial Sequence
  ENSG00000124491_15 (sequence is synthesized)
tcatgaaatcaaggtccaacgttgacatggactttgaagtggaaaatgctgtgctgggaaaagacttcaagctctccatcaccttccggaacaacagccacaaccgttacaccatcacag

SEQ ID NO: 256558 - DNA, 120 bp, Artificial Sequence
  ENSG00000124491_16 (sequence is synthesized)
cgaaggcagaattcaagaaggagacgttcgacgtgacgctggagcccttgtccttcaagaaagaggcggtgctgatccaagccggcgagtacatgggtcagctgctggaacaagcgtccc

SEQ ID NO: 256559 - DNA, 120 bp, Artificial Sequence
  ENSG00000124491_17 (sequence is synthesized)
tgcacttctttgtcacagctcgcatcaatgagaccagggatgttctggccaagcaaaagtccaccgtgctaaccatccctgagatcatcatcaaggtccgtggcactcaggtagttggtt

SEQ ID NO: 256560 - DNA, 120 bp, Artificial Sequence
  ENSG00000124491_18 (sequence is synthesized)
ctgacatgactgtgacagttgagtttaccaatcctttaaaagaaaccctgcgaaatgtctgggtacacctggatggtcctggagtaacaagaccaatgaagaagatgttccgtgaaatcc

SEQ ID NO: 256561 - DNA, 120 bp, Artificial Sequence
  ENSG00000124491_19 (sequence is synthesized)
ggcccaactccaccgtgcagtgggaagaagtgtgccggccctgggtctctgggcatcggaagctgatagccagcatgagcagtgactccctgagacatgtgtatggcgagctggacgtgc

SEQ ID NO: 256562 - DNA, 120 bp, Artificial Sequence
  ENSG00000124491_20 (sequence is synthesized)
agattcaaagacgaccttccatgtgaatgcacaggaagctgagatgaaccctggcatttggcctcttgtagtcttggctaaggaaattctaacgcaaaaatagctcttgctttgacttag

SEQ ID NO: 256563 - DNA, 120 bp, Artificial Sequence
  ENSG00000124491_21 (sequence is synthesized)
gtgtgaagacccagacaggactgcagagggctccagagtggagatcccacatatttcaaaaacatgcttttccaaacccaggctattcggcaaggaagttagtttttaatctctccacct

SEQ ID NO: 256564 - DNA, 120 bp, Artificial Sequence
  ENSG00000124491_22 (sequence is synthesized)
tccaaagagtgctaagcattagctttaattaagctctcatagctcataagagtaacagtcatcatttatcatcacaaatggctacatctccaaatatcagtgggctctcttaccagggag

SEQ ID NO: 256565 - DNA, 120 bp, Artificial Sequence
  ENSG00000124491_23 (sequence is synthesized)
atttgctcaatacctggcctcatttaaaacaagacttcagattccccactcagccttttgggaataatagcacatgatttgggctctagaattccagtcccctttctcggggtcaggttc

SEQ ID NO: 256566 - DNA, 120 bp, Artificial Sequence
  ENSG00000124491_24 (sequence is synthesized)
taccctccatgtgagaatatttttcccaggactagagcacaacataatttttatttttggcaaagccagaaaaagatctttcattttgcacctgcagccaagcaaatgcctgccaaattt

SEQ ID NO: 256567 - DNA, 120 bp, Artificial Sequence
  ENSG00000124491_25 (sequence is synthesized)
tagatttaccttgttagaagaggtggccccatattaacaaattgcatttgtgggaaacttaaccacctacaaggagataagaaagcaggtgcaacactcaagtctattgaataatgtagt

SEQ ID NO: 256568 - DNA, 120 bp, Artificial Sequence
  ENSG00000124491_26 (sequence is synthesized)
tttgtgatgcattttatagaatgtgtcacactgtggcctgatcagcaggagccaatatcccttactttaaccctttctgggatgcaatactaggaagtaaagtgaagaatttatctcttt

SEQ ID NO: 256569 - DNA, 120 bp, Artificial Sequence
  ENSG00000124491_27 (sequence is synthesized)
agttagtgattatatttcacccatctctcaggaatcatctcctttgcagaatgatgcaggttcaggtcccctttcagagatataataagcccaacaagttgaagaagctggcggatctag

SEQ ID NO: 256570 - DNA, 120 bp, Artificial Sequence
  ENSG00000124491_28 (sequence is synthesized)
tgaccagatatatagaaggactgcagccactgattctctcttgtccttcacatcacccatgttgagacctcagcttggcactcaggtgctgaagggtaatatggactcagccttgcaaat

SEQ ID NO: 256571 - DNA, 120 bp, Artificial Sequence
  ENSG00000124491_29 (sequence is synthesized)
agccagtgctagttctgacccaaccacagaggatgctgacatcatttgtattatgttccaaggctactacagagaaggctgcctgctatgtatttgcaaggctgatttatggtcagaatt

SEQ ID NO: 256572 - DNA, 120 bp, Artificial Sequence
  ENSG00000124491_30 (sequence is synthesized)
tccctctgatatgtctagggtgtgatttaggtcagtagactgtgattcttagcaaaaaatgaacagtgataagtatactgggggcaaaatcagaatggaatgctctggtctatataacca

SEQ ID NO: 256573 - DNA, 120 bp, Artificial Sequence
  ENSG00000124491_31 (sequence is synthesized)
catttctaagcctttgagactgttcctgagccttcagcactaacctatgagggtgagctggtcccctctatatatacatcatacttaactttactaagtaatctcacagcatttgccaag

SEQ ID NO: 256574 - DNA, 120 bp, Artificial Sequence
  ENSG00000124491_32 (sequence is synthesized)
tctcccaatatccaattttaaaatgaaatgcattttgctagacagttaaactggcttaacttagtatattattattaattacaatgtaatagaagcttaaaataaagttaaactgattat

SEQ ID NO: 256575 - DNA, 120 bp, Artificial Sequence
  ENSG00000124491_33 (sequence is synthesized)
ggaagaagatgggaacgtgaattccaaactcaccaaggattcagtgtggtacccatccattcctgctgctggaatgtctccaaagagcgcctgaagccctcattccactcaagtctcact

SEQ ID NO: 256576 - DNA, 120 bp, Artificial Sequence
  ENSG00000124491_34 (sequence is synthesized)
tgagagtaaaccaaggggagtttgggggtaaaatgtcagaggtcattgtaataacttcttgggaaattaggcagaaagggaaaaaaagtgggaatcatttaataaaccacatagaaaaca

SEQ ID NO: 256577 - DNA, 120 bp, Artificial Sequence
  ENSG00000124491_35 (sequence is synthesized)
attcagcagaccttgctacctgccttcttcagggaaaataatcttgtttttgagtttatgtttaaactaaagttagttgattattttcttcaacccttgtttttcttgttcatagagttt

SEQ ID NO: 256578 - DNA, 120 bp, Artificial Sequence
  ENSG00000124491_36 (sequence is synthesized)
aaaggaaaccctcccagaccctctgaccaaaggggacgggtggggacttcctggcactgcagggccccttgcctgtccgtttgaggaagtccccgaggcgcacagagcaagcccacgcga

SEQ ID NO: 256579 - DNA, 120 bp, Artificial Sequence
  ENSG00000124491_37 (sequence is synthesized)
agatctagggatggggatggggaggagaagtgggaatgggaaattgggagtcagaggggcaagtgggagagaagggcgcacctgccgggataacaggccagatgaatccgtttgaggaag

SEQ ID NO: 256580 - DNA, 120 bp, Artificial Sequence
  ENSG00000124491_38 (sequence is synthesized)
tggtgagtgccatgtgcaagctccagtcttgacaccatgggttgcattgtagagagaggtgggtacaggcacagttgtgtgatttcctagtgtcatatgtcaacagtggcaggagctgga

SEQ ID NO: 256581 - DNA, 120 bp, Artificial Sequence
  ENSG00000124491_39 (sequence is synthesized)
atgacatccagcccctgaattaccctgtgctctaagactggtctgtatagtgccaaatattgataacttgggcccacccaaggagaaaatctcatataaataaaagtaaaactggtataa

SEQ ID NO: 256582 - DNA, 120 bp, Artificial Sequence
  ENSG00000124493_0 (sequence is synthesized)
ttttctgggtgtgtgttagggaggctatgttcctgaccctccccctctggggtgagaaggggtccccgccatgtcctcggggttggtaggaggagaggattggagctgttttctccttga

SEQ ID NO: 256583 - DNA, 120 bp, Artificial Sequence
  ENSG00000124493_1 (sequence is synthesized)
tgccaagatacgccaagctaggagcattctgccctttccacagtcatccaccgagaacaggcctgcaggacgggacaaggatcagagccttcctgcaaccccggccactgcctgctgtct

SEQ ID NO: 256584 - DNA, 120 bp, Artificial Sequence
  ENSG00000124493_2 (sequence is synthesized)
gtgggcctggactgtgcgggcaactgtgcttggcccgagtgacaaggaggtgggagagggtagcagcatgggctacgcggttggctgccctcagtccccctgctgctgaagctgccctgc

SEQ ID NO: 256585 - DNA, 120 bp, Artificial Sequence
  ENSG00000124493_3 (sequence is synthesized)
ccatgcccacccaggccgtggggccaggggcctgccagggctaggagtgggcctgccgttcatgggtctctagggatttccgagatgcctgggaagagaggcttgggctggtggtgggcc

SEQ ID NO: 256586 - DNA, 120 bp, Artificial Sequence
  ENSG00000124493_4 (sequence is synthesized)
cggctgcccctttgcctgctcctcagcctttacggcccctggatgccttcctccctgggaaagcccaaaggccaccctcacatgaattccatccgcatagatggggacatcacactggga

SEQ ID NO: 256587 - DNA, 120 bp, Artificial Sequence
  ENSG00000124493_5 (sequence is synthesized)
ggcctgttcccggtgcatggccggggctcagagggcaagccctgtggagaacttaagaaggaaaagggcatccaccggctggaggccatgctgttcgccctggatcgcatcaacaacgac

SEQ ID NO: 256588 - DNA, 120 bp, Artificial Sequence
  ENSG00000124493_6 (sequence is synthesized)
ccggacctgctgcctaacatcacgctgggcgcccgcattctggacacctgctccagggacacccatgccctcgagcagtcgctgacctttgtgcaggcgctcatcgagaaggatggcaca

SEQ ID NO: 256589 - DNA, 120 bp, Artificial Sequence
  ENSG00000124493_7 (sequence is synthesized)
gaggtccgctgtggcagtggcggcccacccatcatcaccaagcctgaacgtgtggtgggtgtcatcggtgcttcagggagctcggtctccatcatggtggccaacatccttcgcctcttc

SEQ ID NO: 256590 - DNA, 120 bp, Artificial Sequence
  ENSG00000124493_8 (sequence is synthesized)
aagataccccagatcagctacgcctccacagcgccagacctgagtgacaacagccgctacgacttcttctcccgcgtggtgccctcggacacgtaccaggcccaggccatggtggacatc

SEQ ID NO: 256591 - DNA, 120 bp, Artificial Sequence
  ENSG00000124493_9 (sequence is synthesized)
gtccgtgccctcaagtggaactatgtgtccacagtggcctcggagggcagctatggtgagagcggtgtggaggccttcatccagaagtcccgtgaggacgggggcgtgtgcatcgcccag

SEQ ID NO: 256592 - DNA, 120 bp, Artificial Sequence
  ENSG00000124493_10 (sequence is synthesized)
tcggtgaagataccacgggagcccaaggcaggcgagttcgacaagatcatccgccgcctcctggagacttcgaacgccagggcagtcatcatctttgccaacgaggatgacatcaggcgt

SEQ ID NO: 256593 - DNA, 120 bp, Artificial Sequence
  ENSG00000124493_11 (sequence is synthesized)
gtgctggaggcagcacgaagggccaaccagacaggccatttcttctggatgggctctgacagctggggctccaagattgcacctgtgctgcacctggaggaggtggctgagggtgctgtc

SEQ ID NO: 256594 - DNA, 120 bp, Artificial Sequence
  ENSG00000124493_12 (sequence is synthesized)
acgatcctccccaagaggatgtccgtacgaggcttcgaccgctacttctccagccgcacgctggacaacaaccggcgcaacatctggtttgccgagttctgggaggacaacttccactgc

SEQ ID NO: 256595 - DNA, 120 bp, Artificial Sequence
  ENSG00000124493_13 (sequence is synthesized)
aagctgagccgccacgccctcaagaagggcagccacgtcaagaagtgcaccaaccgtgagcgaattgggcaggattcagcttatgagcaggaggggaaggtgcagtttgtgatcgatgcc

SEQ ID NO: 256596 - DNA, 120 bp, Artificial Sequence
  ENSG00000124493_14 (sequence is synthesized)
gtgtacgccatgggccacgcgctgcacgccatgcaccgtgacctgtgtcccggccgcgtggggctctgcccgcgcatggaccctgtagatggcacccagctgcttaagtacatccgaaac

SEQ ID NO: 256597 - DNA, 120 bp, Artificial Sequence
  ENSG00000124493_15 (sequence is synthesized)
gtcaacttctcaggcatcgcagggaaccctgtgaccttcaatgagaatggagatgcgcctgggcgctatgacatctaccaataccagctgcgcaacgattctgccgagtacaaggtcatt

SEQ ID NO: 256598 - DNA, 120 bp, Artificial Sequence
  ENSG00000124493_16 (sequence is synthesized)
ggctcctggactgaccacctgcaccttagaatagagcggatgcactggccggggagcgggcagcagctgccccgctccatctgcagcctgccctgccaaccgggtgagcggaagaagaca

SEQ ID NO: 256599 - DNA, 120 bp, Artificial Sequence
  ENSG00000124493_17 (sequence is synthesized)
gtaagacgtgtccctatgacatgcggcccacagagaaccgcacgggctgccggcccatccccatcatcaagcttgagtggggctcgccctgggccgtgctgcccctcttcctggccgtgg

SEQ ID NO: 256600 - DNA, 120 bp, Artificial Sequence
  ENSG00000124493_18 (sequence is synthesized)
tgggcatcgctgccacgttgttcgtggtgatcacctttgtgcgctacaacgacacgcccatcgtcaaggcctcgggccgtgaactgagctacgtgctgctggcaggcatcttcctgtgct

SEQ ID NO: 256601 - DNA, 120 bp, Artificial Sequence
  ENSG00000124493_19 (sequence is synthesized)
atgccaccaccttcctcatgatcgctgagcccgaccttggcacctgctcgctgcgccgaatcttcctgggactagggatgagcatcagctatgcagccctgctcaccaagaccaaccgca

SEQ ID NO: 256602 - DNA, 120 bp, Artificial Sequence
  ENSG00000124493_20 (sequence is synthesized)
tctaccgcatcttcgagcagggcaagcgctcggtcagtgccccacgcttcatcagccccgcctcacagctggccatcaccttcagcctcatctcgctgcagctgctgggcatctgtgtgt

SEQ ID NO: 256603 - DNA, 120 bp, Artificial Sequence
  ENSG00000124493_21 (sequence is synthesized)
ggtttgtggtggacccctcccactcggtggtggacttccaggaccagcggacactcgacccccgcttcgccaggggtgtgctcaagtgtgacatctcggacctgtcgctcatctgcctgc

SEQ ID NO: 256604 - DNA, 120 bp, Artificial Sequence
  ENSG00000124493_22 (sequence is synthesized)
tgggctacagcatgctgctcatggtcacgtgcaccgtgtatgccatcaagacacgcggcgtgcccgagaccttcaatgaggccaagcccattggcttcaccatgtacaccacttgcatcg

SEQ ID NO: 256605 - DNA, 120 bp, Artificial Sequence
  ENSG00000124493_23 (sequence is synthesized)
tctggctggccttcatccccatcttctttggcacctcgcagtcggccgacaagctgtacatccagacgacgacgctgacggtctcggtgagtctgagcgcctcggtgtccctgggaatgc

SEQ ID NO: 256606 - DNA, 120 bp, Artificial Sequence
  ENSG00000124493_24 (sequence is synthesized)
tctacatgcccaaagtctacatcatcctcttccacccggagcagaacgtgcccaagcgcaagcgcagcctcaaagccgtcgttacggcggccaccatgtccaacaagttcacgcagaagg

SEQ ID NO: 256607 - DNA, 120 bp, Artificial Sequence
  ENSG00000124493_25 (sequence is synthesized)
gcaacttccggcccaacggagaggccaagtctgagctctgcgagaaccttgaggccccagcgctggccaccaaacagacttacgtcacttacaccaaccatgcaatctagcgagtccatg

SEQ ID NO: 256608 - DNA, 120 bp, Artificial Sequence
  ENSG00000124493_26 (sequence is synthesized)
gagctgagcagcaggaggaggagccgtgaccctgtggaaggtgcgtcgggccagggccacacccaagggcccagctgtcttgcctgcccgtgggcacccacggacgtggcttggtgctga

SEQ ID NO: 256609 - DNA, 120 bp, Artificial Sequence
  ENSG00000124493_27 (sequence is synthesized)
ggatagcagagcccccagccatcactgctggcagcctgggcaaaccgggtgagcaacaggaggacgaggggccggggcggtgccaggctaccacaagaacctgcgtcttggaccattgcc

SEQ ID NO: 256610 - DNA, 120 bp, Artificial Sequence
  ENSG00000124493_28 (sequence is synthesized)
cctcccggccccaaaccacaggggctcaggtcgtgtgggccccagtgctagatctctccctcccttcgtctctgtctgtgctgttggcgacccctctgtctgtctccagccctgtctttc

SEQ ID NO: 256611 - DNA, 120 bp, Artificial Sequence
  ENSG00000124493_29 (sequence is synthesized)
tgttctcttatctctttgtttcaccttttccctctctggcgtccccggctgcttgtactcttggccttttctgtgtctcctttctggctcttgcctccgcctctctctctcatcctcttt

SEQ ID NO: 256612 - DNA, 120 bp, Artificial Sequence
  ENSG00000124493_30 (sequence is synthesized)
gtcctcagctcctcctgctttcttgggtcccaccagtgtcacttttctgccgttttctttcctgttctcctctgcttcattctcgtccagccattgctcccctctccctgccacccttcc

SEQ ID NO: 256613 - DNA, 120 bp, Artificial Sequence
  ENSG00000124493_31 (sequence is synthesized)
ccagttcaccaaaccttacatgttgcaaaagagaaaaaaggaaaaaaaatcaaaacacaaaaaagccaaaacgaaaacaaatctcgagtgtgttgccaagtgctgcgtcctcctggtggc

SEQ ID NO: 256614 - DNA, 120 bp, Artificial Sequence
  ENSG00000124493_32 (sequence is synthesized)
ctctgtgtgtgtccctgtggcccgcagcctgcccgcctgccccgcccatctgccgtgtgtcttgcccgcctgccccgcccgtctgccgtctgtcttgcccgcctgcccgcctgcccctcc

SEQ ID NO: 256615 - DNA, 120 bp, Artificial Sequence
  ENSG00000124493_33 (sequence is synthesized)
tgccgaccacacggagttcagtgcctgggtgtttggtgatggttattgacgacaatgtgtagcgcatgattgtttttataccaagaacatttctaataaaaataaacacatggttttgca

SEQ ID NO: 256616 - DNA, 120 bp, Artificial Sequence
  ENSG00000124493_34 (sequence is synthesized)
agtggtaaggcctctggccgcctcggggttgatgtggacggccctagggccagcccacagcactgaactgacccctcctaacctgtatccagtcttgatgcacaccaggctgggcacttt

SEQ ID NO: 256617 - DNA, 120 bp, Artificial Sequence
  ENSG00000124493_35 (sequence is synthesized)
ccagaaactacctctaacctccagggttccctcagtcactcagcaagcaccagtttggctcctaggccgtgccttgccctgttctaagcatggtggatatatagcagtgaagaaagagtc

SEQ ID NO: 256618 - DNA, 120 bp, Artificial Sequence
  ENSG00000124493_36 (sequence is synthesized)
aacagaaatgtgcagaagaaacaaaacagacaataaaaagaacggaaagtgtgaggggaagggaaactgcaactgtgaagtggccagggacggcctgcttgcgcaggtgacatctgagcc

SEQ ID NO: 256619 - DNA, 120 bp, Artificial Sequence
  ENSG00000124493_37 (sequence is synthesized)
ctcacatgagagggataggccgcacaggggaggggcagtgatcgggccattttacagatgggagaaccgaggcttagaggagaccgtgagcgaattgggcaggattcagcttatgagcag

SEQ ID NO: 256620 - DNA, 120 bp, Artificial Sequence
  ENSG00000124493_38 (sequence is synthesized)
aaatgccccagtccttccggctggctgcaagatggtgcaaactcttcccaagctatttccccatgatggcgccaagagaaaaaagaggacccttaggacttcagggccatgctttggggg

SEQ ID NO: 256621 - DNA, 120 bp, Artificial Sequence
  ENSG00000124493_39 (sequence is synthesized)
agagatgctggagctgtggacctgggcggtcctggtggaggagtgcctgacacatcccagtctttcaccgtggtgcctgtggacagatgaggagactgaggctcacaaaggaggtgactt

SEQ ID NO: 256622 - DNA, 120 bp, Artificial Sequence
  ENSG00000124493_40 (sequence is synthesized)
gcccaaggtcacacagcgaggcagcttctcacctatgggagttggactttgagccctccttggaaaagggggcatggctgtgccccttggggctccttgctgggcctctgccctgcctgc

SEQ ID NO: 256623 - DNA, 120 bp, Artificial Sequence
  ENSG00000124493_41 (sequence is synthesized)
aactgggctctggagacccagggcttgggggctgtggagactgctccctaggctgggatctagtgtggtgtggtgaggccttgggcatggaggggccagattcccaggtaaggggcaggg

SEQ ID NO: 256624 - DNA, 120 bp, Artificial Sequence
  ENSG00000124493_42 (sequence is synthesized)
acattgcaggaaattccaggaatcagcacctagtagtcccctaattagggggtatgctctgtcccctgccctgcagccctgggagggtaacatttctgccttgcctgtcctctgtctcac

SEQ ID NO: 256625 - DNA, 120 bp, Artificial Sequence
  ENSG00000124493_43 (sequence is synthesized)
acccctcacacctgggactgcccttccacccctgcccccataacctgtgcctctctccttccagccaggaagtcctcttcttgagaagttagcttcccgggctgccagcactcatagccg

SEQ ID NO: 256626 - DNA, 120 bp, Artificial Sequence
  ENSG00000124493_44 (sequence is synthesized)
tcccctcctgcttgtgttggctccaggctcgggtgctaagaagatgtgtgtctgtcctggagatcagtgtgttgttatgtgtccacgtgggcccacaagtgcacggcacaggcatggccg

SEQ ID NO: 256627 - DNA, 120 bp, Artificial Sequence
  ENSG00000124493_45 (sequence is synthesized)
tgtggctgtgttggctgtgttggctgtgtgtctgtgtgcacgtccagcgcctccatgcgcatgcgtgcctgtcttgtttgcgtgtctgatcatctgtttgggccccggtggctcatgcag

SEQ ID NO: 256628 - DNA, 120 bp, Artificial Sequence
  ENSG00000124493_46 (sequence is synthesized)
atgcctgtctcaggcccatggcgagtgttcacctcagctggcttccctggcaggttgggaggtgggaaacaggagcgcttaggggctgggctctggctggggtaaattatagagccagaa

SEQ ID NO: 256629 - DNA, 120 bp, Artificial Sequence
  ENSG00000124493_47 (sequence is synthesized)
acacaatgaggccataggcagcagctggagcctgggctgcctgtgccgtcccctcctgccctgcccctgggtcctgcaccccctcccacctccaggctagctgacagcgctatggagcac

SEQ ID NO: 256630 - DNA, 120 bp, Artificial Sequence
  ENSG00000124493_48 (sequence is synthesized)
agtggaagggactggaggaaccctaggcagggggccacgcagggacagagtatgagagtgtgtgtataactgaggctgggacattgaatcatgccaggtatgtcttctccatcagcccac

SEQ ID NO: 256631 - DNA, 120 bp, Artificial Sequence
  ENSG00000124493_49 (sequence is synthesized)
tcttactcctggcctgggcatctcacacatctgtgcataggaaatctcttcttccctggggtctgtgtgcagcacctagtagatgctcaataaatgtttgtgtgagggaaggagacagga

SEQ ID NO: 256632 - DNA, 120 bp, Artificial Sequence
  ENSG00000124493_50 (sequence is synthesized)
aaggaagtgtctcgctgatcatcttgcggaatggttcctaagacctctgcccaggaaagattccacccagtgctccagcccggtcaggcagaactaggttgccagatcaagggtatctcc

SEQ ID NO: 256633 - DNA, 120 bp, Artificial Sequence
  ENSG00000124493_51 (sequence is synthesized)
caaaagcttccagggcagttgggggtgggggggtggggggtagggatggggaatgcagaagcgggtgcagccagctctcccccagggtgactctggcagcacccccatcctgggcaccct

SEQ ID NO: 256634 - DNA, 120 bp, Artificial Sequence
  ENSG00000124493_52 (sequence is synthesized)
gcctgctctgtggctcacgcccctcctgaagtgactgatgctctgaggcccaaggctaggtccagggcagggcctgcaggggtttcatgctcagtccaggacttgcctaggtccccctac

SEQ ID NO: 256635 - DNA, 120 bp, Artificial Sequence
  ENSG00000124493_53 (sequence is synthesized)
atctgtggggcccccatctaggttctaacaggagaatcacctctccaagggggatgctgcccctcggctccccttggctctcaggaggggccctcagggactaccagtcccctgccagtg

SEQ ID NO: 256636 - DNA, 120 bp, Artificial Sequence
  ENSG00000124493_54 (sequence is synthesized)
ggaagaaatagccctgccctcagggagcttccagtgtgatgggggagatacagcagactgtgtcccaaagtaaaatgactgttagaatgaggtgggtggaggagggaagccttgggtggg

SEQ ID NO: 256637 - DNA, 120 bp, Artificial Sequence
  ENSG00000124493_55 (sequence is synthesized)
tgtgactttgggcatctgagcctggggtgcagaggtgggctctgtgggcctgaggtggacaggagggaaccaggccctagcaagacttttgccagctagacctgctgcagcagttgggag

SEQ ID NO: 256638 - DNA, 120 bp, Artificial Sequence
  ENSG00000124493_56 (sequence is synthesized)
ggtgggtgctgctggagtcctgggtccatcacctagaaggctcaggccagtgcagccagggctggggcccacagctggcctgggtgggacctgccctgatgcccatggcaggagggacgc

SEQ ID NO: 256639 - DNA, 120 bp, Artificial Sequence
  ENSG00000124493_57 (sequence is synthesized)
ctggcccttcacaattggcttggctgctcacctttgctctcatcctcaattattaatgactggagaaagctgctaagtatcttcagaatgttagatttcaacaagatggggggttcaggg

SEQ ID NO: 256640 - DNA, 120 bp, Artificial Sequence
  ENSG00000124493_58 (sequence is synthesized)
tccctggcaccctggatagggagccagcggcccctagagacctttgctgtgtgcagggggtatgtgctcacccccgtggcctcagcctcctcaatgtctgaatgaaggattgggctagca

SEQ ID NO: 256641 - DNA, 120 bp, Artificial Sequence
  ENSG00000124493_59 (sequence is synthesized)
gacatcccaccccacagcacactttctaaccagcaggggaacttctagacaatagagacgctgggctccctccagaacactggacctgaacttctggggggagggctgggcacgggcata

SEQ ID NO: 256642 - DNA, 120 bp, Artificial Sequence
  ENSG00000124493_60 (sequence is synthesized)
ttttaaaagctccccagcagatgggccgtgcagtcaagtgggccaagagtggcaccagactttggggcttgtgaagtcaggagggagcaacagtgcccactcgagcttgcctggggctca

SEQ ID NO: 256643 - DNA, 120 bp, Artificial Sequence
  ENSG00000124493_61 (sequence is synthesized)
agcccaaggctgggctgctgccagcctgagcagacacccaggagcttccaggccagctggatgcacagggcacctttgtggaactcctaggaccctggggagacccacctcaggagcaga

SEQ ID NO: 256644 - DNA, 120 bp, Artificial Sequence
  ENSG00000124493_62 (sequence is synthesized)
gtctcaggtcccttccggctctgaggggctgttctgagctctaatgtcttatggtctgcccctcccatccttacttctcaggccctggaggcagaggcatagagccaggcaggacagagg

SEQ ID NO: 256645 - DNA, 120 bp, Artificial Sequence
  ENSG00000124493_63 (sequence is synthesized)
tctcagtgggccacatgccagctgcccccacactgcctcagcctccaggcctccaaggggtcctggggagcccctgagaagatgctgagcctgcataaggctgggcgcccctctttctga

SEQ ID NO: 256646 - DNA, 120 bp, Artificial Sequence
  ENSG00000124493_64 (sequence is synthesized)
caccctcactggctccacggctcccccttcccatcccaggtttccatctgcccactgaacagggaggggaaactgaggcactcccctggcactgagggctccttctgtcatcctgcctgc

SEQ ID NO: 256647 - DNA, 120 bp, Artificial Sequence
  ENSG00000124493_65 (sequence is synthesized)
cctggatggtcctggctgcccctcagggcttggccctggcactgtgagcctcacagggctcagacccccacccccaacccagcactaaatggcactcggcaccagaatctcacttcagtt

SEQ ID NO: 256648 - DNA, 120 bp, Artificial Sequence
  ENSG00000124493_66 (sequence is synthesized)
ggcaaaagcagcaattagcatgtaatgaggcttcttgctttatttttaggtaacctccaaggccctgcctgtgtaattcagcccgccattgctcggtggataattaaagcatgtcaccat

SEQ ID NO: 256649 - DNA, 120 bp, Artificial Sequence
  ENSG00000124493_67 (sequence is synthesized)
agctgcccccaagccttggcagcctgagggtgcccatggggagccctgtctccgcttggctccttgcagtctgtggggcacagcgttcccctggagagaggctgttccttgtgggctctt

SEQ ID NO: 256650 - DNA, 120 bp, Artificial Sequence
  ENSG00000124493_68 (sequence is synthesized)
actgtccatactcccagcctgccctggggggaacttcctgctatctcctcacctccaggcctgagctggaggaaggctgggcagaggagagctgccaggcaagacagatggcctgcagcc

SEQ ID NO: 256651 - DNA, 120 bp, Artificial Sequence
  ENSG00000124493_69 (sequence is synthesized)
tgggccagggaggggcaccactttgatctctgatgccctggggactcacgggctgcaggtgctaccagcccagcaccccggcacagcggggaggctgaggcagacacacgctcctggaga

SEQ ID NO: 256652 - DNA, 120 bp, Artificial Sequence
  ENSG00000124493_70 (sequence is synthesized)
gcaggacgggacaaggatcagagccttcctgcaaccccggccactgcctgctgtctgtgggcctggactgtgcgggcaactgtgcttggcccgagtgacaaggagatggggacatcacac

SEQ ID NO: 256653 - DNA, 120 bp, Artificial Sequence
  ENSG00000124493_71 (sequence is synthesized)
ctgacccaccaggagctcccagccggggcctgatacaggctctgactgcctggctgttgccaggtgggcctcggcctcttctttgagcactgtggtttggtccatggcctcactgggctc

SEQ ID NO: 256654 - DNA, 120 bp, Artificial Sequence
  ENSG00000124493_72 (sequence is synthesized)
tgggtgactccggtcaacggcgactgtgaggcctttgcagacgtgggtgtgcagatgaggggactgttgacctccctggtgcaggagcctgcggggcggccgctctcctcacagcagagg

SEQ ID NO: 256655 - DNA, 120 bp, Artificial Sequence
  ENSG00000124493_73 (sequence is synthesized)
cccaggcgagcctgaccccaccctgggatccagagaggtgggtgctggtgagtgggtatgtgggcagggagacccacaggctagagcacaagctactgctatggggcactccttccctcc

SEQ ID NO: 256656 - DNA, 120 bp, Artificial Sequence
  ENSG00000124493_74 (sequence is synthesized)
cctctccatttcctgcatccattccacctgctagggatggctacctgggtgctttaacagagggctgaggccgtgagcttggggccggaccacttaggttctaatgctgttctcccacct

SEQ ID NO: 256657 - DNA, 120 bp, Artificial Sequence
  ENSG00000124493_75 (sequence is synthesized)
actagctgtgtgaccccaggtgaatttcttaacctctctgggcctctgctgctaaaaaacaaatgagttaatgatacctgcctgatagtgtttgagaattcaatgcaggaatgtgcataa

SEQ ID NO: 256658 - DNA, 120 bp, Artificial Sequence
  ENSG00000124493_76 (sequence is synthesized)
aaggcttagagtaaggtctggcgtgaaataggcacccagtaaatgtgggccacctcagcccctccctcctttctgtggtgagctcagagtacagagaagagctctgggctgtgtttggtt

SEQ ID NO: 256659 - DNA, 120 bp, Artificial Sequence
  ENSG00000124493_77 (sequence is synthesized)
ctagtcttggcttaggctcagagagcccaacctgaggggagacacagctctgtcctcacggagccccaggataaggggagatacagccctgcctagaatctggcagggccctctagtccc

SEQ ID NO: 256660 - DNA, 120 bp, Artificial Sequence
  ENSG00000124493_78 (sequence is synthesized)
tgctggtcacctctccttcagagaggaggctgagagcagatgtggcccctgccaggtctcctcagatatctggcccgggctggcagagcctgctgtgccctcagactccccctcactgga

SEQ ID NO: 256661 - DNA, 120 bp, Artificial Sequence
  ENSG00000124493_79 (sequence is synthesized)
ccagccaaggctgctccgtgtacccagtccttcccaggaggcttcctcctattcctcaccagtgctcccaagccatttctcatgttctaacctggactccagagttgctgcaaaacagat

SEQ ID NO: 256662 - DNA, 120 bp, Artificial Sequence
  ENSG00000124493_80 (sequence is synthesized)
accctcccaggccattggtgggtccctggagggatggaggagggcttctggaagatcatcacggcctcaaaagccaaaaggacaaactgcaatggttgtctcaggcagcgaaaggccagg

SEQ ID NO: 256663 - DNA, 120 bp, Artificial Sequence
  ENSG00000124493_81 (sequence is synthesized)
gaggggaggccctcaagccccatcctgacaccctcagagctgcacagaggcggcacccagtcccttgaggtgtgcaggtcccctgagttctggctctgaacgtgtatgatggccaccgct

SEQ ID NO: 256664 - DNA, 120 bp, Artificial Sequence
  ENSG00000124493_82 (sequence is synthesized)
cagccagctcctggggaagcttctgagccaccgggccccactccctgacttcctgccccctactcccatcccaaagcctggtaagattaggctcccacaccgcacccagctatgtgcctc

SEQ ID NO: 256665 - DNA, 120 bp, Artificial Sequence
  ENSG00000124493_83 (sequence is synthesized)
actccaggcctgctgtttttgaggacaccttcagctcagatggacccacattctgggagggggactgaaagcacttggccttttgtcccagcgaagaagcccctaggggagggctggaag

SEQ ID NO: 256666 - DNA, 120 bp, Artificial Sequence
  ENSG00000124493_84 (sequence is synthesized)
ggagctagactgacttccagagcaggctgcgggaagtggggtaggaggcgggggtcatttctggaaatccacacgcattttcagaagcaaacagaagtaaaaataaacccaggtgactct

SEQ ID NO: 256667 - DNA, 120 bp, Artificial Sequence
  ENSG00000124493_85 (sequence is synthesized)
gcagggctggatgatcgggagctctggccatctcaggctggccggatgcagacgggtattaatagggtgtgggtgtgggttctgagagcagccttacctgccattagtggtgacctaggg

SEQ ID NO: 256668 - DNA, 120 bp, Artificial Sequence
  ENSG00000124493_86 (sequence is synthesized)
tgcgggggggctacaccagtgagcagagctggaaagcctcaggagttgggagatgatggagggtggggtgggatgagatggacaaggccagctcaggtgaaagctctggggcctggaaac

SEQ ID NO: 256669 - DNA, 120 bp, Artificial Sequence
  ENSG00000124493_87 (sequence is synthesized)
atttgtttctccctggaagcccaggccctccagtcccagctggccgcctcctgcacaggcccagcagccaccccccagccctggagtctgtgccctggtcctcaccaacggaagggcctg

SEQ ID NO: 256670 - DNA, 120 bp, Artificial Sequence
  ENSG00000124493_88 (sequence is synthesized)
gacagtttgtagtatcacagcctctcacttgctgtgtgactgtgagcaagttccttgcctcctccctacctcagtctctttttgtgggagctgggttaggggaattctgcccattcctcc

SEQ ID NO: 256671 - DNA, 120 bp, Artificial Sequence
  ENSG00000124493_89 (sequence is synthesized)
ttgtttttcccctctgagatgtctttgaggggccacttaattcatgcctccatgaagccctggctgagcgcttgctgtgggctcctcagccccgggctgggctcttgggtccctggtttg

SEQ ID NO: 256672 - DNA, 120 bp, Artificial Sequence
  ENSG00000124493_90 (sequence is synthesized)
atttatattaccatcacaggcagactgggctgtgtgtgagcactgggcagctggctccacacccatctccctccatcacccactcccactcagggtgtggggagcagctctctgaaggac

SEQ ID NO: 256673 - DNA, 120 bp, Artificial Sequence
  ENSG00000124493_91 (sequence is synthesized)
ctggaattttggcacagagggcggtgaatgaagagggagctgtgggcagaaggcagcatgtgcagaggggtgagggcggcggttgtgtgatggtggatgcgtgtgagaatgggcaaggaa

SEQ ID NO: 256674 - DNA, 120 bp, Artificial Sequence
  ENSG00000124493_92 (sequence is synthesized)
tgtgggggtggatgagccaggaaggcatgcgtctcaggggaccggggctgggcagaggtggttgtggggcctgagtcagacgtggggcgggtgtggatctggaggggagaggtgtggtct

SEQ ID NO: 256675 - DNA, 120 bp, Artificial Sequence
  ENSG00000124493_93 (sequence is synthesized)
gcaggcaggttggatgaggcggtagccatgggtctatgagcaggtgagggcagcgggtagggggaatccatggcttggggtgaaagcatcggtgctgggacagttgtggaccctgggctt

SEQ ID NO: 256676 - DNA, 120 bp, Artificial Sequence
  ENSG00000124493_94 (sequence is synthesized)
cctcaagaagggcagccacgtcaagaagtgcaccagtgagcacgcgggccgggcagggccgggcgggctctaggaggagccggggagggccgagcctgggggcctgaggccgagagtctc

SEQ ID NO: 256677 - DNA, 120 bp, Artificial Sequence
  ENSG00000124493_95 (sequence is synthesized)
cctttgtctgtcgtcggccggccgtggcaggacgtgcagttgggcctgcacctggggtggagttgggaggcctggggcggggccttgaggggcggggccacagcagatttggggtgtggc

SEQ ID NO: 256678 - DNA, 120 bp, Artificial Sequence
  ENSG00000124493_96 (sequence is synthesized)
cctagggcccccgccccctaggtagccatcatggcgtgtccacttcagatacatccggacaggggtctttgcgcgccctgggtctgggtggctctgcggcaggacccagactcaataaca

SEQ ID NO: 256679 - DNA, 120 bp, Artificial Sequence
  ENSG00000124493_97 (sequence is synthesized)
ttggggtgctctggtgcctctcagcctgagtggtgcctaatcgaggatgatgagttatctcctgtattctctcagacttgatcgtgcagtttgggcaaagggcgggggacgcgctgcatg

SEQ ID NO: 256680 - DNA, 120 bp, Artificial Sequence
  ENSG00000124493_98 (sequence is synthesized)
gagtcttagctcctccagagccaggggagaagtgagtgtgatgagggtgggtggggagcatgctgccctctggtggccagagcccacggggacttgcagccactggaccactggggaccc

SEQ ID NO: 256681 - DNA, 120 bp, Artificial Sequence
  ENSG00000124493_99 (sequence is synthesized)
agagaagctcacagccaaacccacctgatctgcagagtgagtgctagtgtgtgagtgtgcccagtgtggcagtgtttgtgtatacacctgtggcacatgactttgcatgtgtgtgagctg

SEQ ID NO: 256682 - DNA, 120 bp, Artificial Sequence
  ENSG00000124493_100 (sequence is synthesized)
gtgttcctgagagagaagggatgtgtgtgcctgtgtcttatgtggggcttatgtattcctgggtgagctaaacataaacattgctgtttactatgtatccactgtgttcagacactttaa

SEQ ID NO: 256683 - DNA, 120 bp, Artificial Sequence
  ENSG00000124493_101 (sequence is synthesized)
agacatcatctttaaaatgtgaaagacatttcactctcacagcaactctaggaactcttaagattcctgcactctagacgaggatatggagagtcagagagaccaagtgacttgcccgag

SEQ ID NO: 256684 - DNA, 120 bp, Artificial Sequence
  ENSG00000124493_102 (sequence is synthesized)
gctgctcagcaaatgcctgcatcaggcagtaatcacaatagaggtgtgagaagtgaaaagatgcctgggtgtggaggctgagccctcatgggtggggtgaccgtgcatcctgtctcccgt

SEQ ID NO: 256685 - DNA, 120 bp, Artificial Sequence
  ENSG00000124493_103 (sequence is synthesized)
gttctggtgtaattattgagagcatccccttcggttcttggaagtgcccaggcgggatggaaaattgtatgggcaccctgatttagatcagcagacctagatcagatcaggggtgagggt

SEQ ID NO: 256686 - DNA, 120 bp, Artificial Sequence
  ENSG00000124493_104 (sequence is synthesized)
ggggatggatgaggtggggatggggtggaaagactggaagtggtggcaagatggacagctggtgcctcctggacccagtgcctaggctgtcgaggggtctgggttgtcaaggggaagggc

SEQ ID NO: 256687 - DNA, 120 bp, Artificial Sequence
  ENSG00000124493_105 (sequence is synthesized)
tttctggaatcttctctttgagagggacaggaggggagaaggctttggtcagttcctgtaggctctgtccagactcctagtccttggggcaggattcaagaaactctccagcagtcctaa

SEQ ID NO: 256688 - DNA, 120 bp, Artificial Sequence
  ENSG00000124493_106 (sequence is synthesized)
tctccagcagtcctaagggaggcgtttggtctgattgtcagctcaggtggggaaggaggactggagcagggttcagaagagcacagagctcggctgggcgtggtggcacatgcctgtaat

SEQ ID NO: 256689 - DNA, 68 bp, Artificial Sequence
  ENSG00000124493_107 (sequence is synthesized)
gcactttggggggccgaggcgggcggagttcatctgaggtcaggagttcaagaccagcttggagtggt

SEQ ID NO: 256690 - DNA, 120 bp, Artificial Sequence
  ENSG00000124493_108 (sequence is synthesized)
agtaaacatgctcttctctagcacttgggacttcttggtgtcttaggagagacctgaggagctgtgtgtgtgtgtgcacgcacatgtgcgtgtgtgtgcatgcgtgtgtgtgtgttgtgt

SEQ ID NO: 256691 - DNA, 120 bp, Artificial Sequence
  ENSG00000124493_109 (sequence is synthesized)
cctgtggccccaggccagcagggtgcctggcacagagcagccactccttccagagcgtaccctgttctctccagaatgcctgccgcctggccacttgcatcctctgaggactcagcccag

SEQ ID NO: 256692 - DNA, 120 bp, Artificial Sequence
  ENSG00000124493_110 (sequence is synthesized)
actctggccaggagaaaattcttcctttaactgagctggaccctgaccttcatgcctccctactggtcccatggtggacccctctgctcaccccatcctcaagcagtttgcttcgtccac

SEQ ID NO: 256693 - DNA, 120 bp, Artificial Sequence
  ENSG00000124493_111 (sequence is synthesized)
atgtgatagactgatagttggacaccaaacttctgcctgtgttagtgggcttccagttacactgctgtgacaaagaggtcccagaactgagcagctcaaatcagacagatgtttgttgct

SEQ ID NO: 256694 - DNA, 120 bp, Artificial Sequence
  ENSG00000124493_112 (sequence is synthesized)
ctctgccgtaataggacatggtgggtgggtgggagtgaggacccaggatccttccatcttgttgctccattggctccctgaagattgaggctagatgacctcaatggttgttctgctcat

SEQ ID NO: 256695 - DNA, 120 bp, Artificial Sequence
  ENSG00000124493_113 (sequence is synthesized)
ggaagggaaaagagaagacgcatgggggaaagacccattttaattgaatgacatgggagctgcacacagtccttccatgtgtatttcatgaggaagaacacagtcagcgctggccaccaa

SEQ ID NO: 256696 - DNA, 120 bp, Artificial Sequence
  ENSG00000124493_114 (sequence is synthesized)
tctgatgtaatggggcaagtctgtgtagaaggctcaggtggccccagcctggacctccaggtcatttggaagcccagcggtgcccagcctaggtgtttggtttgaggcattgtgttgagt

SEQ ID NO: 256697 - DNA, 120 bp, Artificial Sequence
  ENSG00000124493_115 (sequence is synthesized)
tgagtgggacccagaggagggcagcccttagataccaagaccggcttcaagattaatccctcatgcttttccatcgactgccaccaggggcttctggggtcttattctctgggggtctcc

SEQ ID NO: 256698 - DNA, 120 bp, Artificial Sequence
  ENSG00000124493_116 (sequence is synthesized)
agctcctggactccagtagggcaggtaactgtgtggctttgggtaagccacttctcttctctgagcttcagtttcctcatccgtcaaaggcagtggctgacacaagcatggcccacagat

SEQ ID NO: 256699 - DNA, 120 bp, Artificial Sequence
  ENSG00000124493_117 (sequence is synthesized)
gctctgtaccacgaggtcgggtgagatttaaatacgtgaatgacatctgtcccctgccagcacttgagaggcacatctggggctggggatggctgggacaaagtgctcccagggtctctg

SEQ ID NO: 256700 - DNA, 120 bp, Artificial Sequence
  ENSG00000124493_118 (sequence is synthesized)
atggccacccagcctggtcgtgaatcctgacaacatcaagtactgaccctctcctgatggttccagccagtggccatgcacgctgctcctaccaagggcctggtgatgggcatggggccc

SEQ ID NO: 256701 - DNA, 120 bp, Artificial Sequence
  ENSG00000124493_119 (sequence is synthesized)
agggacaggagtcctgagaagcacatggatatgggtgtagcagggactgatgcctcagggtgggctctattcccagctttaaccctccaagaaacattgtgagcgggttacaataaaaat

SEQ ID NO: 256702 - DNA, 120 bp, Artificial Sequence
  ENSG00000124493_120 (sequence is synthesized)
aatcaacatttactaagcactaggtaccggatgttgtctttatatgcattacctcacttgttttataacagttctatgaaataggtaataccattatttccactttataggtgatgtatg

SEQ ID NO: 256703 - DNA, 120 bp, Artificial Sequence
  ENSG00000124493_121 (sequence is synthesized)
ttcatcacagagaggtccagtaactgacctaaggtcacacagcagtaagtggcagagctgagatttgaacccaggcagtctagctcctaagcatgatgccgtgctgcttctagctgctat

SEQ ID NO: 256704 - DNA, 120 bp, Artificial Sequence
  ENSG00000124493_122 (sequence is synthesized)
atggggaaactgaggctcagagtacttaagtgacatatccagggtcaccagctggtaagtggagccaagactggcactgaagctgtcctgactgcacagcccatatccagaggctgggat

SEQ ID NO: 256705 - DNA, 120 bp, Artificial Sequence
  ENSG00000124493_123 (sequence is synthesized)
cccagggctgggagtcaggctggggagcctgggcagcacccagcccccatctcccggagtgtatgttgggagagtggtggggagactcaggttcccctgcccaccccaactaactggtgc

SEQ ID NO: 256706 - DNA, 82 bp, Artificial Sequence
  ENSG00000124493_124 (sequence is synthesized)
gtcccaaaacaaaaaaacagattttaattggtttgggatgcggcctggacacagggaaattttaaagctctctaggtaactc

SEQ ID NO: 256707 - DNA, 120 bp, Artificial Sequence
  ENSG00000124493_125 (sequence is synthesized)
gcctggacacagggaaattttaaagctctctaggtaactccaatgtgcgtcgaggttgcgaaccgccggcctgtcacacagagggagctcaggagatgctgagagtgggaggatgccggc

SEQ ID NO: 256708 - DNA, 120 bp, Artificial Sequence
  ENSG00000124493_126 (sequence is synthesized)
ttgggagcctggagttgcagcttcctgcggctggcgcgcccctccttgctcccctctacgcctctgcatcgcaccccacccctgtaccccaccttcctcccaccaaggaaacctcacctg

SEQ ID NO: 256709 - DNA, 120 bp, Artificial Sequence
  ENSG00000124493_127 (sequence is synthesized)
ccgcctcccgcccaggtcctttggattttgccggtgtgtgtgggtgcgcacaagaggcccctccctgccaggagagcaggtgagcctggccgcgcacgaatccgagggggcggccgccca

SEQ ID NO: 256710 - DNA, 120 bp, Artificial Sequence
  ENSG00000124496_0 (sequence is synthesized)
ggcgaggatggggagcaatgcaaagctctgctcgccccccatctcaccccccaagcggatactggtcttctcgtcggattgcccatgcacttgttgcagaaacagccaaggccctggctg

SEQ ID NO: 256711 - DNA, 120 bp, Artificial Sequence
  ENSG00000124496_1 (sequence is synthesized)
tggagaatgctgaaggaagaagacgcagaagcaggacgaccctgaaagattcagcctcttcatcctcaaacaggaccaggcctcctcttcccacctgtccagcagcatgaaagcagcatg

SEQ ID NO: 256712 - DNA, 120 bp, Artificial Sequence
  ENSG00000124496_2 (sequence is synthesized)
attggccgaccgcaggagaagcccccagaaccaggcccccaactcagccatctgcggaggtcaaggtgtgagcgacgtctcctcaccacagtgctgtgtggtctatacctcagccaggga

SEQ ID NO: 256713 - DNA, 120 bp, Artificial Sequence
  ENSG00000124496_3 (sequence is synthesized)
gaggatgtgaaaccccccgccctgcacatgagtggtacaggccaacaggaacacctggctccagccacgttcacagacatgtcagccgtggagtagtgctgacacttttctctcagcttc

SEQ ID NO: 256714 - DNA, 120 bp, Artificial Sequence
  ENSG00000124496_4 (sequence is synthesized)
tcagggtttcagtccttttgggtttgttttatttaccttttttatggttttgtggctggacgttcacaaccaaggcagacagcatgggtgaccagcaactgtacaagaccaaccatgtgg

SEQ ID NO: 256715 - DNA, 120 bp, Artificial Sequence
  ENSG00000124496_5 (sequence is synthesized)
cccatggtagtgagaaccttttctaccaacagccaccacttggcgtccacagcgggctgaaccacaactatgggaatgcagttacagggggcggaatggatgcccctcaggcctcgccaa

SEQ ID NO: 256716 - DNA, 120 bp, Artificial Sequence
  ENSG00000124496_6 (sequence is synthesized)
tctccccccacttccctcaagatacacgggatggtctgggcttgcctgttggctccaaaaaccttggccaaatggatacctcgaggcagggagggtggggaagtcatgcagggcctggaa

SEQ ID NO: 256717 - DNA, 120 bp, Artificial Sequence
  ENSG00000124496_7 (sequence is synthesized)
accatgtccagctacgtggaaacctggccaactcaaacatgatgtggggggcaccagcccaggctgagcccactgatggctaccaatacacctactcccaggccagcgagatccggaccc

SEQ ID NO: 256718 - DNA, 120 bp, Artificial Sequence
  ENSG00000124496_8 (sequence is synthesized)
agaagcttaccagcggtgtcttacacaagctggactctttcacccaggtgtttgccaaccaaaacctgcgaattcaggtcaacaatatggcccaggtgctgcacactcagtcagcagtga

SEQ ID NO: 256719 - DNA, 120 bp, Artificial Sequence
  ENSG00000124496_9 (sequence is synthesized)
tggatggagcccctgacagtgctctccgccagctgctgtctcagaagcccatggagcccccagcaccggctatcccttcccgctaccagcaggtgccccagcagcctcaccctggtttca

SEQ ID NO: 256720 - DNA, 120 bp, Artificial Sequence
  ENSG00000124496_10 (sequence is synthesized)
ctggtgggctgtccaaaccagctcttcaggtcgggcagcaccctacccaagggcacctgtattatgactaccagcagcctctggctcaggtgccagtgcagggaggacagccactgcagg

SEQ ID NO: 256721 - DNA, 120 bp, Artificial Sequence
  ENSG00000124496_11 (sequence is synthesized)
ccccacagatgctgtcacagcacatgcaacagatgcagcagcaccagtattacccaccgcagcaacagcagcaagccgggcaacagcgtatctccatgcaagaaatacagacgcagccgc

SEQ ID NO: 256722 - DNA, 120 bp, Artificial Sequence
  ENSG00000124496_12 (sequence is synthesized)
aacaaattcgcccatcacagccacagccgccgccacagcagcagcagccgcagcagctacagctgcagcagcggcagggttcaatgcagatacctcagtattatcagccccaacccatga

SEQ ID NO: 256723 - DNA, 120 bp, Artificial Sequence
  ENSG00000124496_13 (sequence is synthesized)
tgcagcacttgcaagagcagcagcagcaacagatgcacctgcagcctccttcttatcacagggaccctcaccagtataccccagagcaggcacacactgtccagctgattcccctgggct

SEQ ID NO: 256724 - DNA, 120 bp, Artificial Sequence
  ENSG00000124496_14 (sequence is synthesized)
ccatgtcccagtactactaccaggagccccagcagccctacagccaccccctctaccagcagagccacctgtcccagcaccagcagcgtgaggacagtcagctgaagacctactctagtg

SEQ ID NO: 256725 - DNA, 120 bp, Artificial Sequence
  ENSG00000124496_15 (sequence is synthesized)
acagacaggcccaggccatgctgagctcccatggggacctggggcctcctgacacaggaatgggagacccagcgagctcagatctgacccgggtcagcagcaccctcccccatcgccccc

SEQ ID NO: 256726 - DNA, 120 bp, Artificial Sequence
  ENSG00000124496_16 (sequence is synthesized)
tcctatcccccagtgggatccacctcaacaacatggggcctcagcatcagcagctgtctcccagtgccatgtggccccagatgcacctacctgatgggagagcccagccagggtcccctg

SEQ ID NO: 256727 - DNA, 120 bp, Artificial Sequence
  ENSG00000124496_17 (sequence is synthesized)
agtcaagtggccaacccaaaggagcgtttggggagcagtttgatgccaagaacaagctgacatgctccatctgcctgaaggagttcaagaacctgcctgccctgaatggccacatgcggt

SEQ ID NO: 256728 - DNA, 120 bp, Artificial Sequence
  ENSG00000124496_18 (sequence is synthesized)
cccacgggggaatgagggcctcccccaacctcaaacaggaggaaggagagaaggtcctgccgcctcagccccagccaccactgccgcctccgcctccgcctccgccgccaccacagctcc

SEQ ID NO: 256729 - DNA, 120 bp, Artificial Sequence
  ENSG00000124496_19 (sequence is synthesized)
ctcccgaggcagaaagcctcacgcctatggtcatgcccgtgtctgtccctgtcaagcttctcccgcccaagcccagctctcaggggttcaccaacagcaccgttgccgccccctccgcca

SEQ ID NO: 256730 - DNA, 120 bp, Artificial Sequence
  ENSG00000124496_20 (sequence is synthesized)
gagacaagccagccagctcgatgtcggacgacgagatgcctgtgctcgaaatccccaggaagcatcagccgagtgtgcccaaagccgaggagcccctcaagaccgtgcaggagaagaaaa

SEQ ID NO: 256731 - DNA, 120 bp, Artificial Sequence
  ENSG00000124496_21 (sequence is synthesized)
agttccggcaccggccggaacctctcttcatcccgccgccgccctcctacaacccgaaccccgctgcctcctactcgggcgccaccctgtaccagagccagctgcgctccccgcgcgtcc

SEQ ID NO: 256732 - DNA, 120 bp, Artificial Sequence
  ENSG00000124496_22 (sequence is synthesized)
tcggggaccacctgctcctggaccccacccacgagctgcccccttacacgcccccacccatgctgagcccggtgcgccagggctcggggctcttcagcaatgtcctcatctccggccacg

SEQ ID NO: 256733 - DNA, 120 bp, Artificial Sequence
  ENSG00000124496_23 (sequence is synthesized)
gccctggcgcccacccgcagctgcccctgacgcccctgacgcccacaccacgggtgctgctgtgtcgctccaacagcatcgatggcagcaacgtgacggtcaccccagggcctggagagc

SEQ ID NO: 256734 - DNA, 120 bp, Artificial Sequence
  ENSG00000124496_24 (sequence is synthesized)
agactgtagatgttgaaccacgcatcaacattggcttgagattccaagcagaaatccctgaactccaagatatctctgccctggcccaggacacacacaaggccacactggtatggaagc

SEQ ID NO: 256735 - DNA, 120 bp, Artificial Sequence
  ENSG00000124496_25 (sequence is synthesized)
cctggccagaactagaaaaccatgacctccagcaaagagtggagaatcttctgaatttgtgctgttccagtgcattgccaggtggagggaccaattctgaatttgctttgcactctctgt

SEQ ID NO: 256736 - DNA, 120 bp, Artificial Sequence
  ENSG00000124496_26 (sequence is synthesized)
ttgaggccaaaggtgatgtgatggttgctctggaaatgctgctactgcggaagcctgtcaggttaaaatgtcatcctttagcaaattaccactatgccggttcggacaagtggacctccc

SEQ ID NO: 256737 - DNA, 120 bp, Artificial Sequence
  ENSG00000124496_27 (sequence is synthesized)
tagaaagaaaactgtttaacaaagcactagccacttacagcaaagactttatttttgtacagaagatggtgaagtccaagacggtggctcagtgcgtggagtactactacacgtggaaaa

SEQ ID NO: 256738 - DNA, 120 bp, Artificial Sequence
  ENSG00000124496_28 (sequence is synthesized)
agatcatgcggctggggcggaaacaccggacacgcctggcagaaatcatcgacgattgtgtgacaagtgaagaagaagaagagttagaggaggaggaggaggaggacccggaagaagata

SEQ ID NO: 256739 - DNA, 120 bp, Artificial Sequence
  ENSG00000124496_29 (sequence is synthesized)
ggaaatccacaaaagaagaagagagtgaggtgccgaagtccccggagccaccacccgtccccgtcctggctcccacggaggggccgcccctgcaggccctgggccagccctcaggctcct

SEQ ID NO: 256740 - DNA, 120 bp, Artificial Sequence
  ENSG00000124496_30 (sequence is synthesized)
caggtgaccaaggcccgaggtgccatcccctctgggaagcagaagcctggtggcacccagagtgggtactgttcggtaaagagctcaccctctcacagcaccaccagcggcgagacagac

SEQ ID NO: 256741 - DNA, 120 bp, Artificial Sequence
  ENSG00000124496_31 (sequence is synthesized)
cccaccaccatcttcccctgcaaggagtgtggcaaagtcttcttcaagatcaaaagccgaaatgcacacatgaaaactcacaggcagcaggaggaacaacagaggcaaaaggctcagaag

SEQ ID NO: 256742 - DNA, 120 bp, Artificial Sequence
  ENSG00000124496_32 (sequence is synthesized)
gcggcttttgcagctgagatggcagccacgattgagaggactacggggcccgtgggggcgccggggctgctgcccctggaccagctgagtctgatcaaacccatcaaggatgtggacatc

SEQ ID NO: 256743 - DNA, 120 bp, Artificial Sequence
  ENSG00000124496_33 (sequence is synthesized)
ctcgacgacgacgtcgtccagcagttgggaggtgtcatggaagaggctgaagttgtggacaccgatcttctcttggatgatcaagattcagtcttgcttcagggtgacgcagaactataa

SEQ ID NO: 256744 - DNA, 120 bp, Artificial Sequence
  ENSG00000124496_34 (sequence is synthesized)
agccctgtgtgtcacttagagacagtgaaaacccacggcctccatcttcattaatcaggaaacctggactgcctgcttgttttgtaacccttttaaactacctgttttaaaagtggtcat

SEQ ID NO: 256745 - DNA, 120 bp, Artificial Sequence
  ENSG00000124496_35 (sequence is synthesized)
tttattcaggtttagaaaaaaaaatcctatttcttttccttttatttaaaaaaatttgtttttgtggggggttgggggaataaataattggcacaactatctttaagaggtgtttcatct

SEQ ID NO: 256746 - DNA, 120 bp, Artificial Sequence
  ENSG00000124496_36 (sequence is synthesized)
gggctaccttctcatgaaatcattcccagtagggactgaagctgaccttcatgttccattgcattcagatgtcaaccatcccggttgccttttatcccaaagcttgctgtgagtgtgtgt

SEQ ID NO: 256747 - DNA, 120 bp, Artificial Sequence
  ENSG00000124496_37 (sequence is synthesized)
gtgtgagacgcaggcgaccctcttagtactggggtcttggggccaacttttcccatcaagcgttactttgattctgttctgacctcattccatagtttgcagtgagcatggcatctttgc

SEQ ID NO: 256748 - DNA, 120 bp, Artificial Sequence
  ENSG00000124496_38 (sequence is synthesized)
ctggagatactatgctaggggcagctttccaggggcaaagcaagccctcgtgttacacggctctcctccagctcacacgacatgtgaggagatgaccaaatgtgaaaacaggtttcccct

SEQ ID NO: 256749 - DNA, 120 bp, Artificial Sequence
  ENSG00000124496_39 (sequence is synthesized)
gtgttgcccgtcatcctttggcccgttcacaggaatggagtactgtataattttaggctttcattcccagcagtgtttactgaggacctggttttctagaacaggtgtgtcctgtcctct

SEQ ID NO: 256750 - DNA, 120 bp, Artificial Sequence
  ENSG00000124496_40 (sequence is synthesized)
tccatgttccctgggggctggtcagctccaagttgtgggtggcagagctgtgtttcagcatgaactgactagagacccatctggaggcaaatattaagttgccaggactgctttcacttc

SEQ ID NO: 256751 - DNA, 120 bp, Artificial Sequence
  ENSG00000124496_41 (sequence is synthesized)
agggtgattgaaggacacatattgaagtacctagaatgccagaaagtgttctattgcccaaaaaacaaatcagaaaagcctattcttttttgcaacgctgttaatgattagtggagttct

SEQ ID NO: 256752 - DNA, 120 bp, Artificial Sequence
  ENSG00000124496_42 (sequence is synthesized)
gaaattactttgtgccacttggaagtactgtgaaaccgcattcactgggattttgctgtaattcacatccgctggactgaagtttaccttgatgttagctataagaaatagttttctaac

SEQ ID NO: 256753 - DNA, 120 bp, Artificial Sequence
  ENSG00000124496_43 (sequence is synthesized)
acatacgatagcaaatacaagacaaatagcattgaaggccaacaaaaatggcttcagatacaccttagctataatgtttgcattcaaacaatgaatgtattcatcacaagtcacttacca

SEQ ID NO: 256754 - DNA, 120 bp, Artificial Sequence
  ENSG00000124496_44 (sequence is synthesized)
aagcacttctagacttctccaacctccatgactttgctctgcttcctcctgtccctgtcagcagggttgctgtttgtacttgaaggtaataaacctgtaatccttcaaaaatgccattta

SEQ ID NO: 256755 - DNA, 120 bp, Artificial Sequence
  ENSG00000124496_45 (sequence is synthesized)
gccccaggcttctgagctgagtcagactgacccatcccaccgttagggcaaaagtcaggctgggacacagcgccagtacagagaggatcctgcttcatgcaactccccttttggagttaa

SEQ ID NO: 256756 - DNA, 120 bp, Artificial Sequence
  ENSG00000124496_46 (sequence is synthesized)
tgcagcgtgatttcctgggccggtgttttcaggcatcgcccaccccaggtatgctggttcccagctccacgtaggtgtgcctatcacgctgggccactttgctgacaacattcatagctt

SEQ ID NO: 256757 - DNA, 120 bp, Artificial Sequence
  ENSG00000124496_47 (sequence is synthesized)
gacatgagagagaatatcagcagaagcatgagagtaggacctgacgtctttgactctgcaaaagcatttagcacacactcatgggggggaactggctgtgagccacagcagccccacaca

SEQ ID NO: 256758 - DNA, 120 bp, Artificial Sequence
  ENSG00000124496_48 (sequence is synthesized)
gacagtggtctctgaacttcaggaaagccatggacagaaaaaaaaataaaattcttttccatcattctattttcaaagaggtcttggcgttttcctacatcttttgtttagagggggaaa

SEQ ID NO: 256759 - DNA, 120 bp, Artificial Sequence
  ENSG00000124496_49 (sequence is synthesized)
aaagtttcatttgctgccatttcagaaaggttatgctatcctgttttatccaagcagttgtgagtcaggaactgcctgggcagtgtgcatcaactttgtggccgaaccattacagctgtc

SEQ ID NO: 256760 - DNA, 120 bp, Artificial Sequence
  ENSG00000124496_50 (sequence is synthesized)
atatccttggctgatcgtctctcccagggactactgccctccacttagtgtctgagggtaagcctagaagggtgctgctattgggtctatggaagcttatctatcaaaggagcaaacatc

SEQ ID NO: 256761 - DNA, 120 bp, Artificial Sequence
  ENSG00000124496_51 (sequence is synthesized)
cagaaaagtgtttataaagcaaatgtattgcctctgtttagagatttgcccagctgttccagttttaaacattaaaaaataaactcagttgccatggcaaaaatagaatgcacagcttac

SEQ ID NO: 256762 - DNA, 120 bp, Artificial Sequence
  ENSG00000124496_52 (sequence is synthesized)
ttataattttccatgcagtatagcataaggatttttgacttgaaacaaccaaagaactcctccttaacgagacagttcaaattcctgaattagtatttcttgactatcaacttaaagaat

SEQ ID NO: 256763 - DNA, 120 bp, Artificial Sequence
  ENSG00000124496_53 (sequence is synthesized)
ggacttcctagtacaatgttgcacttatttttttttctgaaataattctgcctgcatgtatgtgttgtgttttagcttctccccttaccccaccccaaagatcttttcttcctaatggtt

SEQ ID NO: 256764 - DNA, 120 bp, Artificial Sequence
  ENSG00000124496_54 (sequence is synthesized)
aatgtctcaactcggttactgtttactatcagatggtttttcattagtgaatttagacctctttgagaaagcttgtatataaaaagttaacagatatattttatggaaaaacccatctta

SEQ ID NO: 256765 - DNA, 120 bp, Artificial Sequence
  ENSG00000124496_55 (sequence is synthesized)
ggaaaaacccatcttattttcaaatatatttaactgctgttatattttattagaggaaggttgtaaatattttctaggagttctattgtaaagaaaagtatttttgaaaaaaattaatgt

SEQ ID NO: 256766 - DNA, 120 bp, Artificial Sequence
  ENSG00000124496_56 (sequence is synthesized)
tttttaaatagtggttgtgattgcttcctgttctggcttcgttatgttctattctcagcagatgaattgcatgccttccatatcaggatgtaatttattcaggtttgcactattataagt

SEQ ID NO: 256767 - DNA, 120 bp, Artificial Sequence
  ENSG00000124496_57 (sequence is synthesized)
tgacatcataatatctagtgtgcttaactgtattttcccggaatgcaagtcccttggtccatattaaagcactatgtatagcatattcataatttttcttttgtaacgtgtgtattttta

SEQ ID NO: 256768 - DNA, 120 bp, Artificial Sequence
  ENSG00000124496_58 (sequence is synthesized)
ataaggattttatgtaacattttggcaacaagaggaccgtattttctagtgaattttataataacattttgctaaaaatgtttcttcctaggtcagtttttgttaaggtgaaccaaaagt

SEQ ID NO: 256769 - DNA, 120 bp, Artificial Sequence
  ENSG00000124496_59 (sequence is synthesized)
cttattttaccaggggtttaaaaaaagtttgaagcttgaaagcaaagttatatttaaacatcatatgtaacaaataaataaagatgttttatagacttgtcctaaaaaggtgcattcctt

SEQ ID NO: 256770 - DNA, 120 bp, Artificial Sequence
  ENSG00000124496_60 (sequence is synthesized)
tccaagtgataagctttttttttttcttaattatcacaatgcttcttcaaaaagggaaccagggaaattttatttaacacattctaatcattagcctctcagaaagttattacagttcct

SEQ ID NO: 256771 - DNA, 120 bp, Artificial Sequence
  ENSG00000124496_61 (sequence is synthesized)
atagatgggcattcatcaaatggagatgtaaccaaacagacactgtcatatttatttgtgaaaacctgattcaatattgcatcagctgctctgaaaataaaatattaatcttttgcgttt

SEQ ID NO: 256772 - DNA, 120 bp, Artificial Sequence
  ENSG00000124507_0 (sequence is synthesized)
atccttcccccctctccgcctcagctctgaccttcctccttcccgcagccccggcgagatcccagagcgacgcggtggcggcggcagcgccagccccctcctcccccgggaagtcggccg

SEQ ID NO: 256773 - DNA, 120 bp, Artificial Sequence
  ENSG00000124507_1 (sequence is synthesized)
ggcttgaggccgggccccagacgtcccgcttcgccccgagtcgccgccgatggtccccggagctcctgcccccagtgcatgagcagccgagcctgctaaccgcagctccgcacttgtcca

SEQ ID NO: 256774 - DNA, 120 bp, Artificial Sequence
  ENSG00000124507_2 (sequence is synthesized)
tccccctgcggctacaccatgtccagctcctacgatgaggcctcactggcgccagaggagaccaccgacagcttctgggaggtggggaactacaagcggaccgtgaagcgcatcgatgac

SEQ ID NO: 256775 - DNA, 120 bp, Artificial Sequence
  ENSG00000124507_3 (sequence is synthesized)
ggccaccgtctatgcaacgacctgatgaactgcgtgcaggagcgcgccaagatcgagaaggcgtacgggcagcagctcaccgactgggccaagcgttggcgccagctcatcgagaaaggc

SEQ ID NO: 256776 - DNA, 120 bp, Artificial Sequence
  ENSG00000124507_4 (sequence is synthesized)
ccacagtatggcagcctggagcgggcctggggtgccataatgacagaggcagacaaggtgagcgagctgcaccaggaggtgaagaacaatctgctgaatgaggacctggagaaggtgaag

SEQ ID NO: 256777 - DNA, 120 bp, Artificial Sequence
  ENSG00000124507_5 (sequence is synthesized)
aactggcagaaggacgcctatcacaagcagatcatgggtggcttcaaggagacgaaggaggctgaagatggcttccgcaaggcccagaagccttgggccaagaagatgaaggagctggag

SEQ ID NO: 256778 - DNA, 120 bp, Artificial Sequence
  ENSG00000124507_6 (sequence is synthesized)
gcagccaagaaggcctaccatttggcttgcaaagaggaaaagctggccatgacacgggagatgaacagcaagacggagcaatcggtcacacctgagcagcaaaagaagctgcaggacaaa

SEQ ID NO: 256779 - DNA, 120 bp, Artificial Sequence
  ENSG00000124507_7 (sequence is synthesized)
gtggacaagtgcaagcaggatgtgcagaagacacaggagaagtatgagaaagtgctggaagatgtgggcaagaccacaccccagtacatggagaacatggagcaggtgtttgagcaatgc

SEQ ID NO: 256780 - DNA, 120 bp, Artificial Sequence
  ENSG00000124507_8 (sequence is synthesized)
cagcaatttgaggaaaagcggctggtcttcctcaaggaggtgctgctggacatcaaacggcacctcaacctggctgagaacagcagctacatccatgtgtaccgtgagctggagcaggcc

SEQ ID NO: 256781 - DNA, 120 bp, Artificial Sequence
  ENSG00000124507_9 (sequence is synthesized)
atccggggggctgatgcccaggaagacctcagatggttccgcagcaccagtggccccggcatgcccatgaactggccccagtttgaggagtggaacccagaccttcctcacaccaccacc

SEQ ID NO: 256782 - DNA, 120 bp, Artificial Sequence
  ENSG00000124507_10 (sequence is synthesized)
aagaaggagaaacagcctaagaaggcagagggagtggcgctgaccaatgccactggggcggtagagtccacatcccaggctggggaccgcggcagtgttagcagctacgacagaggccag

SEQ ID NO: 256783 - DNA, 120 bp, Artificial Sequence
  ENSG00000124507_11 (sequence is synthesized)
ccctacgccaccgagtggtcagacgacgagagtgggaacccctttgggggcagtgagaccaacgggggcgccaacccctttgaggacgactccaagggagtgcgcgtgcgggcactctac

SEQ ID NO: 256784 - DNA, 120 bp, Artificial Sequence
  ENSG00000124507_12 (sequence is synthesized)
gactatgacggccaggagcaggacgagctcagctttaaggccggagacgaactcaccaagctgggcgaggaggatgagcagggctggtgccgtgggcggctggacagcgggcagctgggc

SEQ ID NO: 256785 - DNA, 120 bp, Artificial Sequence
  ENSG00000124507_13 (sequence is synthesized)
ctctaccctgccaactacgtggaggctatctagaggccccctccctccatactcccgtcactcctccccactgccgcccctcccctcccactctcgtctccttcccctcgccatagagtt

SEQ ID NO: 256786 - DNA, 120 bp, Artificial Sequence
  ENSG00000124507_14 (sequence is synthesized)
ccagacatattttccgatcaagcttttatttttttaaaagtcaaaacagaacaaaacaaagtatgcagagacagagcatttgcagggccacctggaggctggggtgctggggcttggggt

SEQ ID NO: 256787 - DNA, 120 bp, Artificial Sequence
  ENSG00000124507_15 (sequence is synthesized)
ggccccagggtaggtaacagtcttaggacttagcccaacatcacaacatctgctcttcgggttccaccaaagagtctcctgagccctgagggatggatgtctcctgacccttccaccccg

SEQ ID NO: 256788 - DNA, 120 bp, Artificial Sequence
  ENSG00000124507_16 (sequence is synthesized)
cctcactccctccgtcccactccactccaggctgccggcacctgccccattccctggcctggtttcctaacctcttcttcctcccctgccctgcttcccttcctccaccaccctgctctc

SEQ ID NO: 256789 - DNA, 120 bp, Artificial Sequence
  ENSG00000124507_17 (sequence is synthesized)
gccacgtcccttgggaccggtgggactggaggaggaacggtcaccctcctcccccatggaggtttccaggggtcccccagacatgaaagaggggtgagctggaggaagtcatggtgtcac

SEQ ID NO: 256790 - DNA, 120 bp, Artificial Sequence
  ENSG00000124507_18 (sequence is synthesized)
tggggtacaggagggtgaatgaagggcatgcaggccctcagcccgggctgtgccagccctcccagccccaggcccatctgagggaccaagacgctgttacgcaggcccttctttccagct

SEQ ID NO: 256791 - DNA, 120 bp, Artificial Sequence
  ENSG00000124507_19 (sequence is synthesized)
atcagcactttcagcatcggctcttcagcagatccaaaccccctcagcaacttgcagaggacctgtcccctctcaaaagtcccctggcctagggtggggacccccaaacctacggcaaag

SEQ ID NO: 256792 - DNA, 120 bp, Artificial Sequence
  ENSG00000124507_20 (sequence is synthesized)
ccagcaacagtagcagcctgctcccatttgctggggaggagatcatcttgttcccctggccccccactctccctccatgtccatccaaaaaccataaaatcactgggttccacatcagcc

SEQ ID NO: 256793 - DNA, 120 bp, Artificial Sequence
  ENSG00000124507_21 (sequence is synthesized)
tccatgaggccaagccttgtacctgcaaggctcttggcctaaccattcctctgtcctcttctctggcctgcctggggagcccgtgaaggccgcacgggtgcctccagcctgagacatcag

SEQ ID NO: 256794 - DNA, 120 bp, Artificial Sequence
  ENSG00000124507_22 (sequence is synthesized)
gggagagcctgcagctgagttcagcagaaaggaggaatcctggccctcaggaagaagatagtcacatgtttttcttccttgtccccacggcccccagaacaacattctccctgctggcag

SEQ ID NO: 256795 - DNA, 120 bp, Artificial Sequence
  ENSG00000124507_23 (sequence is synthesized)
cccttccatgtctccaaacctgggtcagagtgaaaggacctttgggggtgggtgggagcaaagggcccacctgctggttggtgaaagcagtggtgccggagtgctaggtaccgcacgaga

SEQ ID NO: 256796 - DNA, 120 bp, Artificial Sequence
  ENSG00000124507_24 (sequence is synthesized)
gggtgcgggggcttgggaagcagaccagggttggacaaaaccccatgagggcggggagctggaagaaaagtctcttggggacctctggggcaaggagctgagaagtcctgcagcaccagg

SEQ ID NO: 256797 - DNA, 120 bp, Artificial Sequence
  ENSG00000124507_25 (sequence is synthesized)
tgagacttgcttacagtggatgccacttctaggcctctggaccgcagatgccctcctccctcctgcacacctggcctcctgggcctccaggtaaagagagagagccagcccagccctgtt

SEQ ID NO: 256798 - DNA, 120 bp, Artificial Sequence
  ENSG00000124507_26 (sequence is synthesized)
tcccctcagtcctcctttgctcctgctgcttctcccaacagcccactgttaggaggtagtagaccccagcctcaaggctctgaccttcttcatgtgggcacagagggtcctgacactctg

SEQ ID NO: 256799 - DNA, 120 bp, Artificial Sequence
  ENSG00000124507_27 (sequence is synthesized)
gcagggcctgagctggggcaggcctccctcagggccaggggcgatggcaccccggggacaggcagacctccttcctgccgtcagcacccccttccttatcactgtctggtctccgagctt

SEQ ID NO: 256800 - DNA, 120 bp, Artificial Sequence
  ENSG00000124507_28 (sequence is synthesized)
cggctgcagcctgaggtgtgtcctgggctcctcagagcctgaagcaagcttttggaagcctgcagtcctcccagctccagtgcagaagcctctctctccagcctttccccaggcaggagt

SEQ ID NO: 256801 - DNA, 120 bp, Artificial Sequence
  ENSG00000124507_29 (sequence is synthesized)
tggggttgggggcctctgtccctcatcgcttaccttggaaaggtgggaagctggcaatctgcaccttggggcctgggctccccctctctgtgccagcggcttcccagcacctgggagggg

SEQ ID NO: 256802 - DNA, 120 bp, Artificial Sequence
  ENSG00000124507_30 (sequence is synthesized)
ctgcagccccagctggactccagcctgtccctcttagcactctagctgcccactccagggcagggactcgaaaccccctccgtcctgagcagccacctccagggccctgtttgggaccac

SEQ ID NO: 256803 - DNA, 120 bp, Artificial Sequence
  ENSG00000124507_31 (sequence is synthesized)
tctctcagtccccaggtcctcagggccccagagcgggagggtctcctacctggaagtccccctgagctccagggcccagccctacctgccagtgctggtgtcagggcactcaacaccgag

SEQ ID NO: 256804 - DNA, 120 bp, Artificial Sequence
  ENSG00000124507_32 (sequence is synthesized)
tgtgggggccacgccccttgccatgcccacggcctcctcctgtagctcctgcctgcacccacgatgctgcacgggcccgccctggtggggctcggcgagtaatgtgttttgtccccagtt

SEQ ID NO: 256805 - DNA, 120 bp, Artificial Sequence
  ENSG00000124507_33 (sequence is synthesized)
aaccaccattctgcggcctggttctgcaaggaaccagggctgccccaccgcccgccgtctgccgccctaggcttcctgactccattagttccgacacttgtgaaactccgagaagtgctg

SEQ ID NO: 256806 - DNA, 120 bp, Artificial Sequence
  ENSG00000124507_34 (sequence is synthesized)
tggtctcagcaatgcacctgttttgtacatgattgtgtaatttaaaggtatataaatacaaatatatatatatatcagttgtgattgtatgactgtggataaaatccagaactgtgtcaa

SEQ ID NO: 256807 - DNA, 120 bp, Artificial Sequence
  ENSG00000124507_35 (sequence is synthesized)
agttctggcgctgctgccttcctgagtgagcggtggagggaaccctagaggacagagcccccagcccggcagcaggccccctctccgcccgccaccacggaggagaaggaggacagccag

SEQ ID NO: 256808 - DNA, 120 bp, Artificial Sequence
  ENSG00000124507_36 (sequence is synthesized)
cccctccagccctggcctggcccagcgggggcagtaagctcctacttgcccccagcttggtgcccacacgggcccagtgcatgagcagccgagcctgctaaccgcagctccgcacttgtc

SEQ ID NO: 256809 - DNA, 120 bp, Artificial Sequence
  ENSG00000124507_37 (sequence is synthesized)
cgtggggagtggttggaggtgaggatgagtcaacaggttggggcccaaaggcacagcgatcctgttctcagattgtgcatgagcagccgagcctgctaaccgcagctccgcacttgtcca

SEQ ID NO: 256810 - DNA, 120 bp, Artificial Sequence
  ENSG00000124507_38 (sequence is synthesized)
cagacacaggacattttcaggcgctgttccctcctagatcaaaccaggcctacctgttcatctctattttgtacaattttaggttgaattaaaaaaaaaaaaacactttttatcttgaaa

SEQ ID NO: 256811 - DNA, 120 bp, Artificial Sequence
  ENSG00000124508_0 (sequence is synthesized)
gggactttttggacacccagagaacaggtcccagataccgagtccgcaactccaaacatcgcgattaataggaggcctctggtctctgcctgccctgggtgctcatggaaccagctgctg

SEQ ID NO: 256812 - DNA, 120 bp, Artificial Sequence
  ENSG00000124508_1 (sequence is synthesized)
ctctgcacttctccctgccagcctccctcctcctcctcctgctcctcctccttctcagcctgtgtgcactggtctcagcccagtttactgtcgtggggccagctaatcccatcctggcca

SEQ ID NO: 256813 - DNA, 120 bp, Artificial Sequence
  ENSG00000124508_2 (sequence is synthesized)
tggtgggagaaaacactacattacgctgccatctgtcacccgagaaaaatgctgaggacatggaggtgcggtggttccggtctcagttctcccccgcagtgtttgtgtataagggtggga

SEQ ID NO: 256814 - DNA, 120 bp, Artificial Sequence
  ENSG00000124508_3 (sequence is synthesized)
gagagagaacagaggagcagatggaggagtaccggggaagaatcacctttgtgagcaaagacatcaacaggggcagcgtggccctggtcatacataacgtcacagcccaggagaatggga

SEQ ID NO: 256815 - DNA, 120 bp, Artificial Sequence
  ENSG00000124508_4 (sequence is synthesized)
tctaccgctgttacttccaagaaggcaggtcctacgatgaggccatcctacgcctcgtggtggcaggccttgggtctaagcccctcattgaaatcaaggcccaagaggatgggagcatct

SEQ ID NO: 256816 - DNA, 120 bp, Artificial Sequence
  ENSG00000124508_5 (sequence is synthesized)
ggctggagtgcatatctggagggtggtacccagagcccctcacagtgtggagggacccctacggtgaggttgtgcccgccctgaaggaggtttccatcgctgatgctgacggcctcttca

SEQ ID NO: 256817 - DNA, 120 bp, Artificial Sequence
  ENSG00000124508_6 (sequence is synthesized)
tggtcaccacagctgtgatcatcagagacaagtatgtgaggaatgtgtcctgctctgtcaacaacaccctgctcggccaggagaaggaaactgtcatttttattccagaatcctttatgc

SEQ ID NO: 256818 - DNA, 120 bp, Artificial Sequence
  ENSG00000124508_7 (sequence is synthesized)
ccagcgcatctccctggatggtggccctagctgtcatcctgaccgcatctccctggatggtgtccatgactgtcatcctggctgttttcatcatcttcatggctgtcagcatctgttgca

SEQ ID NO: 256819 - DNA, 120 bp, Artificial Sequence
  ENSG00000124508_8 (sequence is synthesized)
tcaagaaacttcaaagggaaaaaaagattctgtcaggggaaaagaaagttgaacaagaggaaaaagaaattgcacagcaacttcaagaagaattgcgatggagaagaacattcttacatg

SEQ ID NO: 256820 - DNA, 120 bp, Artificial Sequence
  ENSG00000124508_9 (sequence is synthesized)
ctgctgatgtggtcctggatccagacaccgctcatcccgagctcttcctgtcagaggaccggagaagtgtgaggcggggcccctacaggcagagagtgcctgacaacccagagagattcg

SEQ ID NO: 256821 - DNA, 120 bp, Artificial Sequence
  ENSG00000124508_10 (sequence is synthesized)
acagtcagccttgtgtcctgggatgggagagcttcgcctcagggaaacattactgggaggtggaggtggaaaacgtgatggtgtggactgtgggggtctgcagacacagtgttgagagga

SEQ ID NO: 256822 - DNA, 120 bp, Artificial Sequence
  ENSG00000124508_11 (sequence is synthesized)
aaggggaggtcctgctgattcctcagaatggcttctggaccctggagatgtttggaaaccaataccgggccctgtcctcccctgagaggattctccctttgaaggagtccctttgccggg

SEQ ID NO: 256823 - DNA, 120 bp, Artificial Sequence
  ENSG00000124508_12 (sequence is synthesized)
tgggcgtcttcctggactatgaagctggagatgtctccttctacaacatgagggacagatcgcacatctacacatgtccccgttcagcctttactgtgcctgtgaggcccttcttcaggt

SEQ ID NO: 256824 - DNA, 120 bp, Artificial Sequence
  ENSG00000124508_13 (sequence is synthesized)
tagggtctgatgacagccccatcttcatctgccctgcactcacaggagccagtggggtcatggtgcctgaagagggcctgaaacttcacagagtggggacccaccagagcctatagaatc

SEQ ID NO: 256825 - DNA, 120 bp, Artificial Sequence
  ENSG00000124508_14 (sequence is synthesized)
agagaacatcttccagctgcctttttcacacccactccagccctctgccccagttttctcctcctcactagtctgtggctttagtagttcctttgcttgtaattatgggatgggatccag

SEQ ID NO: 256826 - DNA, 120 bp, Artificial Sequence
  ENSG00000124508_15 (sequence is synthesized)
gcatagggaactagttgtttcatagctcccagtcaaaaagaaagtgagagaagctgttgggcagcgaacctactgtttaaaatcaggataaccacattaagcccaatatgccagttggca

SEQ ID NO: 256827 - DNA, 120 bp, Artificial Sequence
  ENSG00000124508_16 (sequence is synthesized)
ccagatgctgtggacttggaatgaggccaacagggttcaccaggatgagagaggagagaggaatccacaggaccaccagaagggagagggaaccagatatgcagatcagagatagaggaa

SEQ ID NO: 256828 - DNA, 120 bp, Artificial Sequence
  ENSG00000124508_17 (sequence is synthesized)
gtggaaccagagagctgggagggaccaaggttgtaaggatggctaagtcccaccataagagctaaagggtcctgggagatgatggctcatttccacccaaccccaggatttccacagcac

SEQ ID NO: 256829 - DNA, 120 bp, Artificial Sequence
  ENSG00000124508_18 (sequence is synthesized)
acacccacaggcctggacctgggatgaagatgaatgaagaacatggactcatgtggatgtggtttggctcagatgtccctgcaataaacaaggggtcagtacttagtccctgagtgtggt

SEQ ID NO: 256830 - DNA, 120 bp, Artificial Sequence
  ENSG00000124508_19 (sequence is synthesized)
tgaggtttgaggtcctggtcgagcagggcagtactggaccaggtctacgtcagcattcaggttcaatggggacaccagtggcttcaaacttcctgatctaattatgtttttagacactta

SEQ ID NO: 256831 - DNA, 120 bp, Artificial Sequence
  ENSG00000124508_20 (sequence is synthesized)
cttagaagttattgaggactttaaagagcttttgtttatttgggttaatatttatgacatttgacattgaaacaaaaatttaaaatgttatcttttaatttatgttaaaatagcattaat

SEQ ID NO: 256832 - DNA, 120 bp, Artificial Sequence
  ENSG00000124508_21 (sequence is synthesized)
cagttataggttaatgtagataggatgttttgtgaaaaagcaatctattgtgtccaaataaaaaaacaaaaagtgtgacactggttaactttttccagatctcatgtctggcttaataag

SEQ ID NO: 256833 - DNA, 120 bp, Artificial Sequence
  ENSG00000124508_22 (sequence is synthesized)
agatatttgtattatcatatctgcctttgtattaaacctattggtatatcataggtcatgttagctcaaaaaaactttactgcacactactgagagaatgagatgaaaaacgattaatgt

SEQ ID NO: 256834 - DNA, 120 bp, Artificial Sequence
  ENSG00000124508_23 (sequence is synthesized)
ttcattattattattgtgaaaatattattaacactggggactccttaagagtacatcagagttctctctaggaatcccaaaaccacattttgaaactagaatagtggatcctggaagtta

SEQ ID NO: 256835 - DNA, 120 bp, Artificial Sequence
  ENSG00000124508_24 (sequence is synthesized)
atccatgtgctggttaattttagatgtcaacctgactggattaaggaatacctagacagctggtacaacattatttctgggtgtgtctgtgagtgtgtttccagaagagattggcaagtg

SEQ ID NO: 256836 - DNA, 120 bp, Artificial Sequence
  ENSG00000124508_25 (sequence is synthesized)
agtcagtgggaaattctctccttctgttggctgggtgcccaatacaacaaaaaggcagaggaaaggcaaattcttctctcctctggagctgagacactcttcttcttctgcccttggaca

SEQ ID NO: 256837 - DNA, 120 bp, Artificial Sequence
  ENSG00000124508_26 (sequence is synthesized)
tcagaactcctggctctccggcctttgaacttcaggacttgtaccaggaggccctgggttctcaggcctttggctttggactgagagttacacaatcagcttccctggttctgaggcttt

SEQ ID NO: 256838 - DNA, 120 bp, Artificial Sequence
  ENSG00000124508_27 (sequence is synthesized)
cagacttaaactgagccatgctaccagcatcccagggtctccagcctacagatgagctgttgtgcgatttcttagcctccataatcacatgagccaatctccttaataaatgcctgctca

SEQ ID NO: 256839 - DNA, 120 bp, Artificial Sequence
  ENSG00000124508_28 (sequence is synthesized)
tagatctgtatctacatctatatctgtatgtgcatctatatctatgcctatatctatatctatatcatattgattttgtctctctggagaaccctgactaataaaatgaggcatctaaaa

SEQ ID NO: 256840 - DNA, 120 bp, Artificial Sequence
  ENSG00000124508_29 (sequence is synthesized)
gggatgctttgttgtctggtggtgactgtgcccatgggtgagttgtatcggaaaatcgtcatgtgaggatcagaggggaaaagaaaacagaggttagttctagaaggcctctggtctctg

SEQ ID NO: 256841 - DNA, 120 bp, Artificial Sequence
  ENSG00000124508_30 (sequence is synthesized)
ggcccagggctacacagggaccatagggaactggggtcagttcatcaacggtgtcccagcaatgatgcatcatggctcttctgtcagggaaccccagcagctcttaatgaaccctgcagt

SEQ ID NO: 256842 - DNA, 120 bp, Artificial Sequence
  ENSG00000124508_31 (sequence is synthesized)
ttacatccccaggaccctttctcttttggaataatttaatgcatgattatcaaaggtttcccatgcatagtagcctcctaagagttacatttcagaagtcattgctctttgattctggat

SEQ ID NO: 256843 - DNA, 120 bp, Artificial Sequence
  ENSG00000124508_32 (sequence is synthesized)
caatttgaaataagataatgctgtcttagcaattcatatcctgggaatggtatagactgtgcacagttgaagacctatgtgaggaaaaggccataagggtccccagtaagcctgatgcaa

SEQ ID NO: 256844 - DNA, 120 bp, Artificial Sequence
  ENSG00000124508_33 (sequence is synthesized)
tggtgtacaaataggtggccagaaatacctttctgcctctaagagagcactgatattctgcatgtagtctgccaggggaaggggtttgggtgagtgggagggtgagtgggagagcacaga

SEQ ID NO: 256845 - DNA, 120 bp, Artificial Sequence
  ENSG00000124508_34 (sequence is synthesized)
gaaaccaatcgcccacttccagtgagttctcatcttgtgattcggcacctctgcctgtcagcaccaaagaatccaaactttaccagataccagggcccatggacctttcctctttggcga

SEQ ID NO: 256846 - DNA, 120 bp, Artificial Sequence
  ENSG00000124508_35 (sequence is synthesized)
gtttcaaaattgccactgtcattttgggacacaatcacaacttgtcacaatcagacatatcaacttgtggaaaagagaaaatcattttaatgcaatagaaaggtagactgaataagtaag

SEQ ID NO: 256847 - DNA, 120 bp, Artificial Sequence
  ENSG00000124508_36 (sequence is synthesized)
aatacatgcagaaggtagaggtttgcagaatgctcagctcctggggcttttcctgtatgggagaagtaatcctggtagatgtcagactcatattgttaaagcaaaactggattgaagtat

SEQ ID NO: 256848 - DNA, 120 bp, Artificial Sequence
  ENSG00000124508_37 (sequence is synthesized)
ttcttccctaactttgcccacacatccctcaggcaccaggttttcttttgcacacatttattctccttctttatcctttgaagtgtgcccttgtcagccacttaaatcagttgtcaccta

SEQ ID NO: 256849 - DNA, 120 bp, Artificial Sequence
  ENSG00000124508_38 (sequence is synthesized)
ttaaaacaacctataggaccaacgaagaggtccttcaccacctaggacagtgtgtaatgatagactcacttaattgatccattgagaggtatgtgggggaacaataggagataaagcttc

SEQ ID NO: 256850 - DNA, 120 bp, Artificial Sequence
  ENSG00000124508_39 (sequence is synthesized)
tgtgatggtttaagccaagttggaaagtttctaactaaagaaagtcccagagatcatatatcttgaatagaaaagggatcagatcttagaatgctgagaaaaactgggaaccattaattt

SEQ ID NO: 256851 - DNA, 120 bp, Artificial Sequence
  ENSG00000124508_40 (sequence is synthesized)
tggctcatttcctaaactctctggatttcatagagccacaattcttctcaacctgggggcactgcttctgtctctggagagatagaagtgcagcttccgtaattctcagggtatgagctg

SEQ ID NO: 256852 - DNA, 120 bp, Artificial Sequence
  ENSG00000124508_41 (sequence is synthesized)
gcttttctcttctctttgggatgctttgttgtctggtggtgactgtgcccatgggtgagttgtatcggaaaatcgtcatgtgaggatcagaggggaaaagaaaacagaggcctctggtct

SEQ ID NO: 256853 - DNA, 120 bp, Artificial Sequence
  ENSG00000124508_42 (sequence is synthesized)
ctggtggggaggcgcagcctcgcctggctttacctcgagtgtcccgacctgggtctcggggagggggaagtggagggacgagggtgtgaaagaatccagggacaactgaagaaaccggac

SEQ ID NO: 256854 - DNA, 120 bp, Artificial Sequence
  ENSG00000124508_43 (sequence is synthesized)
tgtggcccgagaagtgggaagaggaaggaggaaaacggcccccttgatctctgcattgatggcttacttatggaatgtttacggaatccctctttcggagatacctgagccttgagatgc

SEQ ID NO: 256855 - DNA, 120 bp, Artificial Sequence
  ENSG00000124508_44 (sequence is synthesized)
aagcgactcccagaagttggggcaccgatgagacctacttgagtgacaggagaggttgggcccgaccagcactgaggtgccaagactcctaggctgattctcctcctctgtaaccctagg

SEQ ID NO: 256856 - DNA, 120 bp, Artificial Sequence
  ENSG00000124508_45 (sequence is synthesized)
ggcaggtcctacgatgaggccatcctacgcctcgtggtggcaggtgcatcacttcattttgctttattacttttgcacagtgtgacttttggggaaagtttctcccttaacctcaggccc

SEQ ID NO: 256857 - DNA, 120 bp, Artificial Sequence
  ENSG00000124508_46 (sequence is synthesized)
attgcagaccaacggatttctatctggcgtcccctttccacagagaaagtggcttcctcttgcacaaaggccacatgagtgggtttgccctgctaagctataggtttcacttcttttttt

SEQ ID NO: 256858 - DNA, 120 bp, Artificial Sequence
  ENSG00000124508_47 (sequence is synthesized)
aaatcttgggactttttggacacccagagaacaggtcccagataccgagtccgcaactccaaacatcgcgattaataggaggccttgggtctaagcccctcattgaaatcaaggcccaag

SEQ ID NO: 256859 - DNA, 120 bp, Artificial Sequence
  ENSG00000124508_48 (sequence is synthesized)
acaagaggaaaaagaaattgcacgtaaggaatttgtaaagaaagtgtggaaaaatagaaagaaattcaaaaagaaaagttaaatgagtaggaggacaattgactgtcatagaaaggccac

SEQ ID NO: 256860 - DNA, 120 bp, Artificial Sequence
  ENSG00000124508_49 (sequence is synthesized)
agctctcacaggtaccggcttagggaagagagagaggaaatgcacagcagcagccacaagggcttggaactctcatgtcataagaagtaatcattcagagctttctttcttccatgctgc

SEQ ID NO: 256861 - DNA, 120 bp, Artificial Sequence
  ENSG00000124508_50 (sequence is synthesized)
acacattacattcattcacctggctatatgcagcactacatggctgaacgaaagttcagacaaaagtctaacaatgtactgatactacccagccatctgatcatacatcattgctggttt

SEQ ID NO: 256862 - DNA, 120 bp, Artificial Sequence
  ENSG00000124508_51 (sequence is synthesized)
ctgactgttccttaggcataaacgaagggtgatgttggtgttcatagaaaggatggttcctacgttgtttaatacaagctcaatttctcttagttcttctgttgaagacatgattttgtt

SEQ ID NO: 256863 - DNA, 120 bp, Artificial Sequence
  ENSG00000124508_52 (sequence is synthesized)
tctgtattttgttttcagagcaacttcaagaagaattgcgtaagtttagcctttcctgaactactccgtgtacaatttgtgttctgcttacttagcagtgtctcgtgacattcacctctg

SEQ ID NO: 256864 - DNA, 120 bp, Artificial Sequence
  ENSG00000124508_53 (sequence is synthesized)
tctgtcccttgcaggatggagaagaacattcttacatgctggtgagtgcctctgatgttctctcagatctcagctttctccccactagccagctaacaggactccttagaggagatgagc

SEQ ID NO: 256865 - DNA, 120 bp, Artificial Sequence
  ENSG00000124523_0 (sequence is synthesized)
attcgggggcgcgagctgccccaggtgagccgtggctcaggtccggagcgcggtcgggacacagcgcctctaggagaaagcctggaaggcgctccgggggtacccagagctcttagcggg

SEQ ID NO: 256866 - DNA, 120 bp, Artificial Sequence
  ENSG00000124523_1 (sequence is synthesized)
ccggcagcatgtgcggggcccaagtaaatggaaatgttttctaacatataaaaacctacagaagaagaaaataattttctggatcaaattagaagtctgtattatattgatgtctccaga

SEQ ID NO: 256867 - DNA, 120 bp, Artificial Sequence
  ENSG00000124523_2 (sequence is synthesized)
ttcaaatatattagaaagcagccgtggagacaaccatcttcattttgggagaaataactaaagcccgcctcaagcattagaactacagacaaaccctgatgcgacctctccagattgtcc

SEQ ID NO: 256868 - DNA, 120 bp, Artificial Sequence
  ENSG00000124523_3 (sequence is synthesized)
caagtcgattgatttcccagctatattgtggcctgaagcctccagcgtccacacgaaaccagatttgcctgaaaatggctcggccaagttcaagtatggcagattttcgaaagttttttg

SEQ ID NO: 256869 - DNA, 120 bp, Artificial Sequence
  ENSG00000124523_4 (sequence is synthesized)
caaaagcaaagcacatagtcatcatctcaggagctggtgttagtgcagaaagtggtgttccgaccttcagaggagctggaggttattggagaaaatggcaagcccaggacctggcgactc

SEQ ID NO: 256870 - DNA, 120 bp, Artificial Sequence
  ENSG00000124523_5 (sequence is synthesized)
ccctggcctttgcccacaacccgtcccgggtgtgggagttctaccactaccggcgggaggtcatggggagcaaggagcccaacgccgggcaccgcgccatagccgagtgtgagacccggc

SEQ ID NO: 256871 - DNA, 120 bp, Artificial Sequence
  ENSG00000124523_6 (sequence is synthesized)
tgggcaagcagggccggcgagtcgtggtcatcacccagaacatcgatgagctgcaccgcaaggctggcaccaagaaccttctggagatccatggtagcttatttaaaactcgatgtacct

SEQ ID NO: 256872 - DNA, 120 bp, Artificial Sequence
  ENSG00000124523_7 (sequence is synthesized)
cttgtggagttgtggctgagaattacaagagtccaatttgtccagctttatcaggaaaaggtgctccagaacctggaactcaagatgccagcatcccagttgagaaacttccccggtgtg

SEQ ID NO: 256873 - DNA, 120 bp, Artificial Sequence
  ENSG00000124523_8 (sequence is synthesized)
aagaggcaggctgcgggggcttgctgcgacctcacgtcgtgtggtttggagaaaacctggatcctgccattctggaggaggttgacagagagctcgcccactgtgatttatgtctagtgg

SEQ ID NO: 256874 - DNA, 120 bp, Artificial Sequence
  ENSG00000124523_9 (sequence is synthesized)
tgggcacttcctctgtggtgtacccagcagccatgtttgccccccaggtggctgccaggggcgtgccagtggctgaatttaacacggagaccaccccagctacgaacagattcaggtttc

SEQ ID NO: 256875 - DNA, 120 bp, Artificial Sequence
  ENSG00000124523_10 (sequence is synthesized)
atttccagggaccctgtggaacgactcttcctgaagcccttgcctgtcatgaaaatgaaactgtttcttaagtgtcctggggaagaaagaaattacagtatatctaagaactaggccaca

SEQ ID NO: 256876 - DNA, 120 bp, Artificial Sequence
  ENSG00000124523_11 (sequence is synthesized)
cgcagaggagaaatggtcttatgggtggtgagctgagtactgaacaatctaaaaatagcctctgattccctcgctggaatccaacctgttgataagtgatgggggtttagaagtagcaaa

SEQ ID NO: 256877 - DNA, 120 bp, Artificial Sequence
  ENSG00000124523_12 (sequence is synthesized)
gagcacccacattcaaaagtcacagaactggaaagttaattcatattatttggtttgaactgaaacgtgaggtatctttgatgtgtatggttggttattgggagggaaaaattttgtaaa

SEQ ID NO: 256878 - DNA, 120 bp, Artificial Sequence
  ENSG00000124523_13 (sequence is synthesized)
ttagattgtctaaaaaaaatagttattctgattatatttttgttatctgggcaaagtagaagtcaaggggtaaaaaccctactattctgatttttgcacaagttttagtggaaaataaaa

SEQ ID NO: 256879 - DNA, 120 bp, Artificial Sequence
  ENSG00000124523_14 (sequence is synthesized)
tttgcacaagttttagtggaaaataaaatcacactctacagtaggtaatttattgtataaagacattaccccacgatatggctttattagggactttttttttttttttttgagacagag

SEQ ID NO: 256880 - DNA, 71 bp, Artificial Sequence
  ENSG00000124523_15 (sequence is synthesized)
gtcttaaactctgggcatgagccaccgcacccggcttactgggggctttttaaccttgtttggctacatta

SEQ ID NO: 256881 - DNA, 120 bp, Artificial Sequence
  ENSG00000124523_16 (sequence is synthesized)
cggcttactgggggctttttaaccttgtttggctacattacctcagtgaacaaggggaagctcacaacaggaactcacacaaagaaggaagagaacagtaccaacaaggtagaacatcac

SEQ ID NO: 256882 - DNA, 120 bp, Artificial Sequence
  ENSG00000124523_17 (sequence is synthesized)
gatgagaagaaagaatgatgcaaatatgtggacccccaggataaacacagctgcccaaaatttagctctggcccccttagatgggggaagtcaacagtgaagtgtttctcagcatcataa

SEQ ID NO: 256883 - DNA, 120 bp, Artificial Sequence
  ENSG00000124523_18 (sequence is synthesized)
agaagctgtggttcctgtggggcctgccaaccgttcccagatgctgaactctgctgggagttttttccatgggactttaaaaaatgatgcccttaggttgggccagacctctgttaactt

SEQ ID NO: 256884 - DNA, 120 bp, Artificial Sequence
  ENSG00000124523_19 (sequence is synthesized)
cagtagggatggcaccaggttcaagaggccaaagaagagacctggagctagtgaaggaaacatagggtttatttggggaaccttacagggtggtccagtggccgcgggctggacagaact

SEQ ID NO: 256885 - DNA, 120 bp, Artificial Sequence
  ENSG00000124523_20 (sequence is synthesized)
gcaaccacttataaaaagcatgcagtttacatagcactttcactcagcaccctcccctcagcagcctccacgtggcaaccctcacttcttaagttattgctgtcagatgcatctgccata

SEQ ID NO: 256886 - DNA, 120 bp, Artificial Sequence
  ENSG00000124523_21 (sequence is synthesized)
cagggtcattctcaggggatgcttaagttatttctgtcaggtacatcttccatacactttactaccttggagtaaagtagtaagaatacagctttttccttaacctttaccagctaactc

SEQ ID NO: 256887 - DNA, 120 bp, Artificial Sequence
  ENSG00000124523_22 (sequence is synthesized)
agtgcttaggggccttggaatgcctgctgtccagcaggtgtcacaggcctgactgggaggcatggccattatcaacagtgtatgaaggtcacatatggctccctgaagtgattacatact

SEQ ID NO: 256888 - DNA, 120 bp, Artificial Sequence
  ENSG00000124523_23 (sequence is synthesized)
tggaccacatcacctcagccccttgcaaaattgcatttaatgttacacccttggcttttgtagaaacaggcaacaagacactatcatataaaactttgtactgcattgcaaggcataacc

SEQ ID NO: 256889 - DNA, 120 bp, Artificial Sequence
  ENSG00000124523_24 (sequence is synthesized)
tttaataaatcccagtggtcctttgtgtagggaacggggatgctcatagcctatggggcggctggagaaccagtcagggaccctgagggctcgatgtacactttacatgggtgggccaag

SEQ ID NO: 256890 - DNA, 120 bp, Artificial Sequence
  ENSG00000124523_25 (sequence is synthesized)
gagtttacactgagggcactggtaatacctgtaatagtcttatagtacttataaagcagttttgcacataaaataccatcatgcacttataagtttgttcttgggctgctccaagttaac

SEQ ID NO: 256891 - DNA, 120 bp, Artificial Sequence
  ENSG00000124523_26 (sequence is synthesized)
tttattcattttcctagtgttagtgtctcagggagtctgattatatttttgatttgtaatttctatctgactaaggcctagagatttcaaaactgttctttgcaattcctctcatactga

SEQ ID NO: 256892 - DNA, 120 bp, Artificial Sequence
  ENSG00000124523_27 (sequence is synthesized)
acctctggttcagcagctttttttgttgttgttgttttcaagttttatcatttttgttcctatttggttttgtcgtttttaaattgagaattgcttctaaaacagaagacatgaaaagag

SEQ ID NO: 256893 - DNA, 120 bp, Artificial Sequence
  ENSG00000124523_28 (sequence is synthesized)
aattaaaaatacaatatatgtgtaagatagaattattcaacttagcatttattaaacatctaccagatgatagacattagaaataaaatgactagcaagacctggcccttcccctcaggg

SEQ ID NO: 256894 - DNA, 120 bp, Artificial Sequence
  ENSG00000124523_29 (sequence is synthesized)
gttcacagaatggctggagcaactgtcatataagctgttatgaagtgcagaaactacacagacatttgtgcgggttcagaccagcgcaattagagatgggcagagtgggatggggtaggg

SEQ ID NO: 256895 - DNA, 120 bp, Artificial Sequence
  ENSG00000124523_30 (sequence is synthesized)
gtaaggtgcttgaaatttgcctgggtgggaatttttgaagtataaaaaggacttctacctggggggctgcggcagtagagggaagagcacggtcggtacaaatgcatggcaggtgtgaaa

SEQ ID NO: 256896 - DNA, 120 bp, Artificial Sequence
  ENSG00000124523_31 (sequence is synthesized)
cagtttgatttgttcaaagaatgatgaatcacttagtgttgtataatggatgggaggagagaaacacagcgatcacaaagggccatgtttgccaagaaataaaatatacttggaaaaaaa

SEQ ID NO: 256897 - DNA, 120 bp, Artificial Sequence
  ENSG00000124523_32 (sequence is synthesized)
gtacgtatgtgtatataccacaaaactcgggtgcattctctagggaccggcgaagccattctttcaggagatatgctcagcatttgccacgggccagctgctgttccaggtcgtgggtta

SEQ ID NO: 256898 - DNA, 120 bp, Artificial Sequence
  ENSG00000124523_33 (sequence is synthesized)
gggcccggcaccaggaagggcgcccctcccacagggccgacatcctaaccggcgtcgctgcggccgcggagctgggaaggccgagggcgccgggcacgtctgtgcagatttctttagagt

SEQ ID NO: 256899 - DNA, 120 bp, Artificial Sequence
  ENSG00000124523_34 (sequence is synthesized)
ccaggtctgtcgcccgcgtcttcgtcggtggcagcagggctgactggccacggcggccatctgctagagcgcatttcttcccatgaaacgccacctcctccgaagtgcggagcgaacgca

SEQ ID NO: 256900 - DNA, 120 bp, Artificial Sequence
  ENSG00000124523_35 (sequence is synthesized)
gccaaatctacacaaagactgacaagctggatccactcgacggaacccagggccaaaaaacggcggcgagcagcgcctcgggcccgcgattaccggttttctgagcaccggacagcgtga

SEQ ID NO: 256901 - DNA, 120 bp, Artificial Sequence
  ENSG00000124523_36 (sequence is synthesized)
gccgtgccagccctgtctcgccatcccagccgaggagggcagcgcgatggctcttccctgccttgaaatcaaccccattgccagccgctttcgccggcagagcattttccgtggggtcca

SEQ ID NO: 256902 - DNA, 75 bp, Artificial Sequence
  ENSG00000124523_37 (sequence is synthesized)
cacacgaaaccagatttgcctgaaaatggctcggccaagttcaacacaaggctgagagaaattaagacggtcacg

SEQ ID NO: 256903 - DNA, 120 bp, Artificial Sequence
  ENSG00000124523_38 (sequence is synthesized)
atctctggaagggatgtgagttcaggtatggcagattttcgaaagttttttgcaaaagcaaagcacatagtcatcatctcaggagctggtgttagtgcagaaagtggtgttccgaccttc

SEQ ID NO: 256904 - DNA, 120 bp, Artificial Sequence
  ENSG00000124523_39 (sequence is synthesized)
ccggcctctgtttgttttattcgttgcattgtctccagtttccagaactctggcacattataggtgcttaatggattttcgttggctgaacgaaagcagtcataaataaatactgcaata

SEQ ID NO: 256905 - DNA, 120 bp, Artificial Sequence
  ENSG00000124523_40 (sequence is synthesized)
agcaagaaaatgcagatagagaaaaagaagaaaataaaactggagtatttccacaacccaagtttagagttggcccccacctcccatgccatggactgagcagcaggggcccagcatccc

SEQ ID NO: 256906 - DNA, 120 bp, Artificial Sequence
  ENSG00000124523_41 (sequence is synthesized)
ttggatatggtggctgtgtcttcatgtgaaagaaactgaacttggtggtttttcctgccagttcaggagagattcttggcatgtaatatatatcactgctcaagtcaagcctcctaaaac

SEQ ID NO: 256907 - DNA, 120 bp, Artificial Sequence
  ENSG00000124523_42 (sequence is synthesized)
cacagacctgtttcagctgctacttcagccaaaattcttcagcttcatattgtcttgaaaacctatgattgtctctaacaaacaggctacttgctagttagaaattcttatcaatttggc

SEQ ID NO: 256908 - DNA, 120 bp, Artificial Sequence
  ENSG00000124523_43 (sequence is synthesized)
aagctacttatcaaccagactgaccacaagaactgtcatctcatcaatgaaggagtaactgatcaatgaagccagcaatgcttttttcttggcatcatcaaagctgacatttagaagaga

SEQ ID NO: 256909 - DNA, 120 bp, Artificial Sequence
  ENSG00000124523_44 (sequence is synthesized)
tgctggtgatagtcatctcatcctactcaatttttcaaaggcagaaaccaaccctggagcaattgagaggactgtttaaacacagagcttaacaatggcagaattgtatatctcgtgctt

SEQ ID NO: 256910 - DNA, 120 bp, Artificial Sequence
  ENSG00000124523_45 (sequence is synthesized)
aacagattttggttgaactttaccctaggtcaggggtcagcaaactactgcctgtgggccaaatttgcccaccacctgtatctgtaaataaggtttcattggaacacagctgtggccata

SEQ ID NO: 256911 - DNA, 120 bp, Artificial Sequence
  ENSG00000124523_46 (sequence is synthesized)
tgtttgtatattgtgtgtggctgcttttgcattaggatgacagaggtgaatagttgcaacagagactggctggtctgcaaagcctaaaatatgtcctgtgtggccctttacagaaaaagt

SEQ ID NO: 256912 - DNA, 120 bp, Artificial Sequence
  ENSG00000124523_47 (sequence is synthesized)
tttctaacccctgctctaggttacggagaaaaaaaaaatggaataatgttctctgctacttttaacctgattttctttgttacctaaataggcagctagaatgctgcctatattttaata

SEQ ID NO: 256913 - DNA, 120 bp, Artificial Sequence
  ENSG00000124523_48 (sequence is synthesized)
aggatttggatctcacaagacaccttaggccttacacaagttgttcagattctttgccccagttctaatctagtgacaaaggcatagaattctcctcccacaggaatgtatttctatttt

SEQ ID NO: 256914 - DNA, 120 bp, Artificial Sequence
  ENSG00000124523_49 (sequence is synthesized)
caaggtgttaattagttccagttttggttttgtcgttttccccatgtccgatgcttatattggatgatttctgataaaccctgactattccaataaaccctaggcatttttgaatttaaa

SEQ ID NO: 256915 - DNA, 120 bp, Artificial Sequence
  ENSG00000124532_0 (sequence is synthesized)
gcggtagcgacaggtcagagctgcggcctgagcagccagcgtccggcatgaaggtctggggtctggctgctgcctgcttcttgctccagcaccatggaatgcctgcgcagtttaccctgc

SEQ ID NO: 256916 - DNA, 120 bp, Artificial Sequence
  ENSG00000124532_1 (sequence is synthesized)
ctcctgccccgcgcgatgagacttccccggcggacgctgtgtgccctggccttggacgtgacctctgtgggtcctcccgttgctgcctgcggccgccgagccaacctgattggaaggagc

SEQ ID NO: 256917 - DNA, 120 bp, Artificial Sequence
  ENSG00000124532_2 (sequence is synthesized)
cgagcggcgcagctttgcgggcccgaccggctccgcgtggcaggtgaagtgcaccggtttagaacctctgacgtctctcaagccactttagccagtgtagccccagtatttactgtgaca

SEQ ID NO: 256918 - DNA, 120 bp, Artificial Sequence
  ENSG00000124532_3 (sequence is synthesized)
aaatttgacaaacagggaaacgttacttcttttgaaaggaagaaaactgaattataccaagagttaggtcttcaagccagagatttgagatttcagcatgtaatgagtatcacagtcaga

SEQ ID NO: 256919 - DNA, 120 bp, Artificial Sequence
  ENSG00000124532_4 (sequence is synthesized)
aacaataggattatcatgagaatggagtatttgaaagctgtgataactccagagtgtcttctgatattagattatcgtaatttaaacttagagcaatggctgttccgggaactcccttca

SEQ ID NO: 256920 - DNA, 120 bp, Artificial Sequence
  ENSG00000124532_5 (sequence is synthesized)
cagttgtctggagagggtcaactcgttacataccctttaccttttgagtttagagctatagaagcactcctgcaatattggatcaacacccttcaggggaaacttagcattttgcagcca

SEQ ID NO: 256921 - DNA, 120 bp, Artificial Sequence
  ENSG00000124532_6 (sequence is synthesized)
ctgatccttgagaccttggatgctttggtggaccccaaacattcttctgtagacagaagcaaactgcacattttactacagaatggcaaaagtctatcagagttagaaacagatattaaa

SEQ ID NO: 256922 - DNA, 120 bp, Artificial Sequence
  ENSG00000124532_7 (sequence is synthesized)
attttcaaagagtcaattttggagatcttggatgaggaagagttgctagaagagctctgtgtatcaaaatggagtgacccacaagtctttgaaaagagcagtgctgggattgaccatgca

SEQ ID NO: 256923 - DNA, 120 bp, Artificial Sequence
  ENSG00000124532_8 (sequence is synthesized)
gaagagatggagttgctgttggaaaactactaccgattggctgacgatctctccaatgcagctcgtgagcttagggtgctgattgatgattcacaaagtattattttcattaatctggac

SEQ ID NO: 256924 - DNA, 120 bp, Artificial Sequence
  ENSG00000124532_9 (sequence is synthesized)
agccaccgaaacgtgatgatgaggttgaatctacagctgaccatgggaaccttctctctttcgctctttggactaatgggagttgcttttggaatgaatttggaatcttcccttgaagag

SEQ ID NO: 256925 - DNA, 120 bp, Artificial Sequence
  ENSG00000124532_10 (sequence is synthesized)
gaccatagaattttttggctgattacaggaattatgttcatgggaagtggcctcatctggaggcgcctgctttcattccttggacgacagctagaagctccattgcctcctatgatggct

SEQ ID NO: 256926 - DNA, 120 bp, Artificial Sequence
  ENSG00000124532_11 (sequence is synthesized)
tctttacctaaaaagactcttctggcagatagaagcatggaattgaaaaatagcctcagactggatggacttggatcaggaaggagcatcctaacaaaccgttaggaacagccccgtgga

SEQ ID NO: 256927 - DNA, 120 bp, Artificial Sequence
  ENSG00000124532_12 (sequence is synthesized)
tactgaagttttttttatggtagttacaggaaacttctgatactctttttattattttcttgtatagagtcagacacttgaaaaaaactaatgtttgaagacaaaaatattttggcagtc

SEQ ID NO: 256928 - DNA, 120 bp, Artificial Sequence
  ENSG00000124532_13 (sequence is synthesized)
aaattctatttcctacaaactttaaatgctgtttttatagatgtgatatgaggcaacacaagcacagacagttgcatagattttaatttatacatatcaagaaaagtgcaatttcatgct

SEQ ID NO: 256929 - DNA, 120 bp, Artificial Sequence
  ENSG00000124532_14 (sequence is synthesized)
gaatgaagcgtaggaacttgacaagcccataggtagctatagttctttgtcagtatagggaattatgttcatgtgaatttcctgattctcaggtgactaaaaagctagcattctatgtat

SEQ ID NO: 256930 - DNA, 120 bp, Artificial Sequence
  ENSG00000124532_15 (sequence is synthesized)
taaccttacaacagactctgtaagtttgagctttaaaaaccaaactttgacataaccttatttcttgtatttgcccccttttttttataaaaggtgaataaaaagaaataatttaatatc

SEQ ID NO: 256931 - DNA, 120 bp, Artificial Sequence
  ENSG00000124532_16 (sequence is synthesized)
accattgtatggattcctaatcaagatttcacgttctcagcccctgagactagttttctttgctctctgtaattagagcctttggaagcaaagttgaaaggaagtatttccattctgtta

SEQ ID NO: 256932 - DNA, 120 bp, Artificial Sequence
  ENSG00000124532_17 (sequence is synthesized)
ctgttttgtagcactttgtccatttattgatttttaaagtagatatttagataccacccctgccctgccccaaaaagaaaaatgtttattgtcctgctaatctatatgcctacacctcag

SEQ ID NO: 256933 - DNA, 120 bp, Artificial Sequence
  ENSG00000124532_18 (sequence is synthesized)
aagctgacagatgagcttcctaaaacatgaggatgaataaatgttagaactgtgatatcttctcatttccacagagatttgggtttaaaacaaatggctaatatttgtaagcctgaaagc

SEQ ID NO: 256934 - DNA, 120 bp, Artificial Sequence
  ENSG00000124532_19 (sequence is synthesized)
tgccatcctctttaacatcctacctaccttttaaaatattttctggaggttaagtacagttaggcactagaacatttgttaagcctcccaaagtagtgtgcatggaagattctagagtgt

SEQ ID NO: 256935 - DNA, 120 bp, Artificial Sequence
  ENSG00000124532_20 (sequence is synthesized)
ccagctcttgcactacaaatgtaataataacagaataaatacacttaccctgatgatattgagggtacatgattagcctaatgtgatgtcatatgaggaagtttaggagtccatttttca

SEQ ID NO: 256936 - DNA, 120 bp, Artificial Sequence
  ENSG00000124532_21 (sequence is synthesized)
ggtggtttggtgataggaataaaaatgttactcccgtcgctgatttggaagaaaaccgatgaagtacaagtaaggtttccccactcctgtgtgtggtcatgggaagccattagagggaag

SEQ ID NO: 256937 - DNA, 120 bp, Artificial Sequence
  ENSG00000124532_22 (sequence is synthesized)
ctgcagaacagaatggaacaggacaggctgggctagactcgagcacgcagtggcccctgtgccaccacactgtgggtcaggaacacgcgtcatggtgttcttgtcggaatgtgaacatac

SEQ ID NO: 256938 - DNA, 120 bp, Artificial Sequence
  ENSG00000124532_23 (sequence is synthesized)
agcaccctctagcattacgaatctcttaggatttttaagattgtatttgataatacttatatttcacagggcacacttttggcacacctcagagcacactgctgctattttgggtcgtat

SEQ ID NO: 256939 - DNA, 120 bp, Artificial Sequence
  ENSG00000124532_24 (sequence is synthesized)
cactgtaaaatacataataagtactacttaactgtgacatgaagaattggaatcccagagggcaacatttgatttgactaagatcaggcataagatagaatttttgtcatttttccttgc

SEQ ID NO: 256940 - DNA, 120 bp, Artificial Sequence
  ENSG00000124532_25 (sequence is synthesized)
agttttattgacttagtttatgagcttggataaaataattttttgatgaatcatgtcaataaaaggaaaaataatgtaactacctcataagtctgataaaaggaagttgctagtgtttta

SEQ ID NO: 256941 - DNA, 120 bp, Artificial Sequence
  ENSG00000124532_26 (sequence is synthesized)
tagaatttctgaaggtggttaaatcaagtatgatttcaaaatatcaactagttccacttttgtgattgcaggatgcttcttatactaaagttctcataaataataaatcagcttatgcca

SEQ ID NO: 256942 - DNA, 120 bp, Artificial Sequence
  ENSG00000124532_27 (sequence is synthesized)
gcctgggattaagttgtcacaggcactatggcccttgcgagttgctttctcaaacttccttcagtttccctatctgtcagttaagtcggtattacctgcttcatagggttatgggaagaa

SEQ ID NO: 256943 - DNA, 120 bp, Artificial Sequence
  ENSG00000124532_28 (sequence is synthesized)
ttaaacaatatgtgtaaagcacttactagcacactgcctaacacaataagttagaaatataatttgtgtagaactctgacaacatacatttaaacagatgttagtaattctggtataagg

SEQ ID NO: 256944 - DNA, 120 bp, Artificial Sequence
  ENSG00000124532_29 (sequence is synthesized)
tttgtcataaccaaatggaaatgtaggaaacatttataacgttcttaaaagatagaaaattcacctccattttctttgtacttgaagatggcaccactggaataaatacttaagacactg

SEQ ID NO: 256945 - DNA, 120 bp, Artificial Sequence
  ENSG00000124532_30 (sequence is synthesized)
gttccttggttttaaattttgaactaaaatggactgagcacattaattactgtttgaaagtaggtaccaaacactgggttatgtgagtgagtaagcaatcatatcgcctgtcaaacacat

SEQ ID NO: 256946 - DNA, 120 bp, Artificial Sequence
  ENSG00000124532_31 (sequence is synthesized)
caagtgtcgaacacgtcaaggtgtgatactgtctttggaaggctcctaaacaaatgtgagcacaattattaacaccttattcttcatgaacacagactgttaagcagcactaaccaattt

SEQ ID NO: 256947 - DNA, 120 bp, Artificial Sequence
  ENSG00000124532_32 (sequence is synthesized)
tatattaaaaagctatttattttggtgagttattccaagagttgtatacagctttattttttggaattgcaatattaaagttgcacgttggatttaactctcatgactttagtaatacct

SEQ ID NO: 256948 - DNA, 120 bp, Artificial Sequence
  ENSG00000124532_33 (sequence is synthesized)
acagaggtgagctaatggatggtacatggagtagggactgcagagaccctagttttgtccccactccatcttcaaataattttggtctcttaggtctgtgatacaaaggcataaaacaat

SEQ ID NO: 256949 - DNA, 120 bp, Artificial Sequence
  ENSG00000124532_34 (sequence is synthesized)
tcctatcttgaagccttgagaaaagctgttacatatacgcagatagtagcaagacagaaaatgcaaatatgtaaatgtcttctgatatcttgaaataaagataaatttcagttaaacttg

SEQ ID NO: 256950 - DNA, 85 bp, Artificial Sequence
  ENSG00000124532_35 (sequence is synthesized)
gattgggttttgaagatcgatatttttaatggatttaaaaaataaaggctgggcaccttggctcaacgcctgtaatcccagcact

SEQ ID NO: 256951 - DNA, 120 bp, Artificial Sequence
  ENSG00000124535_0 (sequence is synthesized)
gccgagggcgggcggacgcgggagctgcggacgtgaggcatgagcggcgccctcctccggcccgcgagcgtcctgctggttccccgagcgagggtctcgcggcgcggggcctagcggagg

SEQ ID NO: 256952 - DNA, 120 bp, Artificial Sequence
  ENSG00000124535_1 (sequence is synthesized)
gcctagcggagggcatcgaaggcctccgcgtgcgcacgggttgctgcggccgcgccgggcgccggggagggcggcggccgccatggaggtgagcgggccggaagacgaccccttcctttc

SEQ ID NO: 256953 - DNA, 120 bp, Artificial Sequence
  ENSG00000124535_2 (sequence is synthesized)
gcgggccggaagacgaccccttcctttcgcagctgcaccaggtgcagtgccccgtgtgccagcagatgatgcccgccgcgcacatcaactcgcacctggaccgctgtctgctgctccacc

SEQ ID NO: 256954 - DNA, 120 bp, Artificial Sequence
  ENSG00000124535_3 (sequence is synthesized)
cggggagcgggccaaggggccctcgccgcccggcgccaagaggcggcggctgtcggagagctcggcgctgaagcagccagccaccccgacggcagccgagagcagcgagggcgagggtga

SEQ ID NO: 256955 - DNA, 120 bp, Artificial Sequence
  ENSG00000124535_4 (sequence is synthesized)
ccaccccgacggcagccgagagcagcgagggcgagggtgaggagggcgacgacggcggcgagaccgagagccgcgagagctacgacgcgccgcccacacccagcggcgcccgccttatcc

SEQ ID NO: 256956 - DNA, 80 bp, Artificial Sequence
  ENSG00000124535_5 (sequence is synthesized)
atccccgacttcccggtggcccgctccagcagccccgggaggaaggggtcggggaagaggccggcggccgccgccgcggc

SEQ ID NO: 256957 - DNA, 120 bp, Artificial Sequence
  ENSG00000124535_6 (sequence is synthesized)
aggaggaggaggccgtgggcgacggcgatggcgacggggacgcggacgcggacggcgaggacgacccggggcactgggacgcggacgctgccgaagccgccaccgccttcggggccagtg

SEQ ID NO: 256958 - DNA, 120 bp, Artificial Sequence
  ENSG00000124535_7 (sequence is synthesized)
gcgggggccgcccgcacccccgggcgctggctgccgaggagatccgacagatgctacagggcaagccgctggccgacacgatgcgtcctgacacgctgcaggattacttcgggcagagca

SEQ ID NO: 256959 - DNA, 120 bp, Artificial Sequence
  ENSG00000124535_8 (sequence is synthesized)
aggccgtgggccaggataccctgctgcgctcgctcctggagaccaacgaaatcccctcgcttatcctgtgggggccgccgggctgcggcaagaccactctggctcacatcatagccagca

SEQ ID NO: 256960 - DNA, 120 bp, Artificial Sequence
  ENSG00000124535_9 (sequence is synthesized)
acagcaagaaacatagcataaggtttgtgacattatctgcaacaaatgccaagacaaatgatgtgcgagatgtcataaaacaagctcaaaatgaaaagagctttttcaaaaggaaaacca

SEQ ID NO: 256961 - DNA, 120 bp, Artificial Sequence
  ENSG00000124535_10 (sequence is synthesized)
tcctttttattgatgagattcatcggttcaataaatctcagcaggacactttccttcctcacgtggaatgtgggacgatcactctgattggggcaaccactgaaaacccttccttccagg

SEQ ID NO: 256962 - DNA, 120 bp, Artificial Sequence
  ENSG00000124535_11 (sequence is synthesized)
tcaacgctgctcttctgagccgctgtcgagtgattgttcttgagaagcttccagtagaggcaatggtgactattttaatgcgagcgatcaactccctgggaatccacgtcctagactcta

SEQ ID NO: 256963 - DNA, 120 bp, Artificial Sequence
  ENSG00000124535_12 (sequence is synthesized)
gccgtcccactgaccctctgagccacagcagcaacagcagctcagagcccgccatgttcatagaggataaagcagtagacaccctggcttacctcagtgacggtgacgcccgagctgggt

SEQ ID NO: 256964 - DNA, 120 bp, Artificial Sequence
  ENSG00000124535_13 (sequence is synthesized)
tgaacggactgcagctggcggtgctggctaggttaagctctaggaagatgttctgtaagaagagtgggcaatcctattctcccagtagagttctgatcacagagaatgacgtgaaggagg

SEQ ID NO: 256965 - DNA, 120 bp, Artificial Sequence
  ENSG00000124535_14 (sequence is synthesized)
gcctacagcgatcccacattttatatgaccgggcaggtgaggagcattacaactgcatctccgccctgcacaagtccatgcggggctcagaccagaacgcctccctctactggctggctc

SEQ ID NO: 256966 - DNA, 120 bp, Artificial Sequence
  ENSG00000124535_15 (sequence is synthesized)
gcatgctcgagggaggagaggacccactctacgtggcacggaggcttgtcaggtttgccagcgaggacataggtctggcagacccgtctgcgttaacacaagcggttgctgcctaccaag

SEQ ID NO: 256967 - DNA, 120 bp, Artificial Sequence
  ENSG00000124535_16 (sequence is synthesized)
ctttgccagagccccaaagtccattgaggtgtacagcgcctacaacaacgtcaaagcctgcctgaggaaccaccaggggccactgccccccgtgcccctgcacctgaggaacgcgcccac

SEQ ID NO: 256968 - DNA, 120 bp, Artificial Sequence
  ENSG00000124535_17 (sequence is synthesized)
taggctgatgaaggatttgggctatggcaaaggctacaagtacaaccccatgtacagcgagcctgtggatcaggagtacctgcctgaagagttgaggggggtagatttcttcaagcagag

SEQ ID NO: 256969 - DNA, 120 bp, Artificial Sequence
  ENSG00000124535_18 (sequence is synthesized)
gaggtgctgactcctcagggcacgacagcagaaggatgttgcttttttaagggagggccagaaagaaagttagtggattgcaaagttggttgcctggtggaagttagaacagaccaacat

SEQ ID NO: 256970 - DNA, 120 bp, Artificial Sequence
  ENSG00000124535_19 (sequence is synthesized)
tttgtgccagaaatttaagagttccataggtggaggcgcagttctttcgaataaatgtgtaactttgaaattgtgttcatttgcactcggtgcagcggttatgcttatgaaaatacctgg

SEQ ID NO: 256971 - DNA, 120 bp, Artificial Sequence
  ENSG00000124535_20 (sequence is synthesized)
cagctttgtgcaatgaattaatgttataaggaattatctattttgtcatagtatttaagtcataatgtcatttcagaattcagttctgtaggattttcttttctttaaaaaatgtatatt

SEQ ID NO: 256972 - DNA, 120 bp, Artificial Sequence
  ENSG00000124535_21 (sequence is synthesized)
ctgggtagttttaattggtaaaaaaatgtaattgtgatttaatactgcatagtgttttgggtattttttttatatgcaaaggtcttacgagccaataaaactatttcaaagtactcttcg

SEQ ID NO: 256973 - DNA, 120 bp, Artificial Sequence
  ENSG00000124535_22 (sequence is synthesized)
attctgtcatggttttcctgcctggatgctaggtaccagcgttgtcaccattgcatttggtgggtggatactgggaaggagaaatcaccccagatgggaagagtggggagcttaagttaa

SEQ ID NO: 256974 - DNA, 120 bp, Artificial Sequence
  ENSG00000124535_23 (sequence is synthesized)
gaagtcagtgttatcttgttgaaagttaactctgatctctttaaaggaatacataaaggaattctttaaatggcttgtggaagactccagtagtcccatgcccattttttcccacttgtc

SEQ ID NO: 256975 - DNA, 120 bp, Artificial Sequence
  ENSG00000124535_24 (sequence is synthesized)
ctggtttcttcttgcagctccatatttctaaacagtcgtttttcttttactttatgtgtgtcctgaacacaaaatacgccactccttctgctcagttaagagttatttgtccctactgct

SEQ ID NO: 256976 - DNA, 120 bp, Artificial Sequence
  ENSG00000124535_25 (sequence is synthesized)
acttcctctccctctccttagttgcatgtcgtgcatatgcccacaaggatggccccttcaggtagtcggttctcctcctgctgttgcgtgatccctcctggggtcctcctgccatgtctg

SEQ ID NO: 256977 - DNA, 120 bp, Artificial Sequence
  ENSG00000124535_26 (sequence is synthesized)
gaaggctgccggctgttggcctgggacgtcctctgcctttattctgagtgagatgcccattttctggatgctccatcccgccttactggtttattccgctatttcagtgcaacccatcct

SEQ ID NO: 256978 - DNA, 120 bp, Artificial Sequence
  ENSG00000124535_27 (sequence is synthesized)
ctagtagttttatcaggctggagggactgtatgttgcagaggcttggcccgactggcctccctccttctgtctggagtggttgcactgcagtgtgcagttgccatccccagaatctccct

SEQ ID NO: 256979 - DNA, 120 bp, Artificial Sequence
  ENSG00000124535_28 (sequence is synthesized)
tcatcatcaccctggagctttcctctgcttctccctgcaccccatctgatgacaggactgactgctttctggcacaggtggcatgtaccctctagtagctttatggagcaggggtgtgtg

SEQ ID NO: 256980 - DNA, 120 bp, Artificial Sequence
  ENSG00000124535_29 (sequence is synthesized)
gaggaaaagtatttttagacctcaggagactcaaaatgcttttattgtaccttcagacgtgtctgagggtttggctagtaataaattgtaggtaagaaattacttgtgcattgttttaca

SEQ ID NO: 256981 - DNA, 120 bp, Artificial Sequence
  ENSG00000124535_30 (sequence is synthesized)
ctttcccacattgttgtcaagtttgaaggcatcctgatgtgtgtggtcttttgtttgtaacctctatcaacttgtagactcttctgtctttgctccccgtgttttaaaagtctgcactgg

SEQ ID NO: 256982 - DNA, 120 bp, Artificial Sequence
  ENSG00000124535_31 (sequence is synthesized)
gtacttgttgggcctttcaatctggaaactcctttcagttctagggaagtttctttttttattcaataaatttatttatttatgagaccaactcttgctctttttcccaggctggagggc

SEQ ID NO: 256983 - DNA, 120 bp, Artificial Sequence
  ENSG00000124541_0 (sequence is synthesized)
gccattcgtcttccgagcgctactgccagctgatgccgggagctaactaccgcgccggggccggggccggggccggggcccgacgtccccgcggggcccgggaccgcgaggaggacggcg

SEQ ID NO: 256984 - DNA, 120 bp, Artificial Sequence
  ENSG00000124541_1 (sequence is synthesized)
ggggcctggagcccgcggccgtggcccgcgacctattgaggggcacatctaacatgtcatttgaggagctgttggaattgcagagccaagtggggactaagacgtacaaacaattggtag

SEQ ID NO: 256985 - DNA, 120 bp, Artificial Sequence
  ENSG00000124541_2 (sequence is synthesized)
ctggaaatagtcctaagaaacaagcttctagaccacctatccaaaatgcatgtgttgcagataagcacaggcctctggaaatgtcagccaagatccgagtaccatttttacgtcaggttg

SEQ ID NO: 256986 - DNA, 120 bp, Artificial Sequence
  ENSG00000124541_3 (sequence is synthesized)
ttcccattagtaaaaaggtagcccgggaccctcgctttgatgatctgtcaggggaatataatcctgaggtgtttgacaaaacataccaattcttgaatgacatccgagcgaaagagaaag

SEQ ID NO: 256987 - DNA, 120 bp, Artificial Sequence
  ENSG00000124541_4 (sequence is synthesized)
acgaaagcaacagcaggagctgcacctggccctgaagcaagaacgtcgggctcaggcccagcagggccatcggccatacttcctgaaaaaatctgagcagcgccagttggcactagctga

SEQ ID NO: 256988 - DNA, 120 bp, Artificial Sequence
  ENSG00000124541_5 (sequence is synthesized)
gaagttcaaggagctgaaacgcagcaagaaattggagaacttcttgagtcgaaagaggcgacgaaatgcaggcaaggacaggagacatctccctttgagcaaagagtaataaggaactat

SEQ ID NO: 256989 - DNA, 120 bp, Artificial Sequence
  ENSG00000124541_6 (sequence is synthesized)
cctctgctctgccactgccccagggagacatggatctgtgaggacagatttggccacggctggtttccgttcaagggcaaggatcacagctgcccttgaatctcattgcctcagagaaga

SEQ ID NO: 256990 - DNA, 120 bp, Artificial Sequence
  ENSG00000124541_7 (sequence is synthesized)
ctagagggctcttggactatccctagggctacacaagaatagttcagccttctgccatgccacacagcctcagcttgaatctggttcattgcgtcctcgtgttcttctctcatccttgcc

SEQ ID NO: 256991 - DNA, 120 bp, Artificial Sequence
  ENSG00000124541_8 (sequence is synthesized)
ttaaaccagggattctgataccgaagaagaggggccaatgaaaaccatggagtctgttcgtgactcccagggctgggacattatgtaggagccacttcataaacattctctttactcatc

SEQ ID NO: 256992 - DNA, 120 bp, Artificial Sequence
  ENSG00000124541_9 (sequence is synthesized)
aaaaggtagctctaatgaaaaggaagagaagtagaatcagaagttaggacatctattgcttgatgcttctgggatgggtaagacgtagttctggtgatagaagttgaagctgcagcataa

SEQ ID NO: 256993 - DNA, 120 bp, Artificial Sequence
  ENSG00000124541_10 (sequence is synthesized)
tgagagatgaaagagaaactgctcttctggtgattttaaccctagggatgtagctactgggacaggaggaagtgagggacccagtgctgcagggtccctgttgtcacatatgtcaatcct

SEQ ID NO: 256994 - DNA, 120 bp, Artificial Sequence
  ENSG00000124541_11 (sequence is synthesized)
actttaaagtcaaataatggattctggctgataaagcctatcagaattatggtgttgatacgaaagtgtcacatagccaccaaaatgtgttctctactttcttgctttgctctgattagc

SEQ ID NO: 256995 - DNA, 120 bp, Artificial Sequence
  ENSG00000124541_12 (sequence is synthesized)
tggtcttttatagggtaggaagtgagccctatcttttgtgtagatttgtggcggggagtttcccaagcatgggaaatgggctcagatgatgtggttataaaatgtgaatgtccattaaaa

SEQ ID NO: 256996 - DNA, 120 bp, Artificial Sequence
  ENSG00000124541_13 (sequence is synthesized)
ggcagtcagtgttggctactctaagccttcaaattgttgcttttccccttcaacagggaccaaggggagatactggaaacctctgagcttcagctgttggtttttgggttttgtttttgt

SEQ ID NO: 256997 - DNA, 120 bp, Artificial Sequence
  ENSG00000124541_14 (sequence is synthesized)
tttattgagatacagttcacttaactatacagtttacccatttaaggtatacagtgttttttagtaaatttacagaattgtgcaactattacaattttggaacatttttgacacctcccc

SEQ ID NO: 256998 - DNA, 120 bp, Artificial Sequence
  ENSG00000124541_15 (sequence is synthesized)
ccaaaaaaacccctatgccccttagcagtcatcctcagtctcctcagccctaggcaaccactcatctactttctgtctttatagatttgcctatttgggacatttcctataaatggaatc

SEQ ID NO: 256999 - DNA, 120 bp, Artificial Sequence
  ENSG00000124541_16 (sequence is synthesized)
gaatataatcctgaggtgtttgacaaaacataccaattcttgaatgacatccgagcgaaagagaaagagctaacatttgcagaatgctaaccatgatactcattttccaatgtggagctt

SEQ ID NO: 257000 - DNA, 120 bp, Artificial Sequence
  ENSG00000124557_0 (sequence is synthesized)
atctcctaggctgaagctcctgaggggactcacatcagttatcttgctgctccagaagggtgggagatggcagttttcccaagctccggtctccccagatgtctgctcaccctcattctc

SEQ ID NO: 257001 - DNA, 120 bp, Artificial Sequence
  ENSG00000124557_1 (sequence is synthesized)
ctccagctgcccaaactggattcagctccctttgacgtgattggacccccggagcccatcctggccgttgtgggtgaggacgccgagctgccctgtcgcctgtctccgaacgcgagcgcc

SEQ ID NO: 257002 - DNA, 120 bp, Artificial Sequence
  ENSG00000124557_2 (sequence is synthesized)
gagcacttggagctacgctggttccgaaagaaggtttcgccggccgtgctggtgcatagggacgggcgcgagcaggaagccgagcagatgcccgagtaccgcgggcgggcgacgctggtc

SEQ ID NO: 257003 - DNA, 120 bp, Artificial Sequence
  ENSG00000124557_3 (sequence is synthesized)
caggacggcatcgccaaggggcgcgtggccttgaggatccgtggcgtcagagtctctgacgacggggagtacacgtgctttttcagggaggatggaagctacgaagaagccctggtgcat

SEQ ID NO: 257004 - DNA, 120 bp, Artificial Sequence
  ENSG00000124557_4 (sequence is synthesized)
ctgaaggtggctgctctgggctctgaccctcacatcagtatgcaagttcaagagaatggagaaatctgtctggagtgcacctcagtgggatggtacccagagccccaggtgcagtggaga

SEQ ID NO: 257005 - DNA, 120 bp, Artificial Sequence
  ENSG00000124557_5 (sequence is synthesized)
acttccaagggagagaagtttccatctacatcagagtccaggaatcctgatgaagaaggtttgttcactgtggctgcttcagtgatcatcagagacacttctgcgaaaaatgtgtcctgc

SEQ ID NO: 257006 - DNA, 120 bp, Artificial Sequence
  ENSG00000124557_6 (sequence is synthesized)
tacatccagaatctccttcttggccaggagaagaaagtagaaatatccataccagcttcctccctcccaaggctgactccctggatagtggctgtggctgtcatcctgatggttctagga

SEQ ID NO: 257007 - DNA, 120 bp, Artificial Sequence
  ENSG00000124557_7 (sequence is synthesized)
cttctcaccattgggtccatatttttcacttggagactatacaacgaaagacccagagagaggaggaatgaattcagctctaaagagagactcctggaagaactcaaatggaaaaaggct

SEQ ID NO: 257008 - DNA, 120 bp, Artificial Sequence
  ENSG00000124557_8 (sequence is synthesized)
accttgcatgcagttgatgtgactctggacccagacacagctcatccccacctctttctttatgaggattcaaaatctgttcgactggaagattcacgtcagaaactgcctgagaaaaca

SEQ ID NO: 257009 - DNA, 120 bp, Artificial Sequence
  ENSG00000124557_9 (sequence is synthesized)
gagagatttgactcctggccctgtgtgttgggccgtgagaccttcacctcaggaaggcattactgggaggtggaggtgggagacaggactgactgggcaatcggcgtgtgtagggagaat

SEQ ID NO: 257010 - DNA, 120 bp, Artificial Sequence
  ENSG00000124557_10 (sequence is synthesized)
gtgatgaagaaaggatttgaccccatgactcctgagaatgggttctgggctgtagagttgtatggaaatgggtactgggccctcactcctctccggacccctctcccattggcagggccc

SEQ ID NO: 257011 - DNA, 120 bp, Artificial Sequence
  ENSG00000124557_11 (sequence is synthesized)
ccacgccgggttgggattttcctagactatgaatcaggagacatctccttctacaacatgaatgatggatctgatatctatactttctccaatgtcactttctctggccccctccggccc

SEQ ID NO: 257012 - DNA, 120 bp, Artificial Sequence
  ENSG00000124557_12 (sequence is synthesized)
tctagcggtaaaaagcccctgaccatctgcccaattgctgatgggcctgagagggtcacagtcattgctaatgcccaggacctttctaaggagatcccattgtcccccatgggggaggac

SEQ ID NO: 257013 - DNA, 120 bp, Artificial Sequence
  ENSG00000124557_13 (sequence is synthesized)
tctgcccctagggatgcagacactctccattctaagctaatccctacccaacccagccaaggggcaccttaaggaatatctcagctcatctgttttcctttcctctaacccctctcctcc

SEQ ID NO: 257014 - DNA, 120 bp, Artificial Sequence
  ENSG00000124557_14 (sequence is synthesized)
atagccttctgaggcttcacctgctagctttacccagtctgtttcttcctgttgggtggcaattaattaatcctgtgaaggttacattgctgctgctagagagggtggggattgcacctt

SEQ ID NO: 257015 - DNA, 120 bp, Artificial Sequence
  ENSG00000124557_15 (sequence is synthesized)
ccaaatctgtttctgtaccaatatttgggggatggaggggtgactcaaactgcttctagtgttctcctaatcccttaagactagaacctataggaaactacttggagcaaactcaaagga

SEQ ID NO: 257016 - DNA, 120 bp, Artificial Sequence
  ENSG00000124557_16 (sequence is synthesized)
cagattagggatcgagattgggtcaggttagcatggggttgtggttgaaatatcttggtatccaggataagggtatgtggaaaaacaggctttaggcaagtggaaaattcaaaatgtgct

SEQ ID NO: 257017 - DNA, 120 bp, Artificial Sequence
  ENSG00000124557_17 (sequence is synthesized)
gtgaaaggacaatctcaggctgaaatcccataaaggaacttggagggaatattatgatggagggaagtgaggtgaatccaggcacatgatgaacacctggctcatccatagagttttcac

SEQ ID NO: 257018 - DNA, 120 bp, Artificial Sequence
  ENSG00000124557_18 (sequence is synthesized)
agcctatatcgcaaattttctaagccacgtcctataggacagaggagactggccccacttctatgggtctgagctgtggaaaagggagagcagagaggaactgagatgagcagggatgaa

SEQ ID NO: 257019 - DNA, 120 bp, Artificial Sequence
  ENSG00000124557_19 (sequence is synthesized)
gggtcaggcagaaagcgtgatagaggagagaatttttgacaaaactcaaaagttgtttgcacagctgttctttgtaccctgttcctttctctgcgccctcctgtttctcccttgcctgga

SEQ ID NO: 257020 - DNA, 120 bp, Artificial Sequence
  ENSG00000124557_20 (sequence is synthesized)
agtcattccaccctcaatttgttgatccacaagtttccagttgtcctcttctttttgttatagcatctctctatttcaaagacattcctagaagtcatccttcagtgatatcaccacttg

SEQ ID NO: 257021 - DNA, 120 bp, Artificial Sequence
  ENSG00000124557_21 (sequence is synthesized)
ctcagtcaccatctcaaccttatgtcacctcagccctcatctcaatgcccaaaccccttacacacaccttcagttagcttcaactgcctccgtttccacactgtgcacctttcactttcc

SEQ ID NO: 257022 - DNA, 120 bp, Artificial Sequence
  ENSG00000124557_22 (sequence is synthesized)
ctacccagctttcctacatgctgcctctcctcagggtcccctgaatgctgcatcattgtgttcagtgcagctggactgattgcacctgtgtatttgcccctgagcactttcctttacaca

SEQ ID NO: 257023 - DNA, 120 bp, Artificial Sequence
  ENSG00000124557_23 (sequence is synthesized)
tgtggcttgtcttgccaatagactccaggcttataccttccatttccatcgtattctccagtttccaggatagacgttgctcatcgtctttacctaataaataagtttgtctgattgctg

SEQ ID NO: 257024 - DNA, 120 bp, Artificial Sequence
  ENSG00000124562_0 (sequence is synthesized)
gcgtcacgtaacggagtggccaacggcctgcagagcaacatgcccaagttttattgtgactactgcgatacatacctcacccatgactctccatctgtgagaaagacacactgcagtgga

SEQ ID NO: 257025 - DNA, 120 bp, Artificial Sequence
  ENSG00000124562_1 (sequence is synthesized)
aggaaacacaaagagaatgtgaaagactattatcagaaatggatggaagagcaggctcagagcctgattgacaaaacaacggctgcatttcaacaaggaaagatacctcctactccattc

SEQ ID NO: 257026 - DNA, 120 bp, Artificial Sequence
  ENSG00000124562_2 (sequence is synthesized)
tctgctcctcctcctgcaggggcgatgataccacctccccccagccttccgggtcctcctcgccctggtatgatgccagcaccccatatggggggccctcccatgatgccaatgatgggc

SEQ ID NO: 257027 - DNA, 120 bp, Artificial Sequence
  ENSG00000124562_3 (sequence is synthesized)
cccaatgatgagacctcctgcccgtcccatgatggtgcccactcggcccggaatgactcgaccagacagataaggatagaggggaggccttattgtatcggttttatattacctgttctg

SEQ ID NO: 257028 - DNA, 120 bp, Artificial Sequence
  ENSG00000124562_4 (sequence is synthesized)
cttcaccaggagatcatgctgctgtgatactgagttttctaaacagcataaggaagacttgctcccctgtcctatgaaagagaatagttttggaggggagaagtgggacaaaaaagatgc

SEQ ID NO: 257029 - DNA, 120 bp, Artificial Sequence
  ENSG00000124562_5 (sequence is synthesized)
agttttcctttgtattgggaaatgtgaaaataaaattgtcaactctttcagttaaaagtgtgttccctttttcctcctctctgtgttctctgtgtattataaaagaaatgaaacattcca

SEQ ID NO: 257030 - DNA, 120 bp, Artificial Sequence
  ENSG00000124562_6 (sequence is synthesized)
gagtggggccccgaaatctgagggtgatcgtagtcactagttgtggcccccatgcaggagcggagagcgggttctggtttctgaaacctcgagggatgggagagtatctgggccgggtgg

SEQ ID NO: 257031 - DNA, 120 bp, Artificial Sequence
  ENSG00000124562_7 (sequence is synthesized)
acggaggcagggagatggagagcgctagacaccccattttagagtgcagatggatcccgcttaaggcaacaaaaaaaagcctggtttatgtgtcgacgctttgatgcttttgagtcgtga

SEQ ID NO: 257032 - DNA, 120 bp, Artificial Sequence
  ENSG00000124562_8 (sequence is synthesized)
ggcggtctggctttttgttttgtttgtttgttttgtttttatcttccatgaacagcgcttccgtggatgggcatctcagtggttgtcgtctttttctcttcctttcacctcttttcaggt

SEQ ID NO: 257033 - DNA, 120 bp, Artificial Sequence
  ENSG00000124562_9 (sequence is synthesized)
acctttcctacaactccgaacaaacgcttagtgctcctggaatgaggccgcccatgggaggccatatgccaatgatgcctgggcccccaatgatgagacctcctgcccgtcccatgatgg

SEQ ID NO: 257034 - DNA, 120 bp, Artificial Sequence
  ENSG00000124564_0 (sequence is synthesized)
gctccaaaaagtccaagggagtaagcttggaggaaacgctgggttcaacttgaagcccttccacagacattaagtcggtgaaaaccattcactaggagaggagaaacacaatggccacca

SEQ ID NO: 257035 - DNA, 120 bp, Artificial Sequence
  ENSG00000124564_1 (sequence is synthesized)
agacagagttgagtcccacagcaagggagagcaagaacgcacaagatatgcaagtggatgagacactgatccccaggaaagttccaagtttatgttctgctcgctatggaatagccctcg

SEQ ID NO: 257036 - DNA, 120 bp, Artificial Sequence
  ENSG00000124564_2 (sequence is synthesized)
tcttacatttctgcaatttcacaacgatagcacaaaatgtcatcatgaacatcaccatggtagccatggtcaacagcacaagccctcaatcccagctcaatgattcctctgaggtgctgc

SEQ ID NO: 257037 - DNA, 120 bp, Artificial Sequence
  ENSG00000124564_3 (sequence is synthesized)
ctgttgactcatttggtggcctaagtaaagccccaaagagtcttcctgcaaaggctcctgtgtatgactggtctcctcaaatccaaggcatcatctttggtgctgttggctatggtggca

SEQ ID NO: 257038 - DNA, 120 bp, Artificial Sequence
  ENSG00000124564_4 (sequence is synthesized)
tactgacaatggctcccagtggatacctggctggaagagtaggaacaaagcgagtggttggcatttctttgtttgcaacttcatttctcactctatgcatccctctggccactgactttg

SEQ ID NO: 257039 - DNA, 120 bp, Artificial Sequence
  ENSG00000124564_5 (sequence is synthesized)
gaatagtcttgctcattgtaactcgaatagtccagggcctaagccagtcctcaatacttgggggtcagtttgcaatttgggaaaagtggggccctccacaagaacgaagcagactctgca

SEQ ID NO: 257040 - DNA, 120 bp, Artificial Sequence
  ENSG00000124564_6 (sequence is synthesized)
gcattgctttatcaggaatgttactgggatgctttactgccatcctcataggtggcttcattagtgaaacccttgggtggccctttgtcttctatatctttggaggtgttggctgtgtct

SEQ ID NO: 257041 - DNA, 120 bp, Artificial Sequence
  ENSG00000124564_7 (sequence is synthesized)
gctgccttctctggtttgttgtgatttatgatgaccccgtttcctatccatggataagcacctcagaaaaagaatacatcatatcctccttgaaacaacaggtcgggtcttctaagcagc

SEQ ID NO: 257042 - DNA, 120 bp, Artificial Sequence
  ENSG00000124564_8 (sequence is synthesized)
aagctatgctcagatctctacccatttggtccatatgtttaggctgtttcagccatcaatggttagttagcacaatggttgtatacataccaacttacatcagctctgtgtaccatgtta

SEQ ID NO: 257043 - DNA, 120 bp, Artificial Sequence
  ENSG00000124564_9 (sequence is synthesized)
acatcagagacaatggacttctatctgcccttccttttattgttgcctgggtcataggcatggtgggaggctatctggcagatttccttctaaccaaaaagtttagactcatcactgtga

SEQ ID NO: 257044 - DNA, 120 bp, Artificial Sequence
  ENSG00000124564_10 (sequence is synthesized)
ggaaaattgccacaattttaggaagtctcccctcttcagcactcattgtgtctctgccttacctcaattccggctatatcacagcaactgccttgctgacgctctcttgcggattaagca

SEQ ID NO: 257045 - DNA, 120 bp, Artificial Sequence
  ENSG00000124564_11 (sequence is synthesized)
cattgtgtcagtcagggatttatatcaatgtcttagatattgctccaaggtattccagttttctcatgggagcatcaagaggattttcgagcatagcacctgtcattgtacccactgtca

SEQ ID NO: 257046 - DNA, 120 bp, Artificial Sequence
  ENSG00000124564_12 (sequence is synthesized)
gtggatttcttcttagtcaggaccctgagtttgggtggaggaatgtcttcttcttgctgtttgccgttaacctgttaggactactcttctacctcatatttggagaagcagatgtccaag

SEQ ID NO: 257047 - DNA, 120 bp, Artificial Sequence
  ENSG00000124564_13 (sequence is synthesized)
aatgggctaaagagagaaaactcactcgtttatgaagttatcccaccttggatggaaaagtcattaggcaccgtattgcataaaatagaaggcttccgtgatgaaaataccagtgaaaag

SEQ ID NO: 257048 - DNA, 120 bp, Artificial Sequence
  ENSG00000124564_14 (sequence is synthesized)
attttttttttcctgtggctcttttcaattatgagatcagttcattattttattcagacttttttttgagagaaatgtaagatgaataaaaattcaaataaaatgataactaagaatgca

SEQ ID NO: 257049 - DNA, 120 bp, Artificial Sequence
  ENSG00000124564_15 (sequence is synthesized)
gttgtcatcttcatagaattaacaatggattaagagggcttgctgtgtgggacccagtatgttagattccattactggatacaagaaacaatgttttaaaacctttaatccggggtgaca

SEQ ID NO: 257050 - DNA, 120 bp, Artificial Sequence
  ENSG00000124564_16 (sequence is synthesized)
aactcactagggcaatgatttttcctgtttgtgaaaattaatattactttctatttattgggttgagtattgtccatgtgttcttccctatatgtcctccatttatctccatcctgctca

SEQ ID NO: 257051 - DNA, 120 bp, Artificial Sequence
  ENSG00000124564_17 (sequence is synthesized)
ttccatctgagaaatgtatttcttattaccaaaaataatctaatatttaatactcatgccagtagcttttctggggtatgatttaagaggttactgattttcctaagaaagtatgatttc

SEQ ID NO: 257052 - DNA, 120 bp, Artificial Sequence
  ENSG00000124564_18 (sequence is synthesized)
caacaggtacatataaagacaccaacacttttctgagaccttgtatctggattttcttgaggccttaaatctggatttttaagggtgactaagtgtgtgagcatctgtcggatttaccgt

SEQ ID NO: 257053 - DNA, 120 bp, Artificial Sequence
  ENSG00000124564_19 (sequence is synthesized)
gaagaggaccagcagaatctggacttttgaaaaagaaaaaatctaactgaataacaacatcaaagtctcctgggcaaaggggttaaagatttacaacatttctttagaggaaaaaaataa

SEQ ID NO: 257054 - DNA, 120 bp, Artificial Sequence
  ENSG00000124564_20 (sequence is synthesized)
ctggttgaatttacagagcatctgctatgtgccaaacatttaatgagcactttaaaagcatgataaaaattaaaaaaaaacttgttaagcatgaaataaattacctataatgcaaaatca

SEQ ID NO: 257055 - DNA, 120 bp, Artificial Sequence
  ENSG00000124564_21 (sequence is synthesized)
aggactgtttttatgagttttgtgttatcattgtaatgtcaagattgtgtgtcaagtcaatatgaagtttaaaaccatttccaatatgttcacttgatttactcttttccattatttgga

SEQ ID NO: 257056 - DNA, 120 bp, Artificial Sequence
  ENSG00000124564_22 (sequence is synthesized)
tatcccattacacaggcacagtggatgatttaagtattccaggaagctgtttctataccaaagtacctagcaataatgtaacaattccccttatcaacccaaaccacataaatgtatccc

SEQ ID NO: 257057 - DNA, 120 bp, Artificial Sequence
  ENSG00000124564_23 (sequence is synthesized)
aaattttggtccaatgaaatgcattcccactgcagccttcccttcaccatatcaaaaaatgccaagagcaactccatagtactatggtacccaataggatggagatagtaactttaaaca

SEQ ID NO: 257058 - DNA, 120 bp, Artificial Sequence
  ENSG00000124564_24 (sequence is synthesized)
gtcggggccagagcgcaggtgtacctggcggccgtgctggagcacctgaccgccgagatcctggagctggctggcaacccggcccgcgacaagaagacccgcatcatcctgcgccacctg

SEQ ID NO: 257059 - DNA, 120 bp, Artificial Sequence
  ENSG00000124564_25 (sequence is synthesized)
tagctggccattcgcaacggcgaggagcttaacaagctgctgggcgaagtcaccatcgcgcagggcggtgtcctgcccaacattcagggcgtgcttctgccccagaagaccaagagccac

SEQ ID NO: 257060 - DNA, 120 bp, Artificial Sequence
  ENSG00000124568_0 (sequence is synthesized)
aaagttgagagaaaagtcttcacagcggaagaagaaatcacttttttgtcccgaatcagtgggtggaggcaaaacccttcagcaagaagagaagcaacttcagccgtgtatgcaaatgga

SEQ ID NO: 257061 - DNA, 120 bp, Artificial Sequence
  ENSG00000124568_1 (sequence is synthesized)
taaccggttgcctcccaaaaaagttccaggtttctgttcctttcgctatggattgtctttccttgtgcactgttgtaatgttataataacagcacagcgtgcgtgcctgaacctcacaat

SEQ ID NO: 257062 - DNA, 120 bp, Artificial Sequence
  ENSG00000124568_2 (sequence is synthesized)
ggtagtcatggtgaatagcacagatccacatggtttgcccaacacctccacaaagaagctcctggataatataaagaaccctatgtataattggagcccagatatccagggaatcatctt

SEQ ID NO: 257063 - DNA, 120 bp, Artificial Sequence
  ENSG00000124568_3 (sequence is synthesized)
gagttccacctcctatggtgtcatcatcatccaagttcctgttggatacttctctggaatatattctacaaagaaaatgattggctttgcattatgcctcagctctgtgttaagcctgct

SEQ ID NO: 257064 - DNA, 120 bp, Artificial Sequence
  ENSG00000124568_4 (sequence is synthesized)
catcccaccagcagctggaattggagtagcttgggtcgttgtatgtcgagcagttcagggagcagcccaggggatagttgcaacagcccagtttgaaatatatgtcaaatgggctcctcc

SEQ ID NO: 257065 - DNA, 120 bp, Artificial Sequence
  ENSG00000124568_5 (sequence is synthesized)
cctggaacgaggccgacttacttctatgagtacatcagggtttttgctgggaccctttattgtcctacttgtgactggagttatctgtgaatctctgggctggcccatggtcttctatat

SEQ ID NO: 257066 - DNA, 120 bp, Artificial Sequence
  ENSG00000124568_6 (sequence is synthesized)
ttttggtgcttgtggctgtgccgtatgtcttctctggttcgttctgttttatgatgaccccaaagaccacccatgtataagcatcagtgaaaaggaatacatcacatcctccctggtcca

SEQ ID NO: 257067 - DNA, 120 bp, Artificial Sequence
  ENSG00000124568_7 (sequence is synthesized)
tcaaggctatacttaagtcgcttccagtctgggctatttccactggtagttttacgtttttctggtcacataacatcatgacactatacactccaatgtttatcaactccatgcttcatg

SEQ ID NO: 257068 - DNA, 120 bp, Artificial Sequence
  ENSG00000124568_8 (sequence is synthesized)
ttaatataaaagagaatgggttcttgtcttcccttccctatttgtttgcctggatctgtggtaacctagcaggtcagttatcagacttcttcctgaccaggaatattctcagcgtaattg

SEQ ID NO: 257069 - DNA, 120 bp, Artificial Sequence
  ENSG00000124568_9 (sequence is synthesized)
ctgtccggaaactcttcacagcagcaggatttctccttcctgcaatctttggtgtctgcctgccttacctgagttccaccttctacagcattgtcattttcctaatacttgctggtgcaa

SEQ ID NO: 257070 - DNA, 120 bp, Artificial Sequence
  ENSG00000124568_10 (sequence is synthesized)
caggcagcttttgcttgggtggagtgtttataaatggcttggatattgctcccagatattttggatttattaaagcatgttcaactttaactggaatgataggaggactaattgcttcca

SEQ ID NO: 257071 - DNA, 120 bp, Artificial Sequence
  ENSG00000124568_11 (sequence is synthesized)
ctttgactggattgatccttaagcaggatccggaatccgcctggtttaaaaccttcatcctgatggcagccattaatgtgactggcctaattttctaccttatagttgctacagcagaaa

SEQ ID NO: 257072 - DNA, 120 bp, Artificial Sequence
  ENSG00000124568_12 (sequence is synthesized)
ttcaggactgggctaaagaaaaacaacacacacgtctctgaagtgtgaaacagagcacttgcagagcctgggacaacctccttattgaagggaagagggaccagcacatgaggctgaggc

SEQ ID NO: 257073 - DNA, 120 bp, Artificial Sequence
  ENSG00000124568_13 (sequence is synthesized)
tgaggggcagtcaccagcaccaggaagaaggtggtaggaggagtcctaggggccagttttaccctcccacatatcctgtgtgcatcgttttttaacatgtgttgtttgtaacatgtaata

SEQ ID NO: 257074 - DNA, 120 bp, Artificial Sequence
  ENSG00000124568_14 (sequence is synthesized)
tatctgaattttaaatgggggtggtgatttatctcagtcttcctctctgcatcagttgctttataaatgattgtcaaaccaataaatacacacaagataaaattttattctaaggcttca

SEQ ID NO: 257075 - DNA, 120 bp, Artificial Sequence
  ENSG00000124568_15 (sequence is synthesized)
aggactgggctaaagaaaaacaacacacacgtctctgaaggtgagaagtgatcagattaaggacaatttttgaaactgggaatgcaggagacagaggagataaggatgactcctcagacg

SEQ ID NO: 257076 - DNA, 120 bp, Artificial Sequence
  ENSG00000124568_16 (sequence is synthesized)
agaaggaataacgggtgcaggtttggagaagaggagaccatgttaagcctgagaatattagacatcctgaaatggctgtgggactctgtggggatgctaaggctggagatataaatttgg

SEQ ID NO: 257077 - DNA, 120 bp, Artificial Sequence
  ENSG00000124570_0 (sequence is synthesized)
cttcgcgctccggacgggcgacggtagctcgagacccgggactccgcccgcctccccgcgagtatttgaggtctgccatcatggatgttctcgcagaagcaaatggcacctttgccttaa

SEQ ID NO: 257078 - DNA, 120 bp, Artificial Sequence
  ENSG00000124570_1 (sequence is synthesized)
accttttgaaaacgctgggtaaagacaactcgaagaatgtgtttttctcacccatgagcatgtcctgtgccctggccatggtctacatgggggcaaagggaaacaccgctgcacagatgg

SEQ ID NO: 257079 - DNA, 120 bp, Artificial Sequence
  ENSG00000124570_2 (sequence is synthesized)
cccagatactttctttcaataaaagtggcggtggtggagacatccaccagggcttccagtctcttctcaccgaagtgaacaagactggcacgcagtacttgcttaggatggccaacaggc

SEQ ID NO: 257080 - DNA, 120 bp, Artificial Sequence
  ENSG00000124570_3 (sequence is synthesized)
tctttggggaaaagtcttgtgatttcctctcatcttttagagattcctgccaaaaattctaccaagcagagatggaggagcttgactttatcagcgccgtagagaagtccagaaaacaca

SEQ ID NO: 257081 - DNA, 120 bp, Artificial Sequence
  ENSG00000124570_4 (sequence is synthesized)
taaacacctgggtagctgaaaagacagaaggtaaaattgcggagttgctctctccgggctcagtggatccattgacaaggctggttctggtgaatgctgtctatttcagaggaaactggg

SEQ ID NO: 257082 - DNA, 120 bp, Artificial Sequence
  ENSG00000124570_5 (sequence is synthesized)
ggagaaatatttacccaaatcttggtgcttccatatgttggcaaggaactgaatatgatcatcatgcttccggacgagaccactgacttgagaacggtggagaaagaactcacttacgag

SEQ ID NO: 257083 - DNA, 120 bp, Artificial Sequence
  ENSG00000124570_6 (sequence is synthesized)
aagttcgtagaatggacgaggctggacatgatggatgaagaggaggtggaagtgtccctcccgcggtttaaactagaggaaagctacgacatggagagtgtcctgcgcaacctgggcatg

SEQ ID NO: 257084 - DNA, 120 bp, Artificial Sequence
  ENSG00000124570_7 (sequence is synthesized)
actgatgccttcgagctgggcaaggcagacttctctggaatgtcccagacagacctgtctctgtccaaggtcgtgcacaagtcttttgtggaggtcaatgaggaaggcacggaggctgca

SEQ ID NO: 257085 - DNA, 120 bp, Artificial Sequence
  ENSG00000124570_8 (sequence is synthesized)
gccgccacagctgccatcatgatgatgcggtgtgccagattcgtcccccgcttctgcgccgaccaccccttccttttcttcatccagcacagcaagaccaacgggattctcttctgcggc

SEQ ID NO: 257086 - DNA, 120 bp, Artificial Sequence
  ENSG00000124570_9 (sequence is synthesized)
cgcttttcctctccgtgaggacagggcagtcttggtgtgcagcccctctcctctctgtcccctgacactccacagtgtgcctgcaacccaagtggccttatccgtgcagtggtggcagtt

SEQ ID NO: 257087 - DNA, 120 bp, Artificial Sequence
  ENSG00000124570_10 (sequence is synthesized)
gattctccgggatattaccggagacggagtgttttattattagcctttcttaggtggacatttccatttgaattaaaagtcctttaggctgggcgtggtgcatggctgtaatctcagcac

SEQ ID NO: 257088 - DNA, 120 bp, Artificial Sequence
  ENSG00000124570_11 (sequence is synthesized)
aggcaggaagatcacttgaggccaggcgttggagagcagcctgggcaaggtggcaagaaccttgtctctacaaaaaaaaaagcgtctgccatcatggatgttctcgcagaagcaaatggc

SEQ ID NO: 257089 - DNA, 120 bp, Artificial Sequence
  ENSG00000124570_12 (sequence is synthesized)
gacccgaggaccccgggcgcccaggcccagcgcccacggaagaggcggccggcgcgggatgggggcggcgcagagcctcccgggccacaggtctgccatcatggatgttctcgcagaagc

SEQ ID NO: 257090 - DNA, 120 bp, Artificial Sequence
  ENSG00000124570_13 (sequence is synthesized)
ggcggctccggcgcctctgcccgccgttctgctcgctcgctccccgctctggagtacgtgtctggcttgggagccgctcggacacgctggcttgggtctgccatcatggatgttctcgca

SEQ ID NO: 257091 - DNA, 120 bp, Artificial Sequence
  ENSG00000124570_14 (sequence is synthesized)
cgcgagtatttgaggtccggggcggctccggcgcctctgcccgccgttctgctcgctcgctccccgctctggagtacgtgtctggcttgggagccgctcggacacgctggcttgggtttg

SEQ ID NO: 257092 - DNA, 120 bp, Artificial Sequence
  ENSG00000124570_15 (sequence is synthesized)
ggcttgggtttgtcgctccaaagtcgggaaagccgggggcgcgagcggggaggggggcagggtgggggtcgcgcggggccgggaacgcgcgtgggtcgacggcgcgcggggacgctggag

SEQ ID NO: 257093 - DNA, 120 bp, Artificial Sequence
  ENSG00000124570_16 (sequence is synthesized)
gagaatggggcgtggccgcgcggggctgtgaccccagcagtcccagcggggcgggggcccgggcgagcgtccggcttgggttcccttccggagcctcgcagcggcagagaacggcgacgc

SEQ ID NO: 257094 - DNA, 120 bp, Artificial Sequence
  ENSG00000124570_17 (sequence is synthesized)
tttttttttttttttttttgtcctaaagattggcttcggaaaactgaggtacagaaaattaataattaatgttcacatgctgtcaggaatactcagatgcgagggggcatctgagtccat

SEQ ID NO: 257095 - DNA, 120 bp, Artificial Sequence
  ENSG00000124570_18 (sequence is synthesized)
tttttgggcacttttgctttctgggatgctctcgtgcctaatgacagccctgcagctgcctgcatcctttctggtgggggtcaggcctgatgcgatgagatctgatgtgttcagtgacct

SEQ ID NO: 257096 - DNA, 120 bp, Artificial Sequence
  ENSG00000124570_19 (sequence is synthesized)
tctagttaaggtcctgggccggccttgtattgctggggcttttatgtgtgctgggattaacaccagtgactgctgttatcagcatagatggcgtttgttctcatttcaggaccgtatctg

SEQ ID NO: 257097 - DNA, 120 bp, Artificial Sequence
  ENSG00000124570_20 (sequence is synthesized)
agtaattgcatccattgtgatgtgccaccaaagagaaaagtactttggtcatactcgactatgtaaactaagtattttaagttaaggccaattccaatgcattttattacaattcagcat

SEQ ID NO: 257098 - DNA, 120 bp, Artificial Sequence
  ENSG00000124570_21 (sequence is synthesized)
gaaacagttaacacggaccagtaacagtagagtgaaattagcatgaatagaaccaacattcttttccacatatgtaataataagggcacccaagcagatgttgtacggtcccagggaaga

SEQ ID NO: 257099 - DNA, 120 bp, Artificial Sequence
  ENSG00000124570_22 (sequence is synthesized)
aagaccacacaccttacatttccaggcttactgcacttgggattaagccaaggcatccaaagaaagaaaattttttttttttttttttttgccaggctggagtgcagtggtgcgatttcg

SEQ ID NO: 257100 - DNA, 120 bp, Artificial Sequence
  ENSG00000124570_23 (sequence is synthesized)
tgggattacagatgtgagccactgcgcctagcctgaaaataatgtttaactcccatttatatgttaggctgctcagatatattaaacacatacacacacaacacacacacacacacacat

SEQ ID NO: 257101 - DNA, 120 bp, Artificial Sequence
  ENSG00000124570_24 (sequence is synthesized)
acacacacacacacatacacactgcacaaggaaacagagggacaaagcaggaagtccaagtttccattaaaccagtctttaaatggttaaatttagtaggaaataaaggcatccttaata

SEQ ID NO: 257102 - DNA, 120 bp, Artificial Sequence
  ENSG00000124570_25 (sequence is synthesized)
gaagttgagaagcacaattcaatagtgacacctaaaaaaaaattaagacttgattagttgaataaaatcaattgtgaacattgctcagttactggtgatgctacaggaaaaaaaaagtga

SEQ ID NO: 257103 - DNA, 120 bp, Artificial Sequence
  ENSG00000124570_26 (sequence is synthesized)
tgccaggatagatttgttaggcttgtttaaaaaatacataaaattgttcattaataagactttaatatccagtttttatgtctgtgattaaatatcattttttatttttaaatggtatag

SEQ ID NO: 257104 - DNA, 120 bp, Artificial Sequence
  ENSG00000124570_27 (sequence is synthesized)
tttttaaattttgaaacaattaattttgcataaatatttgtctatgtacatatatacatgtgtattcacatatatatatgaaggacacttagctatcttatttactgaagctaaagaagt

SEQ ID NO: 257105 - DNA, 120 bp, Artificial Sequence
  ENSG00000124570_28 (sequence is synthesized)
aggtccttaaaaagccattgacaggtcttgagtttgcaacgtgactgtgaaacaggcatccttgttactcacacgtttgctgaaaggataacagaaagccctcgatagaaaaatctcact

SEQ ID NO: 257106 - DNA, 120 bp, Artificial Sequence
  ENSG00000124570_29 (sequence is synthesized)
agattgtttataatttgttgatatttggagtatcttgagtggtaaactttaaatgtggatttattttttctttccttttaggatttggatctctccaatcttttttatgattaattgttc

SEQ ID NO: 257107 - DNA, 120 bp, Artificial Sequence
  ENSG00000124570_30 (sequence is synthesized)
agtgtttatgcattattgcgaagtgataatgaaaatgctcaaactcagggtcctgcaggcactgtgggggaggcagtggggacgtgaggggattacagatccagtagaagccccccgacc

SEQ ID NO: 257108 - DNA, 120 bp, Artificial Sequence
  ENSG00000124570_31 (sequence is synthesized)
cccatctgcttccaccccatctccttccagaacaccaccgatagccacaccgaagagttctcccatttgctggttcccggacaaaaaagctgctgatcccttgagcacactgcagtgaag

SEQ ID NO: 257109 - DNA, 120 bp, Artificial Sequence
  ENSG00000124570_32 (sequence is synthesized)
ctcccagctgacatgtcctgtccatgtaaacagaacttcctccatgtaaacagaacttccagcattgtttgtgttttcctcttaactatgtactgacatccaagggttgttaggaatgtt

SEQ ID NO: 257110 - DNA, 120 bp, Artificial Sequence
  ENSG00000124570_33 (sequence is synthesized)
tggaaagtctaggtacaaaagagagacctaaataaaataaagcaaacaccagccaccataacaaaaggaccccagagataggcagcgcagggaacggaagactcaataaactataattgt

SEQ ID NO: 257111 - DNA, 120 bp, Artificial Sequence
  ENSG00000124570_34 (sequence is synthesized)
ggtatccaaagaattagtatagaaggcaaaatggaatcaaatatcatgatgaaaagtgtaaatgagggaataaggtcagaagagaacattcatttatatgatttcttcttttttttttta

SEQ ID NO: 257112 - DNA, 120 bp, Artificial Sequence
  ENSG00000124570_35 (sequence is synthesized)
accttttaaacctctatttaggttcaggatacatacgcaggtttgtgacataggtaaactcatgtcgcaggttgttgtgcaggttatttcatcccccaggtactaagcctagtacccaat

SEQ ID NO: 257113 - DNA, 120 bp, Artificial Sequence
  ENSG00000124570_36 (sequence is synthesized)
agttattttttcctctccctcctcccacccttcaccctccaccctctgataggacccagtgtttgttgctcccctctttgtgtccacgttctcatcatttagcttccactcataagtgag

SEQ ID NO: 257114 - DNA, 120 bp, Artificial Sequence
  ENSG00000124570_37 (sequence is synthesized)
ctcataagtgagaacatgcggtatttggttttctgttccctgcgtgtgtttgctaaggataatggcctccagccccatccatgtttctgcaaaacacatgatctcattcttttttatggt

SEQ ID NO: 257115 - DNA, 70 bp, Artificial Sequence
  ENSG00000124570_38 (sequence is synthesized)
atgcgtgaacattcgcgtgcgtgtatctttatgggagaatgatttctattcctctctcctctggttgtat

SEQ ID NO: 257116 - DNA, 120 bp, Artificial Sequence
  ENSG00000124570_39 (sequence is synthesized)
acactgctttccccaatggttgaactgttttacacacccaccagcagtgtgtaagtgttcccttttctccacaaccttgccagtatctcttaatttttgactttttaataatagccattc

SEQ ID NO: 257117 - DNA, 78 bp, Artificial Sequence
  ENSG00000124570_40 (sequence is synthesized)
catttctctaatgatcagtgatactgagccttttttcttatggctgttggctgcattctttttaatggagttgtttgt

SEQ ID NO: 257118 - DNA, 120 bp, Artificial Sequence
  ENSG00000124570_41 (sequence is synthesized)
tgtctgttcatgtcctttgccttctttttaatggagttgtttgttttcttcttgtaaatttgtttaagttccatatagatgctggatatttgacctttgtcagatgcatagtttgtgaat

SEQ ID NO: 257119 - DNA, 120 bp, Artificial Sequence
  ENSG00000124570_42 (sequence is synthesized)
cctgttcctatgtccagaatggtattgcctagattgtcttccagggttttttatagttttggcttttacatctaagcctttaatccatcttgagttgatttttgtacatggtgtatgtaa

SEQ ID NO: 257120 - DNA, 120 bp, Artificial Sequence
  ENSG00000124570_43 (sequence is synthesized)
tttgtacatggtgtatgtaaggaaggggtccagtttcagtcttccagagcagaactttctaacttgtgtgtgggtgttgtgccctgggcaggttaacagatccctccaactcgaggagtc

SEQ ID NO: 257121 - DNA, 120 bp, Artificial Sequence
  ENSG00000124570_44 (sequence is synthesized)
tgggtggctggagctctgcactggtcacctttggggtgagtagcctggccccaaagtgacatacaaacatcattttctgtgtgtgtcacagcctggagaaaggtgagaagtcccagatga

SEQ ID NO: 257122 - DNA, 120 bp, Artificial Sequence
  ENSG00000124570_45 (sequence is synthesized)
tatcagtctaagagttttgtacttgacagaaaaagagaacaaagagccagtctggaggaaatcagcaagtgccttacatttttttcccaagctaggcttggtggctcatgcctataatcc

SEQ ID NO: 257123 - DNA, 120 bp, Artificial Sequence
  ENSG00000124570_46 (sequence is synthesized)
cagcactttgggaagccaacgtggaaagatagcttgaggccgggagtttgggaccagcctcggccaccgagcgagaccctgtctctacaaaaaataaaaatgaactgggcgtggtggtgt

SEQ ID NO: 257124 - DNA, 120 bp, Artificial Sequence
  ENSG00000124570_47 (sequence is synthesized)
ctgggcgtggtggtgtgcacctatcatatctagtctttggactagaaaaatctaaaatggtttggtaagactttgctgttgctttaaagcaatggtccccaacctttttggcaccaggga

SEQ ID NO: 257125 - DNA, 90 bp, Artificial Sequence
  ENSG00000124570_48 (sequence is synthesized)
ccccaacctttttggcaccagggaccagactggttttgtggaagacagtttttccactgataaagttgggggtatggtttcaagatacga

SEQ ID NO: 257126 - DNA, 120 bp, Artificial Sequence
  ENSG00000124570_49 (sequence is synthesized)
gttcaccgtaggttcactctcctacaagactccaacgctgccactgacctaacaggaggtggagctcaggcggtgatgttcgctcacctgctgctcacctcctgctgcgtggcccagttc

SEQ ID NO: 257127 - DNA, 120 bp, Artificial Sequence
  ENSG00000124570_50 (sequence is synthesized)
gcgacggtagctcgagacccgggactccgcccgcctccccgcgagtatttgaggtccggggcggctccggcgcctctgcccgccgttctgctcgctcgctccccgctctggatcctttag

SEQ ID NO: 257128 - DNA, 120 bp, Artificial Sequence
  ENSG00000124570_51 (sequence is synthesized)
agtcttggggcgccgggtgttaggagccgggcgggaggcggagagaggccgaggggttcggcgccaaacggtgccatccgggccccctgcgtgtgttcactggactggccgtgctgggct

SEQ ID NO: 257129 - DNA, 120 bp, Artificial Sequence
  ENSG00000124570_52 (sequence is synthesized)
tggccaatccgcagcactttcaggtcgcccagacctgtggagacgatcgtgtggaccagcccggatctccttaccgctctgtgtttgaattaaactccctacaggcaaactattacaggc

SEQ ID NO: 257130 - DNA, 120 bp, Artificial Sequence
  ENSG00000124570_53 (sequence is synthesized)
cagtgatccgcctgcctcggcctcccagtgttgggattactggcgtgagccccgcgcccgcccctggctggcttctttgccgcaagctgtttcatcagcaaagtctttgtgacctgtatc

SEQ ID NO: 257131 - DNA, 120 bp, Artificial Sequence
  ENSG00000124570_54 (sequence is synthesized)
cgcaagctgtttcatcagcaaagtctttgtgacctgtatctagtctgctcatttttaaatgcgtgttctgcactccccagtggatggccgtgtatcaggagccggcccttttctggaaac

SEQ ID NO: 257132 - DNA, 120 bp, Artificial Sequence
  ENSG00000124570_55 (sequence is synthesized)
aggccagcattcagtctccacagaggcaccataaacacgctggtggggccctgtactgtggtcaaagtcaaggcctccgggcaggactcgcggcccctccggctggcgggtggggttgac

SEQ ID NO: 257133 - DNA, 120 bp, Artificial Sequence
  ENSG00000124570_56 (sequence is synthesized)
ccgcacgtcccgccccgcctctcccttcgcgctccggacgggcgacggtagctcgagacccgggactccgcccgcctccccgcgagtatttgaggtccggggcggctccggcgcctctgc

SEQ ID NO: 257134 - DNA, 120 bp, Artificial Sequence
  ENSG00000124570_57 (sequence is synthesized)
ttttataaggacatgagtcctattggattaaagcccaacctaatggccttatgttaccttaatcacccctgtaaaggccctctctgcaaatgcagttccatcctgagacactggagttgg

SEQ ID NO: 257135 - DNA, 120 bp, Artificial Sequence
  ENSG00000124570_58 (sequence is synthesized)
gacttcagtgtgtaaatttgaggggacacatgcagcccatcacagtaggcgtgggaggcacgtggccgtcacggagcagtggcaattcccaagcccagccaggcatgtattgttcacctc

SEQ ID NO: 257136 - DNA, 120 bp, Artificial Sequence
  ENSG00000124570_59 (sequence is synthesized)
tcagccctgggtgcagggtgttccttgatgagcctccactgcagcttcccagaattgtcccttgtccgttgctgccctggctgtgctctgccctctgtgtcctggtgtcgctcttggcag

SEQ ID NO: 257137 - DNA, 120 bp, Artificial Sequence
  ENSG00000124570_60 (sequence is synthesized)
ctcctttcctgttctgtaagaaatggcccgtgcttgctgcgctcccagcctacctcccacctgtagaacgtgggcacccagaggcctccctgcactttgagccgtctctctcttttagtc

SEQ ID NO: 257138 - DNA, 120 bp, Artificial Sequence
  ENSG00000124570_61 (sequence is synthesized)
caagctgttacaagtgcctgaaaaccactgtggaatttctatcaacttaaaattctgcttccctggacaaaagcacccccaccgccatcctgagtgctctttgttgggttgggagtcagg

SEQ ID NO: 257139 - DNA, 120 bp, Artificial Sequence
  ENSG00000124570_62 (sequence is synthesized)
gtgccatgggagagcctgccagatggtctataagatgctgtctgaatcttctaaggtttaacaaagtggatttggacctcacccttgaggccagtgtctgggatttgatctttgccctga

SEQ ID NO: 257140 - DNA, 120 bp, Artificial Sequence
  ENSG00000124570_63 (sequence is synthesized)
ggccatctcttttagaatcttttgccagctggaaaggctgggaagaagaaacatttttattctccacccagtacatcctggattggaaatagttcctttaaattctgcttgaaaatggaa

SEQ ID NO: 257141 - DNA, 120 bp, Artificial Sequence
  ENSG00000124570_64 (sequence is synthesized)
cagttccttcatctttctcttcccatgtgttaccctaggcagcaaaaagaagccagcttcctcctggaccccttagccagatgcaggagttcccgggggaggcactccatcctccctgtc

SEQ ID NO: 257142 - DNA, 120 bp, Artificial Sequence
  ENSG00000124570_65 (sequence is synthesized)
actgagggtgaccttctttccacttcttcagctggtacacacacagccccctttctccagcccccaggagtcatttcgtcctgtccgtccagcctctgccagctgcctgggtccaaggcc

SEQ ID NO: 257143 - DNA, 120 bp, Artificial Sequence
  ENSG00000124570_66 (sequence is synthesized)
aagtccacatgttttaggttttggtcatggcagaattccacttctggatggctgcatgtgtcagctgttgccacaaaacaaaccatcccaaacttagtggctggaaataacaatgattga

SEQ ID NO: 257144 - DNA, 120 bp, Artificial Sequence
  ENSG00000124570_67 (sequence is synthesized)
ttatttctcagattccgtggcctgagcaggcaggactgctcccaggaagcagtgcaggtcactcatgcagctgtttcagtggacacctggcccggaaggttcaagaaggcctctctcaca

SEQ ID NO: 257145 - DNA, 63 bp, Artificial Sequence
  ENSG00000124570_68 (sequence is synthesized)
ggacacctggcccggaaggttcaagaaggcctctctcacacctgaaacctctggcgcgatgtc

SEQ ID NO: 257146 - DNA, 120 bp, Artificial Sequence
  ENSG00000124570_69 (sequence is synthesized)
gattgcaggtgtgagccaccacgcccggctagaggcctcagttcttcaagcaactctctctacaggtgatggcaccttctccagggctttccatgtggccttcggcaggatagcctggac

SEQ ID NO: 257147 - DNA, 120 bp, Artificial Sequence
  ENSG00000124570_70 (sequence is synthesized)
aacagcatcacttctactgaattctacctactgtatcattagtcagagccagtgacacgggcattccagagccacgggcaggagggagtctgccccttctgatgtcaggggcggcctgtg

SEQ ID NO: 257148 - DNA, 120 bp, Artificial Sequence
  ENSG00000124570_71 (sequence is synthesized)
tttgtatagacaggaggtctggttggcacccttgtttgccaccagactccaagtactgagcatcaggagcctgggtttgtggagggcgttgcagctcatgccagcacagacagggtacag

SEQ ID NO: 257149 - DNA, 80 bp, Artificial Sequence
  ENSG00000124570_72 (sequence is synthesized)
ggagggcgttgcagctcatgccagcacagacagggtacagggaggggctttcaagacccttctggcctttaatcagatgg

SEQ ID NO: 257150 - DNA, 90 bp, Artificial Sequence
  ENSG00000124570_73 (sequence is synthesized)
tccgcctcccgggttcaagcgattctctttcctcagcttcccgagtagctgggttacaggtacgcaccaccaggcccagctcatttttgt

SEQ ID NO: 257151 - DNA, 77 bp, Artificial Sequence
  ENSG00000124570_74 (sequence is synthesized)
gctgcgcccagcctcggatagatcttttaagcagtaataagggtctggatggttgttaggctgagtttggggttgcc

SEQ ID NO: 257152 - DNA, 120 bp, Artificial Sequence
  ENSG00000124570_75 (sequence is synthesized)
agaggatcctccttgcctttccagctactgcagctgtggtccttgcgtttcttggcttgaggcccttcatcttcaagattcttcttcttgagcagcagctcagaaagcgcatccgccctg

SEQ ID NO: 257153 - DNA, 120 bp, Artificial Sequence
  ENSG00000124570_76 (sequence is synthesized)
cgtttcaagcccagctacttcttagcttcacttccgtcaacttcaccttccctgtagtgcagtggggcattgatggtctgccatcatggatgttctcgcagaagcaaatggcacctttgc

SEQ ID NO: 257154 - DNA, 120 bp, Artificial Sequence
  ENSG00000124570_77 (sequence is synthesized)
gcggggctgtgaccccagcagtcccagcggggcgggggcccgggcgagcgtccggcttgggttcccttccggagcctcgcagcggcagagaacggcgacgcggccgggcaaactattaca

SEQ ID NO: 257155 - DNA, 120 bp, Artificial Sequence
  ENSG00000124570_78 (sequence is synthesized)
ccagcggggcgggggcccgggcgagcgtccggcttgggttcccttccggagcctcgcagcggcagagaacggcgacgcggccggagttctgaggttggaggttggaaatgggttccgcag

SEQ ID NO: 257156 - DNA, 120 bp, Artificial Sequence
  ENSG00000124570_79 (sequence is synthesized)
taagtcatacttgctcttattcactaaagaaataaaggtggccaggtagtgggggctggggcccagcaggaagcgtgtggctctaaatgccattatgccatacataggcttttgtaattt

SEQ ID NO: 257157 - DNA, 120 bp, Artificial Sequence
  ENSG00000124570_80 (sequence is synthesized)
cttttcacctgccaatatgttttaaattctctgcatttcaataaggtggatctacttcacgcttttgaagtgtcttgtcagcatcttgtcaggcagctccttgatgcatggctgctccct

SEQ ID NO: 257158 - DNA, 120 bp, Artificial Sequence
  ENSG00000124570_81 (sequence is synthesized)
cttgtcaggcagctccttgatgcatggctgctcccttaaaggatccagcagttggtgaagttcgtttgatattcagagactgattcaacttagtgttttttgcttttttttttttgtttt

SEQ ID NO: 257159 - DNA, 120 bp, Artificial Sequence
  ENSG00000124570_82 (sequence is synthesized)
cctcatatttatttgtaaattatgtatgtcaatcataaaattatagattttctgacttggtgcaatgaagaagtaggccgttggtgttcatcatttttgtagccaggcagttatgtcact

SEQ ID NO: 257160 - DNA, 88 bp, Artificial Sequence
  ENSG00000124570_83 (sequence is synthesized)
ctaaagattggcttcggaaaactgagcatgcaaccaagatcaccacgtgcacagttcaccgtaggttcactctcctacaagactccaa

SEQ ID NO: 257161 - DNA, 120 bp, Artificial Sequence
  ENSG00000124570_84 (sequence is synthesized)
ggctggccctcgggacaggtgttcctggtgttttagggtgacatggatagtcatgaggtgtgtcagcagcattacacacgctagtggcaggcaccggggaacatcatgttagcacagatg

SEQ ID NO: 257162 - DNA, 120 bp, Artificial Sequence
  ENSG00000124570_85 (sequence is synthesized)
tgtcatgatcagggcatggcagatgagcccctgaggagagggttttagtaatacaacaaggcaagaggtcaggatcgtcgttctgatcctgtatgcatgtgggcatcaggcttaactccc

SEQ ID NO: 257163 - DNA, 120 bp, Artificial Sequence
  ENSG00000124570_86 (sequence is synthesized)
ttgggtaagatttggggtggaacatggcttatcttgtttccctccctggtttgcatggtctggtgggcaggtgtgatggcgtgggggatgtatggaaaatacgggagtgggtacgggcca

SEQ ID NO: 257164 - DNA, 120 bp, Artificial Sequence
  ENSG00000124570_87 (sequence is synthesized)
agctctgtccctgctgcctccgtattacttgcatggcgtgagaaggattgcctgtctttgtcagtattagcatgaattgtttttgtatttgcaaggttcatggtttgaaaaggcatcttt

SEQ ID NO: 257165 - DNA, 120 bp, Artificial Sequence
  ENSG00000124570_88 (sequence is synthesized)
tattagaaattagtaatcttaaaatatgtttggaaaggcttggcaagccaggagtgcccagtgccccaagtattctgtgtaatgaataaagaagagtttgaaaacaaaatatttaaacaa

SEQ ID NO: 257166 - DNA, 120 bp, Artificial Sequence
  ENSG00000124570_89 (sequence is synthesized)
gcacagcaaacaagctttatcaggtgtatgagttattgtcttggtttcccgtggctgctgtaacaaatgaccatggattcgtggctaaactgcacatgtttattttctcagagttctgag

SEQ ID NO: 257167 - DNA, 120 bp, Artificial Sequence
  ENSG00000124570_90 (sequence is synthesized)
cagtggagtggcattttgctttattctttgcattgctttttcccgtgagatctccccctccctccctcttagaaggatacctgtgattacatttagggtcaactggaacaatccaggata

SEQ ID NO: 257168 - DNA, 120 bp, Artificial Sequence
  ENSG00000124570_91 (sequence is synthesized)
atctcccatctcaagagcctgaatctaatcgtgctgcacagtcccttttgccatgtaaggggcattcacaggtcccagggattatgacccaggtatctttggagcacttgctcagccaac

SEQ ID NO: 257169 - DNA, 120 bp, Artificial Sequence
  ENSG00000124570_92 (sequence is synthesized)
cccagctccaaatgtaaaggcatgcacagtggagagccgcttaattcagcatctcctcacagggcctccagtaggcacctccttccctctcccatctgctccaggaaatgtctgctccag

SEQ ID NO: 257170 - DNA, 120 bp, Artificial Sequence
  ENSG00000124570_93 (sequence is synthesized)
cttctccccttccttgttccgtgggttcccactcactgctcaagtgagtcactgggactgtcttagaatgctggcattctctgactgggacatattcatttggtaaacatctgagaactg

SEQ ID NO: 257171 - DNA, 120 bp, Artificial Sequence
  ENSG00000124570_94 (sequence is synthesized)
tgtcagagcaggcaggccccgcatccctgcattcctgcatcccctccttcccagcctgactgcctgtggggcccttagctgccccttgtcctctcacctgattctgcagattcttcttct

SEQ ID NO: 257172 - DNA, 120 bp, Artificial Sequence
  ENSG00000124570_95 (sequence is synthesized)
agggcttggtggactttaacatgtgattctgtgattccgacttgcctgaagataccccagctcccccctcccgactatccagctgcattcctgctctggaccctgctggggctgccacac

SEQ ID NO: 257173 - DNA, 120 bp, Artificial Sequence
  ENSG00000124570_96 (sequence is synthesized)
ccactgcacggcagggctagagagatgtgcagcctgaccctacccctgagcctgtctgtgaaggtggagatgggcatgcacccacagcccatgaggcaaggtggtgtcctgagtgtgctg

SEQ ID NO: 257174 - DNA, 120 bp, Artificial Sequence
  ENSG00000124570_97 (sequence is synthesized)
tgagttcaggcgcaggaaggcctggcttgttgcagcaggatgtccccaagcgtggtccaaaattggggctttgccacctgcagggatttcctagaaggagatccaagggtcaggaggcat

SEQ ID NO: 257175 - DNA, 120 bp, Artificial Sequence
  ENSG00000124570_98 (sequence is synthesized)
ttgaaaggctttcacgcatctttgtatgtggcttgattgatccttttttaaggctcttgctacccagaaatgggattctctctctcattataaaaacatttggccatcttttcttgtgta

SEQ ID NO: 257176 - DNA, 120 bp, Artificial Sequence
  ENSG00000124570_99 (sequence is synthesized)
atatttttcaaattaaaacagtacatttaagcccgcaaaacacaccaaagaatacaaacatagaagcaaaagccagtgccccttctgtaattccaccccaaggaagagactccaggaaag

SEQ ID NO: 257177 - DNA, 120 bp, Artificial Sequence
  ENSG00000124570_100 (sequence is synthesized)
ggtgcctccttcccactttctccacgtgcgggcaggcgtgcagggaggagtcctcacaaaacagggcggcgtttcacatagaactctttcattttccacacttaacattagaaacacaca

SEQ ID NO: 257178 - DNA, 120 bp, Artificial Sequence
  ENSG00000124570_101 (sequence is synthesized)
aaataatgtggagggtcctaaaaagaaacagccagagttctgtgtgtgtttctgcttgcccactgaaccacagcatcggcggtgactgtcggtaaggcgcgtgagatgcagtcgcgtgga

SEQ ID NO: 257179 - DNA, 120 bp, Artificial Sequence
  ENSG00000124571_0 (sequence is synthesized)
gtgcgcagcgccggcttcttcccagcgcgagttgctgctaacgctcctcctccagcttcccacccccgccgcccgccgcggcccggtaccaacgggtggtctcgccgagggagctgtcgt

SEQ ID NO: 257180 - DNA, 120 bp, Artificial Sequence
  ENSG00000124571_1 (sequence is synthesized)
gcctcgtggtcccgggactgcagtggtgtgcgctctcggcgcgtggcgctaggcatggcgatggatcaagtaaacgcgctgtgcgagcagctggtgaaagcggtgacggtcatgatggac

SEQ ID NO: 257181 - DNA, 120 bp, Artificial Sequence
  ENSG00000124571_2 (sequence is synthesized)
cccaactccacccagcgctaccggctggaagccctcaagttttgtgaggagtttaaagaaaagtgtcctatctgtgtcccctgtggcttgaggttggctgagaaaacacaagttgccatc

SEQ ID NO: 257182 - DNA, 120 bp, Artificial Sequence
  ENSG00000124571_3 (sequence is synthesized)
gtcagacattttggccttcagatcctggaacacgttgtcaagtttcggtggaacggcatgtctcgattggagaaggtgtatctgaagaacagtgtcatggagctgattgcaaatggaaca

SEQ ID NO: 257183 - DNA, 120 bp, Artificial Sequence
  ENSG00000124571_4 (sequence is synthesized)
ttgaacattttggaagaggagaaccatattaaagatgctctgtctcgaattgtagtggaaatgatcaagcgagagtggccacagcattggcctgacatgctaatagaattggacactctt

SEQ ID NO: 257184 - DNA, 120 bp, Artificial Sequence
  ENSG00000124571_5 (sequence is synthesized)
tccaaacaaggggaaacacagacagaattggtgatgtttatccttttgcgactggcagaggatgtagtgacttttcagacacttccccctcaaagaagaagggacatccagcaaacatta

SEQ ID NO: 257185 - DNA, 120 bp, Artificial Sequence
  ENSG00000124571_6 (sequence is synthesized)
acccagaacatggaaaggatcttcagttttctgcttaacacacttcaagaaaatgtaaacaagtatcagcaagtgaagacagatacttctcaggagtcaaaggcgcaagcaaactgtcga

SEQ ID NO: 257186 - DNA, 120 bp, Artificial Sequence
  ENSG00000124571_7 (sequence is synthesized)
gtaggagttgcagcactgaatactctagcaggctatattgactgggtgtctatgagtcacatcactgctgaaaactgtaaactcctggagatactgtgtttgctgttgaatgaacaggaa

SEQ ID NO: 257187 - DNA, 120 bp, Artificial Sequence
  ENSG00000124571_8 (sequence is synthesized)
cttcagttgggagccgctgagtgtcttctcattgcagtcagcagaaaaggcaagttggaagaccggaagcccttgatggtcttatttggagatgttgccatgcattatatactctccgcc

SEQ ID NO: 257188 - DNA, 120 bp, Artificial Sequence
  ENSG00000124571_9 (sequence is synthesized)
gcacagactgctgatggaggaggtttggtagaaaaacactacgtctttctgaagaggctctgtcaggtgttgtgtgcgctgggcaatcagctgtgtgcattgctgggtgcagattctgat

SEQ ID NO: 257189 - DNA, 120 bp, Artificial Sequence
  ENSG00000124571_10 (sequence is synthesized)
gtagaaacaccatcaaactttggaaaatacctggaatcttttcttgctttcacaacccatccaagtcagtttctacgctcttcaactcagatgacttggggagccctcttcaggcatgaa

SEQ ID NO: 257190 - DNA, 120 bp, Artificial Sequence
  ENSG00000124571_11 (sequence is synthesized)
atcctgtcccgtgatcctttgctattagcaataataccaaaatatcttcgtgcttccatgactaacttggtcaagatgggctttccttctaaaacagacagccctagctgtgaatattct

SEQ ID NO: 257191 - DNA, 120 bp, Artificial Sequence
  ENSG00000124571_12 (sequence is synthesized)
cggtttgattttgatagcgatgaggacttcaatgctttcttcaactcctcccgagcacaacaaggagaggtgatgaggttggcatgtcgtttggatcccaaaactagcttccagatggct

SEQ ID NO: 257192 - DNA, 120 bp, Artificial Sequence
  ENSG00000124571_13 (sequence is synthesized)
ggggagtggctaaagtatcaactatcaacttttcttgatgctggttctgtgaattcttgttctgcagttggaactggagaaggaagcctctgttccgtcttctcaccttcattcgtgcag

SEQ ID NO: 257193 - DNA, 120 bp, Artificial Sequence
  ENSG00000124571_14 (sequence is synthesized)
tgggaagccatgactctttttttggaaagtgttatcacccagatgtttcgaacactaaatagagaagaaattcctgttaatgatggaatagagctattgcagatggttctgaactttgat

SEQ ID NO: 257194 - DNA, 120 bp, Artificial Sequence
  ENSG00000124571_15 (sequence is synthesized)
accaaggatcccctcatcctgtcctgcgtccttactaatgtctctgcactctttccatttgtcacctacagaccagagttcctgccccaggtcttctctaagctattttcatctgtcact

SEQ ID NO: 257195 - DNA, 120 bp, Artificial Sequence
  ENSG00000124571_16 (sequence is synthesized)
tttgaaactgttgaagaaagtaaggcccccagaacccgggcagtgaggaatgtgaggaggcatgcttgttcctccatcatcaagatgtgtcgtgactacccccagcttgtgctgcccaat

SEQ ID NO: 257196 - DNA, 120 bp, Artificial Sequence
  ENSG00000124571_17 (sequence is synthesized)
tttgacatgctttataaccatgtgaagcaactcctctccaatgagctactcctgacacaaatggagaagtgtgccctcatggaagccctggttctcattagcaaccaatttaagaactac

SEQ ID NO: 257197 - DNA, 120 bp, Artificial Sequence
  ENSG00000124571_18 (sequence is synthesized)
gagcgtcagaaggtgttcctagaggagctgatggcaccagtggccagcatctggctttctcaagacatgcacagagtgctgtcagatgttgatgctttcattgcgtatgtgggtacagat

SEQ ID NO: 257198 - DNA, 120 bp, Artificial Sequence
  ENSG00000124571_19 (sequence is synthesized)
cagaagagctgtgacccaggcctggaggatccgtgtggcttaaaccgtgcacgaatgagcttttgtgtatacagcattctgggtgtggtgaaacgaacttgctggcccactgacctagaa

SEQ ID NO: 257199 - DNA, 120 bp, Artificial Sequence
  ENSG00000124571_20 (sequence is synthesized)
gaggccaaagctgggggatttgtggtgggttatacatccagtggaaatccaatcttccgtaacccctgcacagagcagattctgaaacttcttgacaatttgcttgcgcttataagaacc

SEQ ID NO: 257200 - DNA, 120 bp, Artificial Sequence
  ENSG00000124571_21 (sequence is synthesized)
cacaatacattatatgcaccagaaatgctagccaaaatggcagagcctttcaccaaggctctggatatgcttgacgcggaaaaatctgctatattaggattacctcaacctctcttggaa

SEQ ID NO: 257201 - DNA, 120 bp, Artificial Sequence
  ENSG00000124571_22 (sequence is synthesized)
agcgtttcttctctaccctctatgaaaactgttttcatatcctagggaaggcaggcccttccatgcagcaagacttctatactgtggaggaccttgctacccagcttctcagctcagcct

SEQ ID NO: 257202 - DNA, 120 bp, Artificial Sequence
  ENSG00000124571_23 (sequence is synthesized)
ttgtcaacttgaacaatattcctgactaccgactcagacccatgcttcgtgtctttgtaaagcctctggtgctcttctgtcccccagagcactatgaagccctggtatcccccatcctcg

SEQ ID NO: 257203 - DNA, 120 bp, Artificial Sequence
  ENSG00000124571_24 (sequence is synthesized)
gacctcttttcacctacctccatatgaggctttctcagaaatggcaagttatcaaccaaaggagcctgctgtgtggagaagatgaggctgcagatgaaaacccagagtctcaagagatgc

SEQ ID NO: 257204 - DNA, 120 bp, Artificial Sequence
  ENSG00000124571_25 (sequence is synthesized)
tggaggagcaactggtgaggatgttaacccgagaagtcatggacctaatcacggtttgctgtgtttcaaagaagggtgctgaccacagtagtgctcccccagcagatggagacgatgaag

SEQ ID NO: 257205 - DNA, 120 bp, Artificial Sequence
  ENSG00000124571_26 (sequence is synthesized)
aaatgatggccacagaggtcaccccctcagctatggcagagcttacagacctgggcaaatgtctgatgaagcatgaggatgtttgtacagcgctattaattacagccttcaattccctgg

SEQ ID NO: 257206 - DNA, 120 bp, Artificial Sequence
  ENSG00000124571_27 (sequence is synthesized)
cctggaaagatactctgtcctgccagaggacaacctcacagctctgctggcctctcctcaaacaagtgctgtcagggacactgctcgcagatgcagttacgtggcttttcaccagtgtgc

SEQ ID NO: 257207 - DNA, 120 bp, Artificial Sequence
  ENSG00000124571_28 (sequence is synthesized)
tgaaaggcttacagatgcacgggcagcacgacgggtgcatggcttccctggtccatctggccttccagatatacgaggcactgcgccccaggtacctggagataagagctgtaatggagc

SEQ ID NO: 257208 - DNA, 120 bp, Artificial Sequence
  ENSG00000124571_29 (sequence is synthesized)
aaatccctgaaatacagaaggactcactggaccagtttgactgcaagcttttaaacccctccctgcagaaagtggctgacaagcgccgaaaggaccaattcaaacgcctcattgctggtt

SEQ ID NO: 257209 - DNA, 120 bp, Artificial Sequence
  ENSG00000124571_30 (sequence is synthesized)
gcattgggaaacccttgggagagcagttccgaaaagaagttcacattaagaatcttccctcacttttcaaaaaaacaaagccaatgctggagacggaggtgctggacaatgatgggggtg

SEQ ID NO: 257210 - DNA, 120 bp, Artificial Sequence
  ENSG00000124571_31 (sequence is synthesized)
gcctggccaccatctttgaaccctgaatcaagcttttgggcatccttcctcggcctttcttgtcatctcttctttccctttgtagccgatctctaggcccttcttgcactgccacctcac

SEQ ID NO: 257211 - DNA, 120 bp, Artificial Sequence
  ENSG00000124571_32 (sequence is synthesized)
tttccaccactgtcagcctggaaagagatccaggtctggagctggagagaacaggccctgtgcaggaccagaagtaattatactaaagtatcaagaaagggagttagggcttaaactatt

SEQ ID NO: 257212 - DNA, 120 bp, Artificial Sequence
  ENSG00000124571_33 (sequence is synthesized)
ctgtctagatgtcccagatagttcccattctacttggagatttggcttttccaagaaaagctagagcagagcagcccttctcccacaagccctcccacccccgtgcagccacatacctgt

SEQ ID NO: 257213 - DNA, 120 bp, Artificial Sequence
  ENSG00000124571_34 (sequence is synthesized)
acagaatggtaactaagggtgctgtgcccaaccctgcgactagcaaggctcgcagcaagagcacagccctcaactacttgtgccagagtttctcttggaccactccaactcccactgagc

SEQ ID NO: 257214 - DNA, 120 bp, Artificial Sequence
  ENSG00000124571_35 (sequence is synthesized)
ccttttgctgctgggctggcaggaaactttccccactccctaaggggcatgtctgggttaggtgctaagtgctgaagagaacttggtcagttctctcaactttgctttgggcaagaatct

SEQ ID NO: 257215 - DNA, 120 bp, Artificial Sequence
  ENSG00000124571_36 (sequence is synthesized)
ggtcacctgatgggatccatggtacaggctactgctaaacttggcacagtatcaagtatagtacctccaaggaccagggctgggaagtctttagtgctaacatcccctttagagttcaca

SEQ ID NO: 257216 - DNA, 120 bp, Artificial Sequence
  ENSG00000124571_37 (sequence is synthesized)
catcttgcccttccatgaatgacccctcagtctggcctccccagcctcaaggtccactcaggcacaagagccacagtaccctagatagtgtcacatgacaccgttgtcatccaaggataa

SEQ ID NO: 257217 - DNA, 120 bp, Artificial Sequence
  ENSG00000124571_38 (sequence is synthesized)
tacagaccaactaggctacatctgtgatgagcagctagcaaagccgctggtcttctcctaggactaagtccaggtgccttccacaatctcatggtctttcaggtccctggttacttttct

SEQ ID NO: 257218 - DNA, 120 bp, Artificial Sequence
  ENSG00000124571_39 (sequence is synthesized)
caaaggccatttccaaaagaatacatgccttcacatcacaacctgtactgtgagtccattctagaggtcactgaaaggccctgtaaagagaggacatggatacgggacctggccctgagg

SEQ ID NO: 257219 - DNA, 120 bp, Artificial Sequence
  ENSG00000124571_40 (sequence is synthesized)
ttattactggccgtaaggcagagttaatccatacagaaaccagtgtgtccatgtgctctgcacaaaaacagacctgttgtccatccagtccactgacaagagggtttccccgagagccga

SEQ ID NO: 257220 - DNA, 120 bp, Artificial Sequence
  ENSG00000124571_41 (sequence is synthesized)
agtggactgaagctacagtttttagctggtgcgggccacaggcagggtcagattgagaagaagcaaagctggggaagcagaagttgggagtcttgtgttgctccctcttcctgtgtggtg

SEQ ID NO: 257221 - DNA, 120 bp, Artificial Sequence
  ENSG00000124571_42 (sequence is synthesized)
ctctgggtttctgtggatcgtgaaggcgatctcaagagtgtttccctccaaacctgatagctgcctattcctgtctggttggggctgtggaggatgtagttgtatttattgcattgtaat

SEQ ID NO: 257222 - DNA, 120 bp, Artificial Sequence
  ENSG00000124571_43 (sequence is synthesized)
atttttaacatcctgtgacttcatgctagaaattttctattgtttatagaaactttttgtagaaacattaactctaaagcacatctgcatgtcagtaaaaatctcagtttcgtacagaaa

SEQ ID NO: 257223 - DNA, 120 bp, Artificial Sequence
  ENSG00000124571_44 (sequence is synthesized)
atcctggaacacgttgtcaagtaaggagctcttggacattaccactgaagtctgagagaacagatctttatatcttatataacctatagagatgctgtttaggtttcggtggaacggcat

SEQ ID NO: 257224 - DNA, 77 bp, Artificial Sequence
  ENSG00000124571_45 (sequence is synthesized)
gagctggtcgctcagccaactccatgaaggcctgactaatgcaaaggattcatgtttgcggcgggcatggtggattg

SEQ ID NO: 257225 - DNA, 120 bp, Artificial Sequence
  ENSG00000124571_46 (sequence is synthesized)
gtgaaactccgtctcaaaaaaaaagttcatgtttgtagcaacactgacagatccaaaagaaataactagatagaagcaaggcagtccttaagtcaacctaaggatactttatgaattgca

SEQ ID NO: 257226 - DNA, 120 bp, Artificial Sequence
  ENSG00000124571_47 (sequence is synthesized)
aggcgtgagccaccgcacccggccacactgtgttcttattttctgccatggtcttcaattcttttctgaatgaaacatacaaagttctacaagtttattctcagtgttcagtatttgaga

SEQ ID NO: 257227 - DNA, 120 bp, Artificial Sequence
  ENSG00000124571_48 (sequence is synthesized)
aagagtcatagtctctgtcacccaggctagagtgcactggtgcaaccatagctcactgtaggctcaaactcttggactcaagcagtcttcctgcctcagcctcccgagtagttggaccac

SEQ ID NO: 257228 - DNA, 81 bp, Artificial Sequence
  ENSG00000124571_49 (sequence is synthesized)
agcagtcttcctgcctcagcctcccgagtagttggaccacaggcagatcacaacgccagacgaactttaaaatttttttgt

SEQ ID NO: 257229 - DNA, 120 bp, Artificial Sequence
  ENSG00000124571_50 (sequence is synthesized)
gcactagaatcctagtgattacaggcgttcttatgggttccttgagcagcttcagcctatcttgtgcttcttccatcttgtcttgcactgccttgaccatctatttgttcagaaatgcag

SEQ ID NO: 257230 - DNA, 120 bp, Artificial Sequence
  ENSG00000124571_51 (sequence is synthesized)
aatgtggagttcctataagctctatatgaacaagtgtatttacttcattatcttagcatacagagaaaatcgaaggcaatttattttttttccccgttaaccccttcttcaatttagcca

SEQ ID NO: 257231 - DNA, 120 bp, Artificial Sequence
  ENSG00000124571_52 (sequence is synthesized)
tttatttttactgtgtcattttgtttgtttgagattcaaagtagaccagggatgtatcaagcatcctttcctagtcactcactctcagagaattctgtaattttctctcagctagttgaa

SEQ ID NO: 257232 - DNA, 120 bp, Artificial Sequence
  ENSG00000124571_53 (sequence is synthesized)
cttgaaggaccaaaacagttcggtcatcagaatgcctctatttctattggtgaagctaattcttgtgccttggacggtacccccatcttcctccttcctcacctggccagagacaggttg

SEQ ID NO: 257233 - DNA, 120 bp, Artificial Sequence
  ENSG00000124571_54 (sequence is synthesized)
ggatcagtgggcctgaggtggctgttgtggtagtatatacccacccttcacctagtaaccctgctttcttgctttagcggtttgctgtgtttcaaagaagggtgctgaccacagtagtgc

SEQ ID NO: 257234 - DNA, 120 bp, Artificial Sequence
  ENSG00000124571_55 (sequence is synthesized)
tgaaccaggtcagtttccttgcagtctggtgaggagaagacaccctacatgtagttatcatctctggaccagccctcttgctgtgtgcctccatcatactcccacctccaagcctttgca

SEQ ID NO: 257235 - DNA, 120 bp, Artificial Sequence
  ENSG00000124571_56 (sequence is synthesized)
cttgctgtttcctctgtctcagatgatttcctcccaaccatatatgtgatcttttctcttgctttattccaatgtcacctcttcccagagatcgtccatgaccaacctatcaaaaatggc

SEQ ID NO: 257236 - DNA, 120 bp, Artificial Sequence
  ENSG00000124571_57 (sequence is synthesized)
aaccccagctactctgtattcctctgctttattcttcttcatagcagttgtcactacccaacattatgtttttatttatgtattcctttcttacctatctcccatgttagaatgtaaact

SEQ ID NO: 257237 - DNA, 120 bp, Artificial Sequence
  ENSG00000124571_58 (sequence is synthesized)
cccatcagggaagggacctattgtcctataccttttatccccagtaactaaatcagtgtctggtgctcaaatatttgtccaacaacaaagtaacttcagtatttgcagcattttgtgttt

SEQ ID NO: 257238 - DNA, 120 bp, Artificial Sequence
  ENSG00000124571_59 (sequence is synthesized)
ctgcctagaagctcccatttccctcatgtacagcttgagtgcatctctagaagatcagccatgggcatgggcattatgtggaggtgggagggctcctagtactacttagccaccacttag

SEQ ID NO: 257239 - DNA, 120 bp, Artificial Sequence
  ENSG00000124571_60 (sequence is synthesized)
cctagaacactcagctttgctttgttttttgcgcttctgtcagaacaagatattcttctctgttctgaaaggatggagcttaacattctactctctgataacagatgaagaaatgatggc

SEQ ID NO: 257240 - DNA, 120 bp, Artificial Sequence
  ENSG00000124571_61 (sequence is synthesized)
cacagaggtcaccccctcagctatggcagagcttacagacctgggcaaatgtctgatgaagcatgaggtgggtagaaggagcaggtgatacctttactccttgcccaggtggggagtcac

SEQ ID NO: 257241 - DNA, 120 bp, Artificial Sequence
  ENSG00000124571_62 (sequence is synthesized)
cttttacttttcttgctctatggtgctatcaagagttttttgtaatactcctttgttacataagttcctggttccaaaggccccagaaaaaaccgagggaaaaggtgcaatgccatggtg

SEQ ID NO: 257242 - DNA, 120 bp, Artificial Sequence
  ENSG00000124571_63 (sequence is synthesized)
tctcccataccagcataggcaggagctctcaggaaaacacatagtaggcacactgatgcagatccctggtgtttagcctccccaagccaggcctgagctttgtctccatcctacacatac

SEQ ID NO: 257243 - DNA, 120 bp, Artificial Sequence
  ENSG00000124571_64 (sequence is synthesized)
aggttttctcacattttgattttttctttttgactggcaatacacaaaaatagaggaagtaaactccttttatttttcctgcttagctatttaaaactccagctcctaagccaggcatgg

SEQ ID NO: 257244 - DNA, 83 bp, Artificial Sequence
  ENSG00000124571_65 (sequence is synthesized)
tgggagaataaaacaaacccatctttagagggggggaggaaaaaaaaaaaaccctccggctcctgatgtgtaataatcatcag

SEQ ID NO: 257245 - DNA, 120 bp, Artificial Sequence
  ENSG00000124571_66 (sequence is synthesized)
aaaaaaaaccctccggctcctgatgtgtaataatcatcagagaaaactgtgcttctttttccattgtaactcttcatcttttcctgttcaggatgtttgtacagcgctattaattacagc

SEQ ID NO: 257246 - DNA, 120 bp, Artificial Sequence
  ENSG00000124571_67 (sequence is synthesized)
cttcaattccctggcctggaaagatactctgtcctgccagaggacaacctcacagctctgctggcctctcctcaaacaagtatggttattcaccccttttccctgcccctcatggaaggt

SEQ ID NO: 257247 - DNA, 120 bp, Artificial Sequence
  ENSG00000124571_68 (sequence is synthesized)
ttgggtcatgcagactgactaaatcattcagaagaactggggtgctgaggccttgagagaggccccctgtggccctaaagcacagttgtctccccaggtgctgtcagggacactgctcgc

SEQ ID NO: 257248 - DNA, 120 bp, Artificial Sequence
  ENSG00000124571_69 (sequence is synthesized)
ggctttctcagaaatggcaagttatcaaccaaaggagcctgctgtgtggagaagatgaggctgcagatgaaaacccagagtctcaagagatgctggaggagcaactgcggtttgctgtgt

SEQ ID NO: 257249 - DNA, 120 bp, Artificial Sequence
  ENSG00000124571_70 (sequence is synthesized)
atgtgggtacagatcagaagagctgtgacccaggcctggaggatccgtgtggcttaaaccgtgcacgatcttgaattcttgagttagttcccacagcagagcagatggtcttttctatga

SEQ ID NO: 257250 - DNA, 120 bp, Artificial Sequence
  ENSG00000124571_71 (sequence is synthesized)
agtcattattttggctttaaggatctctaaatagctctgaagactgaaggtgtaatgaggaagtaggtcagaacttggtcagcaggatgagcttttgtgtatacagcattctgggtgtgg

SEQ ID NO: 257251 - DNA, 120 bp, Artificial Sequence
  ENSG00000124574_0 (sequence is synthesized)
ttctaatgatcccatcaccaaagtagcaaacgtagtacccaggattttttttttcctagttagtcttcatgttaagtacaatcttacctcaaaattgttaatgtctgtggtttaaaaaaa

SEQ ID NO: 257252 - DNA, 120 bp, Artificial Sequence
  ENSG00000124574_1 (sequence is synthesized)
aacatgaatcagaaatggtgtgggtagtttagaaaatgagttaggttcaggtggccggttagctcagttggtcagaaaatgagttaggttcatctgggaagacttcctgggagaaaagac

SEQ ID NO: 257253 - DNA, 120 bp, Artificial Sequence
  ENSG00000124574_2 (sequence is synthesized)
cctgggttctgaggtaaagtggagtagggataagatgtgcaaggcaggaagggagttgattccttaggtaagtgaattattggaggtgaggggtatgtctggctcctgagtcagccacga

SEQ ID NO: 257254 - DNA, 120 bp, Artificial Sequence
  ENSG00000124574_3 (sequence is synthesized)
tgtgcctccttgtcttcccccttgtccccaggagtccagattacatcctaccctgcagtcctggatggcgcctccgacttgcagcttccttcctgctttccgtcttcccgctgctagacc

SEQ ID NO: 257255 - DNA, 120 bp, Artificial Sequence
  ENSG00000124574_4 (sequence is synthesized)
ttcttccagttgctttgccaccaggggcaggcccaggacccatagggctagaggtgttggcagggtgcgtggcagctgtggcctggatcagccacagcctggccctgtgggtgttggcac

SEQ ID NO: 257256 - DNA, 120 bp, Artificial Sequence
  ENSG00000124574_5 (sequence is synthesized)
attcccctcatggccactcccggggtcccttggccttggccctggtagccttgctgccagctccagccctagtgctgaccgtgttgtggcattgccagcgaggcacacttctgcccccac

SEQ ID NO: 257257 - DNA, 120 bp, Artificial Sequence
  ENSG00000124574_6 (sequence is synthesized)
ttctcccagggcccatggcccgcctatgcttgctcatcctgcagctggctgcactcttggcctatgcactgggatgggcagctcctgggggaccacgagaaccctgggctcaggagcccc

SEQ ID NO: 257258 - DNA, 120 bp, Artificial Sequence
  ENSG00000124574_7 (sequence is synthesized)
tcctgcccgaggatcaagaacctgaggtggctgaagatggggagagttggctgtcacgcttttcctatgcctggctggcacccttgctggcccgtggggcctgtggagagctccggcagc

SEQ ID NO: 257259 - DNA, 120 bp, Artificial Sequence
  ENSG00000124574_8 (sequence is synthesized)
ctcaggacatttgccgcctcccccacagactgcagccaacctacctggctcgtgtcttccaggcacactggcaggagggggcacggctgtggagggccttgtatggggcctttggacggt

SEQ ID NO: 257260 - DNA, 120 bp, Artificial Sequence
  ENSG00000124574_9 (sequence is synthesized)
gctatctggcacttggactgctgaagctggtggggaccatgttgggattctcagggcccctgttgctctccctactggtgggcttcctggaagaggggcaggagccactaagccacggcc

SEQ ID NO: 257261 - DNA, 120 bp, Artificial Sequence
  ENSG00000124574_10 (sequence is synthesized)
tgctctatgctctggggctagccggtggggctgtgctgggtgctgtgctgcagaatcagtatgggtatgaggtatataaggtaacacttcaggcacggggggctgtgctgaacatcctgt

SEQ ID NO: 257262 - DNA, 120 bp, Artificial Sequence
  ENSG00000124574_11 (sequence is synthesized)
actgcaaggctttacagctggggcccagccgccctcctactggggaggccctgaacctactaggcactgactctgaacggctgcttaactttgctgggagcttccatgaagcctggggcc

SEQ ID NO: 257263 - DNA, 120 bp, Artificial Sequence
  ENSG00000124574_12 (sequence is synthesized)
tgcccctgcaactggccatcaccctctacctgctgtaccagcaggtaggcgtggccttcgtgggtggtctcatcttggcactgctgctggtacccgtcaacaaagtgattgccacccgca

SEQ ID NO: 257264 - DNA, 120 bp, Artificial Sequence
  ENSG00000124574_13 (sequence is synthesized)
tcatggccagcaaccaggaaatgctacagcacaaggatgcgcgggttaagcttgtgacagagctgctgagtggcattcgggtcatcaagttctgcgggtgggagcaggcactgggagccc

SEQ ID NO: 257265 - DNA, 120 bp, Artificial Sequence
  ENSG00000124574_14 (sequence is synthesized)
gagtagaggcctgccgggctcgagagctggggcgactccgggtcatcaaatacctggatgcggcctgtgtatacctgtgggctgccctaccggttgtcatctccatcgttatcttcatca

SEQ ID NO: 257266 - DNA, 120 bp, Artificial Sequence
  ENSG00000124574_15 (sequence is synthesized)
cctatgtcctcatggggcaccagctcactgccaccaaggtgttcacggccctggcactggtgcgaatgctcattcttcctctcaacaacttcccttgggtgatcaatggtctcctggagg

SEQ ID NO: 257267 - DNA, 120 bp, Artificial Sequence
  ENSG00000124574_16 (sequence is synthesized)
ccaaagtgtccttggaccggatccagcttttcctcgaccttccaaaccacaacccccaggcctactacagcccagattgtggtagattaggagcccaaatcaagtggcttctctgttcag

SEQ ID NO: 257268 - DNA, 120 bp, Artificial Sequence
  ENSG00000124574_17 (sequence is synthesized)
atccccctgcagagccatctacagtattggagctgcatggagccttgttctcctgggacccagttggaaccagcctggagaccttcatcagtcatctcgaagtgaaaaagggtatgctgg

SEQ ID NO: 257269 - DNA, 120 bp, Artificial Sequence
  ENSG00000124574_18 (sequence is synthesized)
tgggcatcgtggggaaggtcggctgtgggaagagctccctgctggctgccatcgctggagagctccacaggctgcgtgggcatgtggcagtgcgggggctgtccaagggctttggcctgg

SEQ ID NO: 257270 - DNA, 120 bp, Artificial Sequence
  ENSG00000124574_19 (sequence is synthesized)
ccacccaggaaccctggatccagtttgccaccatccgagacaacatcctctttgggaagacatttgatgcacagctgtacaaggaggtgctagaagcctgcgccctcaatgatgacctca

SEQ ID NO: 257271 - DNA, 120 bp, Artificial Sequence
  ENSG00000124574_20 (sequence is synthesized)
gtatcctgcctgctggagaccagacagaggtgggggagaagggtgtcacccttagcggaggacagcgtgcccggattgcccttgctcgtgctgtctaccaggaaaaggagctctatctcc

SEQ ID NO: 257272 - DNA, 120 bp, Artificial Sequence
  ENSG00000124574_21 (sequence is synthesized)
tgcacaggtgcatcctgggcatgctgagctacaccacacggctgctctgcacccaccgcactgagtacctggagagggctgacgcggtgctgctgatggaggccgggcgcctcatccggg

SEQ ID NO: 257273 - DNA, 120 bp, Artificial Sequence
  ENSG00000124574_22 (sequence is synthesized)
ctggacctccctctgagattctgccactggtacaagctgtccccaaagcctgggctgagaatggacaagagtctgactcagccacagcccagtcagtacagaacccagagaaaacaaagg

SEQ ID NO: 257274 - DNA, 120 bp, Artificial Sequence
  ENSG00000124574_23 (sequence is synthesized)
aggggctggaggaggagcagagcacatctggtcgcctgctgcaggaagaaagcaagaaggagggcgccgtggccttgcacgtgtaccaagcttactggaaggccgtgggccagggcttgg

SEQ ID NO: 257275 - DNA, 120 bp, Artificial Sequence
  ENSG00000124574_24 (sequence is synthesized)
ccttagccatcctcttctctctgcttctcatgcaagccacgcggaacgctgctgactggtggctctcccactggatctctcagctgaaggctgagaatagctcccaggaggcgcaaccct

SEQ ID NO: 257276 - DNA, 120 bp, Artificial Sequence
  ENSG00000124574_25 (sequence is synthesized)
ccaccagcccagcttctatggggctcttctctccgcagctgctcctcttttcccctggaaacctctacatcccagtgttcccactgcccaaagctgcccccaatggctcctcagacatcc

SEQ ID NO: 257277 - DNA, 120 bp, Artificial Sequence
  ENSG00000124574_26 (sequence is synthesized)
gtttctacctcaccgtgtatgcgaccattgctggtgtaaattccctctgcacccttctccgggcagtgctctttgcagcaggcacccttcaagcagctgccactctgcatcgccgcctgc

SEQ ID NO: 257278 - DNA, 120 bp, Artificial Sequence
  ENSG00000124574_27 (sequence is synthesized)
tgcatcgagtccttatggcaccagtgactttcttcaatgccacacccacgggccggatcctaaaccgcttctcctctgatgtggcctgtgcggatgacagcctgcccttcatcctcaaca

SEQ ID NO: 257279 - DNA, 120 bp, Artificial Sequence
  ENSG00000124574_28 (sequence is synthesized)
tcctcctggccaacgcggcaggcctgctggggctcctggccgtgctgggctctggcctgccctggctgctgctcctgctgccgcctttgagcatcatgtactatcacgtgcagcgccact

SEQ ID NO: 257280 - DNA, 120 bp, Artificial Sequence
  ENSG00000124574_29 (sequence is synthesized)
acagggcctcctcacgggagctgcggcgcctgggcagcctcaccctgtctccactgtatagccatctggccgataccttggctggcctctctgtgctccgggccacaggggccacctaca

SEQ ID NO: 257281 - DNA, 120 bp, Artificial Sequence
  ENSG00000124574_30 (sequence is synthesized)
ggtttgaggaggagaacctgcgactccttgagctaaaccagaggtgccagtttgccaccagtgccacaatgcagtggctggacattcggctacagctcatgggggcggcagtggtcagcg

SEQ ID NO: 257282 - DNA, 120 bp, Artificial Sequence
  ENSG00000124574_31 (sequence is synthesized)
ctatcgcaggcatcgctctggtgcagcaccagcagggcctcgctaacccagggctggtgggcttgtcgctgtcttatgccctgtccctgacgggcctgctctcgggcctggtgagcagct

SEQ ID NO: 257283 - DNA, 120 bp, Artificial Sequence
  ENSG00000124574_32 (sequence is synthesized)
tcacacagacagaggccatgctggtgagcgtcgagcggctggaagagtacacctgtgacctgccccaggaaccccagggccagccactgcagctgggcaccggctggctgacccaggggg

SEQ ID NO: 257284 - DNA, 120 bp, Artificial Sequence
  ENSG00000124574_33 (sequence is synthesized)
gcgtggagttccaggacgtggtgttggcgtaccggccagggctgccgaatgccctggatggagtgaccttctgcgtgcagcctggagagaagttgggcatcgtgggccgcacaggctccg

SEQ ID NO: 257285 - DNA, 120 bp, Artificial Sequence
  ENSG00000124574_34 (sequence is synthesized)
gcaagtcttccctgttgttggtgctcttccggctgctagagcccagttcagggcgagtgctgctggacggcgtggacaccagccagctggagctggcccagctcagatcccagttggcta

SEQ ID NO: 257286 - DNA, 120 bp, Artificial Sequence
  ENSG00000124574_35 (sequence is synthesized)
tcatcccccaggagccctttttgttcagtgggactgttcgggaaaacctggacccccagggcctacataaggacagggccttgtggcaggccctgaagcagtgccacctgagtgaggtga

SEQ ID NO: 257287 - DNA, 120 bp, Artificial Sequence
  ENSG00000124574_36 (sequence is synthesized)
ttacatccatgggtggtctggatggtgagctgggtgaggggggccggagcttatctcttgggcagaggcagctgttgtgtttggccagggctctcctcacagatgccaagatcctgtgta

SEQ ID NO: 257288 - DNA, 120 bp, Artificial Sequence
  ENSG00000124574_37 (sequence is synthesized)
tcgatgaggccacagcaagtgtggaccagaagacagaccagctgctccagcagaccatctgcaaacgctttgccaacaagacagtgctgaccattgcccataggctcaacacgatcctga

SEQ ID NO: 257289 - DNA, 120 bp, Artificial Sequence
  ENSG00000124574_38 (sequence is synthesized)
actcagaccgggtgctggtgctacaagcggggagagtggtagagctggactccccggccaccctgcgcaaccagccccactccctgttccagcagctgctgcagagcagccagcagggag

SEQ ID NO: 257290 - DNA, 120 bp, Artificial Sequence
  ENSG00000124574_39 (sequence is synthesized)
tccctgcctcactcggaggtccctgagcccaatcccacaccctgcagagttctcccctctctctgatccaggccgggcctatacagaggtgctggctgcttgtttacattctcctctggg

SEQ ID NO: 257291 - DNA, 120 bp, Artificial Sequence
  ENSG00000124574_40 (sequence is synthesized)
gctctacctctccacacttccccagaagggaaaagggcaccctggattactctttggaaatcactccttggtgggcagcatcctgaggcttccccagaaccaggcctctgctctggccct

SEQ ID NO: 257292 - DNA, 120 bp, Artificial Sequence
  ENSG00000124574_41 (sequence is synthesized)
cttgcatctggaacgccaggtgggtttttctggcataggagcccacttgcattttcatagttttatttgataaaattccatcttacattctgtgtattaaaaaaataatatttctggtgt

SEQ ID NO: 257293 - DNA, 120 bp, Artificial Sequence
  ENSG00000124574_42 (sequence is synthesized)
agcatatgggcgtggcgaatagcgccggctaggtcttccaacctctaggtggggtgccagccggggcgggcccagcaccccggccgggcagtactttttttttttttgcatacaccagtt

SEQ ID NO: 257294 - DNA, 120 bp, Artificial Sequence
  ENSG00000124574_43 (sequence is synthesized)
ctcaggatatcggaatccggtgcacagcagcttcttcaggtttgaggttccggatgcctgggggcggagaaacgggaggggaaaaacagatggcaaggtgaggcgtccatggaacgactt

SEQ ID NO: 257295 - DNA, 120 bp, Artificial Sequence
  ENSG00000124574_44 (sequence is synthesized)
ctggcccagctgtgcggcagcagcgcagcgtggccgctcccgctgtgggagggggacaccacaggccactgcttcacccagctggtgctcagcgccctgccccacgcgctcctcgccgtg

SEQ ID NO: 257296 - DNA, 120 bp, Artificial Sequence
  ENSG00000124574_45 (sequence is synthesized)
gaggagggcatagccaggaaggctttatataaactcacagcagccagggctgatcagggggctgaaatggaggacaggatgagcaggcaaggacagcgaactcctagtgcccagatcctg

SEQ ID NO: 257297 - DNA, 120 bp, Artificial Sequence
  ENSG00000124574_46 (sequence is synthesized)
cttatgtgttggacaccttttgggggtcaggggtactaagaagagcaacgcatggtccctttattgggagagttttcaatctggaaagaaggaggtggccaagaaagcgaatcattgtaa

SEQ ID NO: 257298 - DNA, 120 bp, Artificial Sequence
  ENSG00000124574_47 (sequence is synthesized)
tcattacaccagagtgttttaaatgctataatagtcagcaaaggaatggaaacatccagtgtcagctattctttcagaaatgtggctgtgcagagaagggatccagagaggagcataggt

SEQ ID NO: 257299 - DNA, 120 bp, Artificial Sequence
  ENSG00000124574_48 (sequence is synthesized)
ttgagggaggaccttgttttcagatgggaacaagtacaatgtggtggccatactctccactgagctcctgaacagatgtaagtacaacagctgcttggctgtagccaaagagctatttct

SEQ ID NO: 257300 - DNA, 120 bp, Artificial Sequence
  ENSG00000124574_49 (sequence is synthesized)
tcccttcttcgcccagaatgggcttcattaggaccccttgacctcaggagctgccatctcagtcatgtgacatgaagggggaccctgtgtagaagacagcagcctggggaggcttctagg

SEQ ID NO: 257301 - DNA, 120 bp, Artificial Sequence
  ENSG00000124574_50 (sequence is synthesized)
agtcaagggctgggcatggagggacccagaggagagctggtcctcatattgctcgcctggctctctgcaggctgcgtgggcatgtggcagtgcgggggctgtccaagggctttggcctgg

SEQ ID NO: 257302 - DNA, 120 bp, Artificial Sequence
  ENSG00000124574_51 (sequence is synthesized)
actctgccccctgctgcatgtgtgccctgagccagtcattgctgcctcccgccttcacagaactggtgtgaggaactgggagaacaggagggaaaaggagtacgttggtaaaatgccagt

SEQ ID NO: 257303 - DNA, 120 bp, Artificial Sequence
  ENSG00000124574_52 (sequence is synthesized)
gtatttgggactcatgggctttgtgactgggtgctcttgggaacttaaaggcccagggtctctgagaacattctcatatcttcagagaagagaaaggagtcaggtttagaatggtctttt

SEQ ID NO: 257304 - DNA, 120 bp, Artificial Sequence
  ENSG00000124574_53 (sequence is synthesized)
tgtaaaaacaaaaatttttaaactctgaaagatttttatgcagagggatgtgaccacctgcaagtttactgggagagaaataggaggaaatgaagctccagccagatattaggaattgag

SEQ ID NO: 257305 - DNA, 120 bp, Artificial Sequence
  ENSG00000124574_54 (sequence is synthesized)
cgaagcatgagaaaaagctctgcagtaatgagaagtaaccctggacagagtggcaggcatagctctggcggtcctcttggggatggacattcgtccctctctgctggtcggaatcaaggt

SEQ ID NO: 257306 - DNA, 120 bp, Artificial Sequence
  ENSG00000124574_55 (sequence is synthesized)
ttacaaggatggacttgagtcctgctcgaggtctaggggtatccagagcagggtgggttagagagggaggcctaagagtcctgctcgaggtctaggggtatcctgctagggtgggttaga

SEQ ID NO: 257307 - DNA, 60 bp, Artificial Sequence
  ENSG00000124574_56 (sequence is synthesized)
tgtcccaaagtagctgggattacaggagtccagattacatcctaccctgcagtcctggat

SEQ ID NO: 257308 - DNA, 120 bp, Artificial Sequence
  ENSG00000124574_57 (sequence is synthesized)
gacgggcggtcccggttccagggcggggctggagacagggagacccggctgggaagtgcaggcaaagccggctgttaccctgcacagccgtcaccctcaactttcccttcaggtaggcgt

SEQ ID NO: 257309 - DNA, 120 bp, Artificial Sequence
  ENSG00000124574_58 (sequence is synthesized)
cctcagtgctggctgagaaggagggagggatccctgactgcctcatctctcaaccaagggaaaactgaagaaacctttttgtgggggccttggatatataaccctcccctctgtgaagga

SEQ ID NO: 257310 - DNA, 120 bp, Artificial Sequence
  ENSG00000124574_59 (sequence is synthesized)
gttcctttctttcctctcctctacctttcactccagcttctattcagttccaggcttggggttaggtctcttcatcctcgttctaatggccttaggaaaaaaatgtatgatgcaatcctg

SEQ ID NO: 257311 - DNA, 120 bp, Artificial Sequence
  ENSG00000124574_60 (sequence is synthesized)
ggcgtgagccaccgcgcccagcctctgttgcttcctttaaatgccagcagtccacagcctggggagtctcccacaaacgtcccggtgtccaagctctcccagcagctggtacttctctcc

SEQ ID NO: 257312 - DNA, 120 bp, Artificial Sequence
  ENSG00000124575_0 (sequence is synthesized)
atgtcggagactgctccacttgctcctaccattcctgcacccgcagaaaaaacacctgtgaagaaaaaggcgaagaaggcaggcgcaactgctgggaaacgcaaagcatccggaccccca

SEQ ID NO: 257313 - DNA, 120 bp, Artificial Sequence
  ENSG00000124575_1 (sequence is synthesized)
gtatctgagcttatcaccaaggcagtggcagcttctaaggagcgcagcggcgtttctctggccgcgcttaagaaagcgcttgcggctgctggctacgatgtagaaaaaaacaacagccgt

SEQ ID NO: 257314 - DNA, 120 bp, Artificial Sequence
  ENSG00000124575_2 (sequence is synthesized)
tctggctccttcaaactcaacaagaaagcggcttccggggaaggcaaacccaaggccaaaaaggctggcgcagccaagcctaggaagcctgctggggcagccaagaagcccaagaaggtg

SEQ ID NO: 257315 - DNA, 120 bp, Artificial Sequence
  ENSG00000124575_3 (sequence is synthesized)
gctggcgccgctaccccgaagaaaagcatcaaaaagactcctaagaaggtaaagaagccagcaaccgctgctgggaccaagaaagtggccaagagtgcgaaaaaggtgaaaacacctcag

SEQ ID NO: 257316 - DNA, 120 bp, Artificial Sequence
  ENSG00000124575_4 (sequence is synthesized)
ccaaaaaaagctgccaagagtccagctaaggccaaagcccctaagcccaaggcggccaagcctaagtcggggaagccgaaggttacaaaggcaaagaaggcagctccgaagaaaaagtga

SEQ ID NO: 257317 - DNA, 120 bp, Artificial Sequence
  ENSG00000124587_0 (sequence is synthesized)
ccttcaccctcctcgttggtgtcctgtcaccatggcgctggctgtcttgcgggtcctggagccctttccgaccgagacacccccgttggcagtgctgctgccacccgggggcccgtggcc

SEQ ID NO: 257318 - DNA, 120 bp, Artificial Sequence
  ENSG00000124587_1 (sequence is synthesized)
tgctggccctgaggcctgcaggggagagcccggcagggccggcgctgctggtggcagccctggaggggccggacgcgggcaccgaagagcagggtcccgggccgccgcagctactggtta

SEQ ID NO: 257319 - DNA, 80 bp, Artificial Sequence
  ENSG00000124587_2 (sequence is synthesized)
gccgccgcagctactggttagccgcgcgctgctgcggctcctggcactgggctccggggcctgggtgcgggcgcgggcgg

SEQ ID NO: 257320 - DNA, 120 bp, Artificial Sequence
  ENSG00000124587_3 (sequence is synthesized)
ctcgctggggcctgggctcggaccgcgagtcgggccgctgctggtgaggcgcggagagaccctcccagtgcccggaccgcgggtgctggagacgcggccggcgttgcaagggctgctggg

SEQ ID NO: 257321 - DNA, 120 bp, Artificial Sequence
  ENSG00000124587_4 (sequence is synthesized)
cccagggactcggctggctgtgactgagctccgcgggcgggccagactgtgtccagagtctggggacagcagtcggcccccacccccgcccgtggtgtcctcctttgcggtttctggcac

SEQ ID NO: 257322 - DNA, 120 bp, Artificial Sequence
  ENSG00000124587_5 (sequence is synthesized)
agtgcggcgactccagggagttctgggagggactggagattcactaggggtgagccggagctgtctccgtggccttggcctcttccagggcgaatgggtgtgggtggcccaggccagaga

SEQ ID NO: 257323 - DNA, 120 bp, Artificial Sequence
  ENSG00000124587_6 (sequence is synthesized)
gtcatcgaacacttcacagccgcacttggctagggtgcaggtcctagaacctcgctgggacctctctgatagactgggacccggctctggaccgctgggagagcccctcgctgacggact

SEQ ID NO: 257324 - DNA, 120 bp, Artificial Sequence
  ENSG00000124587_7 (sequence is synthesized)
ggcgcttgtccctgccactttggcttttaatcttggctgtgaccccctggaaatgggagagctcagaattcagaggtacttggaaggctccatcgcccctgaagacaaaggaagctgctc

SEQ ID NO: 257325 - DNA, 120 bp, Artificial Sequence
  ENSG00000124587_8 (sequence is synthesized)
attgctgcctgggcctccatttgccagagagttacacatcgaaattgtgtcttctccccactacagcactaatggaaattatgacggtgttctttaccggcactttcagatacccagggt

SEQ ID NO: 257326 - DNA, 120 bp, Artificial Sequence
  ENSG00000124587_9 (sequence is synthesized)
agtccaggaaggggatgttctatgtgtgccaacaattgggcaagtagagatcctggaaggaagtccagagaaactgcccaggtggcgggaaatgttttttaaagtgaagaaaacagttgg

SEQ ID NO: 257327 - DNA, 120 bp, Artificial Sequence
  ENSG00000124587_10 (sequence is synthesized)
ggaagctccagatggaccagccagtgcctacttggccgacaccacccatacctccttgtacatggtgggttctaccctgagccctgttccatggctcccttcagaggaatccactctctg

SEQ ID NO: 257328 - DNA, 120 bp, Artificial Sequence
  ENSG00000124587_11 (sequence is synthesized)
gagcagtttgtctcctccaggcctggaggccttggtgtctgaactctgtgctgtcctgaagcctcgcctccagccagggggtgccctgctgacaggaactagcagtgtccttctacgggg

SEQ ID NO: 257329 - DNA, 120 bp, Artificial Sequence
  ENSG00000124587_12 (sequence is synthesized)
ccccccaggctgtgggaagaccacagtagttgctgctgcctgtagtcaccttgggctccacttactgaaggtgccctgctccagcctctgtgcagaaagtagtggggctgtggagacaaa

SEQ ID NO: 257330 - DNA, 120 bp, Artificial Sequence
  ENSG00000124587_13 (sequence is synthesized)
actgcaggccatcttctcccgggcccgccgttgccggcctgcagtcctgttgctcacagctgtggaccttctgggccgggaccgtgatgggctgggtgaggatgcccgtgtgatggctgt

SEQ ID NO: 257331 - DNA, 120 bp, Artificial Sequence
  ENSG00000124587_14 (sequence is synthesized)
cctgcctgctgatgtgcagacagcatttcctcatgagctcgaggtgcctgctctgtcagaggggcagcggctcagcatcctgcgggccctcactgcccaccttcccctgggccaggaggt

SEQ ID NO: 257332 - DNA, 120 bp, Artificial Sequence
  ENSG00000124587_15 (sequence is synthesized)
gaacttggcacagctagcacggcggtgtgcaggctttgtggtaggggatctctatgcccttctgacccacagcagccgggcagcctgcaccaggatcaagaactcaggtttggcaggtgg

SEQ ID NO: 257333 - DNA, 120 bp, Artificial Sequence
  ENSG00000124587_16 (sequence is synthesized)
cttgactgaggaggatgagggggagctgtgtgctgccggctttcctctcctggctgaggactttgggcaggcactggagcaactgcagacagctcactcccaggccgttggagcccccaa

SEQ ID NO: 257334 - DNA, 120 bp, Artificial Sequence
  ENSG00000124587_17 (sequence is synthesized)
gatcccctcagtgtcctggcatgatgtgggtgggctgcaggaggtgaagaaggagatcctggagaccattcagctccccctggagcaccctgagctactgagcctgggcctgagacgctc

SEQ ID NO: 257335 - DNA, 120 bp, Artificial Sequence
  ENSG00000124587_18 (sequence is synthesized)
aggccttctgctccatgggccccctggcaccggcaagacccttctggccaaggcagtagccactgagtgcagccttaccttcctcagcgtgaaggggccagagctcattaacatgtatgt

SEQ ID NO: 257336 - DNA, 120 bp, Artificial Sequence
  ENSG00000124587_19 (sequence is synthesized)
gggccaaagtgaggagaatgtgcgggaagtgtttgccagggccagggctgcagctccatgcattatcttctttgatgaactggactctttggccccaagccgggggcgaagtggagattc

SEQ ID NO: 257337 - DNA, 120 bp, Artificial Sequence
  ENSG00000124587_20 (sequence is synthesized)
tggaggagtgatggacagggtggtgtctcagctccttgccgagctagatgggctgcacagcactcaggatgtgtttgtgattggagccaccaacagaccagatctcctggaccctgccct

SEQ ID NO: 257338 - DNA, 120 bp, Artificial Sequence
  ENSG00000124587_21 (sequence is synthesized)
tctgcggcctggcagatttgacaagctggtgtttgtgggggcaaatgaggaccgggcctcccagctacgcgttctaagtgccatcacacgcaaattcaagctagagccatctgtgagcct

SEQ ID NO: 257339 - DNA, 120 bp, Artificial Sequence
  ENSG00000124587_22 (sequence is synthesized)
ggtaaacgtgctagattgctgccctccccagctgacgggcgcggacctctactctctctgctctgatgctatgacagctgccctcaaacgcagggttcatgacctggaggaagggctgga

SEQ ID NO: 257340 - DNA, 120 bp, Artificial Sequence
  ENSG00000124587_23 (sequence is synthesized)
gccaggtagctcagcactgatgctcaccatggaggacttgctgcaggctgccgcccggctgcaaccctcagtcagtgagcaggagctgctccggtacaagcgcatccagcgcaagtttgc

SEQ ID NO: 257341 - DNA, 120 bp, Artificial Sequence
  ENSG00000124587_24 (sequence is synthesized)
tgcctgctaggagccccccagggtctgggaccccgctcagcatggctgcaggtaccttgatagcccacagagagatctgggaaggaagggctcctcctcaggctgctgccaacccacctg

SEQ ID NO: 257342 - DNA, 120 bp, Artificial Sequence
  ENSG00000124587_25 (sequence is synthesized)
gaggccacctccctccaggagatcccagggtgcaaagtggcattgagacagcagcaacagctcaagagatatctcctgcctacttgcccctccttccaggccggctctaagagaaaggcc

SEQ ID NO: 257343 - DNA, 120 bp, Artificial Sequence
  ENSG00000124587_26 (sequence is synthesized)
catctactcaggaagagggccagggccttgggttctggggattgggccctgagagggctagttctgtggctgaaaataaagcatgtcccgccccctactggtgttgtggcatgaaaggtt

SEQ ID NO: 257344 - DNA, 120 bp, Artificial Sequence
  ENSG00000124587_27 (sequence is synthesized)
ggagtgagaaagagcagggttgtgggaggagtaagccctgggagagggtgggggggtgggcagcatgggagcctgatccttctgacataaataaacacaatgcatgcaggaactgaaaaa

SEQ ID NO: 257345 - DNA, 120 bp, Artificial Sequence
  ENSG00000124588_0 (sequence is synthesized)
agcgagtgcgcggtccagtgcggccggaacctggcgcaactcctagagcggtccttggggagacgcgggtcccagtcctgcggctcctactggggagtgcgctggtcggaagggggatgg

SEQ ID NO: 257346 - DNA, 120 bp, Artificial Sequence
  ENSG00000124588_1 (sequence is synthesized)
agacagaagtcacaaactcacatgccaccagccatatgatgtaaacatgtaaactgggccaaggaatacaaaagggagtggtgagctggggacactgaagaatggatgccctgtctagag

SEQ ID NO: 257347 - DNA, 120 bp, Artificial Sequence
  ENSG00000124588_2 (sequence is synthesized)
gagtgaaaatgaagcatttcatacaaacaacatgatttcgggcaatcactttgggaatcaggataaggtgttcccccagtctgcagaaacactggcaacatttacaaagctttaggttca

SEQ ID NO: 257348 - DNA, 120 bp, Artificial Sequence
  ENSG00000124588_3 (sequence is synthesized)
ttcttgtaagtgttgctggtgtcagaataggaacctccctgcgctttgaagggatgaatgtgacctctcccacattctccggtgctgtgatgtaccttaaacacagcaagggcacctggc

SEQ ID NO: 257349 - DNA, 120 bp, Artificial Sequence
  ENSG00000124588_4 (sequence is synthesized)
ctgggtggagcccactcctcagcacccacctcacttcttgcagtattctgcagaccccagccctgtgcctgtgctcctggacagctggagataaggagtgggccctggaagatgctcatt

SEQ ID NO: 257350 - DNA, 120 bp, Artificial Sequence
  ENSG00000124588_5 (sequence is synthesized)
caggccctgctcaagattccagtcctgattgctggactcgctgaagagagactacgcaggaaagccccagccacccatcaaatcagagagaaggaatccaccttcttacgctatggcagg

SEQ ID NO: 257351 - DNA, 120 bp, Artificial Sequence
  ENSG00000124588_6 (sequence is synthesized)
tgaactgagcaggcagggctgcaccgtcacagtgtctgatttgtatgccatgaaccttgagccgagggccacagacaaagatatcactggtactctttctaatcctgaggttttcaatta

SEQ ID NO: 257352 - DNA, 120 bp, Artificial Sequence
  ENSG00000124588_7 (sequence is synthesized)
tggagtggaaacccacgaagcctacaagcaaaggtctctggctagcgacatcactgatgagcagaaaaaggttcgggaggctgacctagtgatatttcagttcccgctgtactggttcag

SEQ ID NO: 257353 - DNA, 120 bp, Artificial Sequence
  ENSG00000124588_8 (sequence is synthesized)
cgtgccagccatcctgaagggctggatggatagggtgctgtgccagggctttgcctttgacatcccaggattctacgattccggtttgctccagggtaaactagcgctcctttccgtaac

SEQ ID NO: 257354 - DNA, 120 bp, Artificial Sequence
  ENSG00000124588_9 (sequence is synthesized)
cacgggaggcacggccgagatgtacacgaagacaggagtcaatggagattctcgatacttcctgtggccactccagcatggcacattacacttctgtggatttaaagtccttgcccctca

SEQ ID NO: 257355 - DNA, 120 bp, Artificial Sequence
  ENSG00000124588_10 (sequence is synthesized)
gatcagctttgctcctgaaattgcatccgaagaagaaagaaaggggatggtggctgcgtggtcccagaggctgcagaccatctggaaggaagagcccatcccctgcacagcccactggca

SEQ ID NO: 257356 - DNA, 120 bp, Artificial Sequence
  ENSG00000124588_11 (sequence is synthesized)
cttcgggcaataactctgtggcacgtgggcatcacgtaagcagcacactaggaggcccaggcgcaggcaaagagaagatggtgctgtcatgaaataaaattacaacatagctacctgggg

SEQ ID NO: 257357 - DNA, 120 bp, Artificial Sequence
  ENSG00000124588_12 (sequence is synthesized)
cagggatttcagctggccggccatatggccctgtgggtcgtcgcgcccgggccagggaccattctgtacataggatcgtgcttggctctcacggaacgcgcccacacgcagggtcccggt

SEQ ID NO: 257358 - DNA, 120 bp, Artificial Sequence
  ENSG00000124588_13 (sequence is synthesized)
gcaggttccgggctgcttaggttggcaccggtccgtggtccccgggggcgcagtcgcagcgctcccgccctccaggcgtcagcgagtgcgcggtccagtgcggccggaacctggcgcaac

SEQ ID NO: 257359 - DNA, 120 bp, Artificial Sequence
  ENSG00000124588_14 (sequence is synthesized)
atacttttttctttctgttttttgtttgtttttaattttagctttaaggagcacatggccagtactgtttcaggggaatattgggtggcgctggggtttgggcttctattgatcccatca

SEQ ID NO: 257360 - DNA, 120 bp, Artificial Sequence
  ENSG00000124588_15 (sequence is synthesized)
cccaaacagtgagcatagttcccaatagatagtttttcaacacttcctttcctcccttccttcccgcttttggattcccagcatctattgatcccgtcttttcacccctgtgtacccaat

SEQ ID NO: 257361 - DNA, 120 bp, Artificial Sequence
  ENSG00000124588_16 (sequence is synthesized)
gtttagttcccacttataagttagaacatggggaatttggttttgtttctgtgttgattcacttaggataatgacctccagctgcatccacgttactgcaaaggacaggatttcatgttt

SEQ ID NO: 257362 - DNA, 90 bp, Artificial Sequence
  ENSG00000124588_17 (sequence is synthesized)
accctgggttgattccatgtctttgctactgtaaatagttctgtgatgaacatacaagtgcaggcatcttttcatagaatgatttttttt

SEQ ID NO: 257363 - DNA, 120 bp, Artificial Sequence
  ENSG00000124588_18 (sequence is synthesized)
catacaagtgcaggcatcttttcatagaatgattttttttttccttttggtagatacccagtaatgggattgctgggttgaagggtaattctatttttagcaaactagaaatatttaatg

SEQ ID NO: 257364 - DNA, 120 bp, Artificial Sequence
  ENSG00000124588_19 (sequence is synthesized)
aagtacatgaatgagtgtcttcagaattgtacacagtgagatcaaatattttaataatgagcttgttatgttgaattctattctgaccatcactcactgagattttcttttctttctttc

SEQ ID NO: 257365 - DNA, 120 bp, Artificial Sequence
  ENSG00000124588_20 (sequence is synthesized)
ttttcttttctttcttttttaaagagacagagtttcactatgttgcccgggctggtctcaaaccccttgcctcaagtaatcttcccaccttgggcctcccaaagtgctgggattgcaggt

SEQ ID NO: 257366 - DNA, 120 bp, Artificial Sequence
  ENSG00000124588_21 (sequence is synthesized)
gtgagccaccacacctggcccagattttctttaatatttgtctaatatctttccatctccctatattcaagcttcatgtaattttattttctggtaattctctgagcatagagctggatt

SEQ ID NO: 257367 - DNA, 120 bp, Artificial Sequence
  ENSG00000124588_22 (sequence is synthesized)
tgctagtttttttattttatgactcaacatgacagtttctatttttcatagaaaagttgaatctgggcctgttgcttaattttcttctttgtctttttaaatttacattaggactatgaa

SEQ ID NO: 257368 - DNA, 120 bp, Artificial Sequence
  ENSG00000124588_23 (sequence is synthesized)
gttttaattgaacagccattaacatatatggttatatgttgcatgatgtttcaatcagtgatggactgcatgtacgatggtggtcccctaagattataatgccatgttttgtttattaaa

SEQ ID NO: 257369 - DNA, 120 bp, Artificial Sequence
  ENSG00000124588_24 (sequence is synthesized)
atttatttaagatttattttattatttttatagatgaggtctcactctgttgccccagctgggtgcagtggcatgatcatacctcactaggctcaagtgatcctcctgcctcagcatccc

SEQ ID NO: 257370 - DNA, 120 bp, Artificial Sequence
  ENSG00000124588_25 (sequence is synthesized)
cctgcctcagcatccctagtaactaggactacaggcacatgctaccacgcctggctaattattttaatttttggtagagacaggatctcattatgttgcccaagctggtcttgaactcct

SEQ ID NO: 257371 - DNA, 120 bp, Artificial Sequence
  ENSG00000124588_26 (sequence is synthesized)
cccacctcagcttccccaagtgctgagattacaggcatgagctgcctgcacctggactaatacagtaattttactgtaccttttccatgtttagatacagagatacctattattgtgtta

SEQ ID NO: 257372 - DNA, 120 bp, Artificial Sequence
  ENSG00000124588_27 (sequence is synthesized)
tgcctacagtattcagtacagtaacatctctacaggtttatagccaagggcaataggctctaccataaagcctgggtgtgtagtaggctgtaccatctaggtttgtgtaagtgcattcta

SEQ ID NO: 257373 - DNA, 120 bp, Artificial Sequence
  ENSG00000124588_28 (sequence is synthesized)
tctatgatgtttgcgtgacaatgaaatcaactaattatgaaatcacttaatgatacatttctcagaatgtatctcttttgttaagtgaaacattacaaaatttatttttttgggcacagt

SEQ ID NO: 257374 - DNA, 120 bp, Artificial Sequence
  ENSG00000124588_29 (sequence is synthesized)
gcactttgggaggccaaggcgggcatgccgatcacgaggtcatctcctacaggcagtgcacattgactaagttcattccttgcttttgctgttgtttgctattataaataggattttgtc

SEQ ID NO: 257375 - DNA, 120 bp, Artificial Sequence
  ENSG00000124588_30 (sequence is synthesized)
attataaataggattttgtcttcaattatatcttctaaaagttcttttgattggtaaaagctattgattgctgaatattggtttttgaccccgaccgtttgctgttttctcctcctaatc

SEQ ID NO: 257376 - DNA, 83 bp, Artificial Sequence
  ENSG00000124588_31 (sequence is synthesized)
gtttttgaccccgaccgtttgctgttttctcctcctaatcataattttttcttagttggtttccagtaataaagtcatgttgt

SEQ ID NO: 257377 - DNA, 64 bp, Artificial Sequence
  ENSG00000124588_32 (sequence is synthesized)
gcactctgggaggctgaggtggcgatttagccgggtctggtggcgggcgcctgtagtcccagct

SEQ ID NO: 257378 - DNA, 78 bp, Artificial Sequence
  ENSG00000124588_33 (sequence is synthesized)
ataatgagacccatctctacaaaaaatttaaaaatatacattagttaggcatggtggcacgcacctgtaattccagct

SEQ ID NO: 257379 - DNA, 84 bp, Artificial Sequence
  ENSG00000124588_34 (sequence is synthesized)
ttccagctactcaggaggctgaagcaagagggtcacgtgagtccaggagttcaaggctgcaatgagccatgactgtgtttttaa

SEQ ID NO: 257380 - DNA, 120 bp, Artificial Sequence
  ENSG00000124588_35 (sequence is synthesized)
cagagcaagactctttttaaaaatagccaggcgtgatggctctcacctggaatcccagcatttttggaggctaagatgggcagattgcttgagttcagcagtttgaggccagcctgggca

SEQ ID NO: 257381 - DNA, 78 bp, Artificial Sequence
  ENSG00000124588_36 (sequence is synthesized)
accctatcagtcccaggtacttgggaggctgaggtgagagaatcgctcgagctgggaggcagaggttgcagtgagctg

SEQ ID NO: 257382 - DNA, 120 bp, Artificial Sequence
  ENSG00000124588_37 (sequence is synthesized)
agatcacaccactgcactccagccttgggtgacggaatgagacctgtctcaaaaaacaaataaataaataaaaataatttaaaaatcattaattgccagttacaatgaaaatttaaaact

SEQ ID NO: 257383 - DNA, 120 bp, Artificial Sequence
  ENSG00000124588_38 (sequence is synthesized)
atgaaaatttaaaacttttaaaaaatttagtctgatggcattgtaccactgtgccgtgttcacgtaaccctactaataatcaccctgacacacagccacatgcagatggaggaacttccc

SEQ ID NO: 257384 - DNA, 120 bp, Artificial Sequence
  ENSG00000124588_39 (sequence is synthesized)
taaaagcaagtttgagggattaaatatcatctttgtcatcatatcctcctcttttcccttttcctcctcctccttgtcatcactactgaggacagcactgctggctgtgcccaggggccc

SEQ ID NO: 257385 - DNA, 120 bp, Artificial Sequence
  ENSG00000124588_40 (sequence is synthesized)
ttcttcctcaacgcccccagcaccacccaaagtccccctctgtggaatcggagcactgagtgtgttggcctcagggacactgaaggaagccgcccgcccgtcctctcagccttggagtct

SEQ ID NO: 257386 - DNA, 120 bp, Artificial Sequence
  ENSG00000124588_41 (sequence is synthesized)
gttcaaccattatcattcaaaccaccttccatcaaaggtttgaatacaatgagcagctgctcctgcattcctccaggacacaggttcaccagctgggtgtctgtcaaagacaatgagcct

SEQ ID NO: 257387 - DNA, 120 bp, Artificial Sequence
  ENSG00000124588_42 (sequence is synthesized)
ccgagttggtccaaacttgactctccttgaaggtcttctctggccatcctcaaaatccacaggatgaaatgtgttcgatgaggacaactcactcgtgtcgcggcgtttggatgggctgcg

SEQ ID NO: 257388 - DNA, 120 bp, Artificial Sequence
  ENSG00000124588_43 (sequence is synthesized)
gcgtggccgcttctgccgtagagacggagccttcctgtggttcgcgcacttccttcctgaagcctcatatttcccattccgttgatacttggccacctcaacctgcaacgtgcagtttcc

SEQ ID NO: 257389 - DNA, 120 bp, Artificial Sequence
  ENSG00000124588_44 (sequence is synthesized)
agtgtcatcttcatccaaatgcatgaatgcaagatccacagcttccctcttccaatgatcgcacagcctgtctcctttaagatgtccttggttatctctgtaaaacttgaccttaagttc

SEQ ID NO: 257390 - DNA, 120 bp, Artificial Sequence
  ENSG00000124588_45 (sequence is synthesized)
ttctgtctggggatcgctcataataatgccaaatggacaggcgtgtgaatgcctccacggtaacgaccagaggcaaaccggcacatacacgtttgtatttctccttcttcagcatgaagc

SEQ ID NO: 257391 - DNA, 120 bp, Artificial Sequence
  ENSG00000124588_46 (sequence is synthesized)
agtcttcactggtttctcttctgctcctgtgtgcttgcagaaaccgggctggctcttgattgggattgtaggctgcagaggctggggaagggcagacagcctcgggagacacgccggaaa

SEQ ID NO: 257392 - DNA, 120 bp, Artificial Sequence
  ENSG00000124588_47 (sequence is synthesized)
gggcggctccctcgtgctcctcagtgactcagggttttggccacatagctcccctcctccaccctcgctcagcaggctgcatccggggcggggctggcaggcaaagaggctgtgtcacag

SEQ ID NO: 257393 - DNA, 120 bp, Artificial Sequence
  ENSG00000124588_48 (sequence is synthesized)
cccttcagagcctcaagctggggtccctagggtttctggacctcagatcactgtgaggcaggaggtcctccaccctccctccggcaactctgaagtatgggaaggtgcgttctcgaactg

SEQ ID NO: 257394 - DNA, 120 bp, Artificial Sequence
  ENSG00000124588_49 (sequence is synthesized)
ccgaggggcctgttcctgtgtgggttgagaggatgggaagttgctgaaatccaacctctctgagagccggtgctgtcaccttggcctgagtatgctgaagacattaattccggttcccaa

SEQ ID NO: 257395 - DNA, 120 bp, Artificial Sequence
  ENSG00000124588_50 (sequence is synthesized)
gcaaaactgttagcaattcgagggctgggctcttgcctatgtctcatctcctgttagtaccgggcaccctgatacattttctgccggtttttaagaatttttttttgagacggagtttca

SEQ ID NO: 257396 - DNA, 120 bp, Artificial Sequence
  ENSG00000124588_51 (sequence is synthesized)
aggcatgagccaccgcgcccggccggtttttaagatcttattgctgaaaaacttaaaataaaaaataaattcagtatcagcagggcagcaggaattgccattaaaaaaaaaaaaagaaaa

SEQ ID NO: 257397 - DNA, 120 bp, Artificial Sequence
  ENSG00000124588_52 (sequence is synthesized)
ttggaaatgactgcagccaggtgtgtgtgattgggccccgcgacctttttcttaggcaaacagggctttgtggatgcagaaagacttctttggttgtgtagtttgtctcagagcctctcg

SEQ ID NO: 257398 - DNA, 120 bp, Artificial Sequence
  ENSG00000124588_53 (sequence is synthesized)
tgggtggagcctggtaaaaagaggaaagagactcatgttgctcaatgtgaggaagcaccaggaattttggagaagttcccagcagctcaggagagtggctggtgccttgtcccaggggag

SEQ ID NO: 257399 - DNA, 120 bp, Artificial Sequence
  ENSG00000124588_54 (sequence is synthesized)
agggaaataagcacaggcctatttctttctcaagacggaaaaaccgagccccagaaaatggcgataagatggggatgcaggaaaaagctagctaatgaacagttcagcagtgggcaccgt

SEQ ID NO: 257400 - DNA, 120 bp, Artificial Sequence
  ENSG00000124588_55 (sequence is synthesized)
gtgggaacctctcctaagccgccctccctctgatggatgcatgctcaagtgatttcgttggcccttaaaggaaagtgttattccatcctgtaatcctagcactttaaaaggaggccgagg

SEQ ID NO: 257401 - DNA, 120 bp, Artificial Sequence
  ENSG00000124588_56 (sequence is synthesized)
aaaaaaaaagacatctgcccaagggtcatagctgtagaggggcagatgtggtttgaacccagggcgtctggttcctctctggaagcaaccaaagtgcctgtgattggggtagtgacaaag

SEQ ID NO: 257402 - DNA, 120 bp, Artificial Sequence
  ENSG00000124588_57 (sequence is synthesized)
cactctgagccgctgcatggcagatgctgtgaagagtcatctttgcctgtcccatatctattcccattttttctgattgtaacaccttgtttttttgtgtgtggtgggggaaccatgccc

SEQ ID NO: 257403 - DNA, 120 bp, Artificial Sequence
  ENSG00000124588_58 (sequence is synthesized)
tttcaaccaagctatgtggtgttcataagggtagcccctcctccgaccccaggagtggcagttcacagccctgactgatcacagtgttccgtggcctagctgtaaccaccccagggagtg

SEQ ID NO: 257404 - DNA, 120 bp, Artificial Sequence
  ENSG00000124588_59 (sequence is synthesized)
agactgaactcaggggttcattggacctatcaggaaagagagacctttcttgtttctggacttggagctgtgatgaagtaagtgggtcaggggccaacacatagacagcgttggcctaca

SEQ ID NO: 257405 - DNA, 120 bp, Artificial Sequence
  ENSG00000124588_60 (sequence is synthesized)
aatgcagcccaggcagaggacggtgcagccaagccacacagagagacaacttcctagtgacacgctgtgaactcctgcatccacccctgcctgaactggagcttttcctcttcagctctt

SEQ ID NO: 257406 - DNA, 120 bp, Artificial Sequence
  ENSG00000124588_61 (sequence is synthesized)
cagttatgtgaggcaagatgttgccttttttgcttaatgctgtgagttgagtgtacagcagttacaatcaaagaatcctaaataatgctgcaagcatggtgactatctacatgggaatat

SEQ ID NO: 257407 - DNA, 120 bp, Artificial Sequence
  ENSG00000124588_62 (sequence is synthesized)
gcagtactccagtgaagacaaaacataaattaattttggaatctgatgaccataatctaaaaacattcatagaggtatataaaaattataacaaaatttaaagtagcatatctcctcatg

SEQ ID NO: 257408 - DNA, 120 bp, Artificial Sequence
  ENSG00000124588_63 (sequence is synthesized)
aagcaggttaagtgtatacacaaagaaggaggaggaaaaggtgagaaagaatctgcccttgtggggaagtgacagaggcagaagaggctgatgcagtcctgcatccaggcccagctctgc

SEQ ID NO: 257409 - DNA, 120 bp, Artificial Sequence
  ENSG00000124588_64 (sequence is synthesized)
cagcagctgagtacccctgaacaagctcccccacctcttcgggcctcactttccccatctatgaaagaaagggagtctagcttccatagctgccccagctgatacgcaaggtgccagtgt

SEQ ID NO: 257410 - DNA, 120 bp, Artificial Sequence
  ENSG00000124588_65 (sequence is synthesized)
gtcctcagtcctgtcaggagaaaccttccccactagaatcccaggaggagcttgaaatcctgtctgggatcctgacggcccaggtgctgaccctgcctcgggttgtgtctgctaagaagt

SEQ ID NO: 257411 - DNA, 120 bp, Artificial Sequence
  ENSG00000124588_66 (sequence is synthesized)
ctgatttctgctcatctctccccatttctttcttcccataaagtgggctgatgcgctggaacgtcgatgcagccagtgatgtgtttgatgagaatgtattgagagtaaagctgcccagaa

SEQ ID NO: 257412 - DNA, 120 bp, Artificial Sequence
  ENSG00000124588_67 (sequence is synthesized)
tccaagtgtgtgtcatctgaactcttgaatcatggatggaaggtatgtcctctgttgatgtctcgcagcctgagctgacaatctgtaagaaggttttgttatcttcatgttacagatggt

SEQ ID NO: 257413 - DNA, 120 bp, Artificial Sequence
  ENSG00000124588_68 (sequence is synthesized)
gaaccgaaacttacagagctcaagtcacttgaccaggctccacccctacaagaggcagcacgcaaactaaaaaccaggcggccttttccaaagcttgtgctctgctccactgctggaagg

SEQ ID NO: 257414 - DNA, 120 bp, Artificial Sequence
  ENSG00000124588_69 (sequence is synthesized)
aacccttcggggaattgaagcagcactgaacaaaggccatttttaagaagcgacaccagaaacctaaggcggggtccccggctcaacaaggatctcatgttttgtgggtcagagattctt

SEQ ID NO: 257415 - DNA, 120 bp, Artificial Sequence
  ENSG00000124588_70 (sequence is synthesized)
gtgtcgtgtctgggtgaggtcaaaaaccatgcagagactttcacttcctgttctgtggcagacaagacatctgaaaagctctcctgcagcaacacttctagatgccaagtaaatcacagc

SEQ ID NO: 257416 - DNA, 120 bp, Artificial Sequence
  ENSG00000124588_71 (sequence is synthesized)
aagtgcacttttaaatgtgttactaagatcataaaaatgaaggaaaatgcccaagcatatccccaacccctcaccccacaaccaccaccaccacaataaacaagttgctgacagtggatt

SEQ ID NO: 257417 - DNA, 120 bp, Artificial Sequence
  ENSG00000124588_72 (sequence is synthesized)
ggcaagcgagagtggaaccttaggctgcgttggcatcaaatactaataaccaagcaaaagggagcaagaccaggcctgggggctgtgccattgagaggtgaccgcgtgctggcagtcctc

SEQ ID NO: 257418 - DNA, 87 bp, Artificial Sequence
  ENSG00000124588_73 (sequence is synthesized)
ggctgtgccattgagaggtgaccgcgtgctggcagtcctcacagccctcgttcgctctcggcgcctgctctgcctgggctcccactt

SEQ ID NO: 257419 - DNA, 88 bp, Artificial Sequence
  ENSG00000124588_74 (sequence is synthesized)
gggcgtgggcttggcgggccccgcactcagagcagccgggcggccctgtcggccccgggcaataaatgtactgggtcccccagcagtg

SEQ ID NO: 257420 - DNA, 82 bp, Artificial Sequence
  ENSG00000124588_75 (sequence is synthesized)
tctccgtgagctactgggcagcccaagcctcccccaagagcgccgcctcctgctccaggcgcccagtcccatcaaccaccca

SEQ ID NO: 257421 - DNA, 120 bp, Artificial Sequence
  ENSG00000124588_76 (sequence is synthesized)
ccgcctcctgctccaggcgcccagtcccatcaaccacccaagggctgagaagtgcaggcacagggcgcgggactggcaggcagctccacctgggtgaagccagctgggctcctgagtgtg

SEQ ID NO: 257422 - DNA, 64 bp, Artificial Sequence
  ENSG00000124588_77 (sequence is synthesized)
cagctgggctcctgagttggcactctgtatctacctcaaagtttgtaaacacaccaatcagcac

SEQ ID NO: 257423 - DNA, 120 bp, Artificial Sequence
  ENSG00000124588_78 (sequence is synthesized)
agcaggatgtgggtggggccagataagagtataaaagcaggctgccctagccagcaatagcaacgaagtcggatttgtttccatgctgtgacggttttgtttttttgcttattgtaatag

SEQ ID NO: 257424 - DNA, 120 bp, Artificial Sequence
  ENSG00000124588_79 (sequence is synthesized)
ttattgtaatagcttttgctgttgtactcttttctggtctacactgcgtttatgagttgtaacagtcgtcacaaaggcctgcagctttcactttctgcctcagccagcgagactgcaaac

SEQ ID NO: 257425 - DNA, 120 bp, Artificial Sequence
  ENSG00000124588_80 (sequence is synthesized)
ccaccaaaaaaaaaacttaactgtcacacccaccctaagggtctgcagctgggtttttgaaatcagaccaagaacccaccaattcagaacccaccaattcgggacacaccatgtgggcag

SEQ ID NO: 257426 - DNA, 120 bp, Artificial Sequence
  ENSG00000124588_81 (sequence is synthesized)
ctgaatcaagactttgtggaggagctccaaagtgggtagaaaagtacgttcacccttacagggagactggcaggcagcctttttccttctcggtagaaaaataaactcctgttccataga

SEQ ID NO: 257427 - DNA, 120 bp, Artificial Sequence
  ENSG00000124588_82 (sequence is synthesized)
caggggaatggctgtgacaataaataagattgggaaaacaagaagacgcccttgcatacattaagatatgtatatatggaaatgttaccgggagtcccggttatcccaaaaagggttgtt

SEQ ID NO: 257428 - DNA, 120 bp, Artificial Sequence
  ENSG00000124588_83 (sequence is synthesized)
tcctgttgcgtggtgaggccaatgcacgaaaccgaaagggagtgtgtcaagcagtgcaggctgtattcaatggctatggaattggaagatctgaaatcaacttagcttataagggcctcg

SEQ ID NO: 257429 - DNA, 120 bp, Artificial Sequence
  ENSG00000124588_84 (sequence is synthesized)
gtaggggaggcggggctggagggagatggcgccgcgctcccggatgaacagagaaagcgacaggataagggcctcgctctgttacccaggctggagtgctgtggtgtgtttgtgactcac

SEQ ID NO: 257430 - DNA, 120 bp, Artificial Sequence
  ENSG00000124588_85 (sequence is synthesized)
ttctgctgacacctcactggccatctcaactgcaaggcagcctaggaaatgtagtgcttacctgtacacgtggattcctggaatcaattcaggattgctggactcgctgaagagagacta

SEQ ID NO: 257431 - DNA, 120 bp, Artificial Sequence
  ENSG00000124588_86 (sequence is synthesized)
tgtgcctccaggccctgaaattctccctgggctgtagcaggggctcaagtgaatgaaccccaggaggcatcttgggtaagaaagtactcattgtctatgcacaccaggaacccaagtctt

SEQ ID NO: 257432 - DNA, 120 bp, Artificial Sequence
  ENSG00000124596_0 (sequence is synthesized)
caaacaaccgactcctttccaggtgaagggtgacttgggtacgttggggctttgagcgagcctccccgcaccctcccataggaccccaggacagactgcgtcctcgctgacccgccctag

SEQ ID NO: 257433 - DNA, 120 bp, Artificial Sequence
  ENSG00000124596_1 (sequence is synthesized)
gctgaagaaacacttaaattctggaaatagcgactcagtatcatggccagcagccttaatgaagatccagaaggaagcagaatcacttatgtgaaaggagacctttttgcatgcccgaaa

SEQ ID NO: 257434 - DNA, 120 bp, Artificial Sequence
  ENSG00000124596_2 (sequence is synthesized)
acagactctttagcccactgtatcagtgaggattgtcgcatgggcgctgggatagctgtcctctttaagaagaaatttggaggggtgcaagaacttttaaatcaacaaaagaaatctgga

SEQ ID NO: 257435 - DNA, 120 bp, Artificial Sequence
  ENSG00000124596_3 (sequence is synthesized)
gaagtggctgttctgaagagagatgggcgatatatatattacttgattacaaagaaaagggcttcgcacaagccaacttatgaaaacttacagaagagtttagaggcaatgaagtctcat

SEQ ID NO: 257436 - DNA, 120 bp, Artificial Sequence
  ENSG00000124596_4 (sequence is synthesized)
tgtctgaagaatggagtcactgacctctccatgcccaggattggatgtggtcttgatcgtctgcaatgggaaaatgtatctgcgatgatcgaggaggtatttgaggcaacagacatcaaa

SEQ ID NO: 257437 - DNA, 120 bp, Artificial Sequence
  ENSG00000124596_5 (sequence is synthesized)
attactgtgtacacactctgaaccagtgaacattttggatgtttccgtgttctcctgtgtcatctctactgggccataggaccgggcaaacctaccttaaaataggcagaggaaagtttc

SEQ ID NO: 257438 - DNA, 120 bp, Artificial Sequence
  ENSG00000124596_6 (sequence is synthesized)
atgagaagtagtgtgtttaacaagacagactttggttgctgtattcaagtatttggattatgactgtggaggagggcttgcttaagatatgtggttgtgtttttttgtggaaaagtaagg

SEQ ID NO: 257439 - DNA, 120 bp, Artificial Sequence
  ENSG00000124596_7 (sequence is synthesized)
agttaggtggcttgataataggcagggaaaccagattgtcgggactatgacctttttctccagtatgctacctgatttgtttggctggccactaggtggcagcattggttctacttctct

SEQ ID NO: 257440 - DNA, 120 bp, Artificial Sequence
  ENSG00000124596_8 (sequence is synthesized)
gctttttaagagaaatttcaggaaggatgatcattccagttagtttggcattttttgtcgtttgtgcacataacttggtgttatccttatgtcatcagattcctcctaggggagagtttt

SEQ ID NO: 257441 - DNA, 120 bp, Artificial Sequence
  ENSG00000124596_9 (sequence is synthesized)
tgttttaattacaaaattaaattctacattgttaccaagaaatttgtggtgataaaaatggaaaaataaaaatttggggagttagtgaggttctgtgcttatgtctatttgttctggaca

SEQ ID NO: 257442 - DNA, 120 bp, Artificial Sequence
  ENSG00000124596_10 (sequence is synthesized)
tgggtaatggagggttcacctgcaacttaatttcaaacagtcagacaaagggtccaagcgggaggagaagcaaagtgagaaataagagataaaaatagacaagtcaaaaggcaggttttt

SEQ ID NO: 257443 - DNA, 120 bp, Artificial Sequence
  ENSG00000124596_11 (sequence is synthesized)
agaatctcctcatggtgaactttttctctcttttgtccactgcatggtttctgtgattgaacctgcctgaatttaatcatgaaaacaagtgaaataatgtatgttaaatgcctggcagag

SEQ ID NO: 257444 - DNA, 120 bp, Artificial Sequence
  ENSG00000124596_12 (sequence is synthesized)
tacttagcacagactagtgacccaataaatcagtgattgtcaaaaatccttatgagtcttctttaaaaaaataaaggccacttcctctcaaaaaattctcatacctgtcatctcagcact

SEQ ID NO: 257445 - DNA, 120 bp, Artificial Sequence
  ENSG00000124596_13 (sequence is synthesized)
cgagaccctgtctctacaaaaaaaaaagaaattaaaaattagctgggcctggtggtgcaggcctgtagttccagctactctagaggttgaggcgggaggatggcttgagcctgggaggtt

SEQ ID NO: 257446 - DNA, 120 bp, Artificial Sequence
  ENSG00000124596_14 (sequence is synthesized)
gaagttgcattgagctgtgattgtgccactgcactccagtgtgggcaacagagcaagaccctatctcaattaaaaaaaaaaatttggtggtggagtgggatggccacttttgtgttttta

SEQ ID NO: 257447 - DNA, 120 bp, Artificial Sequence
  ENSG00000124596_15 (sequence is synthesized)
acctccatagaagatttggatgtgcagccagctggggtctaaatattagtcctcttttcttccgaagctgcaaagaccagtcgtctattgtggtcatggtaggaaaataaagttcatgga

SEQ ID NO: 257448 - DNA, 120 bp, Artificial Sequence
  ENSG00000124596_16 (sequence is synthesized)
tttagccaatggttcagtatcagagctattcgggaaactagacattttcttgttttcccttacagtggtgttgagagttaaaacagccagacttgctattgattttctccctagagtgac

SEQ ID NO: 257449 - DNA, 120 bp, Artificial Sequence
  ENSG00000124596_17 (sequence is synthesized)
tttgggtctgtcacaggacttgctgctttcccaagtataaaagaacaactgtattttagaaggggctggttaaaacaccaggaaagtactggttaaatataatctttgtactttagactg

SEQ ID NO: 257450 - DNA, 120 bp, Artificial Sequence
  ENSG00000124596_18 (sequence is synthesized)
tgttcttatcacatatcagcctgataagaggcaacagtttcaaaaaagtatttcacttttgtatttctaggtggaacagacaagttcttcatgttgttggggtaggggcagtggagggtc

SEQ ID NO: 257451 - DNA, 120 bp, Artificial Sequence
  ENSG00000124596_19 (sequence is synthesized)
aagttcattatcaaacttttagattgaggcttttcttgaagcattgcttttgtccacataaagttgaagggaaaaaggaaggagagattatctaaatacacaaaattgaaagtgagagtg

SEQ ID NO: 257452 - DNA, 120 bp, Artificial Sequence
  ENSG00000124596_20 (sequence is synthesized)
ggggataagaaacttaaagaaacttaaaatattttgcttaactctgcaattacagatgctcctcaacttaggtctatgtctgggtaaccccatcttaagttgagttcagttgaagggtgt

SEQ ID NO: 257453 - DNA, 120 bp, Artificial Sequence
  ENSG00000124596_21 (sequence is synthesized)
actgaatgtgtatggcttttgcaccgttgtaaagtccaaaaattgcaagacaaaccattgtaaattgagtaccatctgtaaaccttaacacaagtcaaaacatggattttctaggcttcc

SEQ ID NO: 257454 - DNA, 120 bp, Artificial Sequence
  ENSG00000124596_22 (sequence is synthesized)
tttacttttaaagagattatggttattattattatttttttcttggcgtttgagccttgattctttagacaaaacctagtctcattcaggattggctgtaagtggaattctgggacttag

SEQ ID NO: 257455 - DNA, 120 bp, Artificial Sequence
  ENSG00000124596_23 (sequence is synthesized)
caggaatgtgataaagcactttgtcatttgccgatagtagtcttgggtcaaattccgacgacttatcacacttgaagcctgaggaaaggaggcatgccctggtaatcagagtgaacacat

SEQ ID NO: 257456 - DNA, 120 bp, Artificial Sequence
  ENSG00000124596_24 (sequence is synthesized)
tattcctggaaacctagttagagtttggcaaacacccggaaattcacctgtgaatttttgcttccacataggactcaaacaaacctttaaaaaaaaaaaaagagagacttgacatcatcc

SEQ ID NO: 257457 - DNA, 120 bp, Artificial Sequence
  ENSG00000124596_25 (sequence is synthesized)
tgccattaccatcaaacaccatgtattgaatacttttaaatgattgtatatctgaacattaaactactacttttcacccgctcctctctaataaagaagctagttgcttattaactggca

SEQ ID NO: 257458 - DNA, 120 bp, Artificial Sequence
  ENSG00000124596_26 (sequence is synthesized)
ccgggcgggggcggccatcttagatgcgtgcaattaagggctttggcgggattggctccgcgtttgggctggtccgctgctccccacctaccagggtcggatccggagcccttccccgcg

SEQ ID NO: 257459 - DNA, 120 bp, Artificial Sequence
  ENSG00000124596_27 (sequence is synthesized)
ctctttgccccagaagggttttgtattacgtcccaggggccgaacaaactcacattcatcgataaacgttggggaaaaaagcctattaagtggttgtacagggcaatcagaatattatat

SEQ ID NO: 257460 - DNA, 120 bp, Artificial Sequence
  ENSG00000124596_28 (sequence is synthesized)
atgaagatccagaaggaagcagagtgcgtaacaactattgacttattggtgaactgaaattcgtaataatggaggtcaaaagcataaacactttttaattaaattaatgattgcattatc

SEQ ID NO: 257461 - DNA, 120 bp, Artificial Sequence
  ENSG00000124596_29 (sequence is synthesized)
gctttcctgattgcagttttggttgagaaggttgttcttccctgctgagatggctggctgacttcaccagtcaagaggcctgcaggatgaactggtcttaagtgtgagaaagatttagct

SEQ ID NO: 257462 - DNA, 120 bp, Artificial Sequence
  ENSG00000124596_30 (sequence is synthesized)
atgtgatgatgtggaggaaggtgaagtactacaaatcaagagagcataaaaacaagaacagaaatatttcagcatgtgaacagtggactaaacaggaaaaaaagcttggggccacactac

SEQ ID NO: 257463 - DNA, 120 bp, Artificial Sequence
  ENSG00000124596_31 (sequence is synthesized)
taaacaggaaaaaaagcttggggccacactactttctctcaaaatgtcagacaaagaaattcttctgcagactggtggaagcttgtaaggtcaggacgcagtggctcatgcctgtaatcc

SEQ ID NO: 257464 - DNA, 120 bp, Artificial Sequence
  ENSG00000124596_32 (sequence is synthesized)
taaaatatgcgtgtaaagaggggattcctaagaaccaaatgtttttaagattttcctccccaagaatggcctctagtttagacgtttaccatatcaaaacccaactcctgtgaaggtttt

SEQ ID NO: 257465 - DNA, 120 bp, Artificial Sequence
  ENSG00000124596_33 (sequence is synthesized)
taatctcttcctcttgtatcatgaaactttcttgacgatattactgtacttctctgaaacttgaaataactctgagatgcttagtctataggttggcattcaagatcctttacttaccaa

SEQ ID NO: 257466 - DNA, 120 bp, Artificial Sequence
  ENSG00000124596_34 (sequence is synthesized)
gaacagatgggctgcactgcatttgtgttgatcatgatgttctattctagacaactaagaatgtcaaaaagcttcctatcttatgacaactccagtccagtgatggcggctacttggagc

SEQ ID NO: 257467 - DNA, 120 bp, Artificial Sequence
  ENSG00000124596_35 (sequence is synthesized)
actgggttagaaagaaatgtgaggctgcatcccagctctgtgggaaagtcgtgtatcatgtaccataggcctgttctaagacttgcaaaagttaggaatgcctgccatactatatttcct

SEQ ID NO: 257468 - DNA, 120 bp, Artificial Sequence
  ENSG00000124596_36 (sequence is synthesized)
aaacaataatgtctcaagagacagatttcccaaaggagcttttctcttattccatgtcaaatagcacactgatagcaagggggtgaataaaaacaaaaaataataagtgcagtcccaaat

SEQ ID NO: 257469 - DNA, 120 bp, Artificial Sequence
  ENSG00000124596_37 (sequence is synthesized)
aatacttagctcctctcctaactactgcctgaatgtggggttcttcaacagtccaggatggcatttggtccctgaaagggtgtggcttccttagtggtggtggtgggtagcttacagcta

SEQ ID NO: 257470 - DNA, 120 bp, Artificial Sequence
  ENSG00000124596_38 (sequence is synthesized)
acccactacaagcctgatctggatgacaaactgagtggggagatgtcctagcccctttgaattctgtccttaaagcttatgtggcttccagtggttttactttgggaccctaccagtttt

SEQ ID NO: 257471 - DNA, 120 bp, Artificial Sequence
  ENSG00000124596_39 (sequence is synthesized)
ttctgttgttttatgtagagagacaaaaagcaagcaagcacagtttctaaataagtagaggcttttagcagggaattttcaggtggtatgctttcttccctgttagagatatgcagctta

SEQ ID NO: 257472 - DNA, 120 bp, Artificial Sequence
  ENSG00000124596_40 (sequence is synthesized)
tctcttggaagtggcacagagacttcacctaccttgcttaaaaatattgacaataggcatcatctgctaatctcatgggtttcctaggaaaaggaaagattgctacgtggcagagtctgg

SEQ ID NO: 257473 - DNA, 120 bp, Artificial Sequence
  ENSG00000124596_41 (sequence is synthesized)
gtttctcagcctctatttagtggattttcttgaaggtctcccataacagtgtggaaagggcaatatgacatttgtcatccttgctctagactaattctataaaaatgtgcttactctttt

SEQ ID NO: 257474 - DNA, 120 bp, Artificial Sequence
  ENSG00000124596_42 (sequence is synthesized)
agatgggcgatatatatattacttggtgctgtttcaggtactgggaatatggcaaaagaacaaagcaaatgaaaatccctgctgtgatgatttgtggagcttgaggaactgaacaacaaa

SEQ ID NO: 257475 - DNA, 120 bp, Artificial Sequence
  ENSG00000124596_43 (sequence is synthesized)
taaggcctttggctttggctggcacaggggtgaaggagagccagcggcattgagtaaccaggcgaatgtgcccccaggagagttcattccaaccctcccagttcctactgctggtggggg

SEQ ID NO: 257476 - DNA, 120 bp, Artificial Sequence
  ENSG00000124596_44 (sequence is synthesized)
tcccagtggcaagtgtcctccttctggcccaatgccttcgatggcactgccctagaaggctgctgggggcctgctggacactgaatggtcaagaggaaccagtgtcccagcctacccccc

SEQ ID NO: 257477 - DNA, 120 bp, Artificial Sequence
  ENSG00000124596_45 (sequence is synthesized)
aactagaaaatgaggtctcaaggcagcacctgccagccacactgccagagatggttgccttctaccaggagctacacacacccactcaaggccagaccatggtccgccagttgatgcaca

SEQ ID NO: 257478 - DNA, 120 bp, Artificial Sequence
  ENSG00000124596_46 (sequence is synthesized)
gcctgatgctccaggatacaggcatctccttgctcatcccaccaggtgctgtggctgtgggccgccaggagcgggtgtctttgatcctggtgtgggacctgtcggacgccccatcgctgt

SEQ ID NO: 257479 - DNA, 120 bp, Artificial Sequence
  ENSG00000124596_47 (sequence is synthesized)
cccaagcccaggggctggtaagccctgtggtggcatgtggcccccatggggcctccttcctgaagccttgcactctcacgttcaaacactgtgccgagcagcccagccatgctcgcacct

SEQ ID NO: 257480 - DNA, 120 bp, Artificial Sequence
  ENSG00000124596_48 (sequence is synthesized)
acagcagcaacactaccctgctggatgccaaggtatggaggcccctggggcggccgggggcccacgcctcccgggatgagtgtcgcatccacctctcccacttcaggtaggcacatgcca

SEQ ID NO: 257481 - DNA, 120 bp, Artificial Sequence
  ENSG00000124596_49 (sequence is synthesized)
ttggcctgtcttcccacacccatctctctgaggactgtctttcctgcccactttctctgtctgccttatcttcatctctctgtatagaagatggtctgcaaatcctttatcccctggtgt

SEQ ID NO: 257482 - DNA, 120 bp, Artificial Sequence
  ENSG00000124596_50 (sequence is synthesized)
ctctttctggcccctctgtcctaatgtttgtagcagtttttctcacatcaatcatgtccatgactgcaaatcccattgctgtctctctgtctgtctggaagtgtctgactcagcaccatc

SEQ ID NO: 257483 - DNA, 120 bp, Artificial Sequence
  ENSG00000124596_51 (sequence is synthesized)
agtttcgttacgcatgcgcgggcggcggcgggaaaccacggaatttactgccggaagttcggcggccttcgccaaagagtgtgggctcggctagcaagctagaggggctcgtttccgccc

SEQ ID NO: 257484 - DNA, 120 bp, Artificial Sequence
  ENSG00000124602_0 (sequence is synthesized)
gacccttgtttctcggagaaggaactggaccagccagcagcctctaagagctcctagacggcctttggctttggctggcacaggggtgaaggagagccagcggcattgagtaaccaggcg

SEQ ID NO: 257485 - DNA, 120 bp, Artificial Sequence
  ENSG00000124602_1 (sequence is synthesized)
aatgtgcccccaggagagttcattccaaccctcccagttcctactgctggtgggggtcccagtggcaagtgtcctccttctggcccaatgccttcgatggcactgccctagaaggctgct

SEQ ID NO: 257486 - DNA, 120 bp, Artificial Sequence
  ENSG00000124602_2 (sequence is synthesized)
gggggcctgctggacactgaatggtcaagaggaaccagtgtcccagcctaccccccaactagaaaatgaggtctcaaggcagcacctgccagccacactgccagagatggttgccttcta

SEQ ID NO: 257487 - DNA, 120 bp, Artificial Sequence
  ENSG00000124602_3 (sequence is synthesized)
ccaggagctacacacacccactcaaggccagaccatggtccgccagttgatgcacaaactgttggtgttttcggctcgagaggtggatcaccgcggcggttgcctgatgctccaggatac

SEQ ID NO: 257488 - DNA, 120 bp, Artificial Sequence
  ENSG00000124602_4 (sequence is synthesized)
aggcatctccttgctcatcccaccaggtgctgtggctgtgggccgccaggagcgggtgtctttgatcctggtgtgggacctgtcggacgccccatcgctgtcccaagcccaggggctggt

SEQ ID NO: 257489 - DNA, 120 bp, Artificial Sequence
  ENSG00000124602_5 (sequence is synthesized)
aagccctgtggtggcatgtggcccccatggggcctccttcctgaagccttgcactctcacgttcaaacactgtgccgagcagcccagccatgctcgcacctacagcagcaacactaccct

SEQ ID NO: 257490 - DNA, 120 bp, Artificial Sequence
  ENSG00000124602_6 (sequence is synthesized)
gctggatgccaaggtatggaggcccctggggcggccgggggcccacgcctcccgggatgagtgtcgcatccacctctcccacttcagcctctacacctgtgtgctggaggcacctgtggg

SEQ ID NO: 257491 - DNA, 120 bp, Artificial Sequence
  ENSG00000124602_7 (sequence is synthesized)
gcgcgaagcccgcaaatggctgcagctggccgtattctgctcaccgctggtgccaggacagtcccatctgcaactgcgtatctacttcctcaacaacacgccctgcgccctgcagtgggc

SEQ ID NO: 257492 - DNA, 120 bp, Artificial Sequence
  ENSG00000124602_8 (sequence is synthesized)
actgaccaacgagcagccccatggtgggcgcctgcgtgggccctgccagctcttcgacttcaatggggctaggggcgaccagtgcctgaagctcacgtacatctcagagggttgggagaa

SEQ ID NO: 257493 - DNA, 120 bp, Artificial Sequence
  ENSG00000124602_9 (sequence is synthesized)
tgtggatgacagcagttgccagctggttccccatctccacatctggcatggaaagtgccccttccgctccttctgcttccggagaaaagcagccgatgagaatgaggactgttcagcact

SEQ ID NO: 257494 - DNA, 120 bp, Artificial Sequence
  ENSG00000124602_10 (sequence is synthesized)
aaccaatgagatcattgtcaccatgcacaccttccaggatggcttggagaccaagtatatggaaatcctcagattccaggcatcagaggaggaatcctgggcagcgccaccacctgtttc

SEQ ID NO: 257495 - DNA, 120 bp, Artificial Sequence
  ENSG00000124602_11 (sequence is synthesized)
ccagccgcccccatgcaataggctgcccccagagctctttgagcagctgcggatgttattggagccaaacagcatcaccggcaatgactggcgcagactggcctcccacctggggctttg

SEQ ID NO: 257496 - DNA, 120 bp, Artificial Sequence
  ENSG00000124602_12 (sequence is synthesized)
cggcatgaagatccggttcctgtcctgccagcgcagccccgcagcggccatcctggagttgtttgaggagcagaacggcagcctgcaggagctgcactacctcatgaccgtcatggagcg

SEQ ID NO: 257497 - DNA, 120 bp, Artificial Sequence
  ENSG00000124602_13 (sequence is synthesized)
tgggacacacggcggcagcccaggccccgagcgcgggggcgcccgggataaccagggcctggagctggacgagaagctctgagcgcccagcgggcagggccggaggaggtgtaggggcga

SEQ ID NO: 257498 - DNA, 120 bp, Artificial Sequence
  ENSG00000124602_14 (sequence is synthesized)
gaggggttgttctcctacgcctaagaggaacacagcagctgttcctggctgtgcccaccacccttcccagaaccctcggacggtgccagggccgcccgcgtcctcgccagcctcccagca

SEQ ID NO: 257499 - DNA, 120 bp, Artificial Sequence
  ENSG00000124602_15 (sequence is synthesized)
gcaggcgcgcccttccggccgcgagctgtcccgcgtgcgggtcccctcctggccggcagagggcgcaggagcccaggagatggcctcagcgtggccagcctgccaaactgaccaggggac

SEQ ID NO: 257500 - DNA, 120 bp, Artificial Sequence
  ENSG00000124602_16 (sequence is synthesized)
ggccacggtccccgcgtgcactttagggccggtcaggccctaaagtattcactgagcacttaggaagaccgggcattgggctggtgtcatgaagaatactggaatataggaggtagggtc

SEQ ID NO: 257501 - DNA, 120 bp, Artificial Sequence
  ENSG00000124602_17 (sequence is synthesized)
tggagccctgacaagcacacagttcttttgcaggagtcaagatgtgctcataggagccaagggcaaactcgaaaacagccctgccctgtggttaggggaggtgggtgtggctttaggagt

SEQ ID NO: 257502 - DNA, 120 bp, Artificial Sequence
  ENSG00000124602_18 (sequence is synthesized)
tgagaggggaagagctgagtgcgggctggagcagcgagaatgcttcacggaggatgttggggagagaggatttgatttgccgagtggtttggagatctttaggggcgggtaggggaagag

SEQ ID NO: 257503 - DNA, 120 bp, Artificial Sequence
  ENSG00000124602_19 (sequence is synthesized)
ggtggctggacttaaggtaggagccgaaagtgggcatgggagcccatccccgtgggtgtgaggccggggtaggaccaggcttcccggctaggcacgcctggctggctgcctctgcctcta

SEQ ID NO: 257504 - DNA, 120 bp, Artificial Sequence
  ENSG00000124602_20 (sequence is synthesized)
ctaacttcctttgtctctttatcctcctgcttaggccgtgtcttcctctctctctgccattttctctatcagaaaacattaaagctgagtagaaacttcaagatgatcattctggcccag

SEQ ID NO: 257505 - DNA, 120 bp, Artificial Sequence
  ENSG00000124602_21 (sequence is synthesized)
cccttttatctctttatctccaatggtgtgcgttttaagtttctctgacttggtttttctgtccctgtctcccacagttgttcccgctctgcacctgtgtttcagttactctctctctct

SEQ ID NO: 257506 - DNA, 120 bp, Artificial Sequence
  ENSG00000124602_22 (sequence is synthesized)
gtcttagatctttttgtttctgcctagtctctgtgccctgtctttgtgtgtttctttctctgcctgaaaccctccctcttttcccttcaggcatatgtctctaaaccaatgttatgtatc

SEQ ID NO: 257507 - DNA, 120 bp, Artificial Sequence
  ENSG00000124602_23 (sequence is synthesized)
aaagactgttgaaagagacagggctactctaggaatggatgggtggggatattttccccatggatcaagatccagtttagggttgggaaataaaggatagggataaaagaggcaccccat

SEQ ID NO: 257508 - DNA, 120 bp, Artificial Sequence
  ENSG00000124602_24 (sequence is synthesized)
tcagtcagcagatacttattcagcacctactatgtgtttgatactgtatacaaaagacatgaatgggctgggtcctgaacagagaataaagggtttgactccattctggaaattcttttg

SEQ ID NO: 257509 - DNA, 120 bp, Artificial Sequence
  ENSG00000124602_25 (sequence is synthesized)
tttgcaaacaggtgttgttaatttgttcaaaggcaggcaaacaatctctctggcaacacaattttcttctgtatttaattaaaaaatattaaagctttttttctatgatgaatgataaaa

SEQ ID NO: 257510 - DNA, 120 bp, Artificial Sequence
  ENSG00000124608_0 (sequence is synthesized)
gtaaagtcactgcccggagctacgatggcagcgtcagtggcagctgcagcccggaggctgcggcgggccattcgaaggtcgcccgcatggcggggcctcagccatcggccgctctcatcg

SEQ ID NO: 257511 - DNA, 120 bp, Artificial Sequence
  ENSG00000124608_1 (sequence is synthesized)
gagccccctgcagccaaggcctcggccgtgagggccgcctttctgaacttctttcgggaccgccatggccaccggctggtgccctccgcttccgtgcggccccgcggcgaccccagtttg

SEQ ID NO: 257512 - DNA, 120 bp, Artificial Sequence
  ENSG00000124608_2 (sequence is synthesized)
ctttttgtcaatgcgggcatgaaccagttcaagccaatctttctgggcaccgtggatccacgaagcgagatggcaggcttccgacgtgtggccaacagccagaaatgtgtgagagctgga

SEQ ID NO: 257513 - DNA, 120 bp, Artificial Sequence
  ENSG00000124608_3 (sequence is synthesized)
ggacaccataacgacctggaagatgtgggtcgagacctttcccatcataccttctttgaaatgcttggcaattgggcctttgggggtgaatattttaaggaggaggcttgtaacatggcc

SEQ ID NO: 257514 - DNA, 120 bp, Artificial Sequence
  ENSG00000124608_4 (sequence is synthesized)
tgggaactgctgactcaggtctatgggatccctgaggaaaggctctggatctcctactttgatggtgaccccaaggcagggctggacccagacctggagaccagggacatctggctgagc

SEQ ID NO: 257515 - DNA, 120 bp, Artificial Sequence
  ENSG00000124608_5 (sequence is synthesized)
ttaggggtgcctgctagccgtgtgctttcctttggaccacaagagaacttctgggagatgggggatactggcccttgtgggccctgtactgagatccactacgaccttgctggtggggtg

SEQ ID NO: 257516 - DNA, 120 bp, Artificial Sequence
  ENSG00000124608_6 (sequence is synthesized)
ggagccccccagctggtagagctttggaacctggtcttcatgcaacacaacagagaggcagatggaagcctgcagcccctgccccagcggcatgtggacacaggaatgggcctggaaagg

SEQ ID NO: 257517 - DNA, 120 bp, Artificial Sequence
  ENSG00000124608_7 (sequence is synthesized)
ctggtggctgtgctgcaaggcaaacactccacctatgacactgacctcttttccccgctgctcaacgccatacagcagggctgcagggcacccccttacttgggccgagtaggggtggca

SEQ ID NO: 257518 - DNA, 120 bp, Artificial Sequence
  ENSG00000124608_8 (sequence is synthesized)
gacgaggggcgcacagacacagcgtaccgcgtggtggctgaccacatccgcacactcagtgtctgcatctctgatggcatcttccctgggatgtcaggtcccccgctggttcttcgtcgg

SEQ ID NO: 257519 - DNA, 120 bp, Artificial Sequence
  ENSG00000124608_9 (sequence is synthesized)
atcctgcgtcgagctgtgcgtttctccatggagatcttaaaggcaccacctggcttcctaggcagcctggtacctgtagtggtggagacactgggagatgcttatccagaactgcaaagg

SEQ ID NO: 257520 - DNA, 120 bp, Artificial Sequence
  ENSG00000124608_10 (sequence is synthesized)
aactcagcccagatcgccaacctggtgtcagaggacgaggcagccttcctggcctccctggagcggggtaggcggatcattgatcggactctgaggaccctggggccttcagatatgttc

SEQ ID NO: 257521 - DNA, 120 bp, Artificial Sequence
  ENSG00000124608_11 (sequence is synthesized)
cctgctgaagtggcctggtccttgtcactgtgtggagacctgggactccccttggacatggtagagctgatgctggaggagaaaggggtccagctagactccgctggactggagcggttg

SEQ ID NO: 257522 - DNA, 120 bp, Artificial Sequence
  ENSG00000124608_12 (sequence is synthesized)
gcccaagaggaggcccagcaccgggcacggcaggctgagccagttcagaagcagggattgtggcttgatgtccatgcgcttggggagctgcagcgccaaggagtgcccccaactgacgac

SEQ ID NO: 257523 - DNA, 120 bp, Artificial Sequence
  ENSG00000124608_13 (sequence is synthesized)
agccccaagtacaactactccctgcgacccagcggaagttatgagttcggcacctgtgaggcccaggtgttgcaactgtatacagaggacgggacagcagtggcctccgtggggaaaggc

SEQ ID NO: 257524 - DNA, 120 bp, Artificial Sequence
  ENSG00000124608_14 (sequence is synthesized)
cagcgctgtggcctcctcttggacaggaccaacttctacgcagaacaggggggccaggcttcagaccgtggctacctggtgcgggcagggcaagaggacgtgctgttcccagtagcccgg

SEQ ID NO: 257525 - DNA, 120 bp, Artificial Sequence
  ENSG00000124608_15 (sequence is synthesized)
gcccaggtctgtggaggtttcatcctgcatgaggcagtagcccctgagtgcctgcggttaggggaccaggtgcagctgcatgtggatgaggcctggcgtctaggctgcatggcgaagcat

SEQ ID NO: 257526 - DNA, 120 bp, Artificial Sequence
  ENSG00000124608_16 (sequence is synthesized)
acggccacccacctgctgaactgggcactgaggcagaccctgggccctggcacagagcagcagggctcccatctcaatcctgagcagctgcgcttggatgtgaccacccagaccccattg

SEQ ID NO: 257527 - DNA, 120 bp, Artificial Sequence
  ENSG00000124608_17 (sequence is synthesized)
accccagagcagctccgggcagtggagaacactgtgcaggaggccgtggggcaggatgaggctgtgtacatggaggaggtgcccctggcgctcactgcccaggtccctggcctgcgctct

SEQ ID NO: 257528 - DNA, 120 bp, Artificial Sequence
  ENSG00000124608_18 (sequence is synthesized)
ctggatgaggtttacccagaccctgtgcgggtggtatcagtgggggtgcccgtggcccatgcattggacccagcctcccaagccgcactgcagacctctgtggagctatgctgtgggacg

SEQ ID NO: 257529 - DNA, 120 bp, Artificial Sequence
  ENSG00000124608_19 (sequence is synthesized)
taggccagagcctggcccaggaagtgaaagcggccactgagcggctgagtctggggagccgggatgtggcggaggcactgaggctgtccaaggacataggacgactcattgaagctgtgg

SEQ ID NO: 257530 - DNA, 120 bp, Artificial Sequence
  ENSG00000124608_20 (sequence is synthesized)
aaactgctgtgatgccccagtggcagcggcgggagctgctggccacagtgaagatgctgcagcggcgtgccaacactgccatccgtaagctgcaaatgggacaggctgcaaagaaaactc

SEQ ID NO: 257531 - DNA, 120 bp, Artificial Sequence
  ENSG00000124608_21 (sequence is synthesized)
aggagctgctggagcggcactcgaaggggcctctgattgtggacacagtctctgctgagtctctctcagtgctggtgaaggtggtacggcagctgtgtgagcaggcccccagcacgtctg

SEQ ID NO: 257532 - DNA, 120 bp, Artificial Sequence
  ENSG00000124608_22 (sequence is synthesized)
tgctcctactcagcccccagcccatggggaaggtgctgtgtgcctgtcaggtggcccagggtgccatgcccaccttcacagcagaggcctgggcactggcagtgtgcagccacatggggg

SEQ ID NO: 257533 - DNA, 120 bp, Artificial Sequence
  ENSG00000124608_23 (sequence is synthesized)
gcaaggcgtggggctcacgagtggtggcccaaggcaccggaagcactactgacctggaagctgccctcagtatagcccaaacctatgccctcagccagctctgacccaggtccgcccagg

SEQ ID NO: 257534 - DNA, 120 bp, Artificial Sequence
  ENSG00000124608_24 (sequence is synthesized)
gacccacatggactaaaggcaatgccaggagccctgaaggagccagcagaaccttcccacatgctgaagcgaggactagaggctggaggccaagcagctgagccaaagaagatcacctgg

SEQ ID NO: 257535 - DNA, 120 bp, Artificial Sequence
  ENSG00000124608_25 (sequence is synthesized)
gccagggcctacgtgacacaaggagacatgggctagggaaggcagaactgggcccaaagacacacacccccttggtgaaagagaagacatggacaattatggctgtgactgcacattaga

SEQ ID NO: 257536 - DNA, 67 bp, Artificial Sequence
  ENSG00000124608_26 (sequence is synthesized)
gagaagacatggacaattatggctgtgactgcacattagaaattatttcactggccgggtgtggtgg

SEQ ID NO: 257537 - DNA, 120 bp, Artificial Sequence
  ENSG00000124608_27 (sequence is synthesized)
gacagagcgagactctgtctcaaataattatttcacagaggatagcaagctccagaaggttctattacctttaaaaaagagtagttttgcccctcccagcaacctaagaccagtctgaac

SEQ ID NO: 257538 - DNA, 120 bp, Artificial Sequence
  ENSG00000124608_28 (sequence is synthesized)
gcccctcccagcaacctaagaccagtctgaactcacactgtctgaaaggccacccaggatccaaatcgggccatcttcattgccatgagtgttcggacaggctctgcgtgccaggcaaca

SEQ ID NO: 257539 - DNA, 120 bp, Artificial Sequence
  ENSG00000124608_29 (sequence is synthesized)
gtgggcagacaaagggctccctggctactgggaagatacagaaccatcctgtgaaaatcatttcagcactggagaccttctttgctattacttctttcattaacaatgacctctaattta

SEQ ID NO: 257540 - DNA, 120 bp, Artificial Sequence
  ENSG00000124608_30 (sequence is synthesized)
aattgggccctgctggtttgttgatgaattgagcaactgagaacgtggcgggcactaaactgacagttccttccttcatggagcctgcttcatgtggaggaaacaggaaataaagcaaaa

SEQ ID NO: 257541 - DNA, 120 bp, Artificial Sequence
  ENSG00000124608_31 (sequence is synthesized)
gaagagggtcaggcttggtggctcatgcctataatcctggcattttaggaggctgaggttggagaatcgcttgaggccagaagtgcaagaccagcctgcgcaaacagcaagaccctgtct

SEQ ID NO: 257542 - DNA, 120 bp, Artificial Sequence
  ENSG00000124608_32 (sequence is synthesized)
agcctgcgcaaacagcaagaccctgtctacaaaaaaaaaaaaaagtaatctttatgcctcagcctcccaggtagctgagactacccacaccttggtcccagctacttgggaggctgaggt

SEQ ID NO: 257543 - DNA, 120 bp, Artificial Sequence
  ENSG00000124608_33 (sequence is synthesized)
acagagtgagaccctgtcttaaaaaaaagaagggagaaagtgtcagatggtgatgaggtctgggggggaaatagagaatggggatcaggagtgtggatggtgatattccctcaccaagag

SEQ ID NO: 257544 - DNA, 120 bp, Artificial Sequence
  ENSG00000124608_34 (sequence is synthesized)
gggatcaggagtgtggatggtgatattccctcaccaagaggtgacatgtgagcagggagctgggaggtgagggtgtgacccgtgtggaaatcagggaaaagcattccagcctgagggaac

SEQ ID NO: 257545 - DNA, 120 bp, Artificial Sequence
  ENSG00000124608_35 (sequence is synthesized)
agccaatgcagaggccgtgaggtggccagtgccactgagcagtgagctgggataggggcaggtgaggaggctggagagcggggtcagacaaacaatatgcttattaaaacaagttgtaca

SEQ ID NO: 257546 - DNA, 120 bp, Artificial Sequence
  ENSG00000124608_36 (sequence is synthesized)
gcacctgcctcaagcctgagctgaagctgaaaattggcacttcaaagcaggaggaagcagagatggaggaaagccctccttccctaccagaatgagtccacctcagacagccagactttg

SEQ ID NO: 257547 - DNA, 120 bp, Artificial Sequence
  ENSG00000124608_37 (sequence is synthesized)
gacctctgcctttgttcctagatctctgttgctagatgaaggaaagggcctcaggggatccatcttcaaatcaagggctccctggctaccaaattctgtctagtaaaaattattcgagca

SEQ ID NO: 257548 - DNA, 120 bp, Artificial Sequence
  ENSG00000124608_38 (sequence is synthesized)
gaaggtgctgtgtgcctgtcaggtggcccaggtgagggaagtgggagagcagcccaccgcccccattaatacccatcctggtccagctctctgattttacacctttaattcctcccaaag

SEQ ID NO: 257549 - DNA, 120 bp, Artificial Sequence
  ENSG00000124608_39 (sequence is synthesized)
gggccaaggctgggtggaagtatctatgaggatactccaggacagggatggggaatctccttgttcctgaaaacagcccctccccaccccagaaggcaccaagagattccttaattccta

SEQ ID NO: 257550 - DNA, 120 bp, Artificial Sequence
  ENSG00000124608_40 (sequence is synthesized)
cacatcccttgtaaacaagtagcagatgttcacgttcatacacctccccacacacatttccagcccaaaccttctccggctcatcacctgactgccccaccatgtgcccagctgggaagg

SEQ ID NO: 257551 - DNA, 120 bp, Artificial Sequence
  ENSG00000124608_41 (sequence is synthesized)
gggcactgatgaccttcagctccactcttgagggtaccttgagtggatgctggcagggagggccactctgcatcgcttcctcttctgattctgttcctagggtgccatgcccaccttcac

SEQ ID NO: 257552 - DNA, 120 bp, Artificial Sequence
  ENSG00000124610_0 (sequence is synthesized)
atgtctgaaacagtgcctcccgcccccgccgcttctgctgctcctgagaaacctttagctggcaagaaggcaaagaaacctgctaaggctgcagcagcctccaagaaaaaacccgctggc

SEQ ID NO: 257553 - DNA, 120 bp, Artificial Sequence
  ENSG00000124610_1 (sequence is synthesized)
ccttccgtgtcagagctgatcgtgcaggctgcttcctcctctaaggagcgtggtggtgtgtcgttggcagctcttaaaaaggcgctggcggccgcaggctacgacgtggagaagaacaac

SEQ ID NO: 257554 - DNA, 120 bp, Artificial Sequence
  ENSG00000124610_2 (sequence is synthesized)
gtgcagacaaagggtaccggagcctcgggttccttcaagctcaacaagaaggcgtcctccgtggaaaccaagcccggcgcctcaaaggtggctacaaaaactaaggcaacgggtgcatct

SEQ ID NO: 257555 - DNA, 120 bp, Artificial Sequence
  ENSG00000124610_3 (sequence is synthesized)
aaaaagctcaaaaaggccacgggggctagcaaaaagagcgtcaagactccgaaaaaggctaaaaagcctgcggcaacaaggaaatcctccaagaatccaaaaaaacccaaaactgtaaag

SEQ ID NO: 257556 - DNA, 120 bp, Artificial Sequence
  ENSG00000124610_4 (sequence is synthesized)
cccaagaaagtagctaaaagccctgctaaagctaaggctgtaaaacccaaggcggccaaggctagggtgacgaagccaaagactgccaaacccaagaaagcggcacccaagaaaaagtaa

SEQ ID NO: 257557 - DNA, 120 bp, Artificial Sequence
  ENSG00000124613_0 (sequence is synthesized)
agcgcagagctgcgaccgctgctgatacgttgctcagtctcagtgtggtctctgttttgcaactggtcgtccgcgtcaggagacttaggtccaggcgactgcccagacaatgactggtcc

SEQ ID NO: 257558 - DNA, 120 bp, Artificial Sequence
  ENSG00000124613_1 (sequence is synthesized)
cgcataccgagcagagcatgatcagcagcagtctgagtggaagagtgcctgtgatcttagggaacctgatgggcgttggagcagcggttcgacgcatgggtttctctttaatccttccga

SEQ ID NO: 257559 - DNA, 120 bp, Artificial Sequence
  ENSG00000124613_2 (sequence is synthesized)
cttccccaagcccagcgcactcaggttccgctccaagtgcgggacccgcccggggtgtgtcgggggtactcggccggaggcggccggtgagtgaggcttacagggccccgggaccaagga

SEQ ID NO: 257560 - DNA, 120 bp, Artificial Sequence
  ENSG00000124613_3 (sequence is synthesized)
accccagcatgttaattgaacttgatcacccagttgaaggaagaataatagtagatgttggatcttcaggaagctgaagagggcagtgcccagaaatacctgtcttgatagggggatttg

SEQ ID NO: 257561 - DNA, 120 bp, Artificial Sequence
  ENSG00000124613_4 (sequence is synthesized)
agctgaaccaaagcatcaacaccaatcagactgtttccgaagaactagagttttctgggtcagcaatggaaagcctcagagggaatactgctcagggtcctacaaatgaagaagactata

SEQ ID NO: 257562 - DNA, 120 bp, Artificial Sequence
  ENSG00000124613_5 (sequence is synthesized)
aaaacgaaggccaattatcaaggcaaacaaaatgtcctgcacagaagaaatcctcttttgagaacacagtggtcagaaaagtgtcagtgacactcaaagaaattttcacaggggaggaag

SEQ ID NO: 257563 - DNA, 120 bp, Artificial Sequence
  ENSG00000124613_6 (sequence is synthesized)
gccctgaatccagtgaatttagtctaagcccaaaccttgacgcacaacagaaaattccaaagggacatggatccccaatatctaggaaaaactccaaagataattcagacttaattaaac

SEQ ID NO: 257564 - DNA, 120 bp, Artificial Sequence
  ENSG00000124613_7 (sequence is synthesized)
accaaagacttttctcacaaagaaaaccttgtaaatgcaatgaatgtgaaaaagcctttagttaccaatcagaccttcttgtacacagtagaattcatggtggagaaaagccttttgaat

SEQ ID NO: 257565 - DNA, 120 bp, Artificial Sequence
  ENSG00000124613_8 (sequence is synthesized)
gcaacaaatgtgggaaatctttcagccgaagtacacaccttattgaacatcaaagaactcacactggagagaaaccttatgaatgcaatgaatgtggaaaagcttttagccggagcacac

SEQ ID NO: 257566 - DNA, 120 bp, Artificial Sequence
  ENSG00000124613_9 (sequence is synthesized)
atcttagtctacatcagagaatccatactggagaaaaaccatatgaatgtagtgaatgtggaaaagcctttagccgaagcactaaccttagtcagcatcagcgaactcatactcaagaaa

SEQ ID NO: 257567 - DNA, 120 bp, Artificial Sequence
  ENSG00000124613_10 (sequence is synthesized)
ggccttacaaatgtaatgaatgtgggaaagccttcggtgaccgttcaaccataattcagcatcaacgaatacacactggagagaatccctatgaatgcagtaaatgtggaaaagctttca

SEQ ID NO: 257568 - DNA, 120 bp, Artificial Sequence
  ENSG00000124613_11 (sequence is synthesized)
gttggatctcatcgcttactgaacatcagagaacacacactggggagaacccctatgagtgcagtgaatgtgggaaagtgttcagtcgaagctcgtctcttacagaacatcagagaatcc

SEQ ID NO: 257569 - DNA, 120 bp, Artificial Sequence
  ENSG00000124613_12 (sequence is synthesized)
acagtggagaaaagcctcacgagtgtagagtgtgtggaaagggcttcagtcgaagctcatcccttattattcatcagagaactcataccggggagaagccgtacaaatgtaatgactgtg

SEQ ID NO: 257570 - DNA, 120 bp, Artificial Sequence
  ENSG00000124613_13 (sequence is synthesized)
gaaaagccttctgtcagagttcaactctgatcagacatcagcaccttcatactaaagagtaatatctgagcttttattaatgttagcataagaacacatatacctaacctcccaccactg

SEQ ID NO: 257571 - DNA, 120 bp, Artificial Sequence
  ENSG00000124613_14 (sequence is synthesized)
aaatatatatatttcaagtatatatatacttgttctaattttcttttattagatacctatacccgttttaagctttcattcgttctttccatccatctatccttctttcgtctcccctcc

SEQ ID NO: 257572 - DNA, 120 bp, Artificial Sequence
  ENSG00000124613_15 (sequence is synthesized)
cttcttccctccttccctccttcctactttttctccctctccctgttctttctttctcttttctcaaataagttcacaataaaacaaagggatgactcaaaaaacataacatatgaaatc

SEQ ID NO: 257573 - DNA, 120 bp, Artificial Sequence
  ENSG00000124613_16 (sequence is synthesized)
accacatcagcccctgcacatgaagagaaaatcctgtgtgtgtgtcttcatacttgctggctctagtaccagaagagagggatctggcttcagagcaggactgaaaacttctcaccagtc

SEQ ID NO: 257574 - DNA, 120 bp, Artificial Sequence
  ENSG00000124613_17 (sequence is synthesized)
tggggataatagtgttgaggcaaattcattctcttgacttgcaaaaacagatttttctcatcttcctccttctctcaccttttttgcagtagcatttttcctcaaagtacaactcatttt

SEQ ID NO: 257575 - DNA, 120 bp, Artificial Sequence
  ENSG00000124613_18 (sequence is synthesized)
tttactaacgcctaactaatcctagtgttattttatcatatttttaccaagaatgttctaaaaatcttggagacgttcctccatgatcttgggaaaaaaagttgccaaatgctgtgctgt

SEQ ID NO: 257576 - DNA, 120 bp, Artificial Sequence
  ENSG00000124613_19 (sequence is synthesized)
tttttttgtttgtttttaattttctttcatttacagatttcatgaaacttatattctgtggctttgaccctcaccaatcttggaagattgatctctcaaggacaaacccagtgcctattt

SEQ ID NO: 257577 - DNA, 120 bp, Artificial Sequence
  ENSG00000124613_20 (sequence is synthesized)
ctcagtcctttttctacttgacatttgcagaattggcactttttgccactgttatgccttaaatcttgagcttctttcaggatccatgattctgtgctgatctacacttttcctacctct

SEQ ID NO: 257578 - DNA, 120 bp, Artificial Sequence
  ENSG00000124613_21 (sequence is synthesized)
cagcatttctttgattgtcaatgatcagctctgtgatttggggcaagggttaggccagaattatctcattttatcaagttataaaacttgaggtagtgcaactagattatacacttcttg

SEQ ID NO: 257579 - DNA, 85 bp, Artificial Sequence
  ENSG00000124613_22 (sequence is synthesized)
ataaaacttgaggtagtgcaactagattatacacttcttgaagacagaaatcttggtttgtttgttgttttatttttgagagaac

SEQ ID NO: 257580 - DNA, 120 bp, Artificial Sequence
  ENSG00000124613_23 (sequence is synthesized)
gccacagcctcctgagtagctagggctgcaagtgtgtaccaccacacccacaattttaaagtttttttgtggagacaggatctcactatattggcaaggctggcctccatctcctgaact

SEQ ID NO: 257581 - DNA, 120 bp, Artificial Sequence
  ENSG00000124613_24 (sequence is synthesized)
caaacaattctcccacctcggcttccgaaaacactgacattacaggtgtgagccaccacacctgccagaaatcttgtttttgattgatataaaacatcacaaagtactgagtagacacta

SEQ ID NO: 257582 - DNA, 120 bp, Artificial Sequence
  ENSG00000124613_25 (sequence is synthesized)
aatgctctgtaattattgctcactgattcctctttatctgtaatcaatcaacttgactttatttgatatggattaataattgatttctttctctctttctactgctgcttccaagttctt

SEQ ID NO: 257583 - DNA, 120 bp, Artificial Sequence
  ENSG00000124613_26 (sequence is synthesized)
ggtaccttgtgcctagattactaaattgatcactgttgactcactaccattatctagctccttactaaactactactttgttaaaaaaaaatagtcgtttcccagtgacctctgccccaa

SEQ ID NO: 257584 - DNA, 120 bp, Artificial Sequence
  ENSG00000124613_27 (sequence is synthesized)
atgtaaacttctttaacctaaaggtctttcatagtttgatctacttacttacttcctttctcttctcaaagataatacatgcgggcaggcctgttttgtccctactataccctcttctca

SEQ ID NO: 257585 - DNA, 120 bp, Artificial Sequence
  ENSG00000124613_28 (sequence is synthesized)
cacttttcttcttttcaaactgttccttggcacttctacatgtcctactttcttcgttgtattccagaaaccctatccacccttttttaaaggccatgctcatatcctggctctgtgaca

SEQ ID NO: 257586 - DNA, 120 bp, Artificial Sequence
  ENSG00000124613_29 (sequence is synthesized)
ctttcagtcccctgccttcttagaaatcctttgtagtgatggtttgcattattctcctgtattagacaccttctttactgttttctggttctttcacaagtacttttttacataagctgt

SEQ ID NO: 257587 - DNA, 120 bp, Artificial Sequence
  ENSG00000124613_30 (sequence is synthesized)
tttgaagttgtaaatcatcctaaatcttttataagcctcatataatacatagtacaatgccagcctggactctagttttaatctaaatacatagggtttaatttagcagcataatctttt

SEQ ID NO: 257588 - DNA, 120 bp, Artificial Sequence
  ENSG00000124613_31 (sequence is synthesized)
tagtcttttgaatgatgaggtaacctcataggtattttggcccattttgtttttccttgaattacatatataactgactatttagactgactcctttagatctcctgggatgctgacctc

SEQ ID NO: 257589 - DNA, 120 bp, Artificial Sequence
  ENSG00000124613_32 (sequence is synthesized)
ttggctttccaattcatgagactattgtaaagaataagtgagttcattcatgtaaagtagtaaaacagtgcctgacaaaagtaaatgctcaataaattctaattgttatgattctagtga

SEQ ID NO: 257590 - DNA, 120 bp, Artificial Sequence
  ENSG00000124613_33 (sequence is synthesized)
agtgaccctaggcctcttgcaggagagtccctggtcccagccagcgggagcggcttctccagtttgtggctctcggagagttcgcctcgtccctccctctcagataaccacctatttctg

SEQ ID NO: 257591 - DNA, 120 bp, Artificial Sequence
  ENSG00000124613_34 (sequence is synthesized)
acctctggaggccgggctgagcccggaattttatgaccagcgcccgctggccgtcgtcaccctctaatttctcgcaaaactcccggggacccttcttaatgtcagtagccacagtcgccg

SEQ ID NO: 257592 - DNA, 120 bp, Artificial Sequence
  ENSG00000124613_35 (sequence is synthesized)
cgggctcccctacgccttttggaatcagcgacagacgcaggtataaaagagagcctccactcccacctctccagggctccccacccgctccttctggccgctttctcctgaaagagcaag

SEQ ID NO: 257593 - DNA, 120 bp, Artificial Sequence
  ENSG00000124613_36 (sequence is synthesized)
gcacccctagaagcttcaggctcctccacaggcgagtgcctacccacctatcaggttcataggtggaagaaattcatctccagatgagactttggacttggacttgggacttttgagtta

SEQ ID NO: 257594 - DNA, 120 bp, Artificial Sequence
  ENSG00000124613_37 (sequence is synthesized)
tgaactcataccccatatgaagagaacgtcaaagaggctggatcacctaaagggtttagagaaagtttggaattggctcagatctgtcttttatcataaaagatgaacttgaaacccaga

SEQ ID NO: 257595 - DNA, 120 bp, Artificial Sequence
  ENSG00000124613_38 (sequence is synthesized)
aagtgcgggacccgcccggggtgtgtcgggggtactcggccggaggcggccggtgagtgaggcttacagggccccgggaccaaggttcataggtggaagaaattcatctccagatgagac

SEQ ID NO: 257596 - DNA, 87 bp, Artificial Sequence
  ENSG00000124614_0 (sequence is synthesized)
acagccgcgagattccgcgctgggtacggtcgctgatggcctccaactgctcccgataatacaggatgttgatgcctaagaagaacc

SEQ ID NO: 257597 - DNA, 79 bp, Artificial Sequence
  ENSG00000124614_1 (sequence is synthesized)
agcacccggagctggcagactctcaagtcccgaggctacgtgaaggaacagtttgcctggagacatttctactggtacc

SEQ ID NO: 257598 - DNA, 120 bp, Artificial Sequence
  ENSG00000124614_2 (sequence is synthesized)
acatttctactggtaccttaccaatgagggtatccagtatctccgtgattaccttcatctgcccccggagattgtgcctgccaccctacgccgtagccgtccagagactggcaggcctcg

SEQ ID NO: 257599 - DNA, 120 bp, Artificial Sequence
  ENSG00000124614_3 (sequence is synthesized)
ctcggcctaaaggtctggagggtgagcgacctgcgagactcacaagaggggaagctgacagagatacctacagacggagtgctgtgccacctggtgccgacaagaaagccgaggctgggg

SEQ ID NO: 257600 - DNA, 120 bp, Artificial Sequence
  ENSG00000124614_4 (sequence is synthesized)
ctgggtcagcaaccgaattccagtttagaggcggatttggtcgtggacgtggtcagccacctcagtaaaattggagaggattcttttgcattgaataaacttacagccaaaaaaccttaa

SEQ ID NO: 257601 - DNA, 120 bp, Artificial Sequence
  ENSG00000124614_5 (sequence is synthesized)
gagacggtgtcccaccgacacgcttttttcttgggaacaggactcccccgactgcctccttgcctggcactggagctctagtttgggggagaagtggtaggtaggagacgagggtgcgaa

SEQ ID NO: 257602 - DNA, 120 bp, Artificial Sequence
  ENSG00000124614_6 (sequence is synthesized)
ggccttagccctttggtttggggtctgccgccttcaagaagccggggctttacccctccgggccttccctgcgtaccttatggtacagccgcgagattccgcgctggatgttgatgccta

SEQ ID NO: 257603 - DNA, 120 bp, Artificial Sequence
  ENSG00000124614_7 (sequence is synthesized)
tttctgtggcgttcgagttccatcggctcccatccgggctatcctgccgccttagcggctgcttctccccaggatgcgggcagggggcctctctcccactccccacacaccgatttctga

SEQ ID NO: 257604 - DNA, 120 bp, Artificial Sequence
  ENSG00000124614_8 (sequence is synthesized)
gtagcgataggggctggaggcttattttatggggtagggggccgctggtaggcgaagattgtccgagggagagggggaggatgaagccagtgagtggcggagacttgccagatgttgatg

SEQ ID NO: 257605 - DNA, 120 bp, Artificial Sequence
  ENSG00000124614_9 (sequence is synthesized)
gaagatagtttcttttgtgtaagggacaaaagcattcttagctgatgtcagctttagagggctctggcctgcaggcatttggtcaagtgctagaacctttgtcccatggcttgggacttg

SEQ ID NO: 257606 - DNA, 120 bp, Artificial Sequence
  ENSG00000124614_10 (sequence is synthesized)
gaatagaactagactcagttcttcaggccatccatgagatggccttaagcacagatagtctgtcactttcttcacccacacctgtacaaacatccagatacatgtggtatagaatattga

SEQ ID NO: 257607 - DNA, 120 bp, Artificial Sequence
  ENSG00000124614_11 (sequence is synthesized)
gtaacttttcccgcagagtgcgttgtactattcccgagaagtccaaagcaaagccatttaccacctcgaaagaaacaagagtgttgtagttttcttgccaacaggagaagaaattagaaa

SEQ ID NO: 257608 - DNA, 120 bp, Artificial Sequence
  ENSG00000124614_12 (sequence is synthesized)
tcctggtgctggatgctttcataggaagaggcggatttggtcgtggacgtggtcagccacctcagtaaaattggagaggattcttttgcattgaataaacttacagccaaaaaaccttaa

SEQ ID NO: 257609 - DNA, 120 bp, Artificial Sequence
  ENSG00000124614_13 (sequence is synthesized)
agtgccgctcatgctgatgtgatgtgctttctcttacagagaggcggatttggtcgtggacgtggtcagccacctcagtaaaattggagaggattcttttgcattgaataaacttacagc

SEQ ID NO: 257610 - DNA, 120 bp, Artificial Sequence
  ENSG00000124614_14 (sequence is synthesized)
gaattccagtttgtgagtatcttcctatttgttttccatgagccatcacttgttctggcctcagtctggttgctctgcaagttgtggggatgtcatatagtatgggtgggtcctgtcaac

SEQ ID NO: 257611 - DNA, 120 bp, Artificial Sequence
  ENSG00000124614_15 (sequence is synthesized)
atgagtctcagaaatcagtacatgtggcctactagtattttctgtttcattaatgcttgacattgaactaaacactggaaggtgggtgggcttaagaaccaagatggtatgaaatcaaat

SEQ ID NO: 257612 - DNA, 120 bp, Artificial Sequence
  ENSG00000124614_16 (sequence is synthesized)
cctccatcttttttcagttgatgtaatgttaggtaggttcccctctgcctcagtttctccatctataaaataaggtgataattacagctactaaggtagttgtgagattagttaatccag

SEQ ID NO: 257613 - DNA, 120 bp, Artificial Sequence
  ENSG00000124614_17 (sequence is synthesized)
gcatagtactggcatatcatttttgtcctatggcaggtcctcatagcacacgattgctctcagataatgtcatttgtaaaaaggaagcatgtacagtagaaacggtccaatcctggtgct

SEQ ID NO: 257614 - DNA, 120 bp, Artificial Sequence
  ENSG00000124614_18 (sequence is synthesized)
ggatgctttcataggagtatgtatgaacacactctgggtgggtggccatactcccactttaccaatgaagaaatgggcctagatgttagatatggccccacatccagtaaggggcagtgc

SEQ ID NO: 257615 - DNA, 120 bp, Artificial Sequence
  ENSG00000124615_0 (sequence is synthesized)
agtgtgctcccgaagcgggctgcggttccgctcgtatcaggcttcatggcggcgcggccactgtcccggatgctgcggcggcttctgaggtccagcgcccggagctgcagctcaggggct

SEQ ID NO: 257616 - DNA, 120 bp, Artificial Sequence
  ENSG00000124615_1 (sequence is synthesized)
ccggtgacccagccctgccccggggagtccgcgcgagctgcctcggaggaggtgtccaggcggaggcagttcctgcgggagcatgcggcccccttctccgccttcctcacagacagcttc

SEQ ID NO: 257617 - DNA, 120 bp, Artificial Sequence
  ENSG00000124615_2 (sequence is synthesized)
ggccggcagcacagctacctgcggatctccctcacagagaagtgcaacctcagatgtcagtactgcatgcccgaggagggggtcccgctgacccccaaagccaacctgctgaccacagag

SEQ ID NO: 257618 - DNA, 120 bp, Artificial Sequence
  ENSG00000124615_3 (sequence is synthesized)
gagatcctgaccctcgcccggctctttgtgaaggaaggcatcgacaagatccggctcacaggtggagagccgcttatccggccggacgtggtggacattgtggcccagctccagcggctg

SEQ ID NO: 257619 - DNA, 120 bp, Artificial Sequence
  ENSG00000124615_4 (sequence is synthesized)
gaagggctgagaaccataggtgttaccaccaatggcatcaacctggcccggctactgccccagcttcagaaggctggtctcagtgccatcaacatcagcctggacaccctggtgcctgcc

SEQ ID NO: 257620 - DNA, 120 bp, Artificial Sequence
  ENSG00000124615_5 (sequence is synthesized)
aagtttgagttcattgtccgcaggaaaggcttccacaaggtcatggagggcatccacaaggccatcgagctgggctacaaccctgtgaaggtgaactgtgtggtgatgcgaggccttaac

SEQ ID NO: 257621 - DNA, 120 bp, Artificial Sequence
  ENSG00000124615_6 (sequence is synthesized)
gaggatgaactcctggactttgcggccttgactgagggcctccccctggatgtgcgcttcatagagtatatgccctttgatggcaacaagtggaacttcaagaagatggtcagctataag

SEQ ID NO: 257622 - DNA, 120 bp, Artificial Sequence
  ENSG00000124615_7 (sequence is synthesized)
gagatgctagacactgtccggcagcagtggccagagctggagaaggtgccagaggaggaatccagcacagccaaggcctttaaaatccctggcttccaaggccagatcagcttcatcaca

SEQ ID NO: 257623 - DNA, 120 bp, Artificial Sequence
  ENSG00000124615_8 (sequence is synthesized)
tccatgtctgagcatttctgtgggacctgcaaccgcctgcgaatcacagctgatgggaacctcaaggtctgcctctttggaaactctgaggtatccctgcgggatcacctgcgagctggg

SEQ ID NO: 257624 - DNA, 120 bp, Artificial Sequence
  ENSG00000124615_9 (sequence is synthesized)
gcctctgagcaggagctgctgagaatcattggggctgctgtgggcaggaagaagcggcagcatgcaggcatgttcagtatttcccagatgaagaaccggcccatgatcctcatcgagtta

SEQ ID NO: 257625 - DNA, 120 bp, Artificial Sequence
  ENSG00000124615_10 (sequence is synthesized)
tttttgatgttccccaattccccaccagccaatccaagcattttctcctgggacccgctccatgttcagggtctaagacccagaatgagtttctccagccaggtggccactttatggaaa

SEQ ID NO: 257626 - DNA, 120 bp, Artificial Sequence
  ENSG00000124615_11 (sequence is synthesized)
ggatgcagggtcccccagacccctcctctagcccagcagcggctggggtctggctcctttcagagacactacacttcccgtgcagactcagatgccaactcaaagtgccttagcccaggt

SEQ ID NO: 257627 - DNA, 120 bp, Artificial Sequence
  ENSG00000124615_12 (sequence is synthesized)
tcctgggcttctgctgccccctcaggaccccagctaacctcagaacaactaactcatgtggactcggaaggacgggcagctatggtagatgtgggcaggaagccagacacagagcgggtg

SEQ ID NO: 257628 - DNA, 120 bp, Artificial Sequence
  ENSG00000124615_13 (sequence is synthesized)
gctgtggcttcagccgtggtcctcctgggaccggtagccttcaagcttgtccagcagaaccagctcaagaaaggagatgccctagtggtggcccagctggctggagtccaggcagccaag

SEQ ID NO: 257629 - DNA, 120 bp, Artificial Sequence
  ENSG00000124615_14 (sequence is synthesized)
gtgaccagccagctgatccctctgtgccaccacgtggccctgagccacatccaggtgcagctggagctggacagcacacgccatgccgtgaagatccaggcatcttgccgggctcggggc

SEQ ID NO: 257630 - DNA, 120 bp, Artificial Sequence
  ENSG00000124615_15 (sequence is synthesized)
cccaccggggtggagatggaggccctgacctctgctgcagtggccgccctcaccctgtatgacatgtgcaaggctgtcagcagggacatcgtgttggaggagatcaagctcattagcaag

SEQ ID NO: 257631 - DNA, 120 bp, Artificial Sequence
  ENSG00000124615_16 (sequence is synthesized)
actggtggtcagcggggggacttccatcgggcttagcacctgcccttctcacccatggcccacccaggcctggagctgggatgcaatgtaggctgagggaaagacgtcaggttcctttaa

SEQ ID NO: 257632 - DNA, 120 bp, Artificial Sequence
  ENSG00000124615_17 (sequence is synthesized)
aacaggcctgctgctagatgatctctaatgaccaatggggcttcctttctatagggaggataccagcaggcccttaagccttccaggacactaaggtcgtgggagcgggactgcaacaag

SEQ ID NO: 257633 - DNA, 120 bp, Artificial Sequence
  ENSG00000124615_18 (sequence is synthesized)
caatgccagataactgagaaatcatgttctttgtggactatttcagacaaccaggttccgacagtccagcccagaacttttccttctcattttgggttttctcttctcctgctttcctgg

SEQ ID NO: 257634 - DNA, 120 bp, Artificial Sequence
  ENSG00000124615_19 (sequence is synthesized)
ggagagattaagcgctcattaagcagaggagcccactttgaggagagcaaagcacaagcttgcctgaagaatggatcccaacttctccccggcagctctgcctccctaagtctgtgaagc

SEQ ID NO: 257635 - DNA, 120 bp, Artificial Sequence
  ENSG00000124615_20 (sequence is synthesized)
cgcagccctgccctgtcctgtcctgtcctgacttcatctctccttctgcccaagtctgtgtcccatcagacttgcagcctttcagcttaacagttgcccggtcctgctggccccttttcc

SEQ ID NO: 257636 - DNA, 120 bp, Artificial Sequence
  ENSG00000124615_21 (sequence is synthesized)
tctggcccccctcttctgaaacaggatgtgcacacatgggccatagccctaaggactcctgccagaccacacagcccacacctggccctgttcacggctgttccacccacccctctttat

SEQ ID NO: 257637 - DNA, 120 bp, Artificial Sequence
  ENSG00000124615_22 (sequence is synthesized)
tctggagcatatcagggaaagaaaagttgatgatagattgccttcaccctcacagcgcacaaataaagctacgatgccaactttgcagatgcaagaatgaagacactgtgtgggtagggc

SEQ ID NO: 257638 - DNA, 120 bp, Artificial Sequence
  ENSG00000124615_23 (sequence is synthesized)
actgagctgctgcagtttcacagggaaggctgcacctatcaatcaatcaatcaatcctatcccaagacacagttccctgagggaagaagaggagggacctggaaaggcctaagggtgtac

SEQ ID NO: 257639 - DNA, 120 bp, Artificial Sequence
  ENSG00000124615_24 (sequence is synthesized)
tctctgtatagccccgctatgggaaaataaagtggagtagggggcatagaaatgcaccatctaagggaaatcttttgtcaggtggtggccaggggtgttcaaagctcattgcttgcatta

SEQ ID NO: 257640 - DNA, 120 bp, Artificial Sequence
  ENSG00000124615_25 (sequence is synthesized)
ccagctattagagagatcagagagggcaattaattagaggctcctggttctcacatcccaaacacacacagttctggcctgctgggctctctaacttggatgtctttgagtcctcagtgg

SEQ ID NO: 257641 - DNA, 120 bp, Artificial Sequence
  ENSG00000124615_26 (sequence is synthesized)
tgccccctgcctgcctcccctctgccctatgccaaggtgtgctggcaaatattaaacaaccagctctctggaaaagacaatttgtgatataaatactcccatgttgaataatttcaagct

SEQ ID NO: 257642 - DNA, 120 bp, Artificial Sequence
  ENSG00000124615_27 (sequence is synthesized)
accagtatgtcaaatggcttgcaaaatttctgaaaatgtaaacaattggttctcacagagctggtacaagctggctccagcacactctcagcccaccccagatcccctcataggaagaag

SEQ ID NO: 257643 - DNA, 120 bp, Artificial Sequence
  ENSG00000124615_28 (sequence is synthesized)
gcacaagtttaaaggcagactgggtagggatggtatgaatttaatattttttagtattacaatatattcttataaaaaaggtgcaagtgaaaaaggacactgtagattatgtccattagc

SEQ ID NO: 257644 - DNA, 120 bp, Artificial Sequence
  ENSG00000124615_29 (sequence is synthesized)
ctcatttgtcatctgaggcagctggtgagaacagccttggcgtgaaggcatccctggtagaagtcgggggagatagatagtcacagttccccagttggtggaaatgggatgggagtaggg

SEQ ID NO: 257645 - DNA, 120 bp, Artificial Sequence
  ENSG00000124615_30 (sequence is synthesized)
agaggctggaacagacccttccccattcacctggagaattttctcctcccactgccctaaacactttatttccatcacaggggagaaatgctgctgagaaggttgtgtttgttaggttga

SEQ ID NO: 257646 - DNA, 120 bp, Artificial Sequence
  ENSG00000124615_31 (sequence is synthesized)
tgacgaattttacattggccacaaaattagctagagaaacttatctaaaggtggcaggagcagtggggagggcatgaagaaagcaagaccaagaaacaacctattaaggaccagctcagc

SEQ ID NO: 257647 - DNA, 120 bp, Artificial Sequence
  ENSG00000124615_32 (sequence is synthesized)
caccccgactgggcaccagccccttcttactcagttgagtatgagtccatggtccaaggcactgttggagatctggctacagtggcatctagcaccagagccactggccagatgtagaaa

SEQ ID NO: 257648 - DNA, 120 bp, Artificial Sequence
  ENSG00000124615_33 (sequence is synthesized)
ataaatagaaaaatatctttcttttagagtgagaaggctgagctctggaacaacgtatttgtgtcctctgtcaacagttgaaccaaattctgcttttctgaagatcaaatgtatcttgaa

SEQ ID NO: 257649 - DNA, 120 bp, Artificial Sequence
  ENSG00000124615_34 (sequence is synthesized)
agcccaaacatgtggaagagttggaagctccgcacagatgtcagagtaagggagggggcaggcggttctccttgtgcctcttcccagcccggtagcaggggcccatgcttcctccctggt

SEQ ID NO: 257650 - DNA, 120 bp, Artificial Sequence
  ENSG00000124615_35 (sequence is synthesized)
tccaatttcacctggctcctggggctgtcacttccctttgcttcatgtttataaaatgagaggactgggccagcccatcataagatgggggagggcacagaaacttgtcttgaggagact

SEQ ID NO: 257651 - DNA, 120 bp, Artificial Sequence
  ENSG00000124615_36 (sequence is synthesized)
aattctgcttttctgaagatcaaatgtatcttgaacagcttccatagtccttttgtttccagagcactgagacccaacatgtgacctggggccagcagcatcacctaggaaattatgaga

SEQ ID NO: 257652 - DNA, 120 bp, Artificial Sequence
  ENSG00000124615_37 (sequence is synthesized)
aatacagactctcagacccacaggatcagaagctgcattttaacaagactcatctttacaagactccaggtgactcatgcacaaattaaagagacatttttctaaagctcccagctgatt

SEQ ID NO: 257653 - DNA, 120 bp, Artificial Sequence
  ENSG00000124615_38 (sequence is synthesized)
cagaagctgctggtccatgtaccgcactttgagtagcacttaacaggactataaaattgtaaatttggaaatcatcttcccccaccgtagtggcaacaaaacgttctttgtcatccttaa

SEQ ID NO: 257654 - DNA, 120 bp, Artificial Sequence
  ENSG00000124615_39 (sequence is synthesized)
gccagaaatcttcccagtagagatcaccatccgcccccgacccccaagctgaatacttaaggggtgggtccttcccatcaagctgatttctcaacgagagggacaatcccagcttcccca

SEQ ID NO: 257655 - DNA, 120 bp, Artificial Sequence
  ENSG00000124615_40 (sequence is synthesized)
gtccatctgctgaagcagcccttgaaatttccctgtgcctggaaatcctcctgtgtcctccagttctgctttctaacttcttcacctgctaccccttgcttaccaggccaggtcagtact

SEQ ID NO: 257656 - DNA, 120 bp, Artificial Sequence
  ENSG00000124635_0 (sequence is synthesized)
atgccagagccagcgaagtctgctcccgccccgaaaaagggctccaagaaggcggtgactaaggcgcagaagaaagacggcaagaagcgcaagcgcagccgcaaggagagctattccatc

SEQ ID NO: 257657 - DNA, 120 bp, Artificial Sequence
  ENSG00000124635_1 (sequence is synthesized)
caggtccaccctgacaccggcatttcgtccaaggccatgggcatcatgaattcgtttgtgaacgacattttcgagcgcatcgcaggtgaggcttcccgcctggcgcattacaacaagcgc

SEQ ID NO: 257658 - DNA, 85 bp, Artificial Sequence
  ENSG00000124635_2 (sequence is synthesized)
gcgcctgctgctgcctggggagttggccaagcacgccgtgtccgagggtactaaggccgtcaccaagtacaccagcgctaagtaa

SEQ ID NO: 257659 - DNA, 120 bp, Artificial Sequence
  ENSG00000124635_3 (sequence is synthesized)
ctgaagacgagactgatgctcatctttgaaatgaagggcagtgtgtgcatttctccatgaaggtatccagaaacagccatgccagagctgctgtggggtggctgaactgctattcctttt

SEQ ID NO: 257660 - DNA, 120 bp, Artificial Sequence
  ENSG00000124635_4 (sequence is synthesized)
ctagggtgggatccccactctttgtaaggaaggatattggggtcctgacactgggaactcatcttgtcagtgaggccttctttaactgctgtcttgtaattgagccaccccatctgtgtt

SEQ ID NO: 257661 - DNA, 120 bp, Artificial Sequence
  ENSG00000124635_5 (sequence is synthesized)
tcctgttccaatttaggacttttttttttttatcataatataaagatctgaaatgctatgttttccttattcattggcttattatctttactatcccatcctccacactaaaagtttttt

SEQ ID NO: 257662 - DNA, 120 bp, Artificial Sequence
  ENSG00000124635_6 (sequence is synthesized)
cgagctggatttgggagttgtggggtaggttatattttgatcacttgtatttcccagcttctagaacagtgcccagcaaagtacttctctgaataaatgaataaagtaatattcctctgc

SEQ ID NO: 257663 - DNA, 120 bp, Artificial Sequence
  ENSG00000124641_0 (sequence is synthesized)
gtatttccggagtcccttctgagacagaaggttgtgttggggaactgaaggagtttctgtgggcggacagggaaccctgcgtttctactgtgtgattctgccaccttcctggcccgacgc

SEQ ID NO: 257664 - DNA, 120 bp, Artificial Sequence
  ENSG00000124641_1 (sequence is synthesized)
catgggagtgacttgtgtgtcccagatgcctgtggccgagggcaagagtgttcagcaaaccgtagagctccttacccggaaattggagatgcttggggcagagaagcaaggaacattttg

SEQ ID NO: 257665 - DNA, 120 bp, Artificial Sequence
  ENSG00000124641_2 (sequence is synthesized)
tgtggactgtgagacttaccatacggccgcctctacccttggcagccaaggtcagaccgggaagctgatgtatgtgatgcacaactcagagtacccattgagctgtttcgccctctttga

SEQ ID NO: 257666 - DNA, 120 bp, Artificial Sequence
  ENSG00000124641_3 (sequence is synthesized)
gaatggcccttgccttattgctgacaccaactttgatgtgcttatggtgaagctcaagggctttttccagagtgctaaggccagcaagattgagacccggggcaccaggtaccagtactg

SEQ ID NO: 257667 - DNA, 120 bp, Artificial Sequence
  ENSG00000124641_4 (sequence is synthesized)
tgacttcctggtgaaggtgggcacggtcacaatggggcccagtgcccggggcatctctgtggaggtggagtatggcccctgtgtggtagctagtgactgctggagtctgctgctcgagtt

SEQ ID NO: 257668 - DNA, 120 bp, Artificial Sequence
  ENSG00000124641_5 (sequence is synthesized)
cctacagagttttctaggcagccacacaccaggggctcccgcagtgtttgggaacagacatgatgcggtctacggcccagcagataccatggtccagtacatggaactcttcaacaagat

SEQ ID NO: 257669 - DNA, 120 bp, Artificial Sequence
  ENSG00000124641_6 (sequence is synthesized)
ccgcaagcagcagcaggtgccggtggctgggattcgttagtgatgagcagctgccagctgagctctgtcaccaggggtactccacaggaggagcaggtgctgactttcaggtccctggac

SEQ ID NO: 257670 - DNA, 120 bp, Artificial Sequence
  ENSG00000124641_7 (sequence is synthesized)
cccagaaacccagggtagacatggactctactctccttctctggttctcagctgtggcttttgttctggggctgagtcccctccccaaccccctgactctcacacatagccccccatcag

SEQ ID NO: 257671 - DNA, 120 bp, Artificial Sequence
  ENSG00000124641_8 (sequence is synthesized)
ctgttttactccgtgccttactggatttggcctgtcctcaagaatggtaattatgaagagtggagaagtttggaccttgcctcctttaggggaaaggtaggacaggaatgtccctgcctg

SEQ ID NO: 257672 - DNA, 120 bp, Artificial Sequence
  ENSG00000124641_9 (sequence is synthesized)
gtactggtgggggaaatagtccgtatccccaactattaaggatttgtcccaggccaatggtgaacatgctgcattttatgtttggattgtgctgtaataagagcctcttccttccctcag

SEQ ID NO: 257673 - DNA, 120 bp, Artificial Sequence
  ENSG00000124641_10 (sequence is synthesized)
tgctgaagtgatttgcgaattgactttcctagggtgttgcctgagtcctttgaaatctccttctgacatctttcccttctgttgtgaaatatgttaagccacaggccaaactgctataag

SEQ ID NO: 257674 - DNA, 120 bp, Artificial Sequence
  ENSG00000124641_11 (sequence is synthesized)
atcgaagtttgtttttttctcacctaataatagagaggtaatcagatggtctagggcagatttaactctacaaggttatcaggaactttgtttccttctgtcttattcagccattcccag

SEQ ID NO: 257675 - DNA, 120 bp, Artificial Sequence
  ENSG00000124641_12 (sequence is synthesized)
tatgttttcttacccataagatcaaagcagactcatcagctccatatctgcattccactggggaaagagagagagaaaagagcagattttaaaaaaaagatatgactgagcattgctcag

SEQ ID NO: 257676 - DNA, 120 bp, Artificial Sequence
  ENSG00000124641_13 (sequence is synthesized)
atcactgtggccacactttgctgaaagagatgctgggacatagaacctcttatctgggcagtcatgtgctgagttaaaactcagggattctgtgactacaagatgaaagacaatttggtt

SEQ ID NO: 257677 - DNA, 120 bp, Artificial Sequence
  ENSG00000124641_14 (sequence is synthesized)
gctgagatgcagttaatggcttctgttacatggagctcaatggacgtgcccaggaatgcttttggctgttattttgcagttaatacctcctgtaactaaagcatttgtttatgagttgac

SEQ ID NO: 257678 - DNA, 120 bp, Artificial Sequence
  ENSG00000124641_15 (sequence is synthesized)
ttgagagaagggctgatctcagagccgctttgagctaagttggattagtcacactaggaagttaattccacacctttcgtctaagtctcagtattgaggcctctccagttctcatgcacc

SEQ ID NO: 257679 - DNA, 120 bp, Artificial Sequence
  ENSG00000124641_16 (sequence is synthesized)
ctgatcttagggttagaatacttgaccctgatacctgcaccatgcttcatggttcctgagctctttctcctgtttcatttgagcctccaaactacatatttggtcatattgcctgcctac

SEQ ID NO: 257680 - DNA, 120 bp, Artificial Sequence
  ENSG00000124641_17 (sequence is synthesized)
cccatgcctgctgcagaaatattcatccaggttaaccttgatatacacagagatggtcttggagaattgtgaatgtatgtactgtattgtcatcaaggatactgtcccttatttgaaggc

SEQ ID NO: 257681 - DNA, 120 bp, Artificial Sequence
  ENSG00000124641_18 (sequence is synthesized)
atctaaagagaaactgttttcagatccaagtgctcagatctaaagcctctgcaacaagtcaggtggtggtcatgtttcccttctagttttggctgacaggaagctcagttcagtaccata

SEQ ID NO: 257682 - DNA, 120 bp, Artificial Sequence
  ENSG00000124641_19 (sequence is synthesized)
actacagaacctgtcatctgtattttttgttctcaccccgtttttgttattttgtttctggttttttatattgaggtatgttttagatatagtttacaaaaataaaacgcacagatctta

SEQ ID NO: 257683 - DNA, 120 bp, Artificial Sequence
  ENSG00000124641_20 (sequence is synthesized)
tgttggggaactgaaggagtttctgtgggcggacagggaaccctgcgtttctactgtgtgattctgccaccttcctggcccgacgccatgggagtgacttgggctgttgaatagcacttt

SEQ ID NO: 257684 - DNA, 120 bp, Artificial Sequence
  ENSG00000124641_21 (sequence is synthesized)
ggctactgtgctgaacagctcaagttcacagagttgtgtgtcccagatgcctgtggccgagggcaagagtgttcagcaaaccgtagagctccttacccggaaattggagatgcttggggc

SEQ ID NO: 257685 - DNA, 120 bp, Artificial Sequence
  ENSG00000124641_22 (sequence is synthesized)
cttgaccatggtccgccgtcctctgggagctgagggagatgtcctcgggttgtgtagatgagaggatgccgtccgggctgcgggttccccgggcttgtttcctcagagatgcgccccttc

SEQ ID NO: 257686 - DNA, 120 bp, Artificial Sequence
  ENSG00000124641_23 (sequence is synthesized)
cacggtcacaatggggcccagtgcccggggcatctctgtggaggtaagaccttggtgaaaataggagcaggatgttctgagggggctgcttagcaaagggctctgaagattttccagttc

SEQ ID NO: 257687 - DNA, 120 bp, Artificial Sequence
  ENSG00000124641_24 (sequence is synthesized)
cccaggctggaatgcaatggcacaatcttggcacactgtagcctcgacctccagggctcaagtgatccttccgcctcagtctcccaagtacctgggactacacccaccgaattaaatttt

SEQ ID NO: 257688 - DNA, 120 bp, Artificial Sequence
  ENSG00000124641_25 (sequence is synthesized)
ctcccaagtacctgggactacacccaccgaattaaatttttttttttttttagtagaaatgaggtcttactatgttgcccaggctgatctcagactcctgggctcaattgatcctcccat

SEQ ID NO: 257689 - DNA, 120 bp, Artificial Sequence
  ENSG00000124657_0 (sequence is synthesized)
atgaattgggtaaatgacagcatcatacaggagtttattctgctgggtttctcagatcgaccttggctggagtttccactccttgtggtcttcttgatttcttacactgtgaccatcttt

SEQ ID NO: 257690 - DNA, 120 bp, Artificial Sequence
  ENSG00000124657_1 (sequence is synthesized)
ggcaatctgaccattattctagtgtcacgcctggacaccaaacttcatacccccatgtatttttttcttaccaatctatcactcctggatctttgttacaccacatgtacagtcccacaa

SEQ ID NO: 257691 - DNA, 120 bp, Artificial Sequence
  ENSG00000124657_2 (sequence is synthesized)
atgctagtaaatttatgcagcatcaggaaagtaatcagttatcgtggctgtgtagcccagcttttcatatttctggccttgggggctactgaatatcttctcctggccgtcatgtccttt

SEQ ID NO: 257692 - DNA, 120 bp, Artificial Sequence
  ENSG00000124657_3 (sequence is synthesized)
aactcagtgtggttgtctaccctgactctccagctgccactctgtgacccctatgtgatagatcactttctctgtgaagtccctgcactgctcaagttatcttgtgttgagacaacagca

SEQ ID NO: 257693 - DNA, 120 bp, Artificial Sequence
  ENSG00000124657_4 (sequence is synthesized)
aatgaggctgaactattccttgtcagtgagctcttccatctaatacccctgacactcatccttatatcatatgcttttattgtccgagcagtattgaggatacagtctgctgaaggtcga

SEQ ID NO: 257694 - DNA, 120 bp, Artificial Sequence
  ENSG00000124657_5 (sequence is synthesized)
caaaaagcatttgggacatgtggttcccatctaattgtggtgtctcttttttatagtacagccgtctctgtgtacctgcaaccaccttcgcccagctccaaggaccaaggaaagatggtt

SEQ ID NO: 257695 - DNA, 120 bp, Artificial Sequence
  ENSG00000124657_6 (sequence is synthesized)
tctctcttctatggaatcattgcacccatgctgaatccccttatatatacacttaggaacaaggaggtaaaggaaggctttaaaaggttggttgcaagagtcttcttaatcaagaaataa

SEQ ID NO: 257696 - DNA, 120 bp, Artificial Sequence
  ENSG00000124659_0 (sequence is synthesized)
aagacaagagagaggaagcttgaagccaatatggagtccgtcagttgctccgctgctgctgtcaggaccggagacatggagtcccagcgggacctgagcctggtgcctgagcggcttcag

SEQ ID NO: 257697 - DNA, 120 bp, Artificial Sequence
  ENSG00000124659_1 (sequence is synthesized)
agacgcgaacaagaacggcagctggaagttgaaaggcggaaacaaaagcggcagaaccaggaggtagagaaggagaacagccactttttcgtcgccacctttgttcgggagcgagcggcc

SEQ ID NO: 257698 - DNA, 120 bp, Artificial Sequence
  ENSG00000124659_2 (sequence is synthesized)
gtggaagagcttctggagcgcgcggagtcggtcgagcggctggaggaggcggcctctcggctccaggggctgcagaaactaatcaacgactcagtttttttcctagccgcttacgacctg

SEQ ID NO: 257699 - DNA, 120 bp, Artificial Sequence
  ENSG00000124659_3 (sequence is synthesized)
cggcagggacaagaggcgctggcgcggctgcaggcggccttggccgagcggcgccgggggctgcagcccaagaagcgtttcgctttcaagacccggggaaaggatgctgcttcgtctacc

SEQ ID NO: 257700 - DNA, 120 bp, Artificial Sequence
  ENSG00000124659_4 (sequence is synthesized)
aaagtagacgcggctcctggcatccccccggcagttgaaagcatacaggactccccgctgcccaagaaggcggaaggagacctcggccccagctgggtctgcggtttctccaacctggag

SEQ ID NO: 257701 - DNA, 120 bp, Artificial Sequence
  ENSG00000124659_5 (sequence is synthesized)
tcccaagtcttggagaagagagccagcgagttgcaccagcgcgacgttcttttgaccgaactgagcaactgcacggtcagactgtatggaaatcccaacaccctgcggctaaccaaggcc

SEQ ID NO: 257702 - DNA, 120 bp, Artificial Sequence
  ENSG00000124659_6 (sequence is synthesized)
tggaggactgcagtgactgcgtgctggcagtggcctgccaacagctccgcatacacagtacgaaagacacccgcatcttcctgcaggtgaccagcagggccatcgtggaggactgcagtg

SEQ ID NO: 257703 - DNA, 120 bp, Artificial Sequence
  ENSG00000124659_7 (sequence is synthesized)
ggatccagttcgccccttacacctggagctacccggagatcgacaaggacttcgagagctctggtttagataggagcaaaaataactggaacgatgttgacgattttaactggctggccc

SEQ ID NO: 257704 - DNA, 120 bp, Artificial Sequence
  ENSG00000124659_8 (sequence is synthesized)
gggatatggcctccccaaactggagtattcttcctgaagaggagcgaaatatccagtgggactaagcagttgtcactctgttcttcactcctaccaaatactttccacgttggactttcc

SEQ ID NO: 257705 - DNA, 120 bp, Artificial Sequence
  ENSG00000124659_9 (sequence is synthesized)
cccttattgggtctcgaagtttacttattgtcacactgtgtatgttttcagcattttaaggctagagattgtaatgggctcctacttgtaatttccattaaattcgtaacaggtataaca

SEQ ID NO: 257706 - DNA, 120 bp, Artificial Sequence
  ENSG00000124659_10 (sequence is synthesized)
ctaaagcatttttgctattttcgtcatgcctttgagactgagtcttactccgtcccccagcgtggtggcgcgctgggattacaggcgcgcgccaccacgcgaacttgtatttttagtaga

SEQ ID NO: 257707 - DNA, 80 bp, Artificial Sequence
  ENSG00000124659_11 (sequence is synthesized)
ctgacctcaggtgatccacccgcttcagcagggctttatttatttatttttaccacaatagtttgaagcagtaaggggga

SEQ ID NO: 257708 - DNA, 120 bp, Artificial Sequence
  ENSG00000124659_12 (sequence is synthesized)
tatttatttttaccacaatagtttgaagcagtaagggggaaggagggtgattatattgctttgtaatggtttgtgatacttgaaacatcacggtgcataataaagtaggtctgcagtaaa

SEQ ID NO: 257709 - DNA, 120 bp, Artificial Sequence
  ENSG00000124664_0 (sequence is synthesized)
cttcatctcgcggctgtctgacttcctcccagcacattcctgcactctgccgtgtccacactgccccacagacccagtcctccaagcctgctgccagctccctgcaagcccctcaggttg

SEQ ID NO: 257710 - DNA, 120 bp, Artificial Sequence
  ENSG00000124664_1 (sequence is synthesized)
ggccttgccacggtgccagcaggcagccctgggctgggggtaggggactccctacaggcacgcagccctgagacctcagagggccaccccttgagggtggccaggcccccagtggccaac

SEQ ID NO: 257711 - DNA, 120 bp, Artificial Sequence
  ENSG00000124664_2 (sequence is synthesized)
ctgagtgctgcctctgccaccagccctgctggcccctggttccgctggccccccagatgcctggctgagacacgccagtggcctcagctgcccacacctcttcccggcccctgaagttgg

SEQ ID NO: 257712 - DNA, 120 bp, Artificial Sequence
  ENSG00000124664_3 (sequence is synthesized)
cactgcagcagacagctccctgggcaccaggcagctaacagacacagccgccagcccaaacagcagcggcatgggcagcgccagcccgggtctgagcagcgtatcccccagccacctcct

SEQ ID NO: 257713 - DNA, 120 bp, Artificial Sequence
  ENSG00000124664_4 (sequence is synthesized)
gctgccccccgacacggtgtcgcggacaggcttggagaaggcggcagcgggggcagtgggtctcgagagacgggactggagtcccagtccacccgccacgcccgagcagggcctgtccgc

SEQ ID NO: 257714 - DNA, 120 bp, Artificial Sequence
  ENSG00000124664_5 (sequence is synthesized)
cttctacctctcctactttgacatgctgtaccctgaggacagcagctgggcagccaaggcccctggggccagcagtcgggaggagccacctgaggagcctgagcagtgcccggtcattga

SEQ ID NO: 257715 - DNA, 120 bp, Artificial Sequence
  ENSG00000124664_6 (sequence is synthesized)
cagccaagccccagcgggcagcctggacttggtgcccggcgggctgaccttggaggagcactcgctggagcaggtgcagtccatggtggtgggcgaagtgctcaaggacatcgagacggc

SEQ ID NO: 257716 - DNA, 120 bp, Artificial Sequence
  ENSG00000124664_7 (sequence is synthesized)
ccttccaggagctggcgggcaaggagctgtgcgccatgtcggaggagcagttccgccagcgctcgcccctgggtggggatgtgctgcacgcccacctggacatctggaagtcagcggcct

SEQ ID NO: 257717 - DNA, 120 bp, Artificial Sequence
  ENSG00000124664_8 (sequence is synthesized)
ggatgaaagagcggacttcacctggggcgattcactactgtgcctcgaccagtgaggagagctggaccgacagcgaggtggactcatcatgctccgggcagcccatccacctgtggcagt

SEQ ID NO: 257718 - DNA, 120 bp, Artificial Sequence
  ENSG00000124664_9 (sequence is synthesized)
tcctcaaggagttgctactcaagccccacagctatggccgcttcattaggtggctcaacaaggagaagggcatcttcaaaattgaggactcagcccaggtggcccggctgtggggcatcc

SEQ ID NO: 257719 - DNA, 120 bp, Artificial Sequence
  ENSG00000124664_10 (sequence is synthesized)
gcaagaaccgtcccgccatgaactacgacaagctgagccgctccatccgccagtattacaagaagggcatcatccggaagccagacatctcccagcgcctcgtctaccagttcgtgcacc

SEQ ID NO: 257720 - DNA, 120 bp, Artificial Sequence
  ENSG00000124664_11 (sequence is synthesized)
ccatctgagtgcctggcccagggcctgaaacccgccctcaggggcctctctcctgcctgccctgcctcagccaggccctgagatgggggaaaacgggcagtctgctctgctgctctgacc

SEQ ID NO: 257721 - DNA, 120 bp, Artificial Sequence
  ENSG00000124664_12 (sequence is synthesized)
ttccagagcccaaggtcagggaggggcaaccaactgccccagggggatatgggtcctctggggccttcgggaccctggggcaggggtgcttcctcctcaggcccagctgctcccctggag

SEQ ID NO: 257722 - DNA, 120 bp, Artificial Sequence
  ENSG00000124664_13 (sequence is synthesized)
gacagagggagacagggctgctccccaacacctgcctctgaccccagcatttccagagcagagcctacagaagggcagtgactcgacaaaggccacaggcagtccaggcctctctctgct

SEQ ID NO: 257723 - DNA, 120 bp, Artificial Sequence
  ENSG00000124664_14 (sequence is synthesized)
ccatccccctgcctcccattctgcaccacacctggcatggtgcagggagacatctgcacccctgagttgggcagccaggagtgcccccgggaatggataataaagatactagagaactga

SEQ ID NO: 257724 - DNA, 120 bp, Artificial Sequence
  ENSG00000124678_0 (sequence is synthesized)
agcctgccgcttccggctctggcggggggggcacgtgccccgtcccgttgccccggcgaccgcggcggtttgttctcaggccccggcctttctcaccgtgcgacgccccaacccgccgct

SEQ ID NO: 257725 - DNA, 120 bp, Artificial Sequence
  ENSG00000124678_1 (sequence is synthesized)
ccgccgcggtggtacgctccaggccgccaggccgcgaggcccaccgagcggacgccagtggatgacccgcggcgggggaggaggagataccatcagcaaaatgccagacgtcaaggagag

SEQ ID NO: 257726 - DNA, 120 bp, Artificial Sequence
  ENSG00000124678_2 (sequence is synthesized)
tgtgcccccgaaatatcctggcgactcagagggcaggtcctgtaagcccgaaacctcaggacccccccaggaagacaagagcggctccgaggacccccctccctagaacgtaactagtca

SEQ ID NO: 257727 - DNA, 120 bp, Artificial Sequence
  ENSG00000124678_3 (sequence is synthesized)
tcaaactgaggagctgtccgtgtgcaacaactcaagataaaattcttgactattgaaatgcgaaaaattagattgaggctttgcggctgaattagattggtttttcttgtggccacatga

SEQ ID NO: 257728 - DNA, 120 bp, Artificial Sequence
  ENSG00000124678_4 (sequence is synthesized)
ggtcgctgctggttaactgaatggcaccaaaaggcatattggggtcatttccaacagctatgaacctgagtctggaaggcaaggtcaaggagacagtgcacaatgccttttgggaccatc

SEQ ID NO: 257729 - DNA, 120 bp, Artificial Sequence
  ENSG00000124678_5 (sequence is synthesized)
ttaaagagcaactatcagcaactccccctgacttcagctgtgctcttgaacttctgaaagaaattaaagagatcttgctatcactgctattaccacgccagaaccgcctgagaattgaga

SEQ ID NO: 257730 - DNA, 120 bp, Artificial Sequence
  ENSG00000124678_6 (sequence is synthesized)
ttgaagaagctctggacatggacttgctcaagcaggaggcagaacatggggccctgaaagtcctctatctctctaagtacgttctcaacatgatggctttgctgtgtgcaccagttcgag

SEQ ID NO: 257731 - DNA, 120 bp, Artificial Sequence
  ENSG00000124678_7 (sequence is synthesized)
atgaagcagtgcagaaactagaaaacattacggatcctgtttggctactgagagggatcttccaggttctgggccggatgaaaatggacatggtgaactacactatccagagccttcaac

SEQ ID NO: 257732 - DNA, 120 bp, Artificial Sequence
  ENSG00000124678_8 (sequence is synthesized)
acccaagcagcaggagacctcaccatgtcacctccgacttgcccagacacttctgactcctccagtgtggctggcccctctcccaatgaggcagccaacaacccagagcccctcagcccc

SEQ ID NO: 257733 - DNA, 120 bp, Artificial Sequence
  ENSG00000124678_9 (sequence is synthesized)
acaatggtgctgtgtcagggcttcttgaacctccttctctgggaccttgaaaatgaagagttccctgagaccctgctgatggacagaacccggctgcaggagctgaagtcccagttgcac

SEQ ID NO: 257734 - DNA, 120 bp, Artificial Sequence
  ENSG00000124678_10 (sequence is synthesized)
cagttaaccgtcatggcctcagtcttgctggtggccagtagtttctccggcagtgttttgtttggctcaccccaatttgtagataaactgaaacgcataaccaaatccttgttggaagac

SEQ ID NO: 257735 - DNA, 120 bp, Artificial Sequence
  ENSG00000124678_11 (sequence is synthesized)
tttcactccaggcctgaggaagctatactgactgtgagtgaacaggtatctcaggaaatccatcaaagcctcaagaatatgggccttgttgctctaagcagtgataatacagcatctcta

SEQ ID NO: 257736 - DNA, 120 bp, Artificial Sequence
  ENSG00000124678_12 (sequence is synthesized)
atgggacagctccagaacattgccaagaaggagaactgtgtctgcagtgttattgatcagcggatccatttgtttctcaaatgctgtttggttcttggtgtgcagcggtctctattagac

SEQ ID NO: 257737 - DNA, 120 bp, Artificial Sequence
  ENSG00000124678_13 (sequence is synthesized)
cttcctggaggccttactctcattgaagcagaactggcagaactgggccaaaagtttgtcaacttgacacatcacaatcagcaggtgtttggtccctactacactgagatcctaaaaacc

SEQ ID NO: 257738 - DNA, 120 bp, Artificial Sequence
  ENSG00000124678_14 (sequence is synthesized)
ctcatttccccagcccaggcactggaaacaaaagtggagtctgtttgatagcgtcggctcagagccctggtaccttggacccaagaggaggcccatcatcttcctggagtaacatcacca

SEQ ID NO: 257739 - DNA, 120 bp, Artificial Sequence
  ENSG00000124678_15 (sequence is synthesized)
gtgaccagcagacagtgagcttctatcccaggccctgcagccagtacaccaaggctgtagggatcaagcatgtaaacaccaactggtccatacccattcattaataaacttcttaagtgc

SEQ ID NO: 257740 - DNA, 120 bp, Artificial Sequence
  ENSG00000124678_16 (sequence is synthesized)
ctttctcaccgtgcgacgccccaacccgccgctccgccgcggtggtacgctccaggccgccaggccgcgaggcccaccgagcggacgccagtggatgacccgcggcgggggaggaggagg

SEQ ID NO: 257741 - DNA, 120 bp, Artificial Sequence
  ENSG00000124678_17 (sequence is synthesized)
tctgacagaaaccgttaatgaagtttccaagctgagcaacaagattgggatgaattgtgattactacatggaagagaaggttttacctccaagcagtctggaaggcaaggtcaaggagac

SEQ ID NO: 257742 - DNA, 120 bp, Artificial Sequence
  ENSG00000124678_18 (sequence is synthesized)
agtcattctgagtgtgcctctgttggccacaaatgggtacaagagatgtaaattctgcagaggttgtgagtggcttagccagtgtttttcaatgagaaattccacagcatggaatttgag

SEQ ID NO: 257743 - DNA, 120 bp, Artificial Sequence
  ENSG00000124678_19 (sequence is synthesized)
acgctcctttgcccctttctgcccctcagcacccccaagaccctgaggccgctaccccccttcccgccgcccccagggacccccttggcaattggggaggccccttccccgacgccaaca

SEQ ID NO: 257744 - DNA, 120 bp, Artificial Sequence
  ENSG00000124678_20 (sequence is synthesized)
gctgagagaggccaaccaaggacctcatttgagagggcatagctatgccatgagacgttactggcctgtgtatgctgctgaccacagtgcactgcaggaaccaagcactggagaagctat

SEQ ID NO: 257745 - DNA, 120 bp, Artificial Sequence
  ENSG00000124678_21 (sequence is synthesized)
tcatgctgcaggagccaagtactgcaggagcctgctgagtgaacataccagaaccgggaataaaagctcttgcctttgcaatgtctttctaatcttgctatcactgctattaccacgcca

SEQ ID NO: 257746 - DNA, 120 bp, Artificial Sequence
  ENSG00000124678_22 (sequence is synthesized)
agagggccacatagcaaggagctgcaggtggcttctaggacccggggttagcatccagacaatagccaatcttgctatcactgctattaccacgccagaaccgcctgagaattgagattg

SEQ ID NO: 257747 - DNA, 120 bp, Artificial Sequence
  ENSG00000124678_23 (sequence is synthesized)
cgacgccccaacccgccgctccgccgcggtggtacgctccaggccgccaggccgcgaggcccaccgagcggacgccagtggatgacccgcggcgggggaggaggagatcttgctatcact

SEQ ID NO: 257748 - DNA, 120 bp, Artificial Sequence
  ENSG00000124678_24 (sequence is synthesized)
ctatgaacctgagcttcaacaatgatcaactcgtggccaatctttgttcatctacatctcctccacatcttggagccaaataattttctgtgaaaaatcatgatgctgcatcaaaagaga

SEQ ID NO: 257749 - DNA, 120 bp, Artificial Sequence
  ENSG00000124688_0 (sequence is synthesized)
atgatgccccgcgagacctttattctaaccgcaaggagtagcggaggggaggtcgtgatggcggcgccggaggcggaggttctgtcctcagccgcagtccctgatttggagtggtatgag

SEQ ID NO: 257750 - DNA, 120 bp, Artificial Sequence
  ENSG00000124688_1 (sequence is synthesized)
aagtccgaagaaactcacgcctcccagatagaactacttgagacaagctctacgcaggaacctctcaacgcttcggaggccttttgcccaagagactgcatggtaccagtggtgtttcct

SEQ ID NO: 257751 - DNA, 120 bp, Artificial Sequence
  ENSG00000124688_2 (sequence is synthesized)
gggcctgtgagccaggaaggctgctgtcagtttacttgtgaacttctaaagcatatcatgtatcaacgccagcagctccctctgccctatgaacagcttaagcacttttaccgaaaacct

SEQ ID NO: 257752 - DNA, 120 bp, Artificial Sequence
  ENSG00000124688_3 (sequence is synthesized)
tctccccaggcagaggagatgctgaagaagaaacctcgggccaccactgaggtgagcagcaggaaatgccaacaagccctggcagaactggagagtgtcctcagccacctggaggacttc

SEQ ID NO: 257753 - DNA, 120 bp, Artificial Sequence
  ENSG00000124688_4 (sequence is synthesized)
tttgcacggacactagtaccgcgagtgctgattctccttgggggcaatgccctaagccccaaggagttctatgaactcgacttgtctctgctggccccctacagcgtggaccagagcctg

SEQ ID NO: 257754 - DNA, 120 bp, Artificial Sequence
  ENSG00000124688_5 (sequence is synthesized)
acagggacaccgcaactgtggagaagattggtttcgacccaagctcaactatcgagtgcccagccggggccataaactgactgtgaccctgtcatgtggcagaccttccatccgaaccac

SEQ ID NO: 257755 - DNA, 120 bp, Artificial Sequence
  ENSG00000124688_6 (sequence is synthesized)
ggcttgggaagactacatttggttccaggcaccagtgacatttaaaggcttccgcgagtgaatgagtgcttcttaatcctaaaaacacaatggctgaattatctttctccatgtggcgct

SEQ ID NO: 257756 - DNA, 120 bp, Artificial Sequence
  ENSG00000124688_7 (sequence is synthesized)
gaatcacccatctggtttggagctagagttgcttcctggtgagagaggaagcaactctccttctggttgtctgcctcccctcagatttcctgataggctgatggcatgtggctgtgactg

SEQ ID NO: 257757 - DNA, 120 bp, Artificial Sequence
  ENSG00000124688_8 (sequence is synthesized)
tgactgtaatcattgctgaacaacatctctttgaatcaaaggttgattttcccagagggtgctgggtcaggcatttctattaggagttggaaagcaaaaatgggtccatagacactctat

SEQ ID NO: 257758 - DNA, 120 bp, Artificial Sequence
  ENSG00000124688_9 (sequence is synthesized)
ggaggtgtccctttctgctctttgctgtgtcctttcagaatttttaccaggaacataatgtggatgtgacttatgaacttaaatataaaataaatagattcttattatattttcctgaaa

SEQ ID NO: 257759 - DNA, 120 bp, Artificial Sequence
  ENSG00000124688_10 (sequence is synthesized)
gggggaatttagagcctcgaggcctggggtggggacgcgaggacaccagcgtagaagagcttacatcagaatcgagctttgtgggcgctccgggatttggccctttagcgcggatcctag

SEQ ID NO: 257760 - DNA, 120 bp, Artificial Sequence
  ENSG00000124688_11 (sequence is synthesized)
acaacaggttttggacctcgagagctgcagaactgaggctactggtgccgccagcctgctggctccgcctctgcctcagtttcttcccctatggcccgcgtgccgctggggcggagtctc

SEQ ID NO: 257761 - DNA, 86 bp, Artificial Sequence
  ENSG00000124688_12 (sequence is synthesized)
ttcttcccctatggcccgcgtgccgctggggatggcatgacctcagctcaccacaacttccgcctcccaggttcaagggattctcc

SEQ ID NO: 257762 - DNA, 120 bp, Artificial Sequence
  ENSG00000124688_13 (sequence is synthesized)
agcttccagggcttcggtcactttctccccactctagtctttggtagcctaacccttctggctttttcaactgttctttctttctgaaactcacgtgttgcatttggacttaatgaactg

SEQ ID NO: 257763 - DNA, 120 bp, Artificial Sequence
  ENSG00000124701_0 (sequence is synthesized)
gcctctctcctctccctcagtgactcctgagccacagcccctccatggcccagaaggaagaggctgctgtggccactgaggctgcctcccagaatggggaggatctggagaacctggacg

SEQ ID NO: 257764 - DNA, 120 bp, Artificial Sequence
  ENSG00000124701_1 (sequence is synthesized)
accctgagaagctgaaagagctgattgagctgccgccctttgagattgtcacaggagaacggctgcctgccaacttctttaaattccagttccggaatgtggagtacagttccgggagga

SEQ ID NO: 257765 - DNA, 120 bp, Artificial Sequence
  ENSG00000124701_2 (sequence is synthesized)
acaagaccttcctctgctatgtggttgaagcacagggcaaggggggccaagtgcaggcatctcggggatacctagaggatgagcatgcggctgcccatgcagaggaagctttcttcaaca

SEQ ID NO: 257766 - DNA, 120 bp, Artificial Sequence
  ENSG00000124701_3 (sequence is synthesized)
ccatcctgccagccttcgacccagccctgcggtacaatgtcacctggtatgtgtcctccagcccctgtgcagcgtgtgctgaccgcattatcaaaacccttagcaagaccaagaacctgc

SEQ ID NO: 257767 - DNA, 120 bp, Artificial Sequence
  ENSG00000124701_4 (sequence is synthesized)
aaggaggctggctgtaaactgcgcatcatgaagccccaggacttcgaatatgtctggcagaattttgtggagcaagaagagggtgaatccaaggcctttcagccctgggaggacattcag

SEQ ID NO: 257768 - DNA, 120 bp, Artificial Sequence
  ENSG00000124701_5 (sequence is synthesized)
gagaacttcctatactacgaggagaagttggcagacatcctgaagtagggcaactgggctttgcctcacgtattcctgctgccaccaagagacagcaatgacatgtacagccatctggga

SEQ ID NO: 257769 - DNA, 120 bp, Artificial Sequence
  ENSG00000124701_6 (sequence is synthesized)
catgcctgtcttcctaataccatttggagctggacaacatttgacaccaaccaatcatactggacaaggcccttagaggacttgaaatatacttctcatgctgtagtttatttaggctgt

SEQ ID NO: 257770 - DNA, 120 bp, Artificial Sequence
  ENSG00000124701_7 (sequence is synthesized)
gactctctctctaatgctgctctcgggaaggacgaaagtgacctgcaaggagagaaatgcaaccatacatgggctccagtcaactatgggactgaaggtcctaattgctcacccaagggg

SEQ ID NO: 257771 - DNA, 120 bp, Artificial Sequence
  ENSG00000124701_8 (sequence is synthesized)
gctgcttaacacaaacagcctcagacccgaggtttagatttctgaaatatgcattttatgttaagttgggtatttttttaaaaaaagaaaaacagcaacattaataaaagaagtggtgtg

SEQ ID NO: 257772 - DNA, 120 bp, Artificial Sequence
  ENSG00000124702_0 (sequence is synthesized)
gtttatctcgttggggactaaggcgtcggttggcgcgcaacgggttctaggctgcaggcagctcgaggacccgcggccccgccccggctcggcctggcagatagcagaggcagcaggccg

SEQ ID NO: 257773 - DNA, 120 bp, Artificial Sequence
  ENSG00000124702_1 (sequence is synthesized)
tgccgggggggcatgttgctgtaaccagtggcccaggggatgttacggtggacagtgcacctggagggcgggccccgcagggtgaaccatgctgcagtggctgtcgggcatcgggtatac

SEQ ID NO: 257774 - DNA, 120 bp, Artificial Sequence
  ENSG00000124702_2 (sequence is synthesized)
tccttcgggggttactgctctggtgaagactatgagacactgcgtcagatagatgtgcacattttcaatgcagtgtccttgcgttggacaaagctgcccccggtgaagtctgccatccgt

SEQ ID NO: 257775 - DNA, 120 bp, Artificial Sequence
  ENSG00000124702_3 (sequence is synthesized)
gggcaagctcctgtggtaccctacatgcgctatggacactcaaccgtcctcatcgacgacacagtcctcctttggggcgggcggaatgacaccgaaggggcctgcaatgtgctctatgcc

SEQ ID NO: 257776 - DNA, 120 bp, Artificial Sequence
  ENSG00000124702_4 (sequence is synthesized)
tttgacgtcaatacgcacaagtggttcacaccccgagtgtcagggacagttcctggggcccgggatggacattcagcctgtgtcctaggcaagatcatgtacatttttgggggctacgag

SEQ ID NO: 257777 - DNA, 120 bp, Artificial Sequence
  ENSG00000124702_5 (sequence is synthesized)
cagcaggcggactgtttttccaatgacattcacaagctagataccagcaccatgacatggactcttatctgtacaaagggcagccctgcacgctggagggacttccactcagccacaatg

SEQ ID NO: 257778 - DNA, 120 bp, Artificial Sequence
  ENSG00000124702_6 (sequence is synthesized)
ctgggaagtcacatgtatgtctttgggggccgtgccgaccgctttgggccattccattccaacaatgagatttactgcaaccgcattcgagtctttgacaccagaactgaggcttggctg

SEQ ID NO: 257779 - DNA, 120 bp, Artificial Sequence
  ENSG00000124702_7 (sequence is synthesized)
ctgtacatctttggtggttataatgcaaggctgaaccggcacttccatgacctctggaagtttaatcctgtgtcctttacctggaaaaagattgaaccgaaggggaaggggccatgtccc

SEQ ID NO: 257780 - DNA, 120 bp, Artificial Sequence
  ENSG00000124702_8 (sequence is synthesized)
cgccggcgccagtgctgctgtattgttggtgacaagattgtcctctttgggggtaccagtccatctcctgaggaaggcctgggagatgaatttgaccttatagatcattctgacttacac

SEQ ID NO: 257781 - DNA, 120 bp, Artificial Sequence
  ENSG00000124702_9 (sequence is synthesized)
attttggactttagccctagtctgaagactctgtgcaaactggccgtgattcagtataacctagaccagtcctgtttgcctcatgatatcaggtgggagctgaatgccatgaccaccaac

SEQ ID NO: 257782 - DNA, 120 bp, Artificial Sequence
  ENSG00000124702_10 (sequence is synthesized)
agcaatatcagtcgccccatcgtctcctcccatgggtaggaggaagtttctgccacctcccctcctgagcctgctgtcatcttcactgcccctgcccatctgtcacccacctgctccttt

SEQ ID NO: 257783 - DNA, 120 bp, Artificial Sequence
  ENSG00000124702_11 (sequence is synthesized)
gacccctggacttggtatacctccatgtggagttgttgggcgagaggtgttctctgtgctgtgaattcagtggggagctgtagcggggtgggggctaggttcctccccccttgggccgag

SEQ ID NO: 257784 - DNA, 120 bp, Artificial Sequence
  ENSG00000124702_12 (sequence is synthesized)
ggccccttccccttggtgctctgtccccatccacctcctttcagctgctcctgggcctcagctctgcccagggccagccaggttctgctgggaagggaagggaatggggagaagggagaa

SEQ ID NO: 257785 - DNA, 120 bp, Artificial Sequence
  ENSG00000124702_13 (sequence is synthesized)
gcaagcagtgtctgagcctcaggagcttccccctccccctttgcctatcccctcccctctgcttgagccttgagccttgactgggagctgaaaggagttgcagctgttggcatgagacct

SEQ ID NO: 257786 - DNA, 120 bp, Artificial Sequence
  ENSG00000124702_14 (sequence is synthesized)
ccttctccccgtcttggggaggtggggaccagcagataaatcccacccttccttgagctgtcgctgtactctgaagttcagccagctcagattttataaaaattaattaaaatctccaaa

SEQ ID NO: 257787 - DNA, 120 bp, Artificial Sequence
  ENSG00000124702_15 (sequence is synthesized)
agaatctctcctacgcccctgcccactcctcagccctctcgtccctcaggaaacgtatggactacaagtcccgaaatgcctccggcacttagctacgactgcacgtgcgcgcacagctgc

SEQ ID NO: 257788 - DNA, 120 bp, Artificial Sequence
  ENSG00000124713_0 (sequence is synthesized)
aggcgcggcgcaggatggtggacagcgtgtaccggacccgctccctgggggtggcggccgaagggctcccggaccagtacgcggacggggaggcggcgcgcgtgtggcagctgtatatcg

SEQ ID NO: 257789 - DNA, 120 bp, Artificial Sequence
  ENSG00000124713_1 (sequence is synthesized)
gagacacccgcagccgcaccgccgagtacaaggcatggctgcttgggctgctgcgccagcacggctgccagcgggtgctcgacgtagcctgtggcactggggtggactccattatgctgg

SEQ ID NO: 257790 - DNA, 120 bp, Artificial Sequence
  ENSG00000124713_2 (sequence is synthesized)
tggaagagggcttcagtgtgacgagtgtggatgccagtgacaagatgctgaagtatgcacttaaggagcgctggaaccggcggcacgagcccgccttcgacaagtgggtcatcgaagaag

SEQ ID NO: 257791 - DNA, 120 bp, Artificial Sequence
  ENSG00000124713_3 (sequence is synthesized)
ccaactggatgactctggacaaagatgtgccccagtcagcagagggtggctttgatgctgtcatctgccttggaaacagtttcgctcacttgccagactgcaaaggggaccagagtgagc

SEQ ID NO: 257792 - DNA, 120 bp, Artificial Sequence
  ENSG00000124713_4 (sequence is synthesized)
atctactataagagtgacttgaccaaggacgtcacaacatcagtgctgatagtgaacaacaaggcccacatggtgaccctggactatacggtgcaggtgccgggggctggccaggatggc

SEQ ID NO: 257793 - DNA, 120 bp, Artificial Sequence
  ENSG00000124713_5 (sequence is synthesized)
tctcctggcttgagtaagttccggctctcctactacccacactgtctggcatccttcacggagctgctccaagcagccttcggaggtaagtgccagcacagcgtcctgggcgacttcaag

SEQ ID NO: 257794 - DNA, 120 bp, Artificial Sequence
  ENSG00000124713_6 (sequence is synthesized)
ccttacaagccaggccaaacctacattccctgctacttcatccacgtgctcaagaggacagactgagtgtggcctcagctcccacaagcctctgcccaggcactgctaggctctgtctgg

SEQ ID NO: 257795 - DNA, 120 bp, Artificial Sequence
  ENSG00000124713_7 (sequence is synthesized)
aagatggggaccagcagccccacaccagggccagcctctagagcagactacagctggggtgcagggatgtgggttccacagacggaagggtaaacaatatagtctttttcagttcctgca

SEQ ID NO: 257796 - DNA, 120 bp, Artificial Sequence
  ENSG00000124721_0 (sequence is synthesized)
gttccgggccgcggaggccggagcagctcccccggggcagcgcaaccgctggggccggcctcagtgggctgagtggtcggggcatcggggcccagagagcggctggtttcgaagtataaa

SEQ ID NO: 257797 - DNA, 120 bp, Artificial Sequence
  ENSG00000124721_1 (sequence is synthesized)
gcattccgcacgacgggggatggagaaggatgctgaagatggcgccccttctgagggagcagaggctcctccctctacggaagaggctgcccctccccgttcagaagaggaagaggcccc

SEQ ID NO: 257798 - DNA, 120 bp, Artificial Sequence
  ENSG00000124721_2 (sequence is synthesized)
gcgccctccgacagtggaggccccggcagaagatggtttctctccttccgcagaagatgctgtttcttctgtggtggattatcgggatctcattccttctgaagaagggatagttcttcc

SEQ ID NO: 257799 - DNA, 120 bp, Artificial Sequence
  ENSG00000124721_3 (sequence is synthesized)
agatgatcatgaagcggatctgaatagagttcgacagaggcttgcaccgcgaccggttcagtcagtgatttcggaagtgctgtccttgccgtcttcccggaggtcctccagataccgccg

SEQ ID NO: 257800 - DNA, 120 bp, Artificial Sequence
  ENSG00000124721_4 (sequence is synthesized)
gagtatgagtggccttcccaatctacaggaaacattaaaagagagacaggcaagatttagagaggcaagggaaagccgaagactgaaaattgacccttcatacaaatatatatttgaaat

SEQ ID NO: 257801 - DNA, 120 bp, Artificial Sequence
  ENSG00000124721_5 (sequence is synthesized)
tctagcagaaaatcttggcctggacatagtaactgttgaagaattaattttggattgcccatctctggaagcatttactaatttttttgcgaaagatggttgtaagacactgaaattttt

SEQ ID NO: 257802 - DNA, 120 bp, Artificial Sequence
  ENSG00000124721_6 (sequence is synthesized)
gtaccaagaaggagatgtacctggtattgaatgtggtcgaactattgctggagcaactaaaggggcaaaaatgatgaaattgtatatagacaatgcagccccggataaactaaaaggact

SEQ ID NO: 257803 - DNA, 120 bp, Artificial Sequence
  ENSG00000124721_7 (sequence is synthesized)
gtgcatattttttgttcgttgccgtaatgatgttgctataaatgttaaaactattcaagaggaagcgctctttactgttctggatgcgtcgaaaggactcttaaatggaattagggatat

SEQ ID NO: 257804 - DNA, 120 bp, Artificial Sequence
  ENSG00000124721_8 (sequence is synthesized)
gttggcaaatatatttctaccagctgttcttgcaacaaacaactggggtgctttaaaccagtccaagcagggagaatctgaaaaacatattttcactgaaaccatcaacagatatctttc

SEQ ID NO: 257805 - DNA, 120 bp, Artificial Sequence
  ENSG00000124721_9 (sequence is synthesized)
atttttagatggtgctagaataagtattgagggaacagtgaagttaaagacaatagacaatgttaatttttccaaactgcacacctttgaagaagtaactgctgcagccagcaactcaga

SEQ ID NO: 257806 - DNA, 120 bp, Artificial Sequence
  ENSG00000124721_10 (sequence is synthesized)
aactgttcatcagctggaggaagtgctgatggtatggtacaaacagatcgaacaggtacttattgagagtgagcagatgagaaaagaagctggtgattcaggtccactcactgaattgga

SEQ ID NO: 257807 - DNA, 120 bp, Artificial Sequence
  ENSG00000124721_11 (sequence is synthesized)
acactggaaacgcatgtcagccaagttcaactatatcattgagcagattaaagggccaagttgtaaggctgtcataaatgtgctaaatgttgcacactccaaactgctaaagaattggcg

SEQ ID NO: 257808 - DNA, 120 bp, Artificial Sequence
  ENSG00000124721_12 (sequence is synthesized)
tgatttggatgcaagaatcactgatacagcaaatgaatccaaagataatgtcagatatttgtatactttggaaaaagtgtgtcaacctctctataaccatgacctagtttccatggcaca

SEQ ID NO: 257809 - DNA, 120 bp, Artificial Sequence
  ENSG00000124721_13 (sequence is synthesized)
tggaatacaaaatttgattaatgccatcagaatgattcacggtgtgtcaaggtattataatacctcagagagaatgacctcattgtttatcaaggtaacaaatcaaatggtaacagcatg

SEQ ID NO: 257810 - DNA, 120 bp, Artificial Sequence
  ENSG00000124721_14 (sequence is synthesized)
taaagcatatattactgatggaggattaaaccatgtatgggatcaggaaacgccagttgtactaaagaaaattcaggactgcatttttctattcaaggaatatcaggcatcttttcataa

SEQ ID NO: 257811 - DNA, 120 bp, Artificial Sequence
  ENSG00000124721_15 (sequence is synthesized)
aacaaggaaactgatttcagaatcctcaggggaaaaatcttttgaggtttcagaaatgtatatatttggaaaatttgaagctttttgcaaaagactggagaagattacagaaatgataac

SEQ ID NO: 257812 - DNA, 120 bp, Artificial Sequence
  ENSG00000124721_16 (sequence is synthesized)
tgttgtgcaaacatattcaaccttgagtaattctaccatagaaggaatagatattatggcaataaaattcagaaatatataccaaggggttaagaaaaagcaatatgacattctggatcc

SEQ ID NO: 257813 - DNA, 120 bp, Artificial Sequence
  ENSG00000124721_17 (sequence is synthesized)
aagaaggacagaatttgacacagatttcttagatttcatgacaaaaatcaatggtttagaggtacaaatacaggcatttatgaacagtagttttgggaaaatcttatcttctcagcaggc

SEQ ID NO: 257814 - DNA, 120 bp, Artificial Sequence
  ENSG00000124721_18 (sequence is synthesized)
tcttcagctacttcaaaggtttcagaagctgaacattccctgtctgggattagaaataaaccacacaatagagcgtattcttcagtactatgtggctgaacttgatgctactaagaagct

SEQ ID NO: 257815 - DNA, 120 bp, Artificial Sequence
  ENSG00000124721_19 (sequence is synthesized)
ttatcattctcagaaagatgacccccctcttgctcgcaacatgccccctatagcaggaaaaatactctgggtgaggcagctctatcgccggataagtgagcccatcaattatttctttaa

SEQ ID NO: 257816 - DNA, 120 bp, Artificial Sequence
  ENSG00000124721_20 (sequence is synthesized)
aaactcagacattttatcaagtccggacggtaaagctgtcatccgtcagtataacaagatctcctatgtgctggtggaattcgaggtggtctatcacacagcctggatcagagagatttc

SEQ ID NO: 257817 - DNA, 120 bp, Artificial Sequence
  ENSG00000124721_21 (sequence is synthesized)
acagttgcattacgctttacaagccacgctttttgtgcgacatccagaaacagggaagttgctggttaatttcgatcccaaaattttggaagttgttcgggaaactaagtgtatgataaa

SEQ ID NO: 257818 - DNA, 120 bp, Artificial Sequence
  ENSG00000124721_22 (sequence is synthesized)
aatgaagttggatgtaccagaacaggcaaagagattgctaaaattggaaagtaaattgaaagcagacaaactgtatttgcagggtcttctgcaatattatgatgagttatgtcaggaagt

SEQ ID NO: 257819 - DNA, 120 bp, Artificial Sequence
  ENSG00000124721_23 (sequence is synthesized)
gccttctgtgtttgtcaatctgatgaccccaaaaatgaaaaaggtggaatctgtgttgaggcaaggactcacagtgttaacatggtcgtctttaacactggaaagcttctttcaagaagt

SEQ ID NO: 257820 - DNA, 120 bp, Artificial Sequence
  ENSG00000124721_24 (sequence is synthesized)
cgaattagttttggatatgttcaatcaacttttaaagaagatcagtgacttgtgtgaaatgcatattgatacagttctgaaggagatagccaaaactgtgttgatttctctgcctgaaag

SEQ ID NO: 257821 - DNA, 120 bp, Artificial Sequence
  ENSG00000124721_25 (sequence is synthesized)
tggtgctaccaaagtagaagatatgttgaccctcaatgagacatacacaaaagaatgggctgacattctaaaccacaaaagtaagcatgtggaagaagctgtcagagaacttatatcaat

SEQ ID NO: 257822 - DNA, 120 bp, Artificial Sequence
  ENSG00000124721_26 (sequence is synthesized)
atttgagcagatttatgaagtgaaatacactgggaaagtaggaaaacagtcagaacagcggaaacacgttgtttttggaagtgaaacaggagagggtgaaaacaatgactatgaagctaa

SEQ ID NO: 257823 - DNA, 120 bp, Artificial Sequence
  ENSG00000124721_27 (sequence is synthesized)
tattgtgaatgagtttgatactcatgataaagaagatgaatttaaaaaggagtgtaaagaggtctttgcttttttctctcatcaattactagacagtcttcaaaaagctacacggttatc

SEQ ID NO: 257824 - DNA, 120 bp, Artificial Sequence
  ENSG00000124721_28 (sequence is synthesized)
tctggacacaatgaaaagaagaatatttgttgcaagcctttatgggcgaaagcagtcagaagatattatttcctttataaaaagtgaagtacatcttgcaattcctaatgtggtgatgat

SEQ ID NO: 257825 - DNA, 120 bp, Artificial Sequence
  ENSG00000124721_29 (sequence is synthesized)
tcctagtttggatgacattcaacaagccattaaccgtatgatccagttaaccctggaggtcagcagaggagtggctcactgggggcaacagcaaatccgtcccatcaagtctgtcattcc

SEQ ID NO: 257826 - DNA, 120 bp, Artificial Sequence
  ENSG00000124721_30 (sequence is synthesized)
cagccccaccactactgacgtgacccatcaaaacacaggaaaactgctgaagaaggaagaaagatcttttgaagaagctattcctgcgaggaagctgaagaatttttacccgggggtagc

SEQ ID NO: 257827 - DNA, 120 bp, Artificial Sequence
  ENSG00000124721_31 (sequence is synthesized)
ggagcacaaggatatttctaagttggtcctgctcctttcttcctctgtaaattccctaagaaaggcagctcatgaggccctgcaggactttcagaagtacaagactctctggacagagga

SEQ ID NO: 257828 - DNA, 120 bp, Artificial Sequence
  ENSG00000124721_32 (sequence is synthesized)
ccgcgatgtgaaagtgaaggaatttttggctaacaacccctctctgactgaaatcagatcagaaattctacactatgctacttttgaacaggagattgatgagttgaagcctattattgt

SEQ ID NO: 257829 - DNA, 120 bp, Artificial Sequence
  ENSG00000124721_33 (sequence is synthesized)
tgtaggagcacttgaattacatacagagccgatgaaattggccttatccatcgaggccaaggcatggaagatgttactctgtcgatatctgaatgaagaatacaaaaagaaaatgtcata

SEQ ID NO: 257830 - DNA, 120 bp, Artificial Sequence
  ENSG00000124721_34 (sequence is synthesized)
catgatagcatttattaatgaatacttgaaaaagttatctagacctattcgtgatttagatgatgtcagatttgcaatggaagccttgtcttgcatacgtgataatgaaattcaaatgga

SEQ ID NO: 257831 - DNA, 120 bp, Artificial Sequence
  ENSG00000124721_35 (sequence is synthesized)
catgactttgggaccaattgaagaagcctatgctattttaaacagatttgaagttgaagtaaccaaagaagaatcagaagcagttgataccttaagatattctttcaacaaattgcagag

SEQ ID NO: 257832 - DNA, 120 bp, Artificial Sequence
  ENSG00000124721_36 (sequence is synthesized)
caaagctgtttcagtacaagaggacctagttcaagtgcagccaaagtttaaaagcaatctacttgagtctgtggaagtttttcgtgaggacgtgataaactttgcagaagcatatgaatt

SEQ ID NO: 257833 - DNA, 120 bp, Artificial Sequence
  ENSG00000124721_37 (sequence is synthesized)
ggaaggacctatggttccaaatataccaccccaagaagctagcaacaggctacagatatttcaggccagtttcgatgatctgtggaggaaatttgttacgtattcatctggtgaacaact

SEQ ID NO: 257834 - DNA, 120 bp, Artificial Sequence
  ENSG00000124721_38 (sequence is synthesized)
ttttggattgcctgtgactgattatgaggttttacacaaaaccagaaaagaactcaacttgctgcagaagctgtatggattgtatgacaccgtaatgagcagtattagtggttattatga

SEQ ID NO: 257835 - DNA, 120 bp, Artificial Sequence
  ENSG00000124721_39 (sequence is synthesized)
aatactttggggagatgtagatattgaaaaaattaatgcagaactgctggaatttcaaaacagatgtcgtaaacttccaaaaggacttaaagattggcaagcttttttggatctcaaaaa

SEQ ID NO: 257836 - DNA, 120 bp, Artificial Sequence
  ENSG00000124721_40 (sequence is synthesized)
gagaattgatgatttcagtgagtcatgtcctctactggaaatgatgaccaataaggccatgaaacagagacactgggatagaatctccgagttaactggaaccccatttgatgtggaatc

SEQ ID NO: 257837 - DNA, 120 bp, Artificial Sequence
  ENSG00000124721_41 (sequence is synthesized)
tgattctttttgccttagaaatatcatggaagcaccactccttaaacataaggatgatattgaggatatttgcatatctgccattaaggagaaggatatcgaagccaagctgactcaggt

SEQ ID NO: 257838 - DNA, 120 bp, Artificial Sequence
  ENSG00000124721_42 (sequence is synthesized)
gattgagaattggaccaaccaaaatctgagttttgcagcatttaagggaaaaggagagctcctgctcaaaggaaccgaatcgggagaaattatcactttgatggaggatagtttaatggt

SEQ ID NO: 257839 - DNA, 120 bp, Artificial Sequence
  ENSG00000124721_43 (sequence is synthesized)
cttagggtctttactcagcaacagatacaatgctccatttaaaaaaaatatccagaattgggtgtataaattgtccacttcctcagatataattgaagagtggctcgtagtacagaacct

SEQ ID NO: 257840 - DNA, 120 bp, Artificial Sequence
  ENSG00000124721_44 (sequence is synthesized)
ttgggtttatcttgaagccgtctttgtaggtggagatattgccaaacagctgcctcaggaagcaaaacgttttcagaatattgacaagtcttggataaaaataatgcagcgagctcatga

SEQ ID NO: 257841 - DNA, 120 bp, Artificial Sequence
  ENSG00000124721_45 (sequence is synthesized)
gaatcccaatgtgattaattgctgtgttggagatgaaaccatgggacaacttttacctcatttacatgagcagttggaagtatgtcagaagtcactcacagggtatttggagaagaaacg

SEQ ID NO: 257842 - DNA, 120 bp, Artificial Sequence
  ENSG00000124721_46 (sequence is synthesized)
attactgtttccaagattcttctttgtatctgatccagttctcctggaaattcttggacaagccagtgattcccacaccatacagccgcatctccctgcagtatctgacaacatcaatga

SEQ ID NO: 257843 - DNA, 120 bp, Artificial Sequence
  ENSG00000124721_47 (sequence is synthesized)
ggtgacatttcatgcaaaagactatgatcgcatcatggccgtcatatcaagagaaggagaaaaaattgttttggataattctgttatggccaaaggtcctgtggagatttggctactgga

SEQ ID NO: 257844 - DNA, 120 bp, Artificial Sequence
  ENSG00000124721_48 (sequence is synthesized)
tttgttaaaaatgcagatgtcatcattacataatataattagatccgctttctatcaaatcagtgattcaggatttcaactcttaccattcctcagccactttccagcacaggttggact

SEQ ID NO: 257845 - DNA, 120 bp, Artificial Sequence
  ENSG00000124721_49 (sequence is synthesized)
tctgggaattcagatgttgtggacacacgattcagaagaggctttacgtaatgcaaaagatgacaggaaaatcatgcaagtgaccaatcagaaatttttggatattctaaatactctcat

SEQ ID NO: 257846 - DNA, 120 bp, Artificial Sequence
  ENSG00000124721_50 (sequence is synthesized)
tagtcagacaacacatgatctaagcaagtttgatagagtgaagttcgagactctaattaccatccatgtgcatcagagagatatttttgatgacttggtaaaaatgcatatcaaatcacc

SEQ ID NO: 257847 - DNA, 120 bp, Artificial Sequence
  ENSG00000124721_51 (sequence is synthesized)
tactgactttgaatggctaaaacagagtagattttattttaaggaagatttggatcaaactgtggtgtctattacagatgttgattttatttaccaaaatgaatttctgggatgtactga

SEQ ID NO: 257848 - DNA, 120 bp, Artificial Sequence
  ENSG00000124721_52 (sequence is synthesized)
tcgtcttgttatcactccattaacagatagatgctatatcacgttagctcaggccttgggcatgaacatgggaggtgctcccgcaggacctgctggcactggcaaaacagaaaccacaaa

SEQ ID NO: 257849 - DNA, 120 bp, Artificial Sequence
  ENSG00000124721_53 (sequence is synthesized)
agacatgggaaggtgtttgggaaaatatgtggtcgtgttcaattgctcagatcaaatggatttcagaggcctaggaaggattttcaaaggtcttgcacagtcgggttcctggggctgttt

SEQ ID NO: 257850 - DNA, 120 bp, Artificial Sequence
  ENSG00000124721_54 (sequence is synthesized)
tgatgagtttaacagaattgaattgcctgtattatcagtggcagcacaacaaatttatattgttttgacagcaagaaaagaaagaaagaaacagttcattttttctgatggtgattgtgt

SEQ ID NO: 257851 - DNA, 120 bp, Artificial Sequence
  ENSG00000124721_55 (sequence is synthesized)
tgatttaaatccagaatttggaatcttcttaacgatgaaccctggatatgctgggcgccaggaactaccagaaaacctaaaaatccagtttagaactgttgctatgatggttcctgatag

SEQ ID NO: 257852 - DNA, 120 bp, Artificial Sequence
  ENSG00000124721_56 (sequence is synthesized)
acagatcattatgagagttaaacttgcaagctgtggttttcttgaaaatgttatcttggctcaaaaattttacgttctttacaaactctgtgaagagcaacttactaaacaggttcatta

SEQ ID NO: 257853 - DNA, 120 bp, Artificial Sequence
  ENSG00000124721_57 (sequence is synthesized)
tgactttggattgagaaatattctgtctgtattgaggactcttggatctcaaaaaagagccagaccagaagatagtgaattaagcattgtcatgagaggactaagagatatgaacctttc

SEQ ID NO: 257854 - DNA, 120 bp, Artificial Sequence
  ENSG00000124721_58 (sequence is synthesized)
caaactggttgatgaagatgaacccctgttcctcagcttaatcaatgacctgttcccaggactgcaactggatagtaatacttatgcagaactgcaaaacgcagtagcccatcaggttca

SEQ ID NO: 257855 - DNA, 120 bp, Artificial Sequence
  ENSG00000124721_59 (sequence is synthesized)
gatagagggtttgattaaccatccaccctggaacctgaaactcgtgcagttatatgagacgtctttggtacggcatggcttgatgactcttgggcccagtggttctggaaagacaaccgt

SEQ ID NO: 257856 - DNA, 120 bp, Artificial Sequence
  ENSG00000124721_60 (sequence is synthesized)
tatcacgattctaatgaaggcgcaaacagaatgcggaaggcctcatagagaaatgcgaatgaatccaaaagccattactgcacctcagatgtttggcagactggacactgctaccaatga

SEQ ID NO: 257857 - DNA, 120 bp, Artificial Sequence
  ENSG00000124721_61 (sequence is synthesized)
ctctgtggagaaaaacattaaaagctaaaaaaggtgaaaacattttcctcattttagatggtcctgtggatgccatctggattgagaacttaaattccgttttggatgacaataaaactc

SEQ ID NO: 257858 - DNA, 120 bp, Artificial Sequence
  ENSG00000124721_62 (sequence is synthesized)
tgacgttagctaatggagatcgcattcccatggcccctagttgtaagcttctgtttgaagtccacaatatcgagaacgcctctcctgccacggtttctaggatgggcatggtctatatca

SEQ ID NO: 257859 - DNA, 120 bp, Artificial Sequence
  ENSG00000124721_63 (sequence is synthesized)
gcagctctgctctcagctggaggccaatcttacaggcatggttgaagaaacgcactgcacaggaagctgctgtattcctgacactgtatgagaaagtctttgaagatacatacacatata

SEQ ID NO: 257860 - DNA, 120 bp, Artificial Sequence
  ENSG00000124721_64 (sequence is synthesized)
tgaagctaaatctcaatcccaaaatgcagctcttggagtgcaactatattgtgcaatctctcaatcttctggaagggttaattccctccaaagaagaaggcggtgtttcctgtgtcgaac

SEQ ID NO: 257861 - DNA, 120 bp, Artificial Sequence
  ENSG00000124721_65 (sequence is synthesized)
atcttcataaattatttgtgtttggcctaatgtggagtttaggagcccttctggaattagaaagcagagaaaagcttgaagccttcttacggcagcatgaaagcaagttggacttaccag

SEQ ID NO: 257862 - DNA, 120 bp, Artificial Sequence
  ENSG00000124721_66 (sequence is synthesized)
aaatacctaaaggctcaaatcaaaccatgtatgagttttatgttactgattatggtgattgggagcactggaataagaaacttcagccttattattatccaactgacagtattccggaat

SEQ ID NO: 257863 - DNA, 120 bp, Artificial Sequence
  ENSG00000124721_67 (sequence is synthesized)
attcatcaattttggttccaaatgttgacaatattagaacaaattttttgatagacaccattgcaaaacaacataaagctgttttgctcacaggagagcagggaactgcaaaaactgtca

SEQ ID NO: 257864 - DNA, 120 bp, Artificial Sequence
  ENSG00000124721_68 (sequence is synthesized)
tggttaaggcctatttgaaaaaatatgatcctgaagtacagctatccaaaagtctaaacttttcatctgccacagaaccaatgatgtttcagagaacaattgaaagctacgtggataagc

SEQ ID NO: 257865 - DNA, 120 bp, Artificial Sequence
  ENSG00000124721_69 (sequence is synthesized)
gaattggaagcacatatgggccaccaggagggagaaaaatgactgtatttattgatgatattaatatgcctgtgattaatgagtggggagatcagataactaatgagattgtgcgacaga

SEQ ID NO: 257866 - DNA, 120 bp, Artificial Sequence
  ENSG00000124721_70 (sequence is synthesized)
tgatggaaatggaaggaatgtacagcttggacaagcctggagacttcactactattgttgatgtgcagctcatagcagcaatgatccaccctggaggtggtcgaaatgatattccacaac

SEQ ID NO: 257867 - DNA, 120 bp, Artificial Sequence
  ENSG00000124721_71 (sequence is synthesized)
gtttaaaaagacaatttactgtgtttaattgtacattgccttcaaatgcttcaatagacaaaatttttggaattattggatgtggatactttgatccttgtagaagtttcaagcctcaaa

SEQ ID NO: 257868 - DNA, 120 bp, Artificial Sequence
  ENSG00000124721_72 (sequence is synthesized)
tatgtgagatgattgtgaatttagtctcagtgggtagagtgctgtggcaatggactaaggtgaagatgctgccaactccttctaaatttcattacatcttcaatcttcgagatctttcca

SEQ ID NO: 257869 - DNA, 120 bp, Artificial Sequence
  ENSG00000124721_73 (sequence is synthesized)
gaatttggcaaggaatgttgaccataaaagctgaggagtgcgcttcaatccctactctcctgtcccttttcaaacacgagtgcagcagagtaattgcagacagatttataactcctgaag

SEQ ID NO: 257870 - DNA, 120 bp, Artificial Sequence
  ENSG00000124721_74 (sequence is synthesized)
atgagcagtggtttaatgcacatcttactcgtgcagttgaagaaaatattggctctgatgcagcgtcgtgtattcttcctgaaccatactttgtggattttcttcgtgagatgccagaac

SEQ ID NO: 257871 - DNA, 120 bp, Artificial Sequence
  ENSG00000124721_75 (sequence is synthesized)
caactggtgatgaacctgaagactctgtgtttgaagtacccaaaatatatgaattgatgccatcctttgactttctggctgaaaaactccagttttaccagagacagttcaatgaaatca

SEQ ID NO: 257872 - DNA, 120 bp, Artificial Sequence
  ENSG00000124721_76 (sequence is synthesized)
ttagaggaacatctcttgatctggtgttttttaaagatgcaatgactcatcttattaagatttcacgaataattcgaacgtcgtgtggaaatgcattgctggtgggtgttggtggttccg

SEQ ID NO: 257873 - DNA, 120 bp, Artificial Sequence
  ENSG00000124721_77 (sequence is synthesized)
gaaaacaaagtctttcaagattggcctcttttattgctggctatcaaatattccagataacattaaccaggtcttacaatgtgactaatctaacagatgatttaaaagctttgtacaaag

SEQ ID NO: 257874 - DNA, 120 bp, Artificial Sequence
  ENSG00000124721_78 (sequence is synthesized)
ttgctggtgctgatggaaaaggcatcactttcatctttactgacagtgaaataaaagatgaggcatttctagaataccttaacaacttgctatcttcaggggagatctccaacttgtttg

SEQ ID NO: 257875 - DNA, 120 bp, Artificial Sequence
  ENSG00000124721_79 (sequence is synthesized)
cacgagatgagatggatgaaatcacccaaggtctgatttcagtgatgaagagggagctacctcgccatcctcctacctttgataatttgtatgaatacttcatttcaagatcaaggaaga

SEQ ID NO: 257876 - DNA, 120 bp, Artificial Sequence
  ENSG00000124721_80 (sequence is synthesized)
acttacatgttgttctctgcttttctccagttggtgagaagttccgtgcccgttctttgaaatttcctggcttgatatcaggttgcactatggactggttcagccgctggccaagggagg

SEQ ID NO: 257877 - DNA, 120 bp, Artificial Sequence
  ENSG00000124721_81 (sequence is synthesized)
ctctgattgctgtggcctcctacttcctttcagactataatattgtctgctctagtgaaattaaaagacaagttgtagaaacaatgggcctgtttcatgacatggtttcagagagctgtg

SEQ ID NO: 257878 - DNA, 120 bp, Artificial Sequence
  ENSG00000124721_82 (sequence is synthesized)
aaagttatttccaaagataccgccgaagagcacatgtgactcccaaatcttacctctcatttataaatggttataaaaacatttatgctgaaaaggtgaagttcattaatgaacaggctg

SEQ ID NO: 257879 - DNA, 120 bp, Artificial Sequence
  ENSG00000124721_83 (sequence is synthesized)
aacgtatgaatattggtcttgataaactaatggaggcaagtgaatctgttgctaaactctctcaggatcttgcagtcaaggagaaggagttggcagtggcttccataaaagcagacgaag

SEQ ID NO: 257880 - DNA, 120 bp, Artificial Sequence
  ENSG00000124721_84 (sequence is synthesized)
tattagcagaagtcacagtaagcgctcaggcttcagccaaaattaaaaatgaagtacaggaggtaaaggacaaagcccaaaaaattgtggatgaaattgatagtgaaaaagtgaaagctg

SEQ ID NO: 257881 - DNA, 120 bp, Artificial Sequence
  ENSG00000124721_85 (sequence is synthesized)
aaagcaagcttgaggcagctaaacctgcactggaagaagcagaagcagccctgaatactatcaagccaaatgatattgccacagtcaggaaacttgcaaaaccaccacatcttattatga

SEQ ID NO: 257882 - DNA, 120 bp, Artificial Sequence
  ENSG00000124721_86 (sequence is synthesized)
gaatcatggactgtgttctgttactatttcaaaagaaaattgaccctgttactatggatccagaaaaatcttgctgtaagccatcatggggagagtcattaaagttgatgagtgcaacag

SEQ ID NO: 257883 - DNA, 120 bp, Artificial Sequence
  ENSG00000124721_87 (sequence is synthesized)
gattcctgtggagccttcagcagttccctaaggacactataaatgaagagactgttgagttactacagccatattttaatatggatgattatacttttgaaagtgccaaaaaagtctgtg

SEQ ID NO: 257884 - DNA, 120 bp, Artificial Sequence
  ENSG00000124721_88 (sequence is synthesized)
ggaatgtggctggtctcctgtcttggacacttgctatggcaatattttatggcatcaatagagaagtgttgcctctgaaggccaacctggccaagcaggaaggccggttagcagttgcta

SEQ ID NO: 257885 - DNA, 120 bp, Artificial Sequence
  ENSG00000124721_89 (sequence is synthesized)
atgctgagttagggaaggcacaagccctgctggatgagaagcaagctgagctggataaagtacaggcaaaatttgatgcagcaatgaatgagaaaatggatttgcttaatgacgctgata

SEQ ID NO: 257886 - DNA, 120 bp, Artificial Sequence
  ENSG00000124721_90 (sequence is synthesized)
cgtgccggaaaaagatgcaggccgcctccactctcatcgatgggctgagtggagaaaaaatccggtggacccagcaaagtaaagaattcaaagctcagattaatagacttgtaggtgata

SEQ ID NO: 257887 - DNA, 120 bp, Artificial Sequence
  ENSG00000124721_91 (sequence is synthesized)
ttctgctgtgcacgggattcctttcctaccttggtcctttcaatcagatatttaggaactatttgcttaaagatcaatgggaaatggagttgagagcacggaaaattcctttcacagaaa

SEQ ID NO: 257888 - DNA, 120 bp, Artificial Sequence
  ENSG00000124721_92 (sequence is synthesized)
acctgaatcttatttcaatgttggtggatcctccaactattggtgagtgggggctacagggattaccaggagatgatctctcaattcagaatggcattattgtgacaaaggccaccagat

SEQ ID NO: 257889 - DNA, 120 bp, Artificial Sequence
  ENSG00000124721_93 (sequence is synthesized)
acccactcctcatagacccacaaactcaaggcaaaacttggattaaatcaaaggaaaaagaaaatgatttacaggtgacatctctgaaccataaatattttcgcacacacttggaggaca

SEQ ID NO: 257890 - DNA, 120 bp, Artificial Sequence
  ENSG00000124721_94 (sequence is synthesized)
gcctttccttgggccgaccccttctcattgaggacattcatgaagagctggatccagccttggataatgtattagaaaagaattttattaaatctggcaccactttcaaggtgaaagtcg

SEQ ID NO: 257891 - DNA, 120 bp, Artificial Sequence
  ENSG00000124721_95 (sequence is synthesized)
gtgataaggaatgtgatatcatggatacatttaaactttacattactacgaagttaccaaatcctgcctttaccccagagattaatgctaaaacgtcagtcattgatttcactgttacaa

SEQ ID NO: 257892 - DNA, 120 bp, Artificial Sequence
  ENSG00000124721_96 (sequence is synthesized)
tgaaaggacttgagaatcagttactaaggagagtcattctaacagagaaacaggagttagaggctgagagggttaaacttttggaggatgttacttttaataagcggaagatgaaagaac

SEQ ID NO: 257893 - DNA, 120 bp, Artificial Sequence
  ENSG00000124721_97 (sequence is synthesized)
ttgaagataacctcctctataaattaagtgctacaaaaggctcattggtagatgacgaatctctcattggtgtacttcgaactaccaagcagacagcagctgaggtaagtgaaaagttgc

SEQ ID NO: 257894 - DNA, 120 bp, Artificial Sequence
  ENSG00000124721_98 (sequence is synthesized)
atgtggctgcagaaactgagatcaagatcaacgcggctcaggaggagttccggcccgcagccacccgcggaagcatcctctacttcctcatcacagagatgagcatggtcaacatcatgt

SEQ ID NO: 257895 - DNA, 120 bp, Artificial Sequence
  ENSG00000124721_99 (sequence is synthesized)
atcagacgtcattggcccagttcttgaagttatttgaccagtccatggccagatctgaaaagtcaccactacctcaaaagagaattacaaatattatcgagtacctgacatatgaagttt

SEQ ID NO: 257896 - DNA, 120 bp, Artificial Sequence
  ENSG00000124721_100 (sequence is synthesized)
ttacatactctgtcagaggcctatacgaaaaccacaaattcctgtttgtactcctcatgaccttaaagattgaccttcagagagggacagttaagcacagagagtttcaagctctcatta

SEQ ID NO: 257897 - DNA, 120 bp, Artificial Sequence
  ENSG00000124721_101 (sequence is synthesized)
aagggggagcagctctggacctgaaagcctgtcctcccaaaccctatcgctggatccttgacatgacttggctgaatcttgtggagctgagtaaacttccacaatttgcagaaattatga

SEQ ID NO: 257898 - DNA, 120 bp, Artificial Sequence
  ENSG00000124721_102 (sequence is synthesized)
accagatatctcgtaatgagaaggggtggaaaagctggtttgataaagatgctccagaggaggaaattatccctgatggatataatgattcactagatacctgccataaacttttactta

SEQ ID NO: 257899 - DNA, 120 bp, Artificial Sequence
  ENSG00000124721_103 (sequence is synthesized)
tcaggtcttggtgcccagaccgtactgtttttcaagcaagaaagtatattgcagattctttggaggagaagtacacagaaccagttatcttaaatctggagaaaacttgggaagaaagtg

SEQ ID NO: 257900 - DNA, 120 bp, Artificial Sequence
  ENSG00000124721_104 (sequence is synthesized)
atacccggacacctctgatatgcttcctgtccatgggatctgaccccaccaatcaaattgatgcattggccaagaaactgaaactggaatgtagaactatctcaatggggcaaggacaag

SEQ ID NO: 257901 - DNA, 120 bp, Artificial Sequence
  ENSG00000124721_105 (sequence is synthesized)
aagtacatgctcgaaagctgattcagatgtcaatgcagcagggtggttgggtattactacaaaattgccaccttggcctggaattcatggaagaattactagagacgctaattaccactg

SEQ ID NO: 257902 - DNA, 120 bp, Artificial Sequence
  ENSG00000124721_106 (sequence is synthesized)
aagccagtgatgattctttccgagtatggataactacggagccccatgatcgatttccaattacattgcttcagacctctctcaaattcactaatgagccaccccaaggtgtacgcgcag

SEQ ID NO: 257903 - DNA, 120 bp, Artificial Sequence
  ENSG00000124721_107 (sequence is synthesized)
gtttgaaaagaacatttgctggaattaatcaagaccttctggacatcagtaatttacccatgtggaagccgatgctttacacagtagcatttttacactccactgtgcaggagcgacgaa

SEQ ID NO: 257904 - DNA, 120 bp, Artificial Sequence
  ENSG00000124721_108 (sequence is synthesized)
aatttggccccttaggatggaatattccctacgaattcaattctgctgacttttcagccagtgttcagtttattcagaatcaccttgatgaatgcgatattaagaaaggtgtatcatgga

SEQ ID NO: 257905 - DNA, 120 bp, Artificial Sequence
  ENSG00000124721_109 (sequence is synthesized)
atacggttcggtacatgatcggagaagtacaatatggaggcagagtgacagatgactttgacaaacgtctacttaattgctttgccagagtctggttcagtgagaagatgtttgaaccgt

SEQ ID NO: 257906 - DNA, 120 bp, Artificial Sequence
  ENSG00000124721_110 (sequence is synthesized)
cattctgcttttatactggatataaaatccccttatgcaaaaccttagaccagtattttgaatacatccagtcactgccatccctagataaccctgaagtctttgggcttcaccctaatg

SEQ ID NO: 257907 - DNA, 120 bp, Artificial Sequence
  ENSG00000124721_111 (sequence is synthesized)
ctgatatcacgtatcagagtaacactgcttctgctgttcttgaaacaattaccaacattcaacccaaagagagtggaggtggtgtgggagagacccgggaggctattgtttatagattat

SEQ ID NO: 257908 - DNA, 120 bp, Artificial Sequence
  ENSG00000124721_112 (sequence is synthesized)
ctgaagatatgctgagtaaactccctcctgattacattcctcatgaggtgaaatctcgtttgataaagatgggccatcttaattcaatgaacatatttcttagacaagaaattgacagaa

SEQ ID NO: 257909 - DNA, 120 bp, Artificial Sequence
  ENSG00000124721_113 (sequence is synthesized)
tgcaaagagtcatttcaatactccgcagtagcctgagtgatctaaaattggccattgaaggaacaatcattatgagtgagaatctgagagatgctctggacaacatgtatgatgctcgta

SEQ ID NO: 257910 - DNA, 120 bp, Artificial Sequence
  ENSG00000124721_114 (sequence is synthesized)
tacctcagctctggaaaagagtgtcttgggattcgtccacactgggcttctggttcactgaacttttggaaagaaatgctcagttttctacgtggatatttgaagggaggcctaatgtgt

SEQ ID NO: 257911 - DNA, 120 bp, Artificial Sequence
  ENSG00000124721_115 (sequence is synthesized)
tttggatgactggtttctttaatccccaaggcttcctcacagcaatgaggcaagaagtgacccgtgcccacaaaggctgggcactggacactgtgaccatccacaatgaagttctgagac

SEQ ID NO: 257912 - DNA, 120 bp, Artificial Sequence
  ENSG00000124721_116 (sequence is synthesized)
agaccaaggaggagatcacgtcaccccctggggaaggtgtgtatatttatgggctctacatggatggagcagcctgggacagacggaatgggaagctcatggaatccacccccaaggtac

SEQ ID NO: 257913 - DNA, 120 bp, Artificial Sequence
  ENSG00000124721_117 (sequence is synthesized)
tcttcacgcagttacccgtgctccacatctttgccattaactccacggcacccaaggaccccaagctgtatgtgtgtcctatttacaagaaacccaggcgaactgatttgaccttcatca

SEQ ID NO: 257914 - DNA, 120 bp, Artificial Sequence
  ENSG00000124721_118 (sequence is synthesized)
ctgtggtatatttacgaacagtgttgtccccggatcactggatcctgagaggagtggcccttttgtgtgacatcaagtaagttcatttccatctgctcagggcaccagaacccacataga

SEQ ID NO: 257915 - DNA, 120 bp, Artificial Sequence
  ENSG00000124721_119 (sequence is synthesized)
cagcctgtgctattgagggactcagtgatgtgtgtgtcttttctccccagtaattccttaattactctttctacattaaaaagttgatgttctaaaattgctagtgcgtgtgtgttttcc

SEQ ID NO: 257916 - DNA, 120 bp, Artificial Sequence
  ENSG00000124721_120 (sequence is synthesized)
tcacatatcaatattcaaaaagataactctaaatgaatgttttttattctgggaaatcatatttcactataattactttttaaagataaaaccctgtttggatgttagaacactttggaa

SEQ ID NO: 257917 - DNA, 120 bp, Artificial Sequence
  ENSG00000124721_121 (sequence is synthesized)
gctctgaattttaaaaatttgaaagtgttgatatgtgacatcctaaaaagagcctagtagttgtaaacttttccctcaagtaggtaccaatttcccttgaataaaatctagccatgtcta

SEQ ID NO: 257918 - DNA, 120 bp, Artificial Sequence
  ENSG00000124721_122 (sequence is synthesized)
atggatgttaccacattcttctcgtgatgctcaatcctggtttttccatttttgtttatcattacctgtgaattttaaacctcagtctagtttcctcctgatattcgcatggaaagctta

SEQ ID NO: 257919 - DNA, 120 bp, Artificial Sequence
  ENSG00000124721_123 (sequence is synthesized)
ttccattttctatagtatatgctccattttaccttcaccaattttttgttcgttttatgatttgggagacacaccttctgatttctaagaatgcatctctagcagtcttggaatttcatg

SEQ ID NO: 257920 - DNA, 120 bp, Artificial Sequence
  ENSG00000124721_124 (sequence is synthesized)
atcaatatgaataggtagtacttaaggagtgacagattgagacagttaaatttccattttcagttaaaggcagactttcatttttcattaacggatcatttcaggcaaagaaggaatatt

SEQ ID NO: 257921 - DNA, 120 bp, Artificial Sequence
  ENSG00000124721_125 (sequence is synthesized)
gaagttttgctgcctgctaagctctcttagcccttcgttaattcacctgtcattgacattgaccatcttgtgttgtattcaatagtctgtcacaccaatttgattgtgcattttgctttg

SEQ ID NO: 257922 - DNA, 120 bp, Artificial Sequence
  ENSG00000124721_126 (sequence is synthesized)
gagaagtccttagtcttttatgtagccacagtggccagacatgcagaagacgttcaatattgctgaatgaactaatgcatttgggatagggttacagaaatgggtgcaagagaaaagggt

SEQ ID NO: 257923 - DNA, 120 bp, Artificial Sequence
  ENSG00000124731_0 (sequence is synthesized)
agcagttggagctggtgcacaggaaggatgaggaagaccaggctctgggggctgctgtggatgctctttgtctcagaactccgagctgcaactaaattaactgaggaaaagtatgaactg

SEQ ID NO: 257924 - DNA, 120 bp, Artificial Sequence
  ENSG00000124731_1 (sequence is synthesized)
aaagaggggcagaccctggatgtgaaatgtgactacacgctagagaagtttgccagcagccagaaagcttggcagataataagggacggagagatgcccaagaccctggcatgcacagag

SEQ ID NO: 257925 - DNA, 120 bp, Artificial Sequence
  ENSG00000124731_2 (sequence is synthesized)
aggccttcaaagaattcccatccagtccaagtggggaggatcatactagaagactaccatgatcatggtttactgcgcgtccgaatggtcaaccttcaagtggaagattctggactgtat

SEQ ID NO: 257926 - DNA, 120 bp, Artificial Sequence
  ENSG00000124731_3 (sequence is synthesized)
cagtgtgtgatctaccagcctcccaaggagcctcacatgctgttcgatcgcatccgcttggtggtgaccaagggtttttcagggacccctggctccaatgagaattctacccagaatgtg

SEQ ID NO: 257927 - DNA, 120 bp, Artificial Sequence
  ENSG00000124731_4 (sequence is synthesized)
tataagattcctcctaccaccactaaggccttgtgcccactctataccagccccagaactgtgacccaagctccacccaagtcaactgccgatgtctccactcctgactctgaaatcaac

SEQ ID NO: 257928 - DNA, 120 bp, Artificial Sequence
  ENSG00000124731_5 (sequence is synthesized)
cttacaaatgtgacagatatcatcagggttccggtgttcaacattgtcattctcctggctggtggattcctgagtaagagcctggtcttctctgtcctgtttgctgtcacgctgaggtca

SEQ ID NO: 257929 - DNA, 120 bp, Artificial Sequence
  ENSG00000124731_6 (sequence is synthesized)
tttgtaccctaggcccacgaacccacgagaatgtcctctgacttccagccacatccatctggcagttgtgccaagggaggagggaggaggtaaaaggcagggagttaataacatgaatta

SEQ ID NO: 257930 - DNA, 120 bp, Artificial Sequence
  ENSG00000124731_7 (sequence is synthesized)
aatctgtaatcaccggctatttctaaagtcagcgtctcaccttcctgcccactgccctcgttcctctaataatcttgggtgggcatttgtgcctcagaaaagaagttacagccccaaaca

SEQ ID NO: 257931 - DNA, 120 bp, Artificial Sequence
  ENSG00000124731_8 (sequence is synthesized)
tgcttggtccttcattccaccagccacttggggttggcatgaaatacagacagctcaatgcttttcaccgtaattctcttgtgggggctgtgacatgcagaaggcacacctgatacttct

SEQ ID NO: 257932 - DNA, 120 bp, Artificial Sequence
  ENSG00000124731_9 (sequence is synthesized)
cctgctcagttttgccctggaccatacaattttggcctgacctggacagagctcccactacagaagcatcctgctcgccccatgctgggacttcctctttctagcatcagacacttgggt

SEQ ID NO: 257933 - DNA, 120 bp, Artificial Sequence
  ENSG00000124731_10 (sequence is synthesized)
ttcatgcttatgtgtggttctttccaacactcccagaaaagggtgttgaagattgtggaacctggagaaataagacatcgtggtgagaaagtgcatccttctcagagaaaagagttaaac

SEQ ID NO: 257934 - DNA, 120 bp, Artificial Sequence
  ENSG00000124731_11 (sequence is synthesized)
tgagtatcttcttctggggaaatactggcaggccgagatgggatccataggagagcaacaacagaccatgtcagacatcctgtgtgcatttatcgctggatcctgaaaatagccccgtga

SEQ ID NO: 257935 - DNA, 120 bp, Artificial Sequence
  ENSG00000124731_12 (sequence is synthesized)
aggcagaaatgtatgtgactagaacgaggccacatgaataagccactgcccactggcaggagtgaaaactgaagcgctccttacctgaaggaccccaaaaccatatagaatagaataacc

SEQ ID NO: 257936 - DNA, 120 bp, Artificial Sequence
  ENSG00000124731_13 (sequence is synthesized)
tgtgtctaaatgcctcttttcctgtatcacacaagggtcagggatggtggagtaaaagctctccccctgggaggcttctggaggctgtccccatgtgcttgcctagttccccactctgcc

SEQ ID NO: 257937 - DNA, 120 bp, Artificial Sequence
  ENSG00000124731_14 (sequence is synthesized)
ctcctcctcttctctcagtctgctcctggaacacctgcctcagtttccatgctctctccagtgccctccccggtgaagcaggtaggtgttcaggccaccacagagacaatctctgtggga

SEQ ID NO: 257938 - DNA, 120 bp, Artificial Sequence
  ENSG00000124731_15 (sequence is synthesized)
gattgtcttgcaatctcccacagatttcaatcaggattttgttatttcctactttgagctttaaagggaaatgggcctcatgggtggggaaaggatggtgggtccttccagcccaattta

SEQ ID NO: 257939 - DNA, 120 bp, Artificial Sequence
  ENSG00000124731_16 (sequence is synthesized)
gtgatgcccagggcagatattatcctcagttcccaagagcaatcatacttttccacacataccgtgtgtctcatgttaggtaaatgtatttttacaatgagcaccacttctgtggaaaaa

SEQ ID NO: 257940 - DNA, 120 bp, Artificial Sequence
  ENSG00000124731_17 (sequence is synthesized)
gttccctgcacggggaggtccagcttccagactgctccatcgcataaggacttccccattcccctaaatgctgctctgtcagaacctgcccaggtaatggtaatgaccctagagagatga

SEQ ID NO: 257941 - DNA, 120 bp, Artificial Sequence
  ENSG00000124731_18 (sequence is synthesized)
tttctgaaccgcaattttgagcccattagaaggtgtgtggtgggcatttatttcatcctgatgctctggtgagaatctttgcagacgcactagatccagaagctgttaatcttggtgcat

SEQ ID NO: 257942 - DNA, 120 bp, Artificial Sequence
  ENSG00000124731_19 (sequence is synthesized)
ttattttcctacctaaaagaaccaagcagctcagaggcagtgactgtacaggatgcagtgtttataataatgctgagcttgctggtctggaaccccacactttagcaatcccagcattgt

SEQ ID NO: 257943 - DNA, 120 bp, Artificial Sequence
  ENSG00000124731_20 (sequence is synthesized)
tcctgtttatgaagttgacaaagtgaccagggcaagggggtattatcattaaatacactctaggagaggcagaacacatgagggcaatgtttttcagaggtctttaggccaccgcatcag

SEQ ID NO: 257944 - DNA, 120 bp, Artificial Sequence
  ENSG00000124731_21 (sequence is synthesized)
attctcctggagcataaagcaaatgctttatgagtccagggcccctgcagacctactgtatactagtatacagctccctcttagtggatctcaagcttgtttccaaaaagtcattacact

SEQ ID NO: 257945 - DNA, 120 bp, Artificial Sequence
  ENSG00000124731_22 (sequence is synthesized)
ccttaccaaagcccatgacacattcatacagattcatccagacataacccactgcatggtccagtgcatgcttgtgtgcttaacttattatagatcaagtgttatttaagtccaacatat

SEQ ID NO: 257946 - DNA, 120 bp, Artificial Sequence
  ENSG00000124731_23 (sequence is synthesized)
taaacgtgactgaaatattatatgcactaaatcggaagacaaatggccgtgctggatactctcccatttgcacttacaggccacgccatgctccatcctccccatcctgcctgggaacct

SEQ ID NO: 257947 - DNA, 120 bp, Artificial Sequence
  ENSG00000124731_24 (sequence is synthesized)
gaccaatgtggctaaaccagcaggctccctggctgccagcttctggctggttgagccaatgggaagcatgagaggagagccgagggtggggagacagtcagatcagggtttctgtcctca

SEQ ID NO: 257948 - DNA, 120 bp, Artificial Sequence
  ENSG00000124731_25 (sequence is synthesized)
gggctccctccctggcaggtggtggcaggagtggctgcattcccctctgaaggctccttcaagcctctcagcaaacagctcccatctccaagtccagccacctgttccatcctctcctct

SEQ ID NO: 257949 - DNA, 120 bp, Artificial Sequence
  ENSG00000124731_26 (sequence is synthesized)
gtaggcccagcagtgggaatgacccaccactattgccagcctcagcatactgaagcaccccttactggattccctaaattctatgcacatgtttattaaatgctcctcaattacccagtt

SEQ ID NO: 257950 - DNA, 120 bp, Artificial Sequence
  ENSG00000124731_27 (sequence is synthesized)
tcccatcctctcccaccactgcacactgggcactttcggataagtcagttcttctcccaggctggaactcaatccttgcattcatgttataaaggaaaacctacgccctgaaagatggca

SEQ ID NO: 257951 - DNA, 120 bp, Artificial Sequence
  ENSG00000124731_28 (sequence is synthesized)
cttacaaatgtgacagatatcatcaggtatagtttccaggtccctgggcccctggtttggacactgagccctttgtttcccagtctgtgtgctgagaggatgtgaaagtgagggaaaggg

SEQ ID NO: 257952 - DNA, 120 bp, Artificial Sequence
  ENSG00000124731_29 (sequence is synthesized)
gagggtggggcaggagaagacttgagtcacattagtctgggtagaaatgtccaggggaagaaggaagtggtgatggagaataggggaggctctcagccaggctgtccttctccccagttc

SEQ ID NO: 257953 - DNA, 120 bp, Artificial Sequence
  ENSG00000124731_30 (sequence is synthesized)
accttctttgtttccttgcaacctgagtattaaagagagggaaatggcatcttccccaagttccagtggagctcatccaaccccaggggcctgatgggcagtgggaaagcactctgagtg

SEQ ID NO: 257954 - DNA, 120 bp, Artificial Sequence
  ENSG00000124731_31 (sequence is synthesized)
tggatctagtgttggcctgactaactgaatgtgactttgggtgagtcaggaaccctctctggctttagcttctttgacaattcagtaggcatggtagaaacccaaagctggaagacattg

SEQ ID NO: 257955 - DNA, 120 bp, Artificial Sequence
  ENSG00000124731_32 (sequence is synthesized)
tccacctaataactctcagcaggagctggagctggggctaaatgcagtattggtttttgccttattgttttttaaataacattgttgcatgtgcccaattatagataaatagaatcagaa

SEQ ID NO: 257956 - DNA, 120 bp, Artificial Sequence
  ENSG00000124731_33 (sequence is synthesized)
tttttgcagatgaggtccctctcagtatttttaataagatgtttaggagatttctaatgtgtaggcaaacttaagaaccactaacttagcaatttcacacctctttacagttattaaatg

SEQ ID NO: 257957 - DNA, 120 bp, Artificial Sequence
  ENSG00000124731_34 (sequence is synthesized)
ttgatttatattagaatgtgtttatcattaaatactgaattatcaggatggaaatacttttccacatcaccactagtctaacatgtcttttttctcatattctcttctagtctttattca

SEQ ID NO: 257958 - DNA, 120 bp, Artificial Sequence
  ENSG00000124731_35 (sequence is synthesized)
tgtttatacatattttaatatggcagtaagtctaattatacatgtttttattcttttccttgctgaaattattctttgatgctgctacctaaatttcataaatataatttcaatgagtgc

SEQ ID NO: 257959 - DNA, 120 bp, Artificial Sequence
  ENSG00000124731_36 (sequence is synthesized)
atatttttctatcaattgggaaagccataacttacataaccattggcctgttcttagacattgatatagtgttgataactctgagataaacatattcttgcagatatatttttcttcttt

SEQ ID NO: 257960 - DNA, 120 bp, Artificial Sequence
  ENSG00000124731_37 (sequence is synthesized)
taaataattaactcgaaatttccatgagataatttaaacactgatatcattttgtatacaaatagcatctaccaatggtcttccaaaagattggaaacaatttgcagtgtgatccattaa

SEQ ID NO: 257961 - DNA, 120 bp, Artificial Sequence
  ENSG00000124731_38 (sequence is synthesized)
gcataaataaagcagtgtcatggcaggcttacagacacggatttagtcttttaaatcattaaatagtgtgagttaaatcacattcctgctaaaacaaatgtgaactggtgcctgctctaa

SEQ ID NO: 257962 - DNA, 120 bp, Artificial Sequence
  ENSG00000124731_39 (sequence is synthesized)
tttctctatgagtgtagactccacctccatatgggtagtggcagtgcctttttccccattatgttgtttggggaacaaagtgctcattaaacttctgtggaataaatcaaacgaatgatc

SEQ ID NO: 257963 - DNA, 120 bp, Artificial Sequence
  ENSG00000124731_40 (sequence is synthesized)
catccatacatccattcacccacccatccacccattcatcatccatctgtccatccatccatccaatgtgtcttcttgcaggtttttcagggacccctggctccaatgagaattctaccc

SEQ ID NO: 257964 - DNA, 120 bp, Artificial Sequence
  ENSG00000124731_41 (sequence is synthesized)
ctgtgtgcttctgaagcagcccctctcacatctttctgtgggcacagaccacctggggatcttatttcaaatgcacactccaactgaatgggtacaggggtctgcatctctattgatctc

SEQ ID NO: 257965 - DNA, 120 bp, Artificial Sequence
  ENSG00000124731_42 (sequence is synthesized)
ccaggtgatgccaatgctgatggtccatggctcccattttgggggagcaagtctccagagctcattttgtgtccccttgtacacaactctactcactggataggagaggggggtttactt

SEQ ID NO: 257966 - DNA, 120 bp, Artificial Sequence
  ENSG00000124731_43 (sequence is synthesized)
atctgtaccctattcatttcagaactgcttgagggaagcacctgtgccttcctgggctctgcacccctagcaaataatgtagtttctgacacaaagtaggccctcaggagatgttgcatt

SEQ ID NO: 257967 - DNA, 120 bp, Artificial Sequence
  ENSG00000124731_44 (sequence is synthesized)
aaggaatgaattatggaagacagaggaaagggaagcaggctcaagttcccagcacctggggaattctaagcctgaggaagacaaggtgcacacacaatatattaataaaagataactttt

SEQ ID NO: 257968 - DNA, 120 bp, Artificial Sequence
  ENSG00000124731_45 (sequence is synthesized)
aaagcaatatgccataagccaggtgaacgaaaggcagagtgaatcaagtaagcctggaattattcttggagaaggttggggcacaagaattggtgaagaacagaaggcaagttcatttcc

SEQ ID NO: 257969 - DNA, 120 bp, Artificial Sequence
  ENSG00000124731_46 (sequence is synthesized)
aacagtacgaatgacaaaaaattcctttcttcttctctctttctgctctccctcacttcctgccctttttttcttctttccttttttcgatttctgactcaggttgactccacagtattt

SEQ ID NO: 257970 - DNA, 120 bp, Artificial Sequence
  ENSG00000124731_47 (sequence is synthesized)
gggaaagaagggccaggtgaggaaaggggcagtggtggtagcatcagcagagctggggttcaggattcccagcagtctgtcttcctcccaggacctctttatctctcatctaaggtccag

SEQ ID NO: 257971 - DNA, 120 bp, Artificial Sequence
  ENSG00000124733_0 (sequence is synthesized)
ggcgcggggagccggggttctggaaggggtgtcttttaggaggtggcagggcctccggttgggcgtttaactaggaagtggcggagcaagttggtggggcctggttcaagataagaaccc

SEQ ID NO: 257972 - DNA, 120 bp, Artificial Sequence
  ENSG00000124733_1 (sequence is synthesized)
cgacttaggagggggaggaacgagaggctggaattggggcggaggggtggaggatgcaggagcctcggggaggagctggttttttgcacgcaggagactacaaggagatgatgagaggat

SEQ ID NO: 257973 - DNA, 120 bp, Artificial Sequence
  ENSG00000124733_2 (sequence is synthesized)
gaagatgggcctggtttcatccgatccctgtcctaccgcctccctgttcttgcagcccctgcccggatggcaacagtagttctaggaggagacaccatgggccctgagcgtatcttcccc

SEQ ID NO: 257974 - DNA, 120 bp, Artificial Sequence
  ENSG00000124733_3 (sequence is synthesized)
aatcagactgaggaactgggacatcagggcccttcagaaggcactggggattggagcagtgaggagcctgaggaagagcaggaggaaacggggtcgggcccagctggctactcctaccag

SEQ ID NO: 257975 - DNA, 120 bp, Artificial Sequence
  ENSG00000124733_4 (sequence is synthesized)
cccctgaaccaagatcctgaacaagaggaggtggaactggcaccagtgggggatggagatgtagttgctgacatccaggatcgaatccaggccctggggcttcatttgccagacccacca

SEQ ID NO: 257976 - DNA, 120 bp, Artificial Sequence
  ENSG00000124733_5 (sequence is synthesized)
ttagagagtgaagatgaagatgaggagggagctacagcgttgaacaaccacagctctattcccatggacccagaacatgtagagctggtgaaaaggacaatggctggagtaagcctgcct

SEQ ID NO: 257977 - DNA, 120 bp, Artificial Sequence
  ENSG00000124733_6 (sequence is synthesized)
gcgccaggggttcctgcctgggctcgggagatatcggatgcccagtgggaagatgtggtacagaaagccctccaagcccggcaggcatcccctgcctggaagtgaccacagtgagagctg

SEQ ID NO: 257978 - DNA, 120 bp, Artificial Sequence
  ENSG00000124733_7 (sequence is synthesized)
ccttatattcctacattccaggccagaaccagcacaggactgaacacatccctggttgtaatgtccatttccatcttccccgtctccctttccacatcaaggcacatcagacttctcaga

SEQ ID NO: 257979 - DNA, 120 bp, Artificial Sequence
  ENSG00000124733_8 (sequence is synthesized)
cactgcctgcgcccctggaacctgggtccggccttcctcagcccctggcccctccaaggtacctataagggacaagagaaggcctgcccagcatagcacaaacaaggaaataaataggtg

SEQ ID NO: 257980 - DNA, 120 bp, Artificial Sequence
  ENSG00000124733_9 (sequence is synthesized)
ttggcaggagccatgcttggggcaccgctccctgcttccttctttctagttttgggaaccaacagcacagaaaagcagtcagccccagggtggtcccttccatgtctgtgaccccagggc

SEQ ID NO: 257981 - DNA, 120 bp, Artificial Sequence
  ENSG00000124733_10 (sequence is synthesized)
tgctgctcaccaaagacagggcacggggtagggtgtttattcatccctccccggccccacttggtccatctgggccctatattcatcagttattgtccacagcctatacttttctccttt

SEQ ID NO: 257982 - DNA, 120 bp, Artificial Sequence
  ENSG00000124733_11 (sequence is synthesized)
tgacctcccttggtcaggcatggggtaagaagaaataatacaaccctatctgccagcacacggctgggactggggggcctatttgtgctgcaggggggttggcttcccttcagctactct

SEQ ID NO: 257983 - DNA, 120 bp, Artificial Sequence
  ENSG00000124733_12 (sequence is synthesized)
gggaccaatggggcttgacataactttggtgagaataatctcctgctgttccctacatgcctctgcaggggagagagaggaggggagatacctggcgttcaaatgaggatgaagggaaga

SEQ ID NO: 257984 - DNA, 120 bp, Artificial Sequence
  ENSG00000124733_13 (sequence is synthesized)
atagaggagcgtatgtattcctgtgtgtacttctcagagcagcctcaggtagctgtgggtgaggagcaggtaggggacaggcatccccaggttgtctgagcactaagcatcttagtgctc

SEQ ID NO: 257985 - DNA, 120 bp, Artificial Sequence
  ENSG00000124733_14 (sequence is synthesized)
agcctgtactagccacagggaggcatgaacaccttttggggagaagagggaccattctgtgggtgtccctgcttcaagtgcccacatccccctcccttgagtagctagagaggcgctgcc

SEQ ID NO: 257986 - DNA, 120 bp, Artificial Sequence
  ENSG00000124733_15 (sequence is synthesized)
ttcccccaagacagccagtagggagcagagtatggagggccagggcagtgtcccagggctgtgtgggctgtggccctgtggtaggaacgtgaggggtcagagagcctcctggctggcagt

SEQ ID NO: 257987 - DNA, 120 bp, Artificial Sequence
  ENSG00000124733_16 (sequence is synthesized)
taggaactcttccgcccgcttgtgcgcctccagtgccttgatggtgtacacgtcctggggcagctccgacttcctccgcagcagcactttctccttcttgatgtcttttagcatctgtgt

SEQ ID NO: 257988 - DNA, 120 bp, Artificial Sequence
  ENSG00000124733_17 (sequence is synthesized)
aatcatggatatggggcggggctggaggactaggcacctctgcacgtcctgccccgccggaagtggaggccgcgggctctgagcggcccctgcccggatggcaacagtagttctaggagg

SEQ ID NO: 257989 - DNA, 120 bp, Artificial Sequence
  ENSG00000124733_18 (sequence is synthesized)
ggtcacaacctactcgtggaggctccactctgtccctggcttggcacaaacttgaagcccccttcccaaacgcccctgcccggatggcaacagtagttctaggaggagacaccatgggcc

SEQ ID NO: 257990 - DNA, 120 bp, Artificial Sequence
  ENSG00000124733_19 (sequence is synthesized)
atggtcacaacctactcgtggaggctccactctgtccctggcttggcacaaacttgaagcccccttcccaaacggtatattctcttgtctctgctctgcttactgccacctctctaagaa

SEQ ID NO: 257991 - DNA, 120 bp, Artificial Sequence
  ENSG00000124733_20 (sequence is synthesized)
tctgtgttctttgaggtggggaaagggatctcaaaatactcacagctattaatagcccagccagcctcaaacagtccattgaaagctggcatgagtgcctcaaagcagaaaagctttcag

SEQ ID NO: 257992 - DNA, 120 bp, Artificial Sequence
  ENSG00000124733_21 (sequence is synthesized)
gcttttagagtggaacaatccccctacccaagatagggcgggactgatccaggacagggacctccatgttaccgcggttggttagcccctcacagggagctcctgtcaagctgagttgtt

SEQ ID NO: 257993 - DNA, 120 bp, Artificial Sequence
  ENSG00000124733_22 (sequence is synthesized)
gtcattggggtcacccagggccccccacaggcacaaggagttcctttgacagctgtgcctggtatgctgccaggacttaagccagaaagcccctgcccggatggcaacagtagttctagg

SEQ ID NO: 257994 - DNA, 120 bp, Artificial Sequence
  ENSG00000124733_23 (sequence is synthesized)
ctctgcacgtcctgccccgccggaagtggaggccgcgggctctgagcgggtgaggcgcgcgggaacaccggcgccgggattcggatgggggcgggtgggggacgctgcagctggggccat

SEQ ID NO: 257995 - DNA, 120 bp, Artificial Sequence
  ENSG00000124733_24 (sequence is synthesized)
aaccgacgccttagtccccaacgagataaacacagccaagctcggttcttccggcgggcagctgtgcgcgcacgtgcagtcgtagctaagtgccggaggcatttcgggacttgtagtcca

SEQ ID NO: 257996 - DNA, 120 bp, Artificial Sequence
  ENSG00000124733_25 (sequence is synthesized)
tacgtttcctgagggacgagagggctgaggagtgggcaggggcgtaggagagattctgcgcatgtgcaaatatgtgtcgagaccgaggaggccactggcccctgcccggatggcaacagt

SEQ ID NO: 257997 - DNA, 120 bp, Artificial Sequence
  ENSG00000124743_0 (sequence is synthesized)
aaaaattgctgcagccgggtcttgtcaggtggctgctggtggctccccaccggattttccttctccctctctctatctccacagatcccttcccaagaggagtctcctgctaaaacttca

SEQ ID NO: 257998 - DNA, 120 bp, Artificial Sequence
  ENSG00000124743_1 (sequence is synthesized)
tcatctcaagttgacctgccacttcacccaaggaggcaagctcttgcctgtaacagtgtatttgccaacatggcacccaaaaagaagattgtcaaaaagaacaaaggagatatcaatgag

SEQ ID NO: 257999 - DNA, 120 bp, Artificial Sequence
  ENSG00000124743_2 (sequence is synthesized)
atgactataatcgtagaagatagccccctaaacaaactgaatgctttgaatgggctcctagagggaggcaatggccttagctgcatttcttctgaactaacagatgcttcttatggcccc

SEQ ID NO: 258000 - DNA, 120 bp, Artificial Sequence
  ENSG00000124743_3 (sequence is synthesized)
aacctcttggaaggtttaagtaaaatgcggcaggagaacttcctatgtgacttagtcattggtaccaaaaccaaatcctttgatgttcataagtcagtcatggcttcatgcagtgagtat

SEQ ID NO: 258001 - DNA, 120 bp, Artificial Sequence
  ENSG00000124743_4 (sequence is synthesized)
ttttacaacatcctaaaaaaagacccgtcaattcagagggtggatctcaatgatatctcaccactaggcctggccactgtcattgcatatgcctacactggaaagctcactctctccttg

SEQ ID NO: 258002 - DNA, 120 bp, Artificial Sequence
  ENSG00000124743_5 (sequence is synthesized)
tatacaataggaagcattatttctgctgctgtttatcttcagatccatactcttgtaaagatgtgcagtgattttctgatacgggagatgagtgttgagaattgcatgtatgttgttaat

SEQ ID NO: 258003 - DNA, 120 bp, Artificial Sequence
  ENSG00000124743_6 (sequence is synthesized)
attgctgaaacatactccctaaaaaatgcaaaagcagcagcccagaaatttattcgggataacttccttgaatttgcagaatcggatcagtttatgaaacttacatttgaacaaattaat

SEQ ID NO: 258004 - DNA, 120 bp, Artificial Sequence
  ENSG00000124743_7 (sequence is synthesized)
gaacttcttatagatgatgacttacagttgccttctgagatagtagcattccagattgcaatgaaatggttagaatttgaccaaaagagagtaaaatacgctgcagatcttttgagcaat

SEQ ID NO: 258005 - DNA, 120 bp, Artificial Sequence
  ENSG00000124743_8 (sequence is synthesized)
attcgctttggtaccatctctgcacaagacctggtcaattatgttcaatccgtaccaagaatgatgcaagatgctgattgtcacagacttctcgtagatgctatgaactaccacttgctt

SEQ ID NO: 258006 - DNA, 120 bp, Artificial Sequence
  ENSG00000124743_9 (sequence is synthesized)
ccatatcatcaaaacacattgcaatctaggcgaacaagaatccgaggtggctgccgagtcctcgtcactgttgggggacgcccaggccttactgagaagtcccttagcagagacatcttg

SEQ ID NO: 258007 - DNA, 120 bp, Artificial Sequence
  ENSG00000124743_10 (sequence is synthesized)
tatagagaccctgaaaatggatggagcaagcttacggaaatgccagccaaaagttttaatcagtgtgtggctgtgatggatggatttctttatgtagccggtggtgaagaccagaatgat

SEQ ID NO: 258008 - DNA, 120 bp, Artificial Sequence
  ENSG00000124743_11 (sequence is synthesized)
gcaagaaatcaagccaagcatgcagtcagcaatttctgcagatacgatccccgcttcaacacctggatacacctggccagcatgaaccagaagcgcacgcacttcagcctgagcgtgttc

SEQ ID NO: 258009 - DNA, 120 bp, Artificial Sequence
  ENSG00000124743_12 (sequence is synthesized)
aacgggctcgtgtacgccgcgggcggccgcaacgcagaaggaagcctggcctcgctggagtgctacgtgccctccaccaatcagtggcagccgaagacgcccctggaggtggcgcgctgc

SEQ ID NO: 258010 - DNA, 120 bp, Artificial Sequence
  ENSG00000124743_13 (sequence is synthesized)
tgccacgctagcgcggtcgccgacggccgcgtgctggtgaccggaggctacatagccaacgcctactcgcgctctgtgtgcgcctacgacccggccagcgactcgtggcaggagctgccg

SEQ ID NO: 258011 - DNA, 120 bp, Artificial Sequence
  ENSG00000124743_14 (sequence is synthesized)
aacctcagcacaccccggggctggcactgcgcggtcacgctgagcgacagagtgtacgtgatgggcggcagccagctggggccgcgcggggagcgcgtggacgtgctcaccgtggagtgc

SEQ ID NO: 258012 - DNA, 120 bp, Artificial Sequence
  ENSG00000124743_15 (sequence is synthesized)
tacagccccgcgaccggccagtggagctacgcggcgccgctgcaggtgggagtgagcactgcgggcgtctcggcgctgcatggccgcgcctacctggtggggggctggaacgagggcgag

SEQ ID NO: 258013 - DNA, 120 bp, Artificial Sequence
  ENSG00000124743_16 (sequence is synthesized)
aagaagtacaagaagtgcatccagtgcttcagccccgagctcaacgagtggacggaggacgacgagctacccgaggccactgtcggcgtgtcctgctgcaccctctcgatgcccaacaac

SEQ ID NO: 258014 - DNA, 120 bp, Artificial Sequence
  ENSG00000124743_17 (sequence is synthesized)
gtgactcgggaatcccgggccagttcggtatcttctgtgccagtcagtatctgagcccaggtagatgcagggacgcaggaagaacacgttatttattcgtagagccacgtggttaacctc

SEQ ID NO: 258015 - DNA, 120 bp, Artificial Sequence
  ENSG00000124743_18 (sequence is synthesized)
tgagttcgcgaaaaggaaaatatttaacatttactacactgattgtattgtaaaatatgtcgaggcacatgtcctgatggctttaaattcctggtatggcataatctacctctttttttt

SEQ ID NO: 258016 - DNA, 120 bp, Artificial Sequence
  ENSG00000124743_19 (sequence is synthesized)
ttttttttttttagcaaaatacagggcaatggccaacaaaagaaacaatttatttcagcggccactgggtggcagacggaattcgttataggcactctcccaaggcggcatgtttcctaa

SEQ ID NO: 258017 - DNA, 120 bp, Artificial Sequence
  ENSG00000124743_20 (sequence is synthesized)
atgtatagcggttacacccacatttgagattttttcctctacacgttagtacacttgaggtttatgtaagtgatttcatgttcaaaagtttattttcctctctctcttttttctttagga

SEQ ID NO: 258018 - DNA, 120 bp, Artificial Sequence
  ENSG00000124743_21 (sequence is synthesized)
agttgaagatattcatatagattttatttatttaaaaatggaaattgtcgatctccataaagacttaagatttaattctgtatttcaacgcaattttccccccatatgtgattgagtaaa

SEQ ID NO: 258019 - DNA, 120 bp, Artificial Sequence
  ENSG00000124743_22 (sequence is synthesized)
ggattttgaaagatatcccatgacaacgtaataaagcttaaaacaagatctgaccgaaaaggaatagggattccacccagggaccctaaatttgataacctttgtgttagcggacattcc

SEQ ID NO: 258020 - DNA, 120 bp, Artificial Sequence
  ENSG00000124743_23 (sequence is synthesized)
tcttcctccatgcctcaggccccagtttattttctaccataaaatcatgctctcaatgaagtaattgatatgaatcatttaatttatagcataaatttaagtcatttggttgtttcaact

SEQ ID NO: 258021 - DNA, 120 bp, Artificial Sequence
  ENSG00000124743_24 (sequence is synthesized)
tatcccttgtcctctattaaagaagaatttcacataccctgggagccttaccctcaccctaaaaactacaccaacctggttaaaggcaaccttggccctaatgtacaccccgcgaagatc

SEQ ID NO: 258022 - DNA, 120 bp, Artificial Sequence
  ENSG00000124743_25 (sequence is synthesized)
accaaataaaactatgtccctaaggaccattagccttaagcttagagagcttgaagtttacacaaccaataacaataattttatttgccccaatcttttatatgataagaatgatagaaa

SEQ ID NO: 258023 - DNA, 120 bp, Artificial Sequence
  ENSG00000124743_26 (sequence is synthesized)
catttggaatttgtagatttggtagtaactggatgaatgggttctcctgttgataaatgccattgtttcccatttaatatggatcctcctgatttcttaagtaaaaatcaagcactcatc

SEQ ID NO: 258024 - DNA, 120 bp, Artificial Sequence
  ENSG00000124743_27 (sequence is synthesized)
tcacgtatataaaaatatatactcattctgtcctatttttattaatctcatctgctccaaatgagctttggatttataatcaaagtgtacccacttgatagcacttttcctatatgtttg

SEQ ID NO: 258025 - DNA, 120 bp, Artificial Sequence
  ENSG00000124743_28 (sequence is synthesized)
ccaagttttggggaaagggaatgactgtagtaaatgatacatattttccttttttataatttatcactttattctttgacagtttatttgttttggagaggaagtggcctatcaattatg

SEQ ID NO: 258026 - DNA, 120 bp, Artificial Sequence
  ENSG00000124743_29 (sequence is synthesized)
ggttatgtgcaattggattttgaaaaataaaacaagctatttaggaattgaacatgagatatatggaaatataatttggtttttgttaatctcatcctctccaccttgtgtagataggtt

SEQ ID NO: 258027 - DNA, 120 bp, Artificial Sequence
  ENSG00000124743_30 (sequence is synthesized)
attgctagttatgatatttatttctaaaatatgttatttgaactgtgaaaagtggttcatatagtacactttgtggaacaattttatatcattaccccgatgaaaagttcaatctctgga

SEQ ID NO: 258028 - DNA, 120 bp, Artificial Sequence
  ENSG00000124743_31 (sequence is synthesized)
tatttaatgataacactcaggtaagggctacaaacgctgtaaattaagaacaagatattattaatgtaaaagcgctgggctgtttccttatcccacacaaagaatcttttaccttggtat

SEQ ID NO: 258029 - DNA, 120 bp, Artificial Sequence
  ENSG00000124743_32 (sequence is synthesized)
atgtggatatggtatattaccttggtgtatgtatatgtgtgtatacgcacacactcatacaactgagaagcctatagtatatggttaatttttggagaaaagggtgttttattgtgggtt

SEQ ID NO: 258030 - DNA, 120 bp, Artificial Sequence
  ENSG00000124743_33 (sequence is synthesized)
acagatcataagtgagtgaatagatgtaattccttgatgcacaccaatagatgtgttcccattgacatcttagaagtattgtatgaagaggaggacctagggcttgaaatgaaatgagaa

SEQ ID NO: 258031 - DNA, 120 bp, Artificial Sequence
  ENSG00000124743_34 (sequence is synthesized)
tcaatcaattgcaacattacatgatggaataatgagaagagatactgaaactagaggatttttcatctatcaaagcttgataaattaggttgtgcaaaaacttggcagtggctttctaga

SEQ ID NO: 258032 - DNA, 120 bp, Artificial Sequence
  ENSG00000124743_35 (sequence is synthesized)
gatgaaactggagacatgttagtgctggataaatcatttaaaattaccatttaatttattttctacattgtttatctgaagactcagaaaatccacatatttgagcttaccagactcttg

SEQ ID NO: 258033 - DNA, 120 bp, Artificial Sequence
  ENSG00000124743_36 (sequence is synthesized)
ggtgcattgctgttctatcttctgcttcaacagttaggaaaataaagaccaatatgaatttggaatgtcagaatttctgacataacacattggcgaggagtatggaatgtaagggtcggt

SEQ ID NO: 258034 - DNA, 120 bp, Artificial Sequence
  ENSG00000124743_37 (sequence is synthesized)
gaaagtttcatatcctggaacatcttgcattgccaattgaaagacataaaagtatgcagaatcaaaataatatgtgtccactttcatgtgtaagtgaaacatattctttacaccaactat

SEQ ID NO: 258035 - DNA, 120 bp, Artificial Sequence
  ENSG00000124743_38 (sequence is synthesized)
tgaagcagttgctcctagaaacctagtttctccagatttcccaagtggaaaatatttagtatgttttaagcttacattcaattactccagagtcttaggacccaaccatatacttccttt

SEQ ID NO: 258036 - DNA, 120 bp, Artificial Sequence
  ENSG00000124743_39 (sequence is synthesized)
tattttttattaaagaaaatgacttgttatttttgtaacggctgagtcctgtgatcaaataaaagcatcagttcaatatatcagggaaattgcatgttacccagcaactgaaataataaa

SEQ ID NO: 258037 - DNA, 120 bp, Artificial Sequence
  ENSG00000124743_40 (sequence is synthesized)
attcaagctctctttttctaaatgggccagagacctgatgagaaagtctccaggaagccaaactttaacatactttgtccatttttagttaggttcttggtgccaagttgtcatccctga

SEQ ID NO: 258038 - DNA, 120 bp, Artificial Sequence
  ENSG00000124743_41 (sequence is synthesized)
tgcattagttgctttcagtgcattgaatgaattttatttttacttcctatgttgtaagaatggttttgaatagaaggtcagtgatggtacagattcgtataattttaaaacatgattaga

SEQ ID NO: 258039 - DNA, 120 bp, Artificial Sequence
  ENSG00000124743_42 (sequence is synthesized)
tggtagtgaagtgttatgagtgaggaggtataattgatgtcatgaggaagtgagtactgaatggttctatgatttaaggtaaagcagcagttgtagtaagtgtattttacaaatacacat

SEQ ID NO: 258040 - DNA, 120 bp, Artificial Sequence
  ENSG00000124743_43 (sequence is synthesized)
gtaaatagaggtttacctggaaatatgtacgttctaaaaggtcaattttttaattttatttttttgctggttatcctggccaagtgtcttcagaactcatccaagttacgagacgaaata

SEQ ID NO: 258041 - DNA, 120 bp, Artificial Sequence
  ENSG00000124743_44 (sequence is synthesized)
aactaaaatcacctcattaatttttttcccttagttacaaccaaatgaatttatgtaatctctgaatgaactacatccctattccagccgctgatgaatatgttctccagcacaaggcag

SEQ ID NO: 258042 - DNA, 120 bp, Artificial Sequence
  ENSG00000124743_45 (sequence is synthesized)
cattaaaaggaaatacttttcagtatttcttttcatgccaaaaaacctacagaataattttccaaacagtcctttattcgtaattataagaattaaacaatctaaaatattaaagattta

SEQ ID NO: 258043 - DNA, 120 bp, Artificial Sequence
  ENSG00000124743_46 (sequence is synthesized)
ccctccagcacattcactgggtaaagaccatttaatttgccctctcagggaatttgaaataaattatttgtcctggatattctttaaaaactttttatttattcagcaaattttggcaaa

SEQ ID NO: 258044 - DNA, 120 bp, Artificial Sequence
  ENSG00000124743_47 (sequence is synthesized)
aaaatttctttctttgcttaaaacattctggtactatataaggaacaacaaactaaaatgtatgtagtgttattttgtaatctcatcactatcaataaagctgcattcaataagacctta

SEQ ID NO: 258045 - DNA, 120 bp, Artificial Sequence
  ENSG00000124749_0 (sequence is synthesized)
gagagcgagtttctgagcctctgagctctgcactggccgctgcagggagaacggactccgggcggagggcagccaatccgtttcagcgcaggtcttgctcgggttgggcttgccactgcc

SEQ ID NO: 258046 - DNA, 120 bp, Artificial Sequence
  ENSG00000124749_1 (sequence is synthesized)
tggaacatacctgtccccctggcgcaacactcagctggctgcgacggcaaccccgagcctggacactgcgccaggaatcctaaaaccaaaatattagaacgaaaacagaaacatggctca

SEQ ID NO: 258047 - DNA, 120 bp, Artificial Sequence
  ENSG00000124749_2 (sequence is synthesized)
ctatattacatttctctgcatggttttggtgctgcttcttcagaattctgtgttagctgaagatggggaagtaagatcaagttgtcgtactgctccgacagatttagttttcatcttaga

SEQ ID NO: 258048 - DNA, 120 bp, Artificial Sequence
  ENSG00000124749_3 (sequence is synthesized)
tggctcttatagtgttggcccagaaaactttgaaatagtgaaaaagtggcttgtcaatatcacaaaaaactttgacatagggccgaagtttattcaagttggagtggttcaatatagtga

SEQ ID NO: 258049 - DNA, 120 bp, Artificial Sequence
  ENSG00000124749_4 (sequence is synthesized)
ctaccctgtgctggagattcctctcggaagctatgattcaggagaacatttgacggcagcagtggaatccatactctacttaggaggaaacacaaagacagggaaggccatccagtttgc

SEQ ID NO: 258050 - DNA, 120 bp, Artificial Sequence
  ENSG00000124749_5 (sequence is synthesized)
gctcgattacctttttgccaagtcctcacgatttctgactaagatagcagtggtacttacggatggcaaatcccaagatgacgtcaaggatgcagctcaagcagcaagagatagtaagat

SEQ ID NO: 258051 - DNA, 120 bp, Artificial Sequence
  ENSG00000124749_6 (sequence is synthesized)
aacattatttgctattggtgttggttcagaaacagaagatgccgaacttagagctattgccaacaagccttcgtctacttatgtgttttatgtggaagactatattgcaatatccaaaat

SEQ ID NO: 258052 - DNA, 120 bp, Artificial Sequence
  ENSG00000124749_7 (sequence is synthesized)
aagggaagtgatgaagcagaaactttgtgaagaatctgtctgtccaacacgaattccagtggcagctcgtgatgaaaggggatttgatattcttttaggtttagatgtaaataaaaaggt

SEQ ID NO: 258053 - DNA, 120 bp, Artificial Sequence
  ENSG00000124749_8 (sequence is synthesized)
taagaaaagaatacagctttcaccaaaaaagataaaaggatatgaagtaacatcaaaagttgatttatcagaactcacaagcaatgttttcccagaaggtcttcctccatcatatgtatt

SEQ ID NO: 258054 - DNA, 120 bp, Artificial Sequence
  ENSG00000124749_9 (sequence is synthesized)
tgtgtctactcaaagatttaaagtcaagaaaatttgggatttatggagaatattaactattgatggaaggccacaaatagcagttaccttaaatggtgtggacaaaatcttattatttac

SEQ ID NO: 258055 - DNA, 120 bp, Artificial Sequence
  ENSG00000124749_10 (sequence is synthesized)
aacaaccagcgtaattaatggctcacaagtggttacctttgctaaccctcaagttaagacgttgtttgatgaaggctggcaccaaattcgtctcttagtaacagaacaagatgtgacttt

SEQ ID NO: 258056 - DNA, 120 bp, Artificial Sequence
  ENSG00000124749_11 (sequence is synthesized)
gtatattgatgaccaacaaattgaaaacaagcccttacatccagttttagggatcttgatcaatgggcaaacccaaattggaaaatattctggaaaagaagaaactgttcagtttgatgt

SEQ ID NO: 258057 - DNA, 120 bp, Artificial Sequence
  ENSG00000124749_12 (sequence is synthesized)
ccaaaagttgcgaatctactgtgacccagaacagaacaaccgggagacagcatgtgagattcctggatttaatggagagtgccttaatggtcccagtgatgtaggttcaactccagctcc

SEQ ID NO: 258058 - DNA, 120 bp, Artificial Sequence
  ENSG00000124749_13 (sequence is synthesized)
ctgtatttgtcctccgggaaaaccaggacttcaaggccccaaaggtgaccctggactgcctgggaaccctggctaccctggacaacctggtcaagatggtaagcctggatatcagggaat

SEQ ID NO: 258059 - DNA, 120 bp, Artificial Sequence
  ENSG00000124749_14 (sequence is synthesized)
tgcagggacaccaggtgttccaggatctccaggaatacaaggagctcgaggactaccaggttacaaaggagaaccagggcgagatggtgacaagggtgatcgtggacttcctggttttcc

SEQ ID NO: 258060 - DNA, 120 bp, Artificial Sequence
  ENSG00000124749_15 (sequence is synthesized)
tgggcttcatggcatgccaggatcaaagggtgaaatgggtgccaaaggagacaaaggatcacctggattttatggcaaaaagggtgcaaaaggtgaaaaggggaatgctggcttccctgg

SEQ ID NO: 258061 - DNA, 120 bp, Artificial Sequence
  ENSG00000124749_16 (sequence is synthesized)
cctccctggacctgctggagaaccaggaagacatggaaaggatggattaatgggtagtcccggtttcaagggagaagcaggatcccctggtgctccggggcaggatggaacacggggaga

SEQ ID NO: 258062 - DNA, 120 bp, Artificial Sequence
  ENSG00000124749_17 (sequence is synthesized)
agggatgcctggtttaatgggaagcaatggctcaccaggccagcctggaacaccgggatctaagggaagcaaaggtgaacctggaattcaagggatgcctggggcttctgggctcaaggg

SEQ ID NO: 258063 - DNA, 120 bp, Artificial Sequence
  ENSG00000124749_18 (sequence is synthesized)
agaaccaggagcaacgggttccccaggagaaccaggatacatgggtttacccgggattcaaggaaaaaagggggacaaaggaaatcaaggtgaaaaaggtattcagggtcaaaagggaga

SEQ ID NO: 258064 - DNA, 120 bp, Artificial Sequence
  ENSG00000124749_19 (sequence is synthesized)
aaatggaagacagggaattccagggcaacagggaattcaaggccatcatggtgcaaaaggagagagaggtgaaaagggagaacctggtgtccgaggtgccattggatcaaaaggagaatc

SEQ ID NO: 258065 - DNA, 120 bp, Artificial Sequence
  ENSG00000124749_20 (sequence is synthesized)
tggggtggatggcttgatggggcccgcaggtcctaaggggcaacctggggatccaggtcctcagggacccccaggtttggatgggaagcccggaagagagttttcagaacaatttattcg

SEQ ID NO: 258066 - DNA, 120 bp, Artificial Sequence
  ENSG00000124749_21 (sequence is synthesized)
acaagtttgcacagatgtaataagagcccagctaccagtcttacttcagagtggaagaattagaaattgtgatcattgcctgtcccaacatggctccccgggtattcctgggccacctgg

SEQ ID NO: 258067 - DNA, 120 bp, Artificial Sequence
  ENSG00000124749_22 (sequence is synthesized)
tccgataggcccagagggtcccagaggattacctggtttgccaggaagagatggtgttcctggattagtgggtgtccctggacgtccaggtgtcagaggattaaaaggcctaccaggaag

SEQ ID NO: 258068 - DNA, 120 bp, Artificial Sequence
  ENSG00000124749_23 (sequence is synthesized)
aaatggggaaaaagggagccaagggtttgggtatcctggagaacaaggtcctcctggtcccccaggtccagagggccctcctggaataagcaaagaaggtcctccaggagacccaggtct

SEQ ID NO: 258069 - DNA, 120 bp, Artificial Sequence
  ENSG00000124749_24 (sequence is synthesized)
ccctggcaaagatggagaccatggaaaacctggaatccaagggcaaccaggccccccaggcatctgcgacccatcactatgttttagtgtaattgccagaagagatccgttcagaaaagg

SEQ ID NO: 258070 - DNA, 120 bp, Artificial Sequence
  ENSG00000124749_25 (sequence is synthesized)
accaaactattagtgtctgatgcctcattcagcagcctaggcatggtgctttttctgtggtcttttgcatctcaggaagataaccaacagtaatcccttgaaaagaaacttaagtacctc

SEQ ID NO: 258071 - DNA, 120 bp, Artificial Sequence
  ENSG00000124749_26 (sequence is synthesized)
ggtgtttttattttttttttcttatggaaaaaaatataaaagatcacatatactgattttaaaggctcctcagtcatttggagcccttggattagcagcattaattaaatctcaagggtt

SEQ ID NO: 258072 - DNA, 120 bp, Artificial Sequence
  ENSG00000124749_27 (sequence is synthesized)
tcttgtaaagtccatttatgttaatcaaagttgaatataaaaatccaccattgcctgttagccagtcagttttagtcactgtgaaatatttcacattcagcctccatgcagtagagattt

SEQ ID NO: 258073 - DNA, 120 bp, Artificial Sequence
  ENSG00000124749_28 (sequence is synthesized)
gagtttaatttcatgtccatgtgactttcatgtttcctatctcatagctcatgctactacataagccaaaacatgtatctcatcattggaagtaagatcagggctgatattcacctggga

SEQ ID NO: 258074 - DNA, 120 bp, Artificial Sequence
  ENSG00000124749_29 (sequence is synthesized)
tagacagtattggtgaactactcatttactacagtgtctcagccttgataaggggcagtggattgcctgttgttcggtgttgtgaatagcacctctgaataagattagagtgtttcttaa

SEQ ID NO: 258075 - DNA, 120 bp, Artificial Sequence
  ENSG00000124749_30 (sequence is synthesized)
ttcatttcaaactctaaaattagattaatggtggtgctaagaaagagtattaattactttgggaatggtcaaaattaacattaaaaacattttagacaaaaagtttcattgtacattcaa

SEQ ID NO: 258076 - DNA, 120 bp, Artificial Sequence
  ENSG00000124749_31 (sequence is synthesized)
agaaaatgtaagtttggaagtactaaaagactattttatacttgttgattaatcggaatgtttgttgtatgccttcattttccatttcacttatatgtgtatgtccatatatgttaattt

SEQ ID NO: 258077 - DNA, 120 bp, Artificial Sequence
  ENSG00000124749_32 (sequence is synthesized)
tcattgtagcaaagctaatggaaataaagctaatgctctagttgaaagaaaaggaaaactcctgaaatcctagaatgtcttgttatttttagctgactgtaaaatattatgaacagtctt

SEQ ID NO: 258078 - DNA, 120 bp, Artificial Sequence
  ENSG00000124749_33 (sequence is synthesized)
tgtgtattgtgcttaatgcttttgtaagaaacagaatttgaaatatttcatccttgtcatgctcaaaattttgttacatgcttgttattcagagtataataaagttttgtacaggcctga

SEQ ID NO: 258079 - DNA, 120 bp, Artificial Sequence
  ENSG00000124749_34 (sequence is synthesized)
tggttctggccaagggagttcatacccactcaaagattatattacgaatttcagatgggagcttctctcaacctgcagccaccacatgagttagctggccgacttctgtgaggttcccag

SEQ ID NO: 258080 - DNA, 120 bp, Artificial Sequence
  ENSG00000124749_35 (sequence is synthesized)
aacactcagctggctgcgacggcaaccccgagcctggacactgcgccaggaaacctcttctggcatccttagtaaatggcagtagagtcatctgggaggtaaaagaagattgtaccatgt

SEQ ID NO: 258081 - DNA, 120 bp, Artificial Sequence
  ENSG00000124749_36 (sequence is synthesized)
cctgtacttctttatgtctcttcacaaactgtggtcttcatattcttcatgattgcatcaggaatcccaggatttcctggaaaccgaggattaatgggccaaaagggagaaattgggcct

SEQ ID NO: 258082 - DNA, 120 bp, Artificial Sequence
  ENSG00000124749_37 (sequence is synthesized)
gattgcatcagtaagggagttattaagagaaaagattgccattttttatatgaatatttaggttcttgggtatttcaaggctcaggtgggaggcaatcatttaattaaattaatttttaa

SEQ ID NO: 258083 - DNA, 120 bp, Artificial Sequence
  ENSG00000124749_38 (sequence is synthesized)
ctaaggtggtgacactgagggcttgtggaactgttgcgctaaatcagaacttatatcatttaacagattttcttgcatgattcattagaatacaagaatgtgttcaaatgaaacatcatt

SEQ ID NO: 258084 - DNA, 120 bp, Artificial Sequence
  ENSG00000124749_39 (sequence is synthesized)
tctcctaagttgtcttttccatattggattattacaaatagcaatattataatatgtatacatttgaaaatatgttatttaccagttaaaattccaattgtgactgtttcttctttaatg

SEQ ID NO: 258085 - DNA, 120 bp, Artificial Sequence
  ENSG00000124749_40 (sequence is synthesized)
ataaagtcttcaattttttataagttaaaaatctattttatttgtttttagggaatcccaggatttcctggaaaccgaggattaatgggccaaaagggagaaattgggcctccaggacag

SEQ ID NO: 258086 - DNA, 120 bp, Artificial Sequence
  ENSG00000124749_41 (sequence is synthesized)
caaagtattcatattgaacttttaatgtaatggaaacagaaaactagaattgcagttctaacccagcattagaacagttagctctgttcacccttcttaggggattaattcagaacaatg

SEQ ID NO: 258087 - DNA, 120 bp, Artificial Sequence
  ENSG00000124749_42 (sequence is synthesized)
cagttacttgcaaacaagtttttcttttgtgaaattcttaaagtaggacttgttattaatatatttttaatgataaagtaccctatatattcgatgtatgtataatatgttcagccccat

SEQ ID NO: 258088 - DNA, 120 bp, Artificial Sequence
  ENSG00000124749_43 (sequence is synthesized)
gctaatagctgtggcatcttttatatacccacatgggtattgtctcctagatgaagaccttagaaaagacatgcagatcagaaaatatgaatgtacaattaagtaatatcctgtaaattc

SEQ ID NO: 258089 - DNA, 120 bp, Artificial Sequence
  ENSG00000124749_44 (sequence is synthesized)
tttgctttctagttctctgctcaccagctagccccattgtgtacagggagccttatggctcacagtgaaaatttgtaggcagggactgggttctactgtgagctgagatccctggagctc

SEQ ID NO: 258090 - DNA, 120 bp, Artificial Sequence
  ENSG00000124749_45 (sequence is synthesized)
tcatgttcatagacacatatgaacagataccttctatgagtaattagtaagataagcaatttttaaaaattccacagaatcctagtctgtgtttagactttatgcttagggcctttcatt

SEQ ID NO: 258091 - DNA, 120 bp, Artificial Sequence
  ENSG00000124749_46 (sequence is synthesized)
actgagctggattggacctcagaggttaactgtttcctgagtgtgttgggattagatcatttcaattaattcatgtgtcttgcccctgtaaaagcctaagactttttcagaataggtggt

SEQ ID NO: 258092 - DNA, 120 bp, Artificial Sequence
  ENSG00000124749_47 (sequence is synthesized)
ggctaactaagggtggagtcaggattgctagtgagattttcttagctccaaaatacttatcttctctgattataaatgaaaccctgaaaagtagggataatttttcatagagataattga

SEQ ID NO: 258093 - DNA, 120 bp, Artificial Sequence
  ENSG00000124749_48 (sequence is synthesized)
aatatttccggctattccttacataccttacatatttacatatgtatacatgcatattcacatccttaacgagcttcatgatgcaattatacctcctgaaatatttaaatagaacttgta

SEQ ID NO: 258094 - DNA, 120 bp, Artificial Sequence
  ENSG00000124749_49 (sequence is synthesized)
aacccctaacactttgatgcagggaagagagttttcagaacaatttattcgacaagtttgcacagatgtaataagaggtaggtatcaaatatagcattttaataacttttctcaaattac

SEQ ID NO: 258095 - DNA, 120 bp, Artificial Sequence
  ENSG00000124749_50 (sequence is synthesized)
aaaagtaatacaaattcttaggacatattgtagaggatataagtgaggtgaagaagaaaacagataacatttataagcctcatctacttttcttcaatgagtatttttataaagatttat

SEQ ID NO: 258096 - DNA, 120 bp, Artificial Sequence
  ENSG00000124749_51 (sequence is synthesized)
ttcataaatatgaatatagtccaccaatttcttttgggggcactttcactttttcccctattttaagcaattgctctaataaaattaccgcacagagcaatgaatatttccatagtcaaa

SEQ ID NO: 258097 - DNA, 120 bp, Artificial Sequence
  ENSG00000124749_52 (sequence is synthesized)
ttcctagaagtgaaattattggccaagaaatatgcacatattcaatgttcgtagttttttctctgtaaactgaaaaaaattaaaaatataattaacaccaactcaccatttaaacataag

SEQ ID NO: 258098 - DNA, 120 bp, Artificial Sequence
  ENSG00000124762_0 (sequence is synthesized)
gaggcgggcccgggcggggcggttgtatatcagggccgcgctgagctgcgccagctgaggtgtgagcagctgccgaagtcagttccttgtggagccggagctgggcgcggattcgccgag

SEQ ID NO: 258099 - DNA, 120 bp, Artificial Sequence
  ENSG00000124762_1 (sequence is synthesized)
gcaccgaggcactcagaggaggcgccatgtcagaaccggctggggatgtccgtcagaacccatgcggcagcaaggcctgccgccgcctcttcggcccagtggacagcgagcagctgagcc

SEQ ID NO: 258100 - DNA, 120 bp, Artificial Sequence
  ENSG00000124762_2 (sequence is synthesized)
gcgactgtgatgcgctaatggcgggctgcatccaggaggcccgtgagcgatggaacttcgactttgtcaccgagacaccactggagggtgacttcgcctgggagcgtgtgcggggccttg

SEQ ID NO: 258101 - DNA, 120 bp, Artificial Sequence
  ENSG00000124762_3 (sequence is synthesized)
gcctgcccaagctctaccttcccacggggccccggcgaggccgggatgagttgggaggaggcaggcggcctggcacctcacctgctctgctgcaggggacagcagaggaagaccatgtgg

SEQ ID NO: 258102 - DNA, 120 bp, Artificial Sequence
  ENSG00000124762_4 (sequence is synthesized)
acctgtcactgtcttgtacccttgtgcctcgctcaggggagcaggctgaagggtccccaggtggacctggagactctcagggtcgaaaacggcggcagaccagcatgacagatttctacc

SEQ ID NO: 258103 - DNA, 120 bp, Artificial Sequence
  ENSG00000124762_5 (sequence is synthesized)
actccaaacgccggctgatcttctccaagaggaagccctaatccgcccacaggaagcctgcagtcctggaagcgcgagggcctcaaaggcccgctctacatcttctgccttagtctcagt

SEQ ID NO: 258104 - DNA, 120 bp, Artificial Sequence
  ENSG00000124762_6 (sequence is synthesized)
ttgtgtgtcttaattattatttgtgttttaatttaaacacctcctcatgtacataccctggccgccccctgccccccagcctctggcattagaattatttaaacaaaaactaggcggttg

SEQ ID NO: 258105 - DNA, 120 bp, Artificial Sequence
  ENSG00000124762_7 (sequence is synthesized)
aatgagaggttcctaagagtgctgggcatttttattttatgaaatactatttaaagcctcctcatcccgtgttctccttttcctctctcccggaggttgggtgggccggcttcatgccag

SEQ ID NO: 258106 - DNA, 120 bp, Artificial Sequence
  ENSG00000124762_8 (sequence is synthesized)
ctacttcctcctccccacttgtccgctgggtggtaccctctggaggggtgtggctccttcccatcgctgtcacaggcggttatgaaattcaccccctttcctggacactcagacctgaat

SEQ ID NO: 258107 - DNA, 120 bp, Artificial Sequence
  ENSG00000124762_9 (sequence is synthesized)
aacagatggcactttgaaggggcctcaccgagtgggggcatcatcaaaaactttggagtcccctcacctcctctaaggttgggcagggtgaccctgaagtgagcacagcctagggctgag

SEQ ID NO: 258108 - DNA, 120 bp, Artificial Sequence
  ENSG00000124762_10 (sequence is synthesized)
ctggggacctggtaccctcctggctcttgatacccccctctgtcttgtgaaggcagggggaaggtggggtcctggagcagaccaccccgcctgccctcatggcccctctgacctgcactg

SEQ ID NO: 258109 - DNA, 120 bp, Artificial Sequence
  ENSG00000124762_11 (sequence is synthesized)
gggagcccgtctcagtgttgagccttttccctctttggctcccctgtaccttttgaggagccccagctaccctttttctccagctgggctctgcaattcccctctgctgctgtccctccc

SEQ ID NO: 258110 - DNA, 120 bp, Artificial Sequence
  ENSG00000124762_12 (sequence is synthesized)
ccttgtcctttcccttcagtaccctctcagctccaggtggctctgaggtgcctgtcccacccccacccccagctcaatggactggaaggggaagggacacacaagaagaagggcacccta

SEQ ID NO: 258111 - DNA, 120 bp, Artificial Sequence
  ENSG00000124762_13 (sequence is synthesized)
gttctacctcaggcagctcaagcagcgaccgccccctcctctagctgtgggggtgagggtcccatgtggtggcacaggcccccttgagtggggttatctctgtgttaggggtatatgatg

SEQ ID NO: 258112 - DNA, 120 bp, Artificial Sequence
  ENSG00000124762_14 (sequence is synthesized)
ggggagtagatctttctaggagggagacactggcccctcaaatcgtccagcgaccttcctcatccaccccatccctccccagttcattgcactttgattagcagcggaacaaggagtcag

SEQ ID NO: 258113 - DNA, 120 bp, Artificial Sequence
  ENSG00000124762_15 (sequence is synthesized)
acattttaagatggtggcagtagaggctatggacagggcatgccacgtgggctcatatggggctgggagtagttgtctttcctggcactaacgttgagcccctggaggcactgaagtgct

SEQ ID NO: 258114 - DNA, 120 bp, Artificial Sequence
  ENSG00000124762_16 (sequence is synthesized)
tagtgtacttggagtattggggtctgaccccaaacaccttccagctcctgtaacatactggcctggactgttttctctcggctccccatgtgtcctggttcccgtttctccacctagact

SEQ ID NO: 258115 - DNA, 120 bp, Artificial Sequence
  ENSG00000124762_17 (sequence is synthesized)
gtaaacctctcgagggcagggaccacaccctgtactgttctgtgtctttcacagctcctcccacaatgctgaatatacagcaggtgctcaataaatgattcttagtgactttacttgtaa

SEQ ID NO: 258116 - DNA, 120 bp, Artificial Sequence
  ENSG00000124762_18 (sequence is synthesized)
gagcagctgccgaagtcagttccttgtggagccggagctgggcgcggattcgccgaggcaccgaggcactcagaggagaaactgcaagttgggacttgtccctaggaaaatccagttgct

SEQ ID NO: 258117 - DNA, 120 bp, Artificial Sequence
  ENSG00000124762_19 (sequence is synthesized)
agctgaggtgtgagcagctgccgaagtcagttccttgtggagccggagctgggcgcggattcgccgaggcaccgaggcactcagaggaggtgagagagcggcggcagacaacaggggacc

SEQ ID NO: 258118 - DNA, 120 bp, Artificial Sequence
  ENSG00000124762_20 (sequence is synthesized)
ccgggccggcggcccagagccgagccaagcgtgcccgcgtgtgtccctgcgtgtccgcgaggatgcgtgttcgcgggtgtgtgctgcgttcacaggtgtttctgcggcaggcgccatgtc

SEQ ID NO: 258119 - DNA, 120 bp, Artificial Sequence
  ENSG00000124762_21 (sequence is synthesized)
cctcccggccctggcgggaatagcacacaggctttcccgcggagtggggctggccggcgcgaaccgccgcggctactcctgggctcatccgagatcaacccctatgccattaccacccct

SEQ ID NO: 258120 - DNA, 120 bp, Artificial Sequence
  ENSG00000124762_22 (sequence is synthesized)
tcaaaggagcactccttaggttcaacagtattcactgagctcttactggaaattaaaatatggctgaagtctaaggcaggaaggccaataaaggaggctatttttaattgtttctaaaac

SEQ ID NO: 258121 - DNA, 120 bp, Artificial Sequence
  ENSG00000124762_23 (sequence is synthesized)
aggaaggggatggtaggagacaggagacctctaaagaccccaggtcaccagacttctctgagccccagtttccccagcagtgtatacgggctatgtggggagtattcaggagacagacaa

SEQ ID NO: 258122 - DNA, 120 bp, Artificial Sequence
  ENSG00000124766_0 (sequence is synthesized)
gctctaagctgcagcaagagaaactgtgtgtgaggggaagaggcctgtttcgctgtcgggtctctagttcttgcacgctctttaagagtctgcactggaggaactcctgccattaccagc

SEQ ID NO: 258123 - DNA, 120 bp, Artificial Sequence
  ENSG00000124766_1 (sequence is synthesized)
tcccttcttgcagaagggagggggaaacatacatttattcatgccagtctgttgcatgcaggctttttggcttcctaccttgcaacaaaataattgcaccaactccttagtgccgattcc

SEQ ID NO: 258124 - DNA, 120 bp, Artificial Sequence
  ENSG00000124766_2 (sequence is synthesized)
gcccacagagagtcctggagccacagtcttttttgctttgcattgtaggagagggactaagtgctagagactatgtcgctttcctgagctaccgagagcgctcgtgaactggaatcaact

SEQ ID NO: 258125 - DNA, 120 bp, Artificial Sequence
  ENSG00000124766_3 (sequence is synthesized)
gcttcagggaaaaagaaaaaaaaaaaaaaaagacttgcctgggaggccgcgagaaacttgcattggaagcttcagcaaccagcattcgagaaactcctctctactttagcacggtctcca

SEQ ID NO: 258126 - DNA, 120 bp, Artificial Sequence
  ENSG00000124766_4 (sequence is synthesized)
gactcagccgagagacagcaaactgcagcgcggtgagagagcgagagagagggagagagagactctccagcctgggaactataactcctctgcgagaggcggagaactccttccccaaat

SEQ ID NO: 258127 - DNA, 120 bp, Artificial Sequence
  ENSG00000124766_5 (sequence is synthesized)
cttttggggacttttctctctttacccacctccgcccctgcgaggagttgaggggccagttcggccgccgcgcgcgtcttcccgttcggcgtgtgcttggcccggggaaccgggagggcc

SEQ ID NO: 258128 - DNA, 120 bp, Artificial Sequence
  ENSG00000124766_6 (sequence is synthesized)
cggcgatcgcgcggcggccgccgcgagggtgtgagcgcgcgtgggcgcccgccgagccgaggccatggtgcagcaaaccaacaatgccgagaacacggaagcgctgctggccggcgagag

SEQ ID NO: 258129 - DNA, 120 bp, Artificial Sequence
  ENSG00000124766_7 (sequence is synthesized)
ctcggactcgggcgccggcctcgagctgggaatcgcctcctcccccacgcccggctccaccgcctccacgggcggcaaggccgacgacccgagctggtgcaagaccccgagtgggcacat

SEQ ID NO: 258130 - DNA, 120 bp, Artificial Sequence
  ENSG00000124766_8 (sequence is synthesized)
caagcgacccatgaacgccttcatggtgtggtcgcagatcgagcggcgcaagatcatggagcagtcgcccgacatgcacaacgccgagatctccaagcggctgggcaaacgctggaagct

SEQ ID NO: 258131 - DNA, 120 bp, Artificial Sequence
  ENSG00000124766_9 (sequence is synthesized)
gctcaaagacagcgacaagatccctttcattcgagaggcggagcggctgcgcctcaagcacatggctgactaccccgactacaagtaccggcccaggaagaaggtgaagtccggcaacgc

SEQ ID NO: 258132 - DNA, 120 bp, Artificial Sequence
  ENSG00000124766_10 (sequence is synthesized)
caactccagctcctcggccgccgcctcctccaagccgggggagaagggagacaaggtcggtggcagtggcgggggcggccatgggggcggcggcggcggcgggagcagcaacgcgggggg

SEQ ID NO: 258133 - DNA, 120 bp, Artificial Sequence
  ENSG00000124766_11 (sequence is synthesized)
aggaggcggcggtgcgagtggcggcggcgccaactccaaaccggcgcagaaaaagagctgcggctccaaagtggcgggcggcgcgggcggtggggttagcaaaccgcacgccaagctcat

SEQ ID NO: 258134 - DNA, 120 bp, Artificial Sequence
  ENSG00000124766_12 (sequence is synthesized)
ggtggggttagcaaaccgcacgccaagctcatcctggcaggcggcggcggcggcgggaaagcagcggctgccgccgccgcctccttcgccgccgaacaggcgggggccgccgccctgctg

SEQ ID NO: 258135 - DNA, 120 bp, Artificial Sequence
  ENSG00000124766_13 (sequence is synthesized)
gtacaaggcgcggactcccagcgcctcggcctccgcctcctcggcagcctcggcctccgcagcgctcgcggccccgggcaagcacctggcggagaagaaggtgaagcgcgtctacctgtt

SEQ ID NO: 258136 - DNA, 120 bp, Artificial Sequence
  ENSG00000124766_14 (sequence is synthesized)
tacctgttcggcggcctgggcacgtcgtcgtcgcccgtgggcggcgtgggcgcgggagccgaccccagcgaccccctgggcctgtacgaggaggagggcgcgggctgctcgcccgacgcg

SEQ ID NO: 258137 - DNA, 120 bp, Artificial Sequence
  ENSG00000124766_15 (sequence is synthesized)
cggccgctcgcccgccgaccaccgcggctacgccagcctgcgcgccgcctcgcccgccccgtccagcgcgccctcgcacgcgtcctcctcggcctcgtcccactcctcctcttcctcctc

SEQ ID NO: 258138 - DNA, 120 bp, Artificial Sequence
  ENSG00000124766_16 (sequence is synthesized)
ctcctcggcctcgtcccactcctcctcttcctcctcctcgggctcctcgtcctccgacgacgagttcgaagacgacctgctcgacctgaaccccagctcaaactttgagagcatgtccct

SEQ ID NO: 258139 - DNA, 120 bp, Artificial Sequence
  ENSG00000124766_17 (sequence is synthesized)
gggcagcttcagttcgtcgtcggcgctcgaccgggacctggattttaacttcgagcccggctccggctcgcacttcgagttcccggactactgcacgcccgaggtgagcgagatgatctc

SEQ ID NO: 258140 - DNA, 120 bp, Artificial Sequence
  ENSG00000124766_18 (sequence is synthesized)
gggagactggctcgagtccagcatctccaacctggttttcacctactgaagggcgcgcaggcagggagaagggccggggggggtaggagaggagaaaaaaaaagtgaaaaaaagaaacga

SEQ ID NO: 258141 - DNA, 120 bp, Artificial Sequence
  ENSG00000124766_19 (sequence is synthesized)
aaaggacagacgaagagtttaaagagaaaagggaaaaaagaaagaaaaagtaagcagggctggcttcgcccgcgttctcgtcgtcggatcaaggagcgcggcggcgttttggacccgcgc

SEQ ID NO: 258142 - DNA, 120 bp, Artificial Sequence
  ENSG00000124766_20 (sequence is synthesized)
gtagacaggggcgacctgtgattgttgttattgatgttgttgttgatggcaaaaaaaaaaaagcgacttcgagtttgctcccctttgcttgaagagaccccctcccccttccaacgagct

SEQ ID NO: 258143 - DNA, 120 bp, Artificial Sequence
  ENSG00000124766_21 (sequence is synthesized)
tccggacttgtctgcacccccagcaagaaggcgagttagttttctagagacttgaaggagtctcccccttcctgcatcaccaccttggttttgttttattttgcttcttggtcaagaaag

SEQ ID NO: 258144 - DNA, 120 bp, Artificial Sequence
  ENSG00000124766_22 (sequence is synthesized)
gaggggagaacccagcgcacccctccccccctttttttaaacgcgtgatgaagacagaaggctccggggtgacgaatttggccgatggcagatgttttgggggaacgccgggactgagag

SEQ ID NO: 258145 - DNA, 120 bp, Artificial Sequence
  ENSG00000124766_23 (sequence is synthesized)
actccacgcaggcgaattcccgtttggggcttttttttcctccctcttttccccttgccccctctgcagccggaggaggagatgttgaggggaggaggccagccagtgtgaccggcgcta

SEQ ID NO: 258146 - DNA, 120 bp, Artificial Sequence
  ENSG00000124766_24 (sequence is synthesized)
ggaaatgacccgagaaccccgttggaagcgcagcagcgggagctaggggcgggggcggaggaggacacgaactggaagggggttcacggtcaaactgaaatggatttgcacgttggggag

SEQ ID NO: 258147 - DNA, 120 bp, Artificial Sequence
  ENSG00000124766_25 (sequence is synthesized)
ctggcggcggcggctgctgggcctccgccttcttttctacgtgaaatcagtgaggtgagacttcccagaccccggaggcgtggaggagaggagactgtttgatgtggtacaggggcagtc

SEQ ID NO: 258148 - DNA, 120 bp, Artificial Sequence
  ENSG00000124766_26 (sequence is synthesized)
agaaaaaaaaagaaaaaaaaaagatttttttcttctcttaatcggaatcgtgatggtgttggattatttcaatggtggggttaatatagcatgttatcctgtctatcttttaaagatttc

SEQ ID NO: 258149 - DNA, 120 bp, Artificial Sequence
  ENSG00000124766_27 (sequence is synthesized)
ttaatatagcatgttatcctgtctatcttttaaagatttctgtataagactgttgagcagtttttaaaatagtgtaggataatataaaaagcagatagatggcgctatgtttgattccta

SEQ ID NO: 258150 - DNA, 120 bp, Artificial Sequence
  ENSG00000124766_28 (sequence is synthesized)
caacgaaattatcaccagctttttttcattcttaactctttaaaggattcaaacgcaactcaaatctgtgctggactttaaaaaaacaattcaggaccaaattttttctcagtgtgtgtg

SEQ ID NO: 258151 - DNA, 120 bp, Artificial Sequence
  ENSG00000124766_29 (sequence is synthesized)
tttattccttataggtgtaaatgagaagacgtgtttttttccttcaccgatgctccatcctcgtatttctttttccttgtaaatgtaatcagatgccattttatatgtggacgtatttat

SEQ ID NO: 258152 - DNA, 120 bp, Artificial Sequence
  ENSG00000124766_30 (sequence is synthesized)
atgtggacgtatttatactggccaaacatattttttcttttgtccctttttttctttcctttctttttacttcctttatttctttattccttccttttcctttttttcttttttttttct

SEQ ID NO: 258153 - DNA, 120 bp, Artificial Sequence
  ENSG00000124766_31 (sequence is synthesized)
ttggtagttgttgttacccacgccattttacgtctccttcactgaagggctagagttttaacttttaattttttatatttaaatgtagacttttgacacttttaaaaaacaaaaaaagac

SEQ ID NO: 258154 - DNA, 120 bp, Artificial Sequence
  ENSG00000124766_32 (sequence is synthesized)
aagagagatgaaaacgtttgattattttctcagtgtatttttgtaaaaaatatataaagggggtgttaatcggtgtaaatcgctgtttggatttcctgattttataacagggcggctggt

SEQ ID NO: 258155 - DNA, 120 bp, Artificial Sequence
  ENSG00000124766_33 (sequence is synthesized)
taatatctcacacagtttaaaaaatcagcccctaatttctccatgtttacacttcaatctgcaggcttcttaaagtgacagtatcccttaacctgccaccagtgtccaccctccggcccc

SEQ ID NO: 258156 - DNA, 120 bp, Artificial Sequence
  ENSG00000124766_34 (sequence is synthesized)
cgtcttgtaaaaaggggaggagaattagccaaacactgtaagcttttaagaaaaacaaagttttaaacgaaatactgctctgtccagaggctttaaaactggtgcaattacagcaaaaag

SEQ ID NO: 258157 - DNA, 120 bp, Artificial Sequence
  ENSG00000124766_35 (sequence is synthesized)
ggattctgtagctttaacttgtaaaccacatcttttttgcactttttttataagcaaaaacgtgccgtttaaaccactggatctatctaaatgccgatttgagttcgcgacactatgtac

SEQ ID NO: 258158 - DNA, 120 bp, Artificial Sequence
  ENSG00000124766_36 (sequence is synthesized)
tgcgtttttcattcttgtatttgactatttaatcctttctacttgtcgctaaatataattgttttagtcttatggcatgatgatagcatatgtgttcaggtttatagctgttgtgtttaa

SEQ ID NO: 258159 - DNA, 120 bp, Artificial Sequence
  ENSG00000124766_37 (sequence is synthesized)
aaattgaaaaaagtggaaaacatctttgtacatttaagtctgtattataataagcaaaaagattgtgtgtatgtatgtttaatataacatgacaggcactaggacgtctgcctttttaag

SEQ ID NO: 258160 - DNA, 120 bp, Artificial Sequence
  ENSG00000124766_38 (sequence is synthesized)
gcagttccgttaagggtttttgtttttaaacttttttttgccatccatcctgtgcaatatgccgtgtagaatatttgtcttaaaattcaaggccacaaaaacaatgtttgggggaaaaaa

SEQ ID NO: 258161 - DNA, 120 bp, Artificial Sequence
  ENSG00000124766_39 (sequence is synthesized)
aagaaaaaatcatgccagctaatcatgtcaagttcactgcctgtcagattgttgatatataccttctgtaaataactttttttgagaaggaaataaaatcagctggaactgaaccctaaa

SEQ ID NO: 258162 - DNA, 120 bp, Artificial Sequence
  ENSG00000124767_0 (sequence is synthesized)
attcctagttaaggcggcacagggccgaggcgtagtgtgggtgactcctccgttccttgggtcccgtcgtctgtgatactgcagcgcagccatggcagaaccgcagcccccgtccggcgg

SEQ ID NO: 258163 - DNA, 120 bp, Artificial Sequence
  ENSG00000124767_1 (sequence is synthesized)
cctcacggacgaggccgccctcagttgctgctccgacgcggaccccagtaccaaggattttctattgcagcagaccatgctacgagtgaaggatcctaagaagtcactggatttttatac

SEQ ID NO: 258164 - DNA, 120 bp, Artificial Sequence
  ENSG00000124767_2 (sequence is synthesized)
tagagttcttggaatgacgctaatccaaaaatgtgattttcccattatgaagttttcactctacttcttggcttatgaggataaaaatgacatccctaaagaaaaagatgaaaaaatagc

SEQ ID NO: 258165 - DNA, 120 bp, Artificial Sequence
  ENSG00000124767_3 (sequence is synthesized)
ctgggcgctctccagaaaagctacacttgagctgacacacaattggggcactgaagatgatgagacccagagttaccacaatggcaattcagaccctcgaggattcggtcatattggaat

SEQ ID NO: 258166 - DNA, 120 bp, Artificial Sequence
  ENSG00000124767_4 (sequence is synthesized)
tgctgttcctgatgtatacagtgcttgtaaaaggtttgaagaactgggagtcaaatttgtgaagaaacctgatgatggtaaaatgaaaggcctggcatttattcaagatcctgatggcta

SEQ ID NO: 258167 - DNA, 120 bp, Artificial Sequence
  ENSG00000124767_5 (sequence is synthesized)
ctggattgaaattttgaatcctaacaaaatggcaaccttaatgtagtgctgtgagaattctcctttgagatttcagaagaaaggaaacaatgtgattcaagatatttacataccagaagc

SEQ ID NO: 258168 - DNA, 120 bp, Artificial Sequence
  ENSG00000124767_6 (sequence is synthesized)
atctaggactgatggatcactgtcccgattcaaattattcttcagtccatttccccttcctatttcagctgttccttttcacctaactgttcagtcattctggttttcaagcagtgcttt

SEQ ID NO: 258169 - DNA, 120 bp, Artificial Sequence
  ENSG00000124767_7 (sequence is synthesized)
atctcatgtccttgaatatagttgtgtaactttattttttaggtaataattagaacagttcccttcagaggctgcatttgccttcttctgccacctaaatattacttcccttcaaatctg

SEQ ID NO: 258170 - DNA, 120 bp, Artificial Sequence
  ENSG00000124767_8 (sequence is synthesized)
aaaggaaagaacactagtgttctttcagtaaagtacaaagtgtttattttacaaaagagtaggtactcttgagagcaattcaaatcatgctgacaaggatactgatagaaaaagtgattt

SEQ ID NO: 258171 - DNA, 120 bp, Artificial Sequence
  ENSG00000124767_9 (sequence is synthesized)
cttcttattataaagtacatttaaagttcaaggactaaccttatttatttgggaaaggggaggaggaaggaaatgatatggtacccagacactgggctaggctgcaactttatctcattt

SEQ ID NO: 258172 - DNA, 120 bp, Artificial Sequence
  ENSG00000124767_10 (sequence is synthesized)
aatactcccagctgtcatgtgagaaagaaagcaggctaggcatgtgaaatcactttcatggattattaatggatttaagagggcatcaatcagctcaactcaagatttcataatcatttt

SEQ ID NO: 258173 - DNA, 120 bp, Artificial Sequence
  ENSG00000124767_11 (sequence is synthesized)
tagtatttagattgtgcctcaaagttgtagtacctcacaatacctccactggtttcctgttgtaaaaaccttcagtgagtttgaccattgtgctcttggctcttgggctggagtaccgtg

SEQ ID NO: 258174 - DNA, 120 bp, Artificial Sequence
  ENSG00000124767_12 (sequence is synthesized)
gtgagggagtaaacactagaagtctttagtacaaaactgctctagggacacctggtgattcctacacaagtgatgtttatatttctcataaagagtcttccctatcccaaggtcttcatg

SEQ ID NO: 258175 - DNA, 120 bp, Artificial Sequence
  ENSG00000124767_13 (sequence is synthesized)
atgccagtagccatatatgataaattatgttcagtgataacttagttatcagaaatcagctcagtggtcttccccgccatgattcacatttgatgagtttttaaaaatcaaagtgatttt

SEQ ID NO: 258176 - DNA, 120 bp, Artificial Sequence
  ENSG00000124767_14 (sequence is synthesized)
gaaaatctctaatggctcagaaaataaaaacatccagtttgtggatgactatatttagatttctctagactctagtggaagacctttggaaaggccatgccaaccgtgcttgtactgcta

SEQ ID NO: 258177 - DNA, 120 bp, Artificial Sequence
  ENSG00000124767_15 (sequence is synthesized)
gaagcactttatgtttcctttttgggtgaaatggatttatgtgagtgctttaaacaaatagcaatacttatagactgaaataaaatgaaacttcaaataagactatgtttaatttgtaaa

SEQ ID NO: 258178 - DNA, 120 bp, Artificial Sequence
  ENSG00000124767_16 (sequence is synthesized)
ggcagtttcatcaatagaatggagatgttcacacctagcccatggagctgttttaagggtttaaatgaaatataaagtacttagcacaataaatgagcattattattattcttattattg

SEQ ID NO: 258179 - DNA, 120 bp, Artificial Sequence
  ENSG00000124767_17 (sequence is synthesized)
ttcttgtccagtacctgtatttactgtctctttagtctcgttaaaatcatactttggccatttgtcctttctatagttgaaaacttaatatttttgtagcaggggttaggccaattatgt

SEQ ID NO: 258180 - DNA, 120 bp, Artificial Sequence
  ENSG00000124767_18 (sequence is synthesized)
aaagtagcatataaacgtggtaagatttcaaagatgttacttgcttttcagaatatctattccctaggacattgtagctatgttttccttccttttgtagcaattggggcactgaagatg

SEQ ID NO: 258181 - DNA, 120 bp, Artificial Sequence
  ENSG00000124772_0 (sequence is synthesized)
agtcgctccggaggaggcgtgaatcgcgcagggattgactaatttggggtggggggtgcggtgggcgatggagcagcctgaggacatggcgtcgctgagcgagttcgactccttggcggg

SEQ ID NO: 258182 - DNA, 120 bp, Artificial Sequence
  ENSG00000124772_1 (sequence is synthesized)
cagcatcccggccaccaaggtggagatcaccgtgtcctgcaggaacctcctggacaaagacatgttttccaagtccgacccactgtgcgtcatgtatacccaagggatggagaacaagca

SEQ ID NO: 258183 - DNA, 120 bp, Artificial Sequence
  ENSG00000124772_2 (sequence is synthesized)
gtggcgggagtttgggcgcaccgaagtcatcgacaacacgctcaatcctgacttcgtgcgcaagttcattgtggattactttttcgaggagaagcagaacctccgttttgatctatacga

SEQ ID NO: 258184 - DNA, 120 bp, Artificial Sequence
  ENSG00000124772_3 (sequence is synthesized)
cgttgactctaagagtcctgatttatccaaacacgatttcctgggccaggccttctgcacccttggagagattgtggggtcccctgggagccgcctggaaaagcccctcacgataggcgc

SEQ ID NO: 258185 - DNA, 120 bp, Artificial Sequence
  ENSG00000124772_4 (sequence is synthesized)
attcagcctgaattccaggacgggcaaacccatgccagctgtgtccaacggtggtgtcccaggaaagaaatgtggcaccatcatcctgtccgctgaggagctcagcaactgtagggatgt

SEQ ID NO: 258186 - DNA, 120 bp, Artificial Sequence
  ENSG00000124772_5 (sequence is synthesized)
cgccaccatgcagttctgtgccaacaagctggacaagaaagatttctttgggaaatctgaccccttcttggtattctacagaagcaacgaggatggaacgttcaccatttgccacaagac

SEQ ID NO: 258187 - DNA, 120 bp, Artificial Sequence
  ENSG00000124772_6 (sequence is synthesized)
cgaggtcatgaagaacaccctaaatccagtctggcaaactttctccattcccgtgagagccctctgcaacggcgactacgatcggaccatcaaggtggaggtgtacgactgggatcggga

SEQ ID NO: 258188 - DNA, 120 bp, Artificial Sequence
  ENSG00000124772_7 (sequence is synthesized)
cggcagccatgacttcattggggagttcaccaccagttaccgggagctggcccgtgggcagagccaattcaacatctatgaggtggtaaacccgaaaaagaaaatgaagaaaaagaaata

SEQ ID NO: 258189 - DNA, 120 bp, Artificial Sequence
  ENSG00000124772_8 (sequence is synthesized)
cgtgaattctggcacagtcaccctgctttcctttgctgtggagtcagagtgcaccttccttgactacatcaaaggagggacccagatcaacttcactgtggccattgatttcactgcctc

SEQ ID NO: 258190 - DNA, 120 bp, Artificial Sequence
  ENSG00000124772_9 (sequence is synthesized)
caatgggaacccctcacagtccacatccctgcactacatgagcccctaccagctgaacgcctacgcgctggcgctgactgccgtcggagagatcatccagcactacgacagtgacaagat

SEQ ID NO: 258191 - DNA, 120 bp, Artificial Sequence
  ENSG00000124772_10 (sequence is synthesized)
gttccctgccctgggcttcggggccaagctgcccccggatggcagagtgtcccacgagttcccactgaatggcaaccaggagaacccctcatgctgtggcatcgacggcatcctggaggc

SEQ ID NO: 258192 - DNA, 120 bp, Artificial Sequence
  ENSG00000124772_11 (sequence is synthesized)
ctaccaccgcagcctgcgcactgtgcagctgtacggccccaccaactttgcccccgtggtcacccacgtggccaggaatgcagcggccgtgcaggatggctcccagtactcggtgctgct

SEQ ID NO: 258193 - DNA, 120 bp, Artificial Sequence
  ENSG00000124772_12 (sequence is synthesized)
catcattactgatggggtcatctcggacatggcgcagaccaaggaggccattgtcaacgctgccaagctccccatgtccatcattatcgtcggcgtgggccaggcagagttcgacgccat

SEQ ID NO: 258194 - DNA, 120 bp, Artificial Sequence
  ENSG00000124772_13 (sequence is synthesized)
aggcaaccacgtgctgagcatggcccgcctggcccgagacgtgctggcagagatccctgaccaactggtgtcctacatgaaggcacagggcattcgcccgcgtcccccacccgcagcacc

SEQ ID NO: 258195 - DNA, 120 bp, Artificial Sequence
  ENSG00000124772_14 (sequence is synthesized)
aacccactcgccctcgcagtccccagcccgcacgccccctgcgtcccccctgcacacgcacatctgaacctggtctcagcaggcaggtggctggggcctgggagaggccaggtgaatggg

SEQ ID NO: 258196 - DNA, 120 bp, Artificial Sequence
  ENSG00000124772_15 (sequence is synthesized)
aggccagggccccagactccccgaagttggcctgcccggcctttgggacatctgtgtgcctgggaggctgccagggggtggggcttctgaagacccctcctcaatttcttggcctcactt

SEQ ID NO: 258197 - DNA, 120 bp, Artificial Sequence
  ENSG00000124772_16 (sequence is synthesized)
attgcccaaacccagggagttaggggggtacgggtgaaagaggggtacacagggacccagcccttctcttcttccccaatacctggctctaacccagccaggaaggtgtaaacaataagg

SEQ ID NO: 258198 - DNA, 120 bp, Artificial Sequence
  ENSG00000124772_17 (sequence is synthesized)
gtgattggggtccctgtcgcccacccccggcaatcctatttgcttacctgtcaccctgaagcctgggcttggcctcctccagccccccatctccgtcccatcctcccatggtgtctactc

SEQ ID NO: 258199 - DNA, 120 bp, Artificial Sequence
  ENSG00000124772_18 (sequence is synthesized)
ctgtccctgagccccgccctgtggtctatcctgtgcccgatttccagtgaaccccatgaagctgatgggtttgcaggaaggcctgaacatgtgcaccctcccagggacactggatgcgct

SEQ ID NO: 258200 - DNA, 120 bp, Artificial Sequence
  ENSG00000124772_19 (sequence is synthesized)
gggagccccggggaccccatggggtgctgtaatcatggaccgtaggccatgtgatgggcctgaagtggaggctgctcagcacagagccctttctggtgcctctcgaactcagtacgatgc

SEQ ID NO: 258201 - DNA, 120 bp, Artificial Sequence
  ENSG00000124772_20 (sequence is synthesized)
aagttctagacacacagatggcctgtggaggcctctccctggtgtgggcccacaggtacttccatggttgactcctggcttcaggaatcccttcctccctccagaggcttcccagggccc

SEQ ID NO: 258202 - DNA, 120 bp, Artificial Sequence
  ENSG00000124772_21 (sequence is synthesized)
tcggtgcccacgcctctgcccatctggaggcctgagtaaggagtggctcagccccacgttcccacactgctcctgctctttgccctgtatcccatgaggctaggagacaggagtcctggg

SEQ ID NO: 258203 - DNA, 120 bp, Artificial Sequence
  ENSG00000124772_22 (sequence is synthesized)
tttgagccctgcctccccccactgcctaatgtgggaacccaagcaaggcccttctaccttttgggcctcagtttccatgtctgtaccacaagagggttgaccagatggccccaggttttc

SEQ ID NO: 258204 - DNA, 120 bp, Artificial Sequence
  ENSG00000124772_23 (sequence is synthesized)
ctttaggtctgacatcctgagggtcattcatcccatgcccagttccccccatcctactcctaacagatgtgaccctacttgaggccgccttggcttttgggtcaccctgtctcatcccat

SEQ ID NO: 258205 - DNA, 120 bp, Artificial Sequence
  ENSG00000124772_24 (sequence is synthesized)
caccccaaacataccctagtccttcagcctggggctctggcatctgagcccgagctcctgcccctgctgtgggaaaggtggggaagaaggggatctccctcccgggcccacccagctgcc

SEQ ID NO: 258206 - DNA, 120 bp, Artificial Sequence
  ENSG00000124772_25 (sequence is synthesized)
cagcctttgcccactcggggagcagatcatgcatgccaatccctgttgccgcatggagctcctcagcccactgacctctccgtgcctggtgcaggccaggcccccgtcttccgcctgcct

SEQ ID NO: 258207 - DNA, 120 bp, Artificial Sequence
  ENSG00000124772_26 (sequence is synthesized)
ctgcttccccgtcatgcatggtggtggtgtttctacggtgtctggttctgtgcccgtctctgagacagtctctgtgtggaatttgccttaaactgaagtaaatttggttcttttagtaaa

SEQ ID NO: 258208 - DNA, 120 bp, Artificial Sequence
  ENSG00000124772_27 (sequence is synthesized)
gaagagaccacggtaaagatcagctgacggcctctgtgggaacaaagacagggaaaggggaaatgagttcaccagaaaccaacaggcagcacaggaggtggtaaacccgaaaaagaaaat

SEQ ID NO: 258209 - DNA, 120 bp, Artificial Sequence
  ENSG00000124772_28 (sequence is synthesized)
gcgcagaccaaggaggccattgtcaacgcgcagcctggtttcctttgctctttatctctgagtgccctccctctccctacccccttttctgtgtttctctgtctctccatgttcactctc

SEQ ID NO: 258210 - DNA, 120 bp, Artificial Sequence
  ENSG00000124772_29 (sequence is synthesized)
ccatttctttcctgcccaccccttcctgtcctacccctgatttctccttccttttaactgggtcccaattgggtccaacctttccctgccccccatgctgtctcccaggctgccaagctc

SEQ ID NO: 258211 - DNA, 120 bp, Artificial Sequence
  ENSG00000124772_30 (sequence is synthesized)
gaggcccgtgcgtctgtgtgtgtgcaggggctgagcgtgggaatcagacatccaagagagatggggtggggaggggtggggcagatggagcaacagccaggggagagagttgacttgcag

SEQ ID NO: 258212 - DNA, 120 bp, Artificial Sequence
  ENSG00000124772_31 (sequence is synthesized)
accacacaacaggcgctggctgtatctagcatgaggaatcgcagagacatccacgggacttcctgcaggaaggaagaggaagagaagtcgtatttattgggcccctaccctgggaaattc

SEQ ID NO: 258213 - DNA, 120 bp, Artificial Sequence
  ENSG00000124772_32 (sequence is synthesized)
cccacgttggtgcttttcacaggttgttgccctgagaggcagatattatcatcccctagtcatgaaagaggaaaccaaggctgcaagcaggaaagtgactcagccaaggtcacacagcta

SEQ ID NO: 258214 - DNA, 120 bp, Artificial Sequence
  ENSG00000124772_33 (sequence is synthesized)
gaaagtggtagagatgggactcaacatgacatctcactccagagctggcagctgctacgggcgctgcccctgcttaaccgtgaccttcctgggatgacacgccggcctagtggcttctcg

SEQ ID NO: 258215 - DNA, 120 bp, Artificial Sequence
  ENSG00000124772_34 (sequence is synthesized)
gggctggtcttgaggacattcatacgcttcttcagcaaatacttactgagtgctactgtgtgccaggcactattctaggcacatcagatacagctggaaacaagacagacccaaatccct

SEQ ID NO: 258216 - DNA, 120 bp, Artificial Sequence
  ENSG00000124772_35 (sequence is synthesized)
aaaaaaacacacacacacacacacacatgcctgtgtgtgtcagttgattatgagagctatggaaaaagtataaagggtaaagggacaggcaatggaggaagtattgaggatactggggaa

SEQ ID NO: 258217 - DNA, 120 bp, Artificial Sequence
  ENSG00000124772_36 (sequence is synthesized)
acaggcaatggaggaagtattgaggatactggggaaagggaattccagcattcctgctgtagagaacagcacatgcaaaggccctgaggtggagctcacagtgcatttctagaacaagcc

SEQ ID NO: 258218 - DNA, 120 bp, Artificial Sequence
  ENSG00000124772_37 (sequence is synthesized)
acccagattcatcctctctgtgttccttcctcactctagaggcccatggctagtgcagccaagcctggtcatttgagtcaggcagactgtatctccagacctagaagaggttttcaggag

SEQ ID NO: 258219 - DNA, 120 bp, Artificial Sequence
  ENSG00000124772_38 (sequence is synthesized)
ctctggggttcctctgagaagcctcattttctccgtctgtaaagtaggactaataaatcatccccaccttgccactgcacagggcagctgtgacagacacatgggagatgcaggcttgtg

SEQ ID NO: 258220 - DNA, 120 bp, Artificial Sequence
  ENSG00000124772_39 (sequence is synthesized)
aactgtaaaattactctgctcattcaaaggggactgaacaccacttctttgattgtaactgcttcacagactggggcttggagtcatatttcctttgtccaaggctgcggtgtttcttag

SEQ ID NO: 258221 - DNA, 120 bp, Artificial Sequence
  ENSG00000124772_40 (sequence is synthesized)
tggagaggctgtcagcatttgggcaggaaaattcttcatctcacaggatgtttagcacccctggctgctgcccatagctaccagtagagccccagtcattatgagaacccccaaaattct

SEQ ID NO: 258222 - DNA, 120 bp, Artificial Sequence
  ENSG00000124772_41 (sequence is synthesized)
cccacgccttcctaaattcccctagggaagacagcaccttccccagctgggaataaaaaggttcaaaaaccactgatctcatccagccttcttactttagagacgaagaaactgtggcct

SEQ ID NO: 258223 - DNA, 120 bp, Artificial Sequence
  ENSG00000124772_42 (sequence is synthesized)
agagagggcatgcgatttgtcccaggtcacacagtgagctggagacagagcgggcctaggcccaggtctcttgactttccttttactccagcatttccccatcttcatcgcgaaaaatca

SEQ ID NO: 258224 - DNA, 120 bp, Artificial Sequence
  ENSG00000124772_43 (sequence is synthesized)
cccgggatgcagaaagcttgctgaaatacagacgcccaggccagttccctgggattccactttaggaggcccaggaatctgtgtttagtgcttttcatcccttacttatggtgtgcagaa

SEQ ID NO: 258225 - DNA, 120 bp, Artificial Sequence
  ENSG00000124772_44 (sequence is synthesized)
tcccctggggatcttgtgaaaatgccaagaatctgcatttctgcatttctacctggcatcgaggtgatgctgacgctctggtctagggacactaccctttgaataggggaaagtctgctt

SEQ ID NO: 258226 - DNA, 120 bp, Artificial Sequence
  ENSG00000124772_45 (sequence is synthesized)
tcaccctgcgagcccctgggtgaacccatatggtcagggcagttagggcattgcttcatcctgggggttggaatggggagtggtcaactgtgtctgcagattagacttacgtgaagagct

SEQ ID NO: 258227 - DNA, 120 bp, Artificial Sequence
  ENSG00000124772_46 (sequence is synthesized)
aaacccatgccagctgtgtccaacggaagtggtctttggatggaaagtttgagaaccactggtctggaagcctccggtggtgtcccaggaaagaaatgtggcaccatcatcctgtccgct

SEQ ID NO: 258228 - DNA, 120 bp, Artificial Sequence
  ENSG00000124780_0 (sequence is synthesized)
aggcgtttgcgagaggagatacgagctggacgcctggcccttccctcccaccgggtcctagtccaccgctcccggcgccggctccccgcctctcccgctatgtaccgaccgcgagcccgg

SEQ ID NO: 258229 - DNA, 120 bp, Artificial Sequence
  ENSG00000124780_1 (sequence is synthesized)
gcggctcccgagggcagggtccggggctgcgcggtgcccagcaccgtgctcctgctgctcgcctacctggcttacctggcgctgggcaccggcgtgttctggacgctggagggccgcgcg

SEQ ID NO: 258230 - DNA, 120 bp, Artificial Sequence
  ENSG00000124780_2 (sequence is synthesized)
gcgcaggactccagccgcagcttccagcgcgacaagtgggagctgttgcagaacttcacgtgtctggaccgcccggcgctggactcgctgatccgggatgtcgtccaagcatacaaaaac

SEQ ID NO: 258231 - DNA, 120 bp, Artificial Sequence
  ENSG00000124780_3 (sequence is synthesized)
ggagccagcctcctcagcaacaccaccagcatggggcgctgggagctcgtgggctccttcttcttttctgtgtccaccatcaccaccattggctatggcaacctgagccccaacacgatg

SEQ ID NO: 258232 - DNA, 120 bp, Artificial Sequence
  ENSG00000124780_4 (sequence is synthesized)
gctgcccgcctcttctgcatcttctttgcccttgtggggatcccactcaacctcgtggtgctcaaccgactggggcatctcatgcagcagggagtaaaccactgggccagcaggctgggg

SEQ ID NO: 258233 - DNA, 120 bp, Artificial Sequence
  ENSG00000124780_5 (sequence is synthesized)
ggcacctggcaggatcctgacaaggcgcggtggctggcgggctctggcgccctcctctcgggcctcctgctcttcctgctgctgccaccgctgctcttctcccacatggagggctggagc

SEQ ID NO: 258234 - DNA, 120 bp, Artificial Sequence
  ENSG00000124780_6 (sequence is synthesized)
aggtacccactgtggtacaagaacatggtgtccctgtggatcctctttgggatggcatggctggccttgatcatcaaactcatcctctcccagctggagacgccagggagggtatgttcc

SEQ ID NO: 258235 - DNA, 120 bp, Artificial Sequence
  ENSG00000124780_7 (sequence is synthesized)
tgctgccaccacagctctaaggaagacttcaagtcccaaagctggagacagggacctgaccgggagccagagtcccactccccacagcaaggatgctatccagagggacccatgggaatc

SEQ ID NO: 258236 - DNA, 120 bp, Artificial Sequence
  ENSG00000124780_8 (sequence is synthesized)
atacagcatctggaaccttctgctcacgctgcaggctgtggcaaggacagctagttatactccattctttggtcgtcgtcctcggtagcaagacccctgattttaagctttgcacatgtc

SEQ ID NO: 258237 - DNA, 120 bp, Artificial Sequence
  ENSG00000124780_9 (sequence is synthesized)
cacccaaactaaagactacattttccatccaccctagaggctgggtgcagctatatgattaattctgcccaatagggtatacagagacatgtcctgggtgacatgggatgtgactttcgg

SEQ ID NO: 258238 - DNA, 120 bp, Artificial Sequence
  ENSG00000124780_10 (sequence is synthesized)
gtgtcggggcagcatgcccttctcccccacttccttactttagcgggctgcaatgccgccgatatgatggctgggagctctggcagccatacggcaccatgaagtagcggcaatgtttga

SEQ ID NO: 258239 - DNA, 120 bp, Artificial Sequence
  ENSG00000124780_11 (sequence is synthesized)
gcggcacaataagataggaagagtctggatctctgatgatcacagagccatcctaacaaacggaatatcacccgacctcctttatgtgagagagaaataaacatcttatgtaaaatacca

SEQ ID NO: 258240 - DNA, 120 bp, Artificial Sequence
  ENSG00000124780_12 (sequence is synthesized)
tgcctcatttcagatacgagaaaaccaaacagagactggcaaacactagagcggacatcgaaatcctctgggggcttgttaaaatacagatttctggccgggcacggtggctcacacctg

SEQ ID NO: 258241 - DNA, 120 bp, Artificial Sequence
  ENSG00000124780_13 (sequence is synthesized)
ttctagaatgaggggctgtggtgggaattggggttactaatgacaagaggtgggagcaagtgttactggtgaggttgtgttgggattgggggtcactgctcagaatagggtccttagtga

SEQ ID NO: 258242 - DNA, 120 bp, Artificial Sequence
  ENSG00000124780_14 (sequence is synthesized)
aaaagggcattaatggtggagatggggtgggactgggcagacaggaaggacatgaggcacaggctccaggcagggaacctggagaacacagaccaggtgaagagcccccttcttactggg

SEQ ID NO: 258243 - DNA, 120 bp, Artificial Sequence
  ENSG00000124782_0 (sequence is synthesized)
attccttttccggaacaagtttgcatctctcctcggtctctccctgaagcccaccggtccccaacgcatcatgccagggagccaagcgtcctgcccggccgttgctccgactgtgtgttc

SEQ ID NO: 258244 - DNA, 120 bp, Artificial Sequence
  ENSG00000124782_1 (sequence is synthesized)
caggagtggtggctctgaggtgtgaccctgcccacgtttgggcccagccaggttcagccccccaataaggagggcagcttgataacacaaagaaaacagtgtcaacgagtactaccaaga

SEQ ID NO: 258245 - DNA, 120 bp, Artificial Sequence
  ENSG00000124782_2 (sequence is synthesized)
gaagaagacaagaggtcaacacagactcattttctactccgtgtgaatgatagctacagcaggggaaagtttcatagtctatcagtgggtcagaaaatggagttttatagcagaggcttc

SEQ ID NO: 258246 - DNA, 120 bp, Artificial Sequence
  ENSG00000124782_3 (sequence is synthesized)
ttagaagcttaaacccctgtcccaatgacgtcaagttcgcccgctggcttggaaggttcagacctatcttccatcaacaccatgatgtcggcggtcatgagtgtagggaaggtcacagag

SEQ ID NO: 258247 - DNA, 120 bp, Artificial Sequence
  ENSG00000124782_4 (sequence is synthesized)
aatggcgggagcccccaggggatcaagtccccctcgaagcctccaggaccaaatcggattggcagaaggaaccaggaaacgaaagaggagaagtcttcctataactgccccctgtgtgag

SEQ ID NO: 258248 - DNA, 120 bp, Artificial Sequence
  ENSG00000124782_5 (sequence is synthesized)
aagatttgcactacccagcaccagctgaccatgcacattcgccagcacaacacagacactggaggagccgaccactcatgcagcatctgcggaaagtcactgagctcggccagctccctc

SEQ ID NO: 258249 - DNA, 120 bp, Artificial Sequence
  ENSG00000124782_6 (sequence is synthesized)
gatcgccacatgctggtgcactctggcgagaggccttacaagtgcactgtgtgtggccagtcatttaccaccaatgggaacatgcacagacatatgaagatccatgagaaggaccctaac

SEQ ID NO: 258250 - DNA, 120 bp, Artificial Sequence
  ENSG00000124782_7 (sequence is synthesized)
agtgccacagccacagcccctccatctcctctgaaacgtaggcgattgtcctccaagaggaaactgagtcacgatgccgagtcagagagagaagacccagcaccagctaaaaagatggta

SEQ ID NO: 258251 - DNA, 120 bp, Artificial Sequence
  ENSG00000124782_8 (sequence is synthesized)
gaagacgggcagtcaggtgacttggagaagaaagctgatgaagtctttcactgcccagtatgtttcaaggagtttgtttgcaagtatggactggagacccacatggagacccattcagat

SEQ ID NO: 258252 - DNA, 120 bp, Artificial Sequence
  ENSG00000124782_9 (sequence is synthesized)
aacccactaagatgtgacatttgttgtgtcacctttcgaacacatcgaggactgctgcgtcacaacgcgcttgtccacaaacaacttcccagggatgcaatgggcagacctttcatacag

SEQ ID NO: 258253 - DNA, 120 bp, Artificial Sequence
  ENSG00000124782_10 (sequence is synthesized)
aacaacccttcaattcctgctggcttccacgacttaggattcacggacttctcctgtaggaagtttcctcgcatttctcaggcctggtgcgaaacaaacctgcggaggtgcatcagcgag

SEQ ID NO: 258254 - DNA, 120 bp, Artificial Sequence
  ENSG00000124782_11 (sequence is synthesized)
caacaccgttttgtctgcgacacctgtgacaaggcgttccccatgctctgctcactggctctgcacaagcagacccatgtggcggcagaccagggtcaagaaaagccgcaggccacgccc

SEQ ID NO: 258255 - DNA, 120 bp, Artificial Sequence
  ENSG00000124782_12 (sequence is synthesized)
ctgcctggtgacgccctggaccagaagggcttcctggccttgcttggcctgcagcacaccaaagacgtcaggcctgcccccgccgaggagcccctgccggatgacaaccaggcaattcag

SEQ ID NO: 258256 - DNA, 120 bp, Artificial Sequence
  ENSG00000124782_13 (sequence is synthesized)
ctccagacactcaagtgtcagctacctcaggaccccggctgcaccaacctgctgagcctgtcacctttcgaagctgcttccctaggcggttctctcacagttctccccgcgaccaaggac

SEQ ID NO: 258257 - DNA, 120 bp, Artificial Sequence
  ENSG00000124782_14 (sequence is synthesized)
agcataaagcacctgtccctgcagcccttccagaagggcttcatcatccagcctgacagcagcattgtggtcaagcccatctctggcgagtcggccatcgagctggcagacatccagcaa

SEQ ID NO: 258258 - DNA, 120 bp, Artificial Sequence
  ENSG00000124782_15 (sequence is synthesized)
attctgaagatggcagcctcggctccccctcagatcagtcttccgcccttctccaaggcccctgccgccccactgcaggcgatcttcaagcacatgccccctctgaagccaaagcccctg

SEQ ID NO: 258259 - DNA, 120 bp, Artificial Sequence
  ENSG00000124782_16 (sequence is synthesized)
gtcacaccacggacggtggtggccacctccacgcccccgcctctcatcaacgcccagcaggcttccccgggctgtatcagccccagcctgccgccaccgcccctgaagctcctcaaaggc

SEQ ID NO: 258260 - DNA, 120 bp, Artificial Sequence
  ENSG00000124782_17 (sequence is synthesized)
tcagtggaggcggcctccaacgcccacctgctgcagtccaagtccgggacccagccccacgcggccacgcggctctccctgcagcagccgcgggcggagctgccgggccagcctgagatg

SEQ ID NO: 258261 - DNA, 120 bp, Artificial Sequence
  ENSG00000124782_18 (sequence is synthesized)
aagacgcagctggagcaggacagcatcatcgaggccctgctgccgctgagcatggaggccaagatcaagcaggagatcacagagggggaactcaaggccttcatgacagcgcccggcggc

SEQ ID NO: 258262 - DNA, 120 bp, Artificial Sequence
  ENSG00000124782_19 (sequence is synthesized)
aagaagacgcccgccatgcgcaaggtgctctacccctgccgcttctgcaaccaggtgtttgccttctcgggggtcttgcgtgcccacgtgcgctcccacctgggcatctcgccataccag

SEQ ID NO: 258263 - DNA, 120 bp, Artificial Sequence
  ENSG00000124782_20 (sequence is synthesized)
tgcaacatctgcgactacatcgccgccgacaaggccgcgctcatccgccacctgcgcacgcacagtggggagcggccctacatttgcaagatctgccactaccccttcactgtcaaagcc

SEQ ID NO: 258264 - DNA, 120 bp, Artificial Sequence
  ENSG00000124782_21 (sequence is synthesized)
aactgcgagcggcacctgcgcaagaagcacctcaaggccacccgcaaggatatcgagaagaacatcgagtatgtgagtagcagcgcggccgagctggtggacgccttctgcgccccggac

SEQ ID NO: 258265 - DNA, 120 bp, Artificial Sequence
  ENSG00000124782_22 (sequence is synthesized)
accgtgtgccggctgtgcggcgaggacctcaagcactatcgtgccctgcgcatccacatgcgcacgcactgcggccgcggcctgggcgggggccacaagggccgcaagcccttcgagtgc

SEQ ID NO: 258266 - DNA, 120 bp, Artificial Sequence
  ENSG00000124782_23 (sequence is synthesized)
aaggagtgcagcgccgcgttcgcggccaagcgcaactgcatccaccacatcctcaagcagcacctgcacgtgcccgagcaggacatcgagagctacgtgctggccgccgacggcctgggc

SEQ ID NO: 258267 - DNA, 120 bp, Artificial Sequence
  ENSG00000124782_24 (sequence is synthesized)
cccgcagaggcgccggccgctgaggcgtcggggcgcggggaggacagtggctgcgctgcccttggtgactgcaagcccctcactgccttcctggaaccccagaacggctttcttcacagg

SEQ ID NO: 258268 - DNA, 120 bp, Artificial Sequence
  ENSG00000124782_25 (sequence is synthesized)
ggccccacccagcctccacctccccatgtctcgatcaagttggagcccgccagtagctttgcggtggacttcaatgagcccctggacttctcgcagaagggcctggccctggtccaagtg

SEQ ID NO: 258269 - DNA, 120 bp, Artificial Sequence
  ENSG00000124782_26 (sequence is synthesized)
aagcaggaaaacatctcctttctgagcccttcttccctggtcccctatgactgctccatggagcccatcgacctgtccatccccaagaacttcaggaaaggggacaaggatttggccact

SEQ ID NO: 258270 - DNA, 120 bp, Artificial Sequence
  ENSG00000124782_27 (sequence is synthesized)
cccagcgaagccaagaagcctgaggaggaggcggggagcagcgagcagccctctccctgcccagcacccggcccttctcttcctgtaactttggggcccagcggaatcctggaaagcccc

SEQ ID NO: 258271 - DNA, 120 bp, Artificial Sequence
  ENSG00000124782_28 (sequence is synthesized)
atggcccctgctccggcggccaccccggaacccccagcacagcccctgcagggccctgttcagctggcggtcccaatctactcctcagccctggtcagcagccctccactcgtgggcagc

SEQ ID NO: 258272 - DNA, 120 bp, Artificial Sequence
  ENSG00000124782_29 (sequence is synthesized)
tcagccctcctgagtggcacagccttgctgcgtccactgcggcccaagcccccgctgcttttgccaaagccccccgtgacagaagagctgcccccgctggcctccattgcccagatcatc

SEQ ID NO: 258273 - DNA, 120 bp, Artificial Sequence
  ENSG00000124782_30 (sequence is synthesized)
tcatctgtatcctcggcccccaccctgctgaaaaccaaggtggcggacccagggcccgcaagcactggcagtaacaccacggcttcagacagcttaggaggttctgtccccaaagccgcc

SEQ ID NO: 258274 - DNA, 120 bp, Artificial Sequence
  ENSG00000124782_31 (sequence is synthesized)
accaccgccacccccgctgccaccaccagcccaaaagagtctagtgagcctcccgctccagccagcagcccagaggctgcctctcccaccgagcagggcccagcgggcacgtcgaagaag

SEQ ID NO: 258275 - DNA, 120 bp, Artificial Sequence
  ENSG00000124782_32 (sequence is synthesized)
aggggccggaaaagggggatgaggagccgaccccgcgccaacagcggcggggtggacctggactccagcggggagtttgccagcatcgagaagatgctggccaccacagacaccaacaag

SEQ ID NO: 258276 - DNA, 120 bp, Artificial Sequence
  ENSG00000124782_33 (sequence is synthesized)
ttcagtccgtttctgcagacagcggaggacaacactcaggatgaggtggccggagcccctgccgaccaccatgggcccagtgatgaagagcagggcagtcccccagaagacaagctgctg

SEQ ID NO: 258277 - DNA, 120 bp, Artificial Sequence
  ENSG00000124782_34 (sequence is synthesized)
agggccaagcggaactcgtacaccaactgcctgcagaagatcacctgtccccactgtccccgggttttcccttgggccagctccctacagaggcacatgctcacacacactggtcagaaa

SEQ ID NO: 258278 - DNA, 120 bp, Artificial Sequence
  ENSG00000124782_35 (sequence is synthesized)
gggcttatcccccagtcaaaagagagtgatgttggatcccatgatagcacagacagtcagtcggatgcggagactgcagccgccgcgggcgaagtgctagacctcacctcacgggacaga

SEQ ID NO: 258279 - DNA, 120 bp, Artificial Sequence
  ENSG00000124782_36 (sequence is synthesized)
gagcagccgtcggagggcgccactgagctccgccaggtcgcaggggatgcgcctgtggagcaggccacggcggaaacggcctcgccggtgcaccgggaagagcacgggcgtggggagagc

SEQ ID NO: 258280 - DNA, 120 bp, Artificial Sequence
  ENSG00000124782_37 (sequence is synthesized)
catgagccggaggaggagcatggcactgaggagagcactggggacgccgacggcgcggaagaggacgcgtcgagcaaccagagcctggacctggacttcgccaccaagctcatggacttc

SEQ ID NO: 258281 - DNA, 120 bp, Artificial Sequence
  ENSG00000124782_38 (sequence is synthesized)
aagctggcggagggcgacggcgaggcaggcgccgggggcgcggcctcgcaggagcagaagctcgcctgcgacacctgtgggaagagcttcaagttcctgggcaccctgagccgccaccgg

SEQ ID NO: 258282 - DNA, 120 bp, Artificial Sequence
  ENSG00000124782_39 (sequence is synthesized)
aaggcgcacggccgccaggagcccaaggacgagaagggagatggcgccagcactgcagaggaggggccccagcccgcccctgaacaggaggagaagccccccgagaccccggcagaggtg

SEQ ID NO: 258283 - DNA, 120 bp, Artificial Sequence
  ENSG00000124782_40 (sequence is synthesized)
gtggagtcggccccgggtgccggggaggccccggcggaaaagctcgcggaggagacggagggcccctccgacggggagagcgcggccgagaaaaggtcctcagagaagagcgacgatgac

SEQ ID NO: 258284 - DNA, 120 bp, Artificial Sequence
  ENSG00000124782_41 (sequence is synthesized)
aagaaaccaaagacagactcccccaaaagcgtggccagcaaggcagacaagaggaagaaggtctgcagcgtgtgcaacaagcggttctggtcgctgcaggacctgacccggcacatgcgc

SEQ ID NO: 258285 - DNA, 120 bp, Artificial Sequence
  ENSG00000124782_42 (sequence is synthesized)
tcccacacaggggaaaggccatacaaatgtcagacctgcgagcgaaccttcaccttgaagcacagcctggttcgccaccagcggatccaccagaaagccaggcatgccaaacaccacggg

SEQ ID NO: 258286 - DNA, 120 bp, Artificial Sequence
  ENSG00000124782_43 (sequence is synthesized)
aaggacagcgacaaggaagagcggggtgaggaggacagcgagaatgagtccacccacagcggcaacaacgccgtctcagagaacgaggctgagctggctcccaatgccagcaaccacatg

SEQ ID NO: 258287 - DNA, 120 bp, Artificial Sequence
  ENSG00000124782_44 (sequence is synthesized)
gctgtcacccggagccggaaggagggcttggccagtgccaccaaggactgcagccacagggaggagaaggtcacggcagggtggccgtctgagcctggccagggtgaccttaacccagag

SEQ ID NO: 258288 - DNA, 120 bp, Artificial Sequence
  ENSG00000124782_45 (sequence is synthesized)
agcccggcggccctggggcaggacctgctggagccgcgcagcaagaggcctgcccacccaatcctggccacagctgatggcgcctcccagctcgtggggatggagtgacagcctcagtcc

SEQ ID NO: 258289 - DNA, 120 bp, Artificial Sequence
  ENSG00000124782_46 (sequence is synthesized)
gtgacagcctcagtccccctcagcacagacaaaagccagcagagcaaagcgtctatacttcatggggtttcctcagtgccctttggctgttgaggagtgagagagagagagagagagaga

SEQ ID NO: 258290 - DNA, 120 bp, Artificial Sequence
  ENSG00000124782_47 (sequence is synthesized)
gagacaagcaggagcgtggctgctcgctcagtgccatagccttaccgcagcctgcgcgggaggccacagcccgtgccgattccagtgccttaactacttaccggatccctccatattatc

SEQ ID NO: 258291 - DNA, 120 bp, Artificial Sequence
  ENSG00000124782_48 (sequence is synthesized)
atgggtgttgtatttttccaaaatgacttcttaaacaaaacaaatattataatgaattgtctggagaggacctcttcatttgagcattagcgttattttgtattggtgtgtgtgagcttg

SEQ ID NO: 258292 - DNA, 120 bp, Artificial Sequence
  ENSG00000124782_49 (sequence is synthesized)
ttcttgtgaatctgtgatagcaccgtttgttctgtgagctggaaacagaaggaaaaaacatacccttgggtacccatagccaataactggaagaaaatgatgtgaatttcatgtaaatga

SEQ ID NO: 258293 - DNA, 120 bp, Artificial Sequence
  ENSG00000124782_50 (sequence is synthesized)
ccagaggaaagatggataagatgataatttcttaaatagacattttccttttttctttgtgcttcatggtggagctgtcatctggtccttggtattacaggatgtggttgatgaaggttt

SEQ ID NO: 258294 - DNA, 120 bp, Artificial Sequence
  ENSG00000124782_51 (sequence is synthesized)
ccaatatggtttcaggccaaaaccagggaagattctagcttcagcctcatgtccatttccagtctgtcagcattagacatggtcactgttcaagtttcaagacatccattcttaactata

SEQ ID NO: 258295 - DNA, 120 bp, Artificial Sequence
  ENSG00000124782_52 (sequence is synthesized)
gagaagagttactcccctggcgtcttaacctatggaaaacatgcacggataggatatatttgattgcctcctcttccctttcagtatatgtattattaatattattattattattattat

SEQ ID NO: 258296 - DNA, 120 bp, Artificial Sequence
  ENSG00000124782_53 (sequence is synthesized)
tattagttcatcagtttgctgttctctgcagtgagcagaatcaaatgggcaatatttgtcctgggagacctgtgccgcacccaggtccccgtgttaacgtgtgcctgcggttgtggttgg

SEQ ID NO: 258297 - DNA, 120 bp, Artificial Sequence
  ENSG00000124782_54 (sequence is synthesized)
caccctcgggtggtagctcttctactgtaatgagacaagcctttcttctgtcactgcagaatttagaaggggccgtgagcagtcttcccaagcatggtccaggagcagctcagagagggt

SEQ ID NO: 258298 - DNA, 120 bp, Artificial Sequence
  ENSG00000124782_55 (sequence is synthesized)
ggagtgaggatgcatgcatccagggaacaggcatcaagaagccagggccgtgcctggagcactgcagagatgactttggagaaagcaaagcagtgacccagtgaccaggcacattactcg

SEQ ID NO: 258299 - DNA, 120 bp, Artificial Sequence
  ENSG00000124782_56 (sequence is synthesized)
tgagcgaggtattcccagtcttcctgctaagcctaatccaagccttacccagctgtgctactgtcatttgcaaagcaaggaaatactactactggtaataaaactacacatgcaagatgt

SEQ ID NO: 258300 - DNA, 120 bp, Artificial Sequence
  ENSG00000124782_57 (sequence is synthesized)
cagataagaaataggtttatatttaccttcctgcgatgtggggttggtgcttgaagataaatgtgctgtttctagtttcttaaatagcccacacccctggatgcaaaaaggcagggttat

SEQ ID NO: 258301 - DNA, 120 bp, Artificial Sequence
  ENSG00000124782_58 (sequence is synthesized)
ttttacccatgagcatcctgtgcaggcaatagacttccctcactgtctccgcctgcagggaggagaatgtaccccactgcacctgagctcctggtccctcagccaagacctcaggggtcc

SEQ ID NO: 258302 - DNA, 120 bp, Artificial Sequence
  ENSG00000124782_59 (sequence is synthesized)
ccagccagcctgctgctggggacccctgtgcttgctgcagtgtatggagcctcttgccttcccctggggaggcacccctgtaccccagcttccttcccctggccttttctggccccagtg

SEQ ID NO: 258303 - DNA, 120 bp, Artificial Sequence
  ENSG00000124782_60 (sequence is synthesized)
ctcctcctttacatagacttgttcacacagaaacgtgcacgcccccttttctccgccacttcaccagtttctgaaatccaacctcccagacttcacaggaagatagatattcttgagata

SEQ ID NO: 258304 - DNA, 120 bp, Artificial Sequence
  ENSG00000124782_61 (sequence is synthesized)
atgaaaagtgatatcttcgcatacgaaaggaaaaaaggttgaggtatatatgatttttaactgtattaggggtgtatgaaccagtttaaaaacgaggttttatttactgtagagatgaat

SEQ ID NO: 258305 - DNA, 120 bp, Artificial Sequence
  ENSG00000124782_62 (sequence is synthesized)
gcaaatcagaaccaatgatcccttggcctacttagttaaaaccagttcatacatcccttagggtttttattattattattattattattacagttgttattgttgtttttgttgttatta

SEQ ID NO: 258306 - DNA, 120 bp, Artificial Sequence
  ENSG00000124782_63 (sequence is synthesized)
ttatttggggtttcttgtgttttttctttgcgactctccacactaaacttgcaatattgtggggagaagctgtgactaaactctacgctgcggtgagatgtagcagtaatcagctcccag

SEQ ID NO: 258307 - DNA, 120 bp, Artificial Sequence
  ENSG00000124782_64 (sequence is synthesized)
cgacgtgtgtagctggggctgccgctcgcaataatcactattgatttaaagctttacttagccttgatctgtaccctcgtagtcaataaggtcttgccacattttattagtgaggtggag

SEQ ID NO: 258308 - DNA, 120 bp, Artificial Sequence
  ENSG00000124782_65 (sequence is synthesized)
aaacgtattatttgtttgttgtttttgcccttcccccaccccccaatattaaactgtgaaatttgtgatttgtttaaactctgggtgaatcatagcttagtttgcatgtccagctaattt

SEQ ID NO: 258309 - DNA, 120 bp, Artificial Sequence
  ENSG00000124782_66 (sequence is synthesized)
gtttctatacattttgtttgattctctttctccttctctcagggcttttacaaaaaaatatatatatatggatcttctgaaaagttttttgaggtgcaagttttttctcttttttttttt

SEQ ID NO: 258310 - DNA, 120 bp, Artificial Sequence
  ENSG00000124782_67 (sequence is synthesized)
tttttttttttctcattgattaatggacatgatgctgagattcaatcactacatgaaacacctggctgtgaaaacaaaacaacccagagggctgtgttccaagcagcgctggggaagcta

SEQ ID NO: 258311 - DNA, 120 bp, Artificial Sequence
  ENSG00000124782_68 (sequence is synthesized)
cgtaacagtcggatgccagttttggaagattcaccatgcgttctgaccctctgttcgtctctttcctctcctctttcttcaagaaggaaattgatcctagtgatttcagcccatgcatta

SEQ ID NO: 258312 - DNA, 120 bp, Artificial Sequence
  ENSG00000124782_69 (sequence is synthesized)
aacaggaaacaataataaatttgtagaattcatatttttctaaagggaacttaaaaactgctgctacatgttatgtacaaaactggtttatgccacatgaacagagaatcacaagtttgg

SEQ ID NO: 258313 - DNA, 120 bp, Artificial Sequence
  ENSG00000124782_70 (sequence is synthesized)
ttttggtactttttgttcctctttgtattcagttgtatagaacttccaaattcagaatgagaagaaagctgttctgtatcaaaccatttaagcaataaatgttatattttaaaagctgca

SEQ ID NO: 258314 - DNA, 120 bp, Artificial Sequence
  ENSG00000124782_71 (sequence is synthesized)
ttcagacacctgagagcatcctgttctgggtacagtgtgtgtatgtatatgtttgtttgaagccgctggtcctcgccttttactccttagctggacagcgggttcgggatctgccccatg

SEQ ID NO: 258315 - DNA, 80 bp, Artificial Sequence
  ENSG00000124782_72 (sequence is synthesized)
cgggatggcaactgcggtcaccctgctaaagtcggggcgggggcggcggtcctccccctcaccccccccagtccgagcgc

SEQ ID NO: 258316 - DNA, 120 bp, Artificial Sequence
  ENSG00000124782_73 (sequence is synthesized)
gcgggcgaggaagctgggcggggggccgagacgggggccgggacgacggctggggcgccggggtcgccagctcctcgcccacctccctccctgtgggagaagaggaggaggggaagtgac

SEQ ID NO: 258317 - DNA, 120 bp, Artificial Sequence
  ENSG00000124782_74 (sequence is synthesized)
gttacctgctttatacatattttttaagaaacaggctttgatatgtcaatttgaaatttgtttgtaactctgatagcgttggcttcttaaatctcttataaaattcaggctccccatcag

SEQ ID NO: 258318 - DNA, 120 bp, Artificial Sequence
  ENSG00000124782_75 (sequence is synthesized)
aatcactgtattgcagcagtggagttaaatgaaacctgatgtttctcatcactagttttaggtctggaacatttgtgtagtagtgaataagcctaggttcttaggagggtgctgcagggc

SEQ ID NO: 258319 - DNA, 120 bp, Artificial Sequence
  ENSG00000124782_76 (sequence is synthesized)
ggcagctttctgggctttgtcattgttggcttggcctttcccactctgcctaacccagattaggaaaggtagagaaacctgcctctcatgagtttgagtcctgttggtagtgcacactca

SEQ ID NO: 258320 - DNA, 120 bp, Artificial Sequence
  ENSG00000124782_77 (sequence is synthesized)
gaaaggaggcaaggttacttcgtccttggtatgccaagacttggtttaaatgaaagcttccatcactctgggcgtgaatgtggcctttaactggagaaagacagcgttggatgtttttga

SEQ ID NO: 258321 - DNA, 120 bp, Artificial Sequence
  ENSG00000124782_78 (sequence is synthesized)
ctaaggtaggagaaagagtgaactagaccttgttcattcctgtttctcctggcatgtgacaatgttcttaagtcccgttactccacaccgggctccagtgattgaacttgggcacaacaa

SEQ ID NO: 258322 - DNA, 120 bp, Artificial Sequence
  ENSG00000124782_79 (sequence is synthesized)
cattagggaggcagttaagaaagtatcggtgtggggaaaaagttggctgagagttgtcagagggtggctgtatccacagggtgttcacatggttcactgtgccttctttctctcagcaaa

SEQ ID NO: 258323 - DNA, 120 bp, Artificial Sequence
  ENSG00000124782_80 (sequence is synthesized)
gccccttgagtagtcaccagtgagcccctgaacactggggagtctgctatcatgggtgttcttggacaacagatagattttcttcgcaaaagatgttgcaactcaaatgactattagcaa

SEQ ID NO: 258324 - DNA, 120 bp, Artificial Sequence
  ENSG00000124782_81 (sequence is synthesized)
tgcatgaatatgtggcccaaacagggacagcccacgtgttggatacccctggcacagcactggtccatcataggcactccgaagtgtttgaactgagctggacctgatagcacagaaacc

SEQ ID NO: 258325 - DNA, 120 bp, Artificial Sequence
  ENSG00000124782_82 (sequence is synthesized)
tgagaagccattttggggtcagagaaagttctacttagtgcaggacacttggccaaaaatggaacctgatatgtttcaataaaaaagtgacaggtgattgctctgccatccagcttcaat

SEQ ID NO: 258326 - DNA, 120 bp, Artificial Sequence
  ENSG00000124782_83 (sequence is synthesized)
tgtaggggcttcgcagctccagtgtttctgatcctcagccttgccaggcagaaaacacgggtagtgacaggacttcccacaagaattcaggggactcatctttctttctttaccttctct

SEQ ID NO: 258327 - DNA, 120 bp, Artificial Sequence
  ENSG00000124782_84 (sequence is synthesized)
gataactcatcaggcaaccgttagttctgtattcttgatgagttgatagatttggaagttattcctagagaattgccactttaaaactgttaactgccagagattttaagcattggaaag

SEQ ID NO: 258328 - DNA, 120 bp, Artificial Sequence
  ENSG00000124782_85 (sequence is synthesized)
aacaaagaactacttaggaacccctgttgtcgttgagagacttgaaagtagcccatcctggaagtcacacacagctgcagggtcacgagcacacagcagggccatacacgcgtgcagctt

SEQ ID NO: 258329 - DNA, 120 bp, Artificial Sequence
  ENSG00000124782_86 (sequence is synthesized)
tgggttttagaagacagcttgggaatgcaggaatttgggcatctgtttgcctgaatccctgatatatggaccagatttccttcttgaagacacatgtttagctgtgacttaggaatggga

SEQ ID NO: 258330 - DNA, 120 bp, Artificial Sequence
  ENSG00000124782_87 (sequence is synthesized)
aagtctgagcaagctgaagacttatgttatagggaaaatccaaattgtacagtaacttgatgccaggtcaaatatgattatccttaatcacattagcctgacatttttccattggtgagg

SEQ ID NO: 258331 - DNA, 120 bp, Artificial Sequence
  ENSG00000124782_88 (sequence is synthesized)
gaaaaaggaacttacgaagaatttaaactgctgaacaattgaagtgctataaaatgtctttacggaactccccagtctcaagaaattgcctgatcattgggttgggcacagactggttgt

SEQ ID NO: 258332 - DNA, 120 bp, Artificial Sequence
  ENSG00000124782_89 (sequence is synthesized)
caggcctagaccccactcctccctctgctcatacaggacctcagccagctacatctgaacctgttttctcatccttcaaattgaaggagggcaggaccagataatccttgtgttcctaaa

SEQ ID NO: 258333 - DNA, 120 bp, Artificial Sequence
  ENSG00000124782_90 (sequence is synthesized)
tccttgtgttcctaaaaccttatttttatttatttatttatttttgggtttttttgagaaaagttttgctttgtcacccaggctggagtacactggcgcaatcttggctcactgcaacct

SEQ ID NO: 258334 - DNA, 89 bp, Artificial Sequence
  ENSG00000124782_91 (sequence is synthesized)
cttgctcagccccaaagcctgcctcttaacagttgttttattctgtctaccaggaaaaggcatatggcccctccctgtgtaggccctct

SEQ ID NO: 258335 - DNA, 120 bp, Artificial Sequence
  ENSG00000124782_92 (sequence is synthesized)
ccaggaaaaggcatatggcccctccctgtgtaggccctctagttctgagagatttgggaaacttcacaggttcaggaatgttcacagcatccccaggatgtgggcttgtggtgggtggca

SEQ ID NO: 258336 - DNA, 120 bp, Artificial Sequence
  ENSG00000124782_93 (sequence is synthesized)
aatactgaaatagttctctagatcaaggacctgagtgagcagagatgacattaccagctgaacctcccaaagagaatcatgagcagaggcagaaacagcacaggggaccccagctcctgc

SEQ ID NO: 258337 - DNA, 120 bp, Artificial Sequence
  ENSG00000124782_94 (sequence is synthesized)
tcacgttcctacccagcagccttcagagccagtgctgcagtgaatacaggctgtctctgagcccgtctgtatacttcatctcacttcatattttattctgtgatcagataccaccttaga

SEQ ID NO: 258338 - DNA, 120 bp, Artificial Sequence
  ENSG00000124782_95 (sequence is synthesized)
aactattatttacccccttctagataattctgttctgcaggaaaaataatgtggctcccacaagagatttctgagcagtccaagcctgcatagcatggtgtgtggcagcgatagaggcag

SEQ ID NO: 258339 - DNA, 120 bp, Artificial Sequence
  ENSG00000124782_96 (sequence is synthesized)
atcaggtgtctccttctgaaatgctgacctgggtgagggacgaggttctcctggagcaatcctctgaacaaggacctgctccagggagaggccaggcttcctctgcacagaggttggaga

SEQ ID NO: 258340 - DNA, 120 bp, Artificial Sequence
  ENSG00000124782_97 (sequence is synthesized)
tgggcattgcactggacgctcgtcatttttttcatagttgggatgggtaggatttggtgggtgattaatccacagtgatggtagggctggtgctgtagacaggctgtgaagttgaaccct

SEQ ID NO: 258341 - DNA, 120 bp, Artificial Sequence
  ENSG00000124782_98 (sequence is synthesized)
cagtcctgcacgtccagctagccgacctagaggattttcctcacctgtttactaataatgccctgtgtttggtgaggggttggcttaacaattttgtaacctgacagggacttggcccct

SEQ ID NO: 258342 - DNA, 120 bp, Artificial Sequence
  ENSG00000124782_99 (sequence is synthesized)
ctgggcaggctctcacttcgctggccccacagctgtggctgaggggtggcccgtaagaagagagttgccaggcatcctttgtgggggcacacaggccacccctgccctgtgcctctatct

SEQ ID NO: 258343 - DNA, 120 bp, Artificial Sequence
  ENSG00000124782_100 (sequence is synthesized)
taatgtccctttgctcctctctgctctgccgatccccataataggctgctatcataggaggcctggggcagcctgcgccagcggggcctagccaggcggtgaactgggacagtagctagt

SEQ ID NO: 258344 - DNA, 120 bp, Artificial Sequence
  ENSG00000124782_101 (sequence is synthesized)
gggagagacagcttgttaacccagaactaaaatagacaccagctccatttcaaatcccagaggcagcagaaccacagtgggatgctacccgcttagactgaaggtttgtaactcaaaaca

SEQ ID NO: 258345 - DNA, 120 bp, Artificial Sequence
  ENSG00000124782_102 (sequence is synthesized)
gctgttgccttctcactctcctgcacttatcccccttctccactccccaccaacactggcaaggtgcccattgttccttaataaaaagtgttggaaatccaaactcatataaatctcaac

SEQ ID NO: 258346 - DNA, 120 bp, Artificial Sequence
  ENSG00000124782_103 (sequence is synthesized)
tccatttccctccactccactgtgtttcaaatgaatgaagtgttgtcgtagaacaaaaggaagacacaaagctgcctgtagagatgccagctcttaggatcaggtgttagcttcaccctg

SEQ ID NO: 258347 - DNA, 120 bp, Artificial Sequence
  ENSG00000124782_104 (sequence is synthesized)
acatgaccaatggtcagtcatcccccttcccccagggctccccagatgagggagagaaggcagaggaggaagcggagtcaggctatggcgagctggcgtttggaatcggaggtgagggac

SEQ ID NO: 258348 - DNA, 120 bp, Artificial Sequence
  ENSG00000124782_105 (sequence is synthesized)
ggagtgttcaagagagcaggcggctacacagaggacatcctttgtgtgaggatgttgctgggcattgaatgtccatcagaatagaactgagcaactggccataccctgctgtgaatgaag

SEQ ID NO: 258349 - DNA, 120 bp, Artificial Sequence
  ENSG00000124782_106 (sequence is synthesized)
tcagctgggagaagcatccaggtcagcccggccagcaagagaatctgggccacgcacgtccttggaattttctagtagccgttttttatttcatttcatttcattttgaggatctcgttc

SEQ ID NO: 258350 - DNA, 120 bp, Artificial Sequence
  ENSG00000124782_107 (sequence is synthesized)
tcattttgaggatctcgttctgtcacccaggctggtgtccagtgacatgattatgactcactgcaccttgacctcccaggcttttaagtgacccttccacctcagcctcccaagtagctg

SEQ ID NO: 258351 - DNA, 81 bp, Artificial Sequence
  ENSG00000124782_108 (sequence is synthesized)
gcctcccaagtagctggaaccacaggcatgtgccgtcacatgcagctaatttttttgtatattttgcagagacagagtctc

SEQ ID NO: 258352 - DNA, 120 bp, Artificial Sequence
  ENSG00000124782_109 (sequence is synthesized)
ttgtaggcgtgagccaccctgcctggccctagtagtcatgttttaaaaagtaaaaagaaagagacaaaatgaataatgcttcatcgagtataccagtatcatcaaaatataatgtcaaca

SEQ ID NO: 258353 - DNA, 120 bp, Artificial Sequence
  ENSG00000124782_110 (sequence is synthesized)
cataatcaatagaaaaatggtgagtgatgtggttcacattcttgcttccatgtactgactctttgaaatctggtgtgtgtgacgtgaccccagcccgtcttggctgcaccacaccagcca

SEQ ID NO: 258354 - DNA, 120 bp, Artificial Sequence
  ENSG00000124782_111 (sequence is synthesized)
catttcaggtgcttaacagcccacagagaggtttcagatgagccacctacggcagggagggctgcagctttgacgcggagccatgtcttgtgtgtgaagaaggcccaagggcggcagctg

SEQ ID NO: 258355 - DNA, 120 bp, Artificial Sequence
  ENSG00000124782_112 (sequence is synthesized)
gatggtcaccctgttggcacagccactgctgagggtgaaactcggccaaagttattgtgtaatcttagatggccccctgatgaaaggagttcgggtaataagtaacgttaacatcatttc

SEQ ID NO: 258356 - DNA, 120 bp, Artificial Sequence
  ENSG00000124782_113 (sequence is synthesized)
agttaaaatgtacccagcaaatgattgagtttgtactgtgtgccaggcacttgcccaggcttgaaggaaagagtgatgtttgagacagggtacgggctaggcacaaaacaagctggttgg

SEQ ID NO: 258357 - DNA, 120 bp, Artificial Sequence
  ENSG00000124782_114 (sequence is synthesized)
ttataaaacaaagttcaggggtgagttcagggcccaggagggcacatttccctcagattccaggcaggcagagggatctggtggatgcaaaacttctccttgggattttacatcagaggc

SEQ ID NO: 258358 - DNA, 120 bp, Artificial Sequence
  ENSG00000124782_115 (sequence is synthesized)
tgtggtgcttcacttaatttcctctgggtcagggcccaaccgggtctggtacttcattgaccctggtcatctctgagttcaaggtgatgacattaaatctctgttgggaattggtacata

SEQ ID NO: 258359 - DNA, 120 bp, Artificial Sequence
  ENSG00000124782_116 (sequence is synthesized)
gggagcccaagggggctctgacaggaacctcggctccatgagtagtgagggcagctgagaccacccccttcctgtatcttagtagtggggccaccaaagggaaatgccttctttttcctg

SEQ ID NO: 258360 - DNA, 120 bp, Artificial Sequence
  ENSG00000124782_117 (sequence is synthesized)
cattctccactgttccaaggaatgtttatctcccttcaccacacgcctaccacctacagagaccccaagactcctcatgtacccgggattgatcccacccttgtcaaatgtcatcctaaa

SEQ ID NO: 258361 - DNA, 120 bp, Artificial Sequence
  ENSG00000124782_118 (sequence is synthesized)
aacagggaaaagataaaatatttgtcagcatcttctgttgaagagtctgtgagtctgaggcttgggcaggcagaaacagattttaaacacttccgggggctatgaacagaggtccctcaa

SEQ ID NO: 258362 - DNA, 120 bp, Artificial Sequence
  ENSG00000124782_119 (sequence is synthesized)
ggaggggaagactgcccccacccctcacctgacaggtacagaagccttggtcaggactaccctgtcccccacccaaggcccagagcaaggagtggcccacccagcttcggtagccactac

SEQ ID NO: 258363 - DNA, 120 bp, Artificial Sequence
  ENSG00000124782_120 (sequence is synthesized)
acaccctttgtgaagtccctcagactctgcccagtgcttcacgccacgctggtttggttgaacagtcagagcggggcattgggttgctgtgtgcagcctgggcgggttcctgggtcatgg

SEQ ID NO: 258364 - DNA, 120 bp, Artificial Sequence
  ENSG00000124782_121 (sequence is synthesized)
ggagggacggctgcctggccagggccctgtcacagggccatcactgttgctcgcagcaactgggagagattagtgcagctgtcggatgtcagttctctgccccgagatgggcaggggagg

SEQ ID NO: 258365 - DNA, 120 bp, Artificial Sequence
  ENSG00000124782_122 (sequence is synthesized)
gtgggctgaggagagaagaatgtgtgagttggttgggactctagaggagaggttgtttgcacttactccttctggcctctggagacagaacaggaaaaatgaagcatgaaatcccttttg

SEQ ID NO: 258366 - DNA, 120 bp, Artificial Sequence
  ENSG00000124782_123 (sequence is synthesized)
agaaggaatgccagtctctccattaaaacacaataatgaggaaggaattcagtatctgaaggaaatggtcaagctgagtggcagcttctcggcaggtatttcgcaggttcttctgatgag

SEQ ID NO: 258367 - DNA, 120 bp, Artificial Sequence
  ENSG00000124782_124 (sequence is synthesized)
ggttgcagggagcagggagtgtcagcattaggaaatgctcccagctgagccagcgtccaggcattaaggatgtgtgggtcacataaggagccagggcatctgcaaatagctgtcctctga

SEQ ID NO: 258368 - DNA, 120 bp, Artificial Sequence
  ENSG00000124782_125 (sequence is synthesized)
acgcacagcctggcagagtggaacgaagccagccggctccgtcccagcctgccgcctggcagctctgtgacctcgggcaagtgctgacttggtttccctatctggaaaatagatttgaag

SEQ ID NO: 258369 - DNA, 120 bp, Artificial Sequence
  ENSG00000124782_126 (sequence is synthesized)
gctgttgtgaggatgaagggagataatccacaatcctcagagtgtaacaaatactaaatgaaatttttcttctgatactattatttagaatgtattttttatataaaattttatataaaa

SEQ ID NO: 258370 - DNA, 120 bp, Artificial Sequence
  ENSG00000124782_127 (sequence is synthesized)
ttaaaatttttagatattttaaaccttccaacatttacagttataggtgttgtggcactctatggctatcccattccaatggaattgaaaaggagtcaacttccaggtgcgattcacttg

SEQ ID NO: 258371 - DNA, 120 bp, Artificial Sequence
  ENSG00000124782_128 (sequence is synthesized)
gcagagaacatgaaagcaatttgtcctttactcttataaacagctgtttttatctagttttcgcttttgtaaagattgggaaatggagtggctctttaaatttggtttgagtcttgcttc

SEQ ID NO: 258372 - DNA, 120 bp, Artificial Sequence
  ENSG00000124782_129 (sequence is synthesized)
ccacgtttcttaatcccactgtgtgaaaagcagatatttagaaacgtgaaggaactcgacacctttatgtaacagaacaacacatcactttctttagattgttgggggaaccctagggtt

SEQ ID NO: 258373 - DNA, 120 bp, Artificial Sequence
  ENSG00000124782_130 (sequence is synthesized)
ctaaggaagtgagtttcctgatgtttgaaatttgccaatgcagcctttcaaaaatatgcttagcatagtttaaaaaaaagaaaattcacccttcttgctgattgtgaggaggtcagatat

SEQ ID NO: 258374 - DNA, 120 bp, Artificial Sequence
  ENSG00000124782_131 (sequence is synthesized)
ctgtccctcagctgtcacaatggtagacttgatggagttacatgacagagaagagagcccaaggaagcacctgagtggtttctcatctctgggccactctgttaaggcctgtttgttgac

SEQ ID NO: 258375 - DNA, 120 bp, Artificial Sequence
  ENSG00000124782_132 (sequence is synthesized)
tttgggattttcatcttattctggagagttaaggtcgccagatgaataaaatactactgttagtgagcactgggggagctaatcccaaaactgtttagccacaaggttaagaagttaaaa

SEQ ID NO: 258376 - DNA, 120 bp, Artificial Sequence
  ENSG00000124782_133 (sequence is synthesized)
aaaaaaaagagacttttggtgtccttgttttccatttctgtaaatcacattgctgataaatttgcctttgggcatgcaccctgcccattttaggtactaggctcagttactggctacaga

SEQ ID NO: 258377 - DNA, 120 bp, Artificial Sequence
  ENSG00000124782_134 (sequence is synthesized)
ttgcagattcccttttcagggctgatgcttttaacagtgatagttattcctgataagtaccttaactctgctgtgaggtatcaaaactgctggatctatttttggctgcctctttaccat

SEQ ID NO: 258378 - DNA, 120 bp, Artificial Sequence
  ENSG00000124782_135 (sequence is synthesized)
tactccctctagagaatgtccataccataacaacatatttacatatttatcacactgcatttctatcccagctcagaattgtgcaactttctttaaaaaaaaaaaaaaaaaaaaaaggat

SEQ ID NO: 258379 - DNA, 120 bp, Artificial Sequence
  ENSG00000124782_136 (sequence is synthesized)
atcctgtcttcttccaaggacatttgctgtcagaagaacagatatctgtgccctgcctaaataggcagactgtgtagcacagacagccattaattcaatgctttttaaaattttagggcc

SEQ ID NO: 258380 - DNA, 120 bp, Artificial Sequence
  ENSG00000124782_137 (sequence is synthesized)
tcacggtggctcatgtctgtaatctcagtactttgggaggccgaagcaaggggatcgcttgaggtgaggagttggagacccgtctggccaacacggcgaaactccatctctactaaaata

SEQ ID NO: 258381 - DNA, 120 bp, Artificial Sequence
  ENSG00000124783_0 (sequence is synthesized)
ggatgaagagtaacgccattaccgccggagccgccgagagccttagccgacggaaactggacactggaccggcagcgccatgagactcctcccccgcttgctgctgcttctcttactcgt

SEQ ID NO: 258382 - DNA, 120 bp, Artificial Sequence
  ENSG00000124783_1 (sequence is synthesized)
gttccctgccactgtcttgttccgaggcggccccagaggcttgttagcagtggcacaagatcttacagaggatgaagaaacagtagaagattccataattgaggatgaagatgatgaagc

SEQ ID NO: 258383 - DNA, 120 bp, Artificial Sequence
  ENSG00000124783_2 (sequence is synthesized)
cgaggtagaagaagatgaacccacagatttggtagaagataaagaggaagaagatgtgtctggtgaacctgaagcttcaccgagtgcagatacaactatactgtttgtaaaaggagaaga

SEQ ID NO: 258384 - DNA, 120 bp, Artificial Sequence
  ENSG00000124783_3 (sequence is synthesized)
ttttccagcaaataacattgtgaagttcctggtaggctttaccaacaagggtacagaagattttattgttgaatccttagatgcctcattccgttatcctcaggactaccagttttatat

SEQ ID NO: 258385 - DNA, 120 bp, Artificial Sequence
  ENSG00000124783_4 (sequence is synthesized)
ccagaatttcacagctcttcctctgaacactgtagtgccaccccagagacaggcaacttttgagtactctttcattcctgcagagcccatgggcggacgaccatttggtttggtcatcaa

SEQ ID NO: 258386 - DNA, 120 bp, Artificial Sequence
  ENSG00000124783_5 (sequence is synthesized)
tctgaactacaaagatttgaacggcaatgtattccaagatgcagtcttcaatcaaacagttacagttattgaaagagaggatgggttagatggagaaacaatctttatgtatatgttcct

SEQ ID NO: 258387 - DNA, 120 bp, Artificial Sequence
  ENSG00000124783_6 (sequence is synthesized)
tgctggtcttgggcttctggttattgttggccttcatcaactcctagaatctagaaagcgtaagagacccatacagaaagtagaaatgggtacatcaagtcagaatgatgttgacatgag

SEQ ID NO: 258388 - DNA, 120 bp, Artificial Sequence
  ENSG00000124783_7 (sequence is synthesized)
ttggattcctcaggaaacattgaatcaaatcaataaagcttcaccaagaaggttgcccaggaaacgggcacagaagagatcagtgggatctgatgagtaaatgttcctttgtgcaacaat

SEQ ID NO: 258389 - DNA, 120 bp, Artificial Sequence
  ENSG00000124783_8 (sequence is synthesized)
tcggtctttacttaacctgccctaatatttttcggcctgatgggaattagtgcagagaagccatgtcaccatagaaggcaactcctacttgtgtgtggactgagcaatcagagtctgtgg

SEQ ID NO: 258390 - DNA, 120 bp, Artificial Sequence
  ENSG00000124783_9 (sequence is synthesized)
cgataatattgctgaaaatgcactgcattcatttttctaaagtaacaaatttggtttttttttaaaccattaaaatctatgtgtgtgcgtgtgtatgtatgtgagcagttggtcttacca

SEQ ID NO: 258391 - DNA, 120 bp, Artificial Sequence
  ENSG00000124783_10 (sequence is synthesized)
gaatcattgttgaactacctgaaacaagtctttagaatactaaatataatgctgttgtctcttcctttttgacattttctgattttttcccccaaaactcagttaatatttacccactat

SEQ ID NO: 258392 - DNA, 120 bp, Artificial Sequence
  ENSG00000124783_11 (sequence is synthesized)
gattattgatgtcctgccttgaacagttttaaagaaaacaatttttggaatagctcaaatttcaattgatggcacaaatcagcattttgttgttgttactgtattacaattagtattcta

SEQ ID NO: 258393 - DNA, 120 bp, Artificial Sequence
  ENSG00000124783_12 (sequence is synthesized)
aaggcagaagcagaagtagctgctttttagcaatagaattgtttcagtattttgctgctgtttaatgcgcatcttcagaaaacttcccagtggcttcaaggaatttggggatctctctgg

SEQ ID NO: 258394 - DNA, 120 bp, Artificial Sequence
  ENSG00000124783_13 (sequence is synthesized)
caacaaattgtgaaacatgaaatttctgctgactttaatatatgaaacctaatcctacccccttttttaacaaaaagaaactagtacatttgtgaaaattgtgttgtgttgtccattgtt

SEQ ID NO: 258395 - DNA, 120 bp, Artificial Sequence
  ENSG00000124783_14 (sequence is synthesized)
gctctagttctgacccagaggtagctctggagtgattttagacctactcactcagttgtgtgtaggtttttttgttttgttttgagagagaatttttctctccttaatagaagcatcctt

SEQ ID NO: 258396 - DNA, 120 bp, Artificial Sequence
  ENSG00000124783_15 (sequence is synthesized)
tttaaagagaagttgccttggtccacacactaagcagaaaaccaagttatcaggacagagatatttcccagttactcctaatcaatgaagaaagtgagttggatatttttaaagcagtta

SEQ ID NO: 258397 - DNA, 120 bp, Artificial Sequence
  ENSG00000124783_16 (sequence is synthesized)
actaattttttcttacctaatcttttgggagttttgcttgttgatataacctttttagttaacctgaaagattccaaaaattgttcttaagtgcttgagactggaaccaaaattaaattg

SEQ ID NO: 258398 - DNA, 120 bp, Artificial Sequence
  ENSG00000124783_17 (sequence is synthesized)
tacttcataaaatcctcttatagagttactcttgccctagattgtaaattaagtttggcattattgtcagactggatggagggtgaagtaaaatagtatgaacaattaagaggctctccc

SEQ ID NO: 258399 - DNA, 120 bp, Artificial Sequence
  ENSG00000124783_18 (sequence is synthesized)
cctcttgtctttaagccatattctcctacatgtattttataagaaaatgttaagtcaaattttagtggctctttaattcctgacctcttcattctccttttcagtataacctcccctatg

SEQ ID NO: 258400 - DNA, 120 bp, Artificial Sequence
  ENSG00000124783_19 (sequence is synthesized)
ctcatgcccacacagacaaaaaaacaaaacgaaatacacacagaaaaaagtctttccaaactgtttaagtatttaaacatctgagccaaagcagatagaagttattgtataattgttaat

SEQ ID NO: 258401 - DNA, 120 bp, Artificial Sequence
  ENSG00000124783_20 (sequence is synthesized)
cactttgcaaataggggctatcaaattacctatattggcattgctggattataaactctatatctgtaatataaagtgtttgagtttttaattgggctgttatgatcagtagttgatttt

SEQ ID NO: 258402 - DNA, 120 bp, Artificial Sequence
  ENSG00000124783_21 (sequence is synthesized)
gagaaagctctatgagctctaagtaactgcatggttttttgtttaatgtaatataggagacccttcacattcccaaggaatatattccaaaacatttttgtgaatatctaagtttgtgaa

SEQ ID NO: 258403 - DNA, 120 bp, Artificial Sequence
  ENSG00000124783_22 (sequence is synthesized)
actactagggcatgatacagtaaggtgtaattacagaatttacgaaatgtaaatggcctctacagagttttatggaatacctggtactaacgtaggcagctgcaaaaccacactgagtta

SEQ ID NO: 258404 - DNA, 120 bp, Artificial Sequence
  ENSG00000124783_23 (sequence is synthesized)
cagctgtcagccctcctcattcctaaataacttgccttacatatcagccctcccacttctgaagttcaaattagtgcctcggaaatgtagaatttattatttgtcattttttttttttta

SEQ ID NO: 258405 - DNA, 120 bp, Artificial Sequence
  ENSG00000124783_24 (sequence is synthesized)
gcatagattgagaacagttgaactcttaaatcctcagatgccaggggtctgctctagcatcagtaagtatttagcagaaactaactccgtaatgaatggaattcaattccacacatggtt

SEQ ID NO: 258406 - DNA, 120 bp, Artificial Sequence
  ENSG00000124783_25 (sequence is synthesized)
tgttcaagcacacttaataagtagcctattttttaaatgtctttttaaaatgtaaatatttggatgaagtttttctttgttttgatatattcatttgctacaccaactatgttttcagaa

SEQ ID NO: 258407 - DNA, 120 bp, Artificial Sequence
  ENSG00000124783_26 (sequence is synthesized)
ttcatcttttgaacaacttggtttcagaatatgtaaaatgactttaaggatcttgtgtatcaaacctatccccggatgtgtgagaataatgtgttcataaagcatggatctcgctttggt

SEQ ID NO: 258408 - DNA, 120 bp, Artificial Sequence
  ENSG00000124783_27 (sequence is synthesized)
tgtatagcttcctcatttacttcatggtcttacatagctggtgactttcagggctaatctgccctctaaagcattgtcccaggagaggaaaaggaaatgggacctcagaagtagaagcct

SEQ ID NO: 258409 - DNA, 120 bp, Artificial Sequence
  ENSG00000124783_28 (sequence is synthesized)
cagggaaggagtaaagtagaaatcagaagaaaagaagcttcacttgatagtaataaggtttttaacttcaagtaccttcagaaaatgtgattttgataagaggaaagggcaaatttagac

SEQ ID NO: 258410 - DNA, 120 bp, Artificial Sequence
  ENSG00000124783_29 (sequence is synthesized)
cttaaaaaatatggaagaactactgccttaaaagtgcatttgtggcacatcagcctagaactgtatcatggctgtgctggggagaagtaaatggtggtaatgtaacattgccacctttac

SEQ ID NO: 258411 - DNA, 120 bp, Artificial Sequence
  ENSG00000124783_30 (sequence is synthesized)
ttaatgatgtgttattttcgaggtacagtagatcaatatagtaataggcgagcctcatatatagcattcatcttgtacaatgatatccatacccttgatatgaaggaaaattgacttggt

SEQ ID NO: 258412 - DNA, 120 bp, Artificial Sequence
  ENSG00000124783_31 (sequence is synthesized)
ttgtgcatttgaatactgaaataattttttaaaactcagtgacacataccatctcttgccaagactagaccctgtattttagttcctaaattagatgtttaaatttaaaaacattttcag

SEQ ID NO: 258413 - DNA, 120 bp, Artificial Sequence
  ENSG00000124783_32 (sequence is synthesized)
agatgtttaaatttaaaaacattttcagatgtacttaagtacttccatagtacttttttttttttttttttttttgccccctgagacggagtctctgtgtcacccaggctggagtgcagt

SEQ ID NO: 258414 - DNA, 89 bp, Artificial Sequence
  ENSG00000124783_33 (sequence is synthesized)
cgatctcggctcactgcaacttctgcctcttgggttcaagcagttctccctgtgcccgtcaccgcacctgcctaatttttgcattttta

SEQ ID NO: 258415 - DNA, 88 bp, Artificial Sequence
  ENSG00000124783_34 (sequence is synthesized)
tttgcatttttagtagagacggggtttcgtccaggtgatacgcctgccttggcctcccaaagtgtgctgggattacaggcgtgagcca

SEQ ID NO: 258416 - DNA, 120 bp, Artificial Sequence
  ENSG00000124783_35 (sequence is synthesized)
cattttatagctgtagaactaaaatcaatgtttgccccaattttcttaagtaaaactctactttgagctcttacctccaacttagtaaaaagcagcttcacacacaaacaagattcttac

SEQ ID NO: 258417 - DNA, 120 bp, Artificial Sequence
  ENSG00000124783_36 (sequence is synthesized)
tggtggaatgttaggtttcgttgttaagttaatctgtctataagctcatccttagaggatatttgaggaggaagaacaccttgcagctgacttgcaaacatctaaataatttatttcggg

SEQ ID NO: 258418 - DNA, 120 bp, Artificial Sequence
  ENSG00000124783_37 (sequence is synthesized)
tgcttatgaatgttactaatggattttgtatgaatttttatcccttttcatttatacaaaaacctgggcttttatgttaattatatcatctgaggttctaaggttttttttttagatttt

SEQ ID NO: 258419 - DNA, 120 bp, Artificial Sequence
  ENSG00000124783_38 (sequence is synthesized)
gaaatttagggataatagctcttaggtttgggtaccactttgctgcagtttaagaaagggggaagggaactcatttattaaacatcaatcacgtgctgtgttctgtttgttttctagtca

SEQ ID NO: 258420 - DNA, 120 bp, Artificial Sequence
  ENSG00000124783_39 (sequence is synthesized)
tcatatcacacacctttacgacagctcactgaaggaaggtgatactgttcccattttgtagatggaatagacaaaacctgaatttaagtagcttgctcaaggttccatattgaatatgga

SEQ ID NO: 258421 - DNA, 120 bp, Artificial Sequence
  ENSG00000124783_40 (sequence is synthesized)
attcagttacccacaatacccttttaaatttctgttaatgacatacctttaaatgtctccttgatgaacagaatcatggtctttaaaaacattttcatgggttgattgcattttcaagct

SEQ ID NO: 258422 - DNA, 120 bp, Artificial Sequence
  ENSG00000124783_41 (sequence is synthesized)
ctaaaggattgaaagataaatcttcacgttaaaggtaagagtgaagtatctgctcttgggttacagaaccagatagtactagaactaagattacagggtaaagctgcttttatctttttt

SEQ ID NO: 258423 - DNA, 80 bp, Artificial Sequence
  ENSG00000124783_42 (sequence is synthesized)
gtggcagcctctgcctcttgggctcaagcgattctcctgcttcagctttccaagtatttgggaccacaggcgcacaccac

SEQ ID NO: 258424 - DNA, 120 bp, Artificial Sequence
  ENSG00000124783_43 (sequence is synthesized)
gcctcttgggctcaagcgattctcctgcttcagctttccaagtatttgggaccacaggcgcacaccacaggcctggctaatgtttttgttttgtttttggtagagacggggtttcaccat

SEQ ID NO: 258425 - DNA, 120 bp, Artificial Sequence
  ENSG00000124783_44 (sequence is synthesized)
ctcaagtgattcacccaccttggcctcacaaagtgtcaggcttacaggcgtgagccactgcgcccggctcacagggtaaggcttctgtctggtgtgttgtattacggattttgcttaata

SEQ ID NO: 258426 - DNA, 120 bp, Artificial Sequence
  ENSG00000124783_45 (sequence is synthesized)
ggcacagtgaggcattaaaaagaaaattcagtatgcctgtagaaaggataatccttgtttaaagtctccaaattgcagtcaaagatgttttgactgtgcctttttttgttcccctgctgt

SEQ ID NO: 258427 - DNA, 120 bp, Artificial Sequence
  ENSG00000124783_46 (sequence is synthesized)
cccttatgtagacttctgtcagtacccatggcagcctgtcatcttgttgacatctccttctggactgtgagctctgtatctggcttgtttttcatccccagcttctagttcacaattagg

SEQ ID NO: 258428 - DNA, 120 bp, Artificial Sequence
  ENSG00000124783_47 (sequence is synthesized)
tagaaccctattactctttgaagaaggaacaagaaaatgtgggccagttttcatttgccattcttccatgtgagttagtatggttcgtaagtattcctggtgatacgctagtattggcaa

SEQ ID NO: 258429 - DNA, 120 bp, Artificial Sequence
  ENSG00000124783_48 (sequence is synthesized)
ttctgtgaggttgaacaaaggggtggtatggtgtgctagcgtgggaattaggagacctctgggtcttgacagtgccctggccactaagcaaaggcagttcatccttggagtctcaatgtg

SEQ ID NO: 258430 - DNA, 120 bp, Artificial Sequence
  ENSG00000124783_49 (sequence is synthesized)
cttttttgttaattgagatatgcttgaagtatcagccctaaatagtctgattctgtgacctacaaacccttacttaattcagtgttactataaatgattcttcccttaaacctacttttt

SEQ ID NO: 258431 - DNA, 120 bp, Artificial Sequence
  ENSG00000124783_50 (sequence is synthesized)
acttagcaaaagagaaaaaaaaaaaaaggaaacgctcatgtcaggctgcctgggtttgaaccccagatcccctcttagttggaggcaagttgtatgatgcttcagcttttggttcctgcc

SEQ ID NO: 258432 - DNA, 120 bp, Artificial Sequence
  ENSG00000124783_51 (sequence is synthesized)
tcctaaggttgttaggagttactgtgtgtagctgcttagaacattgcctgggtctcagtaagccgcttaagtgactgctctcattttcgctgtaaagcaccatactgtaataacatccca

SEQ ID NO: 258433 - DNA, 120 bp, Artificial Sequence
  ENSG00000124783_52 (sequence is synthesized)
tgaagcatggggcggggaagagtatatggtaccttatggactttgatgtggtggggtagtaggtaaattctgaatatgtaagctacatagtattctttttgtaactaaaggataaaagtt

SEQ ID NO: 258434 - DNA, 120 bp, Artificial Sequence
  ENSG00000124783_53 (sequence is synthesized)
ttaagatgggcatgtaatatggctagcactggattttaatgatgagccagagtaataaggctggcaaggggagtttttgttttgtaataaatctcttacacctgcacatccagttctttt

SEQ ID NO: 258435 - DNA, 120 bp, Artificial Sequence
  ENSG00000124783_54 (sequence is synthesized)
taaaaacacgtttgaagaggctccatatttctcagtgaagctgttggggttcatgttatttttgaaaatcatcttgcaatttatttcagcatcagactgaaccacccaaagaaaattagt

SEQ ID NO: 258436 - DNA, 120 bp, Artificial Sequence
  ENSG00000124783_55 (sequence is synthesized)
ctatttctgaacagttttttcagaaaccatattggtctgatcacccaacatttatagaaataggcgcttaaggcctagaggcatttcagaaaggagaatgagaaatactgtggtcaagag

SEQ ID NO: 258437 - DNA, 120 bp, Artificial Sequence
  ENSG00000124783_56 (sequence is synthesized)
tagtgttcagatggagaacatcaagcatctgctctgcccttccacacacatcctcatttcatcttcacaactgccctaggtaaccttgttatctgtaatgaaacagcctcaaggagcaca

SEQ ID NO: 258438 - DNA, 120 bp, Artificial Sequence
  ENSG00000124783_57 (sequence is synthesized)
gaggcactcactcctcacgtttggtctgttgccatttccggcttggttggaatagggtaggagccttttggcagggagcacattctcagtaatgcagagtgcactcacctgggttctagc

SEQ ID NO: 258439 - DNA, 120 bp, Artificial Sequence
  ENSG00000124783_58 (sequence is synthesized)
ttcaacacttaggatttgcttgatattttgtattctctgaggcactgcctgtatttgtttctgctatcacagtccagagtcaagcttcatttataaagactgggcagggcatggtggctc

SEQ ID NO: 258440 - DNA, 77 bp, Artificial Sequence
  ENSG00000124783_59 (sequence is synthesized)
tagaacgagactccatctcaaaaaagaacaaaaacaattagccgagcgaggtggtgcacgcctgtaatcccagctac

SEQ ID NO: 258441 - DNA, 62 bp, Artificial Sequence
  ENSG00000124783_60 (sequence is synthesized)
gaggaggaggttgtagtgagtcgtacataaataataagtaaaagctactaacaattaaaaaa

SEQ ID NO: 258442 - DNA, 120 bp, Artificial Sequence
  ENSG00000124783_61 (sequence is synthesized)
acaattaaaaaataaataaataaagacaagactgtctggaaaatggctctcctaaaaggaccagttgccatcatccacagtggaagattcaaagcagttggtccttggtacgtatgagaa

SEQ ID NO: 258443 - DNA, 120 bp, Artificial Sequence
  ENSG00000124783_62 (sequence is synthesized)
gcggatttcattcccttgaattctacagagcagtttattagagtgaatgcattttaaggccttgcatttgatatgtcatccagttcataatcaagttgcctttttctggctaaaacataa

SEQ ID NO: 258444 - DNA, 120 bp, Artificial Sequence
  ENSG00000124783_63 (sequence is synthesized)
tgattatgtatttttctcatttggtcctacaagctgctggccctttgtccctccactgtgggaatcagatctagaggaggctgagcctgcagacacagcagtggccaaaaggtcactcta

SEQ ID NO: 258445 - DNA, 120 bp, Artificial Sequence
  ENSG00000124783_64 (sequence is synthesized)
agtgttttgtcttgactccttacttgaagtccacccagctagcacacatctggtttatactgaagccccctgcctagaaatactcatttcaggaaccaccagtaagcatctgtgaccaca

SEQ ID NO: 258446 - DNA, 120 bp, Artificial Sequence
  ENSG00000124783_65 (sequence is synthesized)
caggctttttgactgatggcttcccggatctggtttcaagggataaccccgtctgtgtgcatctatggtcttctctctacagcgaggactttgcagtgctgcttgtggtccacacaaggg

SEQ ID NO: 258447 - DNA, 120 bp, Artificial Sequence
  ENSG00000124783_66 (sequence is synthesized)
gctcagagctgagtctgaactgcttcatggtcaccagctcctgtcccttccagtcttgagaggcttttttctccagatggaacctttccttcccgccgttttctcggtctctggctgttt

SEQ ID NO: 258448 - DNA, 120 bp, Artificial Sequence
  ENSG00000124783_67 (sequence is synthesized)
ttctcttgtgcccgtctaattggacacctcctggcttccatctctgtggttctcctgcctcacttcctgttctgttgtttttccgttttgtcaaaatatctcctatgttcttggcttcct

SEQ ID NO: 258449 - DNA, 120 bp, Artificial Sequence
  ENSG00000124783_68 (sequence is synthesized)
tttcgtcgccaggttttcagctttcctttagctcttcttctaatatggcttctgcccacaaaagcctgctctgtcaggatctcatggttctccacttgccagaaccttcttcagcctcag

SEQ ID NO: 258450 - DNA, 120 bp, Artificial Sequence
  ENSG00000124783_69 (sequence is synthesized)
ttcctcggcctcaacttgtacgtttaacccattgaccaccaccccccaaattcaccttcatttctttgaccctgctcctcactccttttctgttgaggaatctgttgactaactccaggc

SEQ ID NO: 258451 - DNA, 120 bp, Artificial Sequence
  ENSG00000124783_70 (sequence is synthesized)
tcactcaggctcaccgtcctgctctctgcaccagcctttccagagcgtgccagttctcatggcttcatctgttaactgttgatcacttcagtcctgatttttagacctaaatggtttcct

SEQ ID NO: 258452 - DNA, 120 bp, Artificial Sequence
  ENSG00000124783_71 (sequence is synthesized)
taacgccattctaactgcctgtgactcattttcacttacagtgtttattgtaacgccaaaccaacaaatcacaggtgcttgcttctctccataaatctccccagtctaactttttgtcat

SEQ ID NO: 258453 - DNA, 120 bp, Artificial Sequence
  ENSG00000124783_72 (sequence is synthesized)
tcaacatgactcgtttatccaacctgaaatcgcatatagccccaagtatggtgttttgtacacaggtatttaataagtgacttccagttttggctctgctatgaataaaaagagatttca

SEQ ID NO: 258454 - DNA, 120 bp, Artificial Sequence
  ENSG00000124783_73 (sequence is synthesized)
gttctcttcactttgaaatctaacaactcagagaacattgaagaaattggaatttagttgggatgaaatacttgtggtttaaaatatttctgttcatattttctaatttgttgccggagg

SEQ ID NO: 258455 - DNA, 120 bp, Artificial Sequence
  ENSG00000124783_74 (sequence is synthesized)
tcttgggttttctatttgagtgcttgcaaactcaatgtgatttctgtcagcatatcttaggtttgtttgttatgaaacttatgcagtgtgaggttctatctgaaaatgttatttagctat

SEQ ID NO: 258456 - DNA, 120 bp, Artificial Sequence
  ENSG00000124783_75 (sequence is synthesized)
cttctgggactatttaatgaaagtggggtcatgaatccttaaaattcttgtgcagctttgagaaacatttctgttatttgggtatcagtttgtaagtgtggtaaagccaagatggaaacg

SEQ ID NO: 258457 - DNA, 120 bp, Artificial Sequence
  ENSG00000124783_76 (sequence is synthesized)
agcactttgctttcttggttgttgttactggtctaacctcctgcttgaactagtctgctgtcctgtcaaatgcatctttttatttacatgtcccttaaattaaagctgatcatgaaagta

SEQ ID NO: 258458 - DNA, 120 bp, Artificial Sequence
  ENSG00000124783_77 (sequence is synthesized)
tgatgacatcgggccgctcctgcagctcgggcgcctcgcagtctccaggtgcaaggccagcgcttccgccgtggctgcttcaggacatcccccagcacagccgttcctggagacccggcc

SEQ ID NO: 258459 - DNA, 120 bp, Artificial Sequence
  ENSG00000124783_78 (sequence is synthesized)
atcttttctgcatcgttttgcaatttgtgaaacttaggacagcagccgcctgttcaaccgggccctccgccggatggctctgggaagtcaccgctgggcatggctgtgtcactagggctt

SEQ ID NO: 258460 - DNA, 120 bp, Artificial Sequence
  ENSG00000124783_79 (sequence is synthesized)
tgtggctgatgaataacagctgtcgtgtgctgtttctgggtggagatgtcccaggaaaccagtcctactctgccagccagtaggatggggatgcaggtcccgccagcaaggactggctga

SEQ ID NO: 258461 - DNA, 120 bp, Artificial Sequence
  ENSG00000124783_80 (sequence is synthesized)
accgtgcgacccatgcagtagggcccttgggtcagctgtccccacccactacactgatggtgaatgaggccagaagacagggggctctgcgtgaagcccaccagcccctgccacgtgatg

SEQ ID NO: 258462 - DNA, 120 bp, Artificial Sequence
  ENSG00000124783_81 (sequence is synthesized)
gttggaacgcgtaccttagagcttccagttccgtcttaggacattttcaaagatgagcgtcctcaggaggggcggtggagggggcatgtctggagggacctgaggcacggggagcgctcg

SEQ ID NO: 258463 - DNA, 120 bp, Artificial Sequence
  ENSG00000124783_82 (sequence is synthesized)
gttggccttcatcaactcctagaatctagaaagtctggctctttcatccaggatggagtgcagtggcacaatcttgcttactgcaacctccgccttcggggctcaagtcatcctcccacc

SEQ ID NO: 258464 - DNA, 75 bp, Artificial Sequence
  ENSG00000124783_83 (sequence is synthesized)
ctgcaacctccgccttcggggctcaagtcatcctcccacctcagcttcctgagtagtcgtgtagagacagggttt

SEQ ID NO: 258465 - DNA, 120 bp, Artificial Sequence
  ENSG00000124783_84 (sequence is synthesized)
gctgtcctctcatgttggtttcccaaagtgttggaattgtaggcatgagccaccacactcagcctgcgttaatactcttaattatagaaacaatccttaattaataaacaagtcctttca

SEQ ID NO: 258466 - DNA, 120 bp, Artificial Sequence
  ENSG00000124783_85 (sequence is synthesized)
gtctgtgtgttggtgcccattgtgggctccggggcgctcttcccttgtgctgacgtgagtggagttgaattgccctgaatcagattagactgaaataaactgaattgaaaggcctacaaa

SEQ ID NO: 258467 - DNA, 120 bp, Artificial Sequence
  ENSG00000124783_86 (sequence is synthesized)
ctcaggaaacattgaatcaaatcagtaagtagtcttacagacttggctgggaagtttttctcttaagtggaaattaaataccttagatttagtttaaaaaaaaaactttttcagtactat

SEQ ID NO: 258468 - DNA, 120 bp, Artificial Sequence
  ENSG00000124783_87 (sequence is synthesized)
ttaacattcatcttttccattacttgtgtagaatctagtatagtgattaattaagaccttaaaggtttattcagtgtgtagtcttcttatgctttaatttggaaattcttccagatctgc

SEQ ID NO: 258469 - DNA, 120 bp, Artificial Sequence
  ENSG00000124783_88 (sequence is synthesized)
agcttatttatgaatgtgtgaattttctgtgttcctaatccatttcctgtctcttttctttctgttgcttcagtgcagagtagaagaggtgaggcatttaatttttttaatggtttttgc

SEQ ID NO: 258470 - DNA, 120 bp, Artificial Sequence
  ENSG00000124783_89 (sequence is synthesized)
gagctcccagggcctttcccgctgcttcctctacccctgtatttcgcttggctctctaaattgactcagctccagtttggaagagagaaataaacatttagaggatttaattagaaagcc

SEQ ID NO: 258471 - DNA, 120 bp, Artificial Sequence
  ENSG00000124784_0 (sequence is synthesized)
gggcttccggttggggtggcagggtggtggatctgtcggtcccgttttcccgtcgcacgtggtggccactgttggcttctgaatggtttgcaaggcggatatccacgccaaggcctttgg

SEQ ID NO: 258472 - DNA, 120 bp, Artificial Sequence
  ENSG00000124784_1 (sequence is synthesized)
atcggccgtgggtacatccgtctgagccgttcctttccatcgcagagcggcggcctccggcggcgctctccagtcatggactaccggcggcttctcatgagccgggtggtccccgggcaa

SEQ ID NO: 258473 - DNA, 120 bp, Artificial Sequence
  ENSG00000124784_2 (sequence is synthesized)
ttcgacgacgcggactcctctgacagtgaaaacagagacttgaagacagtcaaagagaaggatgacattctgtttgaagaccttcaagacaatgtgaatgagaatggtgaaggtgaaata

SEQ ID NO: 258474 - DNA, 120 bp, Artificial Sequence
  ENSG00000124784_3 (sequence is synthesized)
gaagatgaggaggaggagggttatgacgatgatgatgatgactgggactgggatgaaggagttggaaaactcgccaagggttatgtctggaatggaggaagcaacccacaggcaaatcga

SEQ ID NO: 258475 - DNA, 120 bp, Artificial Sequence
  ENSG00000124784_4 (sequence is synthesized)
cagacctccgacagcagttcagccaaaatgtctactccagcagacaaggtcttacggaaatttgagaataaaattaatttagataagctaaatgttactgattccgtcataaataaagtc

SEQ ID NO: 258476 - DNA, 120 bp, Artificial Sequence
  ENSG00000124784_5 (sequence is synthesized)
accgaaaagtctagacaaaaggaagcagatatgtatcgcatcaaagataaggcagacagagcaactgtagaacaggtgttggatcccagaacaagaatgattttattcaagatgttgact

SEQ ID NO: 258477 - DNA, 120 bp, Artificial Sequence
  ENSG00000124784_6 (sequence is synthesized)
agaggaatcataacagagataaatggctgcattagcacaggaaaagaagctaatgtataccatgctagcacagcaaatggagagagcagagcaatcaaaatttataaaacttctattttg

SEQ ID NO: 258478 - DNA, 120 bp, Artificial Sequence
  ENSG00000124784_7 (sequence is synthesized)
gtgttcaaagatcgggataaatatgtaagtggagaattcagatttcgtcatggctattgtaaaggaaaccctaggaaaatggtgaaaacttgggcagaaaaagaaatgaggaacttaatc

SEQ ID NO: 258479 - DNA, 120 bp, Artificial Sequence
  ENSG00000124784_8 (sequence is synthesized)
aggctaaacacagcagagataccatgtccagaaccaataatgctaagaagtcatgttcttgtcatgagtttcatcggtaaagatgacatgcctgcaccactcttgaaaaatgtccagtta

SEQ ID NO: 258480 - DNA, 120 bp, Artificial Sequence
  ENSG00000124784_9 (sequence is synthesized)
tcagaatccaaggctcgggagttgtacctgcaggtcattcagtacatgagaagaatgtatcaggatgccagacttgtccatgcagatctcagtgaatttaacatgctgtaccacggtgga

SEQ ID NO: 258481 - DNA, 120 bp, Artificial Sequence
  ENSG00000124784_10 (sequence is synthesized)
tatgaggcacagtgttgctgtcatgactgtgcgggagctctttgaatttgtcacagatccatccattacacatgagaacatggatgcttatctctcaaaggccatggaaatagcatctca

SEQ ID NO: 258482 - DNA, 120 bp, Artificial Sequence
  ENSG00000124784_11 (sequence is synthesized)
aaggaccaaggaagaacggtctagccaagatcatgtggatgaagaggtgtttaagcgagcatatattcctagaaccttgaatgaagtgaaaaattatgagagggatatggacataattat

SEQ ID NO: 258483 - DNA, 120 bp, Artificial Sequence
  ENSG00000124784_12 (sequence is synthesized)
gaaattgaaggaagaggacatggccatgaatgcccaacaagataatattctataccagactgttacaggattgaagaaagatttgtcaggagttcagaaggtccctgcactcctagaaaa

SEQ ID NO: 258484 - DNA, 120 bp, Artificial Sequence
  ENSG00000124784_13 (sequence is synthesized)
tcaagtggaggaaaggacttgttctgattcagaagatattggaagctctgagtgctctgacacagactctgaagagcagggagaccatgcccgccccaagaaacacaccacggaccctga

SEQ ID NO: 258485 - DNA, 120 bp, Artificial Sequence
  ENSG00000124784_14 (sequence is synthesized)
cattgataaaaaagaaagaaaaaagatggtcaaggaagcccagagagagaaaagaaaaaacaaaattcctaaacatgtgaaaaaaagaaaggagaagacagccaagacgaaaaaaggcaa

SEQ ID NO: 258486 - DNA, 120 bp, Artificial Sequence
  ENSG00000124784_15 (sequence is synthesized)
atagaatgagaaccatattatgtacagtcattttcctcagttccttttctcgcctgaactcttaagctgcatctggaagatggcttattggttttaaccagattgtcatcgtggcactgt

SEQ ID NO: 258487 - DNA, 120 bp, Artificial Sequence
  ENSG00000124784_16 (sequence is synthesized)
ctgtgaagacggattcaaatgttttcatgtaactatgtaaaaagctctaagctctagagtctagatccagtcactgactctgtctggtgttgacagaggatttatttaagctattatttt

SEQ ID NO: 258488 - DNA, 120 bp, Artificial Sequence
  ENSG00000124784_17 (sequence is synthesized)
aataaagaactttgtacatttttatttttatatttttttctcttacaaatatgtttttggaagcatgataaatgtttaaatgtagtcaacatctgtaactcttacatgagtgtccagagg

SEQ ID NO: 258489 - DNA, 120 bp, Artificial Sequence
  ENSG00000124784_18 (sequence is synthesized)
cactcatgggaaaattggttttgctttctttgtacacaccagagacccatctgaggtcatctgattataaggccatgtttatataaagggaatttcacccacagttcagctggctgttga

SEQ ID NO: 258490 - DNA, 120 bp, Artificial Sequence
  ENSG00000124784_19 (sequence is synthesized)
ttttcactgcaactctgcctttgtgtgtattggcgatcatttgtaatgctcttacacttcgtctttaatgttctttttggagttaggacctctcagttcataaagttttttacaattcaa

SEQ ID NO: 258491 - DNA, 120 bp, Artificial Sequence
  ENSG00000124784_20 (sequence is synthesized)
tgacgtgtctcagtccgtggagcacgaccacccacatgccttggagttcttgagaaaggattgcgccaacgtcaatggtgagtagaaacggcaattttcgaaacagctcattggtctgtt

SEQ ID NO: 258492 - DNA, 120 bp, Artificial Sequence
  ENSG00000124784_21 (sequence is synthesized)
ttggttttgtactcagttaagctgttggcgtaaaattttctcactaaattgtttggtgcagtgatgcttaaaccatttgctgggagatggtatgtaattttatctccttgtttctctata

SEQ ID NO: 258493 - DNA, 120 bp, Artificial Sequence
  ENSG00000124784_22 (sequence is synthesized)
tcgggataaatatgtaagtggagaattcaggtaagttcagatttttccctccagttggtttaatttctatttcctaaaacattaaaataataatggaatgattgaaataataaacatttt

SEQ ID NO: 258494 - DNA, 120 bp, Artificial Sequence
  ENSG00000124784_23 (sequence is synthesized)
taatgtaagtagcttggtttgtatatagcaagcagctcttcaaaagtagtaggggactgtcccaaacctatctgggccttttaagttcccctaatcttgaatattggcttctgagctagt

SEQ ID NO: 258495 - DNA, 120 bp, Artificial Sequence
  ENSG00000124785_0 (sequence is synthesized)
ctctttctgtctcttcctcgctccctctctttctctcctccctctgccttcccagtgcataaagtctctgtcgctcccggaacttgttggcaatgcctattttttggctttcccccgcgt

SEQ ID NO: 258496 - DNA, 120 bp, Artificial Sequence
  ENSG00000124785_1 (sequence is synthesized)
tctctaaactaactatttaaaggtctgcggtcgcaaatggtttgactaaacgtaggatgggacttaagttgaacggcagatatatttcactgatcctcgcggtgcaaatagcgtatctgg

SEQ ID NO: 258497 - DNA, 120 bp, Artificial Sequence
  ENSG00000124785_2 (sequence is synthesized)
tgcaggccgtgagagcagcgggcaagtgcgatgcggtcttcaagggcttttcggactgtttgctcaagctgggcgacagcatggccaactacccgcagggcctggacgacaagacgaaca

SEQ ID NO: 258498 - DNA, 120 bp, Artificial Sequence
  ENSG00000124785_3 (sequence is synthesized)
tcaagaccgtgtgcacatactgggaggatttccacagctgcacggtcacagcccttacggattgccaggaaggggcgaaagatatgtgggataaactgagaaaagaatccaaaaacctca

SEQ ID NO: 258499 - DNA, 120 bp, Artificial Sequence
  ENSG00000124785_4 (sequence is synthesized)
acatccaaggcagcttattcgaactctgcggcagcggcaacggggcggcggggtccctgctcccggcgttcccggtgctcctggtgtctctctcggcagctttagcgacctggctttcct

SEQ ID NO: 258500 - DNA, 120 bp, Artificial Sequence
  ENSG00000124785_5 (sequence is synthesized)
tctgagcgtggggccagctccccccgcgcgcccacccacactcactccatgctcccggaaatcgagaggaagatccattagttctttggggacgttgtgattctctgtgatgctgaaaac

SEQ ID NO: 258501 - DNA, 120 bp, Artificial Sequence
  ENSG00000124785_6 (sequence is synthesized)
tcctgattctcttttttatttcgtttgatttcttgtgttttatttgccaaatgttaccaatcagtgagcaagcaagcacagccaaaatcggacctcagctttagtccgtcttcacacaca

SEQ ID NO: 258502 - DNA, 120 bp, Artificial Sequence
  ENSG00000124785_7 (sequence is synthesized)
aataagaaaacggcaaacccaccccattttttaattttattattattaattttttttgttggcaaaagaatctcaggaacggccctgggccacctactatattaatcatgctagtaacat

SEQ ID NO: 258503 - DNA, 120 bp, Artificial Sequence
  ENSG00000124785_8 (sequence is synthesized)
gaaaaatgatgggctcctcctaataggaaggcgaggagaggagaaggccaggggaatgaattcaagagagatgtccacggacgaaacatacggtgaataattcacgctcacgtcgttctt

SEQ ID NO: 258504 - DNA, 120 bp, Artificial Sequence
  ENSG00000124785_9 (sequence is synthesized)
ccacagtatcttgttttgatcatttccactgcacatttctcctcaagaaaagcgaaaggacagactgttggctttgtgtttggaggataggagggagagagggaaggggctgaggaaatc

SEQ ID NO: 258505 - DNA, 120 bp, Artificial Sequence
  ENSG00000124785_10 (sequence is synthesized)
tctggggtaagagtaaaggcttccagaagacatgctgctatggtcactgaggggttagctttatctgctgttgttgatgcatccgtccaagttcactgcctttattttccctcctccctc

SEQ ID NO: 258506 - DNA, 120 bp, Artificial Sequence
  ENSG00000124785_11 (sequence is synthesized)
ttgttttagctgttacacacacagtaatacctgaatatccaacggtatagatcacaagggggggatgttaaatgttaatctaaaatatagctaaaaaaagattttgacataaaagagcct

SEQ ID NO: 258507 - DNA, 120 bp, Artificial Sequence
  ENSG00000124785_12 (sequence is synthesized)
tgacataaaagagccttgattttaaaaaaaaaagagagagagatgtaatttaaaaagtttattataaattaaattcagcaaaaaaagatttgctacaaagtatagagaagtataaaataa

SEQ ID NO: 258508 - DNA, 120 bp, Artificial Sequence
  ENSG00000124785_13 (sequence is synthesized)
gtgtgtgtgtgtgtgtgtgtgtgctcgtgcggggggccgggctgcgtgctcacgcgctccaggctgcgcccagagctcagctgctgggttggagaaaaagagggtctgcggtcgcaaatg

SEQ ID NO: 258509 - DNA, 120 bp, Artificial Sequence
  ENSG00000124785_14 (sequence is synthesized)
tacgggttcggtcaccttcctcttcggcgtctggcccggcgctcgcggacaggcgcccgcgttgggggccgggggattgaggtgtccggtcctcccgggacacattcacacacaagcgca

SEQ ID NO: 258510 - DNA, 120 bp, Artificial Sequence
  ENSG00000124785_15 (sequence is synthesized)
gccgccagaaagctgccgaggaccaggccggcgcccagggtcgtgggcgccagtgcggatttcgattctgagattcaccctttcttccccgccctaacgctgtgcttctctggcgccctc

SEQ ID NO: 258511 - DNA, 120 bp, Artificial Sequence
  ENSG00000124785_16 (sequence is synthesized)
ccggcgcccgggctgctttgggccgctaggcactcagcttccagccgggttcgtcggcctcagggcggaaagagatggccacagccgcgcgcccgcagcctgaccactcatcatccgcgc

SEQ ID NO: 258512 - DNA, 120 bp, Artificial Sequence
  ENSG00000124785_17 (sequence is synthesized)
cgcacgctgcagccgagaccccttctgtcacctcaaaatggaagatcgcattgcgagagctgtgacagggcttgctggggaagtgttgggagacgaaggagggagcgaggagaaagagaa

SEQ ID NO: 258513 - DNA, 120 bp, Artificial Sequence
  ENSG00000124786_0 (sequence is synthesized)
gcggtggaaagtgcaggagtgggcgaggaggaggaggaagaggaggtgatggcgacggaccaggggagggggagatgctccgtctagctcagacgccacgcaggctgccgtcacccttcc

SEQ ID NO: 258514 - DNA, 120 bp, Artificial Sequence
  ENSG00000124786_1 (sequence is synthesized)
gggtgacataccggccttggggtacgcgtgccttcggggcctttcctgtgtttgggacccagatctcctctcctccagaaaaccttgacactgcccatcttcctcatccagaaggagcgt

SEQ ID NO: 258515 - DNA, 120 bp, Artificial Sequence
  ENSG00000124786_2 (sequence is synthesized)
tcgaggaatggatgaggtcgggatggaagaaacgggtgattcccttttttgaaagagcggaaaccggccgggcggtttccagggaggagcatctgttcctcctcgcccgtttttcgccct

SEQ ID NO: 258516 - DNA, 120 bp, Artificial Sequence
  ENSG00000124786_3 (sequence is synthesized)
cgggctggcgagaactccctcaggtcccaatccgtggactcgcaggggccatgattgattccggagcgcagttaatcaaggcataatggcatggacttgacacagcaagcaaaagacata

SEQ ID NO: 258517 - DNA, 120 bp, Artificial Sequence
  ENSG00000124786_4 (sequence is synthesized)
cagaacataacagtccaggaaaccaacaaaaataactctgaaagcattgaatgcagcaaaataacaatggatctcaagttcaacaattccaggaaatatatttctatcactgtgccatcc

SEQ ID NO: 258518 - DNA, 120 bp, Artificial Sequence
  ENSG00000124786_5 (sequence is synthesized)
aaaacccaaacaatgtcaccacacatcaagtcagttgacgacgttgtggtacttggcatgaatctcagcaagtttaacaaacttactcagtttttcatatgtgttgctggagtttttgta

SEQ ID NO: 258519 - DNA, 120 bp, Artificial Sequence
  ENSG00000124786_6 (sequence is synthesized)
ttttacctaatttatgggtatttacaggaattaatattttcagtggagggttttaagtcctgtggctggtaccttaccttagtgcagtttgccttttactccatatttggcctaatagaa

SEQ ID NO: 258520 - DNA, 120 bp, Artificial Sequence
  ENSG00000124786_7 (sequence is synthesized)
cttcagcttattcaggacaaaaggaggagaataccaggaaaaacctacatgataatagcttttctaactgtgggtactatggggttatcaaacacttccttgggctacctgaattaccct

SEQ ID NO: 258521 - DNA, 120 bp, Artificial Sequence
  ENSG00000124786_8 (sequence is synthesized)
ccatatgtatgagccttggcctgatatggtttaccctcgctgacagcacaactgcaccaaatttcaacctgacgggtgtggtgcttatttccctggcactatgtgcagatgccgtcattg

SEQ ID NO: 258522 - DNA, 120 bp, Artificial Sequence
  ENSG00000124786_9 (sequence is synthesized)
gaaatgttcaagagaaagctatgaaacttcataatgcttctaattctgaaatggtattgtattcgtattcaattggttttgtatacattttactgggattgacatgcactagtggattag

SEQ ID NO: 258523 - DNA, 120 bp, Artificial Sequence
  ENSG00000124786_10 (sequence is synthesized)
gccctgcagtaacattttgtgcaaagaatccagttcggacctatggttatgcgttccttttttccctcactggatattttggaatctcctttgttctggctttgattaaaatttttggtg

SEQ ID NO: 258524 - DNA, 120 bp, Artificial Sequence
  ENSG00000124786_11 (sequence is synthesized)
cacttattgctgtaacagtgacaacaggaagaaaagcaatgaccattgtactttcgtttatattctttgctaaaccattcacgtttcagtatgtatggtctggtttgttagttgtccttg

SEQ ID NO: 258525 - DNA, 120 bp, Artificial Sequence
  ENSG00000124786_12 (sequence is synthesized)
gtatatttcttaatgtttacagcaaaaatatggataaaataagactaccatcactgtatgatttgataaacaaatcagtggaagcaagaaagtcaaggacgctggcacagactgtataga

SEQ ID NO: 258526 - DNA, 120 bp, Artificial Sequence
  ENSG00000124786_13 (sequence is synthesized)
cagtgattgtcctatttaaaatagaattttaagggaacaatcatcaattaattaactttccaaagggactgataaaaaccaaaggatctggaggcattgctatcccatttgtggacagat

SEQ ID NO: 258527 - DNA, 120 bp, Artificial Sequence
  ENSG00000124786_14 (sequence is synthesized)
ttcatatgaagttgttttgcggtgtcagccttttcttcagagcatttgtttgactgacttccaaagcaatcaagagagccacgtctagcagactttacaataaaatgtcaatatgaagga

SEQ ID NO: 258528 - DNA, 120 bp, Artificial Sequence
  ENSG00000124786_15 (sequence is synthesized)
ctgtaattcctagcagtttattgagaatttcactggaaatggaccatgtgttgcaagactaattggctataattatatcctatcaaagaaatcgatacgtaatagcagattgttttatat

SEQ ID NO: 258529 - DNA, 120 bp, Artificial Sequence
  ENSG00000124786_16 (sequence is synthesized)
tcattccattttgatggtgttatttaaattgattctctgttataagagtaaactgatgagttgaagtctggagagaataacattcattataaataaaattattctgtgatcttttttcaa

SEQ ID NO: 258530 - DNA, 120 bp, Artificial Sequence
  ENSG00000124786_17 (sequence is synthesized)
gcccgccaccggccacacaggcctgtcgggaggcggggccacgcgtctgcgcacgcgcgcagggacacataggcggaagtggcctgcgggcgccggagttgagagtgctttccggggagg

SEQ ID NO: 258531 - DNA, 120 bp, Artificial Sequence
  ENSG00000124786_18 (sequence is synthesized)
ctttaaaacttgagttttctctgatttaaaattattctttagagcaggagctcccaaccacccaggccgtggactggtaccagtccgtggcctgttaggaaccagaccacgcaacaagag

SEQ ID NO: 258532 - DNA, 120 bp, Artificial Sequence
  ENSG00000124786_19 (sequence is synthesized)
agctatgaaacttcataatgcttctaattctgaaatgaatattactaccagtagttattctggggtgtttatattcccaaataaactaaaaatcccattggtattgtgattggtatggca

SEQ ID NO: 258533 - DNA, 120 bp, Artificial Sequence
  ENSG00000124786_20 (sequence is synthesized)
ttcctggcttaagatagacgggatcttaatgcatacttcattatgctgccttaaacttttaagaagaaaaggatttgtacttgaaagaaaaacttgtcaactttctcaaatctttgataa

SEQ ID NO: 258534 - DNA, 120 bp, Artificial Sequence
  ENSG00000124787_0 (sequence is synthesized)
agcggaggccgggaggaccaggaacccaggagagcatggccacgctgcgccggcttcgggaggcgccgcggcacttactggtttgcgagaaatccaacttcggcaaccacaagtcgcgcc

SEQ ID NO: 258535 - DNA, 120 bp, Artificial Sequence
  ENSG00000124787_1 (sequence is synthesized)
accggcatcttgtgcagacgcactactataactacagggtttcatttctcattcctgaatgtgggatactatcggaagaactgaaaaacctggtcatgaacactggaccctattactttg

SEQ ID NO: 258536 - DNA, 120 bp, Artificial Sequence
  ENSG00000124787_2 (sequence is synthesized)
tgaagaatttacctcttcatgaattaattacacctgaattcatcagtacctttataaagaaaggttcttgctatgcactaacatacaatacacatattgatgaagataatactgttgccc

SEQ ID NO: 258537 - DNA, 120 bp, Artificial Sequence
  ENSG00000124787_3 (sequence is synthesized)
tgctaccaaatgggaaattaattttgtcactggataaagacacttatgaagaaactggacttcagggtcatccatctcagttttctggcagaaaaattatgaaatttattgtttccattg

SEQ ID NO: 258538 - DNA, 120 bp, Artificial Sequence
  ENSG00000124787_4 (sequence is synthesized)
atttgatggaattatccttaaacttggattctaagaagtatgaaagaatatcttggtctttcaaagaaaagaagccattgaaatttgattttcttttggcttggcataaaacaggttcag

SEQ ID NO: 258539 - DNA, 120 bp, Artificial Sequence
  ENSG00000124787_5 (sequence is synthesized)
aagaatcgacaatgatgtcatatttttccaagtaccaaattcaggagcatcagccaaaagtagcactgagcacgttgagagatctccagtgcccagtgctgcagagcagcgagctggagg

SEQ ID NO: 258540 - DNA, 120 bp, Artificial Sequence
  ENSG00000124787_6 (sequence is synthesized)
gcgccgtcttcagtaatgtcgacctaaataatgagcctaataatttcatatcaacctattgctgtcctgagccaagcacagtggtggcaaaagcttatttgtgtacaatcactggcttca

SEQ ID NO: 258541 - DNA, 120 bp, Artificial Sequence
  ENSG00000124787_7 (sequence is synthesized)
tacttccagagaagatctgtctcctattggaacatctctgtcactactttgatgaaccgaagttagctccatgggttacactgtccgttcaaggctttgcagacagccctgtttcttggg

SEQ ID NO: 258542 - DNA, 120 bp, Artificial Sequence
  ENSG00000124787_8 (sequence is synthesized)
aaaaaaatgaacatggttttcgaaaaggaggagaacatttatataactttgtgatttttaataatcaggactattggcttcagatggctgttggggcaaatgatcactgtccaccataaa

SEQ ID NO: 258543 - DNA, 120 bp, Artificial Sequence
  ENSG00000124787_9 (sequence is synthesized)
aaataaaaattaaaaatcgtgtttacttacatttacgcttgctttcagatttcttaatggtaaaaggtctgtgtgtccactcaggcttgtgtgatggtgacatttctcagatcagcattt

SEQ ID NO: 258544 - DNA, 120 bp, Artificial Sequence
  ENSG00000124787_10 (sequence is synthesized)
gctggcatcctgccctgcacctgagacccatctgtgatggcagcaaggcctgctgtccagtgaatagctcatagttgatttctctctgtcaacataagcacagggttgtgggttactatg

SEQ ID NO: 258545 - DNA, 120 bp, Artificial Sequence
  ENSG00000124787_11 (sequence is synthesized)
tggtacactgggccaggatgtccagggaccggggatattggtccccatctcactccattggttgagatatattttgttcattacaactttttcagataataaaaagaaatctcatcctta

SEQ ID NO: 258546 - DNA, 120 bp, Artificial Sequence
  ENSG00000124787_12 (sequence is synthesized)
tacacctgaattcatcagtacctttataaagaaaggtaagaaaaacctgaaatggctgtgaacaaggctggatgaggaagggtagggagaccacatcacgatgctagggctgttgttttg

SEQ ID NO: 258547 - DNA, 120 bp, Artificial Sequence
  ENSG00000124787_13 (sequence is synthesized)
tttcaaacagggcctgtggtatagtctgtgtggtcaggtgcacacgcgttctcccccgcattctcatcctgttctttcttgtaccctctttaggtggtggtttctgattgcaattggcca

SEQ ID NO: 258548 - DNA, 120 bp, Artificial Sequence
  ENSG00000124787_14 (sequence is synthesized)
caagtgttggatggggatgttgtaacatgacagtatccgtccccttaaaatgaggattaatggagaggagagacttgcagtctgtgttcagatgcactgctgttgaagatgtggctgcaa

SEQ ID NO: 258549 - DNA, 120 bp, Artificial Sequence
  ENSG00000124788_0 (sequence is synthesized)
ctactacagtggcggagccgtacaggacctgtttcactgcagggggatccaaaacaagccccgtggagcagcagccagagcaacagcagccgcaagacattgtttctctccctctgcccc

SEQ ID NO: 258550 - DNA, 120 bp, Artificial Sequence
  ENSG00000124788_1 (sequence is synthesized)
cccttccccacgcaaccccagatccatttacactttacagttttacctcacaaaaactactacaagcaccaagctccctgatggaaaggagcatcgtgcatcaagtcaccagggtggtcc

SEQ ID NO: 258551 - DNA, 120 bp, Artificial Sequence
  ENSG00000124788_2 (sequence is synthesized)
attcaagctgcagatttgtttgtcatccttgtacagcaatctcctcctccactgccactacagggaagtgcatcacatgtcagcatactggagcatagtgaaagagtctattttgaagct

SEQ ID NO: 258552 - DNA, 120 bp, Artificial Sequence
  ENSG00000124788_3 (sequence is synthesized)
tcaaacttagtgctgctgcagaccaggaacaagagagaaagagtggatttcagcctgcacggatggtcttgaaacacaaatggtttttggtctaggcgttttacactgagattctccact

SEQ ID NO: 258553 - DNA, 120 bp, Artificial Sequence
  ENSG00000124788_4 (sequence is synthesized)
gccaccctttctactcaagcaaaatcttcgtgaaaagatctgctgcaaggaactgatagcttatggttctccattgtgatgaaagcacatggtacagttttccaaagaaattagaccatt

SEQ ID NO: 258554 - DNA, 120 bp, Artificial Sequence
  ENSG00000124788_5 (sequence is synthesized)
ttcttcgtgagaaagaaatcgacgtgctgttttcatagggtatttctcacttctctgtgaaaggaagaaagaacacgcctgagcccaagagccctcaggagccctccagagcctgtggga

SEQ ID NO: 258555 - DNA, 120 bp, Artificial Sequence
  ENSG00000124788_6 (sequence is synthesized)
agtctccatggtgaagtataggctgaggctacctgtgaacagtacgcagtgaatgttcatccagagctgctgttggcggattgtacccacggggagatgattcctcatgaagagcctgga

SEQ ID NO: 258556 - DNA, 120 bp, Artificial Sequence
  ENSG00000124788_7 (sequence is synthesized)
tcccctacagaaatcaaatgtgactttccgtttatcagactaaaatcagagccatccagacagtgaaacagtcaccgtggaggggggacggcgaaaaatgaaatccaaccaagagcggag

SEQ ID NO: 258557 - DNA, 120 bp, Artificial Sequence
  ENSG00000124788_8 (sequence is synthesized)
caacgaatgcctgcctcccaagaagcgcgagatccccgccaccagccggtcctccgaggagaaggcccctaccctgcccagcgacaaccaccgggtggagggcacagcatggctcccggg

SEQ ID NO: 258558 - DNA, 120 bp, Artificial Sequence
  ENSG00000124788_9 (sequence is synthesized)
caaccctggtggccggggccacgggggcgggaggcatgggccggcagggacctcggtggagcttggtttacaacagggaataggtttacacaaagcattgtccacagggctggactactc

SEQ ID NO: 258559 - DNA, 120 bp, Artificial Sequence
  ENSG00000124788_10 (sequence is synthesized)
cccgcccagcgctcccaggtctgtccccgtggccaccacgctgcctgccgcgtacgccaccccgcagccagggaccccggtgtcccccgtgcagtacgctcacctgccgcacaccttcca

SEQ ID NO: 258560 - DNA, 120 bp, Artificial Sequence
  ENSG00000124788_11 (sequence is synthesized)
gttcattgggtcctcccaatacagtggaacctatgccagcttcatcccatcacagctgatccccccaaccgccaaccccgtcaccagtgcagtggcctcggccgcaggggccaccactcc

SEQ ID NO: 258561 - DNA, 120 bp, Artificial Sequence
  ENSG00000124788_12 (sequence is synthesized)
ggccaccactccatcccagcgctcccagctggaggcctattccactctgctggccaacatgggcagtctgagccagacgccgggacacaaggctgagcagcagcagcagcagcagcagca

SEQ ID NO: 258562 - DNA, 120 bp, Artificial Sequence
  ENSG00000124788_13 (sequence is synthesized)
cagcagcagcagcagcagcagcagcacctcagcagggctccggggctcatcaccccggggtcccccccaccagcccagcagaaccagtacgtccacatttccagttctccgcagaacacc

SEQ ID NO: 258563 - DNA, 120 bp, Artificial Sequence
  ENSG00000124788_14 (sequence is synthesized)
ccacatttccagttctccgcagaacaccggccgcaccgcctctcctccggccatccccgtccacctccacccccaccagacgatgatcccacacacgctcaccctggggcccccctccca

SEQ ID NO: 258564 - DNA, 120 bp, Artificial Sequence
  ENSG00000124788_15 (sequence is synthesized)
ggtcgtcatgcaatacgccgactccggcagccactttgtccctcgggaggccaccaagaaagctgagagcagccggctgcagcaggccatccaggccaaggaggtcctgaacggtgagat

SEQ ID NO: 258565 - DNA, 120 bp, Artificial Sequence
  ENSG00000124788_16 (sequence is synthesized)
ggagaagagccggcggtacggggccccgtcctcagccgacctgggcctgggcaaggcaggcggcaagtcggttcctcacccgtacgagtccaggcacgtggtggtccacccgagcccctc

SEQ ID NO: 258566 - DNA, 120 bp, Artificial Sequence
  ENSG00000124788_17 (sequence is synthesized)
agactacagcagtcgtgatccttcgggggtccgggcctctgtgatggtcctgcccaacagcaacacgcccgcagctgacctggaggtgcaacaggccactcatcgtgaagcctccccttc

SEQ ID NO: 258567 - DNA, 120 bp, Artificial Sequence
  ENSG00000124788_18 (sequence is synthesized)
taccctcaacgacaaaagtggcctgcatttagggaagcctggccaccggtcctacgcgctctcaccccacacggtcattcagaccacacacagtgcttcagagccactcccggtgggact

SEQ ID NO: 258568 - DNA, 120 bp, Artificial Sequence
  ENSG00000124788_19 (sequence is synthesized)
gccagccacggccttctacgcagggactcaaccccctgtcatcggctacctgagcggccagcagcaagcaatcacctacgccggcagcctgccccagcacctggtgatccccggcacaca

SEQ ID NO: 258569 - DNA, 120 bp, Artificial Sequence
  ENSG00000124788_20 (sequence is synthesized)
gcccctgctcatcccggtcggcagcactgacatggaagcgtcgggggcagccccggccatagtcacgtcatccccccagtttgctgcagtgcctcacacgttcgtcaccaccgcccttcc

SEQ ID NO: 258570 - DNA, 120 bp, Artificial Sequence
  ENSG00000124788_21 (sequence is synthesized)
caagagcgagaacttcaaccctgaggccctggtcacccaggccgcctacccagccatggtgcaggcccagatccacctgcctgtggtgcagtccgtggcctccccggcggcggctccccc

SEQ ID NO: 258571 - DNA, 120 bp, Artificial Sequence
  ENSG00000124788_22 (sequence is synthesized)
tacgctgcctccctacttcatgaaaggctccatcatccagttggccaacggggagctaaagaaggtggaagacttaaaaacagaagatttcatccagagtgcagagataagcaacgacct

SEQ ID NO: 258572 - DNA, 120 bp, Artificial Sequence
  ENSG00000124788_23 (sequence is synthesized)
gaagatcgactccagcaccgtagagaggattgaagacagccatagcccgggcgtggccgtgatacagttcgccgtcggggagcaccgagcccaggtcagcgttgaagttttggtagagta

SEQ ID NO: 258573 - DNA, 120 bp, Artificial Sequence
  ENSG00000124788_24 (sequence is synthesized)
tcctttttttgtgtttggacagggctggtcatcctgctgtccggagagaaccagccagctctttgatttgccgtgttccaaactctcagttggggatgtctgcatctcgcttaccctcaa

SEQ ID NO: 258574 - DNA, 120 bp, Artificial Sequence
  ENSG00000124788_25 (sequence is synthesized)
gaacctgaagaacggctctgttaaaaagggccagcccgtggatcccgccagcgtcctgctgaagcactcaaaggccgacggcctggcgggcagcagacacaggtatgccgagcaggaaaa

SEQ ID NO: 258575 - DNA, 120 bp, Artificial Sequence
  ENSG00000124788_26 (sequence is synthesized)
cggaatcaaccaggggagtgcccagatgctctctgagaatggcgaactgaagtttccagagaaaatgggattgcctgcagcgcccttcctcaccaaaatagaacccagcaagcccgcggc

SEQ ID NO: 258576 - DNA, 120 bp, Artificial Sequence
  ENSG00000124788_27 (sequence is synthesized)
aacgaggaagaggaggtggtcggcgccagagagccgcaaactggagaagtcagaagacgaaccacctttgactcttcctaagccttctctaattcctcaggaggttaagatttgcattga

SEQ ID NO: 258577 - DNA, 120 bp, Artificial Sequence
  ENSG00000124788_28 (sequence is synthesized)
aggccggtctaatgtaggcaagtagaggcagcgtgggggaaaggaaacgtggctctcccttatcatttgtatccagattactgtactgtaggctaaaataacacagtatttacatgttat

SEQ ID NO: 258578 - DNA, 120 bp, Artificial Sequence
  ENSG00000124788_29 (sequence is synthesized)
cttcttaattttaggtttctgttctaaccttgtcattagagttacagcaggtgtgtcgcaggagactggtgcatatgctttttccacgagtgtctgtcagtgagcgggcgggaggaaggg

SEQ ID NO: 258579 - DNA, 120 bp, Artificial Sequence
  ENSG00000124788_30 (sequence is synthesized)
cacagcaggagcggtcagggctccaggcatccccggggaagaaaggaacggggcttcacagtgcctgccttctctagcggcacagaagcagccgggggcgctgactcccgctagtgtcag

SEQ ID NO: 258580 - DNA, 120 bp, Artificial Sequence
  ENSG00000124788_31 (sequence is synthesized)
gagaaaagtcccgtgggaagggtcctgcaggggtgcagggttgcacgcatgtgggggtgcacaggcgctgtggcggcgagtgagggtctctttttctctgcctccctctgcctcactctc

SEQ ID NO: 258581 - DNA, 120 bp, Artificial Sequence
  ENSG00000124788_32 (sequence is synthesized)
ttgctatcggcatgggccgggggggttcagagcagtgtcctcctggggttcccacgtgcaaaatcaacatcaggaacccagcttcagggcatcgcggagacgcgtcagatggcagatttg

SEQ ID NO: 258582 - DNA, 120 bp, Artificial Sequence
  ENSG00000124788_33 (sequence is synthesized)
gaaagttaaccatttaaaagaacatttttctctccaacatattttacaataaaagcaacttttaattgtatagatatatatttccccctatggggcctgactgcactgatatatattttt

SEQ ID NO: 258583 - DNA, 120 bp, Artificial Sequence
  ENSG00000124788_34 (sequence is synthesized)
tttaaagagcaactgccacatgcgggatttcatttctgctttttactagtgcagcgatgtcaccagggtgttgtggtggacagggaagcccctgctgtcatggccccacatggggtaagg

SEQ ID NO: 258584 - DNA, 120 bp, Artificial Sequence
  ENSG00000124788_35 (sequence is synthesized)
ggggttgggggtgggggagagggagagagcgaacacccacgctggtttctgtgcagtgttaggaaaaccaatcaggttattgcattgacttcactcccaagaggtagatgcaaactgccc

SEQ ID NO: 258585 - DNA, 120 bp, Artificial Sequence
  ENSG00000124788_36 (sequence is synthesized)
ttcagtgagagcaacagaagctcttcacgttgagtttgcgaaatctttttgtctttgaactctagtactgtttatagttcatgactatggacaactcgggtgccactttttttttttttc

SEQ ID NO: 258586 - DNA, 120 bp, Artificial Sequence
  ENSG00000124788_37 (sequence is synthesized)
agattccagtgtgacatgaggaattagattttgaagatgagcatatattactatctttaagcatttaaaaatactgttcacactttattaccaagcatcttggtctctcattcaacaagt

SEQ ID NO: 258587 - DNA, 120 bp, Artificial Sequence
  ENSG00000124788_38 (sequence is synthesized)
actgtatctcactttaaactctttggggaaaaaacaaaaacaaaaaaaactaagttgctttctttttttcaacactgtaactacatttcagctctgcagaattgctgaagagcaagatat

SEQ ID NO: 258588 - DNA, 120 bp, Artificial Sequence
  ENSG00000124788_39 (sequence is synthesized)
tgaaagtttcaatgtggtttaaagggatgaatgtgaattatgaactagtatgtgacaataaatgaccaccaagtactacctgacgggaggcacttttcactttgatgtctgagaatcagt

SEQ ID NO: 258589 - DNA, 120 bp, Artificial Sequence
  ENSG00000124788_40 (sequence is synthesized)
tcaaggcatatgcagagttggcagagaaactgagagaaaagggatggagaagagaatactcatttttgtccagtgtttttctttttaagatgaacttttaaagaaccttgcgatttgcac

SEQ ID NO: 258590 - DNA, 120 bp, Artificial Sequence
  ENSG00000124788_41 (sequence is synthesized)
atattgagtttataacttgtgtgatattcctgcagtttttatccaataacattgtgggaaaggtttgggggactgaacgagcataaataaatgtagcaaaatttctttctaacctgccta

SEQ ID NO: 258591 - DNA, 120 bp, Artificial Sequence
  ENSG00000124788_42 (sequence is synthesized)
aactctaggccattttataaggttatgttcctttgaaaattcattttggtctttttaccacatctgtcacaaaaagccaggtcttagcgggctcttagaaactctgagaattttcttcag

SEQ ID NO: 258592 - DNA, 120 bp, Artificial Sequence
  ENSG00000124788_43 (sequence is synthesized)
attcattgagagagttttccataaagacatttatatatgtgagcaagattttttttaaacaattactttattattgttgttattaatgttattttcagaatggcttttttttttctattc

SEQ ID NO: 258593 - DNA, 120 bp, Artificial Sequence
  ENSG00000124788_44 (sequence is synthesized)
ggtatttcatagtttttaaacctttcattcccagagatccgaaatatcatttgtgggttttgaatgcatctttaaagtgctttaaaaaaaagttttataagtagggagaaatttttaaat

SEQ ID NO: 258594 - DNA, 120 bp, Artificial Sequence
  ENSG00000124788_45 (sequence is synthesized)
attcttacttggatggctgcaactaaactgaacaaatacctgacttttcttttaccccattgaaaatagtactttcttcgtttcacaaattaaaaaaaaaatctggtatcaacccacatt

SEQ ID NO: 258595 - DNA, 120 bp, Artificial Sequence
  ENSG00000124788_46 (sequence is synthesized)
ttggctgtctagtattcatttacatttagggttcaccaggactaatgatttttataaaccgttttctggggtgtaccaaaaacatttgaataggtttagaatagctagaatagttccttg

SEQ ID NO: 258596 - DNA, 120 bp, Artificial Sequence
  ENSG00000124788_47 (sequence is synthesized)
actttcctcgaatttcattaccctctcagcatgcttgcagagagctgggtgggctcattcttgcagtcatactgcttatttagtgctgtattttttaaacgtttctgttcagagaacttg

SEQ ID NO: 258597 - DNA, 120 bp, Artificial Sequence
  ENSG00000124788_48 (sequence is synthesized)
cttaatcttccatatattctgctcagggcacttgcaattattaggttttgtttttctttttgttttttagcctttgatggtaagaggaatacgggctgccacatagactttgttctcatt

SEQ ID NO: 258598 - DNA, 120 bp, Artificial Sequence
  ENSG00000124788_49 (sequence is synthesized)
aatatcactatttacaactcatgtggactcagaaaaacacacaccaccttttggcttacttcgagtattgaattgactggatccactaaaccaacactaagatgggaaaacacacatggt

SEQ ID NO: 258599 - DNA, 120 bp, Artificial Sequence
  ENSG00000124788_50 (sequence is synthesized)
ttggagcaataggaacatcatcataatttttgtggttctatttcaggtataggaattataaaataattggttctttctaaacacttgtcccatttcattctcttgcttttttagcatgtg

SEQ ID NO: 258600 - DNA, 120 bp, Artificial Sequence
  ENSG00000124788_51 (sequence is synthesized)
caatactttctgtgccaatagagtctgaccagtgtgctatatagttaaagctcattcccttttggctttttccttgtttggttgatcttccccattctggccagagcagggctggaggga

SEQ ID NO: 258601 - DNA, 120 bp, Artificial Sequence
  ENSG00000124788_52 (sequence is synthesized)
aggagccaggagggagagagcctcccacctttcccctgctgcggatgctgagtgctggggcggggagccttcaggagccccgtgcgtctgccgccacgttgcagaaagagccagccaagg

SEQ ID NO: 258602 - DNA, 120 bp, Artificial Sequence
  ENSG00000124788_53 (sequence is synthesized)
agacccgggggaggaaccgcagtgtcccctgtcaccacacggaatagtgaatgtggagtgtggagaggaaggaggcagattcatttctaagacgcactctggagccatgtagcctggagt

SEQ ID NO: 258603 - DNA, 120 bp, Artificial Sequence
  ENSG00000124788_54 (sequence is synthesized)
caacccattttccacggtcttttctgcaagtgggcaggcccctcctcggggtctgtgtccttgagacttggagccctgcctctgagcctggacgggaagtgtggcctgttgtgtgtgtgc

SEQ ID NO: 258604 - DNA, 120 bp, Artificial Sequence
  ENSG00000124788_55 (sequence is synthesized)
gttctgagcgtgttggccagtggctgtggaggggaccacctgccacccacggtcaccactcccttgtggcagctttctcttcaaataggaagaacgcacagagggcaggagcctcctgtt

SEQ ID NO: 258605 - DNA, 120 bp, Artificial Sequence
  ENSG00000124788_56 (sequence is synthesized)
tgcagacgttggcgggccccgaggctcccagagcagcctctgtcaccgcttctgtgtagcaaacattaacgatgacaggggtagaaattcttcggtgccgttcagcttacaaggatcagc

SEQ ID NO: 258606 - DNA, 120 bp, Artificial Sequence
  ENSG00000124788_57 (sequence is synthesized)
catgtgcctctgtactatgtccactttgcaatatttaccgacagccgtcttttgttctttctttcctgttttccatttttaaactagtaacagcaggccttttgcgtttacaatggaaca

SEQ ID NO: 258607 - DNA, 120 bp, Artificial Sequence
  ENSG00000124788_58 (sequence is synthesized)
caatcaccaagaaattagtcagggcgaaaagaaaaaaataatactattaataagaaaccaacaaacaagaacctctctttctagggatttctaaatatataaaatgactgttccttagaa

SEQ ID NO: 258608 - DNA, 120 bp, Artificial Sequence
  ENSG00000124788_59 (sequence is synthesized)
tgtttaacttaagaattatttcagtttgtctgggccacactggggcagaggggggagggagggatacagagatggatgccacttacctcagatcttttaaagtggaaatccaaattgaat

SEQ ID NO: 258609 - DNA, 120 bp, Artificial Sequence
  ENSG00000124788_60 (sequence is synthesized)
tttcatttggactttcaggataattttctatgttggtcaacttttcgttttccctaactcacccagtttagtttgggatgatttgatttctgttgttgttgatcccatttctaacttgga

SEQ ID NO: 258610 - DNA, 120 bp, Artificial Sequence
  ENSG00000124788_61 (sequence is synthesized)
attgtgagcctctatgttttctgttaggtgagtgtgttgggttttttccccccaccaggaagtggcagcatccctccttctcccctaaagggactctgcggaacctttcacacctctttc

SEQ ID NO: 258611 - DNA, 120 bp, Artificial Sequence
  ENSG00000124788_62 (sequence is synthesized)
tcagggacggggcaggtgtgtgtgtggtacactgacgtgtccagaagcagcactttgactgctctggagtagggttgtacaatttcaaggaatgtttggatttcctgcatcttgtggatt

SEQ ID NO: 258612 - DNA, 120 bp, Artificial Sequence
  ENSG00000124788_63 (sequence is synthesized)
actccttagataccgcatagattgcaatataatgctgcatgttcaagatgaacagtagctcctagtaatcataaaatccactctttgcacagtttgatctttactgaaatatgttgccaa

SEQ ID NO: 258613 - DNA, 120 bp, Artificial Sequence
  ENSG00000124788_64 (sequence is synthesized)
aatttatttttgttgttgtagctctggattttgttttgttttgttttttaaggaaacgattgacaataccctttaacatctgtgactactaaggaaacctatttctttcatagagagaaa

SEQ ID NO: 258614 - DNA, 120 bp, Artificial Sequence
  ENSG00000124788_65 (sequence is synthesized)
aatctccaatgcttttgaagacactaataccgtgctatttcagatatgggtgaggaagcagagctctcggtaccgaaggccgggcttcttgagctgtgttggttgtcatggctactgttt

SEQ ID NO: 258615 - DNA, 120 bp, Artificial Sequence
  ENSG00000124788_66 (sequence is synthesized)
catgaaccacaagcagctcaacagactggtctgttgccttctgaaaccctttgcacttcaatttgcaccaggtgaaaacagggccagcagactccatggcccaattcggtttcttcggtg

SEQ ID NO: 258616 - DNA, 120 bp, Artificial Sequence
  ENSG00000124788_67 (sequence is synthesized)
gtgatgtgaaaggagagaattacactttttttttttttaagtggcgtggaggcctttgcttccacatttgtttttaacccagaatttctgaaatagagaatttaagaacacatcaagtaa

SEQ ID NO: 258617 - DNA, 120 bp, Artificial Sequence
  ENSG00000124788_68 (sequence is synthesized)
taaatatacagagaatatacttttttataaagcacatgcatctgctattgtgttgggttggtttcctctcttttccacggacagtgttgtgtttctggcatagggaaactccaaacaact

SEQ ID NO: 258618 - DNA, 120 bp, Artificial Sequence
  ENSG00000124788_69 (sequence is synthesized)
tgcacacctctactccggagctgagatttcttttacatagatgacctcgcttcaaatacgttaccttactgatgataggatcttttcttgtagcactataccttgtgggaattttttttt

SEQ ID NO: 258619 - DNA, 120 bp, Artificial Sequence
  ENSG00000124788_70 (sequence is synthesized)
aaatgtacacctgatttgagaagctgaagaaaacaaaattttgaagcactcactttgaggagtacaggtaatgttttaaaaaattgcacaaaagaaaaatgaatgtcgaaatgattcatt

SEQ ID NO: 258620 - DNA, 120 bp, Artificial Sequence
  ENSG00000124788_71 (sequence is synthesized)
cagtgtttgaaagatatggctctgttgaaacaatgagtttcatactttgtttgtaaaaaaaaaaaagcagagaagggttgaaagttacatgtttttttgtatatagaaatttgtcatgtc

SEQ ID NO: 258621 - DNA, 120 bp, Artificial Sequence
  ENSG00000124788_72 (sequence is synthesized)
taaatgatcagatttgtatggttatggcctggaagaattactacgtaaaaggctcttaaactatacctatgcttattgttatttttgttacatatagccctcgtctgagggaggggaact

SEQ ID NO: 258622 - DNA, 120 bp, Artificial Sequence
  ENSG00000124788_73 (sequence is synthesized)
cggtattctgcgatttgagaatactgttcattcctatgctgaaagtacttctctgagctcccttcttagtctaaactcttaagccattgcaacttctttttcttcagagatgatgtttga

SEQ ID NO: 258623 - DNA, 120 bp, Artificial Sequence
  ENSG00000124788_74 (sequence is synthesized)
cattttcagcacttcctgttcctataaacccaaagaatataatcttgaacacgaagtgtttgtaacaagggatccaggctaccaatcaaacaggactcattatggggacaaaaaaaaaaa

SEQ ID NO: 258624 - DNA, 120 bp, Artificial Sequence
  ENSG00000124788_75 (sequence is synthesized)
ttatttcaccttctttccccccacacctcatttaaatggggggagtaaaaacatgatttcaatgtaaatgcctcattttattttagttttattttgatttttatttaatataaagaggcc

SEQ ID NO: 258625 - DNA, 120 bp, Artificial Sequence
  ENSG00000124788_76 (sequence is synthesized)
agaataaatacggagcatcttctcagaatagtattcctgtccaaaaatcaagccggacagtggaaactggacagctgtggggatattaagcacccccacttacaattcttaaattcagaa

SEQ ID NO: 258626 - DNA, 120 bp, Artificial Sequence
  ENSG00000124788_77 (sequence is synthesized)
tctcgtcccctcccttctcgttgaaggcaactgttctggtagctaactttctcctgtgtaatggcgggagggaacaccggcttcagtttttcatgtccccatgacttgcatacaaatggt

SEQ ID NO: 258627 - DNA, 120 bp, Artificial Sequence
  ENSG00000124788_78 (sequence is synthesized)
tcaactgtattaaaattaagtgcatttggccaataggtagtatctatacaataacaacaatctctaagaatttccataacttttcttatctgaaaggactcaagtcttccactgcagata

SEQ ID NO: 258628 - DNA, 120 bp, Artificial Sequence
  ENSG00000124788_79 (sequence is synthesized)
cattggaggcttcacccacgttttctttccctttagtttgtttgctgtctggatggccaatgagcctgtctccttttctgtggccaatctgaaggccttcgttggaagtgttgtttacag

SEQ ID NO: 258629 - DNA, 120 bp, Artificial Sequence
  ENSG00000124788_80 (sequence is synthesized)
taatccttaccaagataacatactgtcctccagaataccaagtattaggtgacactagctcaagctgttgtcttcagagcagttaccaagaagctcggtgcacaggttttctctggttct

SEQ ID NO: 258630 - DNA, 120 bp, Artificial Sequence
  ENSG00000124788_81 (sequence is synthesized)
tacaggaaccacctactctttcagttttctggcccaggagtggggtaaatcctttagttagtgcatttgaacttgatacctgtgcattcagttctgtgaatactgccctttttggcgggg

SEQ ID NO: 258631 - DNA, 120 bp, Artificial Sequence
  ENSG00000124788_82 (sequence is synthesized)
tttcctcatctccccagcctgaactgctcaactctaaacccaaattagtgtcagccgaaaggaggtttcaagatagtcctgtcagtatttgtggtgaccttcagattagacagtcttcat

SEQ ID NO: 258632 - DNA, 120 bp, Artificial Sequence
  ENSG00000124788_83 (sequence is synthesized)
ttccagccagtggagtcctggctccagagccatctctgagactcgtactactggatgttttaatatcagatcattacccaccatatgcctcccacaggccaagggaaaacagacaccaga

SEQ ID NO: 258633 - DNA, 120 bp, Artificial Sequence
  ENSG00000124788_84 (sequence is synthesized)
acttgggttgagggcactaccagactgacatggccagtacagaggagaactagggaaggaatgatgttttgcaccttattgaaaagaaaattttaagtgcatacataatagttaagagct

SEQ ID NO: 258634 - DNA, 120 bp, Artificial Sequence
  ENSG00000124788_85 (sequence is synthesized)
tttattgtgacaggagaacttttttccatatgcgtgcatactctctgtaattccagtgtaaaatattgtacttgcactagcttttttaaacaaatattaaaaaatggaagaattcatatt

SEQ ID NO: 258635 - DNA, 120 bp, Artificial Sequence
  ENSG00000124788_86 (sequence is synthesized)
ctattttctaatcgtggtgtgtctatttgtaggatacactcgagtctgtttattgaattttatggtccctttctttgatggtgcttgcaggttttctaggtagaaattatttcattatta

SEQ ID NO: 258636 - DNA, 120 bp, Artificial Sequence
  ENSG00000124788_87 (sequence is synthesized)
taataaaacaatgtttgattcaaaatttgaacaaaattgttttaaataaattgtctgtataccagtacaagtttattgtttcagtatactcgtactaataaaataacagtgccaattgca

SEQ ID NO: 258637 - DNA, 120 bp, Artificial Sequence
  ENSG00000124788_88 (sequence is synthesized)
tcttcgttggaagtccccgggacttggtgtctttgccgttcaaagtgtttatgaactcgccaggaggcataatgtgtcaccattttattctgggccaccctaaaggatgacacccagctt

SEQ ID NO: 258638 - DNA, 120 bp, Artificial Sequence
  ENSG00000124788_89 (sequence is synthesized)
cagagacctcctcttggacgacatccctgagaatcaatgttttagctgtcccatagtctgacgtctgtttccgaccgcttttgagctggcgcaggcttagtcattaatggccaggacgat

SEQ ID NO: 258639 - DNA, 120 bp, Artificial Sequence
  ENSG00000124788_90 (sequence is synthesized)
gttaaatgttctgcctgattggcttgcagctacacaccttttgtcatttgcagagcagcaactccctcttgagctcttggggagtctttacacaaatacactagaaaaaaggcacccatc

SEQ ID NO: 258640 - DNA, 120 bp, Artificial Sequence
  ENSG00000124788_91 (sequence is synthesized)
cattttttttccatcttggcattagctcacaggcatagtcctgggatgacctggagtagaggcagtggaggataaattcatcttgcacagacttgtttgtgctagttctagcctgtctct

SEQ ID NO: 258641 - DNA, 120 bp, Artificial Sequence
  ENSG00000124788_92 (sequence is synthesized)
tttctagtgtttacataagcagatacaaaaaaaatttgatcactgatttaaatagcagggcttattttaaaaagttatgggtgcttcaaggtggtacagaataaaaatgtcagggttttt

SEQ ID NO: 258642 - DNA, 120 bp, Artificial Sequence
  ENSG00000124788_93 (sequence is synthesized)
tttttttttttttttaacaagtcgtaacacaaccaaaatgtatatattaatgttttgtcaggaaagggtcaaaatggaaaatttgcaacaaagacaaactacaatagaacaagtgcaaac

SEQ ID NO: 258643 - DNA, 120 bp, Artificial Sequence
  ENSG00000124788_94 (sequence is synthesized)
agaagctgacaaatatatgcccctcgttgggagttcagcccatggaatgttatgtaggacaaaaggaatggaagagatatttcagtaacattttgttctctgtcaaaaaccttctgaaat

SEQ ID NO: 258644 - DNA, 120 bp, Artificial Sequence
  ENSG00000124788_95 (sequence is synthesized)
ataaatctgctgtgtattggagaatggatacagcaattgattcaagttgaatagctttcatttaactagaatatcccacagaaagcagttcttgttctgacaaccatatttttgctttct

SEQ ID NO: 258645 - DNA, 120 bp, Artificial Sequence
  ENSG00000124788_96 (sequence is synthesized)
ttcacttaaagaaaattgaattcatgtttacatatcttatagggttgttttatggacaaagacacgggtcaaaccccatcacagtggctagtgttacaacaaatagaaacatttctaaat

SEQ ID NO: 258646 - DNA, 120 bp, Artificial Sequence
  ENSG00000124788_97 (sequence is synthesized)
gaaataacatttctaagccagggccagtgcctgcagtaataatactaggttggtattatgaagccatttgcaactataaataattcagtcatagatgtgctttttttaaaatcctggttt

SEQ ID NO: 258647 - DNA, 120 bp, Artificial Sequence
  ENSG00000124788_98 (sequence is synthesized)
tttaaaattctagtcttttgccaatacacacacccatacacatacttcacctatttgcataatagaggaggaatatgaatatgtatataataaagtcactttattttggactttctgaaa

SEQ ID NO: 258648 - DNA, 120 bp, Artificial Sequence
  ENSG00000124788_99 (sequence is synthesized)
aggaggagggatcacttgagttgagctctgctgactagattgcatttctgtgggaagagatggatggagcatgaggaaggccatgtgtgtgtctgggacataacaagccaatgcacgcat

SEQ ID NO: 258649 - DNA, 120 bp, Artificial Sequence
  ENSG00000124788_100 (sequence is synthesized)
taggctgaggctacctgtgaacagtacgcagtgaatgttatctgatgcacaaaggaaaataataatacaaaacccataacctattcattgtattgttgcggtagatcgagctacatgctg

SEQ ID NO: 258650 - DNA, 120 bp, Artificial Sequence
  ENSG00000124788_101 (sequence is synthesized)
cacagcaaaagaccttctttgcacttctttcaagcagaattattgctgtatattcactctgaactgagagatcattgcaaaaaaaaaaaagaagaagaagaagagaagaaaagaaaaaag

SEQ ID NO: 258651 - DNA, 120 bp, Artificial Sequence
  ENSG00000124788_102 (sequence is synthesized)
aaataggttaagcaaattttgtggtggtgcttatgtgtgcacagacatgcatgaggcctccgcatcttccaaacttggaaagcatattttaacagcacaaatatatctacatgtttgatc

SEQ ID NO: 258652 - DNA, 120 bp, Artificial Sequence
  ENSG00000124788_103 (sequence is synthesized)
tctgaggataaagtcctgacctggaaaattgcctcctagccatgctcccttactttgttggctgttgaatatcattttctttgcaaactctgtttgggcatagtgtgggaagttgagaaa

SEQ ID NO: 258653 - DNA, 120 bp, Artificial Sequence
  ENSG00000124788_104 (sequence is synthesized)
ttgccaagattgttttttaaaacttcgattaaagtatctatctatttggtttaatctatatgttcatgaagactttcatttgactttgcgatgattgataattgccaattggggcttgaa

SEQ ID NO: 258654 - DNA, 120 bp, Artificial Sequence
  ENSG00000124788_105 (sequence is synthesized)
cccttccccacgcaaccccagatccatttacactttacaaacatcagtgctctatcctcatgtccttctaagaatcaaaagttttaacctcacagaatccagcgtgtggcttgtgagtga

SEQ ID NO: 258655 - DNA, 120 bp, Artificial Sequence
  ENSG00000124788_106 (sequence is synthesized)
gactcctttttccatgtgataaccggtctgctttggggaggcaaaagaatcttaccgacacgtacatattttaggatgggctctgagccaattcatcaagccaactcctcactttgaaac

SEQ ID NO: 258656 - DNA, 120 bp, Artificial Sequence
  ENSG00000124788_107 (sequence is synthesized)
gattgtggaatacctgccagaggaagaatctaccgaagttcagtcaactattaattggaaaggaggcagcagactgaggagatagagaatctttgctctcaggtggatggaggttggagt

SEQ ID NO: 258657 - DNA, 120 bp, Artificial Sequence
  ENSG00000124788_108 (sequence is synthesized)
cctcaatctgtcacttgtgggtacattatgtagctccttcacctccatttctttatttattagaaggcgggtaataaaagtgtccactgcctaggatggttctagggcttagaggagata

SEQ ID NO: 258658 - DNA, 120 bp, Artificial Sequence
  ENSG00000124788_109 (sequence is synthesized)
atgaaactcaagggcttaacatgtgaatgttagctattatcattgcatgtgtccattaacacccaaagataaccagtgttgtttagtagttctttgcgtattttctttctaaatagataa

SEQ ID NO: 258659 - DNA, 120 bp, Artificial Sequence
  ENSG00000124788_110 (sequence is synthesized)
tgaaattccataattacccacaaatatggatgtgcccttctaagggtcttgccatgtcaaccagcccagctgaaagctaatagccagtgttagcggtttaaggaactgagcttcagaatt

SEQ ID NO: 258660 - DNA, 120 bp, Artificial Sequence
  ENSG00000124788_111 (sequence is synthesized)
gagagcccccagcaaaggaagttctgtttttattctccatttctactctcctcaaggagaaattaggtgtttattgttttgttttgttttttaaattcccagatcattctggcattggtc

SEQ ID NO: 258661 - DNA, 120 bp, Artificial Sequence
  ENSG00000124788_112 (sequence is synthesized)
ctggattcgctgcaaatgtaatttttagcaacatctattactcctgaaatattttggctcttcgtggcctgtatgattcagtagactctgaggttttccaagtacattaaggacttaaat

SEQ ID NO: 258662 - DNA, 120 bp, Artificial Sequence
  ENSG00000124788_113 (sequence is synthesized)
acagaatgtcttaaaattttagggctattgatcaagagaaagcttctcgaggaataaagttctgttaggttttagccctattctgctttcaaaattcttaactggatgccgtctattttg

SEQ ID NO: 258663 - DNA, 120 bp, Artificial Sequence
  ENSG00000124788_114 (sequence is synthesized)
ttttctttctgtgtttataactaatttgctacttgggtttattgttttcttacttagaaactacttttttttttgttttgtaaatgcacagcacttaaaaatataaaacagttccaaaca

SEQ ID NO: 258664 - DNA, 120 bp, Artificial Sequence
  ENSG00000124788_115 (sequence is synthesized)
gttccaacctgttcattgtttataccttgaccatcttttctgtcttattgctgaaccatcgcttctctttctacttctcttctgggatttcatcttgctcagctaaaattctagtgtgtt

SEQ ID NO: 258665 - DNA, 120 bp, Artificial Sequence
  ENSG00000124788_116 (sequence is synthesized)
attctgaatattatggctggagtttcctgaccaacttcttgcatctgagtccatttcctgtgcttaaggctgctggcattccattcactgctcctagtcaaaactgaaacttctcctgct

SEQ ID NO: 258666 - DNA, 120 bp, Artificial Sequence
  ENSG00000124788_117 (sequence is synthesized)
aatgagattaggccttacaacactattaatttcttcctctctatttcttgctccattgttatttctcagagatgaaaatctatttgtcattatgagattcattttggcatcacttactaa

SEQ ID NO: 258667 - DNA, 120 bp, Artificial Sequence
  ENSG00000124788_118 (sequence is synthesized)
agttcccttggatttttctgttcttcatacaccctacagcttcaaactgcaacagtcatcaactggtctttgacaaattagttgtctctacacatggtttacaatattacactagctgtt

SEQ ID NO: 258668 - DNA, 120 bp, Artificial Sequence
  ENSG00000124788_119 (sequence is synthesized)
taaaaataattaagcttctttctgtgttctttgctgtgggtcaggaactttacttcctttgccatgcaacacagaagttaatcacaaatgggtcctctgaaccaaataattaaaaataga

SEQ ID NO: 258669 - DNA, 120 bp, Artificial Sequence
  ENSG00000124788_120 (sequence is synthesized)
gcaaagtttctgaaccaggcggttggcagaaacgtctgtacttccatctgtgcatggttaggaaaatatttcacgatatttaaatagcatcagctttgctctcttttgtgtgagagtgtg

SEQ ID NO: 258670 - DNA, 120 bp, Artificial Sequence
  ENSG00000124788_121 (sequence is synthesized)
tctgtgtgtctatgcgtaattcattgctttgaaggtttgtttgactgttagataatcatataaaaaaagttactggcaaggaaacaggaaagcaaatccaggtgttttgtgcatacattc

SEQ ID NO: 258671 - DNA, 120 bp, Artificial Sequence
  ENSG00000124788_122 (sequence is synthesized)
tttatttaccagtctctgtgaaggagcaatgatcttgcttttgcttttctctctgactgaaagtttttgccttgttatgtgctgcagaaaactaaataacattgcattttgactttgaaa

SEQ ID NO: 258672 - DNA, 120 bp, Artificial Sequence
  ENSG00000124788_123 (sequence is synthesized)
cagccgcaagacattgtttctctccctctgcccccccttccccacgcaaccccagatccatttacactttacaatcacatgtggggaaaccaaggactacaagaattccttcttttgcat

SEQ ID NO: 258673 - DNA, 120 bp, Artificial Sequence
  ENSG00000124788_124 (sequence is synthesized)
catgtactttaaaagtttattcctttagttaaaagaaattttaactagattcttaaagcctagattggaagaaagtgtttgctaaaaaaaaagtcatggctgggtgcagtggctcacacc

SEQ ID NO: 258674 - DNA, 77 bp, Artificial Sequence
  ENSG00000124788_125 (sequence is synthesized)
atcacaaagtcaggagataaatgcaaaaagtaactgagtgtggtggcatgtgccagtaatcccagctactcgggagg

SEQ ID NO: 258675 - DNA, 120 bp, Artificial Sequence
  ENSG00000124788_126 (sequence is synthesized)
gataatttttgtctattgaatggtgatgctgtgattttcaggatgtatgtatcatggaaactggtagagaaagaaagaactgagatcatgctgaagtatactggggcccaccaagaggta

SEQ ID NO: 258676 - DNA, 120 bp, Artificial Sequence
  ENSG00000124788_127 (sequence is synthesized)
caattgtcaccaaaatggcaacccgtaaaagagaaccattcttaagaaagagtcatgtaccatcaagcggggatttccagaagcctctgatagtaacagttctcccttccattcctttcc

SEQ ID NO: 258677 - DNA, 120 bp, Artificial Sequence
  ENSG00000124788_128 (sequence is synthesized)
tctctactttcaagatgcgatgatgacaaaaagactgacttgtcaaaaaaaccatgaaattccatacaaatgggcaagctgacatatagcagcttcggaaatttccacaatcgctcctct

SEQ ID NO: 258678 - DNA, 120 bp, Artificial Sequence
  ENSG00000124788_129 (sequence is synthesized)
gagttgcctcaaggagaagaaaagtgagagaaaggaagggtacctttgcccccattaaggcacatgtagcatcctggaagctttgaaattacctgtccccaaagttattagaattatgtc

SEQ ID NO: 258679 - DNA, 120 bp, Artificial Sequence
  ENSG00000124788_130 (sequence is synthesized)
attttttggttgttatattatgaaagcctccccacccctaaaagtttgtctataataatttttttgatcaggatttttacttcttaaattaatattaaagcattttaatgtttctagaaa

SEQ ID NO: 258680 - DNA, 120 bp, Artificial Sequence
  ENSG00000124788_131 (sequence is synthesized)
gttgtaagttaacaaccaagaacaatatgtgtagtggcttgccttgtaggattcatgaatcacttgatgtaaccgagccaggtgttgaaggggtattagcatgagctctaggtgatcgtc

SEQ ID NO: 258681 - DNA, 120 bp, Artificial Sequence
  ENSG00000124788_132 (sequence is synthesized)
caattaatttctttttttaattggaagggaatttaattttttaagggaagaggtcctgtttgtatttgctggaacttgcctttctctcggcttctatggcatgctgcaaactatctactt

SEQ ID NO: 258682 - DNA, 120 bp, Artificial Sequence
  ENSG00000124788_133 (sequence is synthesized)
caggaataaaaggatggaatacagtgattctttcattgtaggaacaccttttctactggtacagtcaaatagtatcagatttagagcagcccctttaaactgggctgttgcagttctttt

SEQ ID NO: 258683 - DNA, 120 bp, Artificial Sequence
  ENSG00000124788_134 (sequence is synthesized)
aggttggtgagtagggggtaaaattctccaggctaaggattagcaatcagagtttccatccagcaattattcttctgtatgtgcagttgatgaaaatgacatttttctctctggcttgta

SEQ ID NO: 258684 - DNA, 120 bp, Artificial Sequence
  ENSG00000124788_135 (sequence is synthesized)
aaatcttgaggtatgcaagttacaagcagttatgtttggtgcttcccttacttaaaatgagctgatttactggttttgatcagttactggcttgggattttgagattagtaaagtttgtt

SEQ ID NO: 258685 - DNA, 120 bp, Artificial Sequence
  ENSG00000124788_136 (sequence is synthesized)
cccacatgtcacctgatggccgccttgcatgagaagttttagtgtcaggtaatggaagagatgacatagtgtgacttcagggagcccttccactaggaaataatgcaaaggtgctcagcc

SEQ ID NO: 258686 - DNA, 120 bp, Artificial Sequence
  ENSG00000124788_137 (sequence is synthesized)
ctcctactttctagagaatttaccttgttgctggactgtgtcacaaaacacagttaggagattttgaccaggaaagaaaatagctacatgaaacccaggatggcctatgaatacctctga

SEQ ID NO: 258687 - DNA, 120 bp, Artificial Sequence
  ENSG00000124788_138 (sequence is synthesized)
gtgaaaaagcaagcaccttcaagcccagtgttggagaagtatcttctcccaggtctctattcagttttgactaaaggaggtttggcgagcagaaaggctaatgattgtctaagtccttca

SEQ ID NO: 258688 - DNA, 120 bp, Artificial Sequence
  ENSG00000124788_139 (sequence is synthesized)
gagaagctgtgtggttttgtatagctgtgagtaaaaccacacccattcaggaaatgcaatgtactttcttctaacaggcatcatcaaaacagatgctgatttacatgcatcctgatggta

SEQ ID NO: 258689 - DNA, 120 bp, Artificial Sequence
  ENSG00000124788_140 (sequence is synthesized)
caaaacagatgctgatttacatgcatcctgatggtatgccaaataataatggaagagcagatacaaatacacttgactttattcctgaatttaatttttttttttcttgagacagagtct

SEQ ID NO: 258690 - DNA, 70 bp, Artificial Sequence
  ENSG00000124788_141 (sequence is synthesized)
cacccaggctggagtgcagtggcgcggccacagactcccaaatatctgggattacaggcatgcaacacca

SEQ ID NO: 258691 - DNA, 120 bp, Artificial Sequence
  ENSG00000124788_142 (sequence is synthesized)
gctggggttacaggcatgagccaccgcatgcagcctgaatttaatcattgactcttgtttttaacttttaatataatattggctactggtttgtggtaggtatcttttactgtggcaaat

SEQ ID NO: 258692 - DNA, 120 bp, Artificial Sequence
  ENSG00000124789_0 (sequence is synthesized)
atggcctcgggagccggaggagtcggagggggcggtggcggcaagatccggacgcggcgttgccaccaggggccaattaagccttaccagcaggggcgacaacagcatcagggcattctt

SEQ ID NO: 258693 - DNA, 120 bp, Artificial Sequence
  ENSG00000124789_1 (sequence is synthesized)
agcagggttacagaatctgttaagaatattgtgccagggtggctacaaagatacttcaacaagaatgaagatgtatgcagctgttcaacagacacaagcgaggttccacgctggccagaa

SEQ ID NO: 258694 - DNA, 120 bp, Artificial Sequence
  ENSG00000124789_2 (sequence is synthesized)
aataaagaggaccatctggtatatgccgatgaggagagctctaatattactgatgggagaatcacacctgagccagcagtcagtaatacagaagaaccttcaacaactagtactgcttca

SEQ ID NO: 258695 - DNA, 120 bp, Artificial Sequence
  ENSG00000124789_3 (sequence is synthesized)
aattatccagatgtgttaacaaggccttctcttcatcggagccatctgaatttttccatgttggaatcccctgcattacactgtcagccatctacatcctcggcattcccaattggcagt

SEQ ID NO: 258696 - DNA, 120 bp, Artificial Sequence
  ENSG00000124789_4 (sequence is synthesized)
tcgggattttcccttgtaaaggaaattaaagattctacctctcagcatgatgatgataacatctcaactaccagtggtttttcttcaagagcttctgataaagatataactgtttcaaag

SEQ ID NO: 258697 - DNA, 120 bp, Artificial Sequence
  ENSG00000124789_5 (sequence is synthesized)
aacacttcattgccacctctgtggtccccagaagctgaacgttctcactcactctcacagcacactgccaccagctcaaaaaaaccagcattcaacttgtctgcctttggaacactttcc

SEQ ID NO: 258698 - DNA, 120 bp, Artificial Sequence
  ENSG00000124789_6 (sequence is synthesized)
ccttcacttgggaattcttcaatccttaaaaccagtcagcttggagattctcctttttatcctggaaaaacaacatacggtggggcagcagctgctgtaagacagtctaaactacgaaat

SEQ ID NO: 258699 - DNA, 120 bp, Artificial Sequence
  ENSG00000124789_7 (sequence is synthesized)
acaccttatcaggcaccagttagaagacaaatgaaagctaagcaactcagtgcacaatcttacggtgtgaccagttcaacagctcggcgaatattgcagtctttagagaagatgtcaagc

SEQ ID NO: 258700 - DNA, 120 bp, Artificial Sequence
  ENSG00000124789_8 (sequence is synthesized)
cctttagcggatgcaaaaagaattccatccattgtttcttctcctctgaattctcctcttgataggagtgggatagatatcacagattttcaggccaaaagagaaaaggtggattctcaa

SEQ ID NO: 258701 - DNA, 120 bp, Artificial Sequence
  ENSG00000124789_9 (sequence is synthesized)
tatcctcctgttcagagacttatgaccccaaagccagtttccatagcaacaaatcgaagtgtttattttaaaccatctctgactccttctggtgaattcaggaagactaatcaaagaata

SEQ ID NO: 258702 - DNA, 120 bp, Artificial Sequence
  ENSG00000124789_10 (sequence is synthesized)
gataacaagtgcagtactggatatgaaaaaaatatgacacccggacaaaatagagaacaacgagaaagtggcttttcatatccaaatttcagtttgcctgcagccaatggtttatcttct

SEQ ID NO: 258703 - DNA, 120 bp, Artificial Sequence
  ENSG00000124789_11 (sequence is synthesized)
ggagtaggtggtggaggtggcaagatgagacgagaaagaacacgctttgttgcttctaaacctctggaggaggaggaaatggaagttccagtattaccgaaaatctctctaccgatcacc

SEQ ID NO: 258704 - DNA, 120 bp, Artificial Sequence
  ENSG00000124789_12 (sequence is synthesized)
agttcttcactgcctacctttaattttagttcccctgagatcacaacttcctctccatcacccatcaattcgtctcaagcattaacaaacaaggtacaaatgacctctccgagcagcact

SEQ ID NO: 258705 - DNA, 120 bp, Artificial Sequence
  ENSG00000124789_13 (sequence is synthesized)
ggcagtcccatgtttaaattttcatctccaatcgtaaaatctactgaggcaaatgtactacctccatcatctattggatttacatttagtgtgcctgttgcaaaaacagcagaactttct

SEQ ID NO: 258706 - DNA, 120 bp, Artificial Sequence
  ENSG00000124789_14 (sequence is synthesized)
ggttctagtagtactttagaaccaattataagtagttcagctcatcatgtcactacagtgaacagtacaaattgtaagaagacaccacctgaagattgtgagggtccttttagacctgca

SEQ ID NO: 258707 - DNA, 120 bp, Artificial Sequence
  ENSG00000124789_15 (sequence is synthesized)
gaaatcctgaaagaaggaagtgttctagatattctgaaaagccctggtttcgcatcgccgaagatagattctgttgctgctcagcccaccgcaacaagcccagtagtttatacaagacca

SEQ ID NO: 258708 - DNA, 120 bp, Artificial Sequence
  ENSG00000124789_16 (sequence is synthesized)
gcaataagtagcttttcttctagtggaattgggtttggggagagtttaaaagctgggtcatcatggcagtgtgatacatgtctactccagaacaaagttacagacaacaaatgcatagcc

SEQ ID NO: 258709 - DNA, 120 bp, Artificial Sequence
  ENSG00000124789_17 (sequence is synthesized)
tgtcaagcagcaaaattgtcacccagagatactgctaaacagactggaattgaaacaccaaataaaagtggcaaaacaactctttctgcatcagggacaggctttggagacaaatttaaa

SEQ ID NO: 258710 - DNA, 120 bp, Artificial Sequence
  ENSG00000124789_18 (sequence is synthesized)
ccagtgataggcacttgggattgtgatacctgtttagtgcaaaataaacctgaagcaataaaatgtgtagcctgtgaaacaccgaaacctggaacttgtgtgaagcgagcccttacattg

SEQ ID NO: 258711 - DNA, 120 bp, Artificial Sequence
  ENSG00000124789_19 (sequence is synthesized)
acagtggtttcggaaagtgctgagactatgactgcttcatcttccagctgcactgtaaccactggtaccttaggatttggagataaattcaaaaggcccattggatcttgggagtgttca

SEQ ID NO: 258712 - DNA, 120 bp, Artificial Sequence
  ENSG00000124789_20 (sequence is synthesized)
gtatgctgtgtttctaataatgcagaagacaataagtgtgtgtcctgtatgtctgagaaaccaggaagttcagtacctgcttcaagtagcagcactgtacctgtctctctgccttctgga

SEQ ID NO: 258713 - DNA, 120 bp, Artificial Sequence
  ENSG00000124789_21 (sequence is synthesized)
ggctctctaggattggaaaagttcaagaaacccgagggaagctgggactgtgaattgtgcctagtgcagaataaggcagactctaccaaatgtttggcatgtgaaagtgcaaagccaggc

SEQ ID NO: 258714 - DNA, 120 bp, Artificial Sequence
  ENSG00000124789_22 (sequence is synthesized)
tcctcttctgggccttctcagactttaacaagcactggaaattttaaatttggagatcagggaggattcaaaataggtgtgtcatccgattctgggtctataaaccccatgagtgaaggc

SEQ ID NO: 258715 - DNA, 120 bp, Artificial Sequence
  ENSG00000124789_23 (sequence is synthesized)
tttaaattttctaaaccaataggagattttaaatttggagtttcatctgaatctaagcccgaagaagttaaaaaagatagtaagaatgataattttaagtttggactttcttctggttta

SEQ ID NO: 258716 - DNA, 120 bp, Artificial Sequence
  ENSG00000124789_24 (sequence is synthesized)
agcaacccagtttctttaactccatttcaatttggggtatctaatcttggacaggaagaaaagaaagaggaactgcccaaatcttcctctgcaggttttagctttggtacaggtgttatt

SEQ ID NO: 258717 - DNA, 120 bp, Artificial Sequence
  ENSG00000124789_25 (sequence is synthesized)
aactccacccctgctcctgctaacaccatagtgacctctgagaacaagagcagcttcaaccttggaaccatagaaaccaagagtgcttcagtggctcctttcacatgtaagacatcagaa

SEQ ID NO: 258718 - DNA, 120 bp, Artificial Sequence
  ENSG00000124789_26 (sequence is synthesized)
gctaaaaaagaagaaatgcctgccaccaaaggaggattctcttttggcaacgtggagcctgcctctctgccatctgcctcagtgtttgttttgggaaggacagaagagaaacagcaagag

SEQ ID NO: 258719 - DNA, 120 bp, Artificial Sequence
  ENSG00000124789_27 (sequence is synthesized)
cctgtcacttctacttccctagtttttgggaagaaagctgacaatgaagagccaaagtgtcaaccagtgttttcctttgggaattcagagcaaaccaaagatgagaattcttcaaagtcc

SEQ ID NO: 258720 - DNA, 120 bp, Artificial Sequence
  ENSG00000124789_28 (sequence is synthesized)
acatttagttttagtatgacaaaaccatctgagaaggaatctgaacagccagcaaaagccacttttgcctttggagctcaaactagtactacagctgatcaaggtgcagcaaagccagtt

SEQ ID NO: 258721 - DNA, 120 bp, Artificial Sequence
  ENSG00000124789_29 (sequence is synthesized)
tttagtttcttgaacaacagttcctctagttcaagtacaccagccacttctgctggtggtggcatatttggtagttccacctcttcctccaatccacctgtggctacctttgtgtttgga

SEQ ID NO: 258722 - DNA, 120 bp, Artificial Sequence
  ENSG00000124789_30 (sequence is synthesized)
cagtccagcaatcctgtgagcagctctgcctttggtaacactgctgaatccagcacctctcagtctttgctattttctcaagatagcaaactagcaaccacatccagcacaggtacagct

SEQ ID NO: 258723 - DNA, 120 bp, Artificial Sequence
  ENSG00000124789_31 (sequence is synthesized)
gtcaccccatttgtctttggtccaggagccagcagtaataatactaccacctctggtttcggctttggagccacaaccacatctagctctgcaggatcctcctttgtatttggaactgga

SEQ ID NO: 258724 - DNA, 120 bp, Artificial Sequence
  ENSG00000124789_32 (sequence is synthesized)
ccctcagcaccatctgccagtccagcatttggtgctaaccagaccccaacatttggacaaagtcaaggtgccagccagcccaatcccccaggctttggatctatatcatcttccacagca

SEQ ID NO: 258725 - DNA, 120 bp, Artificial Sequence
  ENSG00000124789_33 (sequence is synthesized)
ttatttcccactggttctcagcctgcaccacctacttttgggacagtgtcaagcagtagccagccccctgtgtttggacagcaacctagtcagtctgcatttggctctggaacaactcct

SEQ ID NO: 258726 - DNA, 120 bp, Artificial Sequence
  ENSG00000124789_34 (sequence is synthesized)
aattctagttcggctttccagtttggcagcagcactacaaatttcaacttcacaaacaacagtccatcaggagtgttcacatttggtgcaaattctagcacacctgcagcctcagcccag

SEQ ID NO: 258727 - DNA, 120 bp, Artificial Sequence
  ENSG00000124789_35 (sequence is synthesized)
ccttcaggctcggggggctttccatttaaccagtctccagcagcatttacagtggggtcaaatgggaaaaatgtgttctcttcttctggaacttcattctctggtcgcaagataaagact

SEQ ID NO: 258728 - DNA, 120 bp, Artificial Sequence
  ENSG00000124789_36 (sequence is synthesized)
gctgttagacgcaggaaataaaggtcacattggtgttgtactcaattttaacaacagctggtgccctgctttcagatactggattgtactttgtgctggggttatctgaagtcagatctg

SEQ ID NO: 258729 - DNA, 120 bp, Artificial Sequence
  ENSG00000124789_37 (sequence is synthesized)
cctaaggacttctttaattttggaattttcctcctttctctttcgttacagaagccccaccctgcctcacccacccttttttaaataaataaatagctagactggtgactgattcttcag

SEQ ID NO: 258730 - DNA, 120 bp, Artificial Sequence
  ENSG00000124789_38 (sequence is synthesized)
caaaaatattttatgatccagcagattattcactgatttgacatagtctggctgtacccaggaatggagcctgcacggtgaatggctttgtatagaacctctttgtctacaccattatgt

SEQ ID NO: 258731 - DNA, 120 bp, Artificial Sequence
  ENSG00000124789_39 (sequence is synthesized)
gcgctgataagcgttcatggaacgcgttgaaattgtaattatatctgaggaattctgtatagattagaattctgtatagattagagagtgttgaaacggatgatttctatgctgagtttg

SEQ ID NO: 258732 - DNA, 120 bp, Artificial Sequence
  ENSG00000124789_40 (sequence is synthesized)
tgctggtgtatgtgtgaagtgagtgagttgggtgtattgtgcgctaaacttttctgatagaggaagcctgattaaagaatggtccgtgctaaggacttgttagatctagttcactctcca

SEQ ID NO: 258733 - DNA, 120 bp, Artificial Sequence
  ENSG00000124789_41 (sequence is synthesized)
tttaataattatatgctatttctatattttcattctcctatcacctgtcttgcctttttcattattttattatgaaacttgtgtaaatacaattttgtttctgtactttttggcataaca

SEQ ID NO: 258734 - DNA, 120 bp, Artificial Sequence
  ENSG00000124789_42 (sequence is synthesized)
taaatctgtgaacttgaaatttgaattttgtgttagagatttttttgttgtttgtttagtcttgtctcagattttattatgtaaatcccattattcaaagttgcctaaatccatttggaa

SEQ ID NO: 258735 - DNA, 120 bp, Artificial Sequence
  ENSG00000124789_43 (sequence is synthesized)
atctttaaaaaaaaaattggggattcttaaagttgaatttattggcttttctgatccagttttgtttggaccaaaaaccagtattgtacaaagtattaagcatatatttttatatttact

SEQ ID NO: 258736 - DNA, 120 bp, Artificial Sequence
  ENSG00000124789_44 (sequence is synthesized)
aaaatggactgtggtgactttggataataaggaaaagtttaatattaaagccatgtttattacagtataattaacatgttaaaccatgggataaatgccatcaataaaaaattatgacat

SEQ ID NO: 258737 - DNA, 120 bp, Artificial Sequence
  ENSG00000124789_45 (sequence is synthesized)
gggcgggcgctgtgcgcacaggggaggggtaggcgggcgtcgccagcggcttcaactgcggcagctacggctagggcgacggaagaactcccaccagtcggcggtcgagttaggcctcag

SEQ ID NO: 258738 - DNA, 120 bp, Artificial Sequence
  ENSG00000124789_46 (sequence is synthesized)
caccgcggggaactgttcgtgctgtcctctgcgggagatctccatagagaccgtgacacacacagaggcgggggtccgcagaggcggccggaccggagcctcctcggcctctgcggccgc

SEQ ID NO: 258739 - DNA, 120 bp, Artificial Sequence
  ENSG00000124789_47 (sequence is synthesized)
cacccccttccccgctgccagcactcaccctctctccgctcctgctcgcaacctcgcggttcctggggtgcttgtgcccactgtgtggacagcgcgggcggacttttgggccggggccgg

SEQ ID NO: 258740 - DNA, 120 bp, Artificial Sequence
  ENSG00000124789_48 (sequence is synthesized)
gaaagaacacgctttgttgcttctaaacctctggaggaggagagacaaggtctcaccgtattgcccaagctgatctcgagctcctgcgctcaagcgatcatcccatcttggcctctcaaa

SEQ ID NO: 258741 - DNA, 80 bp, Artificial Sequence
  ENSG00000124795_0 (sequence is synthesized)
cgcgcacgcggggcagcgggcgcggtttcccgcctcgggaatccctggacggcggcggcggagcgggagggaagccgccc

SEQ ID NO: 258742 - DNA, 120 bp, Artificial Sequence
  ENSG00000124795_1 (sequence is synthesized)
ctggggactgagcgctgcggtcccggctatgggaggaggcaactttcagggttcacagcatgtccgcctcggcccctgctgcggagggggagggaacccccacccagcccgcgtccgaga

SEQ ID NO: 258743 - DNA, 120 bp, Artificial Sequence
  ENSG00000124795_2 (sequence is synthesized)
aagaacccgaaatgcccggtcccagagaggagagcgaggaggaagaggacgaggacgacgaggaggaggaggaggaggaaaaagaaaagagtctcatcgtggaaggcaagagggaaaaga

SEQ ID NO: 258744 - DNA, 120 bp, Artificial Sequence
  ENSG00000124795_3 (sequence is synthesized)
aaaaagtagagaggttgacaatgcaagtctcttccttacagagagagccatttacaattgcacaaggaaaggggcagaaactttgtgaaattgagaggatacatttttttctaagtaaga

SEQ ID NO: 258745 - DNA, 120 bp, Artificial Sequence
  ENSG00000124795_4 (sequence is synthesized)
agaaaaccgatgaacttagaaatctacacaaactgctttacaacaggccaggcactgtgtcctcattaaagaagaatgtgggtcagttcagtggctttccatttgaaaaaggaagtgtcc

SEQ ID NO: 258746 - DNA, 120 bp, Artificial Sequence
  ENSG00000124795_5 (sequence is synthesized)
tgccatgttaaagagcatctgtgaggttcttgatttggagagatcaggtgtaaatagtgaactagtgaagaggatcttgaatttcttaatgcatccaaagccttctggcaaaccattgcc

SEQ ID NO: 258747 - DNA, 120 bp, Artificial Sequence
  ENSG00000124795_6 (sequence is synthesized)
gaaatctaaaaaaacttgtagcaaaggcagtaaaaaggaacggaacagttctggaatggcaaggaaggctaagcgaaccaaatgtcctgaaattctgtcagatgaatctagtagtgatga

SEQ ID NO: 258748 - DNA, 120 bp, Artificial Sequence
  ENSG00000124795_7 (sequence is synthesized)
agatgaaaagaaaaacaaggaagagtcttcagatgatgaagataaagaaagtgaagaggagccaccaaaaaagacagccaaaagagaaaaacctaaacagaaagctacttctaaaagtaa

SEQ ID NO: 258749 - DNA, 120 bp, Artificial Sequence
  ENSG00000124795_8 (sequence is synthesized)
aaaatctgtgaaaagtgccaatgttaagaaagcagatagcagcaccaccaagaagaatcaaaacagttccaaaaaagaaagtgagtctgaggatagttcagatgatgaacctttaattaa

SEQ ID NO: 258750 - DNA, 120 bp, Artificial Sequence
  ENSG00000124795_9 (sequence is synthesized)
aaagttgaagaaaccccctacagatgaagagttaaaggaaacaataaagaaattactggccagtgctaacttggaagaagtcacaatgaaacagatttgcaaaaaggtctatgaaaatta

SEQ ID NO: 258751 - DNA, 120 bp, Artificial Sequence
  ENSG00000124795_10 (sequence is synthesized)
tcctacttatgatttaactgaaagaaaagatttcataaaaacaactgtaaaagagctaatttcttgagatagaggacagagaagatgactcgttcccatagatttgaagatctgatttat

SEQ ID NO: 258752 - DNA, 120 bp, Artificial Sequence
  ENSG00000124795_11 (sequence is synthesized)
cttgttgattctggggagccgagcgcgcggcgcgagcgtcacgccagacagcggcccgcgcgccttctcctcggcgtcggccgccgccgcctcccagaacctcctcgtgccctcgcgtgc

SEQ ID NO: 258753 - DNA, 120 bp, Artificial Sequence
  ENSG00000124795_12 (sequence is synthesized)
tgagtttgctgttttaaattgcatttctatgccatttttagtttaaaatcttgcatggcattaattgttccttgcttttatagttgtattttgtacattttggatttctttatataaggt

SEQ ID NO: 258754 - DNA, 120 bp, Artificial Sequence
  ENSG00000124795_13 (sequence is synthesized)
gtttttagtgcacttaatattagcttgcttaaggcatacttttaatcaagtagaacaaaaactattatcaccaggatttatacatacagagattgtagtatttagtatatgaaatatttt

SEQ ID NO: 258755 - DNA, 120 bp, Artificial Sequence
  ENSG00000124795_14 (sequence is synthesized)
gaatacacatctctgtcagtgtgaaaattcagcggcagtgtgtccatcatattaaaaatatacaagctacagttgtccagatcactgaattggaacttttctcctgcatgtgtatatatg

SEQ ID NO: 258756 - DNA, 120 bp, Artificial Sequence
  ENSG00000124795_15 (sequence is synthesized)
tcaaattgtcagcatgacaaaagtgacagatgttatttttgtatttttaaaaaacaattggttgtatataaagtttttttatttcttttgtgcagatcactttttaaactcacataggta

SEQ ID NO: 258757 - DNA, 120 bp, Artificial Sequence
  ENSG00000124795_16 (sequence is synthesized)
ggtatctttatagttgtagactatggaatgtcagtgttcagccaaacagtatgatggaacagtgaaagtcaattcagtgatggcaacactgaaggaacagttaccctgctttgcctcgaa

SEQ ID NO: 258758 - DNA, 120 bp, Artificial Sequence
  ENSG00000124795_17 (sequence is synthesized)
agtgtcatcaatttgtaattttagtattaactctgtaaaagtgtctgtaggtacgttttatattatataaggacagaccaaaaatcaacctatcaaagcttcaaaaactttgggaaaggg

SEQ ID NO: 258759 - DNA, 120 bp, Artificial Sequence
  ENSG00000124795_18 (sequence is synthesized)
tgggattaagtacaagcacatttggcttacagtaaatgaactgatttttattaactgcttttgcccatataaaatgctgatatttactggaaacctagccagcttcacgattatgactaa

SEQ ID NO: 258760 - DNA, 120 bp, Artificial Sequence
  ENSG00000124795_19 (sequence is synthesized)
agtaccagattataatgccagaatataatgtgcaggcaatcgtggatgtctctgacaaagtgtgtctcaaaaataatatacttttacattaaagaaatttaatgtttctctggagttggg

SEQ ID NO: 258761 - DNA, 120 bp, Artificial Sequence
  ENSG00000124795_20 (sequence is synthesized)
gctcttggctttcagagtttggttaatcagtgttgattctagatgatcaacataatggaccactcctgaatgagacttaattttgtctttcaaatttactgtcttaaatcagtttattaa

SEQ ID NO: 258762 - DNA, 120 bp, Artificial Sequence
  ENSG00000124795_21 (sequence is synthesized)
atctgaattttaaaacatgctgtttatgacacaatgacacatttgttgcaccaattaagtgttgaaaaatatctttgcatcatagaacagaaatatataaaaatatatgttgaatgttaa

SEQ ID NO: 258763 - DNA, 120 bp, Artificial Sequence
  ENSG00000124795_22 (sequence is synthesized)
caggtattttcacaggtttgtttcttgatagttactcagacactagggaaaggtaaatacaagtgaacaaaataagcaactaaatgagacctaataattggccttcgattttaaatattt

SEQ ID NO: 258764 - DNA, 120 bp, Artificial Sequence
  ENSG00000124795_23 (sequence is synthesized)
gttcttataaaccttgtcaataaaaataaatctaaatcactggtgttttaagtcacttgcatttgatatcttataggtgtatatagcatttccttatggggaataattctgaaaagggat

SEQ ID NO: 258765 - DNA, 120 bp, Artificial Sequence
  ENSG00000124795_24 (sequence is synthesized)
ttttaaattgattcagccctataacctatacaatttggaatactcttttgtggtaatggaccattttcttggagtgacttcacaaaactgaataattaaggttaattttatgaccatttg

SEQ ID NO: 258766 - DNA, 120 bp, Artificial Sequence
  ENSG00000124795_25 (sequence is synthesized)
ctataaagaaggtaagtagtcatgcatagagtatttggaagtgaggaaatggagttgttctgtatgaaagttcttgatgagtacgcacacttattaaatggatgtatcaccactacagta

SEQ ID NO: 258767 - DNA, 120 bp, Artificial Sequence
  ENSG00000124795_26 (sequence is synthesized)
gcgcggtttcccgcctcgggaatccctggacggcggcggcggagcgggagggaagccgcccctggggactgagcgctgcggtcccggctatgggaggaggcaactttcagggcaggtgtc

SEQ ID NO: 258768 - DNA, 120 bp, Artificial Sequence
  ENSG00000124795_27 (sequence is synthesized)
ccgcgggaagggtagcatcattcagggtggccgcccggtcctgcctgcgggagtaggaggaccgagacgtccggctttcttcccgcatgcaggttcacagcatgtccgcctcggcccctg

SEQ ID NO: 258769 - DNA, 120 bp, Artificial Sequence
  ENSG00000124795_28 (sequence is synthesized)
cataaaatactccatatttttcaaaatattcatgtcactaaatatcacatttgatcctcacatttcttcataatagggaaatttatttcttctcattcccactttaaagcttaaaattaa

SEQ ID NO: 258770 - DNA, 120 bp, Artificial Sequence
  ENSG00000124795_29 (sequence is synthesized)
aatacttgaggaagttcctgtctacgaggcaaaggtgaggggaagatcagcaggtagctgtaattctgtattgatctcaactgatttttgaaggacaaaatagtaaaatagatgtggaaa

SEQ ID NO: 258771 - DNA, 120 bp, Artificial Sequence
  ENSG00000124795_30 (sequence is synthesized)
caagaagaatcaaaacagttccaaaaaaggtatgttagaaataacattaatcagcaactttaaagatatagcatatattaatatgttgtacatagtatttaagtgtgtgggagaaacagg

SEQ ID NO: 258772 - DNA, 120 bp, Artificial Sequence
  ENSG00000124795_31 (sequence is synthesized)
taaactgcagagaacattgcggggagaagtaatacaggttgaatatcccttatctgaaatgcttgggacaggaagtgattcagattttgcaatatatatatatagagagagagacagaga

SEQ ID NO: 258773 - DNA, 120 bp, Artificial Sequence
  ENSG00000124795_32 (sequence is synthesized)
gagagatatcttggggatgggacccagtctaaacatgaaattcattcatgtttcatattcatcttaaatagcctgaaggtagtttaatattttaactaaataaattatttattgcagtgg

SEQ ID NO: 258774 - DNA, 120 bp, Artificial Sequence
  ENSG00000124795_33 (sequence is synthesized)
taagacctttttacactttaaacctacttgtatattacttcacaatggaatcaatttctgtaaatgttagtgatccactagttcaatttccacactttatgactgagcagactgaggtat

SEQ ID NO: 258775 - DNA, 120 bp, Artificial Sequence
  ENSG00000124795_34 (sequence is synthesized)
gactgagcagactgaggtatatacttattaaatgatttatcacaggaaacacagctggatattagcacttggattataatatccagggctctgtcttcttttttctttttctttttcttt

SEQ ID NO: 258776 - DNA, 120 bp, Artificial Sequence
  ENSG00000124795_35 (sequence is synthesized)
tgttgggattacaggtgtgagccagtatgcccagctctagggctctttctcctgtagtagtttttattccaaactgaaatttcaaattacgaaatccaaattgtgatgaaaggttttagt

SEQ ID NO: 258777 - DNA, 120 bp, Artificial Sequence
  ENSG00000124795_36 (sequence is synthesized)
ttgtgatgaaaggttttagtgacctttaaatgtattgaaagaaattcatgtttttggattttctcgacattcagaataagtgaatgtcggtatgatttgtatgagatcatacatatgatc

SEQ ID NO: 258778 - DNA, 120 bp, Artificial Sequence
  ENSG00000124795_37 (sequence is synthesized)
tcatttgtatctcatacaaataagaggcaaaatcatttgtatctcatacaaatctcatacaaagtgaatttggtgtaattgtatctcatttttagcaaatacctgataaattggatgata

SEQ ID NO: 258779 - DNA, 120 bp, Artificial Sequence
  ENSG00000124795_38 (sequence is synthesized)
gttctttgctaaaggattgttattatactgtacatatgacttagtatattatataatcgagggaactgctttaggttgtacgtgggcaaagtaaagttgggtgttagaatgtctgaagta

SEQ ID NO: 258780 - DNA, 120 bp, Artificial Sequence
  ENSG00000124795_39 (sequence is synthesized)
gaatagaatgtctggtgcatgacataatttattttcagtgagtctgttaatctcatttaatccttaaaccaatttaatttacacaagtcccataactagtgaacggtattagctttttgt

SEQ ID NO: 258781 - DNA, 120 bp, Artificial Sequence
  ENSG00000124795_40 (sequence is synthesized)
ggtactcgctattctttactttgaaagaataaagtccttcttgatttggaaaagaagaattactagtaactttattacttatgaaaaggatatatttttaaatagtaactttccacatcc

SEQ ID NO: 258782 - DNA, 120 bp, Artificial Sequence
  ENSG00000124795_41 (sequence is synthesized)
cctggtactgtcaggtaacttttggttgtggtaaaaactccccagtgaaaatttgttcaaattgttcttttcagagacttaagtttgtaggatttttataatgttaatatgttaatgaca

SEQ ID NO: 258783 - DNA, 120 bp, Artificial Sequence
  ENSG00000124795_42 (sequence is synthesized)
aatacatttttcagttttgaataagaaatgttgaatattgaacccatattgaattggttgactgttcagccagtattgtaacttacagacaggtatgaaaataaagatgttgactttgaa

SEQ ID NO: 258784 - DNA, 120 bp, Artificial Sequence
  ENSG00000124795_43 (sequence is synthesized)
aattctggctctgtgacaggcgtcttttttggagaccctccttcaagagccctgctgcctataaatcatagccaccaaaaaagacagccaaaagagaaaaacctaaacagaaagctactt

SEQ ID NO: 258785 - DNA, 120 bp, Artificial Sequence
  ENSG00000124795_44 (sequence is synthesized)
taaagacatacccaagactgagtaattttaaaggagtttagttgactcacagttccacatggctggggtggcctcacaatcatggtggaaggcgaatgaggagcaaagacccatcttacg

SEQ ID NO: 258786 - DNA, 120 bp, Artificial Sequence
  ENSG00000124795_45 (sequence is synthesized)
cgaatgaggagcaaagacccatcttacgcggcagcaagcaagagggtatgtatagggcaactcccttttataaaaccatcagatctggtgagactgtttcactgtcatgagaacagcatg

SEQ ID NO: 258787 - DNA, 120 bp, Artificial Sequence
  ENSG00000124795_46 (sequence is synthesized)
gttgaggttaaaccacatttggtcataaaccacatttggtcatgctattcacaggtgttaaccttgaggcatagagaaattactgcagagtacagaaaaaagggggaaatagtacatatt

SEQ ID NO: 258788 - DNA, 120 bp, Artificial Sequence
  ENSG00000124795_47 (sequence is synthesized)
ggagaaaacaattctaacagtcttttagactctttaaaagcatattttatttctttttcatcttatcctaatacctctgtcttcaatttttattttctagtgtttttatagcgcatacgt

SEQ ID NO: 258789 - DNA, 120 bp, Artificial Sequence
  ENSG00000124795_48 (sequence is synthesized)
atctcgaaagtatgaaacaaactgtggagttttacgagtatttagaatttatctgaatgttgccatatgttatcaggaatgttttctgctgaaataattgtcagccttactaataatgtt

SEQ ID NO: 258790 - DNA, 120 bp, Artificial Sequence
  ENSG00000124795_49 (sequence is synthesized)
cgaaacaggagtttatttttctttcatgacaagaagcccacagacagggacattctagggccagtacagcagttcaagaaaggaattgaggatgtgggtactgtcctttcctgatctctc

SEQ ID NO: 258791 - DNA, 120 bp, Artificial Sequence
  ENSG00000124795_50 (sequence is synthesized)
atctttagtatatggcaattaacttcatgatcacaaggtggttgttttacctttagacattgtattcatgttccagataaggaagagcaaaaggttttcttctagtgatgttttggcttt

SEQ ID NO: 258792 - DNA, 120 bp, Artificial Sequence
  ENSG00000124795_51 (sequence is synthesized)
tttccctgaatgggatgccttttaccagagatctccatatacatggcatcagccagcactttgttgtctgcccacctaactgcaagagaagctctgagatctaggtgtcagctttcctac

SEQ ID NO: 258793 - DNA, 120 bp, Artificial Sequence
  ENSG00000124795_52 (sequence is synthesized)
ctttataagaggaaggcagatcaaaagtgggtggttcagtgagccatcttacaatgtttgccaagtcagagaaactccattataatttttggtaaactatctatttggaccattcaaggg

SEQ ID NO: 258794 - DNA, 120 bp, Artificial Sequence
  ENSG00000124795_53 (sequence is synthesized)
attatctggtagtggtaaggtgaatgtgaaagttttgttagtcctttcacattgtgttttagaaaactaaactatctcttcctctcacacgttgatcagaggaattgcaaaatctgtata

SEQ ID NO: 258795 - DNA, 120 bp, Artificial Sequence
  ENSG00000124795_54 (sequence is synthesized)
aaccatttaaacctttcgttggaaggcagaattgaataatcaccatactaaaacccatttaaacttgctttcataatcttctgtgaaatataactagacttgcacattctttcctcttgg

SEQ ID NO: 258796 - DNA, 120 bp, Artificial Sequence
  ENSG00000124802_0 (sequence is synthesized)
gcgtctgccaggagctacggccggaagatggcggcggccgcagagttgtcgctactggagaagtccctgggactgagtaaggggaataaatacagtgctcagggcgagcgacagattcca

SEQ ID NO: 258797 - DNA, 120 bp, Artificial Sequence
  ENSG00000124802_1 (sequence is synthesized)
gttcttcagacaaacaatggtccaagtctaacaggattgactactatagcagctcatctagtcaagcaagccaacaaagaatatttgctggggagtactgcagaagaaaaagcaatcgtt

SEQ ID NO: 258798 - DNA, 120 bp, Artificial Sequence
  ENSG00000124802_2 (sequence is synthesized)
cagcagtggttagaatacagggtcactcaagtagatgggcactccagtaaaaatgacatccacacactgttgaaggatcttaattcatatcttgaagataaagtctaccttacagggtat

SEQ ID NO: 258799 - DNA, 120 bp, Artificial Sequence
  ENSG00000124802_3 (sequence is synthesized)
aactttacattagcagatatactattgtactatggacttcatcgctttatagttgacctgacagttcaagaaaaggagaaatatcttaatgtgtctcgctggttttgtcacattcagcat

SEQ ID NO: 258800 - DNA, 120 bp, Artificial Sequence
  ENSG00000124802_4 (sequence is synthesized)
tacagaagatctattaaaaatgttttaaatggaaaatgtactctagaccacaggactaatgtaaattaatatacagtcattcattatttgttgaagttgatagaatttttgaagtgtaaa

SEQ ID NO: 258801 - DNA, 120 bp, Artificial Sequence
  ENSG00000124802_5 (sequence is synthesized)
cttgtgtctgaatgttttatttgttctttagctgaagttttgcaatttttatgtcaaaattcaattgctattaaacaagttgagatccagttataaattaaccttgtttttagtagatga

SEQ ID NO: 258802 - DNA, 120 bp, Artificial Sequence
  ENSG00000124802_6 (sequence is synthesized)
catttatttcaataaaagttgcaaatcgggcttaatcttaaaattggtggtcatttcaatggttgacatatttggctatttattaacctctctttcatattctaaaattcattttcccct

SEQ ID NO: 258803 - DNA, 120 bp, Artificial Sequence
  ENSG00000124802_7 (sequence is synthesized)
tatggatatttatggtagtttgttaagaactgataaattgtgccaaggaagccaaaagggaagacagatggatttgttttaaaatatttatgtgagctagtaaatgtggttgaaaaaata

SEQ ID NO: 258804 - DNA, 120 bp, Artificial Sequence
  ENSG00000124802_8 (sequence is synthesized)
gttatagctaacagggtgccaggtagcaccgtgctgggtctggggaatacaatgatgatttaggggaacatgcttcctcctctcaggcagcttgctttttggccaggtggacaaacattg

SEQ ID NO: 258805 - DNA, 120 bp, Artificial Sequence
  ENSG00000124802_9 (sequence is synthesized)
actaacccaacatcatacaaggaactgagatcaaggaactgagattcaaacacaaatgtctggctcaaacttacctgtaaactactctacatggagtgccataaaattctgcttaattaa

SEQ ID NO: 258806 - DNA, 120 bp, Artificial Sequence
  ENSG00000124802_10 (sequence is synthesized)
atgattgttttgtttataagaaaatgaggattgtaacaggcccccatgtttgtctctgaagtgactgagtcaggagacttcacaggccaggtgtgtgggcacaggcatgcctcattttac

SEQ ID NO: 258807 - DNA, 120 bp, Artificial Sequence
  ENSG00000124802_11 (sequence is synthesized)
tgcatcttcatcttcaacacatggaaggtttgtggcaaccctgcttcgagcgagactattggcaccatttttccgtcggcttgtgcttgcttcatgtctctgtgtcacattttggtaatt

SEQ ID NO: 258808 - DNA, 120 bp, Artificial Sequence
  ENSG00000124802_12 (sequence is synthesized)
gcagatatactattgtactatggacttcatcgctttatagtgagtatttgtatagttactggctttttttctgtagtgttgagaatgatttttaaaactttgtcttgaatttaaatcaga

SEQ ID NO: 258809 - DNA, 120 bp, Artificial Sequence
  ENSG00000124802_13 (sequence is synthesized)
atgatttttaaaactttgtcttgaatttaaatcagatttgcatttttggcttatcaaataaaaatgaaaggaattcctttatacaaggtgccttttgtaacaaacctgcacgttgtgcac

SEQ ID NO: 258810 - DNA, 120 bp, Artificial Sequence
  ENSG00000124812_0 (sequence is synthesized)
attgaacaaatctcccctgtggactgtcatttaaaagcacaaatacactacatagagaaaggcttggttcttatcaggacacaaatttaaaggctgtgtggacttggggatggaaattaa

SEQ ID NO: 258811 - DNA, 120 bp, Artificial Sequence
  ENSG00000124812_1 (sequence is synthesized)
acacctcttgtttttggttgctgctgcttgcttactgcctatgttgtccatgaaaaagaaatcagctagagaccaatttaataagctcgtcaccgacttgccaaatgtacaagaagagat

SEQ ID NO: 258812 - DNA, 120 bp, Artificial Sequence
  ENSG00000124812_2 (sequence is synthesized)
cgttaatatacacaacgccctcaggagaagagtagttccaccagccagcaacatgctgaagatgagttggagtgaagaggctgcacaaaatgccagaattttttcaaagtattgtgatat

SEQ ID NO: 258813 - DNA, 120 bp, Artificial Sequence
  ENSG00000124812_3 (sequence is synthesized)
gacagagagcaacccccttgagaggagacttccaaataccttttgtggagaaaatatgcatatgacatcttatcctgtatcatggtcaagtgtaattggagtctggtacagtgagtctac

SEQ ID NO: 258814 - DNA, 120 bp, Artificial Sequence
  ENSG00000124812_4 (sequence is synthesized)
aagtttcaaacatggagaatggacaacaacggatgatgacataactactgaccactacactcagattgtttgggccacatcttacctgattggctgtgccattgcatcttgccgccaaca

SEQ ID NO: 258815 - DNA, 120 bp, Artificial Sequence
  ENSG00000124812_5 (sequence is synthesized)
aggatcacctcgatatctctacgtttgtcactattgtcatgagggaaatgatcctgaaacaaagaatgaaccttataagacaggcgtcccatgtgaagcctgcccaagtaactgtgaaga

SEQ ID NO: 258816 - DNA, 120 bp, Artificial Sequence
  ENSG00000124812_6 (sequence is synthesized)
caaactttgcactaacccctgcatctactatgatgaatacttcgactgtgacatacaagtccattatctgggatgcaaccactcaacaactatcctattctgtaaagccacttgtctgtg

SEQ ID NO: 258817 - DNA, 120 bp, Artificial Sequence
  ENSG00000124812_7 (sequence is synthesized)
cactgattttaatcatgctggagaccttaactcccatcctgatacatcctgaagtaacactgttttaaactttcttagtgctggagtaaaaggtcaagtccaacacctgccttaaattta

SEQ ID NO: 258818 - DNA, 120 bp, Artificial Sequence
  ENSG00000124812_8 (sequence is synthesized)
aatcatgtgatttatagtttttaagttggcataattcaacttatggtataactgggtccctcaacagtaacctgggctaaaataggtcttatgtggttcaactcccacccccgccttccc

SEQ ID NO: 258819 - DNA, 120 bp, Artificial Sequence
  ENSG00000124812_9 (sequence is synthesized)
catattttcaaccactctgattatcttccctgcacaactaacatccagtaataattcttcacttttaaaattttacttctactttaaatcaatcattaaaggaatccacaaagcaaacag

SEQ ID NO: 258820 - DNA, 120 bp, Artificial Sequence
  ENSG00000124812_10 (sequence is synthesized)
agttcagtctcatcttgcaaggtaaatatcatttaattggaagtagtttaaatgtctcattgttttattgacacatctatatatacatttgtgaagcaagaaacaataaaaaagcttcgt

SEQ ID NO: 258821 - DNA, 120 bp, Artificial Sequence
  ENSG00000124812_11 (sequence is synthesized)
atgccattaatttaacaaaatatgtattcagtactgattgcatacaagatgcatgtttatatatatggaaggaatatagtttcatttcattgcaaaggcagtataaaagatatataaaat

SEQ ID NO: 258822 - DNA, 120 bp, Artificial Sequence
  ENSG00000124812_12 (sequence is synthesized)
agcataatatgagaaattaagtccctaaagacatataggtcacatattattattgccagatgagcataaatagcttctgtttggagattcaggaaagccttagggtggaatgaggaacat

SEQ ID NO: 258823 - DNA, 120 bp, Artificial Sequence
  ENSG00000124812_13 (sequence is synthesized)
cttctgagtaaacagggttgcaaaggttatgattatttcaacacaatggaagagcacagttaaggccaactaacgtaaaatgcactgaagccttagggaatattgaagggcctgacatgg

SEQ ID NO: 258824 - DNA, 120 bp, Artificial Sequence
  ENSG00000124812_14 (sequence is synthesized)
ggaaagggaaggctaaaaatacttggtcaaattttaacattataccaaagttatacccagttctacctacttgtatatttctttactcatttcaataaagtgtttgaaaaaaaaaaaaaa

SEQ ID NO: 258825 - DNA, 120 bp, Artificial Sequence
  ENSG00000124813_0 (sequence is synthesized)
caaactttctccaggaggacagcaagaagtctctggtttttaaatggttaatctccgcaggtcactaccagccaccgagaccaacagagtcagtgagtgctctctaaccacagtctatgc

SEQ ID NO: 258826 - DNA, 120 bp, Artificial Sequence
  ENSG00000124813_1 (sequence is synthesized)
agtaatagtaggtccttcaaatatttgctcattctctttttgttttgtttctttgcttttcacatgttaccagctacataatttcttgacagaaaaaaataaatataaagtctatgtact

SEQ ID NO: 258827 - DNA, 120 bp, Artificial Sequence
  ENSG00000124813_2 (sequence is synthesized)
ccaggcatactgtaaaactaaaacaaggtttgggtatggtttgtattttcagtttaaggctgcaagcagtatttacaacagagggtacaagttctatctgaaaaaaaaaggagggactat

SEQ ID NO: 258828 - DNA, 120 bp, Artificial Sequence
  ENSG00000124813_3 (sequence is synthesized)
ggcatcaaacagcctcttcagcacagtgacaccatgtcagcaaaacttcttttgggatccgagcaccagccggcgcttcagccccccctccagcagcctgcagcccggcaaaatgagcga

SEQ ID NO: 258829 - DNA, 120 bp, Artificial Sequence
  ENSG00000124813_4 (sequence is synthesized)
cgtgagcccggtggtggctgcgcaacagcagcagcaacagcagcagcagcaacagcagcagcagcagcagcaacagcagcagcagcagcaggaggcggcggcggcggctgcggcggcggc

SEQ ID NO: 258830 - DNA, 120 bp, Artificial Sequence
  ENSG00000124813_5 (sequence is synthesized)
ggcggctgcggcggcggcagctgcagtgccccggttgcggccgccccacgacaaccgcaccatggtggagatcatcgccgaccacccggccgaactcgtccgcaccgacagccccaactt

SEQ ID NO: 258831 - DNA, 120 bp, Artificial Sequence
  ENSG00000124813_6 (sequence is synthesized)
cctgtgctcggtgctgccctcgcactggcgctgcaacaagaccctgcccgtggccttcaaggtggtagccctcggagaggtaccagatgggactgtggttactgtcatggcgggtaacga

SEQ ID NO: 258832 - DNA, 120 bp, Artificial Sequence
  ENSG00000124813_7 (sequence is synthesized)
tgaaaattattctgctgagctccggaatgcctctgctgttatgaaaaaccaagtagcaaggttcaacgatctgagatttgtgggccggagtggacgaggcaagagtttcaccttgaccat

SEQ ID NO: 258833 - DNA, 120 bp, Artificial Sequence
  ENSG00000124813_8 (sequence is synthesized)
aaccgtcttcacaaatcctccccaagtagctacctatcacagagcaattaaagttacagtagatggacctcgggaacccagaaggcacagacagaagcttgatgactctaaacctagttt

SEQ ID NO: 258834 - DNA, 120 bp, Artificial Sequence
  ENSG00000124813_9 (sequence is synthesized)
gttctctgaccgcctcagtgatttagggcgcattcctcatcccagtatgagagtaggtgtcccgcctcagaacccacggccctccctgaactctgcaccaagtccttttaatccacaagg

SEQ ID NO: 258835 - DNA, 120 bp, Artificial Sequence
  ENSG00000124813_10 (sequence is synthesized)
acagagtcagattacagaccccaggcaggcacagtcttccccgccgtggtcctatgaccagtcttacccctcctacctgagccagatgacgtccccgtccatccactctaccaccccgct

SEQ ID NO: 258836 - DNA, 120 bp, Artificial Sequence
  ENSG00000124813_11 (sequence is synthesized)
gtcttccacacggggcactgggcttcctgccatcaccgatgtgcctaggcgcatttcagatgatgacactgccacctctgacttctgcctctggccttccactctcagtaagaagagcca

SEQ ID NO: 258837 - DNA, 120 bp, Artificial Sequence
  ENSG00000124813_12 (sequence is synthesized)
ggcaggtgcttcagaactgggccctttttcagaccccaggcagttcccaagcatttcatccctcactgagagccgcttctccaacccacgaatgcactatccagccacctttacttacac

SEQ ID NO: 258838 - DNA, 120 bp, Artificial Sequence
  ENSG00000124813_13 (sequence is synthesized)
cccgccagtcacctcaggcatgtccctcggtatgtccgccaccactcactaccacacctacctgccaccaccctaccccggctcttcccaaagccagagtggacccttccagaccagcag

SEQ ID NO: 258839 - DNA, 120 bp, Artificial Sequence
  ENSG00000124813_14 (sequence is synthesized)
cactccatatctctactatggcacttcgtcaggatcctatcagtttcccatggtgccggggggagaccggtctccttccagaatgcttccgccatgcaccaccacctcgaatggcagcac

SEQ ID NO: 258840 - DNA, 120 bp, Artificial Sequence
  ENSG00000124813_15 (sequence is synthesized)
gctattaaatccaaatttgcctaaccagaatgatggtgttgacgctgatggaagccacagcagttccccaactgttttgaattctagtggcagaatggatgaatctgtttggcgaccata

SEQ ID NO: 258841 - DNA, 120 bp, Artificial Sequence
  ENSG00000124813_16 (sequence is synthesized)
ttgaaattcctcagcagtggcccagtggtatctgggggccacatcccacacgtatcaatatatacatatatagagagagtgcatatatatgtatatcgattagctatctacaaagtgcct

SEQ ID NO: 258842 - DNA, 120 bp, Artificial Sequence
  ENSG00000124813_17 (sequence is synthesized)
attttttagaagatttttcattcactcactcagtcatgatcttgcagccataagagggtagatattgagaagcagaaggctcaagagagacaattgcaatcgagcttcagattgtttact

SEQ ID NO: 258843 - DNA, 120 bp, Artificial Sequence
  ENSG00000124813_18 (sequence is synthesized)
atttaagatgtacttttacaaaggaacaaagaagggaaaaggtatttttgtttttgttgtttggtctgttatcatcaataacctgttcatatgccaattcagagaggtggactccaggtt

SEQ ID NO: 258844 - DNA, 120 bp, Artificial Sequence
  ENSG00000124813_19 (sequence is synthesized)
caggagggagaagagcaaagccgcttcctctctgtgctttgaaacttcacaccctcacggtggcagctgtgtatggaccagtgccctccgcagacagctcacaaaaccagttgaggtgca

SEQ ID NO: 258845 - DNA, 120 bp, Artificial Sequence
  ENSG00000124813_20 (sequence is synthesized)
ctaaagggacatgaggtagaatggatgcttccatcacagtaccatcattcagaataactcttccaatttctgctttcagacatgctgcaggtcctcatctgaactgttgggttcgttttt

SEQ ID NO: 258846 - DNA, 120 bp, Artificial Sequence
  ENSG00000124813_21 (sequence is synthesized)
ttttttttttttcctgctccaagaaagtgacttcaaaaataactgatcaggatagattattttattttactttttaacactccttctccccttttcccactgaaccaaaaagaaatccca

SEQ ID NO: 258847 - DNA, 120 bp, Artificial Sequence
  ENSG00000124813_22 (sequence is synthesized)
tccctaaaacctgccttctccttttatgcaaaactgaaaatggcaatacattattatagccataatggtatagatagtgattgcgtttggctatgtgttgttttctttttttttaaatta

SEQ ID NO: 258848 - DNA, 120 bp, Artificial Sequence
  ENSG00000124813_23 (sequence is synthesized)
atatatttataattatttaatgacatttggacccttgaaacatttcttagtgtattgatatgttgacttcggtctctaaaagtgctctttattaaataacaaatttcttcagtggtctag

SEQ ID NO: 258849 - DNA, 120 bp, Artificial Sequence
  ENSG00000124813_24 (sequence is synthesized)
agccatatctgaaatattgctaagcaatttcagttcatccaggcacaatgtgattttaaaaaatacttccatctccaaatattttagatatagattgtttttgtgatgtatgaaggaaat

SEQ ID NO: 258850 - DNA, 120 bp, Artificial Sequence
  ENSG00000124813_25 (sequence is synthesized)
gttatgtttagttctttcagatctttgaatgcctctaacacagctttgccttctaaagcggtaattagggatttaaaaaacaacctttagccctttatcagcatgaaatgctggagtgat

SEQ ID NO: 258851 - DNA, 120 bp, Artificial Sequence
  ENSG00000124813_26 (sequence is synthesized)
gtggttttctaatttctttggggtaattatgactcttgtcatattaaaaagacaagcacaagtaaatcattgaactacagaaaaatgttctgtggtttcatagttaagcaaaactctaaa

SEQ ID NO: 258852 - DNA, 120 bp, Artificial Sequence
  ENSG00000124813_27 (sequence is synthesized)
tcgccaggcttcatagcaaagacatagtcagctaaaagccgcacatgtggatagagggttcaattatgagacacctagtacaggagagcaaaattgcaccagagattcttaaccaaccag

SEQ ID NO: 258853 - DNA, 120 bp, Artificial Sequence
  ENSG00000124813_28 (sequence is synthesized)
ccttaccaaacaacacaacaggggaaccccaatctgccttacccaaggccccactggcagctttccacagaatttgcatttagaggagcagaatgacatcactgtcctttgggagtaggt

SEQ ID NO: 258854 - DNA, 120 bp, Artificial Sequence
  ENSG00000124813_29 (sequence is synthesized)
cctctgaaaaggcagcaggttccagcaggtagctgagctgagaggacatatggcccacggggacctacagacagcctttgacatttgtatttcttacaatggagggccaaggagggcaag

SEQ ID NO: 258855 - DNA, 120 bp, Artificial Sequence
  ENSG00000124813_30 (sequence is synthesized)
gggctgtggagtttggtgtctactagtgtgtatgaatttgagctagagtccttctgtggcatgcactttgaccactcctggcagtcacatggcagatttccaagtgcaaatccttaatcc

SEQ ID NO: 258856 - DNA, 120 bp, Artificial Sequence
  ENSG00000124813_31 (sequence is synthesized)
aaacaaggatcatctaatgacaccaccaggccaatccctgctctcctccccgaaaagtcagggtcccttcattggaatcctccacccacccaagcagaatttagcagagatttgccttca

SEQ ID NO: 258857 - DNA, 120 bp, Artificial Sequence
  ENSG00000124813_32 (sequence is synthesized)
aaccctaacggcccccttgttctctggtccttctcaaacccacctttgtaggccacccagcattgcaggacagcgtgtggggcagctggacctgtgcttcctgcctgggagtctcccttg

SEQ ID NO: 258858 - DNA, 120 bp, Artificial Sequence
  ENSG00000124813_33 (sequence is synthesized)
gaattcatcctgactccttctaataaaaatggatgggaaagcaaaacactttgccttctaaaggccgtataccaagtatgcttagataaataagccacttttctattacttaagtaagaa

SEQ ID NO: 258859 - DNA, 120 bp, Artificial Sequence
  ENSG00000124813_34 (sequence is synthesized)
ggaagtagtaattgatactatttattgtttgtgtgtggtagcttgaagcacaccactgtccatttatttgtaagtgtaaaatatgtgtgtttgtttcagcagcacttaaaaaagccagtg

SEQ ID NO: 258860 - DNA, 120 bp, Artificial Sequence
  ENSG00000124813_35 (sequence is synthesized)
tctggttacacatttcaattttaattaattgacataaaaatgctaccgccagtgccagctgcatcctatttaattaaaaaggtactatatttgtacattattttttaatgttaaaagggc

SEQ ID NO: 258861 - DNA, 120 bp, Artificial Sequence
  ENSG00000124813_36 (sequence is synthesized)
ttttttaagtttacagtacacataccgagtgactttagggatgcttttgtgttgaaatgttactatagtggctgcaggcagcaacccagaaacactttagaagctttttttccttgggaa

SEQ ID NO: 258862 - DNA, 120 bp, Artificial Sequence
  ENSG00000124813_37 (sequence is synthesized)
aaattcaagcacttcttccctccaccctcactccaaccaccccaatgggggtaattcacatttcttagaacaaattctgcccttttttggtctagggattaaaattttgtttttctttct

SEQ ID NO: 258863 - DNA, 120 bp, Artificial Sequence
  ENSG00000124813_38 (sequence is synthesized)
ttctttttttttttttttcactgaacccttaatttgcactgggtcatgtgtttgatttgtgatttcaagaccaaagcaaagtcttactactactgtggaaccatgtactagttcctggga

SEQ ID NO: 258864 - DNA, 120 bp, Artificial Sequence
  ENSG00000124813_39 (sequence is synthesized)
attaaaatagcgtggttctctttgtagcacaaacattgctggaatttgcagtcttttcaatgcagccacatttttatccatttcagttgtctcacaaattttaacccatatcagagttcc

SEQ ID NO: 258865 - DNA, 120 bp, Artificial Sequence
  ENSG00000124813_40 (sequence is synthesized)
agaacaggtaccacagctttggttttagattagtggaataacattcagcccagaactgagaaactcaacagattaactatcgtttgctctttagacggtctcactgcctctcacttgcca

SEQ ID NO: 258866 - DNA, 120 bp, Artificial Sequence
  ENSG00000124813_41 (sequence is synthesized)
gagccctttcaaaatgagcagagaagtccacaccattagggaccatctgtgataaattcagaagggaggagatgtgtgtacagctttaaggattccctcaattccgaggaaagggactgg

SEQ ID NO: 258867 - DNA, 120 bp, Artificial Sequence
  ENSG00000124813_42 (sequence is synthesized)
cccagaatccaggttaatacatggaaacacgaagcattagcaaaagtaataattatacctatggtatttgaaagaacaataataaaagacacttcttccaaaccttgaatttgttgtttt

SEQ ID NO: 258868 - DNA, 120 bp, Artificial Sequence
  ENSG00000124813_43 (sequence is synthesized)
tagaaaacgaatgcatttaaaaatattttctatgtgagaattttttagatgtgtgtttacttcatgtttacaaataactgtttgctttttaatgcagtactttgaaatatatcagccaaa

SEQ ID NO: 258869 - DNA, 120 bp, Artificial Sequence
  ENSG00000124813_44 (sequence is synthesized)
accataacttacaataatttcttaggtattctgaataaaattccatttcttttggatatgctttaccattcttaggtttctgtggaacaaaaatatttgtagcattttgtgtaaatacaa

SEQ ID NO: 258870 - DNA, 120 bp, Artificial Sequence
  ENSG00000124813_45 (sequence is synthesized)
gctttcatttttattttttccaattgctattgcccaagaattgctttccatgcacatattgtaaaaattccgctttgtgccacaggtcatgattgtggatgagtttactcttaacttcaa

SEQ ID NO: 258871 - DNA, 120 bp, Artificial Sequence
  ENSG00000124813_46 (sequence is synthesized)
agggactatttgtattgtatgttgcaactgtaaattgaattatttggcatttttctcatgattgtaatattaatttgaagtttgaatttaattttcaataaaatggcttttttggttttg

SEQ ID NO: 258872 - DNA, 120 bp, Artificial Sequence
  ENSG00000124813_47 (sequence is synthesized)
gtctcgccttcacccccccaatttcctccttgcccctcatttccaccctcctccccctcccccggccacttcgctaacttgtggctgttgtgatgcgtattcccgtagatccgagcacca

SEQ ID NO: 258873 - DNA, 120 bp, Artificial Sequence
  ENSG00000124813_48 (sequence is synthesized)
gcctgcagctgggtagcagcgcgcggcgcggcgcggcggtggcgggcagcgcgcggcaatgccggccccggggctggactgctgaacccacaccgcttcaccaccggactccaactggga

SEQ ID NO: 258874 - DNA, 120 bp, Artificial Sequence
  ENSG00000124813_49 (sequence is synthesized)
aacccacaccgcttcaccaccggactccaactgggagggggcgccagcgcacccaggacgcggtgccccaagggaccccattccaagctgcaaactcaagtcccccgcctccccaggcca

SEQ ID NO: 258875 - DNA, 120 bp, Artificial Sequence
  ENSG00000124813_50 (sequence is synthesized)
aacacacccccgcgcccgttcgcagctgccaccccgggtgttccaaagactccggcaaagatctgcgcctcccgggtctccctacccgccagcccgactgcgccgcatcgccagactctg

SEQ ID NO: 258876 - DNA, 120 bp, Artificial Sequence
  ENSG00000124813_51 (sequence is synthesized)
cgaagccgttactcactccgctgagttgcatcactgacaagctgaagctccaccagcaggcttgcgggttttgattagttcagactcctttatttctttcaacttgggaggagggaaggc

SEQ ID NO: 258877 - DNA, 120 bp, Artificial Sequence
  ENSG00000124813_52 (sequence is synthesized)
tttgtttctcaagcaaatagcaggaaagggctctctggtcctagtgcctcacattttctgcagcagatggactcccatggggattcagagcccagtaccttggactcccagtcttcgacc

SEQ ID NO: 258878 - DNA, 120 bp, Artificial Sequence
  ENSG00000124813_53 (sequence is synthesized)
accttgttcctctcctcggaggagccaggcccctccaccgccgccctgccatctccctcctcctcttcctgcgagcctcaggccttttccccaggtccgccagcgctgcctccgctgttg

SEQ ID NO: 258879 - DNA, 120 bp, Artificial Sequence
  ENSG00000124813_54 (sequence is synthesized)
gcagcctcggcgcccccaggccccggcgcctcccggcgcacaggccgctactcagtcgtcgcctcctccccggaggccgccccgcgtctggtcgactggctccccggttgcccttcgacc

SEQ ID NO: 258880 - DNA, 120 bp, Artificial Sequence
  ENSG00000124813_55 (sequence is synthesized)
tgcccttcgaccatctctcccagcacacgcggggatgacaaggagcggccgccgcccgtcctggcaccggccgagggcccggaaaggagccgcgccccgcgccccagcactgcgggcagg

SEQ ID NO: 258881 - DNA, 120 bp, Artificial Sequence
  ENSG00000124813_56 (sequence is synthesized)
gaggagggcaccgtggacgcgggtacatccccgccgccccgagcccggcccgccgctgcggcgagcttggaggcccacgtcggggacatcctggtggagctgcggaccatgaacggccac

SEQ ID NO: 258882 - DNA, 120 bp, Artificial Sequence
  ENSG00000124813_57 (sequence is synthesized)
ctggacagcatagcgcgggccctcaccaaactggcttcgtccctggggccccagcctgagcccctgccagatgtttcggatgccaactaatggagctcggcgaggctgggccgccccggg

SEQ ID NO: 258883 - DNA, 120 bp, Artificial Sequence
  ENSG00000124813_58 (sequence is synthesized)
gccgagggatcgcttgcaccaggcatccctgcctgtccctccccagcagcgaagcgcgcccagcggaggagcggttgctctgcgcagctgcctagcggaaagcacggccctagcgtttca

SEQ ID NO: 258884 - DNA, 120 bp, Artificial Sequence
  ENSG00000124813_59 (sequence is synthesized)
gagaaagagagagagagaaagagcaagggggaaaagccacagtggtaggcagtcccactttacttaagagtactgtgaggtcacaaaccacatgattctgcctctccagtaatagtgctt

SEQ ID NO: 258885 - DNA, 120 bp, Artificial Sequence
  ENSG00000124813_60 (sequence is synthesized)
aaagtgcctggaaacggcggtggcaccctgcgaaggatgcttagagaaacactctttcacatcccattcctgcgacttccgcgtggcgtggagggagaggagctcaaagcaagtcgccaa

SEQ ID NO: 258886 - DNA, 120 bp, Artificial Sequence
  ENSG00000124813_61 (sequence is synthesized)
agcagcagcgaggccagctccagcgttggtggggcatccatctctggtgacgttcacaagtttgtttgtttttaaaatcgtttttggaaaaatatttttttttcctcataagcacatttc

SEQ ID NO: 258887 - DNA, 120 bp, Artificial Sequence
  ENSG00000124813_62 (sequence is synthesized)
aagaagtttggaaaatagagaaatgaaacaaaatctggtgtatttgtggaaaaggggggtatttaagtctttcttatgagtaagaaagtattttgtgtaataaaaaaaatgtatatccac

SEQ ID NO: 258888 - DNA, 120 bp, Artificial Sequence
  ENSG00000124813_63 (sequence is synthesized)
actactatttagtgatacaagctgggactaaaactgaggtcccccgacacctggtccagagttctttctactatacatcaaagaatatacaaataaaagtttatcataactaacccaaaa

SEQ ID NO: 258889 - DNA, 120 bp, Artificial Sequence
  ENSG00000124813_64 (sequence is synthesized)
ggctgcttgagttcaataacctaaaaatgaaaaacctctggaccattccagtacaggttattcaaaggagctgtgataaagagcatatagcaaatgtgctcagttatatgcactaggtga

SEQ ID NO: 258890 - DNA, 120 bp, Artificial Sequence
  ENSG00000124818_0 (sequence is synthesized)
ttcagatccctcgtggttcgagaacagaatggcgttaaatcacactgccctgcctcaggacgagcgcctgccccattaccttcgagatggggatccttttgcttccaaactttcttggga

SEQ ID NO: 258891 - DNA, 120 bp, Artificial Sequence
  ENSG00000124818_1 (sequence is synthesized)
agcggatttagtggctggcttttacctaacaataattgggattctgtccacatttggaaatggatatgtcctttacatgtcttctagacgaaagaagaagctgagacccgctgaaataat

SEQ ID NO: 258892 - DNA, 120 bp, Artificial Sequence
  ENSG00000124818_2 (sequence is synthesized)
gactatcaatttagcagtctgtgatctggggatttcagttgtaggcaagccgttcaccatcatctcttgcttttgtcaccgctgggtgtttggctggatcggctgccgctggtatggatg

SEQ ID NO: 258893 - DNA, 120 bp, Artificial Sequence
  ENSG00000124818_3 (sequence is synthesized)
ggctggatttttctttggctgtggaagccttatcaccatgactgctgtcagcctggatcgatatttgaaaatctgctatttatcttatggggtttggctgaaaagaaagcacgcctacat

SEQ ID NO: 258894 - DNA, 120 bp, Artificial Sequence
  ENSG00000124818_4 (sequence is synthesized)
ctgcctggcagccatctgggcctatgcttccttctggaccaccatgcccttggtaggtctgggggactacgtacctgagcccttcggaacctcgtgcaccctggactggtggctggccca

SEQ ID NO: 258895 - DNA, 120 bp, Artificial Sequence
  ENSG00000124818_5 (sequence is synthesized)
ggcctcggtagggggccaggttttcatcctgaacatcctcttcttctgcctcttgctcccaacggctgtgatcgtgttctcctacgtaaagatcattgccaaggttaagtcctcttccaa

SEQ ID NO: 258896 - DNA, 120 bp, Artificial Sequence
  ENSG00000124818_6 (sequence is synthesized)
agaagtagctcatttcgacagtcggatccatagcagccatgtgctggaaatgaaactgacaaaggtagcgatgttgatttgtgctggattcctgattgcctggattccttatgcagtggt

SEQ ID NO: 258897 - DNA, 120 bp, Artificial Sequence
  ENSG00000124818_7 (sequence is synthesized)
tctgtgtggtcagcttttggaaggccagactccattcccatacagctctctgtggtgccaaccctacttgcaaaatctgcagcgatgtacaatcccatcatttaccaagttattgattac

SEQ ID NO: 258898 - DNA, 120 bp, Artificial Sequence
  ENSG00000124818_8 (sequence is synthesized)
aaatttgcctgttgccaaactggtggtttgaaagcaaccaagaagaagtctctggaaggcttcaggctgcacaccgtaaccacagtcaggaagtcttctgctgtgctggaaattcatgaa

SEQ ID NO: 258899 - DNA, 120 bp, Artificial Sequence
  ENSG00000124818_9 (sequence is synthesized)
gagtgggaataacaaatgttctggttgtgaagagtgcatctgaagtgcttacacggcgtctggcatatgcagagaaattagcttacaaatgttatttttctgacttctcgcctccactcc

SEQ ID NO: 258900 - DNA, 120 bp, Artificial Sequence
  ENSG00000124818_10 (sequence is synthesized)
acttaccctgtcaggaaaaaataattcacaaggaatatcaaaacaatgatgcaccctaggagtatccaagtatcttaactgagttatctcattctggtatagtggcagagttataactaa

SEQ ID NO: 258901 - DNA, 120 bp, Artificial Sequence
  ENSG00000124818_11 (sequence is synthesized)
agagtgccagaaacccacgctttaaacatcctgcagtgcacacctcggtctcgtcagtaaggacttcactttcttctgaactggggcttgtgaaagctggcctgaaaagcctgattcaag

SEQ ID NO: 258902 - DNA, 120 bp, Artificial Sequence
  ENSG00000124818_12 (sequence is synthesized)
gagatcaggctgtgtctctgactggagcagctacactccccatctgtaatttgatttgttctattgcagatgatgtactgggcagaggtgagtgtggattggtgaaaatctgtttttatg

SEQ ID NO: 258903 - DNA, 120 bp, Artificial Sequence
  ENSG00000124818_13 (sequence is synthesized)
actggcaaagcagtgcaggggggtctttcactgataagaagcatcatcagtagggtttgtccctgatgcctttacaacagcatctgagcacctctcaagtttttccaggccagctccagt

SEQ ID NO: 258904 - DNA, 120 bp, Artificial Sequence
  ENSG00000124818_14 (sequence is synthesized)
ttcagtgaggagagtgtgggctttctattccccaaatattcttactacagttaatatgtaggttactgccccagcccaactgcaggttcccagatgtgagttccatgtaggcagaaactg

SEQ ID NO: 258905 - DNA, 120 bp, Artificial Sequence
  ENSG00000124818_15 (sequence is synthesized)
agaaatatgaacctatattctgaggccaagaaacctcttacctgttcaccagggcttcagaaatgaatggcaaactccaatatattttttgaaatgcagaaaataatttagagtattatt

SEQ ID NO: 258906 - DNA, 120 bp, Artificial Sequence
  ENSG00000124818_16 (sequence is synthesized)
tgtatttggcttttaaacttgagaaaatacacagccaatgccaactgaagtgttatcgaagtttaatcatgagtatgtaacatatatcagctactccctcttcaatcttcacagattttt

SEQ ID NO: 258907 - DNA, 120 bp, Artificial Sequence
  ENSG00000124818_17 (sequence is synthesized)
gtaaaatagtgacccaagatggaaaggatattctaagcaatgggaaggcaaagagtcgcttaagcttttcattcattgtgatagcaactgaacttcttaatgtatttattgttataaaaa

SEQ ID NO: 258908 - DNA, 120 bp, Artificial Sequence
  ENSG00000124818_18 (sequence is synthesized)
tgtgcttgaaaccaccaattattttttcctgtagatggttagaacttttaatattgtctgggaaacttctagaagcataatttgtcaagtcaacctgcatacagcatttgtaagtactct

SEQ ID NO: 258909 - DNA, 120 bp, Artificial Sequence
  ENSG00000124818_19 (sequence is synthesized)
ctatgagaacactcagaaaatgttacagtttctgactcattctctctagcccagttgtgtgttaaactgaaggacacacttgactattgcactaggaaaaatgggttaggttctttttat

SEQ ID NO: 258910 - DNA, 120 bp, Artificial Sequence
  ENSG00000124818_20 (sequence is synthesized)
ctctgtcagtttccctttatccacacatttaaaataatttctctcttttctttttaagtcacagctgtgttattcaagtgcacttttttttttcaataaagaaaatatactgcattggca

SEQ ID NO: 258911 - DNA, 120 bp, Artificial Sequence
  ENSG00000124818_21 (sequence is synthesized)
agttgaaggcagttgagaggtgaatgtaggaagaggaaagaggtgccctgctgatgatatatgtaatcatgacttagtgacatatcacaagcataggaagcttctggttcagtggtcctc

SEQ ID NO: 258912 - DNA, 120 bp, Artificial Sequence
  ENSG00000124818_22 (sequence is synthesized)
aaatgcaactcacaaaatatcatctggggaagttctgaattaagtcgttgagagtgttacctgggcatcaggatatttaaaatgagaatctacagttgtaggcaagccgttcaccatcat

SEQ ID NO: 258913 - DNA, 120 bp, Artificial Sequence
  ENSG00000124818_23 (sequence is synthesized)
tttgaaaatctgctatttatcttatgttctgacttctggagcaacacagaaccaatctactaatctactccctcctgtacttgacagcctttcaccatactggaatgggtttggctgaaa

SEQ ID NO: 258914 - DNA, 120 bp, Artificial Sequence
  ENSG00000124818_24 (sequence is synthesized)
cagttcttgaaattgaattacttccttgtgtatgtgtttttttcctacttaaagctcctcgggatgcttcctctcaaaagtctttgaagaataagaggttaagctaagacaacctgaatc

SEQ ID NO: 258915 - DNA, 120 bp, Artificial Sequence
  ENSG00000124818_25 (sequence is synthesized)
aatttttttttttttgtcaaatgcgattgaaattatccccataattcaataaaatagctttttcccttctttctttttactttgttggaaactatgcaacagaaacaaagtaagaagact

SEQ ID NO: 258916 - DNA, 120 bp, Artificial Sequence
  ENSG00000124818_26 (sequence is synthesized)
ctaccttaattttaaaggtaactcttacataaagaagaaagtcattatgccaggccagggggagagtggaaaggggaaatttagagaatagaaacaaacttaagcatcttgtaaattttg

SEQ ID NO: 258917 - DNA, 120 bp, Artificial Sequence
  ENSG00000124818_27 (sequence is synthesized)
agtgaattgtaaacacataatgaatgaatgagaagggccagccaggagtctgtgaaatggtccagttgggaaatgcctaatgcataaacacaaatcttggtgacaggtaggttagttatc

SEQ ID NO: 258918 - DNA, 120 bp, Artificial Sequence
  ENSG00000124818_28 (sequence is synthesized)
tgtgaactttctaaagattaaataaacaataataggattttgttaatgtgccaaagtgagtttaaaccatgaaagacacgatgcaaatatgcaagtacctttaattgggcataataaaaa

SEQ ID NO: 258919 - DNA, 120 bp, Artificial Sequence
  ENSG00000124818_29 (sequence is synthesized)
gtagtgaggtatggttaaaataacatttagaacaagagagaagttagggagaatttttgtctaaaaagccaaaaagtgatagttgattggtgattttgttgttatcaggagagagaattt

SEQ ID NO: 258920 - DNA, 120 bp, Artificial Sequence
  ENSG00000124818_30 (sequence is synthesized)
tcttaatgtaataagttaggtactttggcaagtgaaatgggttctaggccaattgcaagtccttaggattccctggcagctagaaaccttggcactcccaaaagacagcttcagttaaaa

SEQ ID NO: 258921 - DNA, 120 bp, Artificial Sequence
  ENSG00000124818_31 (sequence is synthesized)
tgacagatgaacatgagtcttcaagtcaaaactactgttgtaccacgtccattgaatgtttggtgattcaagtctctgttattcaagaactgattctgtttttcctcctgtcaaaacctt

SEQ ID NO: 258922 - DNA, 120 bp, Artificial Sequence
  ENSG00000124818_32 (sequence is synthesized)
ggttgattttgactgtagtagcacatctggcaggaatatgacagaaaaaaattaagttaaaaatataatttctattcccctattttttctgtaaaaggctttatggggaagaagggaaga

SEQ ID NO: 258923 - DNA, 120 bp, Artificial Sequence
  ENSG00000124818_33 (sequence is synthesized)
aggttgacatgagtagagatgatacttgcctctggatgacccagttgggttctcctttgactgccattcaccacagttgacctcattaggctccgaagtatgagaagagcttcattgcca

SEQ ID NO: 258924 - DNA, 120 bp, Artificial Sequence
  ENSG00000124818_34 (sequence is synthesized)
agttagtgaaagaagcagatgatttacttttgctcgagtgggtctgtagacctcgggaggttagccatttctcttagagtttggtgtatgtattaagatacagcatgtatgtaggtatat

SEQ ID NO: 258925 - DNA, 120 bp, Artificial Sequence
  ENSG00000124818_35 (sequence is synthesized)
ataatacatatatgtgtgtatacatatatatatatttctggtttgtttaatatcttttaaaaaattttaatggaattttttgaacatgtacaaaagagaaagaatcctacgatgaactcc

SEQ ID NO: 258926 - DNA, 120 bp, Artificial Sequence
  ENSG00000124818_36 (sequence is synthesized)
catgtatccatcatccagcctcaatagtgatcaacccatagcatattgtggttcatgttgacactcatccacctctttccttccccatctctccccattattttgagacgaatgagatcc

SEQ ID NO: 258927 - DNA, 120 bp, Artificial Sequence
  ENSG00000124818_37 (sequence is synthesized)
tgggatttcgtgaaaatattatgaatatcttatttgtgagaacaagatttcccaaagcatgatccccagaaacctagtcctgcaaaactactgcaaaaataaagtgttctaatctccaaa

SEQ ID NO: 258928 - DNA, 120 bp, Artificial Sequence
  ENSG00000124818_38 (sequence is synthesized)
cgagccaccaagccccttccacaagttcttaggaagccagataagactagcaacacaaaagctgttagcaggaagggcgttttaaagacacaagccatgttttgtgcttcctcacctccc

SEQ ID NO: 258929 - DNA, 120 bp, Artificial Sequence
  ENSG00000124818_39 (sequence is synthesized)
agaaggattttccctggatgatccactaacacaccctttccgagatgttttctcaagggcctccattgtcttcagcatcctctcatctctttcctgtcccttttcccagctgttgtcact

SEQ ID NO: 258930 - DNA, 120 bp, Artificial Sequence
  ENSG00000124818_40 (sequence is synthesized)
ggcccaagctctggaacttttttccgtttactccactctccctcaggcttcagttatctgcccaggggtttggctgaaaagaaagcacgcctacatctgcctggcagccatctgggccta

SEQ ID NO: 258931 - DNA, 120 bp, Artificial Sequence
  ENSG00000124818_41 (sequence is synthesized)
tgcttccttctggaccaccatgcccttgatcattgccaaggttaagtcctcttccaaagaagtagctcatttcgacagtcggatccatagcagccatgtgctggaaatgaaactgacaaa

SEQ ID NO: 258932 - DNA, 120 bp, Artificial Sequence
  ENSG00000124827_0 (sequence is synthesized)
cctctctctctttctctctctctgcacctccccttcacacaccccactttcttctttaaagagaagaaaaaaaacccacctggcgcacctgtccttttttcttctatttttcagaaccct

SEQ ID NO: 258933 - DNA, 120 bp, Artificial Sequence
  ENSG00000124827_1 (sequence is synthesized)
gggcggaaagcgcgagcgagttgggcagatgccggcggccgcggtgcaggaagcggtcggcgtgtgctcctacgggatgcagctcagctgggacatcaacgatccgcagatgcctcagga

SEQ ID NO: 258934 - DNA, 120 bp, Artificial Sequence
  ENSG00000124827_2 (sequence is synthesized)
gctggccctctttgaccaattccgagagtggcctgacggctatgtgcgcttcatctacagcagcgatgagaagaaggcacagcgtcacctgagcggctgggccatgcgcaacaccaacaa

SEQ ID NO: 258935 - DNA, 120 bp, Artificial Sequence
  ENSG00000124827_3 (sequence is synthesized)
ccacaatggccacatcctcaagaagtcgtgcctgggtgtggtggtgtgtacacaggcctgcaccctgcccgacggttcccgcctgcagctgaggccggccatctgcgacaaggcacggct

SEQ ID NO: 258936 - DNA, 120 bp, Artificial Sequence
  ENSG00000124827_4 (sequence is synthesized)
gaaacagcagaagaaggcatgccctaactgtcattctgctttggagttgattccttgtcgagggcacagcggataccccgtaaccaacttttggcggcttgatggcaacgcgatcttttt

SEQ ID NO: 258937 - DNA, 120 bp, Artificial Sequence
  ENSG00000124827_5 (sequence is synthesized)
tcaggccaagggagttcatgatcatccaagaccagagagcaaatcagagacagaagctagaagaagcgccatcaagagacaaatggcctctttctaccaaccccagaaaaagagaattcg

SEQ ID NO: 258938 - DNA, 120 bp, Artificial Sequence
  ENSG00000124827_6 (sequence is synthesized)
agaatccgaggcagaagaaaatcaagacagcagtggtcatttcagcaacatacctcccttggaaaatccagaagactttgatatagttactgaaaccagcttccctattccagggcagcc

SEQ ID NO: 258939 - DNA, 120 bp, Artificial Sequence
  ENSG00000124827_7 (sequence is synthesized)
ttgcccttccttcccaaagtctgatgtttacaaagctacctgtgacctagccacctttcaaggagacaaaatgccacccttccagaaatactcaagcccaagaatctatttgcctaggcc

SEQ ID NO: 258940 - DNA, 120 bp, Artificial Sequence
  ENSG00000124827_8 (sequence is synthesized)
accttgcagctatgaattggcaaaccctggttatacaaattcaagcccatatcccaccctttataaggattccaccagtatccctaatgacacagactgggttcatctgaacacactaca

SEQ ID NO: 258941 - DNA, 120 bp, Artificial Sequence
  ENSG00000124827_9 (sequence is synthesized)
atgtaatgtcaattcatacagcagctatgagagaagctttgatttcaccaacaaacagcatggctggaaaccagctcttggaaaacccagccttgtggaaaggactaaccatgggcagtt

SEQ ID NO: 258942 - DNA, 120 bp, Artificial Sequence
  ENSG00000124827_10 (sequence is synthesized)
cctgcaggtacctcacgactccaccaccaggtgcccctgccctacaaaccgtgatcaccaccaccactaaagtgtcctaccaggcctaccagccccctgctatgaaatacagtgacagtg

SEQ ID NO: 258943 - DNA, 120 bp, Artificial Sequence
  ENSG00000124827_11 (sequence is synthesized)
tgcgagaggtgaagagcctttcgagctgtaactatgctcctgaagatactgggatgtctgtctatccagaaccctggggtcctccggtgacagtcaccagggcagcctctccttcagggc

SEQ ID NO: 258944 - DNA, 120 bp, Artificial Sequence
  ENSG00000124827_12 (sequence is synthesized)
cacctcctatgaaaattgcaggagattgccgggccatcagacccactgtggctattccccacgagccagtttcctctaggacagatgaagcagagacttgggatgtgtgtctgtctgggc

SEQ ID NO: 258945 - DNA, 120 bp, Artificial Sequence
  ENSG00000124827_13 (sequence is synthesized)
tgggctccgcagtcagttactcagacagagtgggtcccttctttacctacaacaatgaggatttttgaaagacaatccaggggacataatagcagtgtgcatgcaggcaggaggcaggga

SEQ ID NO: 258946 - DNA, 120 bp, Artificial Sequence
  ENSG00000124827_14 (sequence is synthesized)
aatgtgaaatggcaatgatctcttattgagttgggagattcaccttgtgtgcaaagaaacacagatagtagtaaaaattctgagtaactgagaaaataatcagttggaaatgattagata

SEQ ID NO: 258947 - DNA, 120 bp, Artificial Sequence
  ENSG00000124827_15 (sequence is synthesized)
atatgggaaatttcacacagcattttgaaactggctacaatacatagaagtagtgaggaaagtgtgagtctctcaaatgaacaaataagcaaactgtaggaggttaaatactgacctaag

SEQ ID NO: 258948 - DNA, 120 bp, Artificial Sequence
  ENSG00000124827_16 (sequence is synthesized)
ttcacttagcttattagcaggagtagaagtcaaggattctggttcttattctaggacttttcccattagagcaccttagggaatttcacatccctagaggctgccaaaatagcttcagga

SEQ ID NO: 258949 - DNA, 120 bp, Artificial Sequence
  ENSG00000124827_17 (sequence is synthesized)
agaaatttttacaatcttatcacctgagtcatttcatgaaatttttgtttagcatttagaacctgttaaactagcttcaggaagtaattttgattgttttatctccaacgtgtgtatcta

SEQ ID NO: 258950 - DNA, 120 bp, Artificial Sequence
  ENSG00000124827_18 (sequence is synthesized)
cagcttttcaaaaaatctctagcaatggtaaagttcagttgtttttaaaagattcaatattagcttttcataacatgatagtttcctaaccttttcataaccttttcataacatgatagt

SEQ ID NO: 258951 - DNA, 120 bp, Artificial Sequence
  ENSG00000124827_19 (sequence is synthesized)
ttccataacagagacagcctaacaatgatgagttgtatttaatggattaccattgtactaaatacattttttttctgattaggtttcagaattataattaaaatgttttgctgaaataca

SEQ ID NO: 258952 - DNA, 120 bp, Artificial Sequence
  ENSG00000124831_0 (sequence is synthesized)
cccctgtcggccgcgcccgagcccagcgccgcgagccgctccccggcgggctggctcctggccccggaagcgcgagcgttcacttagcggcgagtggctccgtctccgcggacagagcgc

SEQ ID NO: 258953 - DNA, 120 bp, Artificial Sequence
  ENSG00000124831_1 (sequence is synthesized)
cgttcacttagcggcgagtggctccgtctccgcggacagagcgcgcgccccctggcccggcccgcgaggggctcccggcgcggtccccgagcatttcccgccgggtggagcgggccgagc

SEQ ID NO: 258954 - DNA, 120 bp, Artificial Sequence
  ENSG00000124831_2 (sequence is synthesized)
atgaccagccccgcggccgctcaaagccgggagatcgactgtttgagcccggaagcgcagaagctggcggaagcccggctcgctgcaaaacgggcggcccgcgcggaggctcgcgagatc

SEQ ID NO: 258955 - DNA, 120 bp, Artificial Sequence
  ENSG00000124831_3 (sequence is synthesized)
cgcatgaaggagctggagcggcagcagaaggaggaagacagtgagcgctactctcgtagatccagaagaaacacatcggcttctgatgaagacgagcgcatgtcagtgggtagtcgtgga

SEQ ID NO: 258956 - DNA, 120 bp, Artificial Sequence
  ENSG00000124831_4 (sequence is synthesized)
agcctgagggtagaagagagaccagaaaaagattttactgagaaggggtctcgtaacatgccgggcctgtctgcagccacgctggcctctctgggtgggacttcctctcggagaggcagc

SEQ ID NO: 258957 - DNA, 120 bp, Artificial Sequence
  ENSG00000124831_5 (sequence is synthesized)
ggagacacctccatctccatcgacaccgaggcatccatcagggaaatcaaggactctctagcagaagttgaagagaaatataagaaggctatggtttccaatgctcagctagacaatgaa

SEQ ID NO: 258958 - DNA, 120 bp, Artificial Sequence
  ENSG00000124831_6 (sequence is synthesized)
aagacaaacttcatgtaccaggttgataccctaaaagatatgttgctggagcttgaagaacagctggctgaatctaggcggcagtacgaagagaaaaacaaagaatttgaaagggaaaaa

SEQ ID NO: 258959 - DNA, 120 bp, Artificial Sequence
  ENSG00000124831_7 (sequence is synthesized)
cacgcccacagtatactgcaatttcagtttgctgaagtcaaggaggccctgaagcaaagagaggaaatgctcgagaaacatggaataatcctaaattcagaaatagctaccaatggagag

SEQ ID NO: 258960 - DNA, 120 bp, Artificial Sequence
  ENSG00000124831_8 (sequence is synthesized)
acttccgacaccctcaataatgttggataccaaggtcctaccaagatgacaaaagaagagttaaatgccctcaagtcgacaggggatgggaccctaggaagagccagtgaagtggaggtg

SEQ ID NO: 258961 - DNA, 120 bp, Artificial Sequence
  ENSG00000124831_9 (sequence is synthesized)
aaaaatgaaatcgtggcgaatgtggggaaaagagaaatcttgcacaatactgagaaagaacaacacacagaggacacagtgaaggactgtgtggacatagaggtattccctgctggtgag

SEQ ID NO: 258962 - DNA, 120 bp, Artificial Sequence
  ENSG00000124831_10 (sequence is synthesized)
aataccgaggaccagaaatcctctgaagacactgccccattcctaggaaccttagcaggtgctacctatgaggaacaggttcaaagccaaattcttgagagcagttctctccctgaaaac

SEQ ID NO: 258963 - DNA, 120 bp, Artificial Sequence
  ENSG00000124831_11 (sequence is synthesized)
acagtacaggttgagtcaaatgaggtcatgggtgcaccagatgacaggaccagaactccccttgagccatccaactgttggagtgacttagatggtgggaaccacacagagaatgtggga

SEQ ID NO: 258964 - DNA, 120 bp, Artificial Sequence
  ENSG00000124831_12 (sequence is synthesized)
gaggcagcagtgactcaggttgaagagcaggcaggcacagtggcctcgtgtcctttagggcatagtgatgacacagtttatcatgatgacaaatgtatggtagaggtcccccaagagtta

SEQ ID NO: 258965 - DNA, 120 bp, Artificial Sequence
  ENSG00000124831_13 (sequence is synthesized)
gagacaagcacagggcatagtttagagaaagaattcaccaaccaggaagcagctgagcccaaggaggttccagcgcacagtacagaagtaggtagggatcacaacgaagaagagggtgaa

SEQ ID NO: 258966 - DNA, 120 bp, Artificial Sequence
  ENSG00000124831_14 (sequence is synthesized)
gaaacaggattaagggacgagaaaccaatcaagacagaagttcctggttctccagcaggaactgagggcaactgtcaggaagcgacaggtccaagtacagtagacactcaaaatgaaccc

SEQ ID NO: 258967 - DNA, 120 bp, Artificial Sequence
  ENSG00000124831_15 (sequence is synthesized)
ttagatatgaaagagcccgatgaagaaaagagtgaccaacagggagaggcattggactcatcgcagaagaagacaaagaacaagaaaaagaaaaacaagaagaaaaaatccccagtaccc

SEQ ID NO: 258968 - DNA, 120 bp, Artificial Sequence
  ENSG00000124831_16 (sequence is synthesized)
gtagaaacccttaaagatgttaaaaaagagttaacgtatcagaacacagatttaagtgaaattaaggaagaagagcaggtaaagtctactgacagaaagtcagcagtggaagcccaaaac

SEQ ID NO: 258969 - DNA, 120 bp, Artificial Sequence
  ENSG00000124831_17 (sequence is synthesized)
gaggtgactgaaaatccaaaacagaaaattgcagcagaaagcagtgaaaatgttgattgtccggagaatcctaaaattaagttggatggaaaacttgaccaagaaggtgatgatgtacaa

SEQ ID NO: 258970 - DNA, 120 bp, Artificial Sequence
  ENSG00000124831_18 (sequence is synthesized)
tgacaccgttcaatcatcaggcccgagggctggtggtgaagaattagatgaaggtgttgcaaaagataatgctaaaatagatggtgccactcaaagcagtcctgcagaaccaaagagcga

SEQ ID NO: 258971 - DNA, 120 bp, Artificial Sequence
  ENSG00000124831_19 (sequence is synthesized)
agacgcagatcgctgcaccctgcccgaacatgaaagtccctcacaggacattagtgatgcctgtgaagcagaaagtacagagaggtgtgagatgtcagaacatccaagtcagaccgtcag

SEQ ID NO: 258972 - DNA, 120 bp, Artificial Sequence
  ENSG00000124831_20 (sequence is synthesized)
gaaagctttagacagcaatagcctagagaacgatgacttgtcggcaccaggaagagagccagggcacttcaatccagaaagcagagaagataccagaggagggaatgagaagggcaaaag

SEQ ID NO: 258973 - DNA, 120 bp, Artificial Sequence
  ENSG00000124831_21 (sequence is synthesized)
caaagaagactgtaccatgtcctaagctgaggcaggcggcaggcgcggtgcacaggaagtctcagtgtgaaggggtcttttctctccactgccaatgtaagtagaatgttctaaattcat

SEQ ID NO: 258974 - DNA, 120 bp, Artificial Sequence
  ENSG00000124831_22 (sequence is synthesized)
agagaggcactgtatgacaattaccaggtgctctactgctttaagttatagactgttacttgtagatttccatgtaatcattgaggttatcacccagattagaaagacatatttgttatc

SEQ ID NO: 258975 - DNA, 120 bp, Artificial Sequence
  ENSG00000124831_23 (sequence is synthesized)
agtgtacgttctaattgagagcattccagtagtatcaaacaataatgtctactgtttatagtccacttaataaaaatagaggcatttactatttgccttaggctgataggaatgtgggtt

SEQ ID NO: 258976 - DNA, 120 bp, Artificial Sequence
  ENSG00000124831_24 (sequence is synthesized)
ttcttgaccaaatatatcagcatctaattgaaatgaccaaatagcattcttagacttctgtattatgaatataattgatatttaaattaatgtcttgttcacatatgtgtactttcatat

SEQ ID NO: 258977 - DNA, 120 bp, Artificial Sequence
  ENSG00000124831_25 (sequence is synthesized)
ttgattttaaaatgtacattataacctgtatggtattttatttaaaggagataaacagccaaatagcaaataggtcactgaatgataagatttgcaccttagaacaataatcattttaag

SEQ ID NO: 258978 - DNA, 120 bp, Artificial Sequence
  ENSG00000124831_26 (sequence is synthesized)
gataacaagtaaatgtctgaaagcatgaggggctttatttgcctttacctcatatgagtctttgatcttgaaccgatacttttggatctcattgttgatatacctgaatttactttgtaa

SEQ ID NO: 258979 - DNA, 120 bp, Artificial Sequence
  ENSG00000124831_27 (sequence is synthesized)
gagattttaacttcacttcatgctgatgatgtatcaaattcattttatagaaagatttaaagtttttttctggaagtgatatatgtcaaattacatttcctactgcagtatttgagcagg

SEQ ID NO: 258980 - DNA, 84 bp, Artificial Sequence
  ENSG00000124831_28 (sequence is synthesized)
atatgtcaaattacatttcctactgcagtatttgagcagggacagtcattttttaaatgttttacattgggaggccaaggcagg

SEQ ID NO: 258981 - DNA, 120 bp, Artificial Sequence
  ENSG00000124831_29 (sequence is synthesized)
ctggacaacaagagcgaaactctgtctaaaaaaaaaaaaaaaaacacacacacacacaacacaatgttttcacgcctgtaaacctagcacattgggaagccaaggtgggaggattgcttg

SEQ ID NO: 258982 - DNA, 65 bp, Artificial Sequence
  ENSG00000124831_30 (sequence is synthesized)
actgtactctagcctgggagacagagtgagacactgtctctaaaaaaaaaaaaaaaaaaaaaaaa

SEQ ID NO: 258983 - DNA, 120 bp, Artificial Sequence
  ENSG00000124831_31 (sequence is synthesized)
aaaaaaaaaaaaaaaaaaaaagtttttgaaccttaaaatactttgtttgaatttctaatcatcattcaaaagagcagtaaaaaatggttacttgttcttgtacaagctactaattagact

SEQ ID NO: 258984 - DNA, 120 bp, Artificial Sequence
  ENSG00000124831_32 (sequence is synthesized)
gactatagtaggatattttaaagagctgaatcacttttggtattttggtataaatattttcatttgttatgtcccagtatattcttactggaaaattcttgttttgatctgcctgaagaa

SEQ ID NO: 258985 - DNA, 120 bp, Artificial Sequence
  ENSG00000124831_33 (sequence is synthesized)
ctgcctgaagaaaatatctgttttctatataaaaaaattttttaaaataattgtaaagttagatttaaaattgtaaaatataaaatcacaaaggaatgtaccttatgaatgttgttgaca

SEQ ID NO: 258986 - DNA, 120 bp, Artificial Sequence
  ENSG00000124831_34 (sequence is synthesized)
atgtggattcatattactgttacaagatagaattgaatgcaaaaagaccaaaacctcaataaaatttgaggaaaacgtgttattatgtaattgaaataaaaacattttataattgtgcaa

SEQ ID NO: 258987 - DNA, 120 bp, Artificial Sequence
  ENSG00000124831_35 (sequence is synthesized)
cggcgcgagcggctggagcaacgggccccgcggcagctgcgggcgacgcggtcgatggacatgggcacccagggatcggggcgcaagcggctccccaaccgggagcggctcacggcggag

SEQ ID NO: 258988 - DNA, 120 bp, Artificial Sequence
  ENSG00000124831_36 (sequence is synthesized)
gatctatcaggtccaaaagaaatattatgggctggatacaaaatggggtgacatcgagcagtggatggaagacagtgagcgctactctcgtagatccagaagaaacacatcggcttctga

SEQ ID NO: 258989 - DNA, 120 bp, Artificial Sequence
  ENSG00000124831_37 (sequence is synthesized)
tgaagacgagcgcatgtcagtgggtagtcgtggaagcctgaggtcgcagcctgacttggagtatgggggtccttacgcctggacaaatggttatgatggagaattgtatggatcacagtc

SEQ ID NO: 258990 - DNA, 120 bp, Artificial Sequence
  ENSG00000124831_38 (sequence is synthesized)
cctgaatagaagatctggcaggccctcctgtctgtacagcgctgcccggccttcggggagttaccgggcgtctgtgttggatgaaggcagcttcggtgggacccgacggggcagcacctc

SEQ ID NO: 258991 - DNA, 120 bp, Artificial Sequence
  ENSG00000124831_39 (sequence is synthesized)
cagggaaatcaaggaactcaatgagttaaaggaccagattcaggatgtagaaggcaaatacatgcagggattgaaagagatgaaggactctctagcagaagttgaagagaaatataagaa

SEQ ID NO: 258992 - DNA, 120 bp, Artificial Sequence
  ENSG00000124831_40 (sequence is synthesized)
gctacagcagaaacaggcgagttctatcagggagatttctgatcttcaggaaacaatagagtggaaagacaaaaagataggggcattagagaggcagaaagagttctttgattccgtaag

SEQ ID NO: 258993 - DNA, 120 bp, Artificial Sequence
  ENSG00000124831_41 (sequence is synthesized)
ggaacagattaagaaactcaaagggcagctggaggagagacagaagattggcaaactagacaatcttcgatctgaagatgatgtcttggaaaacgggacagacatgcatgtaatggacct

SEQ ID NO: 258994 - DNA, 120 bp, Artificial Sequence
  ENSG00000124831_42 (sequence is synthesized)
acaaagggatgccaacagacagatcagcgacctcaaatttaaacttgcaaaatctgagcaagagataactgcattagaacaaaatgtaataaggttagagagtcaagtatcacgttacaa

SEQ ID NO: 258995 - DNA, 120 bp, Artificial Sequence
  ENSG00000124831_43 (sequence is synthesized)
atcagcggctgaaaatgcagaaaaaatagaagatgaacttaaggcagaaaaacggaaactccaaagagagctccgctctgcattggataaaacagaagagctcgaggtgagcaacggcca

SEQ ID NO: 258996 - DNA, 120 bp, Artificial Sequence
  ENSG00000124831_44 (sequence is synthesized)
cttagtgaagcgtctggaaaaaatgaaagcaaatcggagtgcactcttgtcccagcagtaaattccagctctgatcaggcaactggttggtgactggagagcattgtttcataggctttt

SEQ ID NO: 258997 - DNA, 120 bp, Artificial Sequence
  ENSG00000124831_45 (sequence is synthesized)
tgggagcgctgcttcttcccctgccttccgagagacgaagaccgtggcgagcttggcgcttaggggctcccgtgccatggctcaccccagggagccccagcagccaccaggtgcctctgt

SEQ ID NO: 258998 - DNA, 120 bp, Artificial Sequence
  ENSG00000124831_46 (sequence is synthesized)
ctgcagacccctggcccgggctggcgccgacgctcagaacctgcaggtacttcataagcacacaggggcctcgagggagctctgtgtctgaccgcacagcagcctctgaatgccgctgga

SEQ ID NO: 258999 - DNA, 120 bp, Artificial Sequence
  ENSG00000124831_47 (sequence is synthesized)
agtgatgatcaaagtaaagattcagttgggacttgagttttttttttttttcatgtgtcttgctgaagattaaggggaaatgttacagtgttgggacttcctttcatggcagaatctaca

SEQ ID NO: 259000 - DNA, 120 bp, Artificial Sequence
  ENSG00000124831_48 (sequence is synthesized)
atttgagcgacttcagtagtatctcttagtctacgcttttcatacacaaaacactgtggaaccacaagccattaccaagcaaaactctttcactggaaacaagggggcagtctagaagta

SEQ ID NO: 259001 - DNA, 120 bp, Artificial Sequence
  ENSG00000124831_49 (sequence is synthesized)
aaagtgaccttaagaagactctttacaggcaacaaatgaagcttttctaagggatttttgcatcagttcagtcataagaatacttttttccagggtaattaggcaatagcttcactgaaa

SEQ ID NO: 259002 - DNA, 120 bp, Artificial Sequence
  ENSG00000124831_50 (sequence is synthesized)
atgacagcttttcattgcattatttaatccttatatttggaattgaagtcgttaacttcttttaaagaatgtactattagaaaaattaaaaatgaaatgttgagagacttcagcaatgtg

SEQ ID NO: 259003 - DNA, 120 bp, Artificial Sequence
  ENSG00000124831_51 (sequence is synthesized)
gttctaatttttttccactgagaaagaagatctttaatttcatattaatggttctgtatattttgggtcatctttttattttttaagaatatcaagtcaattcatttttctttccctatt

SEQ ID NO: 259004 - DNA, 120 bp, Artificial Sequence
  ENSG00000124831_52 (sequence is synthesized)
taaaaaaaaaggtgttttcacagaatgagtgcacttaaaaagtgaagtgaaggaggaggtaacagtagagacgatggcaatatcatcaaggacaaaagtaaaaacgtttagctacctgct

SEQ ID NO: 259005 - DNA, 120 bp, Artificial Sequence
  ENSG00000124831_53 (sequence is synthesized)
gatttttagtgactgttcatatatgttgtatttcaagtatggctggtgaagccagtcagcttttcgggacgttagcaagtggaaactgagtcagtatcatccaaaaccatatctagtctt

SEQ ID NO: 259006 - DNA, 120 bp, Artificial Sequence
  ENSG00000124831_54 (sequence is synthesized)
aacacatggagaatgctggagtgagggttgtgagttcagggtatataatcaagaaaacactcccagcataatgctaggggtcaccagtgtccatcccccagaactgtatggatctaggat

SEQ ID NO: 259007 - DNA, 120 bp, Artificial Sequence
  ENSG00000124831_55 (sequence is synthesized)
atacacagctgcgttgcattaagaaagagatgaaatctctattaaaatacacaagatttttgtatctccttgtgcagaggatatttgccactgcccattgggaagcagacaagttatagg

SEQ ID NO: 259008 - DNA, 120 bp, Artificial Sequence
  ENSG00000124831_56 (sequence is synthesized)
gggctgggggccaacactggcaagtaggaaaccacgggtcggacaggtgagcaaaatgtgctggcaggtgggcaccactgggagacccacactgcacacccgggcaccgtatgaacagga

SEQ ID NO: 259009 - DNA, 120 bp, Artificial Sequence
  ENSG00000124831_57 (sequence is synthesized)
aagaggaaggaagctggacgaagcccctcagggaccctgtgctgaccatgctgggcccaccggcaaaagggagatattcagttccttgtctcatccttaaggtttcttccacaacatctg

SEQ ID NO: 259010 - DNA, 120 bp, Artificial Sequence
  ENSG00000124831_58 (sequence is synthesized)
aatacaagcatgtttaactgggaaaatgtctatgtcatgcgtgaataacaccagcagcaaacactcacacatcacgcagacacggccggcagcatgctgacgcttttaggtatttttcac

SEQ ID NO: 259011 - DNA, 120 bp, Artificial Sequence
  ENSG00000124831_59 (sequence is synthesized)
tcatgcaattttcacatattttcactcatttcatttgcacggaaattctatgaggtagatgctgttatcaaatccacattacagatgagggacccagggtccaggaaggtgaactggcag

SEQ ID NO: 259012 - DNA, 120 bp, Artificial Sequence
  ENSG00000124831_60 (sequence is synthesized)
aagtctcccagctggtagaacagggctgcaaggcatcgattcccaggtgtctcacagccctgagaagatggcgttttccctatcagtggctctgaggaagtcaagccttcagtctctacc

SEQ ID NO: 259013 - DNA, 120 bp, Artificial Sequence
  ENSG00000124831_61 (sequence is synthesized)
tctcccaccaattcttttggaaacagcaaaccaatgttacacacacttcctaatccagaggaagctagaacacgatttttaaatttatttagtaaaataaaactttttttgcagatgtaa

SEQ ID NO: 259014 - DNA, 120 bp, Artificial Sequence
  ENSG00000124831_62 (sequence is synthesized)
acgtgaagcatgttctgggaggttgacccaacctcctttggctgtggcctcattcaccccgtcctgtctgtggcctcattcaccgtgatattaggttgaaaaagctggttgatgaacggg

SEQ ID NO: 259015 - DNA, 120 bp, Artificial Sequence
  ENSG00000124831_63 (sequence is synthesized)
aggcagaaaaacggaaactccaaagagagattatatatctttgaatgatgcaggccactgcagtggtggagacagcatctggtaaaggctaccacagtaatggaggcaacctccaaaaag

SEQ ID NO: 259016 - DNA, 120 bp, Artificial Sequence
  ENSG00000124831_64 (sequence is synthesized)
aagacgagcgcatgtcagtgggtagtcgtggaagcctgaggccctcctgtctgtacagcgctgcccggccttcggggagttaccgggcgtctgtgttggatgaaggcagcttcggtggga

SEQ ID NO: 259017 - DNA, 120 bp, Artificial Sequence
  ENSG00000124831_65 (sequence is synthesized)
cccgacggggcagcacctccggctcccgtgctcacgccaaccatactaacaggtggtgaaaccgtcttcggttaataaaaacgggaaaaggacaacttgacagaccacacatcattctcg

SEQ ID NO: 259018 - DNA, 120 bp, Artificial Sequence
  ENSG00000124831_66 (sequence is synthesized)
cttcaaactctttcgttcttgttttcttgtccaagtctcctttagaatttctcttcctgaaaagtttcttctctatttataatgttctcactatacaactaaatgtcagattacctatat

SEQ ID NO: 259019 - DNA, 120 bp, Artificial Sequence
  ENSG00000124831_67 (sequence is synthesized)
caattttgcttgcactcttattacattttaacacttattttctagtgcttatgtagaatatttgaagttttctagaagaaaacaataacaattgtacaatagatacttgagcttcaagat

SEQ ID NO: 259020 - DNA, 120 bp, Artificial Sequence
  ENSG00000124831_68 (sequence is synthesized)
cacattctggtgtattcagtgtttcttatgacgcctgtagtttttgtatgtaggagtattaaaacatgtaagaaaatgaaaagtgatattgggcaaaagaatcaggttcataactgcaaa

SEQ ID NO: 259021 - DNA, 120 bp, Artificial Sequence
  ENSG00000124831_69 (sequence is synthesized)
aatgttttgtttcaatgttgggtgggttatgggggggagcgagtaaaacatctgtcagaagtaatttgactgtaaattaaaatagaactcaaaaggatgataaatttaatttatattgtg

SEQ ID NO: 259022 - DNA, 120 bp, Artificial Sequence
  ENSG00000124831_70 (sequence is synthesized)
cttaacattatctggtgtttactgtgcctttcaaaacaacttaggatctttggaaaacataattagagaaaaatgtaacttggattagcatgtggctagatgattttttaaatgaaaatg

SEQ ID NO: 259023 - DNA, 120 bp, Artificial Sequence
  ENSG00000124831_71 (sequence is synthesized)
aagatgcattttatatgaattattttcttttcacatggctaatcaaggttagtttttcattctatgaagaatctggaggtaggccgcatgacagcagtgtcctagtgagctaagagcttt

SEQ ID NO: 259024 - DNA, 120 bp, Artificial Sequence
  ENSG00000124831_72 (sequence is synthesized)
gagtcagggtctgactcgggcgtgtgagtttggatctggaaaaacagcgggtgcagtgtttaggggagtgttcccgtggctgggccgcaaggcctgaagaaacttgcttagtggttctgg

SEQ ID NO: 259025 - DNA, 120 bp, Artificial Sequence
  ENSG00000124831_73 (sequence is synthesized)
gcctctgagcctcatctatagaaggaggctatgatgaagcctacccatagggcttctggggctgaaacgagctaatgatgtcgaagctgctagaactgtacctgtgtcagagcgagtgtg

SEQ ID NO: 259026 - DNA, 120 bp, Artificial Sequence
  ENSG00000124831_74 (sequence is synthesized)
cagcatacgttatcatcactgtcatcactccagcattctgactgtgcctttaaactagtgtgggattttgcccaaacctctaaaccctcccctagccgtggtttcccccgcagtctgaag

SEQ ID NO: 259027 - DNA, 120 bp, Artificial Sequence
  ENSG00000124831_75 (sequence is synthesized)
actctaatacttgacactcgttcagagagatgtttggggaatttatagacacttaacatttatgcatccttatatatcgggtccaggaggaattacagacacttaaaccattactgcctt

SEQ ID NO: 259028 - DNA, 120 bp, Artificial Sequence
  ENSG00000124831_76 (sequence is synthesized)
cttcctcaaaagaataacagctttggtaactgggttagcagaggtgttagtggacttagggttgtaaacagatactcatggcactgacatcgatgagtctatgagggaaattagaaagat

SEQ ID NO: 259029 - DNA, 120 bp, Artificial Sequence
  ENSG00000124831_77 (sequence is synthesized)
agtaaatgctttcacatgtgctgttttagtatacttgtgctggcagagaaaactgtcacggcaaagaatgccctcattccctcacatccccacaaaagcccttaaaaataaaagcacaag

SEQ ID NO: 259030 - DNA, 120 bp, Artificial Sequence
  ENSG00000124831_78 (sequence is synthesized)
gaggggtaggtagacagaacaatggtgtttctctctgagcctatgaaatagaacaggtacccaaaaacgtgcaccaagataccaccacatgttgtgccgatggaaaccacatttactttg

SEQ ID NO: 259031 - DNA, 120 bp, Artificial Sequence
  ENSG00000124831_79 (sequence is synthesized)
ctggatacagcaatctttcgatctgttgattgtatgaaaaaaaaaaaatgaaaggcttttttcatgctaataaactagaaacagtcttaagggagataaaattatgcccagtctctctcc

SEQ ID NO: 259032 - DNA, 120 bp, Artificial Sequence
  ENSG00000124831_80 (sequence is synthesized)
gcccttttccctaccccctaccatctctttgtcttcttcactcataggcactctcttgcctgaggtttcctgccccaagcacaggggcggaaggcactttccctgggttcatggggagag

SEQ ID NO: 259033 - DNA, 120 bp, Artificial Sequence
  ENSG00000124831_81 (sequence is synthesized)
agtgccttctcctactctcagctctgggaggttgtggaggcagggccagaactaacagatttgtgagatgattacaaagtaagggcttggttcccagtaactattgttttaatatttgaa

SEQ ID NO: 259034 - DNA, 120 bp, Artificial Sequence
  ENSG00000124831_82 (sequence is synthesized)
aggttgaaaaagctggttgatgaacgggaatgcttattggaacaggtaacaatctttttattactttaccggttcatgaacagggcacctgaaaccacctgcccatccttccttcttgct

SEQ ID NO: 259035 - DNA, 120 bp, Artificial Sequence
  ENSG00000124831_83 (sequence is synthesized)
tactcagaaaacccctaagttaatcatgtctgaaagtctttatcaagccaactggtgttcttaagattgctatccaaatagaacatcaaagttaatattttcatccaaagagaacatcct

SEQ ID NO: 259036 - DNA, 120 bp, Artificial Sequence
  ENSG00000124831_84 (sequence is synthesized)
ataatattaatgattaactgttgagagacaagagcattactgagtcattccaaatagcacttctcttgtccatatgggttgtttgtccataaaagtcagttttgtactcttggtgatcag

SEQ ID NO: 259037 - DNA, 120 bp, Artificial Sequence
  ENSG00000124831_85 (sequence is synthesized)
cacccctctctcacaggtgtttctttgttacagctaaacaaagttgttttaaccatgtttatcttcattgctctctcctacctcaagaagtagcaggccaggtgcagtggctcacacctg

SEQ ID NO: 259038 - DNA, 120 bp, Artificial Sequence
  ENSG00000124831_86 (sequence is synthesized)
gcaggccttcgctgctgccgtctttcatctcagaaccttggctggggaatgccatgccgaagccgcctcctttcactcctcgccctgtcctttcctcctcccacccccgccaccccagga

SEQ ID NO: 259039 - DNA, 120 bp, Artificial Sequence
  ENSG00000124831_87 (sequence is synthesized)
gagattagactggagctgaggtcgtggcggaacacgtcccttaccagcaccattctgcctgttccaacagaacagccccacgcagcgggagaagaagcaggcagcaaggtgccagcactg

SEQ ID NO: 259040 - DNA, 120 bp, Artificial Sequence
  ENSG00000124831_88 (sequence is synthesized)
cagaaaccaccctggtggacggggtcagaggaaatgggtccccatcatgtcagcacagggtcgcccagaaatagtaaccaagaatagcttgcttggctcaaacccacaccatagtccaaa

SEQ ID NO: 259041 - DNA, 120 bp, Artificial Sequence
  ENSG00000124831_89 (sequence is synthesized)
ctgagaagagtactgatggacacaaagtgccttctgtcatttgacatgctgcttcctttctgatgggctctaacttcagcttttcggtctcattcagagtagagaaattaacagatttta

SEQ ID NO: 259042 - DNA, 120 bp, Artificial Sequence
  ENSG00000124831_90 (sequence is synthesized)
actctcgtgccaagcatgtctctccaaatggctgctctctggcgttcctcacactccccctgaagttcatctaagatcttcattcttcaaaggcggaagcccggctcgctgcaaaacggg

SEQ ID NO: 259043 - DNA, 87 bp, Artificial Sequence
  ENSG00000124831_91 (sequence is synthesized)
actctcgtgccaagcatgtctctccaaatggctgctctctggcgttcctcacactccccctgaagttcatctaagatcttcattctt

SEQ ID NO: 259044 - DNA, 120 bp, Artificial Sequence
  ENSG00000124831_92 (sequence is synthesized)
tccaagccctttactttctcatccccgcattctgatttcttcttcattatccccgtggtctgatagtcaatatttaaccgatgagatgcttacttaaaatcaaatcaatgggggatgttt

SEQ ID NO: 259045 - DNA, 120 bp, Artificial Sequence
  ENSG00000124831_93 (sequence is synthesized)
ctttgttgctgtagagagatgatttatatgcataggcacgttggttgtttctttctcccgagatgaagtcatctttttttcaatacttatccacatcacaaagctcccaagccttgatta

SEQ ID NO: 259046 - DNA, 120 bp, Artificial Sequence
  ENSG00000124831_94 (sequence is synthesized)
gcacagttgtctcagcacattggtgttccacaggaatgcaaaggcgcgtctgccctttagtaagtctgtatccactgacacccatgctcctggtaaaatcggaacctctattaaagtagc

SEQ ID NO: 259047 - DNA, 120 bp, Artificial Sequence
  ENSG00000124831_95 (sequence is synthesized)
accaggactggatccgtaaggtctgccttcagccgcttttccttgtatcagttataattagatctctttaccactgataggcttaatggttaatcaacacaaatatggacttttccttaa

SEQ ID NO: 259048 - DNA, 120 bp, Artificial Sequence
  ENSG00000124831_96 (sequence is synthesized)
acattccagaaaccttaataattatacttgaaaaaagtgtgagtttggggggaagtaaaatagaaaaactatgttttgctcagtgctttaaatcagtgaattaacctgagcatgtcagtt

SEQ ID NO: 259049 - DNA, 120 bp, Artificial Sequence
  ENSG00000124831_97 (sequence is synthesized)
tcttttactgcaggattgaaattacatctcaccgctagtaataaataaatctcaaagcagccactcgctttattaatccttagggaccacatagagctgaaggcttgtttctcttcactg

SEQ ID NO: 259050 - DNA, 120 bp, Artificial Sequence
  ENSG00000124831_98 (sequence is synthesized)
tggcaattaaatcctattactccttgacttcttatacatgcactgagtgtgcatgtaatttggcccttcccaatgataaaatgcagaggtgaaacacggttgctgtgctgtgaagccact

SEQ ID NO: 259051 - DNA, 120 bp, Artificial Sequence
  ENSG00000124831_99 (sequence is synthesized)
ctgtccttgtcagtgtccttgcagtgccaaaagcagatccgtagtgattttgccaaaaaactgtggttcaaatgtgaggccccgtgagggcttccttgctgtttgaaaccttctcctgag

SEQ ID NO: 259052 - DNA, 120 bp, Artificial Sequence
  ENSG00000124831_100 (sequence is synthesized)
atgtagcctcagggatgctgttgtaaccgttacctcgggaccgtctgaccccactcaccccagaagagggaagatttatggatccaaaatagaataaatgcaaagctcaattgacaaagt

SEQ ID NO: 259053 - DNA, 120 bp, Artificial Sequence
  ENSG00000124831_101 (sequence is synthesized)
ctgtagacaaggcccagacatcacagctgttgagcaggcccaggagaagcttgagtccttgaaaccagtgaagaaaatgctgtttcagggatgagggggagcgaccgagagaggaggaaa

SEQ ID NO: 259054 - DNA, 120 bp, Artificial Sequence
  ENSG00000124839_0 (sequence is synthesized)
gccctgaaaccttctgggaggagaagaggcctgaccttggcgctggggtccagtgggcattgctctggtccgaggctgctgctcttgacctctgctctgcggctgttttccattggagta

SEQ ID NO: 259055 - DNA, 120 bp, Artificial Sequence
  ENSG00000124839_1 (sequence is synthesized)
gaggctcctcctgtcctgtcctgcctgtggagggaagcaaaccttcccctggaccagagagaggagaaagcggagacaggtagcaacgctgtggactggtgatgacaggctcttcagctc

SEQ ID NO: 259056 - DNA, 120 bp, Artificial Sequence
  ENSG00000124839_2 (sequence is synthesized)
cctgcaagtgaccgggcctggggaacagggcatggcacaggcacacaggaccccccagcccagggctgcccccagccagccccgtgtgttcaagctggttctcctgggaagtggctccgt

SEQ ID NO: 259057 - DNA, 120 bp, Artificial Sequence
  ENSG00000124839_3 (sequence is synthesized)
gggtaagtccagcttggctcttcggtacgtgaagaacgacttcaagagtatcctgcctacggtgggctgtgcgttcttcacaaaggtggtggatgtgggtgccacctctctgaagcttga

SEQ ID NO: 259058 - DNA, 120 bp, Artificial Sequence
  ENSG00000124839_4 (sequence is synthesized)
gatctgggacacagctggccaggagaagtaccacagcgtctgccacctctacttcaggggtgccaacgctgcgcttctggtgtacgacatcaccaggaaggattccttcctcaaggctca

SEQ ID NO: 259059 - DNA, 120 bp, Artificial Sequence
  ENSG00000124839_5 (sequence is synthesized)
gcagtggctgaaggacctggaggaggagctgcacccaggagaagtcctggtgatgctggtgggcaacaagacggacctcagccaggagcgggaggtgaccttccaggaagggaaggagtt

SEQ ID NO: 259060 - DNA, 120 bp, Artificial Sequence
  ENSG00000124839_6 (sequence is synthesized)
ctgaaccaccaggtgtcggaggtgttcaatacagtggcccaagagctactgcagagaagcgacgaggagggccaggctctacggggggatgcagctgtggctctgaacaaggggcccgcg

SEQ ID NO: 259061 - DNA, 120 bp, Artificial Sequence
  ENSG00000124839_7 (sequence is synthesized)
aggcaggccaaatgctgcgcccactaggtgcagccactcctgggggctgtggggaagacaccccctgcctgggccatggccagctctaggtggattctgattcactgtcaatgctgggtt

SEQ ID NO: 259062 - DNA, 120 bp, Artificial Sequence
  ENSG00000124839_8 (sequence is synthesized)
gctcccgagccctagatgttcctggaagttggccccctttatgaaaaccacttcccacagccagtgggaactgccagaggaagatctggcgtcacatggctcccaggaaagtgctgtgcc

SEQ ID NO: 259063 - DNA, 120 bp, Artificial Sequence
  ENSG00000124839_9 (sequence is synthesized)
ctatccccactgataccatctgattccccgatgcctgtgcctgttccacctggacggtggccccctcagcctggcagcctctggacagagaggaaggaaggattggaaaagtccccgcag

SEQ ID NO: 259064 - DNA, 120 bp, Artificial Sequence
  ENSG00000124839_10 (sequence is synthesized)
cacagcgacggtgggaagatgccttacgtctgatcttgatgggggcactggcctggagcctgggcccacctgcttctggggggttggggagcaggccagatggaggtggtggtgccagga

SEQ ID NO: 259065 - DNA, 120 bp, Artificial Sequence
  ENSG00000124839_11 (sequence is synthesized)
agaaatggagcgatgactgactgtggggtgggcccaggatttccacatcttggtgaagttgcccctgggaagggcagctgggggcagtggcgccagttcccttccatggtctcccggctg

SEQ ID NO: 259066 - DNA, 120 bp, Artificial Sequence
  ENSG00000124839_12 (sequence is synthesized)
gcaatgtggtgaagctgagtttctgtccaatgagcaggaagattctgagacatttcgcctgagatataagttgtactgcgtatgcagtttttcctccaaaaattaaattgcttttgacaa

SEQ ID NO: 259067 - DNA, 120 bp, Artificial Sequence
  ENSG00000124839_13 (sequence is synthesized)
ggttccccagaagaagggcccaggtgggtgccgtccaggggcctccctctgcctcatgtttcctgggttctcagttggttctttgcccagcatcaaagcccacaggtgccaacaggcatg

SEQ ID NO: 259068 - DNA, 120 bp, Artificial Sequence
  ENSG00000124839_14 (sequence is synthesized)
atgggaggggaacctgggggtggggacttggctttccaggccctgcaggaggaggaaggccgcaccccgccagctagaggaagagcctcttccagggagcacaccccgcccctccctggt

SEQ ID NO: 259069 - DNA, 120 bp, Artificial Sequence
  ENSG00000124839_15 (sequence is synthesized)
cctggctgctcaggagtgccaagaaacacaacttggacacgaaacgtggaggagtgcgggctccacggctgcagctttctcggatcttactgttggaagtgaaccaggtgtccttaggaa

SEQ ID NO: 259070 - DNA, 120 bp, Artificial Sequence
  ENSG00000124839_16 (sequence is synthesized)
gattgggggtgggaagatcattttgggggtgggcggggagggagaccttctctctgtgtttcttaaaaaggctaacctgtcatgaagctcaggagtaactgtatggggcatctgcaggct

SEQ ID NO: 259071 - DNA, 120 bp, Artificial Sequence
  ENSG00000124839_17 (sequence is synthesized)
cagggctcagccagggatggcttctagctgacagtgggaggaattaattcatctgaccggaatattcttttctcttctgggctgttggtttttcaagtgcaacaaagattccatacagct

SEQ ID NO: 259072 - DNA, 120 bp, Artificial Sequence
  ENSG00000124839_18 (sequence is synthesized)
ccaaggaaggagccaagaaaaacattctgtgccaaagtgagatcctggaagtgaaaccccggaataaagctgaaaaacgggctccagttgggtgccaggaaatgcaggactggaatgtga

SEQ ID NO: 259073 - DNA, 120 bp, Artificial Sequence
  ENSG00000124839_19 (sequence is synthesized)
aggtgagccccaggtccagggctccagcaaccacagagtcccgtgcagactgaagggcctctgaaatgctcactcattaaacgatgacgattgacagtgactgcaaagtgcaacaaagat

SEQ ID NO: 259074 - DNA, 120 bp, Artificial Sequence
  ENSG00000124839_20 (sequence is synthesized)
tgacatccttataagaaggggagaggacacagccacagaggggcagccacgtgaagacagagccagagatgggggtgatgcagccaccaggaacaccagggttgccggcagcccctgaag

SEQ ID NO: 259075 - DNA, 120 bp, Artificial Sequence
  ENSG00000124839_21 (sequence is synthesized)
ctggaggaggcctggaatggattctccttcagtctccggaaggaaccaacccagccaacgcatcagttttggacctctggcctccagaactgcaggaagaaatttgctaatttgagccac

SEQ ID NO: 259076 - DNA, 120 bp, Artificial Sequence
  ENSG00000124839_22 (sequence is synthesized)
tcggctcatgggactttgttttggcagccgcaggacactcatgcactgtccttggagtgtaagtttttattttaaacatgtggctccatttgccagaatctccccaacagaccccaaacc

SEQ ID NO: 259077 - DNA, 120 bp, Artificial Sequence
  ENSG00000124839_23 (sequence is synthesized)
caatccagggtctaggcagggtagcagctttgacaggagcctgtcggtgctggtggctcctccatgccccagacaccttgccttcccccgccccgtcctctccagttctgtgtataacac

SEQ ID NO: 259078 - DNA, 120 bp, Artificial Sequence
  ENSG00000124839_24 (sequence is synthesized)
attcctgacaagccacacacaatggggcaaaacattttggagatctataaaataaccattttaaaatcatataactttggaaagcaaagggtagaaaatctttaaatgaacagtgcattg

SEQ ID NO: 259079 - DNA, 86 bp, Artificial Sequence
  ENSG00000124839_25 (sequence is synthesized)
caggtacatggctgagtaagacaaagcccctgccttcctgggggagacaggtggagaacgcaggaggccttgcctctgggtgtgta

SEQ ID NO: 259080 - DNA, 120 bp, Artificial Sequence
  ENSG00000124839_26 (sequence is synthesized)
acaggtggagaacgcaggaggccttgcctctgggtgtgtatggggtgcagggaggcttccgtggaggcagggggcccagcagcccttccggggttgccgctggaagatctcagaggatgc

SEQ ID NO: 259081 - DNA, 120 bp, Artificial Sequence
  ENSG00000124839_27 (sequence is synthesized)
ctaagagttttctaggtgaacaagaggaaggataccatgcagaggggacagtagagaagggtgttggtggggagcagcattgggaaagtggggaggttagcaggaggcgaggaaggcctt

SEQ ID NO: 259082 - DNA, 120 bp, Artificial Sequence
  ENSG00000124839_28 (sequence is synthesized)
ggaggagcctatgcaatcgtgactgcctctgtgcaagatgggtctggcaggcgaggggccggtaggccgggggtgcccagggctctaggggttcccagagcccagctgcatcgctggaag

SEQ ID NO: 259083 - DNA, 120 bp, Artificial Sequence
  ENSG00000124839_29 (sequence is synthesized)
ctggcagggatgcatcggactcccagtaagtggagatccctttcacggcatatgtagcccagagcttttgtattaggtcctggagagatttatcttcccatccaaagcctctccaaaggc

SEQ ID NO: 259084 - DNA, 120 bp, Artificial Sequence
  ENSG00000124839_30 (sequence is synthesized)
cccatagcaatcactcccaacactttgctcgatgtggaaggctccatctcccagaagaactgtttgctcaacctcctggccatgcgggcgtgggagatgcatggccagctgtccctctga

SEQ ID NO: 259085 - DNA, 120 bp, Artificial Sequence
  ENSG00000124839_31 (sequence is synthesized)
gcccattgctgtgcctgcggcttgccgtggtcccacctgagccgcatgtggcaacctcgtcctctgagtaagccctctgggcctccctgtttcaggtgcgttcttcacaaaggtggtgga

SEQ ID NO: 259086 - DNA, 120 bp, Artificial Sequence
  ENSG00000124839_32 (sequence is synthesized)
atcacaaggaacagagactccattagtgagcaacagtcacctcctccaggatggcctcctgacaaccccccatcctcctccacagtggggttctgctcctccgtggtccacaaagaacat

SEQ ID NO: 259087 - DNA, 120 bp, Artificial Sequence
  ENSG00000124839_33 (sequence is synthesized)
gccgttgccatctgccactcagtagttcctggtgctgcattagggtcagggtttggggtggtggccagtcccccagactctcttgcacaaagtggtcctttgaggacagctaggcgtggg

SEQ ID NO: 259088 - DNA, 120 bp, Artificial Sequence
  ENSG00000124839_34 (sequence is synthesized)
agattcaggagctcgaggcctgacctgaaataccccgtggctggcagtctcctgggcctggtcagggtgaaggatctgatgtgtgtcctagcagttttctgcctggccgcacaggtcacc

SEQ ID NO: 259089 - DNA, 120 bp, Artificial Sequence
  ENSG00000124839_35 (sequence is synthesized)
caggacaggaacgtgccctcctcagaggaacggagcagccctgcaggtgcgcccatggccagttggattctgtgacattttacacaacgtgatcagcaacactggcttccccctcccgga

SEQ ID NO: 259090 - DNA, 120 bp, Artificial Sequence
  ENSG00000124875_0 (sequence is synthesized)
caaagtgctctgtatcctccagtctccgcgcctccacccagctcaggaacccgcgaaccctctcttgaccactatgagcctcccgtccagccgcgcggcccgtgtcccgggtccttcggg

SEQ ID NO: 259091 - DNA, 120 bp, Artificial Sequence
  ENSG00000124875_1 (sequence is synthesized)
ctccttgtgcgcgctgctcgcgctgctgctcctgctgacgccgccggggcccctcgccagcgctggtcctgtctctgctgtgctgacagagctgcgttgcacttgtttacgcgttacgct

SEQ ID NO: 259092 - DNA, 120 bp, Artificial Sequence
  ENSG00000124875_2 (sequence is synthesized)
gagagtaaaccccaaaacgattggtaaactgcaggtgttccccgcaggcccgcagtgctccaaggtggaagtggtagcctccctgaagaacgggaagcaagtttgtctggacccggaagc

SEQ ID NO: 259093 - DNA, 120 bp, Artificial Sequence
  ENSG00000124875_3 (sequence is synthesized)
cccttttctaaagaaagtcatccagaaaattttggacagtggaaacaagaaaaactgagtaacaaaaaagaccatgcatcataaaattgcccagtcttcagcggagcagttttctggaga

SEQ ID NO: 259094 - DNA, 120 bp, Artificial Sequence
  ENSG00000124875_4 (sequence is synthesized)
tccctggacccagtaagaataagaaggaagggttggtttttttccattttctacatggattccctactttgaagagtgtgggggaaagcctacgcttctccctgaagtttacagctcagc

SEQ ID NO: 259095 - DNA, 120 bp, Artificial Sequence
  ENSG00000124875_5 (sequence is synthesized)
taatgaagtactaatatagtatttccactatttactgttattttacctgataagttattgaaccctttggcaattgaccatattgtgagcaaagaatcactggttattagtctttcaatg

SEQ ID NO: 259096 - DNA, 120 bp, Artificial Sequence
  ENSG00000124875_6 (sequence is synthesized)
gtgtgctgttgagggaggtatcctgttgttcttactcactcttctcataaaataggaaatattttagttctgtttcttggggaatatgttactctttaccctaggatgctatttaagttg

SEQ ID NO: 259097 - DNA, 120 bp, Artificial Sequence
  ENSG00000124875_7 (sequence is synthesized)
tactgtattagaacactgggtgtgtcataccgttatctgtgcagaatatatttccttattcagaatttctaaaaatttaagttctgtaagggctaatatattctcttcctatggttttag

SEQ ID NO: 259098 - DNA, 120 bp, Artificial Sequence
  ENSG00000124875_8 (sequence is synthesized)
acgtttgatgtcttcttagtatggcataatgtcatgatttactcattaaactttgattttgtatgctattttttcactataggatgactataattctggtcactaaatatacactttaga

SEQ ID NO: 259099 - DNA, 120 bp, Artificial Sequence
  ENSG00000124875_9 (sequence is synthesized)
tagatgaagaagcccaaaaacagataaattcctgattgctaatttacatagaaatgtattctcttggttttttaaataaaagcaaaattaacaatgatctgtgctctgaaagttttgaaa

SEQ ID NO: 259100 - DNA, 120 bp, Artificial Sequence
  ENSG00000124875_10 (sequence is synthesized)
atatatttgaacaatttgaatataaattcatcatttagtcctcaaaatatatatagcattgctaagattttcagatatctattgtggatcttttaaaggttttgaccattttgttatgag

SEQ ID NO: 259101 - DNA, 120 bp, Artificial Sequence
  ENSG00000124875_11 (sequence is synthesized)
gaattatacatgtatcacattcactatattaaaattgcacttttattttttcctgtgtgtcatgttggtttttggtacttgtattgtcatttggagaaacaataaaagatttctaaacca

SEQ ID NO: 259102 - DNA, 120 bp, Artificial Sequence
  ENSG00000124875_12 (sequence is synthesized)
gtatttgtccctttgatctttgtggtgttttaatatcttctatggaaagcatatacttcacaatgtccttattctctctgtaggatttagactatgcttagaattataaggttgttaaga

SEQ ID NO: 259103 - DNA, 120 bp, Artificial Sequence
  ENSG00000124875_13 (sequence is synthesized)
ggtcaggtgcttaatctgttcactttctgccaaacctgtttacctcccaggaagggcaggattttaaagccttgacttttttgaattcttattttatccaagatacctactcttactgta

SEQ ID NO: 259104 - DNA, 120 bp, Artificial Sequence
  ENSG00000124875_14 (sequence is synthesized)
ttaaaatccaggtatgtttccattctctctcaaaaatcacattttattctgagaaggctagttaaaagatgacagaaagaagatgaaaataagcaagcctagtttcaacatagtacatgg

SEQ ID NO: 259105 - DNA, 120 bp, Artificial Sequence
  ENSG00000124882_0 (sequence is synthesized)
acttgcctgatatttccagtgtcagagggacacagccaacgtggggtcccttctaggctgacagccgctctccagccactgccgcgagcccgtctgctcccgccctgcccgtgcactctc

SEQ ID NO: 259106 - DNA, 120 bp, Artificial Sequence
  ENSG00000124882_1 (sequence is synthesized)
cgcagccgccctccgccaagccccagcgcccgctcccatcgccgatgaccgcggggaggaggatggagatgctctgtgccggcagggtccctgcgctgctgctctgcctgggtttccatc

SEQ ID NO: 259107 - DNA, 120 bp, Artificial Sequence
  ENSG00000124882_2 (sequence is synthesized)
ttctacaggcagtcctcagtacaactgtgattccatcatgtatcccaggagagtccagtgataactgcacagctttagttcagacagaagacaatccacgtgtggctcaagtgtcaataa

SEQ ID NO: 259108 - DNA, 120 bp, Artificial Sequence
  ENSG00000124882_3 (sequence is synthesized)
caaagtgtagctctgacatgaatggctattgtttgcatggacagtgcatctatctggtggacatgagtcaaaactactgcaggtgtgaagtgggttatactggtgtccgatgtgaacact

SEQ ID NO: 259109 - DNA, 120 bp, Artificial Sequence
  ENSG00000124882_4 (sequence is synthesized)
tctttttaaccgtccaccaacctttaagcaaagaatatgtggctttgaccgtgattcttattattttgtttcttatcacagtcgtcggttccacatattatttctgcagatggtacagaa

SEQ ID NO: 259110 - DNA, 120 bp, Artificial Sequence
  ENSG00000124882_5 (sequence is synthesized)
atcgaaaaagtaaagaaccaaagaaggaatatgagagagttacctcaggggatccagagttgccgcaagtctgaatggcgccatcaaacttatgggcagggataacagtgtgcctggtta

SEQ ID NO: 259111 - DNA, 120 bp, Artificial Sequence
  ENSG00000124882_6 (sequence is synthesized)
atattaatattcccattttattaataatatttatgttgggtcaagtgttaggtcaataacactgtattttaatgtacttgaaaaatgtttttatttttgttttatttttgacagactatt

SEQ ID NO: 259112 - DNA, 120 bp, Artificial Sequence
  ENSG00000124882_7 (sequence is synthesized)
tgctaatgtataatgtgcagaaaatatttaatatcaaaagaaaattgatatttttatacaagtaatttcctgagctaaatgcttcattgaaagcttcaaagtttatatgcctggtgcaca

SEQ ID NO: 259113 - DNA, 120 bp, Artificial Sequence
  ENSG00000124882_8 (sequence is synthesized)
gtgcttagaagtaagcaattcccaggtcatagctcaagaattgttagcaaatgacagatttctgtaagcctatatatatagtcaaatcgatttagtaagtatgttttttatgttcctcaa

SEQ ID NO: 259114 - DNA, 120 bp, Artificial Sequence
  ENSG00000124882_9 (sequence is synthesized)
atcagtgataattggtttgactgtaccatggtttgatatgtagttggcaccatggtatcatatattaaaacaataatgcaattagaatttgggagaagcaaatataggtcctgtgttaaa

SEQ ID NO: 259115 - DNA, 120 bp, Artificial Sequence
  ENSG00000124882_10 (sequence is synthesized)
cactacacatttgaaacaagctaaccctggggagtctatggtctcttcactcaggtctcagctataattctgttatatgaggggcagtggacagttccctatgccaactcacgactccta

SEQ ID NO: 259116 - DNA, 120 bp, Artificial Sequence
  ENSG00000124882_11 (sequence is synthesized)
caggtactagtcactcatctaccagattctgcctatgtaaaatgaattgaaaaacaattttctgtaatcttttatttaagtagtgggcatttcatagcttcacaatgttccttttttgta

SEQ ID NO: 259117 - DNA, 120 bp, Artificial Sequence
  ENSG00000124882_12 (sequence is synthesized)
tattacaacatttatgtgaggtaattattgctcaacagacaattagaaaaaagtccacacttgaagcctaaatttgtgctttttaagaatatttttagactatttctttttataggggct

SEQ ID NO: 259118 - DNA, 120 bp, Artificial Sequence
  ENSG00000124882_13 (sequence is synthesized)
ttgctgaattctaacattaaatcacagcccaaaatttgatggactaattattattttaaaatatatgaagacaataattctacatgttgtcttaagatggaaatacagttatttcatctt

SEQ ID NO: 259119 - DNA, 120 bp, Artificial Sequence
  ENSG00000124882_14 (sequence is synthesized)
ttattcaaggaagttttaactttaatacagctcagtaaatggcttcttctagaatgtaaagttatgtatttaaagttgtatcttgacacaggaaatgggaaaaaacttaaaaattaatat

SEQ ID NO: 259120 - DNA, 120 bp, Artificial Sequence
  ENSG00000124882_15 (sequence is synthesized)
ggtgtatttttccaaatgaaaaatctcaattgaaagcttttaaaatgtagaaacttaaacacaccttcctgtggaggctgagatgaaaactagggctcattttcctgacatttgtttatt

SEQ ID NO: 259121 - DNA, 120 bp, Artificial Sequence
  ENSG00000124882_16 (sequence is synthesized)
ttttggaagagacaaagatttcttctgcactctgagcccataggtctcagagagttaataggagtatttttgggctattgcataaggagccactgctgccaccacttttggattttatgg

SEQ ID NO: 259122 - DNA, 120 bp, Artificial Sequence
  ENSG00000124882_17 (sequence is synthesized)
gaggctccttcatcgaatgctaaacctttgagtagagtctccctggatcacataccaggtcagggaggatctgttcttcctctacgtttatcctggcatgtgctagggtaaacgaaggca

SEQ ID NO: 259123 - DNA, 120 bp, Artificial Sequence
  ENSG00000124882_18 (sequence is synthesized)
taataagccatggctgacctctggagcaccaggtgccaggacttgtctccatgtgtatccatgcattatataccctggtgcaatcacacgactgtcatctaaagtcctggccctggccct

SEQ ID NO: 259124 - DNA, 120 bp, Artificial Sequence
  ENSG00000124882_19 (sequence is synthesized)
attgtatatatattcatatacaaacatgtatgtatacatgaccttaatggatcatagaattgcagtcatttggtgctctgctaaccatttatataaaacttaaaaacaagagaaaagaaa

SEQ ID NO: 259125 - DNA, 120 bp, Artificial Sequence
  ENSG00000124882_20 (sequence is synthesized)
aatcaattagatctaaacagttatttctgtttcctatttaatacagctgaagtcaaaatatgtaagaacacattttaaatactctacttacagttggccctctgtggttagttccacatc

SEQ ID NO: 259126 - DNA, 120 bp, Artificial Sequence
  ENSG00000124882_21 (sequence is synthesized)
tagttccacatctgtggattcaaccaaccaaggacggaaaatgcttaaaaaataatacaacaacaacaaaaaatacattataacaactatttacttttttttttttctttttgagatgga

SEQ ID NO: 259127 - DNA, 120 bp, Artificial Sequence
  ENSG00000124882_22 (sequence is synthesized)
tgagccaccgcacgtagcatttacattaggtattacaagtaatgtaaagatgatttaagtatacaggaggatgtgaataggttatatgcaagcactatgcccttttatataagtgacttg

SEQ ID NO: 259128 - DNA, 120 bp, Artificial Sequence
  ENSG00000124882_23 (sequence is synthesized)
aacatctgtgcccgattttagtatgtgcaggggggcgatctgggaatcagtcccctgtggataccaaggtacaactgtatttattaacgcttactagatgtgaggagagtctgaatattt

SEQ ID NO: 259129 - DNA, 120 bp, Artificial Sequence
  ENSG00000124882_24 (sequence is synthesized)
tcagtgatcttggctgtttcaaaaaaatctattgacttttcaataaatcagctgcaatccatttatttcatttacaaaagatttattgtaagcatctcaatcttggtttgtcagtttatc

SEQ ID NO: 259130 - DNA, 120 bp, Artificial Sequence
  ENSG00000124882_25 (sequence is synthesized)
ttaagcatgtcaattcataaaaacaagtcatttttgtatttttcatctttaagaatgcttaaaaaagctaatccctaaaatagttagatctttgtaaatgcatattaaataataaagtat

SEQ ID NO: 259131 - DNA, 120 bp, Artificial Sequence
  ENSG00000124882_26 (sequence is synthesized)
gacccacattactttttatgggtgaaaataagacaaaaataatagttttagtgaggatggtgctgagtaaacataaaaactgatttgctctcagctgatgtgtcctgtacacagtgggaa

SEQ ID NO: 259132 - DNA, 120 bp, Artificial Sequence
  ENSG00000124882_27 (sequence is synthesized)
gattttagttcacacttagtctaactcccccattttacagatttctcactatatatatttctagaaggggctatgcatattcaatgtattgagaaccaaagcaaccacaaatgcataaat

SEQ ID NO: 259133 - DNA, 120 bp, Artificial Sequence
  ENSG00000124882_28 (sequence is synthesized)
gcataatttatggtcttcaaccaaggccacataataacccagttaacttactctttaaccaggaatattaagttctataactagtactcaaggtttaaccttaaaattaagatttcctta

SEQ ID NO: 259134 - DNA, 120 bp, Artificial Sequence
  ENSG00000124882_29 (sequence is synthesized)
accttaaccttaaaattgatattatattaaacatacataatacaatgtaactccactgttctcctgaatattttttgctctaatctctctgccgaaagtcaaagtgatgggagaattggt

SEQ ID NO: 259135 - DNA, 120 bp, Artificial Sequence
  ENSG00000124882_30 (sequence is synthesized)
atactggtatgactacgtcttaagtcagatttttatttatgagtctttgagactaaattcaatcaccaccaggtatcaaatcaacttttatgcagcaaatatatgattctagtgtctgac

SEQ ID NO: 259136 - DNA, 120 bp, Artificial Sequence
  ENSG00000124882_31 (sequence is synthesized)
ttttgttaaattcagtaatgcagtttttaaaaacctgtatctgacccactttgtaatttttgctccaatatccattctgtagacttttgaaaaaaaagtttttaatttgatgcccaatat

SEQ ID NO: 259137 - DNA, 120 bp, Artificial Sequence
  ENSG00000124882_32 (sequence is synthesized)
attctgaccgttaaaaaattcttgttcatatgggagaagggggagtaatgacttgtacaaacagtatttctggtgtatattttaatgtttttaaaaagagtaatttcatttaaatatctg

SEQ ID NO: 259138 - DNA, 120 bp, Artificial Sequence
  ENSG00000124882_33 (sequence is synthesized)
ttattcaaatttgatgatgttaaatgtaatataatgtattttctttttattttgcactctgtaattgcactttttaagtttgaagagccattttggtaaacggtttttattaaagatgct

SEQ ID NO: 259139 - DNA, 120 bp, Artificial Sequence
  ENSG00000124882_34 (sequence is synthesized)
atggaacataaagttgtattgcatgcaatttgaagtaacttatttgactatgaatgttatcggattactgaattgtatcaatttgtttgtgttcaatatcagctttgataattgtgtacc

SEQ ID NO: 259140 - DNA, 120 bp, Artificial Sequence
  ENSG00000124882_35 (sequence is synthesized)
tgtgtaccttaagatattgaaggagaaaatagataatttacaagatattattaatttttatttatttttcttgggaattgaaaaaaattgaaataaataaaaatgcattgaacatcttgc

SEQ ID NO: 259141 - DNA, 120 bp, Artificial Sequence
  ENSG00000124882_36 (sequence is synthesized)
gcagatttgctagtggatatattcagtagtggtgaagtctgagcttttagagtacctacccctcaaatagtgtgcatggaacccattaggtaatttttcatcccttaacccccccaaaac

SEQ ID NO: 259142 - DNA, 120 bp, Artificial Sequence
  ENSG00000124882_37 (sequence is synthesized)
gataaacaaatgcagttttactctttgtatttctatttttatattttgaaattaccctatatttccatgggctgttaaatgcagtatatatattattagaaacttttctgagtttttaaa

SEQ ID NO: 259143 - DNA, 120 bp, Artificial Sequence
  ENSG00000124882_38 (sequence is synthesized)
aattaggtagtaaatagtagcttttaaattgcacacatatgtcagaggtgcagagcagggaggacttctgatgcttctcacacttgccaagatggtgtctctctgctttggatcttttcc

SEQ ID NO: 259144 - DNA, 87 bp, Artificial Sequence
  ENSG00000124882_39 (sequence is synthesized)
cacttgccaagatggtgtctctctgctttggatcttttccttcaatttctatatcaggtattgttttaagaattgattccaggccgg

SEQ ID NO: 259145 - DNA, 120 bp, Artificial Sequence
  ENSG00000124882_40 (sequence is synthesized)
gaacacaaccgtcattttaatactacaatttagtccaagagctacgtggagcccttttatcattactggtctaactcaatctttgaaatcctctttacaatctttagcaaattttgttga

SEQ ID NO: 259146 - DNA, 120 bp, Artificial Sequence
  ENSG00000124882_41 (sequence is synthesized)
tttcttgcattacagtgtgatgttagtccttataaaactaattcataaccatgatttcctttttaagtaactgatctttctttcttccgtattttccttcaggtgtgaagtgggttatac

SEQ ID NO: 259147 - DNA, 120 bp, Artificial Sequence
  ENSG00000124900_0 (sequence is synthesized)
gcagggaatgagctcctgatcttggggagtacttaaaagaattttttcttggaagaattactgcaggaaacattcatagaaccttgggaaacatgaattctggaatcttgcaagtcttcc

SEQ ID NO: 259148 - DNA, 120 bp, Artificial Sequence
  ENSG00000124900_1 (sequence is synthesized)
agagggcactcacctgtcccatctgcatgaactacttcctagacccagtcaccatagactgtgggcacagcttttgccggccctgtttgtacctcaactggcaagacacggcagttcttg

SEQ ID NO: 259149 - DNA, 120 bp, Artificial Sequence
  ENSG00000124900_2 (sequence is synthesized)
ctcagtgctctgaatgcaagaagacaacgcggcagagaaacctcaacactgacatttgtttgaagaacatggctttcattgccagaaaagccagcctccggcaattccttagctctgagg

SEQ ID NO: 259150 - DNA, 120 bp, Artificial Sequence
  ENSG00000124900_3 (sequence is synthesized)
agcaaatatgtgggatgcacagagagacaaagaagatgttctgtgaagtggacaagagcctgctctgtttgccgtgctccaactctcaggagcaccggaatcacatacactgtcccattg

SEQ ID NO: 259151 - DNA, 120 bp, Artificial Sequence
  ENSG00000124900_4 (sequence is synthesized)
agtgggctgctgaggaacgccgggaggagctcctaaaaaaaatgcagtctttatgggaaaaagcttgtgaaaatctcagaaatctgaacatggaaaccacaagaaccagatgctggaagg

SEQ ID NO: 259152 - DNA, 120 bp, Artificial Sequence
  ENSG00000124900_5 (sequence is synthesized)
attatgtgagtttaaggatagaagcaatcagagctgaatatcagaagatgcctgcatttctccatgaagaagagcaacatcacttggaaaggctgcgaaaggagggcgaggacatttttc

SEQ ID NO: 259153 - DNA, 120 bp, Artificial Sequence
  ENSG00000124900_6 (sequence is synthesized)
tgaagcaaatgtgccataaagcagatgtggagctactccaggcttttggagacatattacacaggtatgagtctctgctgctgcaagtgtctgagcctgtgaatccagagctcagtgcag

SEQ ID NO: 259154 - DNA, 120 bp, Artificial Sequence
  ENSG00000124900_7 (sequence is synthesized)
ggcccatcactggactgctggacagcctcagtggattcagagttgattttactctgcagcctgaaagagccaatagtcatatcttcctgtgtggagatttgagaagcatgaatgttggat

SEQ ID NO: 259155 - DNA, 120 bp, Artificial Sequence
  ENSG00000124900_8 (sequence is synthesized)
gtgaccctcaagatgatcccgatatcactggaaaatctgaatgttttcttgtatggggggctcaggctttcacatctggcaaatattattgggaggttcatatgggggactcttggaatt

SEQ ID NO: 259156 - DNA, 120 bp, Artificial Sequence
  ENSG00000124900_9 (sequence is synthesized)
gggcttttggtgtctgtaacaattattggaaagagaagagacagaatgacaagatagatggagaggagggactctttcttcttggatgtgttaaggaggacactcactgcagtctcttta

SEQ ID NO: 259157 - DNA, 120 bp, Artificial Sequence
  ENSG00000124900_10 (sequence is synthesized)
ccacctccccacttgtggtgcaatatgttccaagacctaccagcacagtaggattattcctggattgtgaaggtagaaccgtgagctttgttgatgttgatcaaagttccctgatataca

SEQ ID NO: 259158 - DNA, 120 bp, Artificial Sequence
  ENSG00000124900_11 (sequence is synthesized)
gctccttctcacctcctctcaggcctatcttttgctgtagtcacttctgaccagagaaaagtcagaaatgtgcctgtatgctctgggaacctgtttatcccagaaagccctctttttcgc

SEQ ID NO: 259159 - DNA, 120 bp, Artificial Sequence
  ENSG00000124900_12 (sequence is synthesized)
cctctttttcgcacctcatcaaacagaacaaataagttatatttaatgtctttagttgcattctaatgtcatcaaaactcatttatagtgtttctattaaatatggtgaaaacattaaaa

SEQ ID NO: 259160 - DNA, 120 bp, Artificial Sequence
  ENSG00000124900_13 (sequence is synthesized)
tgccatctctgtgtccccttaagcatgtctgttatgagcttccttgacttcacacctctcagatttgacaaacatgaggagaaacaaagcaaactctcttttctgtgggttaatttgtct

SEQ ID NO: 259161 - DNA, 120 bp, Artificial Sequence
  ENSG00000124920_0 (sequence is synthesized)
cacagggcctgcagagaggggacccaccgggcaggatgcactggcttccagcaggccacgacatcaacggtgccctggagccctccaacatagacaccagcatcctggaggagtacatca

SEQ ID NO: 259162 - DNA, 120 bp, Artificial Sequence
  ENSG00000124920_1 (sequence is synthesized)
gcaaggaggatgcctccgacctctgcttccctgacatctctgctccagccagctcggcctcctactcccacgggcagcctgcgatgcctggctccagcggggtccaccacctgagccccc

SEQ ID NO: 259163 - DNA, 120 bp, Artificial Sequence
  ENSG00000124920_2 (sequence is synthesized)
ctgggggtggaccctccccggggcgccatggtcccctcccacccccgggctacggcaccccgctgaactgcaacaacaacaacggcatgggcgctgcccccaagcccttcccggggggca

SEQ ID NO: 259164 - DNA, 120 bp, Artificial Sequence
  ENSG00000124920_3 (sequence is synthesized)
ccgggccccccatcaaggctgagcccaaggctccctatgccccaggcacactgccggactctcccccagactcgggctccgaggcctactccccccagcaggtgaatgagccccacctcc

SEQ ID NO: 259165 - DNA, 120 bp, Artificial Sequence
  ENSG00000124920_4 (sequence is synthesized)
tgcgcacgataacccctgagacactgtgccacgtgggagtgccctcccgcctggagcatccgcccccacctccagcccacttgccaggccccccgccacccccaccacccccacctcact

SEQ ID NO: 259166 - DNA, 120 bp, Artificial Sequence
  ENSG00000124920_5 (sequence is synthesized)
accctgtcctgcagcgggatctgtacatgaaggccgagcccccgatcccccactacgctgccatggggcaggggctggtgcccactgatcttcaccacacccagcagtcccagatgctgc

SEQ ID NO: 259167 - DNA, 120 bp, Artificial Sequence
  ENSG00000124920_6 (sequence is synthesized)
accagctcctgcagcagcacggagctgagctccctacacacccctccaagaagaggaagcactctgaatccccccccagcaccctcaatgcccagatgctgaatggaatgatcaaacagg

SEQ ID NO: 259168 - DNA, 120 bp, Artificial Sequence
  ENSG00000124920_7 (sequence is synthesized)
agcctgggaccgtgacagccctgcctctgcaccccactcgagccccatcgccaccctggcctccccagggtccgctctccccgggccctggttccttgcctctcagcattgcccgtgtcc

SEQ ID NO: 259169 - DNA, 120 bp, Artificial Sequence
  ENSG00000124920_8 (sequence is synthesized)
agacaccgccttggcacccgccaggtgccccctccccaggcctcctgcaggacagtgacagcctcagtggctcctacctggaccccaactaccagtccatcaagtggcagcctcatcagc

SEQ ID NO: 259170 - DNA, 120 bp, Artificial Sequence
  ENSG00000124920_9 (sequence is synthesized)
agaacaagtgggcgaccctgtacgatgctaactacaaggagctgcccatgctcacctaccgcgtggatgcggacaagggcttcaacttttcggtgggcgacgacgcctttgtgtgccaga

SEQ ID NO: 259171 - DNA, 120 bp, Artificial Sequence
  ENSG00000124920_10 (sequence is synthesized)
agaagaaccacttccaggtgacagtgtacatcggcatgctgggcgagcccaagtacgtcaagacgcccgagggcctcaagcccctcgactgcttctatctgaagctgcacggagtgaagc

SEQ ID NO: 259172 - DNA, 120 bp, Artificial Sequence
  ENSG00000124920_11 (sequence is synthesized)
tggaggccctgaaccagtccattaacatcgagcagtcccagtcagaccggagcaagcggcccttcaacccggtcacggtcaatctgccccctgagcaggtcacgaaggtgactgtggggc

SEQ ID NO: 259173 - DNA, 120 bp, Artificial Sequence
  ENSG00000124920_12 (sequence is synthesized)
ggctgcacttcagcgagaccaccgctaacaacatgcgtaagaagggcaagcccaacccggaccagaggtacttcatgctggtggtggccctccaggctcatgcacagaaccagaactaca

SEQ ID NO: 259174 - DNA, 120 bp, Artificial Sequence
  ENSG00000124920_13 (sequence is synthesized)
cgctggccgcccagatctcagagcgcatcattgtgcgggcctccaacccaggccagttcgagagcgacagcgatgtgttgtggcagcgggcacaggtgcccgacaccgtcttccaccacg

SEQ ID NO: 259175 - DNA, 120 bp, Artificial Sequence
  ENSG00000124920_14 (sequence is synthesized)
gccgcgtgggcatcaacacagaccggccggatgaggcgctggttgtgcacgggaatgtcaaggtcatgggctcgcttatgcacccctccgacctgcgcgccaaggaacacgtgcaggagg

SEQ ID NO: 259176 - DNA, 120 bp, Artificial Sequence
  ENSG00000124920_15 (sequence is synthesized)
tggacaccaccgagcaattgaagaggatctcgcgcatgcggctggtgcactacagatacaagcccgagttcgccgccagcgcgggcatcgaggccaccgcgccagagacaggtgtcatcg

SEQ ID NO: 259177 - DNA, 120 bp, Artificial Sequence
  ENSG00000124920_16 (sequence is synthesized)
ctcaggaggtgaaggagatcttgcctgaggctgtgaaagacaccggagacatggtctttgccaatgggaaaaccatagagaacttcctggtggtgaacaaggagcgcatcttcatggaga

SEQ ID NO: 259178 - DNA, 120 bp, Artificial Sequence
  ENSG00000124920_17 (sequence is synthesized)
acgtaggggccgtgaaggagctgtgcaagctgacagacaacctggagacgcgcattgatgagctggagcgctggagccacaagctggccaagctgcggcggctcgacagcctcaagtcca

SEQ ID NO: 259179 - DNA, 120 bp, Artificial Sequence
  ENSG00000124920_18 (sequence is synthesized)
ccggcagctcgggcgccttcagccatgcagggagccagttcagtcgggcgggcagcgtcccccacaagaagaggccccccaaggtggccagcaagtcatcgtccgtggttccggaccagg

SEQ ID NO: 259180 - DNA, 120 bp, Artificial Sequence
  ENSG00000124920_19 (sequence is synthesized)
cctgcatcagccagcgcttcctgcagggaaccatcattgccctggtggtggtcatggccttcagcgtggtgtccatgtccacactgtacgtgctgagcctgcgcacagaggaggacctgg

SEQ ID NO: 259181 - DNA, 120 bp, Artificial Sequence
  ENSG00000124920_20 (sequence is synthesized)
tagacactgatggcaggtccagccagagctttgggaccacgcagctccgacagtcccccttgaccacggggctaccaggcatacagccctctttgctgctggtgaccaccagcctcacca

SEQ ID NO: 259182 - DNA, 120 bp, Artificial Sequence
  ENSG00000124920_21 (sequence is synthesized)
gctcggccccaggttctgctgtccgcaccttggacatgtgttccagccacccctgccctgtcatctgctgttcctcacccactaccaaccctaccactggtcctagtcttggccccagct

SEQ ID NO: 259183 - DNA, 120 bp, Artificial Sequence
  ENSG00000124920_22 (sequence is synthesized)
ttaaccctggccatgttctcagcccaagtcccagccccagcaccaaccgctcaggccccagccagatggcccttctgccagtcaccaacatcagagccaagtcctggggtctttcagtca

SEQ ID NO: 259184 - DNA, 120 bp, Artificial Sequence
  ENSG00000124920_23 (sequence is synthesized)
gtttccatggccgggcccgccgaggggccctccagtccagcgtgggccctgctgagcccacctgggcccagggccagtcagagccagtgccctccctgacctccatccaggtgctggaga

SEQ ID NO: 259185 - DNA, 120 bp, Artificial Sequence
  ENSG00000124920_24 (sequence is synthesized)
attcgatgtccatcacctcccagtactgtgctccaggggatgcctgcaggcctgggaacttcacctaccacatccctgtcagtagtggcaccccactgcacctcagcctgactctgcaga

SEQ ID NO: 259186 - DNA, 120 bp, Artificial Sequence
  ENSG00000124920_25 (sequence is synthesized)
tgaactcctcctcccccgtgtctgtggtgctgtgcagcctgaggtcaaaggaggaaccatgtgaggaggggagccttccacagagtctccacacccaccaggacacccagggcacctctc

SEQ ID NO: 259187 - DNA, 120 bp, Artificial Sequence
  ENSG00000124920_26 (sequence is synthesized)
accggtggccaataaccatcctgtccttccgtgaattcacctaccacttccgggtggcactgctgggtcaggccaactgcagttcagaggctctcgcccagccagccacagactaccact

SEQ ID NO: 259188 - DNA, 120 bp, Artificial Sequence
  ENSG00000124920_27 (sequence is synthesized)
tccacttctaccgcctgtgtgactgagctgccctcctgaggcagcaccacaccagggaccaggggtgcccaggcaccccccaacactggatgcaatggtgttacactggagcccgctgca

SEQ ID NO: 259189 - DNA, 120 bp, Artificial Sequence
  ENSG00000124920_28 (sequence is synthesized)
ggccagctctgctgttcactggccctacccgagactggtgaaactggaagtcttcacactggagttgctgttccagctggtcgcccctcacggcacagagggaacctgagagccagagac

SEQ ID NO: 259190 - DNA, 120 bp, Artificial Sequence
  ENSG00000124920_29 (sequence is synthesized)
ttcttgggccttcctgcctgccaccccctaggggccaggacaggaccagtttacctctttccagatatggtggttggagggctggttcaggtgccctggagggaaggggaagcctgtggc

SEQ ID NO: 259191 - DNA, 120 bp, Artificial Sequence
  ENSG00000124920_30 (sequence is synthesized)
cctgatttgttcagagcccattctcccttgcctccccttttgagactggagccaacccttttggagagaggacctgcccacctttgagatcagcagggggctcggatccagccctaagag

SEQ ID NO: 259192 - DNA, 120 bp, Artificial Sequence
  ENSG00000124920_31 (sequence is synthesized)
acttgggtggacccccatgagtcaatggagggcagacggctctcccccttaaagctgttccctgggggatggcttggtagtggactttctggggtttgcctgttacgccagactcggact

SEQ ID NO: 259193 - DNA, 120 bp, Artificial Sequence
  ENSG00000124920_32 (sequence is synthesized)
tctaagctttaagtgtggcccaggaggtttcttctccctgggagggcttggctcccaagaagtcccagggcagccgaggccagccctgcctgggttggagaaactgactttgtgccttaa

SEQ ID NO: 259194 - DNA, 120 bp, Artificial Sequence
  ENSG00000124920_33 (sequence is synthesized)
gtctactcagtgcctggtgaagccaccctcagcccttcacaggcctgaaccagtaggggccagtgggccaggtaagccctagagccttgaaccaggaatatccaggaagaggaaattccc

SEQ ID NO: 259195 - DNA, 120 bp, Artificial Sequence
  ENSG00000124920_34 (sequence is synthesized)
tttgagcccccagatggtattgcagcttcactgcctgcgttcctgggagcgtctggagctcacagtgatcagtgaccacatcattctctctgagcagaggagcaggaatccctcaagcag

SEQ ID NO: 259196 - DNA, 120 bp, Artificial Sequence
  ENSG00000124920_35 (sequence is synthesized)
cagcctggtcttggctggtgggcagatgcaaatagcttttgctgttattaatgaagtaattactaaatgcacttaaaccagggcaggaaggaatggaaggatggagctagaaagctcaga

SEQ ID NO: 259197 - DNA, 120 bp, Artificial Sequence
  ENSG00000124920_36 (sequence is synthesized)
gtgggccagagcaggggtgtgacacttgcaaagacagggctctgactctgatccctcccagggagcctccgacacccatcccactcccaaccaccaagaccctgggttagggaagaagtt

SEQ ID NO: 259198 - DNA, 120 bp, Artificial Sequence
  ENSG00000124920_37 (sequence is synthesized)
gtatcttaagtgccaccttcaagtttcttagtggtgcctggtgcattccgaggctacatccaggctcatggaaggagtgtagtattcatttagccatgtctgccatgggtccagaaatgg

SEQ ID NO: 259199 - DNA, 120 bp, Artificial Sequence
  ENSG00000124920_38 (sequence is synthesized)
gaaagggaattgctgtccttgccctgtggtatgctgccacctctttgggaagcaggccttgcccctgtcccaccactcattctcagctttgaatgggaggcctttctatagtggaggcct

SEQ ID NO: 259200 - DNA, 120 bp, Artificial Sequence
  ENSG00000124920_39 (sequence is synthesized)
ttccttgaagcctatgaactgcaggcccccttttgccattgatctcaaagcacttgtcctcaggatagggaagagcagggggatgcaggaatagcagggatagcttgctcccagccccct

SEQ ID NO: 259201 - DNA, 120 bp, Artificial Sequence
  ENSG00000124920_40 (sequence is synthesized)
ccccaatttggttccgttgacataggaattttacgattcccaaaccatgcaggggctgagccttccttatgatgactttgttctccctcccactgggggaatcctccctatgccttaaaa

SEQ ID NO: 259202 - DNA, 120 bp, Artificial Sequence
  ENSG00000124920_41 (sequence is synthesized)
ctgccgagccccactccatgtaataggattcctgggcttcctcaatgggggttcatgttcttggactgcgggccctcagtccttaactggaaagtgaccgtccactgccccatggagccc

SEQ ID NO: 259203 - DNA, 120 bp, Artificial Sequence
  ENSG00000124920_42 (sequence is synthesized)
atctggacacagcacagccccaaaaccgttagcagctggctctgtttccaagcctggggaggggttcctcagtgcaggagttggggacaggctggggatccaagctgcttgagggggtca

SEQ ID NO: 259204 - DNA, 120 bp, Artificial Sequence
  ENSG00000124920_43 (sequence is synthesized)
accttggaccaaagttgccttaagcctgtggtaaaagggcttcagggaaggtaagtgggccacctgctggaagctgccagctgcccggctggcaatggtgtgagtgtcttggccctgtcc

SEQ ID NO: 259205 - DNA, 120 bp, Artificial Sequence
  ENSG00000124920_44 (sequence is synthesized)
ctgccctggggtccagcaggtcatccctcccttcttctctctcctttggcgtttgttcctgtagtcactgggctaatctccccctagcttcaagctgtacatagggcctcccagtgcaaa

SEQ ID NO: 259206 - DNA, 120 bp, Artificial Sequence
  ENSG00000124920_45 (sequence is synthesized)
tcctcctgcccataccgtgcacccttagaagcctgcgtgtgcatagagcgccccctacttcccagttaactcccagttcttctccctgagcttggtatttgtcatgtgccaactctgact

SEQ ID NO: 259207 - DNA, 120 bp, Artificial Sequence
  ENSG00000124920_46 (sequence is synthesized)
ctgaggtgggcagtgagggaagcagccccgggcctgcttgcttcctgtccccgaaatgttcgtttcttctgaagtaaatatacatatataaataaatgtataaatactgctttgtatctg

SEQ ID NO: 259208 - DNA, 120 bp, Artificial Sequence
  ENSG00000124920_47 (sequence is synthesized)
ccgcgccggcgatgccgcgcccccgggccgggctgtagcggggccgcggctggagtgtgcgccgggcaggcgggacatggaggtggtggacgagacggaggcgctgcagcgcttcttcga

SEQ ID NO: 259209 - DNA, 120 bp, Artificial Sequence
  ENSG00000124920_48 (sequence is synthesized)
atctaaccactccagtggtggggtctcctctccacactgcagcctccaggctgccgccctcctgggctccggggcctgctccgggacggccgcaggaggggttcattcccgggcctggct

SEQ ID NO: 259210 - DNA, 120 bp, Artificial Sequence
  ENSG00000124920_49 (sequence is synthesized)
agtggccccctcgcccggcctgcacccgcccagccccagcccttcgcctcccttctgtcaccagggaggtctgagggccggacctggggtctgctgtggtcccacctctgaaagctgctc

SEQ ID NO: 259211 - DNA, 120 bp, Artificial Sequence
  ENSG00000124920_50 (sequence is synthesized)
ctcgtcccttcccagccactgactcctccgaaatctccatagttccctgcagggagggggcggctacttccctgctggggctggggtcctggctggagctgagccgccccccttccccgc

SEQ ID NO: 259212 - DNA, 120 bp, Artificial Sequence
  ENSG00000124920_51 (sequence is synthesized)
cagggagcagggctgtggccgtgacctgggaggtgctagacactggcctggcatgggatgggctgggtgactggctgtgcgtgggcaggtgagggaagggaggatgagtccaggtcaagg

SEQ ID NO: 259213 - DNA, 120 bp, Artificial Sequence
  ENSG00000124920_52 (sequence is synthesized)
ggggactcctgggctttgttctgaggcagtgggcagccacaaagcttctaagcatgggagtgatgagggctgacgtaagtgctagaaaaatctcgatgctgtgtggagagtggacaggaa

SEQ ID NO: 259214 - DNA, 120 bp, Artificial Sequence
  ENSG00000124920_53 (sequence is synthesized)
gcggcgggactggaggctgtgactgtttaccttcatgggaacacctgcatacccgtgcacgcgcgccaagcccacccacttacgcatccagctgacgtgtactgtggccacaggagctgg

SEQ ID NO: 259215 - DNA, 120 bp, Artificial Sequence
  ENSG00000124920_54 (sequence is synthesized)
cccatggctcagatgtggcacctcagttcccccctacccaagcaagcctcatggggcccagaacccaggcccttccccccatctttctgaggagtccacaccaagggcctgacccagggc

SEQ ID NO: 259216 - DNA, 120 bp, Artificial Sequence
  ENSG00000124920_55 (sequence is synthesized)
tgaaccttaggcctggctttgaccaaaggttccaggcagccacccggccagccagactccagggcagctcccggggcacatgctcacagcgggaggctgggagcatgggtctgcagggga

SEQ ID NO: 259217 - DNA, 120 bp, Artificial Sequence
  ENSG00000124920_56 (sequence is synthesized)
cgtttgctgagcacagaataaggatcaggaatcaggcctgcagccttacatagatcatcccatttagtcctcacagcactcctgcaagaaaggaattgttgttcctattgttcagctgaa

SEQ ID NO: 259218 - DNA, 120 bp, Artificial Sequence
  ENSG00000124920_57 (sequence is synthesized)
gaaatgggatggagactaaggtgaagtgacctgcccagggttatacagcccctccgaggcagggcttgtatttgatcccgagcctggctcctccttcgccatgccagcaccaggagggtg

SEQ ID NO: 259219 - DNA, 120 bp, Artificial Sequence
  ENSG00000124920_58 (sequence is synthesized)
ctatactgggtctcccctactatttcccaaaccttggatctttggttttaacaaagctacagaaccttttattgtagttttcaaactgggttcctctgaggtaccctgggggctgcgctg

SEQ ID NO: 259220 - DNA, 120 bp, Artificial Sequence
  ENSG00000124920_59 (sequence is synthesized)
ggggctgccctgggggttgaaggggaggctgggaggcttcctggcttcaaccaggcagctctgctctcaccaactttcatctgatggattttgtggcttcaagaaaaagaaagcctggaa

SEQ ID NO: 259221 - DNA, 120 bp, Artificial Sequence
  ENSG00000124920_60 (sequence is synthesized)
aatgtggcttacagagatggaaattcaatgtgatgggggaaccccatgggggagatgtttgccaggcacctgtttactgagctgcctgccactctgtggctggctctgtacaggggactg

SEQ ID NO: 259222 - DNA, 120 bp, Artificial Sequence
  ENSG00000124920_61 (sequence is synthesized)
ggggtgatgaagatggacacgcccctgtccccaaagacctcacagagatgaaaacacagcagtgtgatgaggctctgaggggacatgcaggtagctttgggactggggaggacacttaat

SEQ ID NO: 259223 - DNA, 120 bp, Artificial Sequence
  ENSG00000124920_62 (sequence is synthesized)
ccggacgaaggtggggaggatcagggaaaacttctctggagttggtgacatttgagctgactctttaaaggacctttggaatttgcccagaagggatgtgggaagggcaccttccatctc

SEQ ID NO: 259224 - DNA, 120 bp, Artificial Sequence
  ENSG00000124920_63 (sequence is synthesized)
gtctgtatctgatacctgtcctgaccacacagggtgtcctggatcctgttggggtccttgggtccctgggtcatgcctcagagctgaaaacgtaccaggtccagcaaatgttcagcggcc

SEQ ID NO: 259225 - DNA, 120 bp, Artificial Sequence
  ENSG00000124920_64 (sequence is synthesized)
ccagcttcccccttcctgggtggatagtcaggcagcagcaagactgtatgtgaactagatgagcaagaagtcctgtctcccccatctgacttgtcacacttcagtcccacccctacccag

SEQ ID NO: 259226 - DNA, 120 bp, Artificial Sequence
  ENSG00000124920_65 (sequence is synthesized)
ccagccagcctgcagtcggtttgttcagggaggctgcgaggagcagcgtgctggtagcggtgtaatcatcggcctcggggcagaggggagcctgatttgtgtgatgctgtcaacactgct

SEQ ID NO: 259227 - DNA, 120 bp, Artificial Sequence
  ENSG00000124920_66 (sequence is synthesized)
gatttcaagctaccagtgtaactgatgtttctgaacccagaactgggagagatgcccgcagtcaggaacacaggcctcgagcgggctcctgcacacctggcaggggatgtgaagacccat

SEQ ID NO: 259228 - DNA, 120 bp, Artificial Sequence
  ENSG00000124920_67 (sequence is synthesized)
ccctacttctgggtgttccagttcttttgaggaggcagacgtcaggctcatgggaactgggtagtcctagggctgctgaggaaagggtgtagtgtgatgctggccattgtggaggtctgg

SEQ ID NO: 259229 - DNA, 120 bp, Artificial Sequence
  ENSG00000124920_68 (sequence is synthesized)
aaaaaaataacctggaacttattcatactaaggtgtgagtgactgcttcaagtctggcaaggaaagacttgccagcttctcatttgtgtcctgccttgtcaccttactcctgccccaaca

SEQ ID NO: 259230 - DNA, 120 bp, Artificial Sequence
  ENSG00000124920_69 (sequence is synthesized)
aggcaggaggggagccagggagaatctcccgcagagcctcagaacagccgagtctgaggacagccggagagtctctggtatttcctgcatggtgggataagtgctgacttcattgcctac

SEQ ID NO: 259231 - DNA, 120 bp, Artificial Sequence
  ENSG00000124920_70 (sequence is synthesized)
ttcgtggttaactggctaaatgacctggcctcatgggctgaggaccacatgggatggtcgatgggaaaggttttgttcgagggccctggttattatgcggtgtttcaggctgggtggaga

SEQ ID NO: 259232 - DNA, 120 bp, Artificial Sequence
  ENSG00000124920_71 (sequence is synthesized)
ttcagaggcgtgtggcaggctggctgggagggggctggggttgagggactctagaacctcatttctctgctaactgggcctgtctacagctcctcctcccccgtgtctgtggtgctgtgc

SEQ ID NO: 259233 - DNA, 120 bp, Artificial Sequence
  ENSG00000124920_72 (sequence is synthesized)
agcctgaggtcaaaggaggaaccatgtgaggaggggagccttccacagagtctccacacccaccaggacacccaggtaggtgggactgggaagctgcgggccggccaggcccgagctgct

SEQ ID NO: 259234 - DNA, 120 bp, Artificial Sequence
  ENSG00000124920_73 (sequence is synthesized)
tctctcctggcacaactgggccccaaaatgggcaaggagcagaagctgggagttatagagtaaagccttctccacaagggacactctggggcctgggcctctgtgtcccagggaggggca

SEQ ID NO: 259235 - DNA, 120 bp, Artificial Sequence
  ENSG00000124920_74 (sequence is synthesized)
cgcgtgcccgtgtttgttcattgcactctgctgagcatctcccagccctgccgtgctggagacgtggggaagacagcagatcacaggtgctaatgtggatgagtgcaatgatggaaacag

SEQ ID NO: 259236 - DNA, 120 bp, Artificial Sequence
  ENSG00000124920_75 (sequence is synthesized)
gcaggtgtctgggagcccatggcggggagggctgtggctcactggaggtgtctgcagaagcaggaaggagccgacctcatgctcaggttggggaagtggcacagctagatgtacagcatc

SEQ ID NO: 259237 - DNA, 120 bp, Artificial Sequence
  ENSG00000124920_76 (sequence is synthesized)
agagggcccctcaggttccatgtttggccacctcttctgggagaactggatggtgagctcctccctggccaggtaaccggaagttatgactgtccctggggctgatggacccccagtttc

SEQ ID NO: 259238 - DNA, 120 bp, Artificial Sequence
  ENSG00000124920_77 (sequence is synthesized)
ttcttgagcctaagaggccatgggagaagacgctcaggacaaatgaagggaagtagtgattattttttcttgcccattcatgtgtttactcagaaaatattgattggggccccatctgtc

SEQ ID NO: 259239 - DNA, 120 bp, Artificial Sequence
  ENSG00000124920_78 (sequence is synthesized)
ccaggccctgtgctgggtgggcctagctgcaggggagagaggtggagtagacacaggttttgacttccaagaacgtactctatagtgagggagaaaagacgtgcagaaagcacctgcaac

SEQ ID NO: 259240 - DNA, 120 bp, Artificial Sequence
  ENSG00000124920_79 (sequence is synthesized)
agaggtgggggtgcttctgagggaggcccgagccctgtcgccctgcagaagagacagggtccaagacagagggagagcccagctagacacacagcagacatggtgctcgggcctgaaacc

SEQ ID NO: 259241 - DNA, 120 bp, Artificial Sequence
  ENSG00000124920_80 (sequence is synthesized)
acatcacagacgcacagccaaagcctcaggtagatgggcaagctgcctgcagccaggctgcatgccaccctgtgagggagacagccagacagacctgggtttgaatcccagctgtgtgat

SEQ ID NO: 259242 - DNA, 120 bp, Artificial Sequence
  ENSG00000124920_81 (sequence is synthesized)
tttgccacactgtgtgatttttaggaagtggctcagtttcctcatccagaagatggggctagtagcagcactgtgtcactggattgtactgaggatggggctaatgaaatactttgatgt

SEQ ID NO: 259243 - DNA, 120 bp, Artificial Sequence
  ENSG00000124920_82 (sequence is synthesized)
gtgaggacgacgtttgtcacttacctgtcctgagtctgggcgccaaggaggcatgtaataggtctccaccccagctgaatagtgaagtgctgacatctgagacaccagtcatccgagggg

SEQ ID NO: 259244 - DNA, 120 bp, Artificial Sequence
  ENSG00000124920_83 (sequence is synthesized)
cagatcccggggctgcagccttcaggcttaggagaggagagctctggcagggagtggggagggccattcaggcaggtgggacagcccaggtgaaggtgcagaggtggaggtgttgctcgg

SEQ ID NO: 259245 - DNA, 120 bp, Artificial Sequence
  ENSG00000124920_84 (sequence is synthesized)
agacaggcacaggagctgtgggagccgaggctggattggaggggcccgcccaggtagggagactttgagggcctcccagtggccaaggacagtggccgcccctcctgccccctgatgtct

SEQ ID NO: 259246 - DNA, 120 bp, Artificial Sequence
  ENSG00000124935_0 (sequence is synthesized)
aggctcctggggtggagtccaaatcactcattgtttgtgaaagctgagctcacagcaaaacaagccaccatgaagctgtcggtgtgtctcctgctggtcacgctggccctctgctgctac

SEQ ID NO: 259247 - DNA, 120 bp, Artificial Sequence
  ENSG00000124935_1 (sequence is synthesized)
tgatgcccctccggaagctgttgcagccaagttaggagtgaagagatgcacggatcagatgtcccttcagaaacgaagcctcattgcggaagtcctggtgaaaatattgaagaaatgtag

SEQ ID NO: 259248 - DNA, 120 bp, Artificial Sequence
  ENSG00000124935_2 (sequence is synthesized)
tgtgtgacatgtaaaaactttcatcctggtttccactgtctttcaatgacaccctgatcttcactgcagaatgtaaaggtttcaacgtcttgctttaataaatcacttgctctccacgtc

SEQ ID NO: 259249 - DNA, 120 bp, Artificial Sequence
  ENSG00000124939_0 (sequence is synthesized)
acagcaacttccttgatccctgccacgcacgactgaacacagacagcagccgcctcgccatgaagctgctgatggtcctcatgctggcggccctcctcctgcactgctatgcagattctg

SEQ ID NO: 259250 - DNA, 120 bp, Artificial Sequence
  ENSG00000124939_1 (sequence is synthesized)
gctgcaaactcctggaggacatggttgaaaagaccatcaattccgacatatctatacctgaatacaaagagcttcttcaagagttcatagacagtgatgccgctgcagaggctatgggga

SEQ ID NO: 259251 - DNA, 120 bp, Artificial Sequence
  ENSG00000124939_2 (sequence is synthesized)
gaaaaactttggactgatgatgcatacagtgtacgacagcatttggtgtaatatgaagagtaattaactttacccaaggcgtttggctcagagggctacagactatggccagaactcatc

SEQ ID NO: 259252 - DNA, 120 bp, Artificial Sequence
  ENSG00000124939_3 (sequence is synthesized)
tgttgattgctagaaaccacttttctttcttgtgttgtctttttatgtggaaactgctagacaactgttgaaacctcaaattcatttccatttcaataaactaactgcaaatcactaaaa

SEQ ID NO: 259253 - DNA, 120 bp, Artificial Sequence
  ENSG00000124942_0 (sequence is synthesized)
ggactgcaccgcccgccctgccagacccgcccggaacggggctcgtcgccgccagtagccgcagcaccgcagccttgggcctcgcgccggctatggccgtgccctggggctgagccctca

SEQ ID NO: 259254 - DNA, 120 bp, Artificial Sequence
  ENSG00000124942_1 (sequence is synthesized)
tggggctgagccctcaggttgtgaccgagattcccgacgagagagactgaggggaagagaggaaggaggggcgggctcctggcaaggcattcgctcctgagcggaatcctgcaaagatgg

SEQ ID NO: 259255 - DNA, 120 bp, Artificial Sequence
  ENSG00000124942_2 (sequence is synthesized)
agaaggaggagacaacccgggagctgctgctgcccaactggcagggtagtggctcccacgggctgaccatcgcccagagggacgacggcgtctttgtgcaggaggtgacgcagaactccc

SEQ ID NO: 259256 - DNA, 120 bp, Artificial Sequence
  ENSG00000124942_3 (sequence is synthesized)
ctgcggcccgcactggggtggtcaaggagggggaccagattgtgggtgccaccatctactttgacaacctgcagtcgggtgaggtgacccagctgctgaacaccatggggcaccacacgg

SEQ ID NO: 259257 - DNA, 120 bp, Artificial Sequence
  ENSG00000124942_4 (sequence is synthesized)
agtcttcagctcctgcagctctgaagtggttctgaacacaccacagccatcagcactggaatgcaaagaccagaacaaacagaaggaagccagcagccaagccggggcagtttcagtctc

SEQ ID NO: 259258 - DNA, 120 bp, Artificial Sequence
  ENSG00000124942_5 (sequence is synthesized)
caccccaaatgcaggactgtagaagcggccaggaagaaaaccaccccctcttaaggttgtttttgtgaccgttctttggagcattgttctaaaaatgggaaattacatattgctgtgcca

SEQ ID NO: 259259 - DNA, 120 bp, Artificial Sequence
  ENSG00000124942_6 (sequence is synthesized)
agggcaacaaacacctgcagttaaaggaataccttccgcgaggcggcttttcggagcatgcatgtttatagctccagccaggccagaccgagggctgctgcataagccctgcttggtgca

SEQ ID NO: 259260 - DNA, 120 bp, Artificial Sequence
  ENSG00000124942_7 (sequence is synthesized)
tttctttacttgcaaggggacagagtgtgggcttaggtttgggactagagggggctttggcaactatggtgctcaggtgattatccttcgctcgtttatccaataaacatttatcaagca

SEQ ID NO: 259261 - DNA, 120 bp, Artificial Sequence
  ENSG00000124942_8 (sequence is synthesized)
cagaggccagcatccaagctggtgctggagacggcgagtgggaagagtctgaagtcaaactgaaaaagtccaagatcaaaatgcccaagtttaatttttccaaacctaaagggaaaggtg

SEQ ID NO: 259262 - DNA, 120 bp, Artificial Sequence
  ENSG00000124942_9 (sequence is synthesized)
gtgtcactggctcaccagaagcatcaatttctgggtccaaaggtgacctgaaaagttcaaaggccagcctgggctctctggaaggagaggcagaggccgaagcctcttcaccgaaaggca

SEQ ID NO: 259263 - DNA, 120 bp, Artificial Sequence
  ENSG00000124942_10 (sequence is synthesized)
aattctccttatttaaaagtaagaagccacggcaccgctcaaattcattcagtgatgaaagagagttctctggaccttccaccccgacggggacgctggagtttgaagaacacaccacag

SEQ ID NO: 259264 - DNA, 120 bp, Artificial Sequence
  ENSG00000124942_11 (sequence is synthesized)
tcagctcctgcagctctgaagtggttctgagcggggatgatgaggagtaccagcgcatctacaccacgaagatcaagccacggctgaagtcggaagatggagtggaaggagacctcgggg

SEQ ID NO: 259265 - DNA, 120 bp, Artificial Sequence
  ENSG00000124942_12 (sequence is synthesized)
gggcttggcgtgggaggagggctaagctgcgctcgctggaaccctgcgctccagcggtgcgcgccaggagagggggcccgaagcgaggtctcgcctagagttggaaaggcagcgtgctta

SEQ ID NO: 259266 - DNA, 120 bp, Artificial Sequence
  ENSG00000124942_13 (sequence is synthesized)
gcctacactgtggatgtgactggccgggaaggagccaaggacatagacatcagtagccctgaattcaagatcaagattccaagacatgaactgactgaaatctccaatgtggatgtggag

SEQ ID NO: 259267 - DNA, 120 bp, Artificial Sequence
  ENSG00000124942_14 (sequence is synthesized)
acccagtctgggaagaccgtgatcagactgccctcgggctcgggggcagcctctccgacaggctctgctgtggatatccgagcaggggccatttctgcttcaggaccagagctccaaggt

SEQ ID NO: 259268 - DNA, 120 bp, Artificial Sequence
  ENSG00000124942_15 (sequence is synthesized)
gctggccactcgaagctccaggtcaccatgcctgggataaaggtgggaggctcaggtgtcaatgtcaatgcaaagggcttggacttgggtggcagaggaggggtccaagttccagcagtg

SEQ ID NO: 259269 - DNA, 120 bp, Artificial Sequence
  ENSG00000124942_16 (sequence is synthesized)
gacatttcatcttctcttgggggtagggcagtagaggtacagggcccatctctggagagtggtgatcatggcaaaattaaatttcccaccatgaaagtgccgaaatttggtgtctcaaca

SEQ ID NO: 259270 - DNA, 120 bp, Artificial Sequence
  ENSG00000124942_17 (sequence is synthesized)
gggcgtgagggccagacaccaaaggcagggctgagggtttctgcacctgaagtctctgtggggcacaagggcggcaagccaggcttgactatccaagcccctcagctggaagtcagtgtg

SEQ ID NO: 259271 - DNA, 120 bp, Artificial Sequence
  ENSG00000124942_18 (sequence is synthesized)
ccctctgccaatattgagggccttgaggggaagctgaagggcccccaaatcactgggccatcacttgagggtgacctaggcctgaaaggtgccaagccacaggggcacattggggtggat

SEQ ID NO: 259272 - DNA, 120 bp, Artificial Sequence
  ENSG00000124942_19 (sequence is synthesized)
gcctctgctccccaaattgggggtagcatcactggccccagtgtggaagttcaggcccctgacattgatgttcaggggcctgggagcaaactgaatgtgcccaagatgaaagtccccaag

SEQ ID NO: 259273 - DNA, 120 bp, Artificial Sequence
  ENSG00000124942_20 (sequence is synthesized)
ttctctgtatcaggtgcaaagggagaggaaactgggattgatgtgacactgcctacaggtgaagtgactgttcctggggtctctggggatgtcagcctgcctgagattgctactggtggg

SEQ ID NO: 259274 - DNA, 120 bp, Artificial Sequence
  ENSG00000124942_21 (sequence is synthesized)
ctggaaggaaagatgaaaggtactaaagtgaagactcctgaaatgattattcagaaacctaaaatctccatgcaggatgtggatctgagccttgggtctcctaaactgaaaggagatatt

SEQ ID NO: 259275 - DNA, 120 bp, Artificial Sequence
  ENSG00000124942_22 (sequence is synthesized)
aaggtttctgctcctggggtgcaaggtgatgttaaaggccctcaagtggcacttaaaggctccagagtggacatagagacaccaaacctagagggaaccttgacaggccctaggcttggc

SEQ ID NO: 259276 - DNA, 120 bp, Artificial Sequence
  ENSG00000124942_23 (sequence is synthesized)
agtccttccgggaaaaccggaacctgtaggatctctatgtcagaagtagacttaaatgtggccgcacctaaagtgaaagggggtgtagatgtcacactccccagagtagaagggaaagtc

SEQ ID NO: 259277 - DNA, 120 bp, Artificial Sequence
  ENSG00000124942_24 (sequence is synthesized)
aaagtccctgaagttgatgtcagaggccccaaagtggatgtcagtgccccagatgtcgaagcgcatggcccagaatggaacctgaaaatgcccaagatgaaaatgcccacgttcagcact

SEQ ID NO: 259278 - DNA, 120 bp, Artificial Sequence
  ENSG00000124942_25 (sequence is synthesized)
ccaggagccaaaggggaaggtccagatgttcatatgactctacccaaaggagatatcagtatttcagggcccaaggtcaatgtggaagccccagatgtcaacttggagggtctgggggga

SEQ ID NO: 259279 - DNA, 120 bp, Artificial Sequence
  ENSG00000124942_26 (sequence is synthesized)
aaacttaaaggccccgatgttaagctgcctgatatgagtgtcaagacaccaaagatctccatgcctgatgtagatttgcacgtgaaaggtacaaaggtgaagggagagtatgatgtaact

SEQ ID NO: 259280 - DNA, 120 bp, Artificial Sequence
  ENSG00000124942_27 (sequence is synthesized)
gtaccaaagctggaaggagaactcaaaggcccaaaagtggacattgatgccccagatgtggatgttcatggcccagactggcacttgaagatgcccaagatgaaaatgcccaaattcagt

SEQ ID NO: 259281 - DNA, 120 bp, Artificial Sequence
  ENSG00000124942_28 (sequence is synthesized)
gtgccagggttcaaagcagagggcccagaagtggatgtgaacctgcccaaggctgatgtggacatttccgggcccaagatagatgttactgctcctgatgtgagcattgaggaaccagaa

SEQ ID NO: 259282 - DNA, 120 bp, Artificial Sequence
  ENSG00000124942_29 (sequence is synthesized)
gggaaattgaaagggcccaagtttaagatgcctgagatgaacatcaaagtccccaagatctccatgcctgatgtggacttacatctgaaaggccctaacgtaaagggagaatatgatgtc

SEQ ID NO: 259283 - DNA, 120 bp, Artificial Sequence
  ENSG00000124942_30 (sequence is synthesized)
acaatgccaaaggttgaaagtgagattaaagttcctgatgttgaacttaaaagtgccaaaatggacattgatgtcccagatgtggaggttcaaggcccagactggcacctgaagatgccc

SEQ ID NO: 259284 - DNA, 120 bp, Artificial Sequence
  ENSG00000124942_31 (sequence is synthesized)
aagatgaaaatgcccaagttcagcatgcctggcttcaaagcagagggcccagaagtggatgtgaacctgcccaaggctgatgtggacatctcaggacccaaggtgggtgttgaagttcca

SEQ ID NO: 259285 - DNA, 120 bp, Artificial Sequence
  ENSG00000124942_32 (sequence is synthesized)
gatgtgaatattgaaggacctgaaggaaagctgaagggccccaagttcaagatgccagagatgaatatcaaggcccccaagatctccatgcctgatgtggacttgcatatgaaaggtcct

SEQ ID NO: 259286 - DNA, 120 bp, Artificial Sequence
  ENSG00000124942_33 (sequence is synthesized)
aaagtaaagggagaatatgatatgacagtgccaaagctggaaggggacctgaaaggcccaaaagtagatgtcagtgccccagatgttgaaatgcagggtcctgactggaacttgaagatg

SEQ ID NO: 259287 - DNA, 120 bp, Artificial Sequence
  ENSG00000124942_34 (sequence is synthesized)
ccaaagattaaaatgcccaaatttagcatgcccagcctcaaaggagaggggccagaatttgatgtgaacctgtccaaagcgaatgtggacatttctgcaccaaaagtagatactaatgct

SEQ ID NO: 259288 - DNA, 120 bp, Artificial Sequence
  ENSG00000124942_35 (sequence is synthesized)
ccagatctgagccttgaaggacctgaagggaagttgaaaggcccgaagtttaagatgcctgagatgcacttcagagctcctaagatgtctttgccagatgttgacctggatcttaaagga

SEQ ID NO: 259289 - DNA, 120 bp, Artificial Sequence
  ENSG00000124942_36 (sequence is synthesized)
cccaaaatgaaaggaaatgtagatatctctgcaccaaagatagagggtgaaatgcaggttccagatgtggacatcagaggtcccaaggtagatattaaagcaccagatgtggaaggccaa

SEQ ID NO: 259290 - DNA, 120 bp, Artificial Sequence
  ENSG00000124942_37 (sequence is synthesized)
ggcctggactggagcctgaaaatacccaagatgaaaatgcccaagttcagcatgcccagcctcaaaggcgagggcccagaagtggatgtgaacttgcctaaggctgacgttgttgtctca

SEQ ID NO: 259291 - DNA, 120 bp, Artificial Sequence
  ENSG00000124942_38 (sequence is synthesized)
ggacccaaggtggacatcgaagccccagatgtgagcctcgaaggtccagaagggaagctgaagggtcccaagtttaagatgcctgagatgcatttcaagacccccaagatctccatgcct

SEQ ID NO: 259292 - DNA, 120 bp, Artificial Sequence
  ENSG00000124942_39 (sequence is synthesized)
gatgtggacttacacttgaaaggccccaaagtcaaaggggatgtggatgtgtctgtgcccaaggtagaaggtgaaatgaaagtgccagatgttgaaatcaaaggacccaaaatggacatt

SEQ ID NO: 259293 - DNA, 120 bp, Artificial Sequence
  ENSG00000124942_40 (sequence is synthesized)
gatgccccagatgtggaggttcaaggcccagactggcacctgaagatgcccaagatgaaaatgcccaagtttagcatgcctggcttcaaaggagagggccgagaagtggatgtgaacctg

SEQ ID NO: 259294 - DNA, 120 bp, Artificial Sequence
  ENSG00000124942_41 (sequence is synthesized)
cccaaggctgacattgatgtctcaggacccaaggtggatgttgaagtcccagatgtgagccttgagggcccggaaggaaagctgaagggccccaagtttaagatgcctgagatgcacttc

SEQ ID NO: 259295 - DNA, 120 bp, Artificial Sequence
  ENSG00000124942_42 (sequence is synthesized)
aaggcccccaagatctccatgcctgatgtggacctgaatcttaaggggccaaaattgaagggagatgtggatgtgtccttgcctgaggtagaaggtgaaatgaaagtgccagatgttgac

SEQ ID NO: 259296 - DNA, 120 bp, Artificial Sequence
  ENSG00000124942_43 (sequence is synthesized)
attaaagggcccaaagttgacattagtgctccagatgtggatgttcatggcccagattggcacctgaagatgcccaaggtgaaaatgcccaagttcagcatgcccggcttcaaaggagag

SEQ ID NO: 259297 - DNA, 120 bp, Artificial Sequence
  ENSG00000124942_44 (sequence is synthesized)
ggccctgaagtggatgtgaagctgcccaaagctgacgttgatgtctcaggacccaaaatggatgctgaagttccagatgtgaatattgaaggtccagacgcaaaactaaaaggtcccaaa

SEQ ID NO: 259298 - DNA, 120 bp, Artificial Sequence
  ENSG00000124942_45 (sequence is synthesized)
ttcaagatgccagaaatgagtataaagcctcagaagatatccataccagatgttggtttgcatttgaaaggtcctaaaatgaaaggagattatgatgtaacagttccaaaagtagaagga

SEQ ID NO: 259299 - DNA, 120 bp, Artificial Sequence
  ENSG00000124942_46 (sequence is synthesized)
gagataaaagctcctgatgttgacatcaaaggccccaaagttgatattaatgcaccagatgtggaggttcatggcccagactggcacctgaagatgcccaaggtaaaaatgcccaagttc

SEQ ID NO: 259300 - DNA, 120 bp, Artificial Sequence
  ENSG00000124942_47 (sequence is synthesized)
agcatgcctggctttaaaggagagggcccagaggtggatatgaacctgcccaaggctgaccttggtgtttcaggacccaaggtggacattgatgttccagatgtgaatcttgaagctcca

SEQ ID NO: 259301 - DNA, 120 bp, Artificial Sequence
  ENSG00000124942_48 (sequence is synthesized)
gaggggaaactaaaaggccctaagttcaagatgccaagcatgaatatacagacgcacaaaatctctatgcctgatgttggacttaatttgaaagcccctaaactgaaaactgatgtagat

SEQ ID NO: 259302 - DNA, 120 bp, Artificial Sequence
  ENSG00000124942_49 (sequence is synthesized)
gtttcccttcccaaagtggaaggagacttgaagggtcctgaaattgatgtgaaagcccctaagatggatgtgaatgttggtgatattgatattgaaggtccagaagggaagttgaagggc

SEQ ID NO: 259303 - DNA, 120 bp, Artificial Sequence
  ENSG00000124942_50 (sequence is synthesized)
cccaagtttaagatgcctgagatgcatttcaaggcccccaagatctccatgcccgatgtggacttacacttgaaaggccccaaagtcaaaggggatatggatgtgtctgtgcccaaggta

SEQ ID NO: 259304 - DNA, 120 bp, Artificial Sequence
  ENSG00000124942_51 (sequence is synthesized)
gaaggtgaaatgaaagtgccagatgttgacattaaagggcccaaagtggacattgatgccccagatgtggaggttcacgacccagattggcacctgaaaatgcccaagatgaaaatgccc

SEQ ID NO: 259305 - DNA, 120 bp, Artificial Sequence
  ENSG00000124942_52 (sequence is synthesized)
aagttcagtatgcctggcttcaaagcagagggccctgaagtggatgtgaatctgccaaaggctgacattgatgtgtctggacccagtgtggacactgatgctcctgatttggatattgag

SEQ ID NO: 259306 - DNA, 120 bp, Artificial Sequence
  ENSG00000124942_53 (sequence is synthesized)
ggaccagaaggaaagttgaaaggctccaaatttaagatgcccaagttgaatataaaagctcccaaggtctccatgccagatgtggacttgaatttgaagggacccaaactgaagggagag

SEQ ID NO: 259307 - DNA, 120 bp, Artificial Sequence
  ENSG00000124942_54 (sequence is synthesized)
atagatgcttctgtgccagaactggaaggtgatctcagagggccgcaagttgatgtcaaaggtccttttgtggaagcggaggtgcccgatgttgatctggagtgtcctgatgcaaagttg

SEQ ID NO: 259308 - DNA, 120 bp, Artificial Sequence
  ENSG00000124942_55 (sequence is synthesized)
aaagggcccaagtttaagatgcctgagatgcacttcaaggcccccaagatctccatgcctgatgtggacttacacctgaaaggccccaaagtcaaaggggatgcggatgtgtcggtgcca

SEQ ID NO: 259309 - DNA, 120 bp, Artificial Sequence
  ENSG00000124942_56 (sequence is synthesized)
aaattggagggagatttaacaggccccagtgtgggtgtggaggtgcctgatgttgagctggagtgtcctgatgcaaagttgaaaggccctaaatttaagatgccagacatgcacttcaag

SEQ ID NO: 259310 - DNA, 120 bp, Artificial Sequence
  ENSG00000124942_57 (sequence is synthesized)
gcccccaagatctccatgcctgatgtggacttacacttgaaaggccccaaagtcaaaggggatgtggatgtgtcggtgccaaaattggagggagatttaacaggtcccagtgtgggtgtg

SEQ ID NO: 259311 - DNA, 120 bp, Artificial Sequence
  ENSG00000124942_58 (sequence is synthesized)
gaggtgcctgatgttgagctggagtgtcctgatgcaaagttgaaagggcccaagtttaagatgcctgagatgcacttcaagacccccaagatctccatgcctgatgtggacttacacctg

SEQ ID NO: 259312 - DNA, 120 bp, Artificial Sequence
  ENSG00000124942_59 (sequence is synthesized)
aaaggccccaaagtcaaaggggatatggatgtgtctgtgcccaaggtagaaggtgaaatgaaagtgccagatgttgacatcaaaggacccaaaatggacattgatgccccagatgtggat

SEQ ID NO: 259313 - DNA, 120 bp, Artificial Sequence
  ENSG00000124942_60 (sequence is synthesized)
gttcatggcccagactggcacctgaagatgcccaagatgaaaatgcccaagttcagcatgcctggcttcaaagcagagggcccagaagtggatgtgaacttgcccaaggctgatgttgtt

SEQ ID NO: 259314 - DNA, 120 bp, Artificial Sequence
  ENSG00000124942_61 (sequence is synthesized)
gtctcaggacccaaggtggatgttgaagtcccagatgtgagccttgaaggtccagaagggaagctgaagggccccaagcttaagatgcctgagatgcacttcaaggcccccaagatctcc

SEQ ID NO: 259315 - DNA, 120 bp, Artificial Sequence
  ENSG00000124942_62 (sequence is synthesized)
atgcctgatgtggacttacacttgaaaggccccaaagtcaaaggggatgtggatgtgtctttgccaaaattggagggagatttaacaggccccagtgtggatgtggaggtgcctgatgtt

SEQ ID NO: 259316 - DNA, 120 bp, Artificial Sequence
  ENSG00000124942_63 (sequence is synthesized)
gagctggagtgtcctgatgcaaagttgaaagggcccaagtttaagatgcctgagatgcacttcaagacccccaagatctccatgcctgatgtgaacttaaacttgaaaggccccaaagtc

SEQ ID NO: 259317 - DNA, 120 bp, Artificial Sequence
  ENSG00000124942_64 (sequence is synthesized)
aaaggggatatggatgtgtctgttcccaaggtagaaggtgaaatgaaagtgccagatgttgacatcagagggcccaaagtggacattgatgccccagatgtggatgttcatggcccagac

SEQ ID NO: 259318 - DNA, 120 bp, Artificial Sequence
  ENSG00000124942_65 (sequence is synthesized)
tggcacctgaagatgcctaagatgaaaatgcccaagttcagcatgcctggcttcaaaggagagggcccagaagtggatgtgaacttgcccaaggctgacgttgatgtctcaggacccaag

SEQ ID NO: 259319 - DNA, 120 bp, Artificial Sequence
  ENSG00000124942_66 (sequence is synthesized)
gtggatgttgaagtcccagatgtgagccttgaaggtccagaagggaagctgaagggccccaagtttaagatgcctgagatgcacttcaagacccccaagatctccatgcctgatgttgat

SEQ ID NO: 259320 - DNA, 120 bp, Artificial Sequence
  ENSG00000124942_67 (sequence is synthesized)
ttcaatttaaagggacccaaaatcaaaggagatgttgatgtttctgccccaaagctggagggagagttaaaaggtccagaattggatgtcaaaggtcccaaattagatgctgacatgcca

SEQ ID NO: 259321 - DNA, 120 bp, Artificial Sequence
  ENSG00000124942_68 (sequence is synthesized)
gaagtagctgtggaaggcccaaatggcaagtggaaaactcctaagttcaagatgccagatatgcactttaaagctcccaaaatctctatgccagacctcgatctacacttgaagagcccc

SEQ ID NO: 259322 - DNA, 120 bp, Artificial Sequence
  ENSG00000124942_69 (sequence is synthesized)
aaggcaaaaggagaggtggatgtagatgttcccaaattggaaggggaccttaaagggccacatgtggatgtcagtgggccagacattgacattgagggaccagagggcaaattgaaaggc

SEQ ID NO: 259323 - DNA, 120 bp, Artificial Sequence
  ENSG00000124942_70 (sequence is synthesized)
cctaagttcaagatgcctgatatgcatttcaaagcccccaatatttctatgcctgatgttgatctaaatctcaaaggacccaaaatcaagggggatgtggatgtgtctgtgcctgaggta

SEQ ID NO: 259324 - DNA, 120 bp, Artificial Sequence
  ENSG00000124942_71 (sequence is synthesized)
gaaggtaaacttgaagtaccagatatgaacatcaggggccccaaagttgatgtaaatgcccccgatgtccaagctccagactggcacctgaagatgcccaagatgaaaatgcccaagttc

SEQ ID NO: 259325 - DNA, 120 bp, Artificial Sequence
  ENSG00000124942_72 (sequence is synthesized)
agcatgcctggcttcaaagcagagggccctgaagtagacgtcaacttgcctaaggctgacgttgacatctcaggacccaaggtggacattgaaggccctgatgttaatattgaaggacca

SEQ ID NO: 259326 - DNA, 120 bp, Artificial Sequence
  ENSG00000124942_73 (sequence is synthesized)
gagggaaagttgaaagggcctaagttaaagatgccagagatgaacatcaaagcccccaagatctccatgcctgactttgatttgcatctgaaaggtcccaaggtgaagggcgatgtggat

SEQ ID NO: 259327 - DNA, 120 bp, Artificial Sequence
  ENSG00000124942_74 (sequence is synthesized)
gtttctctgcccaaagtggaaggtgacctcaagggccccgaagttgacatcaaggggcccaaagtggatattaatgccccagatgtgggtgttcaaggcccagactggcacctgaagatg

SEQ ID NO: 259328 - DNA, 120 bp, Artificial Sequence
  ENSG00000124942_75 (sequence is synthesized)
cccaaggtgaaaatgccaaagttcagcatgcctggcttcaaaggagagggcccagatggggatgtgaagctgcccaaggctgacattgatgtctcaggacccaaagtggacattgaaggc

SEQ ID NO: 259329 - DNA, 120 bp, Artificial Sequence
  ENSG00000124942_76 (sequence is synthesized)
cctgatgttaacattgaaggaccagagggaaagttgaaagggcctaagttcaagatgccagagatgaatatcaaagcccccaagatctccatgcctgatattgacttaaacctgaaagga

SEQ ID NO: 259330 - DNA, 120 bp, Artificial Sequence
  ENSG00000124942_77 (sequence is synthesized)
cccaaagtgaagggtgatgtggatgtttcccttcctaaagtggaaggtgacctcaagggcccagaagttgacatcaagggcccaaaagtggacattgacgcacctgatgttgatgttcat

SEQ ID NO: 259331 - DNA, 120 bp, Artificial Sequence
  ENSG00000124942_78 (sequence is synthesized)
ggcccagactggcacctaaagatgcccaagataaaaatgcccaagatcagcatgcctggcttcaaaggagaaggtccagatgtggacgtgaacctgcccaaggctgacattgatgtctca

SEQ ID NO: 259332 - DNA, 120 bp, Artificial Sequence
  ENSG00000124942_79 (sequence is synthesized)
ggaccgaaagtggatgttgaatgtcccgatgtgaatatcgaaggacctgaaggaaagtggaaaagtccaaagtttaagatgccagagatgcattttaagactccaaagatatccatgcca

SEQ ID NO: 259333 - DNA, 120 bp, Artificial Sequence
  ENSG00000124942_80 (sequence is synthesized)
gatattgacctgaatctcacaggtccaaaaataaaaggagatgtggatgttacaggccctaaggtagagggagatctgaaaggtcctgaagttgacctcaaaggccccaaagtggacatt

SEQ ID NO: 259334 - DNA, 120 bp, Artificial Sequence
  ENSG00000124942_81 (sequence is synthesized)
gatgtcccagatgttaatgttcagggtccagactggcacctgaagatgcccaagatgaaaatgcccaagttcagcatgcctggcttcaaagcagagggccctgaagtggatgtgaacctg

SEQ ID NO: 259335 - DNA, 120 bp, Artificial Sequence
  ENSG00000124942_82 (sequence is synthesized)
cccaaggctgacgttgatgtctcaggccccaaagtggacgttgaaggccctgatgttaacattgaaggaccagagggaaagttgaaagggcccaagttcaagatgccagagatgaatatc

SEQ ID NO: 259336 - DNA, 120 bp, Artificial Sequence
  ENSG00000124942_83 (sequence is synthesized)
aaagcccccaagatccccatgcctgactttgatttgcatctgaaaggtcccaaggtgaagggcgatgtggatatttctctgcccaaagtggaaggtgacctcaagggccctgaagttgac

SEQ ID NO: 259337 - DNA, 120 bp, Artificial Sequence
  ENSG00000124942_84 (sequence is synthesized)
atcaggggtccccaagtggacattgatgtcccggatgtgggcgttcaaggcccagactggcacctaaaaatgcccaaagtgaaaatgcccaaattcagcatgcctggcttcaaaggagag

SEQ ID NO: 259338 - DNA, 120 bp, Artificial Sequence
  ENSG00000124942_85 (sequence is synthesized)
tgtctcaggacccaaggtggacattgatgttccagatgtgaatatcgaaggcccagagggaaagttgaaaggtcccaaattcaaaatgcctgagatgaacatcaaagcccccaagatctc

SEQ ID NO: 259339 - DNA, 120 bp, Artificial Sequence
  ENSG00000124942_86 (sequence is synthesized)
catgcctgacattgatcttaacctgaaaggtcccaaagtgaagggtgacatggatgtgtctctgccaaaagtggaaggtgacatgaaagttcctgacgtggatattaaaggccccaaagt

SEQ ID NO: 259340 - DNA, 120 bp, Artificial Sequence
  ENSG00000124942_87 (sequence is synthesized)
ggatattaatgccccagatgtggatgttcaaggcccagactggcacctgaagatgcctaaaataaaaatgcccaagatcagcatgcctggcttcaaaggagaaggtccagaagtggacgt

SEQ ID NO: 259341 - DNA, 120 bp, Artificial Sequence
  ENSG00000124942_88 (sequence is synthesized)
gaacctgcccaaggctgaccttgacgtctcaggacccaaggtggacgttgatgttccagatgtgaatattgaaggtccagatgcgaaactgaagggccctaaattcaagatgccagagat

SEQ ID NO: 259342 - DNA, 120 bp, Artificial Sequence
  ENSG00000124942_89 (sequence is synthesized)
gaacatcaaagctcctaaaatatcaatgcctgatttggacctcaatcttaaaggccctaaaatgaaaggagaggtggatgtttcacttgcaaatgtagaaggtgatttgaaaggacctgc

SEQ ID NO: 259343 - DNA, 120 bp, Artificial Sequence
  ENSG00000124942_90 (sequence is synthesized)
tcttgacataaaaggcccaaagatagatgtagatgctccagatattgacattcatggcccagatgccaaattaaaaggtccaaaactgaagatgcctgacatgcatgtaaacatgcccaa

SEQ ID NO: 259344 - DNA, 120 bp, Artificial Sequence
  ENSG00000124942_91 (sequence is synthesized)
gatctccatgccagaaattgacttgaatttgaaaggctcaaagcttaagggagatgttgatgtctctgggcccaagttggaaggtgacattaaagctcccagtttggatataaagggccc

SEQ ID NO: 259345 - DNA, 120 bp, Artificial Sequence
  ENSG00000124942_92 (sequence is synthesized)
agaagtggacgtttccggtcctaagcttaatatcgaaggcaagtcaaagaaatctcgttttaagcttcccaaatttaatttttcgggctctaaagttcagacacctgaagtggatgtcaa

SEQ ID NO: 259346 - DNA, 120 bp, Artificial Sequence
  ENSG00000124942_93 (sequence is synthesized)
aggtaaaaagccagatattgacataacaggtccaaaagttgatattaatgctcctgatgtcgaggtccaaggaaaagtgaaaggatccaagtttaaaatgcctttcctgagtatttcatc

SEQ ID NO: 259347 - DNA, 120 bp, Artificial Sequence
  ENSG00000124942_94 (sequence is synthesized)
tcccaaagtttctatgcctgacgtggagctaaatttgaaaagtcccaaagtcaaaggagacttagatattgcaggtcccaatttagaaggtgactttaaaggccccaaagtggatattaa

SEQ ID NO: 259348 - DNA, 120 bp, Artificial Sequence
  ENSG00000124942_95 (sequence is synthesized)
ggcaccagaagtcaatcttaatgcacctgatgtggatgttcatggtccagactggaatctgaaaatgcccaagatgaaaatgcccaaattcagtgtgtctggcttaaaagcagaagggcc

SEQ ID NO: 259349 - DNA, 120 bp, Artificial Sequence
  ENSG00000124942_96 (sequence is synthesized)
agatgtagctgtggatctaccaaaaggagacatcaacatagagggcccaagtatgaacattgagggcccagatctcaatgtggaaggtccggagggaggcttgaaaggtcccaaattcaa

SEQ ID NO: 259350 - DNA, 120 bp, Artificial Sequence
  ENSG00000124942_97 (sequence is synthesized)
gatgcctgacatgaatatcaaagctcccaagatctccatgcctgacattgacttaaacttgaaaggccccaaggtgaaaggtgatgtggatatttctcttcccaaacttgaaggggatct

SEQ ID NO: 259351 - DNA, 120 bp, Artificial Sequence
  ENSG00000124942_98 (sequence is synthesized)
gaaagggccagaggttgatatcaaaggccctaaagtggacatcaatgccccagatgtggatgttcatggtccagactggcatctgaagatgcccaaagtgaaaatgcccaagttcagcat

SEQ ID NO: 259352 - DNA, 120 bp, Artificial Sequence
  ENSG00000124942_99 (sequence is synthesized)
gcctggcttcaaaggagaaggccctgaagtcgatgttaccctccctaaagctgacattgacatttctggtcccaatgtagacgttgatgttccagacgtgaatattgaaggtccagatgc

SEQ ID NO: 259353 - DNA, 120 bp, Artificial Sequence
  ENSG00000124942_100 (sequence is synthesized)
aaagctgaagggccccaagttcaagatgcctgagatgaacatcaaagcccccaagatctccatgcctgactttgacctgaacttgaagggacccaaaatgaagggtgatgtggttgtgtc

SEQ ID NO: 259354 - DNA, 120 bp, Artificial Sequence
  ENSG00000124942_101 (sequence is synthesized)
tttgcccaaagtggaaggtgatctaaaaggccctgaggtggacatcaagggccccaaagtggacattgacactcctgacattaacatcgaaggctcagagggtaaattcaagggacccaa

SEQ ID NO: 259355 - DNA, 120 bp, Artificial Sequence
  ENSG00000124942_102 (sequence is synthesized)
atttaagataccagagatgcacctgaaggctcccaaaatatcgatgcctgacattgatttaaacctgaagggccccaaagtcaagggcgatgtggatgtttctctgcccaaaatggaagg

SEQ ID NO: 259356 - DNA, 120 bp, Artificial Sequence
  ENSG00000124942_103 (sequence is synthesized)
tgacctcaagggtcctgaagttgacatcaagggccccaaagtggacattaatgctccagatgttgatgttcaaggcccagactggcacctgaagatgcccaaggtgaaaatgcccaagtt

SEQ ID NO: 259357 - DNA, 120 bp, Artificial Sequence
  ENSG00000124942_104 (sequence is synthesized)
cagcatgcctggcttcaaaggagagggcccagatgtggatgtgaacctgcccaaggctgaccttgatgtctcaggacccaaggtggacattgatgttccagatgtgaatatcgaaggccc

SEQ ID NO: 259358 - DNA, 120 bp, Artificial Sequence
  ENSG00000124942_105 (sequence is synthesized)
agagggaaagttgaaaggtcccaaattcaagatgcctgagatgaacatcaaagcccccaagatctccatgcctgacattgatcttaacctgaaaggacccaaagtgaagggtgatatgga

SEQ ID NO: 259359 - DNA, 120 bp, Artificial Sequence
  ENSG00000124942_106 (sequence is synthesized)
tgtgtctctgccaaaagtggaaggtgacatgcaagttcctgacttggatattaaaggccccaaagtggatattaatgccccagatgtggatgttcgaggcccagactggcacctgaagat

SEQ ID NO: 259360 - DNA, 120 bp, Artificial Sequence
  ENSG00000124942_107 (sequence is synthesized)
gcctaagataaaaatgcccaagatcagcatgcctggcttcaaaggagaaggtccagaagtggatgtgaacctgcccaaggctgaccttgacgtctcaggacccaaggtggacgttgatgt

SEQ ID NO: 259361 - DNA, 120 bp, Artificial Sequence
  ENSG00000124942_108 (sequence is synthesized)
tccagatgtgaatattgaaggtccagatgcgaaactgaagggccctaaattcaagatgccagagatgaacatcaaagcccccaagatctccatgcctgactttgatttgcatctgaaagg

SEQ ID NO: 259362 - DNA, 120 bp, Artificial Sequence
  ENSG00000124942_109 (sequence is synthesized)
ccctaaggtgaaaggagatgtggatgtttctctgcctaagatggaaggtgatctaaaggcccctgaagttgacatcaagggccccaaagtggacattgatgccccagatgtggatgttca

SEQ ID NO: 259363 - DNA, 120 bp, Artificial Sequence
  ENSG00000124942_110 (sequence is synthesized)
tggcccagactggcacctgaagatgcccaaggtgaaaatgcccaaattcagcatgccaggatttaaaggagagggcccagaagtggatgttaatttgcccaaagctgacattgatgtctc

SEQ ID NO: 259364 - DNA, 120 bp, Artificial Sequence
  ENSG00000124942_111 (sequence is synthesized)
aggacccaaagtggacattgacactcctgatattgatattcatggtccagaagggaaactgaagggccccaaatttaaaatgcctgacctgcacctcaaggcaccgaagatctctatgcc

SEQ ID NO: 259365 - DNA, 120 bp, Artificial Sequence
  ENSG00000124942_112 (sequence is synthesized)
tgaagttgacctgaatctgaaaggtccaaagatgaagggcgacgtggacgtttctctgcccaaagtggaaggcgacctcaagggccctgaagttgacatcaagggccccaaagtggacat

SEQ ID NO: 259366 - DNA, 120 bp, Artificial Sequence
  ENSG00000124942_113 (sequence is synthesized)
tgatgtcccagatgtggacgttcaaggcccagactggcacttaaaaatgcccaaagtgaaaatgcccaagttcagcatgcctggcttcaaaggagagggcccagatgtggatgtgaacct

SEQ ID NO: 259367 - DNA, 120 bp, Artificial Sequence
  ENSG00000124942_114 (sequence is synthesized)
gcccaaggctgaccttgacgtctcaggacccaaggtggacattgatgttcctgatgtgaatatcgaaggtccagatgcgaaactaaagggccctaaattcaagatgcctgagatgaacat

SEQ ID NO: 259368 - DNA, 120 bp, Artificial Sequence
  ENSG00000124942_115 (sequence is synthesized)
caaagcccccaagatctccatgcctgactttgatttgcatctgaaaggtcccaaggtgaagggtgatgtggatgtttcccttcctaaagtggaaggtgacctcaagggcccagaagttga

SEQ ID NO: 259369 - DNA, 120 bp, Artificial Sequence
  ENSG00000124942_116 (sequence is synthesized)
catcaagggccccaaagtggacatcgatgcccctgatgtagatgttcatggcccagactggcacctgaagatgcccaaggtgaaaatgcccaaattcagcatgccaggattcaaaggaga

SEQ ID NO: 259370 - DNA, 120 bp, Artificial Sequence
  ENSG00000124942_117 (sequence is synthesized)
gggcccagatgtggatgttacccttcctaaggctgacattgagatttctggccccaaagtggacattgatgcccctgatgtcagtatcgaaggtccagatgcaaaactcaagggtccaaa

SEQ ID NO: 259371 - DNA, 120 bp, Artificial Sequence
  ENSG00000124942_118 (sequence is synthesized)
gttcaagatgccagagatgaacatcaaggcccccaaaatctccatgcctgacattgactttaacttgaagggtcccaaagtgaaaggtgatgtggatgtctctctgcccaaagtggaagg

SEQ ID NO: 259372 - DNA, 120 bp, Artificial Sequence
  ENSG00000124942_119 (sequence is synthesized)
tgatctcaagggccctgaaattgacataaaaggccccagtttggacattgacacacctgatgtcaatattgaaggtccggaaggaaaattgaaggggcccaaatttaagatgcctgagat

SEQ ID NO: 259373 - DNA, 120 bp, Artificial Sequence
  ENSG00000124942_120 (sequence is synthesized)
gaacatcaaagctcccaaaatctctatgcctgactttgatttgcacctgaaaggtcccaaggtgaagggtgatgtggatgtttcactacctaaggtggaaagtgatctgaaagggccaga

SEQ ID NO: 259374 - DNA, 120 bp, Artificial Sequence
  ENSG00000124942_121 (sequence is synthesized)
ggtagacattgaaggtcctgaagggaagctcaaaggtcccaagtttaagatgcctgatgtacatttcaaaagcccacaaatctccatgagtgacattgatttgaatttgaaaggacctaa

SEQ ID NO: 259375 - DNA, 120 bp, Artificial Sequence
  ENSG00000124942_122 (sequence is synthesized)
gataaaaggagatatggacatttccgttcctaaactggagggagatctgaaaggtcccaaagtggatgtcaaaggccctaaagtgggcattgacactcctgatattgacattcatggtcc

SEQ ID NO: 259376 - DNA, 120 bp, Artificial Sequence
  ENSG00000124942_123 (sequence is synthesized)
agaagggaaactgaagggccccaaatttaaaatgcctgacttacacctcaaggcaccgaagatctctatgcctgaagttgacctgaatctgaaaggtccaaaggtgaagggcgacatgga

SEQ ID NO: 259377 - DNA, 120 bp, Artificial Sequence
  ENSG00000124942_124 (sequence is synthesized)
catttctctgcccaaagtggaaggcgacctcaagggccccgaagttgacatcagggaccccaaagtggacattgatgtcccagatgtggacgttcaaggcccagactggcacctaaaaat

SEQ ID NO: 259378 - DNA, 120 bp, Artificial Sequence
  ENSG00000124942_125 (sequence is synthesized)
gcccaaagtgaaaatgcccaagttcagcatgcctggcttcaaaggagagggcccagatgtggatgtgaacctgcccaaggctgacattgatgtctcaggacccaaagtggacgttgatgt

SEQ ID NO: 259379 - DNA, 120 bp, Artificial Sequence
  ENSG00000124942_126 (sequence is synthesized)
tcctgatgtgaatatcgaaggtccagatgcgaaactaaagggccccaagttcaagatgcctgagatgagcatcaaagcccccaagatctccatgcctgatattgacttaaacctgaaagg

SEQ ID NO: 259380 - DNA, 120 bp, Artificial Sequence
  ENSG00000124942_127 (sequence is synthesized)
acccaaagtgaagggcgatgtggatgttacccttcctaaagtggaaggtgacctcaagggcccagaagctgacatcaagggcccaaaagtggacatcaacacccctgatgtggatgttca

SEQ ID NO: 259381 - DNA, 120 bp, Artificial Sequence
  ENSG00000124942_128 (sequence is synthesized)
tggcccagactggcacctgaagatgcccaaggtgaaaatgcccaaattcagcatgcctggcttcaaaggagaaggtccagatgtggatgtgagcctgcccaaggccgacatcgatgtctc

SEQ ID NO: 259382 - DNA, 120 bp, Artificial Sequence
  ENSG00000124942_129 (sequence is synthesized)
gggacccaaggtggacgttgatattccagatgtgaatatcgaaggtccagacgcaaaactgaagggccccaagttcaagatgcctgaaataaatatcaaagctcccaagatctccatacc

SEQ ID NO: 259383 - DNA, 120 bp, Artificial Sequence
  ENSG00000124942_130 (sequence is synthesized)
tgatgttgacctggatttgaaaggacccaaagtaaaaggagattttgatgtgtctgtccctaaggttgaagggactttgaaaggcccagaagtagatcttaaaggtccacgtctggattt

SEQ ID NO: 259384 - DNA, 120 bp, Artificial Sequence
  ENSG00000124942_131 (sequence is synthesized)
cgaaggccctgatgccaaactcagtggcccatctttgaagatgccatcgctggagatatctgctcctaaagtaactgctcctgatgttgatttgcatctcaaggcaccaaaaattggatt

SEQ ID NO: 259385 - DNA, 120 bp, Artificial Sequence
  ENSG00000124942_132 (sequence is synthesized)
ttcaggtccgaagttagaaggtggtgaagtggacctcaagggacccaaagttgaagctccaagcttagatgtacacatggacagcccagatattaacatcgaagggccagatgttaaaat

SEQ ID NO: 259386 - DNA, 120 bp, Artificial Sequence
  ENSG00000124942_133 (sequence is synthesized)
ccccaaatttaagaaacccaagtttggatttggggcaaaaagccccaaagctgacatcaagtcaccttcactggatgtcactgttcctgaggcagagctgaaccttgagactcctgaaat

SEQ ID NO: 259387 - DNA, 120 bp, Artificial Sequence
  ENSG00000124942_134 (sequence is synthesized)
tagtgttggtggcaagggcaagaaaagtaagtttaaaatgcctaaaattcatatgagtggtcctaagattaaggccaaaaaacagggatttgacctgaatgttcctgggggtgaaattga

SEQ ID NO: 259388 - DNA, 120 bp, Artificial Sequence
  ENSG00000124942_135 (sequence is synthesized)
tgccagcctcaaggctccggatgtagatgtcaacatcgcagggccggatgctgcactcaaagtcgacgtgaaatcgcccaaaaccaagaaaacgatgtttggaaaaatgtacttcccaga

SEQ ID NO: 259389 - DNA, 120 bp, Artificial Sequence
  ENSG00000124942_136 (sequence is synthesized)
tgtagagtttgacattaaatcacctaaatttaaagctgaggcccctctccctagccccaaactggagggtgaactccaggcacctgatctggaactttctttgccagcgattcacgtcga

SEQ ID NO: 259390 - DNA, 120 bp, Artificial Sequence
  ENSG00000124942_137 (sequence is synthesized)
aggtcttgacatcaaggcgaaggctcccaaggtcaagatgccagatgtggacatctcagtgccaaaaatagagggtgacctgaaaggccccaaagtgcaggcaaacttgggtgcacctga

SEQ ID NO: 259391 - DNA, 120 bp, Artificial Sequence
  ENSG00000124942_138 (sequence is synthesized)
catcaacatcgaaggcctagatgctaaagtcaaaacaccgtccttcggcatttctgcccctcaagtctccatccctgatgtgaatgtaaacttgaaaggaccaaagataaagggtgatgt

SEQ ID NO: 259392 - DNA, 120 bp, Artificial Sequence
  ENSG00000124942_139 (sequence is synthesized)
ccccagcgtgggactggaaggaccagatgtagatctgcaaggtccagaagcaaaaattaagttccccaagttttccatgcccaagatcggcatcccaggtgtgaaaatggagggtggggg

SEQ ID NO: 259393 - DNA, 120 bp, Artificial Sequence
  ENSG00000124942_140 (sequence is synthesized)
agccgaggtccatgcccagctaccctctcttgaaggagacttgagaggaccagatgttaagctcgaagggcccgatgtttctctaaaggggccaggagtagacttgccttcagtgaacct

SEQ ID NO: 259394 - DNA, 120 bp, Artificial Sequence
  ENSG00000124942_141 (sequence is synthesized)
ctctatgccaaaagtctctgggcctgaccttgatctgaacttgaaaggaccaagtttgaagggagacctggatgcatctgttcccagcatgaaggtgcatgctccagggctcaacctcag

SEQ ID NO: 259395 - DNA, 120 bp, Artificial Sequence
  ENSG00000124942_142 (sequence is synthesized)
tggtgtcggtggcaaaatgcaggtgggaggagacggtgtgaaagtgccagggatcgatgccacaacaaagcttaacgttggggcaccagatgtgacactgaggggaccaagcctgcaggg

SEQ ID NO: 259396 - DNA, 120 bp, Artificial Sequence
  ENSG00000124942_143 (sequence is synthesized)
agatctggctgtctctggtgacatcaaatgccctaaagtatccgtaggagctcctgatctaagcttggaggcatccgaaggcagcattaaacttcccaaaatgaagctgccccaatttgg

SEQ ID NO: 259397 - DNA, 120 bp, Artificial Sequence
  ENSG00000124942_144 (sequence is synthesized)
catctctactccggggtccgacttgcacgtcaatgccaaggggccacaggtttctggcgaactgaaggggccaggtgtggatgtgaacctgaaagggcctcggatttcagcaccgaatgt

SEQ ID NO: 259398 - DNA, 120 bp, Artificial Sequence
  ENSG00000124942_145 (sequence is synthesized)
ggactttaacttggaaggaccaaaagtgaaagggagccttggggccactggtgagatcaaaggccccactgtcggaggaggtcttccaggcattggtgttcaaggcctagaaggaaacct

SEQ ID NO: 259399 - DNA, 120 bp, Artificial Sequence
  ENSG00000124942_146 (sequence is synthesized)
ccagatgcctggaattaagtcctctggatgtgatgtgaacctgccaggcgtgaatgtgaaactcccaactgggcagatttctgggcctgaaatcaaaggtggtctgaaaggttcagaagt

SEQ ID NO: 259400 - DNA, 120 bp, Artificial Sequence
  ENSG00000124942_147 (sequence is synthesized)
aggtttccatggggctgctcctgatatcagtgtgaaggggcctgcctttaatatggcatctcctgagtcagattttggcatcaacttgaagggcccaaaaatcaaaggaggtgcggatgt

SEQ ID NO: 259401 - DNA, 120 bp, Artificial Sequence
  ENSG00000124942_148 (sequence is synthesized)
ttcagggggtgtcagtgccccagacatcagccttggtgaagggcatttgagtgttaaaggttccgggggtgagtggaagggaccccaagtctcctctgctctcaacttggacacatctaa

SEQ ID NO: 259402 - DNA, 120 bp, Artificial Sequence
  ENSG00000124942_149 (sequence is synthesized)
gtttgctgggggccttcatttctcaggaccaaaggtggaaggaggtgtgaaaggaggtcagattggactccaggctcctgggctgagtgtgtctgggcctcaaggtcacttggaaagtgg

SEQ ID NO: 259403 - DNA, 120 bp, Artificial Sequence
  ENSG00000124942_150 (sequence is synthesized)
agttaaagggaaacacgggaagctgaaattcggtacctttggtggattggggtcaaagagcaaaggtcattatgaggtgactgggagcgatgatgagacaggcaagttacaggggagtgg

SEQ ID NO: 259404 - DNA, 120 bp, Artificial Sequence
  ENSG00000124942_151 (sequence is synthesized)
ggtgtccctggcctctaagaagtcccgactgtcctcctcttctagcaatgacagtgggaataaggttggcatccagcttcccgaggtggagctgtcagtttccacaaagaaagagtagca

SEQ ID NO: 259405 - DNA, 120 bp, Artificial Sequence
  ENSG00000124942_152 (sequence is synthesized)
ggcctttgtatgtgtgtacatatatatatatataacaaaacatcagccttgggtggtgtgttcctatataaactccaaagggaaacacaccgactgcctcagcaatcatgcaaagacctt

SEQ ID NO: 259406 - DNA, 120 bp, Artificial Sequence
  ENSG00000124942_153 (sequence is synthesized)
gcctggcccggtggcaagcgctgaaaaaccgaccgcctgtaggctcctggaactatacagataggtaaagagttccaagttcgtccagcccatgtgcaaagtcaacagtatttgccttaa

SEQ ID NO: 259407 - DNA, 120 bp, Artificial Sequence
  ENSG00000124942_154 (sequence is synthesized)
gatttcatatatatatatttttttgcattgactgctgagagctcctgtttactaagcaagcttttgtgtttattatcctcatttttactgaacattgttagttttggggtaatggaaacc

SEQ ID NO: 259408 - DNA, 120 bp, Artificial Sequence
  ENSG00000124942_155 (sequence is synthesized)
cactttttcattgtaatgactttgggggcttttgttagtaagggtgggtggggtgatgggttgcagacggaggtcaggtcttcctctttcctgagactggatctgttcaaacagcaaacg

SEQ ID NO: 259409 - DNA, 120 bp, Artificial Sequence
  ENSG00000124942_156 (sequence is synthesized)
cccacagatggcccagaggtggtggtagtcagggtgtgtgggtgtttttagggttctttagtgttgtttctttcacccaggggtggtggtcccagccagtttggtgctgacggtgagagg

SEQ ID NO: 259410 - DNA, 120 bp, Artificial Sequence
  ENSG00000124942_157 (sequence is synthesized)
aaattagaatctgtttgcaaattgtccaacccaccccctcaacatgaggggcttccattttctgtgttttgtaagggaactgtttccttcatgccgccatgttcctgatattagttctga

SEQ ID NO: 259411 - DNA, 120 bp, Artificial Sequence
  ENSG00000124942_158 (sequence is synthesized)
tttctttttaacaaatgttatcatgattaagaaaatttccagcactttaatggccaattaactgagaatgtaagaaaattgatgctgtacaaggcaaataaagctgtttattaaccttga

SEQ ID NO: 259412 - DNA, 120 bp, Artificial Sequence
  ENSG00000125037_0 (sequence is synthesized)
gctgggattccaggagtgagccaccgagcctgggccaccgccgatagttttccactttcccgccaggcccgacgccgctctgacgccactgaggtgcgccacgacgtgacgtcaacgttc

SEQ ID NO: 259413 - DNA, 120 bp, Artificial Sequence
  ENSG00000125037_1 (sequence is synthesized)
ctgaggtgcgccacgacgtgacgtcaacgttcgcgccggaagtggaagaccaggcagcccagctgaaggcagtaagctcggctcacagtcgcaggagagttctggggtacacgggcaaag

SEQ ID NO: 259414 - DNA, 120 bp, Artificial Sequence
  ENSG00000125037_2 (sequence is synthesized)
gggcttgagaaggcccggaggcgaagccgaagagaagcaactgtgccccggagaagagaagctcgcccattccagactgggaaccagctttcagtgaagatggcagggccagaactgttg

SEQ ID NO: 259415 - DNA, 120 bp, Artificial Sequence
  ENSG00000125037_3 (sequence is synthesized)
ctcgactccaacatccgcctctgggtggtcctacccatcgttatcatcactttcttcgtaggcatgatccgccactacgtgtccatcctgctgcagagcgacaagaagctcacccaggaa

SEQ ID NO: 259416 - DNA, 120 bp, Artificial Sequence
  ENSG00000125037_4 (sequence is synthesized)
caagtatctgacagtcaagtcctaattcgaagcagagtcctcagggaaaatggaaaatacattcccaaacagtctttcttgacacgaaaatattatttcaacaacccagaggatggattt

SEQ ID NO: 259417 - DNA, 120 bp, Artificial Sequence
  ENSG00000125037_5 (sequence is synthesized)
ttcaaaaaaactaaacggaaggtagtgccaccttctcctatgactgatcctactatgttgacagacatgatgaaagggaatgtaacaaatgtcctccctatgattcttattggtggatgg

SEQ ID NO: 259418 - DNA, 120 bp, Artificial Sequence
  ENSG00000125037_6 (sequence is synthesized)
atcaacatgacattctcaggctttgtcacaaccaaggtcccatttccactgaccctccgttttaagcctatgttacagcaaggaatcgagctactcacattagatgcatcctgggtgagt

SEQ ID NO: 259419 - DNA, 120 bp, Artificial Sequence
  ENSG00000125037_7 (sequence is synthesized)
tctgcatcctggtacttcctcaatgtatttgggcttcggagcatttactctctgattctgggccaagataatgccgctgaccaatcacgaatgatgcaggagcagatgacgggagcagcc

SEQ ID NO: 259420 - DNA, 120 bp, Artificial Sequence
  ENSG00000125037_8 (sequence is synthesized)
atggccatgcccgcagacacaaacaaagctttcaagacagagtgggaagctttggagctgacggatcaccagtgggcactagatgatgtcgaagaagagctcatggccaaagacctccac

SEQ ID NO: 259421 - DNA, 120 bp, Artificial Sequence
  ENSG00000125037_9 (sequence is synthesized)
ttcgaaggcatgttcaaaaaggaattacagacctctattttttgaagaccgagcagggattagctgtgtcaggaacttggagttgcacttaaccttgtaactttgtttggagctggcacc

SEQ ID NO: 259422 - DNA, 120 bp, Artificial Sequence
  ENSG00000125037_10 (sequence is synthesized)
ggatgcacgagctggcaggcatgcagcaaggcttgttcttgtctgggctgggttcccctttatgtttgaaactagaggaaataggagtatgctgggcaacttgttatttttaaaatgttg

SEQ ID NO: 259423 - DNA, 120 bp, Artificial Sequence
  ENSG00000125037_11 (sequence is synthesized)
tttaaaatgttgtaaatgttccttctggtgactctagtaatgaaagtcagagaaagggggaaacctcaggctactgataatatataaaatcttggccaggcgcagtggctcacgcctgta

SEQ ID NO: 259424 - DNA, 79 bp, Artificial Sequence
  ENSG00000125037_12 (sequence is synthesized)
ttgggaggctgaggcagagaactgcttaaacctaggaggcggaggatgcagtgagctgacatctctgaaaaaaaaaaaa

SEQ ID NO: 259425 - DNA, 120 bp, Artificial Sequence
  ENSG00000125037_13 (sequence is synthesized)
atatatatatatatatatatatctatcttagcagaagcccagtcttcgaaggaagcattgttaattatagctaatgattatgtgcagtcagcctgacatctagccacagtaaactcctgt

SEQ ID NO: 259426 - DNA, 120 bp, Artificial Sequence
  ENSG00000125037_14 (sequence is synthesized)
tagccacagtaaactcctgttttcttgggatccaaacaccctgtgttttaccattagttttgttagtattgttaactttctttacacaagtaaaccatttccactaccaaaggtttagaa

SEQ ID NO: 259427 - DNA, 120 bp, Artificial Sequence
  ENSG00000125037_15 (sequence is synthesized)
actatggatgaacaaaatgaatctccctgttcattttgagcctacatagacatagagaccaaatatgtcaaaaccttattcaaataaactctcttcagagtgaatacccagggtcaggac

SEQ ID NO: 259428 - DNA, 120 bp, Artificial Sequence
  ENSG00000125037_16 (sequence is synthesized)
agactcagcaaaccttctatatcacttaattctgcccagtgaaaatcagtgaccctgaggcactgccagattctaaagtgcctttgggatcatcagagactgtctataaataatgcaaaa

SEQ ID NO: 259429 - DNA, 120 bp, Artificial Sequence
  ENSG00000125037_17 (sequence is synthesized)
tcttgatctggatgtcagtgtatcaaatcttatcaaatccattgacaaatcagtggtgctatactggaaatggctactcctttggatgaaggacctcatttcccagttgcttggaacaaa

SEQ ID NO: 259430 - DNA, 120 bp, Artificial Sequence
  ENSG00000125037_18 (sequence is synthesized)
agagaatttacatattgctgtaagaagggagagacggcagttgttggtagacacacagataagggtgcccaagaataattctgtctggattaaaggtcccagggaagtgacggtgccatt

SEQ ID NO: 259431 - DNA, 120 bp, Artificial Sequence
  ENSG00000125037_19 (sequence is synthesized)
tctgtaccaagaggtgaatataatttgcatgttgagtgcagtaattaagaacaaacgactcgactccacaaattaaaccgtcctgttttctcttctttgcctgtgaaagtgttgcctctg

SEQ ID NO: 259432 - DNA, 120 bp, Artificial Sequence
  ENSG00000125037_20 (sequence is synthesized)
taagtcactaacaaccttctgccagcagttgactgtctatcttggatcagtgcggggagtctaagacgaaagagatgtgaaccttgccctcaactcacaagagagagacacctaagagct

SEQ ID NO: 259433 - DNA, 120 bp, Artificial Sequence
  ENSG00000125037_21 (sequence is synthesized)
acttagtaaaaacatagtttacacgtctctctttcctgagacagaatcatctattaagtaaatggaaattcttggtgcttttactggtttttaaatgctcactggaatttaatccacact

SEQ ID NO: 259434 - DNA, 120 bp, Artificial Sequence
  ENSG00000125037_22 (sequence is synthesized)
atcaatgatgctgtaaaataatccaatcggaggtgccaggtaaacatttagaataatttgaacctttttgaaccccatagacatcagatataaattgcattaaaaaaacaatactaagag

SEQ ID NO: 259435 - DNA, 120 bp, Artificial Sequence
  ENSG00000125037_23 (sequence is synthesized)
ccttttcacaaaaaggttctagaatttgcaaaatttagtatgatttttgtgggacaaaatctcactgtgtttcatgatagaaactaaaagagaagggaagttccggccaggcacaggggc

SEQ ID NO: 259436 - DNA, 66 bp, Artificial Sequence
  ENSG00000125037_24 (sequence is synthesized)
ggaggccaaggcaggtggttctactaaagatacaaaaaaaaaatttgctgggcatggtggtgggca

SEQ ID NO: 259437 - DNA, 70 bp, Artificial Sequence
  ENSG00000125037_25 (sequence is synthesized)
caaaaatgagctgggcacggtggcatgtgcctataatcccagccacccaggaggctgaggcaggagaatc

SEQ ID NO: 259438 - DNA, 120 bp, Artificial Sequence
  ENSG00000125037_26 (sequence is synthesized)
aatcgagctactcacattagatgcatcctggtaagaactttcttttgtttaataaaaacacaaaccacactttgggaagccaaggcgggaggatcacttgagcccatgagtttgagacca

SEQ ID NO: 259439 - DNA, 120 bp, Artificial Sequence
  ENSG00000125046_0 (sequence is synthesized)
actcgaagggcagacatctctttggcaggacgtctggaacatggacagggatctgaatgaagatgacagtgtggtggacctcagttttgaggccgagagtcctctggcgccccccacaga

SEQ ID NO: 259440 - DNA, 120 bp, Artificial Sequence
  ENSG00000125046_1 (sequence is synthesized)
gctcctggagagactgcccagctatgactggcttcttcaagggggcagaggacagatattcttcccacctttggaggccccagggaggccccaggagcaaaggtcctggccctcgttcct

SEQ ID NO: 259441 - DNA, 120 bp, Artificial Sequence
  ENSG00000125046_2 (sequence is synthesized)
ggaacacagagtccctgcgatgacggaggaggtggcccgggaagccctcctcagctttgtggactctaagtgctgctacagcagcacggtggctggagacctcgtcatccaggagctgaa

SEQ ID NO: 259442 - DNA, 120 bp, Artificial Sequence
  ENSG00000125046_3 (sequence is synthesized)
gcggcagaccctctgcaggtaccgtctggagacctttagtgaatccaggataagcgagtggacatttcaaccctttactaaccactctgtggatgggccgcaaagaggcgcctcccccag

SEQ ID NO: 259443 - DNA, 120 bp, Artificial Sequence
  ENSG00000125046_4 (sequence is synthesized)
tgggcgtgggcggtacaagtgcagcggctgccacggggcgggcacggtgcggtgcccatcctgctgcggagccaagcgcaaagccaagcagtcccggagatgtcagctgtgcgcggggtc

SEQ ID NO: 259444 - DNA, 120 bp, Artificial Sequence
  ENSG00000125046_5 (sequence is synthesized)
cggcaggcgaagatgcagcacttgctcagggagagggaacaagacctgcgccacctgcaagggggagaagaagctgttgcacttcatccagcttgtcatcatgtggaagaacagcttgtt

SEQ ID NO: 259445 - DNA, 120 bp, Artificial Sequence
  ENSG00000125046_6 (sequence is synthesized)
tgagtttgtgtctgagcaccggctcaactgccccagggagctccttgctaaagccaaaggagaaaacctctttaaggatgaaaactcggtggtgtaccccatcgtggacttccctctgcg

SEQ ID NO: 259446 - DNA, 120 bp, Artificial Sequence
  ENSG00000125046_7 (sequence is synthesized)
agacatctctcttgcctcccagaggggcattgcagagcacagcgctgccttggcctcccgtgcccgcgtcctgcagcagcgccagaccattgagctgatccccctcacagaagttcacta

SEQ ID NO: 259447 - DNA, 120 bp, Artificial Sequence
  ENSG00000125046_8 (sequence is synthesized)
ttggtaccaaggaaagacttatgtctactacatctatggcactgaccaccaggtgtatgcggtggactatcctgagcggtattgctgtggctgtaccatcgtgtgacatagcatggctgt

SEQ ID NO: 259448 - DNA, 120 bp, Artificial Sequence
  ENSG00000125046_9 (sequence is synthesized)
cacaggaagaaccctgcttcctccggggagtcatctctggcctctccagcccacagtgtctcttgtgctgccatccatggatctgaagacagacgggcccctctgtgtgccagggctgga

SEQ ID NO: 259449 - DNA, 120 bp, Artificial Sequence
  ENSG00000125046_10 (sequence is synthesized)
ggatgctggagatacaagtgtgcagaattgtggattaatggctctcagggctgccatggagaaatgcatgaagatgcaaggggaggaaggaggattctttcctcttggaggtgttggggc

SEQ ID NO: 259450 - DNA, 120 bp, Artificial Sequence
  ENSG00000125046_11 (sequence is synthesized)
caaaccctggcatgtccttccagaaaaaccagcttatcatctatcaagctccaaccccttatacagctcctctggtggaatccatgactcatatgtttaacctacaataattcagctata

SEQ ID NO: 259451 - DNA, 120 bp, Artificial Sequence
  ENSG00000125046_12 (sequence is synthesized)
cacattcctgtagaacaaatgagagaaataatttaaatggcaaggactttgcctctggtctccaagttaatgccccgatgatgcgtgtgatttgattttgctttttccctttgtcggtct

SEQ ID NO: 259452 - DNA, 120 bp, Artificial Sequence
  ENSG00000125046_13 (sequence is synthesized)
tggttctggtgtgcttcttctagtgggagcctcttgacgatctgagtattactgaaatgttcaaggatacacacaaatatctggccctaatgcacaataaatactgcacttaggcataaa

SEQ ID NO: 259453 - DNA, 120 bp, Artificial Sequence
  ENSG00000125046_14 (sequence is synthesized)
tggactgctgagggctttaccactaccgtggcctcagtttctcgcctgcacgttgaggaggctggctggcccgcgtgagtccacaggcccttcccagaagcccccgcctctctgttcggt

SEQ ID NO: 259454 - DNA, 87 bp, Artificial Sequence
  ENSG00000125046_15 (sequence is synthesized)
ttaggctctgctgggctgcgttcccacccctgtcagatagtaaatcccaagtaaggtacctgctttcggcagctctgagctttcttc

SEQ ID NO: 259455 - DNA, 120 bp, Artificial Sequence
  ENSG00000125046_16 (sequence is synthesized)
gtcagatagtaaatcccaagtaaggtacctgctttcggcagctctgagctttcttcttggacacctaaaacccacagtcctccaggctccgatagattgcaaatgacctgctttctttct

SEQ ID NO: 259456 - DNA, 81 bp, Artificial Sequence
  ENSG00000125046_17 (sequence is synthesized)
gagttcggacccctgttggatagtaaatcccaagtaaggtacctgccttcggcagctctgagatttcttcttggacaccta

SEQ ID NO: 259457 - DNA, 83 bp, Artificial Sequence
  ENSG00000125046_18 (sequence is synthesized)
cctgccttcggcagctctgagttacctgtgtgtcccctgtggtacctatggaaaccagttgttgggaaatccttgttaaggta

SEQ ID NO: 259458 - DNA, 120 bp, Artificial Sequence
  ENSG00000125046_19 (sequence is synthesized)
gaccaccgtggattgtaatatccaggaaaacgttactgctaatgtcacaggacgtgtagaccctgccatcaaattcgtaatatcctagcgggacttcactagtcatttcacaatgcgtgt

SEQ ID NO: 259459 - DNA, 120 bp, Artificial Sequence
  ENSG00000125046_20 (sequence is synthesized)
cttgtaatagtacctcttagggctgctgtgaaggaaggataacatggaagcaacatgcctatcatagtgctttgtgtatgcccctgtcaaccatcactctactttgtgtgtgtgagtttg

SEQ ID NO: 259460 - DNA, 120 bp, Artificial Sequence
  ENSG00000125046_21 (sequence is synthesized)
accacctgaatctttttggcaccatctcaagtataattcaaatcacgaggcatttgtgcatatcgacaatacacccatcgtggtgtggtggacctcagttttgaggccgagagtcctctg

SEQ ID NO: 259461 - DNA, 120 bp, Artificial Sequence
  ENSG00000125046_22 (sequence is synthesized)
ggtcctgtaagagggccaagacctggggttcttcttaccaggcagtctttgtcagccagggaaaccaacaagcaactccatttgtcgtgcagggcagtgggtgctgagcaggtgcggtgc

SEQ ID NO: 259462 - DNA, 120 bp, Artificial Sequence
  ENSG00000125046_23 (sequence is synthesized)
atgtttcaccatgaggtttagaggggacacagatccagaccatatcatcgccccagggattccgactccccaagtctggagtggggcctaaggctctgtatttctaacaagctccctgtt

SEQ ID NO: 259463 - DNA, 120 bp, Artificial Sequence
  ENSG00000125046_24 (sequence is synthesized)
gagcccaagctgctgctgttcctaggcaccgctgaccaacacaacacgctcgttcaaccccctcaaggtgctctgaagattcctcgaaaatacatctgagaaattcttttgacatcccgg

SEQ ID NO: 259464 - DNA, 120 bp, Artificial Sequence
  ENSG00000125046_25 (sequence is synthesized)
attattctccagcctacttagttataaatgagtctgcgtgtgtctcagtctgtgctgataagacggatggagtcctcctttccttacagtaacggtctcactctgttgctcactgacgct

SEQ ID NO: 259465 - DNA, 88 bp, Artificial Sequence
  ENSG00000125046_26 (sequence is synthesized)
taccgatcccagctaccattgttcttaatcaatggtatcaatgtttttttaaatggaggaagaggtaacatttgccagttatatcttt

SEQ ID NO: 259466 - DNA, 120 bp, Artificial Sequence
  ENSG00000125046_27 (sequence is synthesized)
ttaaatggaggaagaggtaacatttgccagttatatctttgttgaatgcacgggctctgaggattagacaccaggcattgtgctaaacacatcgtatccgctgtcactggatcgccacca

SEQ ID NO: 259467 - DNA, 120 bp, Artificial Sequence
  ENSG00000125046_28 (sequence is synthesized)
tgactctcagaagaagaagggatgctcattccacccactgagatggctttcaaatcgacagtagaatccagcacatattctgtctttggaaaattgctccaggtgtatcctcagaacaat

SEQ ID NO: 259468 - DNA, 120 bp, Artificial Sequence
  ENSG00000125046_29 (sequence is synthesized)
ccagccccgtcgtcactttccacagccactgcttggcacctgcggtagctctgagaggctccgttatgcgtgtggcatcagcctttttttctagcagccttgggctccgatagattgcaa

SEQ ID NO: 259469 - DNA, 120 bp, Artificial Sequence
  ENSG00000125046_30 (sequence is synthesized)
atgcgggacacgctgtagaacagctcacactggctggcactgctaagcaggtgcggaggggagtcagagacccccggatggaggggtgtggtggacctcagttttgaggccgagagtcct

SEQ ID NO: 259470 - DNA, 120 bp, Artificial Sequence
  ENSG00000125046_31 (sequence is synthesized)
cacaggaaaacctgccccgttctcacgctgggcacccgttcacatggtcccctttgcaggagatgccctccccagttggactgctgagggctttaccactaccgtggcctcagtttctcg

SEQ ID NO: 259471 - DNA, 66 bp, Artificial Sequence
  ENSG00000125046_32 (sequence is synthesized)
cgttatgcgtgtggcatcagcctttttttctagcagccttgggttggagtatacaggcaaaatccg

SEQ ID NO: 259472 - DNA, 120 bp, Artificial Sequence
  ENSG00000125046_33 (sequence is synthesized)
ccatgttggccaggcgggtctcgaactctgggcctcaagtgatccatgtgactcggcctcccacggtgctgggattacaggcctgagccaccaaacctggccaagattttctgttttgtt

SEQ ID NO: 259473 - DNA, 120 bp, Artificial Sequence
  ENSG00000125046_34 (sequence is synthesized)
ccacggtgctgggattacaggcctgagccaccaaacctggccaagattttctgttttgttcctacatagaagtgaggatatgaaatatttgtcattctgtgcctggcttatttcatttaa

SEQ ID NO: 259474 - DNA, 120 bp, Artificial Sequence
  ENSG00000125046_35 (sequence is synthesized)
aagcagttccctcctttgtgcagtgcagctagaagaaaacaacattgtcttgggacacgcatcattactaagaatttttccgtaaatttatctgtgtgccttctacagttacctgtgtgt

SEQ ID NO: 259475 - DNA, 120 bp, Artificial Sequence
  ENSG00000125046_36 (sequence is synthesized)
cccctgtggtacctatggaaaccagttgttgggaaatccttgttaaggtatctgatgaatctccatatctcttacactgcacacaataaatacccattgaatgaatgaatacatatatgg

SEQ ID NO: 259476 - DNA, 120 bp, Artificial Sequence
  ENSG00000125046_37 (sequence is synthesized)
atggatggacagacggatgatgcatggtagatggatgaatactggatcccatgcccattgagggtttgggtcaggggactgatgtgagcagacacacagaagcacgggcagcccccggcc

SEQ ID NO: 259477 - DNA, 120 bp, Artificial Sequence
  ENSG00000125046_38 (sequence is synthesized)
tccagcagattcttccaacccagctggaaagacatgatatggacttgggaattctctaactctgaaaggccccctctgctgaggtgtcccatgttcacagacagtgtgcatgaccagaga

SEQ ID NO: 259478 - DNA, 120 bp, Artificial Sequence
  ENSG00000125046_39 (sequence is synthesized)
acccatctgtctcgtcactgctgtgtccccagagctctgcacgtagtaggtgctctgtggttatttgaagagtaggtgagcttttctcaaggcctggcatttctggacaaggctggaact

SEQ ID NO: 259479 - DNA, 120 bp, Artificial Sequence
  ENSG00000125046_40 (sequence is synthesized)
cgtcatgcaatatatgtggaaagagtgtgaagaaagagccactgcagggaggaaacacagggacggggttaccaggaaaggagacctctcccgcccacgggttgggaagtgaatatcaaa

SEQ ID NO: 259480 - DNA, 120 bp, Artificial Sequence
  ENSG00000125046_41 (sequence is synthesized)
aaccacctaaaggccagatttttaactcactgaggatcagttcctgggcaagcccctatttataactcattttggggtctgaatggaggaggagtcaaggaaagttggttgattgactaa

SEQ ID NO: 259481 - DNA, 120 bp, Artificial Sequence
  ENSG00000125046_42 (sequence is synthesized)
acaataaacaaaatttcatcactgctcacagctttgcaaacactgggccattgcattttgtaaatcctatcctttagtgtatttataactttttaagggaaacaggaaaccgtgaggagt

SEQ ID NO: 259482 - DNA, 120 bp, Artificial Sequence
  ENSG00000125046_43 (sequence is synthesized)
aaaaatactcaaggttgggttggttaatgatacttttgcctcattaaagcccaggccatccttctgacaagccagttggagaagctttggtggcaccttccatcgtggttggtagagaca

SEQ ID NO: 259483 - DNA, 120 bp, Artificial Sequence
  ENSG00000125046_44 (sequence is synthesized)
tcctcagggtgagtctccatgggcgctgccatcagccctgggccagtgcctggctggggtcttcccatcatgttgctagcagctcctctggctaaggtcaaggtacccgagggcaggagc

SEQ ID NO: 259484 - DNA, 120 bp, Artificial Sequence
  ENSG00000125046_45 (sequence is synthesized)
cttatttagcctgtctctgcctccttttaactgtgcgacatcctctctggacctctgtttttcttatctataaaatggtacaattcctctctaaggttgtgtttcttcagttgcaggatt

SEQ ID NO: 259485 - DNA, 120 bp, Artificial Sequence
  ENSG00000125046_46 (sequence is synthesized)
ctatcagcttttctcctaagctccacatttcaactaaagtgtttttggctgttctctaggaaaacctgccccgttctcacgctgggcacccgttcacatggtcccctttgcaggagatgc

SEQ ID NO: 259486 - DNA, 120 bp, Artificial Sequence
  ENSG00000125084_0 (sequence is synthesized)
agacgggcgggaaccacagccccgctcgctgcccattgtctgcgcccctaaccggtgcgccctggtgccacagtgcggcccggaggggcagcctcctcccgtcacttcagccagcgccgc

SEQ ID NO: 259487 - DNA, 120 bp, Artificial Sequence
  ENSG00000125084_1 (sequence is synthesized)
aactataagaggcggtgccgcccgccgtggccgcctcagcccaccagccgggaccgcgagccatgctgtccgccgcccgcccccagggttgttaaagccagactgcgaactctcgccact

SEQ ID NO: 259488 - DNA, 120 bp, Artificial Sequence
  ENSG00000125084_2 (sequence is synthesized)
gccgccaccgccgcgtcccgtcccaccgtcgcgggcaacaaccaaagtcgccgcaactgcagcacagagcgggcaaagccaggcaggccatggggctctgggcgctgttgcctggctggg

SEQ ID NO: 259489 - DNA, 120 bp, Artificial Sequence
  ENSG00000125084_3 (sequence is synthesized)
tttctgctacgctgctgctggcgctggccgctctgcccgcagccctggctgccaacagcagtggccgatggtggggtattgtgaacgtagcctcctccacgaacctgcttacagactcca

SEQ ID NO: 259490 - DNA, 120 bp, Artificial Sequence
  ENSG00000125084_4 (sequence is synthesized)
agagtctgcaactggtactcgagcccagtctgcagctgttgagccgcaaacagcggcgtctgatacgccaaaatccggggatcctgcacagcgtgagtggggggctgcagagtgccgtgc

SEQ ID NO: 259491 - DNA, 120 bp, Artificial Sequence
  ENSG00000125084_5 (sequence is synthesized)
gcgagtgcaagtggcagttccggaatcgccgctggaactgtcccactgctccagggccccacctcttcggcaagatcgtcaaccgaggctgtcgagaaacggcgtttatcttcgctatca

SEQ ID NO: 259492 - DNA, 120 bp, Artificial Sequence
  ENSG00000125084_6 (sequence is synthesized)
cctccgccggggtcacccattcggtggcgcgctcctgctcagaaggttccatcgaatcctgcacgtgtgactaccggcggcgcggccccgggggccccgactggcactgggggggctgca

SEQ ID NO: 259493 - DNA, 120 bp, Artificial Sequence
  ENSG00000125084_7 (sequence is synthesized)
gcgacaacattgacttcggccgcctcttcggccgggagttcgtggactccggggagaaggggcgggacctgcgcttcctcatgaaccttcacaacaacgaggcaggccgtacgaccgtat

SEQ ID NO: 259494 - DNA, 120 bp, Artificial Sequence
  ENSG00000125084_8 (sequence is synthesized)
tctccgagatgcgccaggagtgcaagtgccacgggatgtccggctcatgcacggtgcgcacgtgctggatgcggctgcccacgctgcgcgccgtgggcgatgtgctgcgcgaccgcttcg

SEQ ID NO: 259495 - DNA, 120 bp, Artificial Sequence
  ENSG00000125084_9 (sequence is synthesized)
acggcgcctcgcgcgtcctgtacggcaaccgcggcagcaaccgcgcttcgcgggcggagctgctgcgcctggagccggaagacccggcccacaaaccgccctccccccacgacctcgtct

SEQ ID NO: 259496 - DNA, 120 bp, Artificial Sequence
  ENSG00000125084_10 (sequence is synthesized)
ctgcacgtacagcggacgcctgggcacagcaggcacggcagggcgcgcctgtaacagctcgtcgcccgcgctggacggctgcgagctgctctgctgcggcaggggccaccgcacgcgcac

SEQ ID NO: 259497 - DNA, 120 bp, Artificial Sequence
  ENSG00000125084_11 (sequence is synthesized)
gcagcgcgtcaccgagcgctgcaactgcaccttccactggtgctgccacgtcagctgccgcaactgcacgcacacgcgcgtactgcacgagtgtctgtgaggcgctgcgcggactcgccc

SEQ ID NO: 259498 - DNA, 120 bp, Artificial Sequence
  ENSG00000125084_12 (sequence is synthesized)
ccaggaacgctctcctcgagccctcccccaaacagactcgctagcactcaagacccggttattcgcccacccgagtacctccagtcacactccccgcggttcatacgcatcccatctctc

SEQ ID NO: 259499 - DNA, 120 bp, Artificial Sequence
  ENSG00000125084_13 (sequence is synthesized)
ccacttcctcctacctggggactcctcaaaccacttgcctggggcggcatgaaccctcttgccatcctgatggacctgccccggacctacctccctccctctccgcgggagaccccttgt

SEQ ID NO: 259500 - DNA, 120 bp, Artificial Sequence
  ENSG00000125084_14 (sequence is synthesized)
tgcactgccccctgcttggccaggaggtgagagaaggatgggtcccctccgccatggggtcggctcctgatggtgtcattctgcctgctccatcgcgccagcgacctctctgcctctctt

SEQ ID NO: 259501 - DNA, 120 bp, Artificial Sequence
  ENSG00000125084_15 (sequence is synthesized)
cttcccctttgtcctgcgttttctccgggtcctcctaagtcccttcctattctcctgccatgggtgcagaccctgaacccacacctgggcatcagggcctttctcctccccacctgtagc

SEQ ID NO: 259502 - DNA, 120 bp, Artificial Sequence
  ENSG00000125084_16 (sequence is synthesized)
tgaagcaggaggttacagggcaaaagggcagctgtgatgatgtggaaatgaggttgggggaaccagcagaaatgcccccattctcccagtctctgtcgtggagccattgaacagctgtga

SEQ ID NO: 259503 - DNA, 120 bp, Artificial Sequence
  ENSG00000125084_17 (sequence is synthesized)
gccatgcctccctgggccacctcctaccccttcctgtcctgcctcctcatcagtgtgtaaataatttgcactgaaacgtggatacagagccacgagtttggatgttgtaaataaaactat

SEQ ID NO: 259504 - DNA, 120 bp, Artificial Sequence
  ENSG00000125084_18 (sequence is synthesized)
ttattgtgctgggtcccagcctggtttgcaaagaccacctccaacccaacccaatccctctccactcttctctcctttctccctgcagccttttctggtccctcttctctcctcagtttc

SEQ ID NO: 259505 - DNA, 120 bp, Artificial Sequence
  ENSG00000125084_19 (sequence is synthesized)
tcaaagatgcgtttgcctcctggaatcagtatttccttccactgtagctattagcggctcctcgcccccaccagtgtagcatcttcctctgcagaataaaatctctatttttatcgatga

SEQ ID NO: 259506 - DNA, 120 bp, Artificial Sequence
  ENSG00000125089_0 (sequence is synthesized)
gtccagctggagacagccccgtggggccagccagcgctgggccaggagcggccacctggttcctgcgtgctacggccctgtgggcctgggagctgcctctgaggaacacgccgcagggcc

SEQ ID NO: 259507 - DNA, 120 bp, Artificial Sequence
  ENSG00000125089_1 (sequence is synthesized)
aggcatgtgaggtctctgcgggtcatggagaacctccctgccgtgaccactgaggagccgacccccatggggaggggtcctgtgggaccctcaggaggtggcagcacccgggaccaggtc

SEQ ID NO: 259508 - DNA, 120 bp, Artificial Sequence
  ENSG00000125089_2 (sequence is synthesized)
cggactgtggtcatgaggccctctgtgagctgggagaaagcggggcccgaggaggccaaggcgccagtgagaggcgacgaggctcctcctgcccgcgtggctgggcctgctgctgggacc

SEQ ID NO: 259509 - DNA, 120 bp, Artificial Sequence
  ENSG00000125089_3 (sequence is synthesized)
cctccctgccagatgggggtttatcccacagacctgaccctgcagctgctggctgtgcggaggaagagcagactgcgggaccccggcctacagcagaccctccggggccagctccgcctg

SEQ ID NO: 259510 - DNA, 120 bp, Artificial Sequence
  ENSG00000125089_4 (sequence is synthesized)
ctggagaatgatagccgggagatggcccgcgtgcttggggaattatcagccaggctgctgtccatccacagtgaccaggaccggatcgtggtgacgtttaagacttttgaagaaatctgg

SEQ ID NO: 259511 - DNA, 120 bp, Artificial Sequence
  ENSG00000125089_5 (sequence is synthesized)
aagttttccacctaccatgctctcggcttcactcatcactgcctggcaaacctgctcatggaccaggccttctggctgctcttgcccagtgaggaggaggagacggccatccaagtccat

SEQ ID NO: 259512 - DNA, 120 bp, Artificial Sequence
  ENSG00000125089_6 (sequence is synthesized)
gtggatgagaacgccttaaggctgacccacgagagcctcctcatccaagaagggcccttctttgtcctgtgtcctgaccaccatgtgagagtgatgacgggtccccgggatgcaggaaat

SEQ ID NO: 259513 - DNA, 120 bp, Artificial Sequence
  ENSG00000125089_7 (sequence is synthesized)
ggcccccaggccctcaggcaggcttcgggggcaccccagggagaggcggccccggaaacagactcttcaccgccgagccccagcgtgtcctccgaggaggtggcagtggcggccgccccg

SEQ ID NO: 259514 - DNA, 120 bp, Artificial Sequence
  ENSG00000125089_8 (sequence is synthesized)
gagcctttgattccatttcatcagtgggctcttaggatcccccaggaccccatcgacgatgccatgggtggccctgtgatgcccggcaacccgctgatggctgtgggcctggcctcggca

SEQ ID NO: 259515 - DNA, 120 bp, Artificial Sequence
  ENSG00000125089_9 (sequence is synthesized)
ttggcagacttccagggctcggggcccgaagagatgaccttccgaggtggcgacctcatcgagatccttggggcgcaggtgcccagcctgccctggtgcgtgggccgacacgcagcctcg

SEQ ID NO: 259516 - DNA, 120 bp, Artificial Sequence
  ENSG00000125089_10 (sequence is synthesized)
ggccgggtggggtttgtgcggagcagcctcatcagcatgcagggccccgtgtccgagttggaaagtgcgatttttctcaatgaggaagaaaagtcattcttcagcgagggctgcttttct

SEQ ID NO: 259517 - DNA, 120 bp, Artificial Sequence
  ENSG00000125089_11 (sequence is synthesized)
gaggaggatgccaggcagttgctgaggcggatgtcgggcaccgatgtctgcagcgtgtacagcctggactcagtagaggaagctgagaccgagcagccgcaggaaaaagaaatacctcca

SEQ ID NO: 259518 - DNA, 120 bp, Artificial Sequence
  ENSG00000125089_12 (sequence is synthesized)
ccttgcctgagcctggagccacaggagaccttgcagaaggtgaagaatgttctggaacaatgcaagacctgcccaggctgcccccaggagccagcgtcctggggtctctgtgcggcatcc

SEQ ID NO: 259519 - DNA, 120 bp, Artificial Sequence
  ENSG00000125089_13 (sequence is synthesized)
agcgacgtgagcttgcaggaccccgaggagccctccttctgcttggaagccgaggacgactgggaggacccagaggccctgagctcactgctgctgttcctgaacgcccctgggtacaag

SEQ ID NO: 259520 - DNA, 120 bp, Artificial Sequence
  ENSG00000125089_14 (sequence is synthesized)
gccagcttccgtggcctgtacgatgtggcgctgccgtggctgagcagcgtgttccgcagcttcagcgacgaggaggagctgactgggcgcctggcacaggcccggggggcggccaagaaa

SEQ ID NO: 259521 - DNA, 120 bp, Artificial Sequence
  ENSG00000125089_15 (sequence is synthesized)
gctggcctcctcatggccctggccaggctctgcttcctcctggggcggctgtgcagcaggaggctcaagctgtcccaggcccgggtgtactttgaggaagcgctgggggccctggagggc

SEQ ID NO: 259522 - DNA, 120 bp, Artificial Sequence
  ENSG00000125089_16 (sequence is synthesized)
agcttcggggacctgttcctagtggtggctgtgtacgccaacctggccagcatttaccggaagcagaagaaccgggagaagtgtgcacaggtggtgcccaaagccatggccctgctcctg

SEQ ID NO: 259523 - DNA, 120 bp, Artificial Sequence
  ENSG00000125089_17 (sequence is synthesized)
cctgcttcctgctggccaggcaccacgtgcacctcaagcagcccgaggaggccctgcccttcctagagcggctgctgcttttgcacagggactcgggagccccagaggccgcgtggctct

SEQ ID NO: 259524 - DNA, 120 bp, Artificial Sequence
  ENSG00000125089_18 (sequence is synthesized)
cagactgctacctactcctggctgacatctacagccgcaagtgcctgccccacctggtgctgagctgtgtcaaggtggcctcattgcggacacggggctcgctggccggctcgctgagga

SEQ ID NO: 259525 - DNA, 120 bp, Artificial Sequence
  ENSG00000125089_19 (sequence is synthesized)
gtgtgaacctggtgctccagaacgccccccagccccacagcctccctgcccaaacttcccactacctcaggcaagcgctggcctccctgaccccgggcacaggccaggcgctgcgcggcc

SEQ ID NO: 259526 - DNA, 120 bp, Artificial Sequence
  ENSG00000125089_20 (sequence is synthesized)
ccctctacaccagcttggcccagctgtacagccaccatggctgccacggcccggccatcaccttcatgacgcaggcagtggaagccagtgctattgccggagtccgtgccatcgtggacc

SEQ ID NO: 259527 - DNA, 120 bp, Artificial Sequence
  ENSG00000125089_21 (sequence is synthesized)
acctggtggccctggcctggctgcacgtgcttcatgggcagagcccggtggccctggacatcctgcagtctgtccgggatgcagtggtggccagcgaggaccaggagggcgtgattgcca

SEQ ID NO: 259528 - DNA, 120 bp, Artificial Sequence
  ENSG00000125089_22 (sequence is synthesized)
acatggtggccgtggctctgaagaggacgggccggacgaggcaggcagctgagagctactaccgcgccctgcgggtggctcgggacctgggccagcaaaggaaccaggcagtggggctgg

SEQ ID NO: 259529 - DNA, 120 bp, Artificial Sequence
  ENSG00000125089_23 (sequence is synthesized)
ccaacttcggggccctgtgcctgcatgcgggtgccagcaggctggcccagcactacctcctggaggccgtgcggctgttctcgaggctgccccttggggagtgtggccgggacttcaccc

SEQ ID NO: 259530 - DNA, 120 bp, Artificial Sequence
  ENSG00000125089_24 (sequence is synthesized)
acgtgctcctgcagctgggccatctctgcacccgccagggcccggcccagcagggcaagggctactacgagtgggcccttctggtcgccgtggagatgggccacgtggagagccagctgc

SEQ ID NO: 259531 - DNA, 120 bp, Artificial Sequence
  ENSG00000125089_25 (sequence is synthesized)
gggccgtccagcggctgtgccacttctacagcgccgtcatgcccagcgaggcccagtgtgtcatctaccatgagctccagctctccctggcctgcaaggtggccgacaaggtgctggagg

SEQ ID NO: 259532 - DNA, 120 bp, Artificial Sequence
  ENSG00000125089_26 (sequence is synthesized)
ggcagctcctggagaccatcagccagctctacctgtccctgggcaccgagcgggcctacaaatccgcactggactacaccaaacgaagtctggggattttcattgacctccagaagaaag

SEQ ID NO: 259533 - DNA, 120 bp, Artificial Sequence
  ENSG00000125089_27 (sequence is synthesized)
agaaggaggcgcatgcctggctgcaagcagggaagatctattacatcttgcggcagagcgagctggtggacctctacatccaggtggcacagaacgtggccctgtacacaggcgacccca

SEQ ID NO: 259534 - DNA, 120 bp, Artificial Sequence
  ENSG00000125089_28 (sequence is synthesized)
acctggggctggagctgtttgaggcggctggagacatcttcttcgacggggcctgggagcgggagaaagctgtgtccttctaccgggaccgggccctgcccctggcagtgactacgggca

SEQ ID NO: 259535 - DNA, 120 bp, Artificial Sequence
  ENSG00000125089_29 (sequence is synthesized)
accgcaaggcggagctgcggctgtgcaacaagctggtggcactgctggccacgctggaggagccccaggagggcttggagtttgcccacatggccctagcactcagcatcaccctggggg

SEQ ID NO: 259536 - DNA, 120 bp, Artificial Sequence
  ENSG00000125089_30 (sequence is synthesized)
accggctgaacgagcgcgtggcctaccaccggctggccgccctgcaacaccgactgggccatggcgagctggcagagcacttctacctcaaggccctgtcgctctgcaactcgccgctgg

SEQ ID NO: 259537 - DNA, 120 bp, Artificial Sequence
  ENSG00000125089_31 (sequence is synthesized)
agtttgacgaggagaccctctactacgtgaaggtgtacctggtgctcggtgacatcatcttctacgacctgaaggacccgtttgatgcagccgggtactaccagctggcgctggcagccg

SEQ ID NO: 259538 - DNA, 120 bp, Artificial Sequence
  ENSG00000125089_32 (sequence is synthesized)
ccgtggacctgggcaacaagaaggcacagctgaagatctacacgcggctggccaccatctaccacaacttcctcctggaccgtgagaagtcgctcttcttctaccagaaggccaggacct

SEQ ID NO: 259539 - DNA, 120 bp, Artificial Sequence
  ENSG00000125089_33 (sequence is synthesized)
tcgccacagagctcaacgtccgcagggtcaacctgcctcctctgccactctgcgggtgggccccctggttggcccccagccaccctcgctgaggacagcatccaagggagtgggttttgt

SEQ ID NO: 259540 - DNA, 120 bp, Artificial Sequence
  ENSG00000125089_34 (sequence is synthesized)
gcaagggctgggggtctcctgcctctcctggtgtcgccggtggctcattttctggcaaatggaggcacgaacgcaggggccaaatagcaataaatgggttttgttttttttttgcaataa

SEQ ID NO: 259541 - DNA, 120 bp, Artificial Sequence
  ENSG00000125089_35 (sequence is synthesized)
gggcctgggagctgcctctgaggaacacgccgcaggcgacggagcactgttccgggagcacggtctgttgggtgtgacggcccagcaaagaggcagtgaccggctcctgaggaggggcac

SEQ ID NO: 259542 - DNA, 120 bp, Artificial Sequence
  ENSG00000125089_36 (sequence is synthesized)
aaggcacccaggggttctgcctcgacagggaaggggactccaggcagaaaaccagcgagaggaggccccgtggaggaagggagcacagcaaacccgagatagggaggggaggcgcagcag

SEQ ID NO: 259543 - DNA, 120 bp, Artificial Sequence
  ENSG00000125089_37 (sequence is synthesized)
ctcttttcttgcagagagacctggagcgtttggcgccttcagaggagccaggcctttgcttggtctcccctaatcctgggaacctgctgtgttgcagacgaggctcctcctgcccgcgtg

SEQ ID NO: 259544 - DNA, 120 bp, Artificial Sequence
  ENSG00000125089_38 (sequence is synthesized)
ggagtcagggggagggaggggctgaggtgcagtgtctgagactggggacacaggaggcaggcctcagagagcgagagccactcaggacagtggtggccttggaggggcggctgtgatacc

SEQ ID NO: 259545 - DNA, 120 bp, Artificial Sequence
  ENSG00000125089_39 (sequence is synthesized)
cagtgggtggcgagggcttgtttctcccacttgctttgtggagggcactgtgatcgtccctctgctctcccacagccccagcaacaggggacctcgagctgtccctttctccacctgccc

SEQ ID NO: 259546 - DNA, 120 bp, Artificial Sequence
  ENSG00000125089_40 (sequence is synthesized)
tccacccacaaggactgtcaaagtctctttgatggggagttaaggacaagtgtgaagttagtcttattttttctggtgacaaagccagcctcctgtgggcttctgcacataccagccttc

SEQ ID NO: 259547 - DNA, 120 bp, Artificial Sequence
  ENSG00000125089_41 (sequence is synthesized)
ctaccagaaggccaggaccttcgccacagagctcaacgtccgcagggtcaacctgcctcctctgccactctgcgggccactgtgcgcggaggtgggggctgctagtgcccccattcgcca

SEQ ID NO: 259548 - DNA, 120 bp, Artificial Sequence
  ENSG00000125089_42 (sequence is synthesized)
gtgaagaaatagagacacagagaggttaactgtctggcccaccatcacacagacgcagagcccagtgcgctgaccacaccaccctgccggcctgctgccaggaaggtgcccccattagga

SEQ ID NO: 259549 - DNA, 120 bp, Artificial Sequence
  ENSG00000125089_43 (sequence is synthesized)
caggagagccacagggcggtgagggtggcccaggggatcccccactaagtgtcctctggtcccagacttggctgggctgagcctgaccagtcccacctccagccactggtcagtcctgtg

SEQ ID NO: 259550 - DNA, 120 bp, Artificial Sequence
  ENSG00000125089_44 (sequence is synthesized)
ggaagtgagatgcagggatctctgcctgtgtagacgctgctgcccagtgttgaaagccttttctgggctgcccctcagccctccccatgtacccctccccttccggcccccggccctcat

SEQ ID NO: 259551 - DNA, 120 bp, Artificial Sequence
  ENSG00000125089_45 (sequence is synthesized)
aacactccagcccgcaacaccagcaccctgcaacatctcagccctcaatacctgcacccagcaatgctctcaccctgcaacatcgacactagctcaacctggcaggggaccagaggtact

SEQ ID NO: 259552 - DNA, 120 bp, Artificial Sequence
  ENSG00000125089_46 (sequence is synthesized)
ctgtgccccccgcccgggacaaacacttggggcctggacacagcaatggccttacccttgcacccgatgatctcaagcaaccttgagtgggaagtcctgtccccatcttacagatgagga

SEQ ID NO: 259553 - DNA, 120 bp, Artificial Sequence
  ENSG00000125089_47 (sequence is synthesized)
aactgaggctcagagaggcacagggacacgtcaaaggacacacggcatgccagtgggaggcccagggccagggcccaggtctgcatgcaccccgaagcggggacggcttcccccttcctc

SEQ ID NO: 259554 - DNA, 120 bp, Artificial Sequence
  ENSG00000125089_48 (sequence is synthesized)
tgagctcatggtgtggctcagccctgggcacagataaatgtcgtgtttttagagcagagaggagtgcaggctccccccagtcagacccctggtgcccaggcgggaggggctggtttgagg

SEQ ID NO: 259555 - DNA, 120 bp, Artificial Sequence
  ENSG00000125089_49 (sequence is synthesized)
ctgccgggtgtagctggatgggcctcaggtgactcttcagcccctagcttgggtgtctgaaccgccctttatctcagagcacacagctgtgtcgaggcccaggggtagctggggcgtggg

SEQ ID NO: 259556 - DNA, 120 bp, Artificial Sequence
  ENSG00000125089_50 (sequence is synthesized)
aagctccgagcacatgtttgagctctgaggagggcgctgggcaaggtgggtgctgcgggaagcctgaccccacctgcctgtgtggcaggaccgggccctgcccctggcagtgactacggg

SEQ ID NO: 259557 - DNA, 120 bp, Artificial Sequence
  ENSG00000125089_51 (sequence is synthesized)
actaaaaatgtgcaccttcttgcctggacagggtgctgggctgtgtggctgtcctgaggaactgtgatagcaacagctgtggccctgcagcaggtggtgggcccgggatccagcctcccc

SEQ ID NO: 259558 - DNA, 120 bp, Artificial Sequence
  ENSG00000125089_52 (sequence is synthesized)
cggagccactgtgcccgctgagtcacttgagaggccagggcccagctcgtgtttttccagggacgcgtcagtgataacaaaactggcaaagaacgaggcaggggcctttgaacccccatg

SEQ ID NO: 259559 - DNA, 120 bp, Artificial Sequence
  ENSG00000125089_53 (sequence is synthesized)
aagggccgggccaggccaccctgtggtcaggggccgggccaggacgtgtgcccagtttcctgaattcccgggagacctgaagagtgacctaggtgatctccaggatcccctcttaccccc

SEQ ID NO: 259560 - DNA, 120 bp, Artificial Sequence
  ENSG00000125089_54 (sequence is synthesized)
atcctgagaccctgaaggggacgaggggagaggcaggggagaccaaggcctgcacggcccctcccggcaggagacagctgcggttgtgacccgtccctgggcctcgtcctcccagtgtcc

SEQ ID NO: 259561 - DNA, 120 bp, Artificial Sequence
  ENSG00000125089_55 (sequence is synthesized)
agcctcagcccagtctcctcttagctgcctatgtccctgtcttgggactccagggcttggcacatggtaggtgcttcgtcactgttcaagggattgatgaatgaaggatgtgtttggaca

SEQ ID NO: 259562 - DNA, 120 bp, Artificial Sequence
  ENSG00000125089_56 (sequence is synthesized)
tcattccaccctcaccacccgccctccatcccacccacttctccaccccacccgccccgtccatccatccctcaccaccctgcctgcctccaggcctcttggggctggggctggagtctg

SEQ ID NO: 259563 - DNA, 120 bp, Artificial Sequence
  ENSG00000125089_57 (sequence is synthesized)
ctctccatcacttctcgtttccttcccccgcgtgtgtttaacaggagccactgtgcccgctgagtcacttgagaggccagggcccagctcgtgtttttccagggacgcgtcagtgataac

SEQ ID NO: 259564 - DNA, 120 bp, Artificial Sequence
  ENSG00000125089_58 (sequence is synthesized)
ccacagggacccgggagatcggctccagccttggcctcaggttcacagcaggaaaatgggccagtgtgttagagccatgttctcaaagtgtggtccctggaccagcagagcagcatccat

SEQ ID NO: 259565 - DNA, 120 bp, Artificial Sequence
  ENSG00000125089_59 (sequence is synthesized)
caggcccgtggagccagaagctctgggggcaggccagcaagctatatggacaggcctctggatgactgtgatgcctgcgcaccttgagaaccatcggcctggatagcatctgaacactga

SEQ ID NO: 259566 - DNA, 120 bp, Artificial Sequence
  ENSG00000125089_60 (sequence is synthesized)
ctttcactcactggttgtttaggagtgtgtcatttccacatatttttgactttcccaaatttccttcactgttgatgtccagtttcacgccagtacaactgaagaacactcctgctttgg

SEQ ID NO: 259567 - DNA, 120 bp, Artificial Sequence
  ENSG00000125089_61 (sequence is synthesized)
tctcagtccttttccattcactgaggctcattgtggggcctggcacgtggcctgtcttggggaatgtcccatgggcgcttgagaggactgtgtattctgccgttgttgggtggcgtgtgt

SEQ ID NO: 259568 - DNA, 120 bp, Artificial Sequence
  ENSG00000125089_62 (sequence is synthesized)
gatagatgtccactcggcgtacctggtttctggtgttcatctccggaatgttgctgacactagaaaatcagcagctttccaccgttcccagcgccttggctttgggagaggcccgtgagc

SEQ ID NO: 259569 - DNA, 120 bp, Artificial Sequence
  ENSG00000125089_63 (sequence is synthesized)
ctgtgggtttggagcctggctgcacgggaggagcacgtgtgggaatgccaggggccggctttgagccccattcccccaacatgatgccgtgtgtggcagacgtgacatttggttttgctc

SEQ ID NO: 259570 - DNA, 120 bp, Artificial Sequence
  ENSG00000125089_64 (sequence is synthesized)
ccccagggttccatctgcgacaggggctacttgtgtccctggcctcgtcagctcgggctgaaggcggccctggtcctggccagaggggctttgtgaagcagaaatagatggcctggtgca

SEQ ID NO: 259571 - DNA, 120 bp, Artificial Sequence
  ENSG00000125089_65 (sequence is synthesized)
ggggccaagctcggctagggcctcagccctgggagttgtaaagaaggccggcctctaccatgggcatctgcaccaagctgtgcccatgtcacggtgtgctcagcggttccccgcctgtgg

SEQ ID NO: 259572 - DNA, 120 bp, Artificial Sequence
  ENSG00000125089_66 (sequence is synthesized)
ggcccaggctcacagaggtgtgaaagaggcaagcacaccgcaggggcctctgagcccagccagcctcgcttcaatgctgggaggctgacgtcttcctttttgtcttctgcccaggccagc

SEQ ID NO: 259573 - DNA, 120 bp, Artificial Sequence
  ENSG00000125089_67 (sequence is synthesized)
ccccagggggggcaccttgagggctgaggcacaggtgtggcagggcagagccctcgcacctggaggcagggccgcccatgcacatgcttagtttcctagtggtttcaccgggaatgatat

SEQ ID NO: 259574 - DNA, 120 bp, Artificial Sequence
  ENSG00000125089_68 (sequence is synthesized)
ccgaaacagctgccggattttcctggtctcctgtccaggcaggcacatctgcccagctggctcccccgtccggccgtggggcacagcccgaggtccttcactcagtgcagagctccctgc

SEQ ID NO: 259575 - DNA, 120 bp, Artificial Sequence
  ENSG00000125089_69 (sequence is synthesized)
ctggctgagctctgcttcctgtgcctcttccccctgctgaccacgagggctgcccagtgtgccctctgccttccagacatgccagacatctcgttggtccctgcatgtgccaggctgagt

SEQ ID NO: 259576 - DNA, 120 bp, Artificial Sequence
  ENSG00000125089_70 (sequence is synthesized)
ggcacattccctttctcttgtgcccttcccaccctcatcaaccacacggctctgtggctgatgaagtcccagttccccttccagcagcctgccccttaatgccgggcatcccccggtgct

SEQ ID NO: 259577 - DNA, 120 bp, Artificial Sequence
  ENSG00000125089_71 (sequence is synthesized)
gtgccagggtcgtctgtcctctagagagagggagccccagacaggccacatgccccagcgccttgtggcccagggcctggtacacaggtgtgcagccgcgtgggaatgcattgaatgcag

SEQ ID NO: 259578 - DNA, 120 bp, Artificial Sequence
  ENSG00000125089_72 (sequence is synthesized)
gctccacagcactcaccctgaaaaggggaggacaccggagacagcctgggtgggctcgcgcatctgtggggggacctggagctcaggcacgcagtgactccccaaggtaggggactctga

SEQ ID NO: 259579 - DNA, 120 bp, Artificial Sequence
  ENSG00000125089_73 (sequence is synthesized)
tgatgacacacccaggaagagttggatgtcatgtctgtgggttgcctggagccctggtgcccaggagcgcgtgggctgcatgccttttgggctctcctggttaaaaacagtgagcaaagg

SEQ ID NO: 259580 - DNA, 120 bp, Artificial Sequence
  ENSG00000125089_74 (sequence is synthesized)
caggtggctatatgtaggcacagagctgggccatccaagtccgactttgccaaagcctcacggtagatgggggcaggccttattagttctgctttgtagatgggaaagtgagtctgggag

SEQ ID NO: 259581 - DNA, 120 bp, Artificial Sequence
  ENSG00000125089_75 (sequence is synthesized)
ctgggaagggactggccagaactgcccaggtgaccgcagtgcctggaggcgagccaggtgctgccggggtctgcatgcctgccccggggagccacgtcctcacacctgcccccttggcct

SEQ ID NO: 259582 - DNA, 120 bp, Artificial Sequence
  ENSG00000125089_76 (sequence is synthesized)
aaactccaccccttcccccggggctggaggctggcctggggctggagcctgttctgacccatccagggccccccaagggtttgtcctgatgataaactgaacaaacaggatgaaggcagg

SEQ ID NO: 259583 - DNA, 120 bp, Artificial Sequence
  ENSG00000125089_77 (sequence is synthesized)
ctgcttggtggtcccccagctggggccaggcatgtgaggtctctgcgggtcatggagaacctccctgccgtgaccactgaggagccgacccccatggggaggggtcctgtgggaccctca

SEQ ID NO: 259584 - DNA, 120 bp, Artificial Sequence
  ENSG00000125089_78 (sequence is synthesized)
ctcctggagaccatcagccagctctacctgtccctgggcaccgagcggtcatctcaaccccagcagaagcagttacatgcattctgggctgttcttcctacctggtggcttttgtcatct

SEQ ID NO: 259585 - DNA, 120 bp, Artificial Sequence
  ENSG00000125089_79 (sequence is synthesized)
gacctctgcctgccccgagtcttcactcctggccttcacctgtccccttaaatgtgaccacagcagccacctgtggcttctctcccacagaagacagagccagttgtgtcacctgcttcc

SEQ ID NO: 259586 - DNA, 120 bp, Artificial Sequence
  ENSG00000125089_80 (sequence is synthesized)
ctggggcagggtttcaaggtctcacatcccacatgtggcccacttggctctcctggagcatcctgacctggtggggtaaccatggccctggccaccccacccacagggcccagtgacatt

SEQ ID NO: 259587 - DNA, 120 bp, Artificial Sequence
  ENSG00000125089_81 (sequence is synthesized)
acacaggccatgtctgggacgcgggggagatggactagcacgctcccccagccacagggcagcatgatgcccagttccctcagaaggatgtccttcgtcttttccttgccgtgtgtgttc

SEQ ID NO: 259588 - DNA, 120 bp, Artificial Sequence
  ENSG00000125089_82 (sequence is synthesized)
ttcatctgtcaccagacccacgggaggaggcagactggttccaggaggatgacagcccttgttctgacacctgtgtctgataccagggcctacaaatccgcactggactacaccaaacga

SEQ ID NO: 259589 - DNA, 120 bp, Artificial Sequence
  ENSG00000125107_0 (sequence is synthesized)
gtagagaaacaagcggagttaaccgaagagggggtcgaggagagccggagtcggggacccaggagtttcctgtgtccagcgctgccggagccgcctgaggtgccatgtttcagaacagag

SEQ ID NO: 259590 - DNA, 120 bp, Artificial Sequence
  ENSG00000125107_1 (sequence is synthesized)
taagacccctggtaaagaagaactgaagatattatacagataccagatatagcctaattacaaagaaagcattaacctgcctctgaggtgactaaaggggaataatggtgattttgcgcc

SEQ ID NO: 259591 - DNA, 120 bp, Artificial Sequence
  ENSG00000125107_2 (sequence is synthesized)
gggctcggccgcctgcttccgccccaaccagcaatgaatcttgactcgctctcgctggccttgtctcaaatcagctacctggtggacaatttaaccaagaaaaattaccgagccagccag

SEQ ID NO: 259592 - DNA, 120 bp, Artificial Sequence
  ENSG00000125107_3 (sequence is synthesized)
caggaaatacagcatattgtgaatcggcacggtcctgaggcagacaggcatttattacgctgcctattttcgcatgtggatttcagtggcgatggtaaaagcagtggcaaagatttccat

SEQ ID NO: 259593 - DNA, 120 bp, Artificial Sequence
  ENSG00000125107_4 (sequence is synthesized)
cagactcagtttctgattcaggagtgtgcgttgctgattacaaagccaaattttatctcgacgctgtcctatgccattgataatccattgcactatcagaagagtttaaagcctgcaccc

SEQ ID NO: 259594 - DNA, 120 bp, Artificial Sequence
  ENSG00000125107_5 (sequence is synthesized)
cacttatttgcccagctgagtaaagtgctcaaattaagcaaagtacaagaggtaatttttggccttgccctgttgaattcttccagctcagatcttagaggtttcgctgcccagtttatc

SEQ ID NO: 259595 - DNA, 120 bp, Artificial Sequence
  ENSG00000125107_6 (sequence is synthesized)
aaacagaagcttccagatcttctgcgttcttacattgacgcagacgtcagtggaaatcaagaaggtggcttccaagatatagcaatagaggtcctacacctcctcctctcccatctcctc

SEQ ID NO: 259596 - DNA, 120 bp, Artificial Sequence
  ENSG00000125107_7 (sequence is synthesized)
tttgggcagaagggagcctttggagttggacaagaacagatagacgcttttcttaagacgctgcgcagagattttccccaagaacgctgtcccgtggtgctcgcaccacttttataccct

SEQ ID NO: 259597 - DNA, 120 bp, Artificial Sequence
  ENSG00000125107_8 (sequence is synthesized)
gaaaaacgggacattctaatggacaggatcctgcctgattccggaggggtagctaaaaccatgatggagagctctttggctgatttcatgcaagaagtaggctatggcttttgtgcaagt

SEQ ID NO: 259598 - DNA, 120 bp, Artificial Sequence
  ENSG00000125107_9 (sequence is synthesized)
attgaagaatgtcgcaatataatcgtgcagtttggtgttcgggaggtcacagctgcccaggttgcaagggttttgggaatgatggctcgaactcattcaggattaacagatggcattcca

SEQ ID NO: 259599 - DNA, 120 bp, Artificial Sequence
  ENSG00000125107_10 (sequence is synthesized)
ttacagagtatttctgctccgggcagtgggatctggagtgatgggaaagataaaagtgatggagcacaggcacacacatggaatgtagaagtcttgattgacgttcttaaagaactgaat

SEQ ID NO: 259600 - DNA, 120 bp, Artificial Sequence
  ENSG00000125107_11 (sequence is synthesized)
ccaagtttgaatttcaaggaagtaacttatgaactggaccatcctggatttcaaattcgtgacagtaaaggacttcataatgtggtttatggcattcagaggggtttgggtatggaagtg

SEQ ID NO: 259601 - DNA, 120 bp, Artificial Sequence
  ENSG00000125107_12 (sequence is synthesized)
ttcccagtagacctcatatatagaccttggaaacatgctgaaggccagctctccttcattcaacattcccttataaatccagagatcttctgttttgctgactatccctgtcatactgtt

SEQ ID NO: 259602 - DNA, 120 bp, Artificial Sequence
  ENSG00000125107_13 (sequence is synthesized)
gccactgatattctgaaagcaccaccagaggatgacaatcgagaaattgccacatggaagagcttggatttgattgaatctctgctgaggcttgcagaggttgggcagtatgagcaagtc

SEQ ID NO: 259603 - DNA, 120 bp, Artificial Sequence
  ENSG00000125107_14 (sequence is synthesized)
aaacagctcttcagcttccctatcaaacactgtccagacatgctggtattggccttactacaaattaacacctcttggcataccttgcgccatgaacttatctccactctgatgccaatt

SEQ ID NO: 259604 - DNA, 120 bp, Artificial Sequence
  ENSG00000125107_15 (sequence is synthesized)
ttccttggaaaccatcctaactcagctattattttgcactatgcatggcatgggcagggacagtctccctcaattcgccaacttatcatgcatgcaatggcagaatggtacatgagaggg

SEQ ID NO: 259605 - DNA, 120 bp, Artificial Sequence
  ENSG00000125107_16 (sequence is synthesized)
gagcagtatgatcaggccaaattgtctcgaatacttgatgtggcccaggacttgaaggccttgtcaatgctgctaaatggtactccatttgcctttgttattgaccttgctgcacttgct

SEQ ID NO: 259606 - DNA, 120 bp, Artificial Sequence
  ENSG00000125107_17 (sequence is synthesized)
tcacgtcgtgaatacctcaaacttgataagtggctcacagataaaattcgagagcatggggagccttttatccaggcgtgtatgacttttttaaagagacggtgtccttctattttgggc

SEQ ID NO: 259607 - DNA, 120 bp, Artificial Sequence
  ENSG00000125107_18 (sequence is synthesized)
ggacttgccccagaaaaagaccagcccaaaagtgctcaacttcctccagaaactttggcgacaatgttggcctgtctgcaagcttgtgcagggagtgtttctcaggagctatcagaaact

SEQ ID NO: 259608 - DNA, 120 bp, Artificial Sequence
  ENSG00000125107_19 (sequence is synthesized)
atcctcaccatggtagccaattgcagtaatgttatgaataaggccagacaaccaccacctggagttatgccaaaaggacgtcctcctagtgctagcagcttagatgccatttctcctgtt

SEQ ID NO: 259609 - DNA, 120 bp, Artificial Sequence
  ENSG00000125107_20 (sequence is synthesized)
cagattgaccctcttgctggaatgacatctcttagtataggtggttcagctgcccctcacacccagagtatgcagggttttcctccaaatttgggttctgcattcagtacccctcagtca

SEQ ID NO: 259610 - DNA, 120 bp, Artificial Sequence
  ENSG00000125107_21 (sequence is synthesized)
ccagcaaaagcatttccacccctttcaacccccaatcagaccactgcattcagtggtattggaggactttcatcacagcttccagtaggtggtcttggcacaggcagcctgactggtata

SEQ ID NO: 259611 - DNA, 120 bp, Artificial Sequence
  ENSG00000125107_22 (sequence is synthesized)
ggaactggtgctcttggactccctgcagtgaataacgacccttttgtacagaggaaactgggcacctctggactgaatcagcctacattccagcagagtaagatgaaaccttcggacttg

SEQ ID NO: 259612 - DNA, 120 bp, Artificial Sequence
  ENSG00000125107_23 (sequence is synthesized)
tctcaggtgtggccagaggcaaaccagcactttagtaaagagatagatgatgaagcaaacagctatttccagcgaatatataatcatccaccacatccaaccatgtctgttgatgaggta

SEQ ID NO: 259613 - DNA, 120 bp, Artificial Sequence
  ENSG00000125107_24 (sequence is synthesized)
ttagaaatgctgcagagatttaaagactctactataaagagggaacgagaagtatttaactgtatgctaaggaacttgtttgaagaatatcgtttttttccccagtatcctgataaagag

SEQ ID NO: 259614 - DNA, 120 bp, Artificial Sequence
  ENSG00000125107_25 (sequence is synthesized)
ttacatataacagcctgcctatttggtggtataattgagaaaggactggtcacttacatggcactaggtctggctctacgatatgttcttgaagccttacgcaagccttttggatccaaa

SEQ ID NO: 259615 - DNA, 120 bp, Artificial Sequence
  ENSG00000125107_26 (sequence is synthesized)
atgtattatttcgggattgctgcactagatagatttaaaaacagattgaaggactatccccagtattgtcagcatttggcttctatcagtcactttatgcaatttccacatcatttacag

SEQ ID NO: 259616 - DNA, 120 bp, Artificial Sequence
  ENSG00000125107_27 (sequence is synthesized)
gagtatattgagtatggacagcagtctagagatcctcctgtgaaaatgcaaggctctatcacaacccctggaagtattgcactggctcaggcccaggctcaggcccaggttccagcaaaa

SEQ ID NO: 259617 - DNA, 120 bp, Artificial Sequence
  ENSG00000125107_28 (sequence is synthesized)
gctcctcttgctggtcaagttagcactatggtaaccacctcaacaactaccactgttgctaaaacggttacggtcaccaggccaactggagtcagctttaagaaagatgtgccaccttct

SEQ ID NO: 259618 - DNA, 120 bp, Artificial Sequence
  ENSG00000125107_29 (sequence is synthesized)
attaatactacaaatatagatacgttgcttgtggccacagatcaaactgagagaattgtggagcccccagaaaatatccaggagaaaattgcttttattttcaataatctctcacagtca

SEQ ID NO: 259619 - DNA, 120 bp, Artificial Sequence
  ENSG00000125107_30 (sequence is synthesized)
aatatgacacaaaaggttgaagagctaaaggaaacggtgaaagaagaatttatgccttgggtttcacagtatctggttatgaagagagtcagtattgagccaaactttcatagcctgtat

SEQ ID NO: 259620 - DNA, 120 bp, Artificial Sequence
  ENSG00000125107_31 (sequence is synthesized)
tcaaacttccttgacacgctgaagaatcctgaatttaacaagatggttctgaatgagacctacagaaacattaaagtgctcctgacctctgataaagctgcagccaatttctcagatcgt

SEQ ID NO: 259621 - DNA, 120 bp, Artificial Sequence
  ENSG00000125107_32 (sequence is synthesized)
tctttgctgaagaacttgggacattggctaggaatgatcacattagctaaaaacaaacccatcttacacactgacttggatgtgaaatcattgctgctagaggcttatgttaaaggacaa

SEQ ID NO: 259622 - DNA, 120 bp, Artificial Sequence
  ENSG00000125107_33 (sequence is synthesized)
caagaattgctctatgtagtgccctttgttgccaaagtcttagaatctagcattcgtagtgtggtttttaggccaccaaacccttggacaatggcaattatgaatgtattagctgagcta

SEQ ID NO: 259623 - DNA, 120 bp, Artificial Sequence
  ENSG00000125107_34 (sequence is synthesized)
catcaggagcatgacttaaagttaaacttgaagtttgaaatcgaggttctctgcaagaaccttgcattagacatcaatgagctaaaacctggaaacctcctaaaggataaagatcgcctg

SEQ ID NO: 259624 - DNA, 120 bp, Artificial Sequence
  ENSG00000125107_35 (sequence is synthesized)
tgagcaactctctgctccaaagaaagatgtcaagcagccagaagaactccctcccatcacaaccacaacaacttctactacaccagctaccaacaccacttgtacagccacggttccacc

SEQ ID NO: 259625 - DNA, 120 bp, Artificial Sequence
  ENSG00000125107_36 (sequence is synthesized)
acagccacagtacagctaccacgacatcaatgtctattcccttgcgggcttggcaccacacattactctgaatccaacaattcccttgtttcaggcccatccacagttgaagcagtgtgt

SEQ ID NO: 259626 - DNA, 120 bp, Artificial Sequence
  ENSG00000125107_37 (sequence is synthesized)
gcgtcaggcaattgaacgggctgtccaggagctggtccatcctgtggtggatcgatcaattaagattgccatgactacttgtgagcaaatagtcaggaaggattttgccctggattcgga

SEQ ID NO: 259627 - DNA, 120 bp, Artificial Sequence
  ENSG00000125107_38 (sequence is synthesized)
ggaatctcgaatgcgaatagcagctcatcacatgatgcgtaacttgacagctggaatggctatgattacatgcagggaacctttgctcatgagcatatctaccaacttaaaaaacagttt

SEQ ID NO: 259628 - DNA, 120 bp, Artificial Sequence
  ENSG00000125107_39 (sequence is synthesized)
tgcctcagcccttcgtactgcttccccacaacaaagagaaatgatggatcaggcagctgctcaattagctcaggacaattgtgagttggcttgctgttttattcagaagactgcagtaga

SEQ ID NO: 259629 - DNA, 120 bp, Artificial Sequence
  ENSG00000125107_40 (sequence is synthesized)
aaaagcaggccctgagatggacaagagattagcaactgaatttgagctgagaaaacatgctaggcaagaaggacgcagatactgtgatcctgttgttttaacatatcaagctgaacggat

SEQ ID NO: 259630 - DNA, 120 bp, Artificial Sequence
  ENSG00000125107_41 (sequence is synthesized)
gccagagcaaatcaggctgaaagttggtggtgtggacccaaagcagttggctgtttacgaagagtttgcacgcaatgttcctggcttcttacctacaaatgacttaagtcagcccacggg

SEQ ID NO: 259631 - DNA, 120 bp, Artificial Sequence
  ENSG00000125107_42 (sequence is synthesized)
atttttagcccagcccatgaagcaagcttgggcaacagatgatgtagctcagatttatgataagtgtattacagaactggagcaacatctacatgccatcccaccaactttggccatgaa

SEQ ID NO: 259632 - DNA, 120 bp, Artificial Sequence
  ENSG00000125107_43 (sequence is synthesized)
ccctcaagctcaggctcttcgaagtctcttggaggttgtagttttatctcgaaactctcgggatgccatagctgctcttggattgctccaaaaggctgtagagggcttactagatgccac

SEQ ID NO: 259633 - DNA, 120 bp, Artificial Sequence
  ENSG00000125107_44 (sequence is synthesized)
aagtggtgctgatgctgaccttctgctgcgctacagggaatgccacctcttggtcctaaaagctctgcaggatggccgggcatatgggtctccatggtgcaacaaacagatcacaaggtg

SEQ ID NO: 259634 - DNA, 120 bp, Artificial Sequence
  ENSG00000125107_45 (sequence is synthesized)
cctaattgaatgtcgagatgaatataaatataatgtggaggctgtggagctgctaattcgcaatcatttggttaatatgcagcagtatgatcttcacctagcgcagtcaatggagaatgg

SEQ ID NO: 259635 - DNA, 120 bp, Artificial Sequence
  ENSG00000125107_46 (sequence is synthesized)
cttaaactacatggctgtggcatttgctatgcagttagtaaaaatcctgctggtggatgaaaggagtgttgctcatgttactgaggcagatctgttccacaccattgaaaccctcatgag

SEQ ID NO: 259636 - DNA, 120 bp, Artificial Sequence
  ENSG00000125107_47 (sequence is synthesized)
gattaatgctcattccagaggcaatgctccagaaggattgccccagctgatggaagtagtgcgatccaactatgaagcaatgattgatcgtgctcatggaggcccaaactttatgatgca

SEQ ID NO: 259637 - DNA, 120 bp, Artificial Sequence
  ENSG00000125107_48 (sequence is synthesized)
ttctgggatctctcaagcctcagagtatgatgaccctccaggcctgagggagaaggcagagtatcttctgagggaatgggtgaatctctaccattcagcagcagctggccgcgacagtac

SEQ ID NO: 259638 - DNA, 120 bp, Artificial Sequence
  ENSG00000125107_49 (sequence is synthesized)
caaagctttctctgcatttgttggacagatgcaccagcaaggaatactgaagaccgatgatctcataacaaggttctttcgtctgtgtactgaaatgtgtgttgaaatcagttaccgtgc

SEQ ID NO: 259639 - DNA, 120 bp, Artificial Sequence
  ENSG00000125107_50 (sequence is synthesized)
tcaggctgagcagcagcacaatcctgctgccaatcccaccatgatccgagccaagtgctatcacaacctggatgcctttgttcgactcattgcactgctcgtgaaacactcaggggaggc

SEQ ID NO: 259640 - DNA, 120 bp, Artificial Sequence
  ENSG00000125107_51 (sequence is synthesized)
caccaacactgtcacaaagattaatctgctgaacaaggtccttggtatagtagtgggagttctccttcaggatcatgatgttcgtcagagtgaatttcagcaacttccctaccatcgaat

SEQ ID NO: 259641 - DNA, 120 bp, Artificial Sequence
  ENSG00000125107_52 (sequence is synthesized)
ttttatcatgcttctcttggaactcaatgcacctgagcatgtgttggaaaccattaatttccagacacttacagctttctgcaatacattccacatcttgaggcctaccaaagctcctgg

SEQ ID NO: 259642 - DNA, 120 bp, Artificial Sequence
  ENSG00000125107_53 (sequence is synthesized)
ctttgtatatgcctggcttgaactgatttcccatcggatatttattgcaagaatgctggcacatacgccacagcagaaggggtggcctatgtatgcacagctactgattgatttattcaa

SEQ ID NO: 259643 - DNA, 120 bp, Artificial Sequence
  ENSG00000125107_54 (sequence is synthesized)
atatttagcgcctttccttagaaatgtggaactcaccaaacctatgcaaatcctctacaagggcactttaagagtgctgctggttcttttgcatgatttcccagagttcctttgtgatta

SEQ ID NO: 259644 - DNA, 120 bp, Artificial Sequence
  ENSG00000125107_55 (sequence is synthesized)
ccattatgggttctgtgatgtgatcccacctaattgtatccagttaagaaatttgatcctgagtgcctttccaagaaacatgaggctccccgacccattcactcctaatctaaaggtgga

SEQ ID NO: 259645 - DNA, 120 bp, Artificial Sequence
  ENSG00000125107_56 (sequence is synthesized)
catgttgagtgaaattaacattgctccccggattctcaccaatttcactggagtaatgccacctcagttcaaaaaggatttggattcctatcttaaaactcgatcaccagtcactttcct

SEQ ID NO: 259646 - DNA, 120 bp, Artificial Sequence
  ENSG00000125107_57 (sequence is synthesized)
gtctgatctgcgcagcaacctacaggtatccaatgaacctgggaatcgctacaacctccagctcatcaatgcactggtgctctatgtcgggactcaggccattgcgcacatccacaacaa

SEQ ID NO: 259647 - DNA, 120 bp, Artificial Sequence
  ENSG00000125107_58 (sequence is synthesized)
gggcagcacaccttcaatgagcaccatcactcactcagcacacatggatatcttccagaatttggctgtggacttggacactgagggtcgctatctctttttgaatgcaattgcaaatca

SEQ ID NO: 259648 - DNA, 120 bp, Artificial Sequence
  ENSG00000125107_59 (sequence is synthesized)
gctccggtacccaaatagccacactcactacttcagttgcaccatgctgtacctttttgcagaggccaatacggaagccatccaagaacagatcacaagagttctcttggaacggttgat

SEQ ID NO: 259649 - DNA, 120 bp, Artificial Sequence
  ENSG00000125107_60 (sequence is synthesized)
tgtaaataggccacatccttggggtcttcttattaccttcattgagctgattaaaaacccagcgtttaagttctggaaccatgaatttgtacactgtgccccagaaatcgaaaagttatt

SEQ ID NO: 259650 - DNA, 120 bp, Artificial Sequence
  ENSG00000125107_61 (sequence is synthesized)
ccagtcggtcgcacagtgctgcatgggacagaagcaggcccagcaagtaatggaagggacaggtgccagttagacgaaactgcatctctgttgtacgtgtcagtctagaggtctcactgc

SEQ ID NO: 259651 - DNA, 120 bp, Artificial Sequence
  ENSG00000125107_62 (sequence is synthesized)
accgagttcataaactgactgaagaatcctttcagctcttcctgactttcccagccctttggtttgtgggtatctgccccaactactgttgggatcagcctcctgtcttatgtgggcacg

SEQ ID NO: 259652 - DNA, 120 bp, Artificial Sequence
  ENSG00000125107_63 (sequence is synthesized)
ttccaaagtttaaatgcatttttttgactcttggccaaaatttagaagatgctgtgaatatcattttgaacttgtgtaaatacatgaaagagaaaacctttgtctggaacttcttggctt

SEQ ID NO: 259653 - DNA, 120 bp, Artificial Sequence
  ENSG00000125107_64 (sequence is synthesized)
tgtgcaagctgtgtccaaggcaagtacataaactggtaccttgtaatgaagaggcagctgatgccatgcacttgtctgagggcatagctccatgtcttctgacattcctggtgtcccaaa

SEQ ID NO: 259654 - DNA, 120 bp, Artificial Sequence
  ENSG00000125107_65 (sequence is synthesized)
gaatagcaaaaagccagtttgaatattatgtaacttatttttttaatgtggacaggggaccttgaaaatcactaagttattaaaaatgtggatgtgctagaattggatatgtccaggaac

SEQ ID NO: 259655 - DNA, 120 bp, Artificial Sequence
  ENSG00000125107_66 (sequence is synthesized)
atgggaagggctcactattggaatcccatgagtttccattttgtctctacccaaacgtattccaaagctgactgcatttgtaccatcttatttcttttggggattatacacctcagccgc

SEQ ID NO: 259656 - DNA, 120 bp, Artificial Sequence
  ENSG00000125107_67 (sequence is synthesized)
ctgagatgggggtcagctctttatataaagggaaaccagaccaggcctaaagcccacccctaccctcacccccccaatcctctcctgaaacttaaaaacagtgggaatataggaaaggga

SEQ ID NO: 259657 - DNA, 120 bp, Artificial Sequence
  ENSG00000125107_68 (sequence is synthesized)
accaaatctcattaattaattgttctcccccattaccccactgaatgaatggccatacaggctaagctgaataatgacaaagttgaaaggaccaatacagccccttttataaggattttg

SEQ ID NO: 259658 - DNA, 120 bp, Artificial Sequence
  ENSG00000125107_69 (sequence is synthesized)
aatgttttgcaaatgtattggtccctgtgttgtattttgtagccttttcctgggcttcagctcccctacttcttgtatgtgtatgcatactgtagctaaccattaaagtcatgacacaca

SEQ ID NO: 259659 - DNA, 120 bp, Artificial Sequence
  ENSG00000125107_70 (sequence is synthesized)
aaatgggaacggggaggggaaaggccgcgacgtgagcgcgcgacctccggcgccattttgtagagaaacaagcggagttaaccgaagagggggtcgaggagagccggagtcggggaccca

SEQ ID NO: 259660 - DNA, 120 bp, Artificial Sequence
  ENSG00000125107_71 (sequence is synthesized)
ggagtttcctgtgtccagcgctgccggagccgcctgaggtgaccagcacccatgcagaaactacctagaagttgccaagctatcagtcaactcagcatacaaaaagaaacttaccattct

SEQ ID NO: 259661 - DNA, 120 bp, Artificial Sequence
  ENSG00000125107_72 (sequence is synthesized)
aagaaaaagggagtaaacatactagtagacctctatttgatacatgtgtcaataaaaaaccttaacattcttttgtctcttgttggttgtttccttctgtaaaacagcaagcttgggcaa

SEQ ID NO: 259662 - DNA, 120 bp, Artificial Sequence
  ENSG00000125107_73 (sequence is synthesized)
taatatgtaaacatacccgctctgtcttagaatatagtgccttaaccgaaatacaaaaagagatcataatgtatttcagtatgttaatgcttggtagtatgaatttgccccatatacaga

SEQ ID NO: 259663 - DNA, 120 bp, Artificial Sequence
  ENSG00000125107_74 (sequence is synthesized)
atcactgtgagtgggtggctagacgtgcctcctgctgatagattggcaactcaagtacatgagtgatattagtcattggcttgatttacacagtggagttcctggaaatttgaatattaa

SEQ ID NO: 259664 - DNA, 120 bp, Artificial Sequence
  ENSG00000125107_75 (sequence is synthesized)
aacaatgcaaaaatacttgtaaaaatggactgtgattttggatttgggaaattagagatgtgttcttcaagcccctcactgttcagtgggcaagtcaagtggaatgggatctctgcagcc

SEQ ID NO: 259665 - DNA, 120 bp, Artificial Sequence
  ENSG00000125107_76 (sequence is synthesized)
taacagctttcctggcccctgcctactaaatgccaagataggagtaaatcattcccacatgtcaacttcatgtcagaccagacaaattagattgttatattgtgttaacatggtgaaatg

SEQ ID NO: 259666 - DNA, 120 bp, Artificial Sequence
  ENSG00000125107_77 (sequence is synthesized)
tgaggggccttgctgatttctagagctgaagaagaaccattgggcatttgtggagaatattcaggtgtggtccaaggatgttgaaatgcaaagaaacacacaaaacactgaaggcggagt

SEQ ID NO: 259667 - DNA, 120 bp, Artificial Sequence
  ENSG00000125107_78 (sequence is synthesized)
cagaccaatttatgaccctatcggctgccagcatgtaattttgtattcaaattgtatatatgctttcctttaatgttgggtttaagaatgcaaagtttaaaaagcatgacatcgaagtgg

SEQ ID NO: 259668 - DNA, 120 bp, Artificial Sequence
  ENSG00000125107_79 (sequence is synthesized)
actgcttgtctgtaataatttttttctttgtctatatatggcactgggcgttaccacttattcttaataatcaccatatttgtttgatgtcttccatcattttagattgtaattctgtga

SEQ ID NO: 259669 - DNA, 120 bp, Artificial Sequence
  ENSG00000125107_80 (sequence is synthesized)
ggcaaagcatcatgtctgtgtgtttttttttttttctgttatattctcaacacgatgtttgacagatagtagatacccaaatatttgttggtttaaataaattaagatttaaaaaggaaa

SEQ ID NO: 259670 - DNA, 120 bp, Artificial Sequence
  ENSG00000125107_81 (sequence is synthesized)
tagagaaacaagcggagttaaccgaagagggggtcgaggagagccggagtcggggacccaggagtttcctgtgtccagcgctgccggagccgcctgagatggagtcttgctctgttgccc

SEQ ID NO: 259671 - DNA, 68 bp, Artificial Sequence
  ENSG00000125107_82 (sequence is synthesized)
gccacctcgcctggctaattttttgtattcttagttgagacaggatggccttggcctcccagagtgct

SEQ ID NO: 259672 - DNA, 120 bp, Artificial Sequence
  ENSG00000125107_83 (sequence is synthesized)
tattagcatgaagaagataagtcagtgtagctgcttgggcgacttgtagtggctgaaaaacagctgagtataattatgactcatgtacatttctttctttcaggggtggcctatgtatgc

SEQ ID NO: 259673 - DNA, 120 bp, Artificial Sequence
  ENSG00000125107_84 (sequence is synthesized)
aggaaatacagcatgtaagtaaactagccagaaaacaagtgccattaaaggaatgagtagacagtggaaagaaaaccacacatttatgtgggcatgttgcatgaaaggtaactaactttt

SEQ ID NO: 259674 - DNA, 120 bp, Artificial Sequence
  ENSG00000125107_85 (sequence is synthesized)
tatgtgggcatgttgcatgaaaggtaactaacttttgccccttaattcaagtgatttctgtcatcatcatctgtaaaagagctcttagcccaatcttttttttttttttttttttgagac

SEQ ID NO: 259675 - DNA, 120 bp, Artificial Sequence
  ENSG00000125122_0 (sequence is synthesized)
gttcctcctttgggccactctgtccctttagcttgggggaccgtcctccccttccctatcggccccagaagatagctgccctgtcatctccgcgagaacaggccctctgcccatcccctt

SEQ ID NO: 259676 - DNA, 120 bp, Artificial Sequence
  ENSG00000125122_1 (sequence is synthesized)
cccttgaagtggctgtctcctccccgctcagttctggaagatgtccgctccatctcatcgtcccgaaggatgctcacatatattctgagcttcctgcctctgtcagatcagaaagaggcc

SEQ ID NO: 259677 - DNA, 120 bp, Artificial Sequence
  ENSG00000125122_2 (sequence is synthesized)
tccctcgtgagttgggcttggtaccgtgctgcccagaatgcccttcgggagcaaccaggccttacctccctggacctcagtggctgctcagaactgactgatggggcgctcttggccgtg

SEQ ID NO: 259678 - DNA, 120 bp, Artificial Sequence
  ENSG00000125122_3 (sequence is synthesized)
agccggggcctgcggcacctgcggcgcctgagcctggggaagctgcagcggctgacagatgcaggatgtacagctctgggtggcctgcaggagctgcagagcctcgacatggccgagggc

SEQ ID NO: 259679 - DNA, 120 bp, Artificial Sequence
  ENSG00000125122_4 (sequence is synthesized)
gggaactggcccaggccctgggctgtatgcacggggctccatcccagctggcctccctcagcctggcccactgctcttcattgaagtcacgcccagagctggagcatcaggcctcaggta

SEQ ID NO: 259680 - DNA, 120 bp, Artificial Sequence
  ENSG00000125122_5 (sequence is synthesized)
ccaaggacgcctgtccagagccacagggcccctccctgctcacgctgcgggccctgcaggagttggacctcacagcctgcagcaagctgactgatgccagtttagccaaggtgctccagt

SEQ ID NO: 259681 - DNA, 120 bp, Artificial Sequence
  ENSG00000125122_6 (sequence is synthesized)
cctgttgccagaactcacagacaacggcttggttgctgtggccaggggctgtcctagcctggagcacttggcgctgagtcactgcagccgactcagtgacaagggctgggcccaggcagc

SEQ ID NO: 259682 - DNA, 120 bp, Artificial Sequence
  ENSG00000125122_7 (sequence is synthesized)
cagctcctggccaaggctgcagcatctcaacctgtccagctgcagtcagctcatagagcagacactggatgctattgggcaggcgtgcaggcagctccgggtgttggatgtggccacgtg

SEQ ID NO: 259683 - DNA, 120 bp, Artificial Sequence
  ENSG00000125122_8 (sequence is synthesized)
ccctggcatcaacatggccgccgtcagacgcttccaagcccagctgccccaggtgtcctgtgtccagtcccgcttcgtgggaggggctgacctgaccctaacactctgaggccagaccct

SEQ ID NO: 259684 - DNA, 120 bp, Artificial Sequence
  ENSG00000125122_9 (sequence is synthesized)
ctaggactgggggtggggccaatccagggcagcccagagggaacatcctgccacaccgcctggcagtagcctctttccagctacacgtcgctgccacaggcccctggaaatgctacctac

SEQ ID NO: 259685 - DNA, 120 bp, Artificial Sequence
  ENSG00000125122_10 (sequence is synthesized)
gtgttgccgccacaggctcctgctctctggccaagccctgggtgggaggccaggcccccagcgggcagggtctggtgctgggaggagcagagcctctgcctcttgcctgccctcctctca

SEQ ID NO: 259686 - DNA, 120 bp, Artificial Sequence
  ENSG00000125122_11 (sequence is synthesized)
gacctaaggccgggctccacctactcctgtgggactctcccagcaccctgtgtgcactgagcttcagcagctgagcctaggtctgtgctgtaaatcctaagattaaacattccagatagt

SEQ ID NO: 259687 - DNA, 120 bp, Artificial Sequence
  ENSG00000125122_12 (sequence is synthesized)
acatttcccagaaagccttgcgcagtgggggcggaggcggcagggatgcgatggcggagtcgctgcccctggagatgctcacatatattctgagcttcctgcctctgtcagatcagaaag

SEQ ID NO: 259688 - DNA, 120 bp, Artificial Sequence
  ENSG00000125122_13 (sequence is synthesized)
aggcctccctcgtgagttgggcttggtaccgtgctgcccagaatgcccttcgggagtgacttgtcaccaaacccaatgcccagcaccctctgaagccagagggctacccccaggcctgct

SEQ ID NO: 259689 - DNA, 120 bp, Artificial Sequence
  ENSG00000125122_14 (sequence is synthesized)
gccatcaagagcctgggcctcaggggcatctgctgcatcagcctgaccaacctggatggctctctggcttcacaccaggtgctacaatctgttgcttaccacctgggcccacacctgcag

SEQ ID NO: 259690 - DNA, 120 bp, Artificial Sequence
  ENSG00000125122_15 (sequence is synthesized)
agcttgtccctgggtggaggcagccccacagaggcctcctctgtggccctgatcctgggctgcccagccctgtgtgtccttgacctcagtggctgcaatagcctcttcacctcgggcaca

SEQ ID NO: 259691 - DNA, 120 bp, Artificial Sequence
  ENSG00000125122_16 (sequence is synthesized)
ccagcaggctttgagcggcctccgtgagctcaacctggctggcctgcgagacctggctgacctcagcttcaaccagctcagcagctgtgcccccagcctggagcgcctctccttggcata

SEQ ID NO: 259692 - DNA, 120 bp, Artificial Sequence
  ENSG00000125122_17 (sequence is synthesized)
ctgccacctcaccttcgagctaggcccagcctgaggctccatcggcccccaagactcctctcccgcccagttctccttctgcaacctgctgcgattagtgcaagagcgggctggcaggct

SEQ ID NO: 259693 - DNA, 120 bp, Artificial Sequence
  ENSG00000125122_18 (sequence is synthesized)
gcgtgccctggacctgagtggcactggcttgccccccgaggccctgcaggctctgggccaggtagctgggctgcagcttcaggagctgagcctgcacagctgccgggacctctccacaga

SEQ ID NO: 259694 - DNA, 120 bp, Artificial Sequence
  ENSG00000125122_19 (sequence is synthesized)
agggtgctagacctgtcctcctgtgtggccctcaccaacaggaccctgcaggccatctgcacctacctcacccacctctcagtcctgcgcctggcgtggtgcagggagctctgtgactgg

SEQ ID NO: 259695 - DNA, 120 bp, Artificial Sequence
  ENSG00000125122_20 (sequence is synthesized)
gggcttcgggggctgggggagcctgtgcaggggacccaggtgtgggaccctcgaggtcttggaggacggggtggcccctgggatcagctgccctcctgcccctcccaagtctctgtagga

SEQ ID NO: 259696 - DNA, 120 bp, Artificial Sequence
  ENSG00000125122_21 (sequence is synthesized)
gtatttaagggcaaactcaggaggaacctgagaagcaaaggcttcttcccacagtcacgcccagagctggagcatcaggcctcaggtaccaaggacgcctgtccagagccacagggcccc

SEQ ID NO: 259697 - DNA, 120 bp, Artificial Sequence
  ENSG00000125124_0 (sequence is synthesized)
aggcggtacctggacgggttcgtcccgggctgtttcgcgtccggcctgaggcggctggggccgcgcaggtagtgtccctgcacttcttgcccgggcgcgtgaggccagctccgctgcgct

SEQ ID NO: 259698 - DNA, 120 bp, Artificial Sequence
  ENSG00000125124_1 (sequence is synthesized)
tgtctccagcttccagccctcctcccctaagccgccgccatcatgctgctgcctgtgttcaccctgaaactgcgccacaaaatcagcccccgaatggtggccatagggcgctacgacggg

SEQ ID NO: 259699 - DNA, 120 bp, Artificial Sequence
  ENSG00000125124_2 (sequence is synthesized)
actcacccgtgcctggcggccgccacccaaacgggcaaggtttttattcataatcctcatacacggaaccagcatgtcagtgcatccagggtcttccagagccccctggaatctgatgtt

SEQ ID NO: 259700 - DNA, 120 bp, Artificial Sequence
  ENSG00000125124_3 (sequence is synthesized)
tctcttctcagcattaaccaggcagtcagctgtctgactgcaggcgtattgaaccctgagcttggctatgatgcccttttagtggggacacagactaatcttttggcttatgatgtctac

SEQ ID NO: 259701 - DNA, 120 bp, Artificial Sequence
  ENSG00000125124_4 (sequence is synthesized)
aataattcggatttgttctacagagaggtagcagatggggcaaatgcaattgtgctggggacattgggagacatttcttcccctcttgcgattattggtggcaattgtgctctgcaaggt

SEQ ID NO: 259702 - DNA, 120 bp, Artificial Sequence
  ENSG00000125124_5 (sequence is synthesized)
ttcaatcatgaaggaagtgatctcttttggacggttactggagacaatgttaattccttggccttgtgtgactttgatggtgatggaaagaaagagcttcttgttggatctgaggatttt

SEQ ID NO: 259703 - DNA, 120 bp, Artificial Sequence
  ENSG00000125124_6 (sequence is synthesized)
gatatccgagtttttaaggaagatgagattgtggcagaaatgacagaaacagagatagtcacctctctttgtcccatgtatggcagtcgatttggttatgccctttccaatggcacagtt

SEQ ID NO: 259704 - DNA, 120 bp, Artificial Sequence
  ENSG00000125124_7 (sequence is synthesized)
ggagtttatgacaaaacatcccgatactggagaattaaatcgaaaaatcatgccatgagcattcatgcttttgaccttaattctgatggagtgaatgaactgataactggttggtccaat

SEQ ID NO: 259705 - DNA, 120 bp, Artificial Sequence
  ENSG00000125124_8 (sequence is synthesized)
gggaaggttgatgctcgaagtgaccgaactggggaggtcatctttaaggacaatttttcttctgcaattgccggtgtggtagagggagattaccggatggatggccacatacagttaatc

SEQ ID NO: 259706 - DNA, 120 bp, Artificial Sequence
  ENSG00000125124_9 (sequence is synthesized)
tgctgctcagtggatggggaaatccggggctacctgcctggcacggctgagatgaggggcaacctcatggacaccagtgcagagcaggacctgatccgagagctgagtcagaagaagcag

SEQ ID NO: 259707 - DNA, 120 bp, Artificial Sequence
  ENSG00000125124_10 (sequence is synthesized)
aatctgttgctggaactccgtaactatgaggaaaatgccaaggctgaattggccagtccactgaacgaggctgatgggcatcggggcataatcccagccaataccaggctccacaccacg

SEQ ID NO: 259708 - DNA, 120 bp, Artificial Sequence
  ENSG00000125124_11 (sequence is synthesized)
aatttttacaggtgaaagccacgtggtacatcccagcattcacaacctctccagttccatctgcatccctattgtgcctcccaaagatgtccctgtggatctgcacttgaaggcattcgt

SEQ ID NO: 259709 - DNA, 120 bp, Artificial Sequence
  ENSG00000125124_12 (sequence is synthesized)
gggttacagaagcagcacccagtttcatgtatttgaatcgacaagacagctccctcgattctccatgtatgcgctgaccagcctggaccctgccagtgagccaatcagttatgttaactt

SEQ ID NO: 259710 - DNA, 120 bp, Artificial Sequence
  ENSG00000125124_13 (sequence is synthesized)
taccattgcagaacgggcacagagggttgttgtatggctcggtcagaactttctgttaccagaagacactcacattcagaatgctccatttcaagtgtgtttcacatctttacggaatgg

SEQ ID NO: 259711 - DNA, 120 bp, Artificial Sequence
  ENSG00000125124_14 (sequence is synthesized)
cggccacctgcatataaaaataaaacttagtggagagatcactataaatactgatgatattgatttggctggtgatatcatccagtcaatggcatcattttttgctattgaagaccttca

SEQ ID NO: 259712 - DNA, 120 bp, Artificial Sequence
  ENSG00000125124_15 (sequence is synthesized)
agtagaagcggattttcctgtctattttgaggaattacgaaaggtgctagttaaggtggatgaatatcattcagtgcatcagaagctcagtgctgatatggctgatcattctaatttgat

SEQ ID NO: 259713 - DNA, 120 bp, Artificial Sequence
  ENSG00000125124_16 (sequence is synthesized)
ccgaagtttgctggtcggagctgaggatgctcgtctgatgagggacatgaaaacaatgaagagtcgttatatggaactctatgaccttaatagagacttgctaaatggatataaaattcg

SEQ ID NO: 259714 - DNA, 120 bp, Artificial Sequence
  ENSG00000125124_17 (sequence is synthesized)
ctgtaacaatcacacagagctgttgggaaacctcaaagcagtaaatcaagcaattcaaagagcaggtcgtctgcgggttggaaaaccaaagaaccaggtgatcactgcttgtcgggatgc

SEQ ID NO: 259715 - DNA, 120 bp, Artificial Sequence
  ENSG00000125124_18 (sequence is synthesized)
aattcgaagcaataacatcaacacactgttcaaaatcatgcgagtggggacagcttcttcctaggtgaggaaaatacaggtcatgaagttcctggcaaagattttctgttaaaaacctat

SEQ ID NO: 259716 - DNA, 120 bp, Artificial Sequence
  ENSG00000125124_19 (sequence is synthesized)
gctggtttgctttggatcacaccctggtgaaccccgggtgctaagaatgaaaataaccttggtgagttgtacaaattaaagacaaagaactacatgtgaagatagacttgctttctattt

SEQ ID NO: 259717 - DNA, 120 bp, Artificial Sequence
  ENSG00000125124_20 (sequence is synthesized)
ttaaatcagtagtagtactgttgctgaataatactaggtttttatggaataggatgaatgcttttgaagtattagggcttcagagtccaattttgcttatttatggtatataaatacata

SEQ ID NO: 259718 - DNA, 120 bp, Artificial Sequence
  ENSG00000125124_21 (sequence is synthesized)
tttttttcttgaaattgcaattgagtttgtacttttcaaatagattatctactttttcattaaaatgtaaagatgttaaactttgtgttgattgattataaaatcaccaccaaatcagaa

SEQ ID NO: 259719 - DNA, 120 bp, Artificial Sequence
  ENSG00000125124_22 (sequence is synthesized)
ggcgagcaccttgtggctccatcctgcagaggacagtggggtcttagaggaagagcttttctgagaagttgacgttttcttgtcatcaggcacttggagtcaggcgaggtttttattcat

SEQ ID NO: 259720 - DNA, 120 bp, Artificial Sequence
  ENSG00000125124_23 (sequence is synthesized)
ttgaatttgatgtaacaagggaatttgtttgcttactttaaaagaacaatacttcaaaaatgttaaagtcatgatgggatacagtggaccatacccatagaaagatgcaagggtattttc

SEQ ID NO: 259721 - DNA, 120 bp, Artificial Sequence
  ENSG00000125124_24 (sequence is synthesized)
ccacagggccagatagagcaagggagcactaatgaggtgagttctctgaattctaaagaatcagattactataataataataatatgctggaggctctgtcttttgaagctgaatagcaa

SEQ ID NO: 259722 - DNA, 120 bp, Artificial Sequence
  ENSG00000125124_25 (sequence is synthesized)
agcggacgggtctgcgccgccgcaggaggagcaggcggtacctggacgggttcgtcccgggctgtttcgcgtccggcctgaggcggctggggccgcgcaggtttttattcataatcctca

SEQ ID NO: 259723 - DNA, 120 bp, Artificial Sequence
  ENSG00000125124_26 (sequence is synthesized)
gtatgaagaagaaaacattctttttggttactggagacaatgttaattccttggccttgtgtgactttgatggtgatggaaagaaagagcttcttgttggatctgaggattttgatatcc

SEQ ID NO: 259724 - DNA, 120 bp, Artificial Sequence
  ENSG00000125124_27 (sequence is synthesized)
catgcgagtggggacagcttcttcctaggggccaagaaatgaagcttcaggcctgtgaagttggagagcagcaagaatagtgcctcagagcgaaataacttcatgcactccttcaatatc

SEQ ID NO: 259725 - DNA, 120 bp, Artificial Sequence
  ENSG00000125124_28 (sequence is synthesized)
tcaggaagcttactctcctcagctttctcataaaacctgaaaaacagcaatgtcaagttgttcatcaaagccacagatgtaaaatgactcacagaataaaagctgatcgttagctttgta

SEQ ID NO: 259726 - DNA, 120 bp, Artificial Sequence
  ENSG00000125124_29 (sequence is synthesized)
gagatcctgtagttctaataaattcaccaaagttggggagaacttaggtttttgtttttaagagcaggtaattgatgacctaaaagtatacctggttatacttgcggttttttccttctg

SEQ ID NO: 259727 - DNA, 120 bp, Artificial Sequence
  ENSG00000125124_30 (sequence is synthesized)
cagaaacagaggtaagaagctccacctcgaactatggtaaccttgagcaagatagatcagtactgtcagatgaaacatcaagtgagagtgctggggcatctccaaacccaggtggtttta

SEQ ID NO: 259728 - DNA, 120 bp, Artificial Sequence
  ENSG00000125124_31 (sequence is synthesized)
ggataaaagcttggggagggggtcagacagagctgtatgttatggtaagaaaagcaataaaaatcctaattaagatatattttgaaaagactgattaaatagagaaaaattattgcatat

SEQ ID NO: 259729 - DNA, 120 bp, Artificial Sequence
  ENSG00000125124_32 (sequence is synthesized)
agttgaatacataaaggcatttcttttaatgagttaatacatgcaaataataataatggcaatcatttattatgtacctattgtatgccaggtagtgctctaagtactttatatgaagta

SEQ ID NO: 259730 - DNA, 89 bp, Artificial Sequence
  ENSG00000125124_33 (sequence is synthesized)
acaacaaccctaataggaagataaattattattatttctatagatgaggaaaatggtgttctggcagagttttactccatcacccaggc

SEQ ID NO: 259731 - DNA, 84 bp, Artificial Sequence
  ENSG00000125124_34 (sequence is synthesized)
atagtcacctctctttgtcccatgtatggcagtcgatttggttatgccctttccaatggcacagttggagtttatgacaaaaca

SEQ ID NO: 259732 - DNA, 120 bp, Artificial Sequence
  ENSG00000125124_35 (sequence is synthesized)
gtcctaatgtgaccaggtaatggaggctgaaatgttgagactgaccgggaggatcagcaaatatggaagaatgagagtgtcattgccagggtgtggcctttttgccattgtcagaattga

SEQ ID NO: 259733 - DNA, 120 bp, Artificial Sequence
  ENSG00000125124_36 (sequence is synthesized)
gaggggatatatgctttcgtcttgaaatttcatttccaggtagttaaactgtagaaatgttttcctgattgtttaaggacatttcctgcagcactatttatttatagcagtgaaaacagc

SEQ ID NO: 259734 - DNA, 120 bp, Artificial Sequence
  ENSG00000125124_37 (sequence is synthesized)
tggaagaaacttagatgttcgtcagcagtagggagtatgtgctaaggaatattaagcagctcaaagaatgaatacttggactgatatggaaggatatctgtcgtcttaccaagtgacaaa

SEQ ID NO: 259735 - DNA, 120 bp, Artificial Sequence
  ENSG00000125124_38 (sequence is synthesized)
aggcaagaacaatatagaatgtcttttatctttttcaaaaacaaacatgttaaaaacagacaactgtaaaaactgtgtgtgtgcatacagcaaactggctgaaatattcctttaatttgt

SEQ ID NO: 259736 - DNA, 90 bp, Artificial Sequence
  ENSG00000125124_39 (sequence is synthesized)
gctcatacagaattacgcatttccacttctaatggtaagacagtactcacagctggtatttagaggcacctgtgccatcttggagtcacc

SEQ ID NO: 259737 - DNA, 120 bp, Artificial Sequence
  ENSG00000125124_40 (sequence is synthesized)
gttacagaagcaggtgaccctttgcaagtcacagttcatttcaggacagcacttagaggagggcaagatgtataaattttccatatgcccagtggattcttgggggcctgagaaaccatt

SEQ ID NO: 259738 - DNA, 120 bp, Artificial Sequence
  ENSG00000125124_41 (sequence is synthesized)
taatggttctgtctacccaaagtttctcatgaccttttatttcctcagtttgaaacctgtaaaaagaaaatggaaaaactgatatgtaagtttaagatggttcttttttttttttttttt

SEQ ID NO: 259739 - DNA, 73 bp, Artificial Sequence
  ENSG00000125124_42 (sequence is synthesized)
ttggcgatcattattttctgtttttagtcaggtgatctcataatcaaaaaatgtttaattgatgatttgtcaa

SEQ ID NO: 259740 - DNA, 120 bp, Artificial Sequence
  ENSG00000125124_43 (sequence is synthesized)
gatctcataatcaaaaaatgtttaattgatgatttgtcaatttgtagttttggccactaaaactacaagagttaggatgcacctttatattacagtcatacataacctcagctagtgaag

SEQ ID NO: 259741 - DNA, 120 bp, Artificial Sequence
  ENSG00000125124_44 (sequence is synthesized)
aaaaactgctctatttgtggaagataagatactttttacatcccctttatgatattttaaacccttagtgcatgcaggtatatatgtagactcatgctgtctttaaatcccaaacctaat

SEQ ID NO: 259742 - DNA, 120 bp, Artificial Sequence
  ENSG00000125124_45 (sequence is synthesized)
atattactgtagtactttaaccctcaagtgttttgggggttccttcttaagtgaaacccttaaatatcaattgatgacccagaagtggctttattttctgggccttgcattttgaaagaa

SEQ ID NO: 259743 - DNA, 120 bp, Artificial Sequence
  ENSG00000125124_46 (sequence is synthesized)
agaaagggaaaattacattaatgtgttatattggtagcagtaaatatgatatgaaagaattctctaacttgggggtggcttgtaacctgtaataaaaatattgctaaaataccttctctc

SEQ ID NO: 259744 - DNA, 120 bp, Artificial Sequence
  ENSG00000125124_47 (sequence is synthesized)
actttgaaaaagcatctgagcaatcctcagttattggtgaattcttaccagtgtttaattcctctctttccgttatggtcttagtgtggttgtcctggtgtagtatttcaagaggaacct

SEQ ID NO: 259745 - DNA, 120 bp, Artificial Sequence
  ENSG00000125124_48 (sequence is synthesized)
gcagcaagatgaaaagagagtgggacttggagctaagaacgtttttggctttaagtgctacgttaactcattaaattcttagtgatcttggggaagtcccctcaccagtgtgagcctcag

SEQ ID NO: 259746 - DNA, 120 bp, Artificial Sequence
  ENSG00000125124_49 (sequence is synthesized)
ttttcttatctaataagtaaggataatcttacccaccttattgcgggggcccgaggattacatgattggtgtaacagtagcaccttgtacatttgaaaggactaataccagtggacttta

SEQ ID NO: 259747 - DNA, 120 bp, Artificial Sequence
  ENSG00000125124_50 (sequence is synthesized)
accttggctgggctttggaattcttggtgggactttttaatcatgtagattctcaggcccctgcctggcctgtggaaccacagactctataggtgggcccttccagaaggcctcatgggt

SEQ ID NO: 259748 - DNA, 120 bp, Artificial Sequence
  ENSG00000125124_51 (sequence is synthesized)
ggttctcatgtggaacctgtgttgcaagccactgcatggtgttactgctattaacattaaaacttatattttccttattgtgtggatatatctgtggtgtttgcccatgtatacttcatt

SEQ ID NO: 259749 - DNA, 120 bp, Artificial Sequence
  ENSG00000125124_52 (sequence is synthesized)
ttacatttcttaaagaatagaatggaatggttttaagcacgctacattgtccaggttatacccacagaagagctgttgtgtaacagaatcagcatcatacctgaatcatttgtacattgc

SEQ ID NO: 259750 - DNA, 120 bp, Artificial Sequence
  ENSG00000125124_53 (sequence is synthesized)
atataagactatgtctaagtagaagatgctatgaaatcatgtctgctgtggggccaggcataattatgaatgttacttaagagcataggtgaggtgagaaaagggaatgtgactagtgtt

SEQ ID NO: 259751 - DNA, 120 bp, Artificial Sequence
  ENSG00000125124_54 (sequence is synthesized)
ttagtattttcttggtgtgggatgaagtataattcttttttttttttctcaacaaagcagtaaaactagaaagaaggagaactcttccctcaagaatggctgtaccttcatatctagagg

SEQ ID NO: 259752 - DNA, 120 bp, Artificial Sequence
  ENSG00000125124_55 (sequence is synthesized)
tctattttgaggaattacgaaaggtgctagttaaggtgagggaatgcggtagatgcatttgtgagaatgtggtagtctaataatatttgaggagattaatggtactacaaatgtacttat

SEQ ID NO: 259753 - DNA, 120 bp, Artificial Sequence
  ENSG00000125124_56 (sequence is synthesized)
gttatagtgatgttttcaagaatttttgcaattcttgaagtaaaaattgaactagtattggagagtttactacttaaggatttattttataaaaggaagtgtttagctcctgagcaccat

SEQ ID NO: 259754 - DNA, 120 bp, Artificial Sequence
  ENSG00000125124_57 (sequence is synthesized)
gcttgctttgtttggtttaaagtgatgcatttaaatattaacattttcctttgttagctcttcatcttatttgtagtatctgctttggtcttcttcagtttgggtctttccaaaaaccca

SEQ ID NO: 259755 - DNA, 120 bp, Artificial Sequence
  ENSG00000125124_58 (sequence is synthesized)
aattcaagataaaagagcaaaataaagatgattctgattggccccaaagtatacaatattcccactgcaaatccctaaaatattaatatgtgtgttgtgggggctcctggtgctaaagca

SEQ ID NO: 259756 - DNA, 120 bp, Artificial Sequence
  ENSG00000125124_59 (sequence is synthesized)
tggggaagattcacatggagtgtcgtgttgaaattggaggcagcacagatgagttaacttgttgagacagagatgaaataacgggaagtagcttaattggtataagcgaacaggggaaag

SEQ ID NO: 259757 - DNA, 120 bp, Artificial Sequence
  ENSG00000125124_60 (sequence is synthesized)
aagggggtctctgtatctggtaaatagtgtcttttcatttgtctgggttcaagaagtttgtgaggcctttttcattcctgagtgttcatggtctccaggtggatgaatatcattcagtgc

SEQ ID NO: 259758 - DNA, 120 bp, Artificial Sequence
  ENSG00000125124_61 (sequence is synthesized)
caagaacaatacttcaaaaatgttaaagtcatgatgggatacagtggaccatacccatagaaagatgcaagggtattttcccacagggccagatagagcaagggagcactaatgaggtga

SEQ ID NO: 259759 - DNA, 120 bp, Artificial Sequence
  ENSG00000125124_62 (sequence is synthesized)
cacaggagatacttcaaagaaaaccagtttgttccacgaagggataagagacttgacaatctgcttcggctgaaagtgttctgcaccaggaaagaacacatcaataaattatcattaacc

SEQ ID NO: 259760 - DNA, 120 bp, Artificial Sequence
  ENSG00000125144_0 (sequence is synthesized)
actccgccttccacgtgcacccactgcctcttcccttctcgcttgggaactctagtctcgcctcgggttgcaatggaccccaactgctcctgtgccgctggtgtctcctgcacctgcgcc

SEQ ID NO: 259761 - DNA, 120 bp, Artificial Sequence
  ENSG00000125144_1 (sequence is synthesized)
gctgctgctcctgctgccctgtgggctgtgccaagtgtgcccagggctgcatctgcaaaggggcatcggagaagtgcagctgctgcgcctgatgtcgggacagccctgctcccaagtaca

SEQ ID NO: 259762 - DNA, 120 bp, Artificial Sequence
  ENSG00000125144_2 (sequence is synthesized)
aatagagtgacccgtaaaatccaggattttttgttttttgctacaatcttgacccctttgctacattcctttttttctgtgaaatatgtgaataataattaaacacttagacttgattcc

SEQ ID NO: 259763 - DNA, 120 bp, Artificial Sequence
  ENSG00000125144_3 (sequence is synthesized)
actccgccttccacgtgcacccactgcctcttcccttctcgcttgggaactctagtctcgcctcgggttgcaatggaccccaactgctcctgtgccgctgcaggtgtctcctgcacctgc

SEQ ID NO: 259764 - DNA, 120 bp, Artificial Sequence
  ENSG00000125144_4 (sequence is synthesized)
gagtgagtgcggggccatctccaggaatctggggctgtggctaaggttgggagggaacccaaggctgtccctgagtgcgtgcttctggggaaccggccttcctttgtccctgtaggttgt

SEQ ID NO: 259765 - DNA, 120 bp, Artificial Sequence
  ENSG00000125144_5 (sequence is synthesized)
cagggcttatgtgaggtggggcagctttctcaaaggaagacccattccaatgtccaccagttgtctcctgacaaaaaccatgccatcatgaactaagggtcctctggggctggagggatg

SEQ ID NO: 259766 - DNA, 120 bp, Artificial Sequence
  ENSG00000125148_0 (sequence is synthesized)
accacgcctcctccaagtcccagcgaacccgcgtgcaacctgtcccgactctagccgcctcttcagctcgccatggatcccaactgctcctgcgccgccggtgactcctgcacctgcgcc

SEQ ID NO: 259767 - DNA, 120 bp, Artificial Sequence
  ENSG00000125148_1 (sequence is synthesized)
gaaaagctgctgctcctgctgccctgtgggctgtgccaagtgtgcccagggctgcatctgcaaaggggcgtcggacaagtgcagctgctgcgcctgatgctgggacagccccgctcccag

SEQ ID NO: 259768 - DNA, 120 bp, Artificial Sequence
  ENSG00000125148_2 (sequence is synthesized)
atgtaaagaacgcgacttccacaaacctggattttttatgtacaaccctgaccgtgaccgtttgctatattcctttttctatgaaataatgtgaatgataataaaacagctttgacttga

SEQ ID NO: 259769 - DNA, 120 bp, Artificial Sequence
  ENSG00000125148_3 (sequence is synthesized)
ggctggggatgcccagtgtagactgtagcgctagagaagcaatttctgacccctctttctttctctggtcactcaatttcaggacaggagttgctccttcccaaagagttttggggtgac

SEQ ID NO: 259770 - DNA, 120 bp, Artificial Sequence
  ENSG00000125148_4 (sequence is synthesized)
accacgcctcctccaagtcccagcgaacccgcgtgcaacctgtcccgactctagccgcctcttcagctcgccatggatcccaactgctcctgcgccgccggtaagaggctggggatgccc

SEQ ID NO: 259771 - DNA, 120 bp, Artificial Sequence
  ENSG00000125148_5 (sequence is synthesized)
agtgtagactgtagcgctagagaagcaatttctgacccctctttctttctctggtcactcaatttcaggacaggagttgctccttcccaaagagttttggggtatctttctctccattct

SEQ ID NO: 259772 - DNA, 120 bp, Artificial Sequence
  ENSG00000125148_6 (sequence is synthesized)
ctcggccccgggctcttagtacgccgtcccttgttcaggtatccagggacggttctcacctctgtcttttctccttgcaggtgactcctgcacctgcgccggctcctgcaaatgcaaaga

SEQ ID NO: 259773 - DNA, 120 bp, Artificial Sequence
  ENSG00000125148_7 (sequence is synthesized)
gcagtctggggatgccccattgcgcggaaattgttgcctcctcagtgatccttatcagggagagcaggaatccttattcccggtgtcgctagtactcatctctgccgcctcctgtctgcc

SEQ ID NO: 259774 - DNA, 120 bp, Artificial Sequence
  ENSG00000125149_0 (sequence is synthesized)
gcagtcgcgcccgccgccgtcgttgcccccgctgccgcggctgctgcaggtgaggtgaagtgaggtgaggtgtggtgttgggccggtgctgctgccgctgccgccggggaggaggtggaa

SEQ ID NO: 259775 - DNA, 120 bp, Artificial Sequence
  ENSG00000125149_1 (sequence is synthesized)
agcggggctgtggcgggccggcgggggcggcctgtcagccgctgctttgtctccttagctcgggtcccttctgcgctgccgcagggaggccgcccgggccaggcgagccgaaccaatgct

SEQ ID NO: 259776 - DNA, 120 bp, Artificial Sequence
  ENSG00000125149_2 (sequence is synthesized)
ggacctggaggtagtgcccgaacgctctctggggaacgagcaatgggaattcacgctgggaatgcctctggctcaggcagtagccattcttcagaagcactgtcgcatcatcaaaaacgt

SEQ ID NO: 259777 - DNA, 120 bp, Artificial Sequence
  ENSG00000125149_3 (sequence is synthesized)
ccaggttctctacagtgaacagtctcctctaagccatgacctcattcttaacctgactcaggacgggatcaaactaatgtttgatgctttcaatcagagacttaaggtgatcgaagtatg

SEQ ID NO: 259778 - DNA, 120 bp, Artificial Sequence
  ENSG00000125149_4 (sequence is synthesized)
tgatttgactaaagtaaagttaaaatattgtggcgtgcattttaattctcaggccatagctcctaccattgaacagattgaccagtcttttggcgcaacccatcctggagtgtacaactc

SEQ ID NO: 259779 - DNA, 120 bp, Artificial Sequence
  ENSG00000125149_5 (sequence is synthesized)
cgctgagcagctcttccatctcaacttcagaggactgtctttctcttttcagttagactcatggactgaggctccaaagtatgagcccaattttgcccatggcctggcttctctccagat

SEQ ID NO: 259780 - DNA, 120 bp, Artificial Sequence
  ENSG00000125149_6 (sequence is synthesized)
accccatggagcaactgtaaaacgaatgtacatctacagtggcaacagcctgcaggataccaaggctcccatgatgcctctgagctgtttcctgggcaatgtctatgctgagagtgtaga

SEQ ID NO: 259781 - DNA, 120 bp, Artificial Sequence
  ENSG00000125149_7 (sequence is synthesized)
tgttcttcgagatggaactggacctgcaggtttacgacttcgcctacttgctgcaggttgtggacctggcctattagcagatgccaagatgcgggtatttgaacgttcagtgtattttgg

SEQ ID NO: 259782 - DNA, 120 bp, Artificial Sequence
  ENSG00000125149_8 (sequence is synthesized)
tgattcctgccaagatgttcttagcatgcttggctctccacacaaagtcttctataaatcagaagacaagatgaaaattcattctccttcccctcataaacaagttccatcgaagtgtaa

SEQ ID NO: 259783 - DNA, 120 bp, Artificial Sequence
  ENSG00000125149_9 (sequence is synthesized)
tgactacttttttaactacttcactcttggagtggacatcctctttgatgcgaatacacacaaagtgaagaagtttgttctacacaccaattaccctgggcattataatttcaacattta

SEQ ID NO: 259784 - DNA, 120 bp, Artificial Sequence
  ENSG00000125149_10 (sequence is synthesized)
tcatcgctgtgagttcaagatcccactagccataaagaaagaaaacgcagatggtcagacagaaacatgcacgacctacagcaagtgggacaacatccaggagctcctgggccaccctgt

SEQ ID NO: 259785 - DNA, 120 bp, Artificial Sequence
  ENSG00000125149_11 (sequence is synthesized)
ggagaagcctgttgtcctgcacaggtcttcctccccaaacaacaccaacccatttggttccacattctgctttggtcttcagcgaatgatctttgaggtcatgcagaacaaccacattgc

SEQ ID NO: 259786 - DNA, 120 bp, Artificial Sequence
  ENSG00000125149_12 (sequence is synthesized)
cacctgagaacagcggaactcccctagggacaccaccacccatgcccctctgtcccgtggaactgtgcatcacatcctgctcagtgggcctctgtaccaccctgtgggttttcttggaca

SEQ ID NO: 259787 - DNA, 120 bp, Artificial Sequence
  ENSG00000125149_13 (sequence is synthesized)
cctggccagtgctgaagggctgttgtgatgttctgaggttgggctcaggctgggtgctctgccatgggctgagtggcccagatattcttctgtccatctttggcctgctggtgccagcag

SEQ ID NO: 259788 - DNA, 120 bp, Artificial Sequence
  ENSG00000125149_14 (sequence is synthesized)
gggacacagactgcaaagagaagcacaaagtttgagccttgattcctggacccaggagctctcaactaacaaggaggcaggagaggtcaacccttgtcccatgcacattgggaagacttg

SEQ ID NO: 259789 - DNA, 120 bp, Artificial Sequence
  ENSG00000125149_15 (sequence is synthesized)
gggctctttctgtgactgaggacacaggcacccaggataaggacaaggtcctgcctttggctccacattgccacatgacccttaaggcaagcaggtagcgtgtccatagtacttggttgc

SEQ ID NO: 259790 - DNA, 120 bp, Artificial Sequence
  ENSG00000125149_16 (sequence is synthesized)
gacatttgcactacatccactttagttacttgatgagctggctgtggccagggtggcccacctgcccttccctgttcctttcttgcacgcgctccctgcctgggcacaccaaactggttg

SEQ ID NO: 259791 - DNA, 120 bp, Artificial Sequence
  ENSG00000125149_17 (sequence is synthesized)
aaacacagctttctaccatccaggtacatgcccaggcctggttctcacccctgttggagtcagctttcaagattgcctgtgcccctgctctgccccatcctggctggcagggctgcatgt

SEQ ID NO: 259792 - DNA, 120 bp, Artificial Sequence
  ENSG00000125149_18 (sequence is synthesized)
ttccatcctgtttgcctcttttatttaatgccaaagttttagccaaagacatcttcctacttttgttgtgtttcagcattctgttctgcactgtgggctggctctctgccccaaccctgg

SEQ ID NO: 259793 - DNA, 120 bp, Artificial Sequence
  ENSG00000125149_19 (sequence is synthesized)
gcactggcccctggctgggccatttcatggctcaaagcctctgggggctcaaggaaggctgggctgctcagtcccttcatgggtcttgctaatggaaagtagcatatatgtgctttaaaa

SEQ ID NO: 259794 - DNA, 120 bp, Artificial Sequence
  ENSG00000125149_20 (sequence is synthesized)
atattaatccttttgaaaagaactgagaagaaaaatgtataattttatcccatttttaatattttggtctagcaacttgtgatacatagatgacaattttgtgagtttttcaaatgtgtg

SEQ ID NO: 259795 - DNA, 120 bp, Artificial Sequence
  ENSG00000125149_21 (sequence is synthesized)
tacagatttttgtaaatatgactcttttgtaattaactcatgtacagcctcatcctgtatagtttaatgatgaatgtgcaggggacctgtctcaggctcctatatggttcctgggcctta

SEQ ID NO: 259796 - DNA, 120 bp, Artificial Sequence
  ENSG00000125149_22 (sequence is synthesized)
tagccaggtttgtgtggcgctcccgacttttgtgactgactggtgtcttcccatttggactgtggcctggccagagccccttgcatatccccactgtcaggggcagccaggactgttccc

SEQ ID NO: 259797 - DNA, 120 bp, Artificial Sequence
  ENSG00000125149_23 (sequence is synthesized)
atcctcctggaatgggggaaccttccttatcccctgcccacatcccctctccaataaagcacctgtgccctcagcaatggcctgccatgtgctgttgctgggatgtttgtattaaggtaa

SEQ ID NO: 259798 - DNA, 120 bp, Artificial Sequence
  ENSG00000125149_24 (sequence is synthesized)
gagctgtttcctgggcaatgtctatgctgagagtgtagatgttcttcgagatggaactggacctgcaggtttacgacttcgcctacttgctgcagttctggaggctgggaagtccaagat

SEQ ID NO: 259799 - DNA, 120 bp, Artificial Sequence
  ENSG00000125149_25 (sequence is synthesized)
ctagttcatagaagaaacttctccccgtatcctcatatggtgcaaggggctagttaactccctggagtctgttttttaacggcactgatctcaatcctgaggtctctgcttccataatgt

SEQ ID NO: 259800 - DNA, 120 bp, Artificial Sequence
  ENSG00000125149_26 (sequence is synthesized)
cctttcagtaagtctccttaactggcttccctttccctttttgagggtgtgaagaggacctgattcctggggcaggctcaggcagttttgctgatagaggagtagacaagcaaatgtgtg

SEQ ID NO: 259801 - DNA, 120 bp, Artificial Sequence
  ENSG00000125149_27 (sequence is synthesized)
gtaccactggcccctgcaggttctagttgtcttttagttttactggggccttcatacctcagggtctggtggcttctcttctctacccttttcttaagagtcactggtgtcataaagccc

SEQ ID NO: 259802 - DNA, 120 bp, Artificial Sequence
  ENSG00000125149_28 (sequence is synthesized)
ttaatgctcttatttaaaagttctctaattaagctttgtattttgatataattagagactcacctgcctgtgtcttaaaaataactctcccagctactatctcacatgatctgtgggccc

SEQ ID NO: 259803 - DNA, 120 bp, Artificial Sequence
  ENSG00000125149_29 (sequence is synthesized)
aaacctgcccggtagtgccatcccaccccacttcctggagtcaggctcccataggattgtggggttggtacttgggtgtgaaggaaacatcctcccccttgttttcaacctagtaggcca

SEQ ID NO: 259804 - DNA, 120 bp, Artificial Sequence
  ENSG00000125149_30 (sequence is synthesized)
gtttagaaacaagccacagggaaggtgttgtcagtcattactccctgccaggctggtttatgttagccatttcagatgccagtcaaccatgttattttcttctcccccacccccaacagt

SEQ ID NO: 259805 - DNA, 120 bp, Artificial Sequence
  ENSG00000125149_31 (sequence is synthesized)
agaaagaaccaagcctctgctcattctgtgtctgtccccagggctcccatgatgcctctgagctgtttcctgggcaatgtctatgctgagagtgtagatgttcttcgagatggaactgga

SEQ ID NO: 259806 - DNA, 120 bp, Artificial Sequence
  ENSG00000125149_32 (sequence is synthesized)
cctgcaggtttacgacttcgcctacttgctgcaggtcagtgactggctttgaggttggtacattccgcattatacccatgttgagacagtctaaaatcccacgtgcttagggtgtgtctc

SEQ ID NO: 259807 - DNA, 120 bp, Artificial Sequence
  ENSG00000125149_33 (sequence is synthesized)
aacatatgaattttaggggaacaaaagcattcagtccattgccacatagttggtagaagacaaatgatgcagatgtttatggttaaagcttttgtttagttttgtcaagggactggacat

SEQ ID NO: 259808 - DNA, 120 bp, Artificial Sequence
  ENSG00000125149_34 (sequence is synthesized)
agtcttataattagcaaatcttaataagcaacagcactgcttctctcagcatgcacataggcctgctgtgtgcttatatagctttgtgacagttcccaagtgtttcctggagatgcatcc

SEQ ID NO: 259809 - DNA, 66 bp, Artificial Sequence
  ENSG00000125149_35 (sequence is synthesized)
gctttgtgacagttcccaagtgtttcctggagatgcatcctgtgggttgcagtgctactgctctcc

SEQ ID NO: 259810 - DNA, 60 bp, Artificial Sequence
  ENSG00000125149_36 (sequence is synthesized)
tctccccttttttctacctttttttgttttgttttgttttgttttgtaagagatggcctc

SEQ ID NO: 259811 - DNA, 120 bp, Artificial Sequence
  ENSG00000125149_37 (sequence is synthesized)
cacctggccagctctccccttttttctacctttttttgttttgttttgttttgttttgtaagagatggcctcattctgtcatccaggctgtagtgcagtggtgcaatcatagctcactgc

SEQ ID NO: 259812 - DNA, 120 bp, Artificial Sequence
  ENSG00000125149_38 (sequence is synthesized)
cctaagcctcccaagtagctaggaccacaggcatgtgctaccatgcccagttaatttttgtctatgtggagatgggtcttgctgtgttacccagaatgatcttgaactcctgggctcaat

SEQ ID NO: 259813 - DNA, 120 bp, Artificial Sequence
  ENSG00000125149_39 (sequence is synthesized)
cgatcctccctccttggctttccaaagtgctggtattacaggtgcaagccgctacacccagcttttctccctatattatccaggccggtgtgcattggaatactgtggccttgaactcct

SEQ ID NO: 259814 - DNA, 120 bp, Artificial Sequence
  ENSG00000125149_40 (sequence is synthesized)
gggctcaagcaatcctgccttaacctcctgactaggctacaggcacgcaccaccatgcctggctctcctttttctaccctttatgccaagttctcaacgtaggcaagcagacgggacttg

SEQ ID NO: 259815 - DNA, 120 bp, Artificial Sequence
  ENSG00000125149_41 (sequence is synthesized)
acgtaggcaagcagacgggacttgttgaattgtggtttggccacaccttggccagagttttgccaaccatgaacaacaacaacaaaaagaaatagttggccgggtgcagtggctcatgcc

SEQ ID NO: 259816 - DNA, 120 bp, Artificial Sequence
  ENSG00000125149_42 (sequence is synthesized)
ccaccacgtctggccagaaactgcactgtttttgttcacttttgtttcttcaacatctagcacaatgtcctagcccatggtaggcaataaagtagtgaatgaataagtgaatgaagtatc

SEQ ID NO: 259817 - DNA, 120 bp, Artificial Sequence
  ENSG00000125149_43 (sequence is synthesized)
cagagcttcatgtcacatgtgggggattgaataagtccctggcattattttgaatagcgatctcttgtacagtcttaagccctggtgacctgatgtttctgattgcatgcagtcttgccc

SEQ ID NO: 259818 - DNA, 120 bp, Artificial Sequence
  ENSG00000125149_44 (sequence is synthesized)
ctccccaaacaacaccaacccatttggttccacattctgctttggtcttcagcgaatgatctttgaggtcatgcagaacaaccacattgcctcggtgaccctgtatggcccccccagata

SEQ ID NO: 259819 - DNA, 120 bp, Artificial Sequence
  ENSG00000125166_0 (sequence is synthesized)
accttcagcaggagccggttccctgtgtgtgtgtccgctcgccctctgctccgtcctgcggctgcccactgccctcctacggtccaccatggccctgctgcactccggccgcgtcctccc

SEQ ID NO: 259820 - DNA, 120 bp, Artificial Sequence
  ENSG00000125166_1 (sequence is synthesized)
cgggatcgccgccgccttccacccgggcctcgccgccgcggcctctgccagagccagctcctggtggacccatgtggaaatgggacctccagatcccattctgggagtcactgaagcctt

SEQ ID NO: 259821 - DNA, 120 bp, Artificial Sequence
  ENSG00000125166_2 (sequence is synthesized)
taagagggacaccaatagcaaaaagatgaatctgggagttggtgcctaccgggatgataatggaaagccttacgttctgcctagcgtccgcaaggcagaggcccagattgccgcaaaaaa

SEQ ID NO: 259822 - DNA, 120 bp, Artificial Sequence
  ENSG00000125166_3 (sequence is synthesized)
tttggacaaggaatacctgcccattgggggactggctgaattttgcaaggcatctgcagaactagccctgggtgagaacagcgaagtcttgaagagtggccggtttgtcactgtgcagac

SEQ ID NO: 259823 - DNA, 120 bp, Artificial Sequence
  ENSG00000125166_4 (sequence is synthesized)
catttctggaactggagccttaaggatcggagccagttttctgcaaagattttttaagttcagccgagatgtctttctgcccaaaccaacctggggaaaccacacacccatcttcaggga

SEQ ID NO: 259824 - DNA, 120 bp, Artificial Sequence
  ENSG00000125166_5 (sequence is synthesized)
tgctggcatgcagctacaaggttatcggtattatgaccccaagacttgcggttttgacttcacaggcgctgtggaggatatttcaaaaataccagagcagagtgttcttcttctgcatgc

SEQ ID NO: 259825 - DNA, 120 bp, Artificial Sequence
  ENSG00000125166_6 (sequence is synthesized)
ctgcgcccacaatcccacgggagtggacccgcgtccggaacagtggaaggaaatagcaacagtggtgaagaaaaggaatctctttgcgttctttgacatggcctaccaaggctttgccag

SEQ ID NO: 259826 - DNA, 120 bp, Artificial Sequence
  ENSG00000125166_7 (sequence is synthesized)
tggtgatggtgataaggatgcctgggctgtgcgccacttcatcgaacagggcattaatgtttgcctctgccaatcatatgccaagaacatgggcttatatggtgagcgtgtaggagcctt

SEQ ID NO: 259827 - DNA, 120 bp, Artificial Sequence
  ENSG00000125166_8 (sequence is synthesized)
cactatggtctgcaaagatgcggatgaagccaaaagggtagagtcacagttgaagatcttgatccgtcccatgtattccaaccctcccctcaatggggcccggattgctgctgccattct

SEQ ID NO: 259828 - DNA, 120 bp, Artificial Sequence
  ENSG00000125166_9 (sequence is synthesized)
gaacaccccagatttgcgaaaacaatggctgcaagaagtgaaagtcatggctgaccgcatcattggcatgcggactcaactggtctccaacctcaagaaggagggttccacccacaattg

SEQ ID NO: 259829 - DNA, 120 bp, Artificial Sequence
  ENSG00000125166_10 (sequence is synthesized)
tggcatgttctgtttcacagggctaaagcctgaacaggtggagcggctgatcaaggagttctccatctacatgacaaaagatggccgcatctctgtggcaggggtcacctccagcaacgt

SEQ ID NO: 259830 - DNA, 120 bp, Artificial Sequence
  ENSG00000125166_11 (sequence is synthesized)
gggctaccttgcccatgccattcaccaggtcaccaagtaatgtccctggtgcgaggaaacagagacaacctttctgtcttcagcctctgctattgagagcttcacacagacaatgagaga

SEQ ID NO: 259831 - DNA, 120 bp, Artificial Sequence
  ENSG00000125166_12 (sequence is synthesized)
gggtggatggtggtgagtggatcatttctttcagccacagtgtgtaacactcagcatttgaatgtttctcagaaaagaacatgtagtgacacagggcagaggcatccatggctggcgtct

SEQ ID NO: 259832 - DNA, 120 bp, Artificial Sequence
  ENSG00000125166_13 (sequence is synthesized)
ggaatattaaaccaaactctccccggtccttttttctccaacttttctcaaagagtttacatgtgcaagaaagtcatcgcaccaaaaaacctgtcaattatgccattgcaatatttcaga

SEQ ID NO: 259833 - DNA, 120 bp, Artificial Sequence
  ENSG00000125166_14 (sequence is synthesized)
agctttaactgaagtgtcaggttcctcgtgagaaacagcacacgttagaggctttgagagaaggcctagttctgtcatgagtagtcggcctcgtgtctgtcctcccatcttggaacaacc

SEQ ID NO: 259834 - DNA, 120 bp, Artificial Sequence
  ENSG00000125166_15 (sequence is synthesized)
ttatcaacaggccgcactgcagaaatgatgttttatgaaaaccaatgaggctgctgccactccagcaagggaaataatgcagtttcctgtcttatttaagaaaaagagaaggctctcttt

SEQ ID NO: 259835 - DNA, 120 bp, Artificial Sequence
  ENSG00000125166_16 (sequence is synthesized)
tctcccttgtcattgccgttcttttccttacacgcaaagattttttaactattgcagattttcatcccattctactgcttgattgaccatcaactccatcctatcgagatttatttaaga

SEQ ID NO: 259836 - DNA, 120 bp, Artificial Sequence
  ENSG00000125166_17 (sequence is synthesized)
atgaagaacataattttctgctgatgctgtaccctcacccttttcagcaaagaatagtggagagtaggaaactgtactttatctcggcatcctcttgaatgatagtgcaagtttctccag

SEQ ID NO: 259837 - DNA, 120 bp, Artificial Sequence
  ENSG00000125166_18 (sequence is synthesized)
ttgggatgttgtctctgcccggttggacctcctccctttgttgaatgtggtgtgcagcctctcatctcacactgtgagtccagcggcgcagggtggtaccaggaaagaggatattctagg

SEQ ID NO: 259838 - DNA, 120 bp, Artificial Sequence
  ENSG00000125166_19 (sequence is synthesized)
ctttgcgtgctgctagctgggttcaggcttcacccactggaaagaaccaccatctgctctaaccatgtagacttattgcggcctggtttctctgttacaataaaattactgtagacccaa

SEQ ID NO: 259839 - DNA, 120 bp, Artificial Sequence
  ENSG00000125166_20 (sequence is synthesized)
aaaaatacctttgaatactctgagtactcaaaacttccttgtgcctcagttcaccactctggttgttgaaagctttttatttataataaagttattttggggtcctttggatggaaacag

SEQ ID NO: 259840 - DNA, 120 bp, Artificial Sequence
  ENSG00000125166_21 (sequence is synthesized)
tgttctgtttcacagggctaaagcctgaacaggtgagtgattctgatttctctgcagcagaccagctgatcagtctttgcaaacccgaaggattacttttttttcttttttcttttttat

SEQ ID NO: 259841 - DNA, 63 bp, Artificial Sequence
  ENSG00000125166_22 (sequence is synthesized)
tttgtttttgtttttgttttgagacagtctcgctctgaagcttaagtgatcctcctgcctcag

SEQ ID NO: 259842 - DNA, 76 bp, Artificial Sequence
  ENSG00000125166_23 (sequence is synthesized)
tgcctcagcctcccgagcagctgggactagaagtgtagtttcgccatgttgcccgggcttgtcttgaactcctgga

SEQ ID NO: 259843 - DNA, 120 bp, Artificial Sequence
  ENSG00000125166_24 (sequence is synthesized)
atgtcccaatatctgagttaaaatactggggaagagctgattcccagggttctggttacctttgttacttatcaaatgatgacgatcctgtggcatttcagataaaccatttcctttaaa

SEQ ID NO: 259844 - DNA, 120 bp, Artificial Sequence
  ENSG00000125166_25 (sequence is synthesized)
gctgcaaagtcgtctcttggctgtttttctctttagaaaataccagagcagagtgttcttcttctgcatgcctgcgcccacaatcccacgggagtggacccgcgtccggaacagtggaag

SEQ ID NO: 259845 - DNA, 90 bp, Artificial Sequence
  ENSG00000125166_26 (sequence is synthesized)
ttgaagagtggccgggtaagctgagcaggctctggcatcatcccaggtctgttttaacaaatttgtaattatttaaacaattttaggccc

SEQ ID NO: 259846 - DNA, 120 bp, Artificial Sequence
  ENSG00000125166_27 (sequence is synthesized)
gccaagatcatgccattgaactccagcctgggcaacaacagcagaactccatctcaaaaaaaaaaaaaaaatttaagaaatatgaaaagataactcattttgtgtgtaatgattgttttg

SEQ ID NO: 259847 - DNA, 120 bp, Artificial Sequence
  ENSG00000125166_28 (sequence is synthesized)
gataactcattttgtgtgtaatgattgttttgaggaggccacactatttctaataattcttatttgatagtaaattgccatcattaaataaaataatttacatgacaccaattccaaaaa

SEQ ID NO: 259848 - DNA, 80 bp, Artificial Sequence
  ENSG00000125170_0 (sequence is synthesized)
ggagtcccagccggagccccagccggagcccgatccctagccctgcggccgcgcctccctcgccgtccccgcctggagcc

SEQ ID NO: 259849 - DNA, 120 bp, Artificial Sequence
  ENSG00000125170_1 (sequence is synthesized)
tgacgcgggcatgagcctgctccgcggcgccgctgagcaggcgctcctggcccgggcctcggcgcccagcaggcgcggggcgaaggagctgctagaacaatgctgaggcgggtgaggtga

SEQ ID NO: 259850 - DNA, 120 bp, Artificial Sequence
  ENSG00000125170_2 (sequence is synthesized)
ggagcagcccctcgcggcagccccgacagagtgtctggaacaggtgattggaggagccggagacccaggcacctgggcatccttcccctcgcctctgccaggccccgcgcccctaaaagg

SEQ ID NO: 259851 - DNA, 120 bp, Artificial Sequence
  ENSG00000125170_3 (sequence is synthesized)
tgggaaaaccatggcgaccaatttcagtgacatcgtcaagcaaggctacgtgaagatgaagagcaggaagctcgggatctaccggaggtgctggctggtgttccggaaatcctccagcaa

SEQ ID NO: 259852 - DNA, 120 bp, Artificial Sequence
  ENSG00000125170_4 (sequence is synthesized)
ggggccccagcggctggagaagtatccagatgagaagtcggtgtgcctccggggctgccccaaggtgactgagatcagcaacgtcaagtgtgttacgcggctccccaaggagaccaagcg

SEQ ID NO: 259853 - DNA, 120 bp, Artificial Sequence
  ENSG00000125170_5 (sequence is synthesized)
gcaggcggtggccatcatattcactgatgactcggcacgtaccttcacctgcgactcagagctagaggcagaggagtggtacaagacactatctgtggagtgtctggggtcccgcctcaa

SEQ ID NO: 259854 - DNA, 120 bp, Artificial Sequence
  ENSG00000125170_6 (sequence is synthesized)
cgacatcagtctgggagaacctgacctcctggccccaggggtgcagtgtgaacagacagatcgcttcaatgtcttcctgctgccctgccccaacctggacgtgtatggcgagtgcaagct

SEQ ID NO: 259855 - DNA, 120 bp, Artificial Sequence
  ENSG00000125170_7 (sequence is synthesized)
gcagatcacccacgagaacatctacctctgggacatccacaacccccgtgtgaagctcgtctcgtggcccctctgctcactgcgccgctatggccgggatgccacacgctttaccttcga

SEQ ID NO: 259856 - DNA, 120 bp, Artificial Sequence
  ENSG00000125170_8 (sequence is synthesized)
ggctggccggatgtgtgatgctggggaaggactctataccttccagacacaagagggggagcagatttaccagcgcgtccacagtgccaccctggccatcgcagagcagcacaagcgggt

SEQ ID NO: 259857 - DNA, 120 bp, Artificial Sequence
  ENSG00000125170_9 (sequence is synthesized)
cctgctggaaatggagaagaacgtgaggctgctgaacaagggcacggaacattactcgtatccctgcacacccacgaccatgctgccgcgcagtgcctactggcaccacatcactggttc

SEQ ID NO: 259858 - DNA, 120 bp, Artificial Sequence
  ENSG00000125170_10 (sequence is synthesized)
ccagaacatcgccgaagcctccagctatgctggtgaggggtatggggcagcccaggccagctcggaaacagacctcctcaacagattcatcctgctaaagccaaagcccagccaggggga

SEQ ID NO: 259859 - DNA, 120 bp, Artificial Sequence
  ENSG00000125170_11 (sequence is synthesized)
gaggccaagaccccatcccagtgaccacagtgctggcgagcaccgatgactgctgggggctgcctgctgcggggctggctgcagtgtaccgtggacagcctcagggggctgtcggccaag

SEQ ID NO: 259860 - DNA, 120 bp, Artificial Sequence
  ENSG00000125170_12 (sequence is synthesized)
agcctggagaaagggagcaagctgccccctccttgcccccaaggatgaggctggactgaggcaaagggctggccacaccacctgagcatgtgtgaggggttggagctaccgtgggactat

SEQ ID NO: 259861 - DNA, 120 bp, Artificial Sequence
  ENSG00000125170_13 (sequence is synthesized)
atactgttaatgattttaatatatatggcttatgacatactctgtatcaatgagatcccctcaccctcaccccatccttccccaccaatacacacaaattttttaatcccatgaccaggc

SEQ ID NO: 259862 - DNA, 120 bp, Artificial Sequence
  ENSG00000125170_14 (sequence is synthesized)
cacggtcaaggctgtttttgagtatgagtgcagtcgtgtccatcctccatggcacagccctcctgctgccaggacctgcttgaactaccagggccacaggagggggataatcagagcttg

SEQ ID NO: 259863 - DNA, 120 bp, Artificial Sequence
  ENSG00000125170_15 (sequence is synthesized)
aggctggcactctgactgctggcttttcccagacagcccaagggccggaacagcaggtggcttctcagttcctctgggcctggagtgacacaggaaggatctgcacttcctctgtgctgc

SEQ ID NO: 259864 - DNA, 120 bp, Artificial Sequence
  ENSG00000125170_16 (sequence is synthesized)
ttgccagccttgcagttggagttttaagcagaggtgacatctggttgacgcctcaggtgaaaatctggttttaaaatgtaacttctgcacaggctccttcctgctttgtaggctgggaag

SEQ ID NO: 259865 - DNA, 120 bp, Artificial Sequence
  ENSG00000125170_17 (sequence is synthesized)
atgcccctggggtaggggtgctgattacctcagccatgtggaggaaggctggagcttgttcctgccccaggaataggccaggagggaaggccgcagcaggactgccgtggggagcacccc

SEQ ID NO: 259866 - DNA, 120 bp, Artificial Sequence
  ENSG00000125170_18 (sequence is synthesized)
tgctgcccccctctcactgaccaggggtggacaatgcccaagcagagggagcccccttgccctgtttggccaccctctggccagccaaaagcactctgaaaccaagaccttcccatttcc

SEQ ID NO: 259867 - DNA, 120 bp, Artificial Sequence
  ENSG00000125170_19 (sequence is synthesized)
tcctccccacatggtgctgaggctccctgctgcaatgcaattaaagcaattgattttctagtgctggtatttgttgactaccatgcagaagggctatctttctattcacgtcaaactttt

SEQ ID NO: 259868 - DNA, 120 bp, Artificial Sequence
  ENSG00000125170_20 (sequence is synthesized)
ggttgtgtggggttttttgttgttttttgggttttgttttttaatactttagggtcctgatttgtgggaacagaccttcttgtaaataaccactatttgagttgtggcaggaggatgata

SEQ ID NO: 259869 - DNA, 120 bp, Artificial Sequence
  ENSG00000125170_21 (sequence is synthesized)
aagcacgcggcccctcccaaaggagcccttgagctagggaggtggtgcagtcagcctcgctctcaacgtgacccggggaatgaccacccagagggatgagctagcctgtagaggggaact

SEQ ID NO: 259870 - DNA, 120 bp, Artificial Sequence
  ENSG00000125170_22 (sequence is synthesized)
ggggtccaaaggtctttggggagggaggcagagctggctggctcagctaagtggcacgatgacgcatgaaggagattatgttgtgctctttattgccaaaaataaacacttttaaaaaga

SEQ ID NO: 259871 - DNA, 120 bp, Artificial Sequence
  ENSG00000125170_23 (sequence is synthesized)
ggttttcctgaatggttctgtcgtcctggggtggggagggaagggaaggaagaagggcgggaggaaggagggagggaagagggagagaggaggagtgtgggaagaggaaggaaaaaagag

SEQ ID NO: 259872 - DNA, 120 bp, Artificial Sequence
  ENSG00000125170_24 (sequence is synthesized)
ctgagactgtgcacagtgctaataacaggtgtgagcaggaagcactcaggaacgttggctactcacactaaactcagcggtgcacacagtacatggcaggtcaggagagcaccctttgtg

SEQ ID NO: 259873 - DNA, 120 bp, Artificial Sequence
  ENSG00000125170_25 (sequence is synthesized)
gaacagcgttttggagccagccaagaagtcaatgacttttcaatttggggaggaggcttctctcccagggaggtgacactgctggtgactcccacccccggtgtccccaggctggggctc

SEQ ID NO: 259874 - DNA, 120 bp, Artificial Sequence
  ENSG00000125170_26 (sequence is synthesized)
gcatttctaacaagtttcaaggtgatgggaagcttctggtccagggactacactttgagaagccctggtgtaaaaagcaggcgcggggcgaaggagctgctagaacaatgctgaggcggg

SEQ ID NO: 259875 - DNA, 120 bp, Artificial Sequence
  ENSG00000125170_27 (sequence is synthesized)
agacgacactgagatggtgtccaggtagggctgttcctgcagccctgataagatccgatctgtcaggggtggggaggcccagccaggcaggcagccgctcgctcagtcattggttgccag

SEQ ID NO: 259876 - DNA, 120 bp, Artificial Sequence
  ENSG00000125170_28 (sequence is synthesized)
cctcagcgcgtttgttctggagccaaagcctccaggcagaatccatgtgcgagagggagtgctcagcatggctgccctgtggggcaggtgggcagtgagggccctgggagtctccctact

SEQ ID NO: 259877 - DNA, 120 bp, Artificial Sequence
  ENSG00000125170_29 (sequence is synthesized)
ccccgccaccccaggacaccagcccttcctggggagaggagcattttggagctggctctccctgcgcggaaacctgtggtggcctggcaccaggcaggcgcggggcgaaggagctgctag

SEQ ID NO: 259878 - DNA, 120 bp, Artificial Sequence
  ENSG00000125170_30 (sequence is synthesized)
gtgcggaagagttgcagggcctgggaacaggccctgcgtgagctcgaggtagtgattcttagcctggggctggagagaaacagcaggcgcggggcgaaggagctgctagaacaatgctga

SEQ ID NO: 259879 - DNA, 120 bp, Artificial Sequence
  ENSG00000125170_31 (sequence is synthesized)
gaagctctgtgtcccaagtgggcaagcaggtgcctcatgaattcatttcctcatttaaagtaggtagatttattctcatttttttccaatggggaaattaaggcacagggtcttaagcgg

SEQ ID NO: 259880 - DNA, 120 bp, Artificial Sequence
  ENSG00000125170_32 (sequence is synthesized)
cttgcccaggaccacacagccagctggattcacactccgggctgtgctatgtctgagctatgttggatgaacctgggggtccagtggcttcctgtaggcgtgttctgactgggggcttcc

SEQ ID NO: 259881 - DNA, 120 bp, Artificial Sequence
  ENSG00000125170_33 (sequence is synthesized)
acactgtagacccacagccagtggtcagcctgctaatcatcttggagaggaactcctgagctggtccttgctctgaggagaaggcagccccagaggcaggcggtgaagacagagctgaga

SEQ ID NO: 259882 - DNA, 120 bp, Artificial Sequence
  ENSG00000125170_34 (sequence is synthesized)
gactctgccctcccacccaggaagcagcacccagagctgcgtgcggaagagttgcagggcctgggaacaggccctgcgtgagctcgagcaggcgcggggcgaaggagctgctagaacaat

SEQ ID NO: 259883 - DNA, 120 bp, Artificial Sequence
  ENSG00000125170_35 (sequence is synthesized)
aatttgcatttctaacaagtttcaaggtgatgggaagcttctggtccagggactacactttgagaagccctggtgtaaaaaggtacagacgtgaaaaccagaggggggacagctcctccc

SEQ ID NO: 259884 - DNA, 120 bp, Artificial Sequence
  ENSG00000125170_36 (sequence is synthesized)
cagaggaggcactgggcaacttctcttgtccctgcctggcacagctgaggcctgtgactggggattccgacagatcacaggcgcggggcgaaggagctgctagaacaatgctgaggcggg

SEQ ID NO: 259885 - DNA, 120 bp, Artificial Sequence
  ENSG00000125207_0 (sequence is synthesized)
gttactgggcgtatggcgtacagacacgaggccggcgcccgggaggcggtgttcatccgcccgggaaaagagcgcctgttgctcgctgcccgcgtgtccctggctctctcgggaacccag

SEQ ID NO: 259886 - DNA, 120 bp, Artificial Sequence
  ENSG00000125207_1 (sequence is synthesized)
cgccgaaggcgaggtgggcgcgggccgaaggaggtcctgggaggtcggcggcgcggagggatctccgcgggagccgttggggctgttggcctcgggctgaggtgcaaggaccaggactag

SEQ ID NO: 259887 - DNA, 120 bp, Artificial Sequence
  ENSG00000125207_2 (sequence is synthesized)
ggcgagggcagcggtccaagaaatagaaaacaatgactgggagagcccgagccagagccagaggaagggcccgcggtcaggagacagcgcagctggtgggctccactgccagtcagcaac

SEQ ID NO: 259888 - DNA, 120 bp, Artificial Sequence
  ENSG00000125207_3 (sequence is synthesized)
ctggttatattcagcctaggcctcagccgccaccagcagagggggaattatttggccgtggacggcagagaggaacagcaggaggaacagccaagtcacaaggactccagatatctgctg

SEQ ID NO: 259889 - DNA, 120 bp, Artificial Sequence
  ENSG00000125207_4 (sequence is synthesized)
gatttcaggagttatcgttagcagagagaggaggtcgtcgtagagattttcatgatcttggtgtgaatacaaggcagaacctagaccatgttaaagaatcaaaaacaggttcttcaggca

SEQ ID NO: 259890 - DNA, 120 bp, Artificial Sequence
  ENSG00000125207_5 (sequence is synthesized)
ttatagtaaggttaagcactaaccatttccggctgacatcccgtccccagtgggccttatatcagtatcacattgactataacccactgatggaagccagaagactccgttcagctcttc

SEQ ID NO: 259891 - DNA, 120 bp, Artificial Sequence
  ENSG00000125207_6 (sequence is synthesized)
tttttcaacacgaagatctaattggaaagtgtcatgcttttgatggaacgatattatttttacctaaaagactacagcaaaaggttactgaagtttttagtaagacccggaatggagagg

SEQ ID NO: 259892 - DNA, 120 bp, Artificial Sequence
  ENSG00000125207_7 (sequence is synthesized)
atgtgaggataacgatcactttaacaaatgaacttccacctacatcaccaacttgtttgcagttctataatattattttcaggaggcttttgaaaatcatgaatttgcaacaaattggac

SEQ ID NO: 259893 - DNA, 120 bp, Artificial Sequence
  ENSG00000125207_8 (sequence is synthesized)
gaaattattataacccaaatgacccaattgatattccaagtcacaggttggtgatttggcctggcttcactacttccatccttcagtatgaaaacagcatcatgctctgcactgacgtta

SEQ ID NO: 259894 - DNA, 120 bp, Artificial Sequence
  ENSG00000125207_9 (sequence is synthesized)
gccataaagtccttcgaagtgagactgttttggatttcatgttcaacttttatcatcagacagaagaacataaatttcaagaacaagtttccaaagaactaataggtttagttgttctta

SEQ ID NO: 259895 - DNA, 120 bp, Artificial Sequence
  ENSG00000125207_10 (sequence is synthesized)
ccaagtataacaataagacatacagagtggatgatattgactgggaccagaatcccaagagcacctttaagaaagccgacggctctgaagtcagcttcttagaatactacaggaagcaat

SEQ ID NO: 259896 - DNA, 120 bp, Artificial Sequence
  ENSG00000125207_11 (sequence is synthesized)
acaaccaagagatcaccgacttgaagcagcctgtcttggtcagccagcccaagagaaggcggggccctggggggacactgccagggcctgccatgctcattcctgagctctgctatctta

SEQ ID NO: 259897 - DNA, 120 bp, Artificial Sequence
  ENSG00000125207_12 (sequence is synthesized)
caggtctaactgataaaatgcgtaatgattttaacgtgatgaaagacttagccgttcatacaagactaactccagagcaaaggcagcgtgaagtgggacgactcattgattacattcata

SEQ ID NO: 259898 - DNA, 120 bp, Artificial Sequence
  ENSG00000125207_13 (sequence is synthesized)
aaaacgataatgttcaaagggagcttcgagactggggtttgagctttgattccaacttactgtccttctcaggaagaattttgcaaacagaaaagattcaccaaggtggaaaaacatttg

SEQ ID NO: 259899 - DNA, 120 bp, Artificial Sequence
  ENSG00000125207_14 (sequence is synthesized)
attacaatccacaatttgcagattggtccaaagaaacaagaggtgcaccattaattagtgttaagccactagataactggctgttgatctatacgcgaagaaattatgaagcagccaatt

SEQ ID NO: 259900 - DNA, 120 bp, Artificial Sequence
  ENSG00000125207_15 (sequence is synthesized)
cattgatacaaaatctatttaaagttacaccagccatgggcatgcaaatgagaaaagcaataatgattgaagtggatgacagaactgaagcctacttaagagtcttacagcaaaaggtca

SEQ ID NO: 259901 - DNA, 120 bp, Artificial Sequence
  ENSG00000125207_16 (sequence is synthesized)
atgctattaaaaaatacctgtgtacagattgccctaccccaagtcagtgtgtggtggcccgaaccttaggcaaacagcaaactgtcatggccattgctacaaagattgccctacagatga

SEQ ID NO: 259902 - DNA, 120 bp, Artificial Sequence
  ENSG00000125207_17 (sequence is synthesized)
actgcaagatgggaggagagctctggagggtggacatccccctgaagctcgtgatgatcgttggcatcgattgttaccatgacatgacagctgggcggaggtcaatcgcaggatttgttg

SEQ ID NO: 259903 - DNA, 120 bp, Artificial Sequence
  ENSG00000125207_18 (sequence is synthesized)
ccagcatcaatgaagggatgacccgctggttctcacgctgcatatttcaggatagaggacaggagctggtagatgggctcaaagtctgcctgcaagcggctctgagggcttggaatagct

SEQ ID NO: 259904 - DNA, 120 bp, Artificial Sequence
  ENSG00000125207_19 (sequence is synthesized)
gcaatgagtacatgcccagccggatcatcgtgtaccgcgatggcgtaggagacggccagctgaaaacactggtgaactacgaagtgccacagtttttggattgtctaaaatccattggta

SEQ ID NO: 259905 - DNA, 120 bp, Artificial Sequence
  ENSG00000125207_20 (sequence is synthesized)
gaggttacaaccctagactaacggtaattgtggtgaagaaaagagtgaacaccagattttttgctcagtctggaggaagacttcagaatccacttcctggaacagttattgatgtagagg

SEQ ID NO: 259906 - DNA, 120 bp, Artificial Sequence
  ENSG00000125207_21 (sequence is synthesized)
ttaccagaccagaatggtatgacttttttatcgtgagccaggctgtgagaagtggtagtgtttctcccacacattacaatgtcatctatgacaacagcggcctgaagccagaccacatac

SEQ ID NO: 259907 - DNA, 120 bp, Artificial Sequence
  ENSG00000125207_22 (sequence is synthesized)
agcgcttgacctacaagctgtgccacatctattacaactggccaggtgtcattcgtgttcctgctccttgccagtacgcccacaagctggcttttcttgttggccagagtattcacagag

SEQ ID NO: 259908 - DNA, 120 bp, Artificial Sequence
  ENSG00000125207_23 (sequence is synthesized)
agccaaatctgtcactgtcaaaccgcctttactacctctaacctgcagaagacgatgcagccgcttttctttttgaaatgactttgggatttttttaagcttttatttacttttttttta

SEQ ID NO: 259909 - DNA, 120 bp, Artificial Sequence
  ENSG00000125207_24 (sequence is synthesized)
actgttatctttctggatgaaacttgggaaggggattaggagatctagcattttatttctagcattgctattcaccggcttccttattttatacgtaaaaattaagattttatattttat

SEQ ID NO: 259910 - DNA, 120 bp, Artificial Sequence
  ENSG00000125207_25 (sequence is synthesized)
cttcttgtttctcatagatattttgtgagcatttttttgtttattttgaagaaatgtggataagatacttggtagtataaaacagactctctgagagtatttgaaatgtgtttggagatt

SEQ ID NO: 259911 - DNA, 120 bp, Artificial Sequence
  ENSG00000125207_26 (sequence is synthesized)
tacttaaacgtactttcaggagtgagcaagtcctacttataaacctatattaactttatttttgagatacctgttttgaatttaaaggagataagaggcgtaaagtaggatgctcactac

SEQ ID NO: 259912 - DNA, 120 bp, Artificial Sequence
  ENSG00000125207_27 (sequence is synthesized)
aaccataggtggggtttcagctcatatcttaaagataaaaggtactattatataacctatacacaagatacaggagaaaatatgcttgatttttatttggcaggggggctaggttgtatg

SEQ ID NO: 259913 - DNA, 120 bp, Artificial Sequence
  ENSG00000125207_28 (sequence is synthesized)
ggagtaaaaaaaacattgaaaatttttaaattgtccaaagaaacattttaagactctttaacaaaaaaggccatgagtaaatctctatattaacattactatttattttgttttggaact

SEQ ID NO: 259914 - DNA, 120 bp, Artificial Sequence
  ENSG00000125207_29 (sequence is synthesized)
gggacatgattctatttgttataaaataaaattgatgtgattgtcaccttatttgaataactgtaattcttgttttactgaaagtatgtgcgttttcttttcatttaatttttaaaagtg

SEQ ID NO: 259915 - DNA, 120 bp, Artificial Sequence
  ENSG00000125207_30 (sequence is synthesized)
atctccaaatgggaaagaaagaaccagccaccagcatcctaattctttcagcactttctcctcctaagtctgtttataataaataatccaaatgaaaaactaagtcttatattaaaatag

SEQ ID NO: 259916 - DNA, 120 bp, Artificial Sequence
  ENSG00000125207_31 (sequence is synthesized)
gttttcccctttggccctactgcagtgcccagtgcaaggtaagcaactgagtttgttgaatgtaggaatgttacattaaaaaaaactgtcattaaagattagaaggatacataataattg

SEQ ID NO: 259917 - DNA, 120 bp, Artificial Sequence
  ENSG00000125207_32 (sequence is synthesized)
cctggggagcttacttttgaaactcaaagaagtttaaagtaacattgtagaaattatcaaatgcgattgcctccattgagtattgtcttcaagattgtttcctctccagaaatagaaaac

SEQ ID NO: 259918 - DNA, 120 bp, Artificial Sequence
  ENSG00000125207_33 (sequence is synthesized)
caggttacagatttaaaccctctaaaccagcaacttctgtagttgtaattgcatcatgacagactgtggaaaatacatgaagacctttaggtagttatcagacttacaatacagaaaaat

SEQ ID NO: 259919 - DNA, 120 bp, Artificial Sequence
  ENSG00000125207_34 (sequence is synthesized)
aatttcccagtcagcaaacatatgctcctgcactcttgcaccacagtccagttggcttgatctcttgattcaaggtgcacatctcttgaaagggtgcatctgcaattgcccaggacagtg

SEQ ID NO: 259920 - DNA, 120 bp, Artificial Sequence
  ENSG00000125207_35 (sequence is synthesized)
acaaggcctttatgaatgaagttataactaggaaaccattctctcgttaggctggcagatacctaaaacatgttgataggattgttttatgccttgtcttctacacctcagtatcctttg

SEQ ID NO: 259921 - DNA, 120 bp, Artificial Sequence
  ENSG00000125207_36 (sequence is synthesized)
gttaggtggaagcgtctttggcagagctggtagcgaatcggagaggtgatttccagcgagtgtggttattggaagcacacacttgctttctgactttaagaattcaatatccagactgag

SEQ ID NO: 259922 - DNA, 120 bp, Artificial Sequence
  ENSG00000125207_37 (sequence is synthesized)
caggccaagaagcctgatgaaccttgacacaggagagccgcctgaagaatccaggtggggatgggtggctaaaaagggcagcctctagtatgggtgcatctggcgtgtggtaggccaagg

SEQ ID NO: 259923 - DNA, 120 bp, Artificial Sequence
  ENSG00000125245_0 (sequence is synthesized)
agtaaaatgtcacactgcaaactctgggcctggggtcccatgggacttcagtggttccaggactgatttcactgccatcacttatatatgatgatgcagacttcaagcatcaaagtacac

SEQ ID NO: 259924 - DNA, 120 bp, Artificial Sequence
  ENSG00000125245_1 (sequence is synthesized)
aaactgaagaaactttatcctttgtatataattatcttaaatatatgccatcatttcaaggggagcttatgctaagtgtgacttcataaacaaatcatttgtgaaagagaaaaaccacat

SEQ ID NO: 259925 - DNA, 120 bp, Artificial Sequence
  ENSG00000125245_2 (sequence is synthesized)
ccagggtaaagtcataaggtgaaaaagcctatttcagagagcacttcctgaaagagacaaagcagcaattaaagtcagcccagcaccaactccgacgccaagcgttacactggaaactac

SEQ ID NO: 259926 - DNA, 120 bp, Artificial Sequence
  ENSG00000125245_3 (sequence is synthesized)
tttttaaagcaacaaaagagtctaaaacaaaatacaacatttcttaaatacactgtttccagaaagagctattttaacagaagcaactcaaagatatcccttcgacagaagtggaagtgc

SEQ ID NO: 259927 - DNA, 120 bp, Artificial Sequence
  ENSG00000125245_4 (sequence is synthesized)
tgaaaaatgctcatctctcacacagacttttgatggacaggagtttctaagtatcatgcctaccaacaagctgtaaaatgatcaccctgaacaatcaagatcaacctgtcccttttaaca

SEQ ID NO: 259928 - DNA, 120 bp, Artificial Sequence
  ENSG00000125245_5 (sequence is synthesized)
gctcacatccagatgaatacaaaattgcagcccttgtcttctatagctgtatcttcataattggattatttgttaacatcactgcattatgggttttcagttgtaccaccaagaagagaa

SEQ ID NO: 259929 - DNA, 120 bp, Artificial Sequence
  ENSG00000125245_6 (sequence is synthesized)
ccacggtaaccatctatatgatgaatgtggcattagtggacttgatatttataatgactttaccctttcgaatgttttattatgcaaaagatgaatggccatttggagagtacttctgcc

SEQ ID NO: 259930 - DNA, 120 bp, Artificial Sequence
  ENSG00000125245_7 (sequence is synthesized)
cagtgttttacccaagcattgctttatggcttcttgcctttattagtgctgacagatacatggccattgtacagccgaagtacgccaaagaacttaaaaacacgtgcaaagccgtgctgg

SEQ ID NO: 259931 - DNA, 120 bp, Artificial Sequence
  ENSG00000125245_8 (sequence is synthesized)
cgtgtgtgggagtctggataatgaccctgaccacgaccacccctctgctactgctctataaagacccagataaagactccactcccgccacctgcctcaagatttctgacatcatctatc

SEQ ID NO: 259932 - DNA, 120 bp, Artificial Sequence
  ENSG00000125245_9 (sequence is synthesized)
taaaagctgtgaacgtgctgaacctcactcgactgacattttttttcttgattcctttgttcatcatgattgggtgctacttggtcattattcataatctccttcacggcaggacgtcta

SEQ ID NO: 259933 - DNA, 120 bp, Artificial Sequence
  ENSG00000125245_10 (sequence is synthesized)
agctgaaacccaaagtcaaggagaagtccataaggatcatcatcacgctgctggtgcaggtgctcgtctgctttatgcccttccacatctgtttcgctttcctgatgctgggaacggggg

SEQ ID NO: 259934 - DNA, 120 bp, Artificial Sequence
  ENSG00000125245_11 (sequence is synthesized)
agaacagttacaatccctggggagcctttaccaccttcctcatgaacctcagcacgtgtctggatgtgattctctactacatcgtttcaaaacaatttcaggctcgagtcattagtgtca

SEQ ID NO: 259935 - DNA, 120 bp, Artificial Sequence
  ENSG00000125245_12 (sequence is synthesized)
tgctataccgtaattaccttcgaagcatgcgcagaaaaagtttccgatctggtagtctacggtcactaagcaatataaacagtgaaatgttatgaataataaggttctttcatttcaatc

SEQ ID NO: 259936 - DNA, 120 bp, Artificial Sequence
  ENSG00000125245_13 (sequence is synthesized)
ccatcaaaattcacttcactaactactctggcgtcaatggatattctgtataatactatcaagtcccttttctcttgaaaaaataaattcattatcttcattttaaaaacttatataaaa

SEQ ID NO: 259937 - DNA, 120 bp, Artificial Sequence
  ENSG00000125245_14 (sequence is synthesized)
gctcatctctcacacagacttttgatggacaggaggtgctgctttctgtgaaccactgaagtagagcagctgaaatcacaaaacctggaagacttggctttacgtactcccaattgtgca

SEQ ID NO: 259938 - DNA, 120 bp, Artificial Sequence
  ENSG00000125245_15 (sequence is synthesized)
ctagaaaacagctcatctattgctctaacagtctagttcttgatctgctgaccatgacacaaaacattgctgtttctcaacctatgataatttaaagagaacataagtttctaagtatca

SEQ ID NO: 259939 - DNA, 120 bp, Artificial Sequence
  ENSG00000125246_0 (sequence is synthesized)
atggcgctacgtctgctgcggagggcggcgcgcggagctgcggcggcggcgctgctgaggctgaaagcgtctctagcagctgatatccccagacttggatatagttcctcatcccatcac

SEQ ID NO: 259940 - DNA, 120 bp, Artificial Sequence
  ENSG00000125246_1 (sequence is synthesized)
aagtacatcccccggagggcagtgctttatgtacctggaaatgatgaaaagaaaataaagaagattccatccctgaatgtagattgtgcagtgctcgactgtgaggatggagtggctgca

SEQ ID NO: 259941 - DNA, 120 bp, Artificial Sequence
  ENSG00000125246_2 (sequence is synthesized)
aacaaaaagaatgaagctcgactgagaattgtaaaaactcttgaagacattgatctgggccctactgaaaaatgtgtgagagtcaactcagtttccagtggtctggcggaagaagaccta

SEQ ID NO: 259942 - DNA, 120 bp, Artificial Sequence
  ENSG00000125246_3 (sequence is synthesized)
gagacccttttgcaatcccgggtccttccttccagcctgatgctaccaaaggtggaaagtcctgaagaaatccagtggtttgcagacaaattttcattccacttaaaaggccgaaaactt

SEQ ID NO: 259943 - DNA, 120 bp, Artificial Sequence
  ENSG00000125246_4 (sequence is synthesized)
gcctcaagtaggtctctttctagatgcagtcgtttttggaggagaagactttcgagccagcataggtgcaacaagtagtaaagaaaccctggatattctctacgcccggcaaaagattgt

SEQ ID NO: 259944 - DNA, 120 bp, Artificial Sequence
  ENSG00000125246_5 (sequence is synthesized)
tgtcatagcgaaagcctttggtctccaagccatagatctggtgtacattgactttcgagatggagctgggctgcttagacagtcacgagaaggagccgccatgggcttcactggtaagca

SEQ ID NO: 259945 - DNA, 120 bp, Artificial Sequence
  ENSG00000125246_6 (sequence is synthesized)
ggtgattcaccctaaccaaattgccgtggtccaggagcagttttctccttcccctgaaaaaattaagtgggctgaagaactgattgctgcctttaaagaacatcaacaattaggaaaggg

SEQ ID NO: 259946 - DNA, 120 bp, Artificial Sequence
  ENSG00000125246_7 (sequence is synthesized)
ggcctttactttccaagggagtatgatcgacatgccattactgaagcaggcccagaacactgttacgcttgccacctccatcaaggaaaaatgatctgttaaatgaagctgtcatcaggc

SEQ ID NO: 259947 - DNA, 120 bp, Artificial Sequence
  ENSG00000125246_8 (sequence is synthesized)
taaagggtattgaagctgcagagggatcaacttgtgcttgccagaggacgccaatgaagtttgaaacaccaacaatcagagattttgtttctgttcctcattaaatcatgagcttttgtg

SEQ ID NO: 259948 - DNA, 120 bp, Artificial Sequence
  ENSG00000125246_9 (sequence is synthesized)
tgaacatatacagtggggttcttaaagacaaaccacaatactcaaagcaacttgttaggatgccagattgggacctgactccatttacagttcatgttaatcacaattttgttgttgttg

SEQ ID NO: 259949 - DNA, 120 bp, Artificial Sequence
  ENSG00000125246_10 (sequence is synthesized)
tctcactggccagttattcccctaaaaaaatgaacgcttttccctttggatccaagcttatgattttatcatttttagtgtattacgaatatgggcttatgatttcacagggaggtaaga

SEQ ID NO: 259950 - DNA, 120 bp, Artificial Sequence
  ENSG00000125246_11 (sequence is synthesized)
tcctggggaaagatgggctgtgaggcgaaggtaggtctttaatgaaatggatctttcccaaatagacatattccctccacccttctcatgttagtaaatgtttcctgcttgttcatttat

SEQ ID NO: 259951 - DNA, 120 bp, Artificial Sequence
  ENSG00000125246_12 (sequence is synthesized)
acagctgacaccacaaataattttaagaaaagccaggcctttaaaacatagtagcaacattaaggggtcatctctatttcactagtaatctgataaaacaacagagatggcatcaaaaaa

SEQ ID NO: 259952 - DNA, 120 bp, Artificial Sequence
  ENSG00000125246_13 (sequence is synthesized)
gaatactaagtattatattggcttaaaaagacactttctgaaaataaactttcgaaactggttactattaacctccacccctaaaacgaaacatccatctccttgaaccgctagacgatg

SEQ ID NO: 259953 - DNA, 120 bp, Artificial Sequence
  ENSG00000125246_14 (sequence is synthesized)
aacacgaaagctgtcatcctgggtgaatgctgtgagtcaaccattaccggcaattaaaaaataaatgtgcagaaacacaagaccatccattctccccctttattttcccgtttaactgtt

SEQ ID NO: 259954 - DNA, 120 bp, Artificial Sequence
  ENSG00000125246_15 (sequence is synthesized)
tgccattgaggctatttccccctggaaatgtatggctgggacaggactccctcagtcataaacttgtagcgtctcagaagacacaatgcacccgagctggtgcatgtggcccctgcgaga

SEQ ID NO: 259955 - DNA, 120 bp, Artificial Sequence
  ENSG00000125246_16 (sequence is synthesized)
tttgcatcacattagagatgcggctgcaggtcagatgggtggtgtggttaacgggcttagtaaagctgttttgaagaggttaacccagcttgtagtaagggtaaataaacataacaacca

SEQ ID NO: 259956 - DNA, 120 bp, Artificial Sequence
  ENSG00000125246_17 (sequence is synthesized)
acacagcagcaacgctgctactcttagacaaacaccgcggggaaggctgttctgtttatttaaatttgtaaatagaaaacagttgttttttactttcatttttcacctcctcctacgccc

SEQ ID NO: 259957 - DNA, 120 bp, Artificial Sequence
  ENSG00000125246_18 (sequence is synthesized)
ttttggattatttcctctgcggcccctagcatgagccccaaccaggcctccccttttccccacttctctcaattcccacaggaagcccgagaggtgaggagctgaggttagacaccagga

SEQ ID NO: 259958 - DNA, 120 bp, Artificial Sequence
  ENSG00000125246_19 (sequence is synthesized)
gaggcaccatcacacaaaagcgcggccgcagagtcccaccgccaccaggcgacccccacccagagagggacagacatgcggggagccagcaccgggcaagatggctctggggatcctcat

SEQ ID NO: 259959 - DNA, 120 bp, Artificial Sequence
  ENSG00000125246_20 (sequence is synthesized)
tctgtgaagacaccaactcatttctcaaacacaggatccaggagacagatagctcctaaatggagatggcacatgctccgtggggtccctcatagaggagtgccaccctccacactggcc

SEQ ID NO: 259960 - DNA, 120 bp, Artificial Sequence
  ENSG00000125246_21 (sequence is synthesized)
acgctgggctgccccagagcggccagaaaggaaggtgggagctagccccatcctcactcagaggccggaaggaggaagatggcatctcgccaacttcagagccgaatggcctctagccac

SEQ ID NO: 259961 - DNA, 120 bp, Artificial Sequence
  ENSG00000125246_22 (sequence is synthesized)
actgcttccagaccccagacggggcagcagcagcagttcccagaggagcacccattgttgcagctaggacccaccaaggatgggactcctggagtcaggtgcacaccaggtaacccagga

SEQ ID NO: 259962 - DNA, 120 bp, Artificial Sequence
  ENSG00000125246_23 (sequence is synthesized)
ccacgctgtgcacccccagtctgcccctctgctcagaacacagagggatgggaggatggcttggcagtgggaaggcaaaagaaggcctctctcactctgcccctgccatacgcacccgct

SEQ ID NO: 259963 - DNA, 120 bp, Artificial Sequence
  ENSG00000125246_24 (sequence is synthesized)
gagggtgttagaagcagtggaggcagagctggccctaagcaaaagaagaaaataaacctcaccttgtccttcctatgggcagccctcaccccaatctaactaaccttcccatcctccagc

SEQ ID NO: 259964 - DNA, 120 bp, Artificial Sequence
  ENSG00000125246_25 (sequence is synthesized)
ctaatccaaagaagcccttggcttgaggggatgaagggcttgcgttctagtctccaccccagccccacaggcagccagccagccagccccacacagaggggcctcctcaaggcctcactg

SEQ ID NO: 259965 - DNA, 120 bp, Artificial Sequence
  ENSG00000125246_26 (sequence is synthesized)
cccctccgcaaggcccctgggtggtgcggaggccggaccggctaggcctcccgctgctggccactcccaggccacgggttcctaggtcccaaccacattggactgctcgccacgccactg

SEQ ID NO: 259966 - DNA, 120 bp, Artificial Sequence
  ENSG00000125246_27 (sequence is synthesized)
ccctcatcccaaactgctttgttcaaacaaaaccaccttgtttcagtctccccaaatgtccagttcattatcttcctcataacccatggtccctattagggtaggatcatgagactaaga

SEQ ID NO: 259967 - DNA, 120 bp, Artificial Sequence
  ENSG00000125246_28 (sequence is synthesized)
cctatgagagccacaaatctggaccaaagtcccattccctgaacagagacccaaacgacgagggtcccagaagagagttcagtcctgatcagaaacccatggtgccttagtccttgaaga

SEQ ID NO: 259968 - DNA, 120 bp, Artificial Sequence
  ENSG00000125246_29 (sequence is synthesized)
acaaaactctaggaagaagatgctggaaggcaaagggtattccccctctttccccacccgcgtctctgtggtgccatgggtgggcccaggtaccctgggaaaggtgggagagcagtcaag

SEQ ID NO: 259969 - DNA, 120 bp, Artificial Sequence
  ENSG00000125246_30 (sequence is synthesized)
ggtgggtgtgtgatctccactgggctcactgggcacccccgacacggggaagtgagagctgcccgactcctgagccaggcgtgggtgacaggaagaggaccttgcagctaatctgattca

SEQ ID NO: 259970 - DNA, 120 bp, Artificial Sequence
  ENSG00000125246_31 (sequence is synthesized)
ttagaaaccatacctgtttatgttttgtgtagctcatcacaagccgcttagccatatcacccccgttattaattcttggggtctaaattatgggtaacactattaaaacattatcagaac

SEQ ID NO: 259971 - DNA, 120 bp, Artificial Sequence
  ENSG00000125246_32 (sequence is synthesized)
taatgagaaacaattacttagaaaatgagccgggacaagactgagttgggaacatcagtggtgatcactgtagattagtttaataaatcatcaggtgcaaggcaagactgactgtatgta

SEQ ID NO: 259972 - DNA, 120 bp, Artificial Sequence
  ENSG00000125246_33 (sequence is synthesized)
tgcaaagccccgtcacgggaaaatgaaattgagattttttttttttgcataattttttcattaatctcaataggacccgtgtggtgtagattgctttattcccctaataccttgcctgag

SEQ ID NO: 259973 - DNA, 120 bp, Artificial Sequence
  ENSG00000125246_34 (sequence is synthesized)
gcgggggggggggggggtgcccaataatgtcttcattgttttactgaggtcttaatgacaatctgtgacaacctcattttaatgtatagaggattatatcaatacagtcatgttttattg

SEQ ID NO: 259974 - DNA, 120 bp, Artificial Sequence
  ENSG00000125246_35 (sequence is synthesized)
aaatggtgaagggaactccagtcagagtcaggcagtgtctgtgagcacaagttaggaagtttctcggcatccgggagcgttcccgtctgatgtcccagtgttagtcctcccggccgccct

SEQ ID NO: 259975 - DNA, 120 bp, Artificial Sequence
  ENSG00000125246_36 (sequence is synthesized)
cccctcctctcctccagggacggctgggaaaacagtcctgcgggatgaagacttcaccgcctccgatttgaatttgaaagtaactccttccgtggcatatttcgctgggcagatagaaca

SEQ ID NO: 259976 - DNA, 120 bp, Artificial Sequence
  ENSG00000125246_37 (sequence is synthesized)
aaccatgtcgttttcccccgtctctaaaatagacatattattatcattcacacttttgcacccggtcgttttgcgggagttcgggaaactgactttcttcattggggacattgtaatttt

SEQ ID NO: 259977 - DNA, 120 bp, Artificial Sequence
  ENSG00000125246_38 (sequence is synthesized)
ctgatgatgccacgaggagaaaaaaaatacgggtttgttttaattggaaggaccttccgcttttatgatttcggtttaccttggaaaactgaatcttctgtgttttatttctttcctcta

SEQ ID NO: 259978 - DNA, 120 bp, Artificial Sequence
  ENSG00000125246_39 (sequence is synthesized)
gtactagaaaagcaatgaattaattgcacaaaacaggttctgagacggcccgcaggccccgagctcgtggacgcggccgagggtcgggtgtgacccgcggagccgctgccaggcttccca

SEQ ID NO: 259979 - DNA, 120 bp, Artificial Sequence
  ENSG00000125246_40 (sequence is synthesized)
gctcgtcttcgcggggaggcgggaggcaggaccagaccccagcatttcagcgtgaaagtcttcgcctttctttccgcgctgtctttcccgcgggcggagcggcgtacctgagcgcggtcc

SEQ ID NO: 259980 - DNA, 120 bp, Artificial Sequence
  ENSG00000125246_41 (sequence is synthesized)
ccacggaggatcagtgactttcccagaccccgcgggcgagcccgcgcttgggacccggcagctctgcgcgggctggttttggagggggtggtgttcgtttgtttaaattccagttgttat

SEQ ID NO: 259981 - DNA, 120 bp, Artificial Sequence
  ENSG00000125246_42 (sequence is synthesized)
ttggcagcatatcgccttccgagtcagtaagaattgcccacgacgtaaagagcgacttgcaggaaggggccgaagccgtcgttagcgcccgggcggcggcggccactcgaaccccgtttc

SEQ ID NO: 259982 - DNA, 120 bp, Artificial Sequence
  ENSG00000125246_43 (sequence is synthesized)
cgccaagcgcgctgcaacctgcggggcgagttcgttttgttttgccaaaatcatttggggacttctttgtcattcatgcccttccttttaaatgatttttatttttttccactgtaagtg

SEQ ID NO: 259983 - DNA, 120 bp, Artificial Sequence
  ENSG00000125246_44 (sequence is synthesized)
accggctgggtttgacttttgcttcttccgacggaagggcaccgcgagccggggtgggcggccccgcgggcaggaggagcgcggggtacacgcggtggccgcagacgccgagccctgcgg

SEQ ID NO: 259984 - DNA, 80 bp, Artificial Sequence
  ENSG00000125246_45 (sequence is synthesized)
gcggagccggggccgaggccgggccaggaggagtgtggcggcccaggaggcctggactgtgggccctgctcgcccgcccg

SEQ ID NO: 259985 - DNA, 120 bp, Artificial Sequence
  ENSG00000125246_46 (sequence is synthesized)
gggccgcccggagcccgcgcgcctgtcgcgcagcccggctgtaatggtggcagatcaaaggcggccccgtgtccccgcggagcccgggacaatcccgcgcctttgtgcgctgttgctagg

SEQ ID NO: 259986 - DNA, 120 bp, Artificial Sequence
  ENSG00000125246_47 (sequence is synthesized)
agcccgagaaactaagagaaagtgtcaggagcatgttaatcagactcgttacactgtaacaataacgtctctctcgggtctcccaggccccagtacccccgcgcaccctgcgcgcaggcc

SEQ ID NO: 259987 - DNA, 120 bp, Artificial Sequence
  ENSG00000125246_48 (sequence is synthesized)
ccctggggtcccgccggccctggggtccctgcagccccgaatccgcacccgagccacgcggaacgactagccccgaggggccccgcaggctcccggtgcagctccctggtcgtggtctcc

SEQ ID NO: 259988 - DNA, 120 bp, Artificial Sequence
  ENSG00000125246_49 (sequence is synthesized)
ccggtgcagctccctggtcgtggtctccttgaccgaagccccggcctcacaccgcctggccgcgagcccgagggacgcagggacgatcccggtcccctgcttttcagtcctccagtcgaa

SEQ ID NO: 259989 - DNA, 120 bp, Artificial Sequence
  ENSG00000125246_50 (sequence is synthesized)
tcgcccactttgttcaatcacagtattcgaatcaagaggaaaatgaacattccctttatggtagctttttggttatgagttttggcaaaactgttaaatcaactttgccgatttcccttg

SEQ ID NO: 259990 - DNA, 120 bp, Artificial Sequence
  ENSG00000125246_51 (sequence is synthesized)
ggaatccctggaggccactctaagtggtaatcccaagtttaagaaggaaatggggaaattttgctgagagtaaagatgtcgccgaactttttgaagggatttgcttcattcattcattta

SEQ ID NO: 259991 - DNA, 120 bp, Artificial Sequence
  ENSG00000125246_52 (sequence is synthesized)
gtcattcaacagacacctgttgaacccgactgggtgccagaggggccagtcacaggacttattccagatgaacttttcttttgaaattagaatgcccttgtggaagccaaaggaggagca

SEQ ID NO: 259992 - DNA, 120 bp, Artificial Sequence
  ENSG00000125246_53 (sequence is synthesized)
gaggcctaaaataatgtcaagtgtcaaagcaaaaagaagtgccattggctactacagtgtgtgatgataacaagagaggtgcgaattaggaattaaaaacgtttgaaaaactacaggcca

SEQ ID NO: 259993 - DNA, 120 bp, Artificial Sequence
  ENSG00000125246_54 (sequence is synthesized)
tttttggaggagaagactttcgagccagcataggtgtcaaagacatctctctctctctttttctgtgtgtgtgtgtgtatatgtgtgtatatattttttctttgcccctcaaggatggac

SEQ ID NO: 259994 - DNA, 120 bp, Artificial Sequence
  ENSG00000125246_55 (sequence is synthesized)
atttacataacaatgtatatttgccaaccatgacaatggtttttcatgacaatggaatggacactacttcctgataatttagggctcctcatagctgccctgcttctagagcactgcatt

SEQ ID NO: 259995 - DNA, 120 bp, Artificial Sequence
  ENSG00000125246_56 (sequence is synthesized)
attacttctgttcatttataaaagacacgagcaatagaaagcctgttgcagccccaggcatgctcaggaatatatggcatctcctttgctcctaataaatatattatgtgaacagcctca

SEQ ID NO: 259996 - DNA, 120 bp, Artificial Sequence
  ENSG00000125246_57 (sequence is synthesized)
gaagaactgattgctgcctttaaagaacatcaacaattaggaaaggtaggtcggtattgctgctcttggctttgcattcagccttttccatcatcaccaggtcagcggtcacagagcatc

SEQ ID NO: 259997 - DNA, 120 bp, Artificial Sequence
  ENSG00000125247_0 (sequence is synthesized)
ggggtcgggtgcgcggcgggcggcccctccccctgccaggtccgggcgggtgcctggagccgccagagtttccgcacccgggagggagatgcggccggggctcaggctccttgcagattc

SEQ ID NO: 259998 - DNA, 120 bp, Artificial Sequence
  ENSG00000125247_1 (sequence is synthesized)
ctcaggctccttgcagattcctaaccagcataatgctggagccgggagccaccaacctgcagttttcagaatggccgtgttggacactgatttggatcacattcttccatcttctgttct

SEQ ID NO: 259999 - DNA, 120 bp, Artificial Sequence
  ENSG00000125247_2 (sequence is synthesized)
tcctccattctgggctaagttagtagtgggatcggttgccattgtgtgttttgcacgcagctatgatggagactttgtctttgatgactcagaagctattgttaacaataaggacctcca

SEQ ID NO: 260000 - DNA, 120 bp, Artificial Sequence
  ENSG00000125247_3 (sequence is synthesized)
agcagaaacgcccctgggggacctgtggcatcatgacttctggggcagtagactgagcagcaacaccagccacaagtcctaccggcctctcaccgtcctgactttcaggattaactacta

SEQ ID NO: 260001 - DNA, 120 bp, Artificial Sequence
  ENSG00000125247_4 (sequence is synthesized)
cctctcgggaggcttccaccccgtgggctttcacgtggtcaacatcctcctgcacagtggcatctctgtcctcatggtggacgtcttctcggttctgtttggcggcctgcagtacaccag

SEQ ID NO: 260002 - DNA, 120 bp, Artificial Sequence
  ENSG00000125247_5 (sequence is synthesized)
taaaggccggaggctgcacctcgcccccagggcgtccctgctggccgcgctgctgtttgctgtccatcctgtgcacaccgagtgtgttgctggtgttgtcggccgtgcagacctcctgtg

SEQ ID NO: 260003 - DNA, 120 bp, Artificial Sequence
  ENSG00000125247_6 (sequence is synthesized)
tgccctgttcttcttgttatctttccttggctactgtaaagcatttagagaaagtaacaaggagggagcgcattcttccaccttctgggtgctgctgagtatctttctgggagcagtggc

SEQ ID NO: 260004 - DNA, 120 bp, Artificial Sequence
  ENSG00000125247_7 (sequence is synthesized)
catgctgtgcaaagagcaagggatcactgtgctgggtttaaatgcggtatttgacatcttggtgataggcaaattcaatgttctggaaattgtccagaaggtactacataaggacaagtc

SEQ ID NO: 260005 - DNA, 120 bp, Artificial Sequence
  ENSG00000125247_8 (sequence is synthesized)
attagagaatctcggcatgctcaggaacgggggcctcctcttcagaatgaccctgctcacctctggaggggctgggatgctctacgtgcgctggaggatcatgggcacgggcccgccggc

SEQ ID NO: 260006 - DNA, 120 bp, Artificial Sequence
  ENSG00000125247_9 (sequence is synthesized)
cttcaccgaggtggacaacccggcctcctttgctgacagcatgctggtgagggccgtaaactacaattactactattcattgaatgcctggctgctgctgtgtccctggtggctgtgttt

SEQ ID NO: 260007 - DNA, 120 bp, Artificial Sequence
  ENSG00000125247_10 (sequence is synthesized)
tgattggtcaatgggctgcatccccctcattaagtccatcagcgactggagggtaattgcacttgcagcactctggttctgcctaattggcctgatatgccaagccctgtgctctgaaga

SEQ ID NO: 260008 - DNA, 120 bp, Artificial Sequence
  ENSG00000125247_11 (sequence is synthesized)
cggccacaagagaaggatccttactctgggcctgggatttctcgttatcccatttctccccgcgagtaacctgttcttccgagtgggcttcgtggtcgcagagcgtgtcctctacctccc

SEQ ID NO: 260009 - DNA, 120 bp, Artificial Sequence
  ENSG00000125247_12 (sequence is synthesized)
cagcgttgggtactgtgtgctgctgacttttggattcggagccctgagcaaacataccaagaaaaagaaactcattgccgctgtcgtgctgggaatcttattcatcaacacgctgagatg

SEQ ID NO: 260010 - DNA, 120 bp, Artificial Sequence
  ENSG00000125247_13 (sequence is synthesized)
tgtgctgcgcagcggcgagtggcggagtgaggaacagcttttcagaagtgctctgtctgtgtgtcccctcaatgctaaggttcactacaacattggcaaaaacctggctgataaaggcaa

SEQ ID NO: 260011 - DNA, 120 bp, Artificial Sequence
  ENSG00000125247_14 (sequence is synthesized)
gacagctgccatcagatactaccgggaagctgtaagattaaatcccaagtatgttcatgccatgaataatcttggaaatatcttaaaagaaaggaatgagctacaggaagctgaggagct

SEQ ID NO: 260012 - DNA, 120 bp, Artificial Sequence
  ENSG00000125247_15 (sequence is synthesized)
gctgtctttggctgttcaaatacagccagactttgccgctgcgtggatgaatctaggcatagtgcagaatagcctgaaacggtttgaagcagcagagcaaagttaccggacagcaattaa

SEQ ID NO: 260013 - DNA, 120 bp, Artificial Sequence
  ENSG00000125247_16 (sequence is synthesized)
acacagaaggaaatacccagactgttactacaacctcgggcgtctgtatgcagatctcaatcgccacgtggatgccttgaatgcgtggagaaatgccaccgtgctgaaaccagagcacag

SEQ ID NO: 260014 - DNA, 120 bp, Artificial Sequence
  ENSG00000125247_17 (sequence is synthesized)
cctggcctggaacaacatgattatactcctcgacaatacaggtaatttagcccaagctgaagcagttggaagagaggcactggaattaatacctaatgatcactctctcatgttctcgtt

SEQ ID NO: 260015 - DNA, 120 bp, Artificial Sequence
  ENSG00000125247_18 (sequence is synthesized)
ggcaaacgtgctggggaaatcccagaaatacaaggaatctgaagctttattcctcaaggcaattaaagcaaatccaaatgctgcaagttaccatggtaatttggctgtgctttatcatcg

SEQ ID NO: 260016 - DNA, 120 bp, Artificial Sequence
  ENSG00000125247_19 (sequence is synthesized)
ttggggacatctagacttggccaagaaacactatgaaatctccttgcagcttgaccccacggcatcaggaactaaggagaattacggtctgctgagaagaaagctagaactaatgcaaaa

SEQ ID NO: 260017 - DNA, 120 bp, Artificial Sequence
  ENSG00000125247_20 (sequence is synthesized)
gaaagctgtctgatcctgtttccttcatgttttgagtttgagtgtgtgtgtgcatgaggcatatcattaatagtatgtggttacatttaaccatttaaaagtcttagacatgttatttta

SEQ ID NO: 260018 - DNA, 120 bp, Artificial Sequence
  ENSG00000125247_21 (sequence is synthesized)
ctgatttttttctatgaaaacaaagacatgcaaaaagattatagcaccagcaatatactcttgaatgcgtgatatgatttttcattgaaattgtattttttcagacaactcaaatgtaat

SEQ ID NO: 260019 - DNA, 120 bp, Artificial Sequence
  ENSG00000125247_22 (sequence is synthesized)
tctaaaattccaaaaatgtcttttttaattaaacagaaaaagagaaaaaattatcttgagcaacttttagtagaattgagcttacatttgggatctgagccttgtcgtgtatggactagc

SEQ ID NO: 260020 - DNA, 120 bp, Artificial Sequence
  ENSG00000125247_23 (sequence is synthesized)
actattaaacttcaattatgaccaagaaaggatacactggcccctacaatttgtataaatattgaacatgtctatatattagcatttttatttaatgacaaagcaaattaagttttttta

SEQ ID NO: 260021 - DNA, 120 bp, Artificial Sequence
  ENSG00000125247_24 (sequence is synthesized)
tctcttttttttaaaacaacatactgtgaactttgtaaggaaatatttatttgtatttttatgttttgaatagggcaaataatcgaatgaggaatggaagttttaacatagtatatctat

SEQ ID NO: 260022 - DNA, 120 bp, Artificial Sequence
  ENSG00000125247_25 (sequence is synthesized)
atgcttttccccataggaagaaattgactcttgcagtttttggatgctctgacttgtgcaatttcaatacacaggagattatgtaatgtaatattttacataagcggttactatcaattg

SEQ ID NO: 260023 - DNA, 120 bp, Artificial Sequence
  ENSG00000125247_26 (sequence is synthesized)
aaagttcaagccatgctttaggcaagagcaggcagcctcacatctttatttttgttacatccaaggtgaagagggcaacacatctgtgtaagctgctttttagtgtgtttatctgaaggc

SEQ ID NO: 260024 - DNA, 120 bp, Artificial Sequence
  ENSG00000125247_27 (sequence is synthesized)
cgttttccattttgcttaatgtaactacagacattatccagaaaatgcaaaattttctatcaaatggagccacattcggggaattcgtggtatttttaagaattgagttgttcctgctgt

SEQ ID NO: 260025 - DNA, 120 bp, Artificial Sequence
  ENSG00000125247_28 (sequence is synthesized)
tttttatttgatccaaacaatgttttgttttgttcttctctgtatgctgttgacctaatgatttatgcaatctctgtaatttcttatgcagtaaaattactacacaaactagcatgaaaa

SEQ ID NO: 260026 - DNA, 120 bp, Artificial Sequence
  ENSG00000125247_29 (sequence is synthesized)
ctggcaaaggcctgctctcatcaatgtgtggtttccaaagtcaccctgtccatctccattccagccagctggaaggggaaaccaagtgggaatgtgtgcccaagttttacaaccaaacat

SEQ ID NO: 260027 - DNA, 120 bp, Artificial Sequence
  ENSG00000125247_30 (sequence is synthesized)
ccaaaatggtacgtgtcgcttctcccacattccataaggctagaactcagccccgcaacctagtttaactgcaggggaggctgggagatgtcatctagttgtaacccagcgagaaaacta

SEQ ID NO: 260028 - DNA, 120 bp, Artificial Sequence
  ENSG00000125247_31 (sequence is synthesized)
ctggacaactagatttctgcacaagagatctccagagctccattagagattatcatgtgtgttcatcccatttctaaagatgccaaagtgcactggcacttaaggttcacttacatggct

SEQ ID NO: 260029 - DNA, 120 bp, Artificial Sequence
  ENSG00000125247_32 (sequence is synthesized)
gggtttttgaggttgatggctgcctttatcttccagtatgattactgcccaggaaaacactctgttgcatgaactaaaggactgttttatagtgaccaaaaaaagtggggagggggtatc

SEQ ID NO: 260030 - DNA, 120 bp, Artificial Sequence
  ENSG00000125247_33 (sequence is synthesized)
tctcgagggcttttcctaggaatcccaaatttctagctatcctgaatcttgtagaactcctacacgcagactgtgaaatcattactatcaggggcttactaaataataaatatgatctat

SEQ ID NO: 260031 - DNA, 120 bp, Artificial Sequence
  ENSG00000125247_34 (sequence is synthesized)
taccttgagctaatttcatagaaacgtacggctgttatgtgtttttttaaagagctgcagaggtcttccgtgattctctagtctatgtgttccttgtctagattgagtaatgaaattgtg

SEQ ID NO: 260032 - DNA, 120 bp, Artificial Sequence
  ENSG00000125247_35 (sequence is synthesized)
aagtgtaattgctgcctaacacagccaagctctcccgtggctgattgtcttgctttgctttcttagggtttaaatgcggtatttgacatcttggtgataggcaaattcaatgttctggaa

SEQ ID NO: 260033 - DNA, 120 bp, Artificial Sequence
  ENSG00000125247_36 (sequence is synthesized)
attgtccagaaggtactacataaggacaagtcattagaggtgagtctgtacttttatctccagcccagacatggaaaatgtcaagtaccagctgatttaaaatgccattctcaaatattc

SEQ ID NO: 260034 - DNA, 120 bp, Artificial Sequence
  ENSG00000125247_37 (sequence is synthesized)
cttgtgattttgaattctacaataaccagccttttaaagcacagtgttgaagcagttcaggcagaattgctgcacatctgtacctggctcagccacacttttatgtgaaaatcagccacc

SEQ ID NO: 260035 - DNA, 120 bp, Artificial Sequence
  ENSG00000125247_38 (sequence is synthesized)
tggaaggaaagatgggttatttttcttatttataataaaatgacatagtgacacccacctagcccatacattttataaagttctttcacatgtttctatctcatttgaaggtagctattt

SEQ ID NO: 260036 - DNA, 120 bp, Artificial Sequence
  ENSG00000125247_39 (sequence is synthesized)
gatttccttttgagtaattttttaaagctctcattagagagcagtacagtgtgaattagtcaagtttaagaggtcacccacgcaaaaggttaaacccaggaataaattaacatgttaaag

SEQ ID NO: 260037 - DNA, 120 bp, Artificial Sequence
  ENSG00000125247_40 (sequence is synthesized)
tcccgtccgccctgtaaaacagcactccaatgggtaacttcctgataaacatcagtttctctgtttttaaaacaagaattgagtaagaacagagattaaagtaacaaatccgtagtatga

SEQ ID NO: 260038 - DNA, 120 bp, Artificial Sequence
  ENSG00000125247_41 (sequence is synthesized)
tttctgagctcccttgttctccttcttcaagggagcagagctcttcatctgcagggagcatttcccccaaaaaaggcagctttggagggcacgggatttatttgaaagggctttgacatt

SEQ ID NO: 260039 - DNA, 120 bp, Artificial Sequence
  ENSG00000125247_42 (sequence is synthesized)
atttggtggaaatagaaaataacgtgttctgtagtagctttatatttttggttattgacaggatgtttacgaagatctgattgctcttgattttcttgacaaaaataaaatgagacacac

SEQ ID NO: 260040 - DNA, 120 bp, Artificial Sequence
  ENSG00000125247_43 (sequence is synthesized)
tgggattacaggcgtgagccattgcaaccagccttgatttgttgttttttaagtagcaggagtaatttctttagctgaaatgtaagcatagaggttggggtctgtgtgctaacctgtgtt

SEQ ID NO: 260041 - DNA, 120 bp, Artificial Sequence
  ENSG00000125247_44 (sequence is synthesized)
agcatagaggttggggtctgtgtgctaacctgtgttgtgtttgcagttgtaatttagattcgagaagtggtttatcctttgactggaaaagaaaagtagctgcagtattcccccagcact

SEQ ID NO: 260042 - DNA, 120 bp, Artificial Sequence
  ENSG00000125247_45 (sequence is synthesized)
tgctgagagcatgccgtatgccaggctgtgaggctcgagagacaagcagtggaagagttgcggcctgtttcatctctggattgtaaatctgagcctccttctggcccctggaaggggaca

SEQ ID NO: 260043 - DNA, 120 bp, Artificial Sequence
  ENSG00000125247_46 (sequence is synthesized)
taagcattggcctgggccccgatggtgctctcgatttttctctcttttcaacatcgcctccatgatttagtgcctttcttattgctggcaccaaggttctgaacccctgcctcagctcag

SEQ ID NO: 260044 - DNA, 120 bp, Artificial Sequence
  ENSG00000125247_47 (sequence is synthesized)
aacccggcttcctcctctcccgccgggtccgtctgtccctgcgcctccttcgccgccgactagcgccccctggcctgacgtcaccggcgcgtccgccaatgagctgaggagggacttggc

SEQ ID NO: 260045 - DNA, 120 bp, Artificial Sequence
  ENSG00000125247_48 (sequence is synthesized)
aagaaaaaggtatcaactgagagtggtgccagctgatgaacagaatgaccggatgcatctcactggtgacaattaccatgtctttctgttcttaagaaactcattgccgctgtcgtgctg

SEQ ID NO: 260046 - DNA, 120 bp, Artificial Sequence
  ENSG00000125247_49 (sequence is synthesized)
tccatcagcgactggagggtaattgcacttgcagcactctggttctgcctaattggcctgatatgccaagccctgtgctctgaagacggccacaagagaaggggacattgggaatgatca

SEQ ID NO: 260047 - DNA, 120 bp, Artificial Sequence
  ENSG00000125249_0 (sequence is synthesized)
cggctcgggcggcaccagcggctcccggtctctctctctgctcgccctcagtcccacccggtgcctacggggccgcatcgccgcccggctcggcccggcccatgcccagggccgctgctc

SEQ ID NO: 260048 - DNA, 120 bp, Artificial Sequence
  ENSG00000125249_1 (sequence is synthesized)
cagcgcggccggcgtaggtctatgtcgcgggcggcggcggcggcggcggccgcggagggacgatgcgcgagtacaaagtggtggtgctgggctcgggcggggtaggcaaatccgccctga

SEQ ID NO: 260049 - DNA, 120 bp, Artificial Sequence
  ENSG00000125249_2 (sequence is synthesized)
ccgtgcagttcgtgaccggcaccttcatcgagaaatacgaccccaccatcgaggacttctaccgcaaggagatcgaggtggattcgtcgccgtcggtgctggagatcctggacacggcgg

SEQ ID NO: 260050 - DNA, 120 bp, Artificial Sequence
  ENSG00000125249_3 (sequence is synthesized)
gcaccgagcagttcgcgtccatgcgggacctgtacatcaagaacggccagggcttcatcctcgtctacagcctcgtcaaccagcagagcttccaggacatcaagcccatgcgggaccaga

SEQ ID NO: 260051 - DNA, 120 bp, Artificial Sequence
  ENSG00000125249_4 (sequence is synthesized)
tcatccgcgtgaagcggtatgagaaagtgccagtcatcttggttgggaacaaagtggacctggaaagtgagagagaagtatcgtccagcgaaggcagagcccttgctgaagagtggggct

SEQ ID NO: 260052 - DNA, 120 bp, Artificial Sequence
  ENSG00000125249_5 (sequence is synthesized)
gcccctttatggaaacttccgctaagagtaaaacaatggtggacgaactctttgcagaaattgtgaggcagatgaactatgctgctcagcctgacaaagatgacccatgctgttctgcat

SEQ ID NO: 260053 - DNA, 120 bp, Artificial Sequence
  ENSG00000125249_6 (sequence is synthesized)
gtaacatacaatagcatccaaatatggctgtcctggatgggatttgcccaatgtcgtaggtgatagaaaactcgcctactccactgcagaacttgcagaatgcgtggtgttaatctacag

SEQ ID NO: 260054 - DNA, 120 bp, Artificial Sequence
  ENSG00000125249_7 (sequence is synthesized)
agaactgcagcccttattcagaattgagcagtgattgtcagttgatatctctgagtaacatttgggttcagtaactacagttttcaccatttgtcctcagtctcctttatgcatctgcaa

SEQ ID NO: 260055 - DNA, 120 bp, Artificial Sequence
  ENSG00000125249_8 (sequence is synthesized)
ctttaaggcatagtccatcgatctacagggtgatctcatttgaaagctatgatggcattgtcgctgagttgacagaagcaactattgtacaaattaaaaataaccataagggagaaacca

SEQ ID NO: 260056 - DNA, 120 bp, Artificial Sequence
  ENSG00000125249_9 (sequence is synthesized)
gaagaattcctctgaccacttacaattaaaatattttgtcttctttaaaaaaataagtaaaggagaaatattttcctacaagagtactgaatttcaggaaatgggatagagcttctaacc

SEQ ID NO: 260057 - DNA, 120 bp, Artificial Sequence
  ENSG00000125249_10 (sequence is synthesized)
aatgtattccgtcaagtaagataataacagctgacctgccaacagcattacagggagattctttgctcagctaacacatttctgtttttcaaaattgatgcttaattgtagctgttattc

SEQ ID NO: 260058 - DNA, 120 bp, Artificial Sequence
  ENSG00000125249_11 (sequence is synthesized)
taatttgtgacatggaactaactcatgcttcaatccttgatagagcaaaactcagaacaggttatgtaaaaatatagtctggctttagaatttgttaattcacctgctttgccacagaaa

SEQ ID NO: 260059 - DNA, 120 bp, Artificial Sequence
  ENSG00000125249_12 (sequence is synthesized)
atggaggctttcacaagggtttgatcagaattaaaaccccaaacccgccctctgttaggggtggtctttataactttactgaacaagagggaagcaactgtgatgggaagagattaccta

SEQ ID NO: 260060 - DNA, 120 bp, Artificial Sequence
  ENSG00000125249_13 (sequence is synthesized)
gccttactaacaagaagcattctaatagataaactagtaccatcatgtaaggaagatgaagccatgttgcatccacatgttcccgtttgcagaaacctcacaggacagtacgaatatctg

SEQ ID NO: 260061 - DNA, 120 bp, Artificial Sequence
  ENSG00000125249_14 (sequence is synthesized)
gcatttttaagttcattaaagcagcaaattccttctcgcctttaagggctatggttgtagtgtgacccgtggctaacctgctttcaaaatcaagtatttgctgtagcagagctttattgc

SEQ ID NO: 260062 - DNA, 120 bp, Artificial Sequence
  ENSG00000125249_15 (sequence is synthesized)
aggcattttaaaaattgaataaccatgtgaaataatttgggcttaaaagtgaacataaattatagagtggaaggtaagggacaaaagccttttacctttaattttcctggagaattatat

SEQ ID NO: 260063 - DNA, 120 bp, Artificial Sequence
  ENSG00000125249_16 (sequence is synthesized)
aaaggttttcttagaacaattttgccctgattactgaagcgtcaaataaagctggagtgaaaattttgttttgaaaaggtgctcaagctctgacatttttggttttcatagtcgtgaagt

SEQ ID NO: 260064 - DNA, 120 bp, Artificial Sequence
  ENSG00000125249_17 (sequence is synthesized)
atttatcatttgcatgactaatggcacaggaaaaacctattcataagttttacaatcaagtatagaggggtcttcagctaacttagttatacataaatgctgaaaagattatcttgagct

SEQ ID NO: 260065 - DNA, 120 bp, Artificial Sequence
  ENSG00000125249_18 (sequence is synthesized)
gggccttgggagaagaatttggccttcagaactgcaatatcactgagcctgcgatctatacaccaccccacattttgttggtttcacagtcttgtgcaagtaacctctggtcttacgtgt

SEQ ID NO: 260066 - DNA, 120 bp, Artificial Sequence
  ENSG00000125249_19 (sequence is synthesized)
gtaactgagagaagagtgtgtgtttgtgtgtgcatgtgtgtttattgttcctaagaatttggcacaagtcagagataattgcctatactaagaatctatactgcagaatatagtgtatca

SEQ ID NO: 260067 - DNA, 120 bp, Artificial Sequence
  ENSG00000125249_20 (sequence is synthesized)
aaaacttttttcttttaaattattaaagtgtcttttatacttttatgaaatcattggtagccccccaagtgtttaataactggcattaagcttagagggtgaaaaaaaaaaaaaagattg

SEQ ID NO: 260068 - DNA, 120 bp, Artificial Sequence
  ENSG00000125249_21 (sequence is synthesized)
atagtatttttcataatgaaaaaactgaagagatacgtgaatgaaaccaggccatagctgtcataaatctttgacttttgaatatttacattcttcagtataattttttataatcctcaa

SEQ ID NO: 260069 - DNA, 120 bp, Artificial Sequence
  ENSG00000125249_22 (sequence is synthesized)
aggacaaaaaaatttaaccaattttattgaaacgaatttcactgtgtaaaagttggtttgattcaaacatgtagagaagttgtagattcaagatatatgatttctctatggaaataaaaa

SEQ ID NO: 260070 - DNA, 120 bp, Artificial Sequence
  ENSG00000125249_23 (sequence is synthesized)
tatttgttagtgaattggttgagttttgattcctctaacttctcagaatgattctttagaattctataattcatagcaatttttgacaagtaagattgcaaaatagaaatatctataaag

SEQ ID NO: 260071 - DNA, 120 bp, Artificial Sequence
  ENSG00000125249_24 (sequence is synthesized)
attccacagtttgacattatggcttgctatgcagatgtgaaaataggttaaataatatgaaagatatggcagaatgtaaagtggaaaagatgacctaaaattttgagttgtattaatagt

SEQ ID NO: 260072 - DNA, 120 bp, Artificial Sequence
  ENSG00000125249_25 (sequence is synthesized)
taaaaacatttgtgtcagatgacagggtgggcttttactgtcaagacatgaataagaactgatctggctgcctgatgagtgtttccacgcagccctgcatatttagtgaccaaggcatca

SEQ ID NO: 260073 - DNA, 120 bp, Artificial Sequence
  ENSG00000125249_26 (sequence is synthesized)
aggacatcccgaaactggaaattcatatccatctggtatgaatatataactcagctggcaaatgaatgtgtttgttgagatattacagtaataaaacacttaagaacaggaagattacat

SEQ ID NO: 260074 - DNA, 120 bp, Artificial Sequence
  ENSG00000125249_27 (sequence is synthesized)
ttgttggcatacgaaaccttagtggctacagaagaaagttgaccttgtgtcactatttattttatgccctgatcagactagcaacttagataagtgaaagtttttctaacatgccttaaa

SEQ ID NO: 260075 - DNA, 120 bp, Artificial Sequence
  ENSG00000125249_28 (sequence is synthesized)
aatattatggtttgatccaaagacccactttttctttagctcttgtgataagattttcttttttttacttttatacaaaggcagcatctttgaatttttttttcttttgatgttgcaact

SEQ ID NO: 260076 - DNA, 120 bp, Artificial Sequence
  ENSG00000125249_29 (sequence is synthesized)
tttgggttcttttaaactgtgatagtgatggtaactgatgcctttcattttgttcaacttatacaaaacaagccagcatctgatcaaaagtattacataaaatattttcttaaactattg

SEQ ID NO: 260077 - DNA, 120 bp, Artificial Sequence
  ENSG00000125249_30 (sequence is synthesized)
aaaggtgctttgatgattttctcctttggtttgtagaattaggactgaacttttgactcaaattgctacagttgccatcacctttctgtggtaatactactgatatttgcttttctatat

SEQ ID NO: 260078 - DNA, 120 bp, Artificial Sequence
  ENSG00000125249_31 (sequence is synthesized)
aaagaaatgttgcctaaggctgtctggtatttcttttcaagggttttccagtatgaatgttaatgttgtcagtgtatgtatgaatatgaaagtgctttgttttgtttgttgctgtttttt

SEQ ID NO: 260079 - DNA, 120 bp, Artificial Sequence
  ENSG00000125249_32 (sequence is synthesized)
gtttatgtgtgtgtttttaatttttttgttcttatcagcagtcttgtgttagcactgggtaagctttaattgtcccttagccaatcaaacattaaggactatggaggtcttttttttttt

SEQ ID NO: 260080 - DNA, 120 bp, Artificial Sequence
  ENSG00000125249_33 (sequence is synthesized)
atttaacatgtcattgttcatctattaaatcttgatcagggtttcaagaatgactgcagtgggttttggaaacagacttatcattattgatttgaggtttcccagagatatagttcacag

SEQ ID NO: 260081 - DNA, 120 bp, Artificial Sequence
  ENSG00000125249_34 (sequence is synthesized)
ttaattgttgcgctctaatacaactgaccatttaaaattgaacaagtttattgttttgtaacaatgtcagttgttaaaccttgacatttcaattaaaacatgaattgtagttataactca

SEQ ID NO: 260082 - DNA, 120 bp, Artificial Sequence
  ENSG00000125249_35 (sequence is synthesized)
atgcaaattcaacagttgtatttggagttaaattattttaacaaataaatttatttaatgaaactctggatttgctttgttttgtacatgctcatgagagaaatgtattatatacaaaaa

SEQ ID NO: 260083 - DNA, 120 bp, Artificial Sequence
  ENSG00000125249_36 (sequence is synthesized)
caattaaaaattgccatataatgaatttagtactcttcatacaaaaatattttagctgatttgagagttcatcatataaaaaggcaggtaggtagataattttcatagtctttaaaaata

SEQ ID NO: 260084 - DNA, 120 bp, Artificial Sequence
  ENSG00000125249_37 (sequence is synthesized)
aaaataacatgtaagagactgtaaaatcagttattataaatataaacttatctctacaaatgattttatattttgaatggtagctggttaatttaaagcctgatgctaaggttaacagaa

SEQ ID NO: 260085 - DNA, 120 bp, Artificial Sequence
  ENSG00000125249_38 (sequence is synthesized)
ttgttcaaataattaacattaattagcaatatcactaaaatgattcagaggccttctagtgatggcttgaagccgtctttctgttttcaggtcatgtggatccgaaggtgccagaagctg

SEQ ID NO: 260086 - DNA, 120 bp, Artificial Sequence
  ENSG00000125249_39 (sequence is synthesized)
aaggttgccgccaggctgtagggcctgcttgttctatatggggccctatgaaagttgacagatgctgttaattgtatacagccttcagctgctctgataaggagcccattcatttcctaa

SEQ ID NO: 260087 - DNA, 120 bp, Artificial Sequence
  ENSG00000125249_40 (sequence is synthesized)
gccaatttaaactatgccttttggttatgttgccttcaaactctgttgaaatcctctggcagcattccaccagttgagaagcttcattgttttagattataagaataatttgaatgaata

SEQ ID NO: 260088 - DNA, 120 bp, Artificial Sequence
  ENSG00000125249_41 (sequence is synthesized)
taacagaggcactgtagatagaatcccagatatttaaaggaaaacatgcctatattttaggaatatcttctgaagaacttcataattttatttgaagtgtttgtaaattttttaataaat

SEQ ID NO: 260089 - DNA, 120 bp, Artificial Sequence
  ENSG00000125249_42 (sequence is synthesized)
tatttaaatgtatcaatagtggatagttggaagaacgtctttgaggctaaaaagtagtactctgaaattctctcaagttatattatttgtctgttagaggtccacgaatgaaaatatatg

SEQ ID NO: 260090 - DNA, 120 bp, Artificial Sequence
  ENSG00000125249_43 (sequence is synthesized)
tagctaaaggagtaaggtgctgcccaatttggaacccaactgacctctaggatctatgaagcagagaatattaccacaaacttctgaaagaagctgttgacctcgtttcttaatttaaaa

SEQ ID NO: 260091 - DNA, 120 bp, Artificial Sequence
  ENSG00000125249_44 (sequence is synthesized)
tatgttgccacataaatactaataaaacatagttgctcttcatctcttaaatggatcattccaactggttttacatcgttgaatattatctagtatttttaataaatattttcataaata

SEQ ID NO: 260092 - DNA, 120 bp, Artificial Sequence
  ENSG00000125255_0 (sequence is synthesized)
acttccctaaggtggctttcaaaagagacaccaagtgacatatttttaggaggggtttaaaagtttgatggggtagaagtaaacgttgcttaactcaaccagcagcagagccagggccca

SEQ ID NO: 260093 - DNA, 120 bp, Artificial Sequence
  ENSG00000125255_1 (sequence is synthesized)
gggaccagcgcttctgtggacttggcctttccagcagcagacccagcaatgaatgatccgaacagctgtgtggacaatgcaacagtttgctctggtgcatcctgtgtggtacctgagagc

SEQ ID NO: 260094 - DNA, 120 bp, Artificial Sequence
  ENSG00000125255_2 (sequence is synthesized)
aatttcaataacatcctaagtgtggtcctaagtacggtgctgaccatcctgttggccttggtgatgttctccatgggatgcaacgtggaaatcaagaaatttctagggcacataaagcgg

SEQ ID NO: 260095 - DNA, 120 bp, Artificial Sequence
  ENSG00000125255_3 (sequence is synthesized)
ccgtggggcatttgtgttggcttcctctgtcagtttggaatcatgcccctcacaggattcatcctgtcggtggcctttgacatcctcccgctccaggccgtagtggtgctcattatagga

SEQ ID NO: 260096 - DNA, 120 bp, Artificial Sequence
  ENSG00000125255_4 (sequence is synthesized)
tgctgccctggaggaactgcctccaatatcttggcctattgggtcgatggcgacatggacctgagcgtcagcatgaccacatgctccacactgcttgccctcggaatgatgccgctgtgc

SEQ ID NO: 260097 - DNA, 120 bp, Artificial Sequence
  ENSG00000125255_5 (sequence is synthesized)
ctccttatctataccaaaatgtgggtcgactctgggagcatcgtaattccctatgataacataggtacatctctggtttctctcgttgttcctgtttccattggaatgtttgttaatcac

SEQ ID NO: 260098 - DNA, 120 bp, Artificial Sequence
  ENSG00000125255_6 (sequence is synthesized)
aaatggccccaaaaagcaaagatcatacttaaaattgggtccatcgcgggcgccatcctcattgtgctcatagctgtggttggaggaatattgtaccaaagcgcctggatcattgctccc

SEQ ID NO: 260099 - DNA, 120 bp, Artificial Sequence
  ENSG00000125255_7 (sequence is synthesized)
aaactgtggattataggaacaatatttcctgtggcgggttactccctggggtttcttctggctagaattgctggtctaccctggtacaggtgccgaacggttgcttttgaaacggggatg

SEQ ID NO: 260100 - DNA, 120 bp, Artificial Sequence
  ENSG00000125255_8 (sequence is synthesized)
cagaacacgcagctatgttccaccatcgttcagctctccttcactcctgaggagctcaatgtcgtattcaccttcccgctcatctacagcattttccagctcgcctttgccgcaatattc

SEQ ID NO: 260101 - DNA, 120 bp, Artificial Sequence
  ENSG00000125255_9 (sequence is synthesized)
ttaggattttatgtggcatacaagaaatgtcatggaaaaaacaaggcagaaattccagagagcaaagaaaatggaacggagccagagtcatcgttttataaggcaaatggaggatttcaa

SEQ ID NO: 260102 - DNA, 120 bp, Artificial Sequence
  ENSG00000125255_10 (sequence is synthesized)
cctgacgaaaagtagacatcaagtggacaaaacagacgagttccaaattacgttcttaaaccgtaactatatttaattatttgttttggtaggacagttggcagaaaagagttaaagtga

SEQ ID NO: 260103 - DNA, 120 bp, Artificial Sequence
  ENSG00000125255_11 (sequence is synthesized)
aaattggaatttcattggaattcatgtattggtttcagtaccaagtgactggtggcccaattctttaatgggacaaatattgtttcctatatatatgtatatgttttatatatgtatgta

SEQ ID NO: 260104 - DNA, 120 bp, Artificial Sequence
  ENSG00000125255_12 (sequence is synthesized)
tactcatatagatatattgtcattgaaatattcccccaaaatattctcagactaaacctgacatagggaacaccgagaatgaaaacatctttaacaccaaaactgaattcttatgcagaa

SEQ ID NO: 260105 - DNA, 120 bp, Artificial Sequence
  ENSG00000125255_13 (sequence is synthesized)
tgacatgaacatctttcactgacattttaatcattattttaaaagctttgcaacctatatatttatataactttgtaatataacatgggcaaatatctgacttctgtatttttaaaaagt

SEQ ID NO: 260106 - DNA, 120 bp, Artificial Sequence
  ENSG00000125255_14 (sequence is synthesized)
tgccttctccagtggcagtccaaaagcagaaatgagaggaaattattacaaaatagaattcaataaccatattggatgcaggctcttaactcagcagggatatcgtacatctattgctct

SEQ ID NO: 260107 - DNA, 120 bp, Artificial Sequence
  ENSG00000125255_15 (sequence is synthesized)
acctcaggggtccagtgatacccactagatcttccaaggaaaaacataattctttcaaacggtgtgtatttggcaaagagctcttcaaatctgggagagggacttcctcaaggttttcct

SEQ ID NO: 260108 - DNA, 120 bp, Artificial Sequence
  ENSG00000125255_16 (sequence is synthesized)
gtgtgcagtggatccacatagctaatatgacagctagtcagttgacagggaccacccacagtaagcaccatggtcagggaggtggcaggaggtgcaaagacagaagtattgagagaaaca

SEQ ID NO: 260109 - DNA, 120 bp, Artificial Sequence
  ENSG00000125255_17 (sequence is synthesized)
ccaagactctagtggaggaattaattcaatgggagatagtataaaatacatagaaaacacaagtaacagaaacctggttgaaatgcttaactagagtcaattagatgtgcaggagtaagt

SEQ ID NO: 260110 - DNA, 120 bp, Artificial Sequence
  ENSG00000125255_18 (sequence is synthesized)
agtataagaagaatcaagtccgagagtgatcaggaaatgagtattaaacagtatttgaaacagagaacgtgtcccagggcccaaaagtcagaagggccccaccagccaggaaagttgttt

SEQ ID NO: 260111 - DNA, 120 bp, Artificial Sequence
  ENSG00000125255_19 (sequence is synthesized)
caatgctgtaagtaggtgtagccaagggaagccaggactatctgatatacggtagcaggggtttacggctgccaggggaaaataactcatcaagtgttggactttcaattataagatcga

SEQ ID NO: 260112 - DNA, 120 bp, Artificial Sequence
  ENSG00000125255_20 (sequence is synthesized)
atttaatttcctttccctcattctgcagcaatcagaatacacaatcttaaccactcggtccttagtggttttgttccattttgcattgggtattttcactgcctcatagagtctatttca

SEQ ID NO: 260113 - DNA, 120 bp, Artificial Sequence
  ENSG00000125255_21 (sequence is synthesized)
agtgttttggctgaaagggctttttgcatttgcatgttctgagttcagattctgctggtgcacccaagcattatgggaacaggaactcaacttagctcttccagtagaggggtgagggat

SEQ ID NO: 260114 - DNA, 120 bp, Artificial Sequence
  ENSG00000125255_22 (sequence is synthesized)
tctgcttttcaaattcataacattgatctttttatgcaagatttccatttacagttgaataagtacttcatatttttccatcattagacaaatacaaaatggactaaataattttaagag

SEQ ID NO: 260115 - DNA, 120 bp, Artificial Sequence
  ENSG00000125255_23 (sequence is synthesized)
atagtggaggagagggggtacagacttccttcttagagagtgtcagagaatatgctcccaatggtggaaaggaagatttacagtctagcggctaagtacctcctacacatttcccatcaa

SEQ ID NO: 260116 - DNA, 120 bp, Artificial Sequence
  ENSG00000125255_24 (sequence is synthesized)
tcagaaaatagacaggtacactaaagggaccctgagaactcctcttgtaatttcaacacacccaaaatcaagggcctggatgccagcagctgcagcaagcaggtttttcctccctgttga

SEQ ID NO: 260117 - DNA, 120 bp, Artificial Sequence
  ENSG00000125255_25 (sequence is synthesized)
gcaagacaggtgagcaagataggacttggctttcttacatgatgcggtaacttgtgacttgagtctttttccctaatttgctagtgggaagaaaaatagctgagctttctaaaatgatag

SEQ ID NO: 260118 - DNA, 120 bp, Artificial Sequence
  ENSG00000125255_26 (sequence is synthesized)
tgagctttctaaaatgatagctctctatttttaaatgaatttgaaaagtcgattaaattatgtattttattgcctctgagtatcatattaaatgaatattttattttaaaggcttaaata

SEQ ID NO: 260119 - DNA, 120 bp, Artificial Sequence
  ENSG00000125257_0 (sequence is synthesized)
gcttcacaggctccagccgagcggacaggcgtggcggccggagccccagcatccctgcttgaggtccaggagcggagcccgcggccaccgccgcctgatcagcgcgaccccggcccgcgc

SEQ ID NO: 260120 - DNA, 120 bp, Artificial Sequence
  ENSG00000125257_1 (sequence is synthesized)
ccgccccgcccggcaagatgctgcccgtgtaccaggaggtgaagcccaacccgctgcaggacgcgaacctctgctcacgcgtgttcttctggtggctcaatcccttgtttaaaattggcc

SEQ ID NO: 260121 - DNA, 120 bp, Artificial Sequence
  ENSG00000125257_2 (sequence is synthesized)
ataaacggagattagaggaagatgatatgtattcagtgctgccagaagaccgctcacagcaccttggagaggagttgcaagggttctgggataaagaagttttaagagctgagaatgacg

SEQ ID NO: 260122 - DNA, 120 bp, Artificial Sequence
  ENSG00000125257_3 (sequence is synthesized)
cacagaagccttctttaacaagagcaatcataaagtgttactggaaatcttatttagttttgggaatttttacgttaattgaggaaagtgccaaagtaatccagcccatatttttgggaa

SEQ ID NO: 260123 - DNA, 120 bp, Artificial Sequence
  ENSG00000125257_4 (sequence is synthesized)
aaattattaattattttgaaaattatgatcccatggattctgtggctttgaacacagcgtacgcctatgccacggtgctgactttttgcacgctcattttggctatactgcatcacttat

SEQ ID NO: 260124 - DNA, 120 bp, Artificial Sequence
  ENSG00000125257_5 (sequence is synthesized)
atttttatcacgttcagtgtgctgggatgaggttacgagtagccatgtgccatatgatttatcggaaggcacttcgtcttagtaacatggccatggggaagacaaccacaggccagatag

SEQ ID NO: 260125 - DNA, 120 bp, Artificial Sequence
  ENSG00000125257_6 (sequence is synthesized)
tcaatctgctgtccaatgatgtgaacaagtttgatcaggtgacagtgttcttacacttcctgtgggcaggaccactgcaggcgattgcagtgactgccctactctggatggagataggaa

SEQ ID NO: 260126 - DNA, 120 bp, Artificial Sequence
  ENSG00000125257_7 (sequence is synthesized)
tatcgtgccttgctgggatggcagttctaatcattctcctgcccttgcaaagctgttttgggaagttgttctcatcactgaggagtaaaactgcaactttcacggatgccaggatcagga

SEQ ID NO: 260127 - DNA, 120 bp, Artificial Sequence
  ENSG00000125257_8 (sequence is synthesized)
ccatgaatgaagttataactggtataaggataataaaaatgtacgcctgggaaaagtcattttcaaatcttattaccaatttgagaaagaaggagatttccaagattctgagaagttcct

SEQ ID NO: 260128 - DNA, 120 bp, Artificial Sequence
  ENSG00000125257_9 (sequence is synthesized)
gcctcagagggatgaatttggcttcatttttcagtgcaagcaaaatcatcgtgtttgtgaccttcaccacctacgtgctcctcggcagtgtgatcacagccagccgcgtgttcgtggcag

SEQ ID NO: 260129 - DNA, 120 bp, Artificial Sequence
  ENSG00000125257_10 (sequence is synthesized)
tgacgctgtatggggctgtgcggctgacggttaccctcttcttcccctcagccattgagagggtgtcagaggcaatcgtcagcatccgaagaatccagacctttttgctacttgatgaga

SEQ ID NO: 260130 - DNA, 120 bp, Artificial Sequence
  ENSG00000125257_11 (sequence is synthesized)
tatcacagcgcaaccgtcagctgccgtcagatggtaaaaagatggtgcatgtgcaggattttactgctttttgggataaggcatcagagaccccaactctacaaggcctttcctttactg

SEQ ID NO: 260131 - DNA, 120 bp, Artificial Sequence
  ENSG00000125257_12 (sequence is synthesized)
tcagacctggcgaattgttagctgtggtcggccccgtgggagcagggaagtcatcactgttaagtgccgtgctcggggaattggccccaagtcacgggctggtcagcgtgcatggaagaa

SEQ ID NO: 260132 - DNA, 120 bp, Artificial Sequence
  ENSG00000125257_13 (sequence is synthesized)
ttgcctatgtgtctcagcagccctgggtgttctcgggaactctgaggagtaatattttatttgggaagaaatacgaaaaggaacgatatgaaaaagtcataaaggcttgtgctctgaaaa

SEQ ID NO: 260133 - DNA, 120 bp, Artificial Sequence
  ENSG00000125257_14 (sequence is synthesized)
aggatttacagctgttggaggatggtgatctgactgtgataggagatcggggaaccacgctgagtggagggcagaaagcacgggtaaaccttgcaagagcagtgtatcaagatgctgaca

SEQ ID NO: 260134 - DNA, 120 bp, Artificial Sequence
  ENSG00000125257_15 (sequence is synthesized)
tctatctcctggacgatcctctcagtgcagtagatgcggaagttagcagacacttgttcgaactgtgtatttgtcaaattttgcatgagaagatcacaattttagtgactcatcagttgc

SEQ ID NO: 260135 - DNA, 120 bp, Artificial Sequence
  ENSG00000125257_16 (sequence is synthesized)
agtacctcaaagctgcaagtcagattctgatattgaaagatggtaaaatggtgcagaaggggacttacactgagttcctaaaatctggtatagattttggctcccttttaaagaaggata

SEQ ID NO: 260136 - DNA, 120 bp, Artificial Sequence
  ENSG00000125257_17 (sequence is synthesized)
atgaggaaagtgaacaacctccagttccaggaactcccacactaaggaatcgtaccttctcagagtcttcggtttggtctcaacaatcttctagaccctccttgaaagatggtgctctgg

SEQ ID NO: 260137 - DNA, 120 bp, Artificial Sequence
  ENSG00000125257_18 (sequence is synthesized)
agagccaagatacagagaatgtcccagttacactatcagaggagaaccgttctgaaggaaaagttggttttcaggcctataagaattacttcagagctggtgctcactggattgtcttca

SEQ ID NO: 260138 - DNA, 120 bp, Artificial Sequence
  ENSG00000125257_19 (sequence is synthesized)
ttttccttattctcctaaacactgcagctcaggttgcctatgtgcttcaagattggtggctttcatactgggcaaacaaacaaagtatgctaaatgtcactgtaaatggaggaggaaatg

SEQ ID NO: 260139 - DNA, 120 bp, Artificial Sequence
  ENSG00000125257_20 (sequence is synthesized)
taaccgagaagctagatcttaactggtacttaggaatttattcaggtttaactgtagctaccgttctttttggcatagcaagatctctattggtattctacgtccttgttaactcttcac

SEQ ID NO: 260140 - DNA, 120 bp, Artificial Sequence
  ENSG00000125257_21 (sequence is synthesized)
aaactttgcacaacaaaatgtttgagtcaattctgaaagctccggtattattctttgatagaaatccaataggaagaattttaaatcgtttctccaaagacattggacacttggatgatt

SEQ ID NO: 260141 - DNA, 120 bp, Artificial Sequence
  ENSG00000125257_22 (sequence is synthesized)
tgctgccgctgacgtttttagatttcatccagacattgctacaagtggttggtgtggtctctgtggctgtggccgtgattccttggatcgcaatacccttggttccccttggaatcattt

SEQ ID NO: 260142 - DNA, 120 bp, Artificial Sequence
  ENSG00000125257_23 (sequence is synthesized)
tcatttttcttcggcgatattttttggaaacgtcaagagatgtgaagcgcctggaatctacaactcggagtccagtgttttcccacttatcatcttctctccaggggctctggaccatcc

SEQ ID NO: 260143 - DNA, 120 bp, Artificial Sequence
  ENSG00000125257_24 (sequence is synthesized)
tggtttgccgtccgtctggatgccatctgtgccatgtttgtcatcatcgttgcctttgggtccctgattctggcaaaaactctggatgccgggcaggttggtttggcactgtcctatgcc

SEQ ID NO: 260144 - DNA, 120 bp, Artificial Sequence
  ENSG00000125257_25 (sequence is synthesized)
ctcacgctcatggggatgtttcagtggtgtgttcgacaaagtgctgaagttgagaatatgatgatctcagtagaaagggtcattgaatacacagaccttgaaaaagaagcaccttgggaa

SEQ ID NO: 260145 - DNA, 120 bp, Artificial Sequence
  ENSG00000125257_26 (sequence is synthesized)
tatcagaaacgcccaccaccagcctggccccatgaaggagtgataatctttgacaatgtgaacttcatgtacagtccaggtgggcctctggtactgaagcatctgacagcactcattaaa

SEQ ID NO: 260146 - DNA, 120 bp, Artificial Sequence
  ENSG00000125257_27 (sequence is synthesized)
tcacaagaaaaggttggcattgtgggaagaaccggagctggaaaaagttccctcatctcagccctttttagattgtcagaacccgaaggtaaaatttggattgataagatcttgacaact

SEQ ID NO: 260147 - DNA, 120 bp, Artificial Sequence
  ENSG00000125257_28 (sequence is synthesized)
gaaattggacttcacgatttaaggaagaagatgtcaatcatacctcaggaacctgttttgttcactggaacaatgaggaaaaacctggatccctttaatgagcacacggatgaggaactg

SEQ ID NO: 260148 - DNA, 120 bp, Artificial Sequence
  ENSG00000125257_29 (sequence is synthesized)
tggaatgccttacaagaggtacaacttaaagaaaccattgaagatcttcctggtaaaatggatactgaattagcagaatcaggatccaattttagtgttggacaaagacaactggtgtgc

SEQ ID NO: 260149 - DNA, 120 bp, Artificial Sequence
  ENSG00000125257_30 (sequence is synthesized)
cttgccagggcaattctcaggaaaaatcagatattgattattgatgaagcgacggcaaatgtggatccaagaactgatgagttaatacaaaaaaaaatccgggagaaatttgcccactgc

SEQ ID NO: 260150 - DNA, 120 bp, Artificial Sequence
  ENSG00000125257_31 (sequence is synthesized)
accgtgctaaccattgcacacagattgaacaccattattgacagcgacaagataatggttttagattcaggaagactgaaagaatatgatgagccgtatgttttgctgcaaaataaagag

SEQ ID NO: 260151 - DNA, 120 bp, Artificial Sequence
  ENSG00000125257_32 (sequence is synthesized)
agcctattttacaagatggtgcaacaactgggcaaggcagaagccgctgccctcactgaaacagcaaaacaggtatacttcaaaagaaattatccacatattggtcacactgaccacatg

SEQ ID NO: 260152 - DNA, 120 bp, Artificial Sequence
  ENSG00000125257_33 (sequence is synthesized)
gttacaaacacttccaatggacagccctcgaccttaactattttcgagacagcactgtgaatccaaccaaaatgtcaagtccgttccgaaggcattttccactagtttttggactatgta

SEQ ID NO: 260153 - DNA, 120 bp, Artificial Sequence
  ENSG00000125257_34 (sequence is synthesized)
aaccacattgtacttttttttactttggcaacaaatatttatacatacaagatgctagttcatttgaatatttctcccaacttatccaaggatctccagctctaacaaaatggtttattt

SEQ ID NO: 260154 - DNA, 120 bp, Artificial Sequence
  ENSG00000125257_35 (sequence is synthesized)
ttatttaaatgtcaatagttgttttttaaaatccaaatcagaggtgcaggccaccagttaaatgccgtctatcaggttttgtgccttaagagactacagagtcaaagctcatttttaaag

SEQ ID NO: 260155 - DNA, 120 bp, Artificial Sequence
  ENSG00000125257_36 (sequence is synthesized)
gagtaggacaaagttgtcacaggtttttgttgttgtttttattgcccccaaaattacatgttaatttccatttatatcagggattctatttacttgaagactgtgaagttgccattttgt

SEQ ID NO: 260156 - DNA, 120 bp, Artificial Sequence
  ENSG00000125257_37 (sequence is synthesized)
ctcattgttttctttgacataactaggatccattatttcccctgaaggcttcttgttagaaaatagtacagttacaaccaataggaacaacaaaaagaaaaagtttgtgacattgtagta

SEQ ID NO: 260157 - DNA, 120 bp, Artificial Sequence
  ENSG00000125257_38 (sequence is synthesized)
gggagtgtgtaccccttactccccatcaaaaaaaaaaatggatacatggttaaaggatagaagggcaatattttatcatatgttctaaaagagaaggaagagaaaatactactttctcaa

SEQ ID NO: 260158 - DNA, 120 bp, Artificial Sequence
  ENSG00000125257_39 (sequence is synthesized)
aatggaagcccttaaaggtgctttgatactgaaggacacaaatgtgaccgtccatcctcctttagagttgcatgacttggacacggtaactgttgcagttttagactcagcattgtgaca

SEQ ID NO: 260159 - DNA, 120 bp, Artificial Sequence
  ENSG00000125257_40 (sequence is synthesized)
cttcccaagaaggccaaacctctaaccgacattcctgaaatacgtggcattattcttttttggatttctcatttatggaaggctaaccctctgttgactgtaagccttttggtttgggct

SEQ ID NO: 260160 - DNA, 120 bp, Artificial Sequence
  ENSG00000125257_41 (sequence is synthesized)
gtattgaaatcctttctaaattgcatgaataggctctgctaacgtgatgagacaaactgaaaattattgcaagcattgactataattatgcagtacgttctcaggatgcatccaggggtt

SEQ ID NO: 260161 - DNA, 120 bp, Artificial Sequence
  ENSG00000125257_42 (sequence is synthesized)
cattttcatgagcctgtccaggttagtttactcctgaccactaatagcattgtcatttgggctttctgttgaatgaatcaacaaaccacaatacttcctgggaccttttgtactttattt

SEQ ID NO: 260162 - DNA, 120 bp, Artificial Sequence
  ENSG00000125257_43 (sequence is synthesized)
gaactatgagtctttaatttttcctgatgatggtggctgtaatatgttgagttcagtttactaaaggttttactattatggtttgaagtggagtctcatgacctctcagaataaggtgtc

SEQ ID NO: 260163 - DNA, 120 bp, Artificial Sequence
  ENSG00000125257_44 (sequence is synthesized)
acctccctgaaattgcatatatgtatatagacatgcacacgtgtgcatttgtttgtatacatatatttgtccttcgtatagcaagttttttgctcatcagcagagagcaacagatgtttt

SEQ ID NO: 260164 - DNA, 120 bp, Artificial Sequence
  ENSG00000125257_45 (sequence is synthesized)
attgagtgaagccttaaaaagcacacaccacacacagctaactgccaaaatacattgaccgtagtagctgttcaactcctagtacttagaaatacacgtatggttaatgttcagtccaac

SEQ ID NO: 260165 - DNA, 120 bp, Artificial Sequence
  ENSG00000125257_46 (sequence is synthesized)
aaaccacacacagtaaatgtttattaatagtcatggttcgtattttaggtgactgaaattgcatcagtgatcataatgaggtttgttaaaacgatagctatattcaaaatgtctatatgt

SEQ ID NO: 260166 - DNA, 120 bp, Artificial Sequence
  ENSG00000125257_47 (sequence is synthesized)
ttatttggacttttgaggttaaagacagtcatataaacgtcctgtttctgttttaatgttatcatagaattttttaatgaaactaaattcaattgaaataaatgatagttttcatctcca

SEQ ID NO: 260167 - DNA, 120 bp, Artificial Sequence
  ENSG00000125257_48 (sequence is synthesized)
ttggatttaggacccacttggataatccaggatgatgtcttcactccaacatcctcagtttaattccatgtgcaaatacccttttcccaaataacattcaattctttaccaggaaaggtg

SEQ ID NO: 260168 - DNA, 120 bp, Artificial Sequence
  ENSG00000125257_49 (sequence is synthesized)
acaggatctgctgctttttctggcttaacctccctggtcagatgagcttgttggcaggcacctcagggcccagccccacatcctgctttttttgcgcatcttcgtctccttccccatccc

SEQ ID NO: 260169 - DNA, 120 bp, Artificial Sequence
  ENSG00000125257_50 (sequence is synthesized)
cttcttctgggcttggactcctctcggaatcgctgctgcacgttccctctttgtgccccctgactggcttgtggggtctttctctcaccatgcatggcctgtggctctgtcagcaaacgt

SEQ ID NO: 260170 - DNA, 120 bp, Artificial Sequence
  ENSG00000125257_51 (sequence is synthesized)
tttctgcaaaaggccacctagtaagtgttttaggcattgtgtgccattattgtctctgttgtgatgaatcacctttgccattgtagcacaaaagcagatgtcaatacattggcaaatggc

SEQ ID NO: 260171 - DNA, 87 bp, Artificial Sequence
  ENSG00000125257_52 (sequence is synthesized)
taagatcttgacaactgaaattggacttcacgatttaaggaagaagatgtcaatcatacctcaggctgcagtgcagtggtgctatct

SEQ ID NO: 260172 - DNA, 87 bp, Artificial Sequence
  ENSG00000125257_53 (sequence is synthesized)
cctcctcaagcaaacctctggctaaatgttgtttttttgatattcaatttttgtttatagaattttcatttgttttgctcttatact

SEQ ID NO: 260173 - DNA, 120 bp, Artificial Sequence
  ENSG00000125257_54 (sequence is synthesized)
tttttgtttatagaattttcatttgttttgctcttatacttttcatctttttatgtttattgaccaattaaatatcatttgggtaagcacctatttaagtgtcttaacaatttttctatt

SEQ ID NO: 260174 - DNA, 120 bp, Artificial Sequence
  ENSG00000125257_55 (sequence is synthesized)
gagtactctgggtttttgttttgtttttcttactgatttgtagaattctttatgtattctgaattgcagataccttccttctgtactaatgcttatctttttagccctgtaatattgtgt

SEQ ID NO: 260175 - DNA, 120 bp, Artificial Sequence
  ENSG00000125257_56 (sequence is synthesized)
taaccattgcacacagattgaacaccattattgacagcgacaagataatggtgagtccttcacctgcggaattcctgttgctcccaattatgttcactttttcagtttattccttccttg

SEQ ID NO: 260176 - DNA, 120 bp, Artificial Sequence
  ENSG00000125257_57 (sequence is synthesized)
cttcccagcagtaattcatatgcttaactacaccctcagtgctactaacaatatatccaatgtatctctttgcatataatcatatgcaaaaatcatatgttaaaagtttaccatgaaaat

SEQ ID NO: 260177 - DNA, 120 bp, Artificial Sequence
  ENSG00000125257_58 (sequence is synthesized)
attccaaatctaagattcagcttgtgatgctaactgtcatactacggagtagtatccaatagaagatcacagtcattgtcactgtcacagttgtttcagcatgcttgatccccttaatga

SEQ ID NO: 260178 - DNA, 120 bp, Artificial Sequence
  ENSG00000125257_59 (sequence is synthesized)
gcgcccgccccgcccggcaagatgctgcccgtgtaccaggaggtgaagcccaacccgctgcaggacgcgaacctctgctcacgcgtgttcttctgatggagtctcgctgtgtcacccagg

SEQ ID NO: 260179 - DNA, 120 bp, Artificial Sequence
  ENSG00000125257_60 (sequence is synthesized)
cagtggcgcagtctcagctcactgcagcctccacctcctgtgttcaagcagtcctcctgcctcagccaccagactagcaggtctcccccgcctctttcttggaaggacacttgccattgg

SEQ ID NO: 260180 - DNA, 120 bp, Artificial Sequence
  ENSG00000125257_61 (sequence is synthesized)
tgttggaattcataaaatcatctaaaaatttttctaaatatacagtgttgttttccccattgtatcttgatctcaagcaacaaatggtaaaagtatagctattaatgtcattaaatgtga

SEQ ID NO: 260181 - DNA, 120 bp, Artificial Sequence
  ENSG00000125257_62 (sequence is synthesized)
ccctcaggctattgggaacatttatttttccttgaaacatgaagcctcctaggaggcctgcgtgtgctgtttggtggatacgtgaccatggagcttgggaggccgcaggtttttctgcac

SEQ ID NO: 260182 - DNA, 78 bp, Artificial Sequence
  ENSG00000125257_63 (sequence is synthesized)
atactaagattacatgcgtgagccactgcgcccggaacctgttttgttcactggaacaatgaggaaaaacctggatcc

SEQ ID NO: 260183 - DNA, 120 bp, Artificial Sequence
  ENSG00000125257_64 (sequence is synthesized)
atttcatgttcctttcttctcagagctgggattcatgtttttaagtattaactcaaaagacttgtagaaatgtcattattacatgctaaaccatattaccgtaaagtatgtaaaattgct

SEQ ID NO: 260184 - DNA, 120 bp, Artificial Sequence
  ENSG00000125257_65 (sequence is synthesized)
acctcaaggttactacattgttaaagaaaatgatgctgttttaatttagaactttttgtttacctcttccatgacttaattcaaattgtattatttggaaattacagactctaagacctg

SEQ ID NO: 260185 - DNA, 80 bp, Artificial Sequence
  ENSG00000125266_0 (sequence is synthesized)
gctgactctcctcggcggggaccgcggcgccggccggagcgaggagctgcgcacgcagcgggtcccggcgccctccccgc

SEQ ID NO: 260186 - DNA, 120 bp, Artificial Sequence
  ENSG00000125266_1 (sequence is synthesized)
cgagctccctctttcctgccctgggggccgggagccgcgcggactgagaaggctcctgcgcgcccggaggcgccctactccgctccgtgctccgggacatggaaccgcgccgacgcggcg

SEQ ID NO: 260187 - DNA, 120 bp, Artificial Sequence
  ENSG00000125266_2 (sequence is synthesized)
cccgcgcgctcgggccgctgcccgctgcactggatctatagtcacaggcggccccgctcggggcgcagcgcccgccgcccgcgccggtcgtctccgctccgggtctttgtgtcccagccc

SEQ ID NO: 260188 - DNA, 80 bp, Artificial Sequence
  ENSG00000125266_3 (sequence is synthesized)
gcaccctggagccgcacgggagtcggccgtccgagctgcgtccggcgcggcgccccggaaccccgagtccgccgcgccgc

SEQ ID NO: 260189 - DNA, 120 bp, Artificial Sequence
  ENSG00000125266_4 (sequence is synthesized)
cgccctgagggccccggagagcgagcgcacctggcccggcgaccgctggagctgcgcagcgcgcctcggagctgcctgcgggcgcacgccgtcttccccgccagtctgccccggaggatt

SEQ ID NO: 260190 - DNA, 120 bp, Artificial Sequence
  ENSG00000125266_5 (sequence is synthesized)
cttccccgccagtctgccccggaggattgggggtcccagcctgcgtcccgtcagtcccttcttggcccggagtgcgcggagctgggagtggcttcgccatggctgtgagaagggactccg

SEQ ID NO: 260191 - DNA, 120 bp, Artificial Sequence
  ENSG00000125266_6 (sequence is synthesized)
tgtggaagtactgctggggtgttttgatggttttatgcagaactgcgatttccaaatcgatagttttagagcctatctattggaattcctcgaactccaaatttctacctggacaaggac

SEQ ID NO: 260192 - DNA, 120 bp, Artificial Sequence
  ENSG00000125266_7 (sequence is synthesized)
tggtactatacccacagataggagacaaattggatattatttgccccaaagtggactctaaaactgttggccagtatgaatattataaagtttatatggttgataaagaccaagcagaca

SEQ ID NO: 260193 - DNA, 120 bp, Artificial Sequence
  ENSG00000125266_8 (sequence is synthesized)
gatgcactattaagaaggaaaatacccctctcctcaactgtgccaaaccagaccaagatatcaaattcaccatcaagtttcaagaattcagccctaacctctggggtctagaatttcaga

SEQ ID NO: 260194 - DNA, 120 bp, Artificial Sequence
  ENSG00000125266_9 (sequence is synthesized)
agaacaaagattattacattatatctacatcaaatgggtctttggagggcctggataaccaggagggaggggtgtgccagacaagagccatgaagatcctcatgaaagttggacaagatg

SEQ ID NO: 260195 - DNA, 120 bp, Artificial Sequence
  ENSG00000125266_10 (sequence is synthesized)
caagttctgctggatcaaccaggaataaagatccaacaagacgtccagaactagaagctggtacaaatggaagaagttcgacaacaagtccctttgtaaaaccaaatccaggttctagca

SEQ ID NO: 260196 - DNA, 120 bp, Artificial Sequence
  ENSG00000125266_11 (sequence is synthesized)
cagacggcaacagcgccggacattcggggaacaacatcctcggttccgaagtggccttatttgcagggattgcttcaggatgcatcatcttcatcgtcatcatcatcacgctggtggtcc

SEQ ID NO: 260197 - DNA, 120 bp, Artificial Sequence
  ENSG00000125266_12 (sequence is synthesized)
tcttgctgaagtaccggaggagacacaggaagcactcgccgcagcacacgaccacgctgtcgctcagcacactggccacacccaagcgcagcggcaacaacaacggctcagagcccagtg

SEQ ID NO: 260198 - DNA, 120 bp, Artificial Sequence
  ENSG00000125266_13 (sequence is synthesized)
acattatcatcccgctaaggactgcggacagcgtcttctgccctcactacgagaaggtcagcggggactacgggcacccggtgtacatcgtccaggagatgcccccgcagagcccggcga

SEQ ID NO: 260199 - DNA, 120 bp, Artificial Sequence
  ENSG00000125266_14 (sequence is synthesized)
acatttactacaaggtctgagagggaccctggtggtacctgtgctttcccagaggacacctaatgtcccgatgcctcccttgagggtttgagagcccgcgtgctggagaattgactgaag

SEQ ID NO: 260200 - DNA, 120 bp, Artificial Sequence
  ENSG00000125266_15 (sequence is synthesized)
cacagcaccgggggagagggacactcctcctcggaagagcccgtcgcgctggacagcttacctagtcttgtagcattcggccttggtgaacacacacgctccctggaagctggaagactg

SEQ ID NO: 260201 - DNA, 120 bp, Artificial Sequence
  ENSG00000125266_16 (sequence is synthesized)
tgcagaagacgcccattcggactgctgtgccgcgtcccacgtctcctcctcgaagccatgtgctgcggtcactcaggcctctgcagaagccaagggaagacagtggtttgtggacgagag

SEQ ID NO: 260202 - DNA, 120 bp, Artificial Sequence
  ENSG00000125266_17 (sequence is synthesized)
ggctgtgagcatcctggcaggtgccccaggatgccacgcctggaagggccggcttctgcctggggtgcatttcccccgcagtgcataccggacttgtcacacggacctcgggctagttaa

SEQ ID NO: 260203 - DNA, 120 bp, Artificial Sequence
  ENSG00000125266_18 (sequence is synthesized)
ggtgtgcaaagatctctagagtttagtccttactgtctcactcgttctgttacccagggctctgcagcacctcacctgagacctccactccacatctgcatcactcatggaacactcatg

SEQ ID NO: 260204 - DNA, 120 bp, Artificial Sequence
  ENSG00000125266_19 (sequence is synthesized)
tctggagtcccctcctccagccgctggcaacaacagcttcagtccatgggtaatccgttcatagaaattgtgtttgctaacaaggtgccctttagccagatgctaggctgtctgcgaaga

SEQ ID NO: 260205 - DNA, 120 bp, Artificial Sequence
  ENSG00000125266_20 (sequence is synthesized)
gaaacagaaagttggaaaggaaaaaagaaaaaagcaattaggtagcacagcactttggttttgctgagatcgaagaggccagtaggagacacgacagcacacacagtggattccagtgca

SEQ ID NO: 260206 - DNA, 120 bp, Artificial Sequence
  ENSG00000125266_21 (sequence is synthesized)
tggggaggcactcgctgttatcaaatagcgatgtgcaggaagaaaagcccctcttcattccggggaacaaagacgggtattgttgggaaaggaacaggcttggagggaagggagaaagta

SEQ ID NO: 260207 - DNA, 120 bp, Artificial Sequence
  ENSG00000125266_22 (sequence is synthesized)
ggccgctgatgatatattcgggcaggactgttgtggtactggcaataagatacacagctccgagctgtaggagagtcggtctgctttggatgattttttaagcagactcagctgctatac

SEQ ID NO: 260208 - DNA, 120 bp, Artificial Sequence
  ENSG00000125266_23 (sequence is synthesized)
ttatcacattttattaaacacagggaaagcatttaggagaatagcagagagccaaatctgacctaaaagttgaaaagccaaaggtcaaacaggctgtaattccatcatcatcgttgttat

SEQ ID NO: 260209 - DNA, 120 bp, Artificial Sequence
  ENSG00000125266_24 (sequence is synthesized)
taaagaatccttatctataaaaggtaggtcagatccccctccccccaggttcctccttcccctcccgattgagccttacgacactttggtttatgcggtgctgtccgggtgccagggctg

SEQ ID NO: 260210 - DNA, 120 bp, Artificial Sequence
  ENSG00000125266_25 (sequence is synthesized)
cagggtcggtactgatggaggctgcagcgcccggtgctctgtgtcaaggtgaagcacatacggcagacctcttagagtccttaagacggaagtaaattatgatgtccagggggagaagga

SEQ ID NO: 260211 - DNA, 120 bp, Artificial Sequence
  ENSG00000125266_26 (sequence is synthesized)
agataggacgtatttataataggtatatagaacacaagggatataaaatgaaagatttttactaatatatattttaaggttgcacacagtacacaccagaagatgtgaaattcatttgtg

SEQ ID NO: 260212 - DNA, 120 bp, Artificial Sequence
  ENSG00000125266_27 (sequence is synthesized)
gcaattaagtggtcccaatgctcagcgcttaaaaaaacaaattggacagctacttctgggaaaaacaacatcattccaaaaagaacaataatgagagcaaatgcaaaaataaccaagtcc

SEQ ID NO: 260213 - DNA, 120 bp, Artificial Sequence
  ENSG00000125266_28 (sequence is synthesized)
tccgaaggcatctcacggaaccgtagactaggaagtacgagccccacagagcaggaagccgatgtgactgcatcatatatttaacaatgacaagatgttccggcgtttatttctgcgttg

SEQ ID NO: 260214 - DNA, 120 bp, Artificial Sequence
  ENSG00000125266_29 (sequence is synthesized)
ggttttcccttgccttatgggctgaagtgttctctagaatccagcaggtcacactgggggcttcaggtgacgatttagctgtggctccctcctcctgtcctcccccgcaccccctccctt

SEQ ID NO: 260215 - DNA, 120 bp, Artificial Sequence
  ENSG00000125266_30 (sequence is synthesized)
ctgggaaacaagaagagtaaacaggaaacctactttttatgtgctatgcaaaatagacatctttaacatagtcctgttactatggtaacactttgctttctgaattggaagggaaaaaaa

SEQ ID NO: 260216 - DNA, 120 bp, Artificial Sequence
  ENSG00000125266_31 (sequence is synthesized)
atgtagcgacagcattttaaggttctcagacctccagtgagtacctgcaaaaatgagttgtcacagaaattatgatcctctatttcctgaacctggaaatgatgttggtccaaagtgcgt

SEQ ID NO: 260217 - DNA, 120 bp, Artificial Sequence
  ENSG00000125266_32 (sequence is synthesized)
gtgtgtatgtgtgagtgggtgcgtggtatacatgtgtacatatatgtataatatatatctacaatatatattatatatatctatatcatatttctgtggagggttgccatggtaaccagc

SEQ ID NO: 260218 - DNA, 120 bp, Artificial Sequence
  ENSG00000125266_33 (sequence is synthesized)
cacagtacatatgtaattctttccatcaccccaacctctcctttctgtgcattcatgcaagagtttcttgtaagccatcagaagttacttttaggatgggggagaggggcgagaagggga

SEQ ID NO: 260219 - DNA, 120 bp, Artificial Sequence
  ENSG00000125266_34 (sequence is synthesized)
aaaatgggaaatagtctgattttaatgaaatcaaatgtatgtatcatcagttggctacgttttggttctatgctaaactgtgaaaaatcagatgaattgataaaagagttccctgcaacc

SEQ ID NO: 260220 - DNA, 120 bp, Artificial Sequence
  ENSG00000125266_35 (sequence is synthesized)
aattgaaaagtgttctgtgcgtctgttttgtgtctggtgcagaatatgacaatctaccaactgtccctttgtttgaagttggtttagctttggaaagttactgtaaatgccttgcttgta

SEQ ID NO: 260221 - DNA, 120 bp, Artificial Sequence
  ENSG00000125266_36 (sequence is synthesized)
tgatcgtccctggtcacccgactttggaatttgcaccatcatgtttcagtgaagatgctgtaaataggttcagattttactgtctatggatttggggtgttacagtagccttattcacct

SEQ ID NO: 260222 - DNA, 120 bp, Artificial Sequence
  ENSG00000125266_37 (sequence is synthesized)
ttttaataaaaatacacatgaaaacaagaaagaaatggcttttcttacccagattgtgtacatagagcaatgttggttttttataaagtctaagcaagatgttttgtataaaatctgaat

SEQ ID NO: 260223 - DNA, 120 bp, Artificial Sequence
  ENSG00000125266_38 (sequence is synthesized)
tttgcaatgtatttagctacagcttgtttaacggcagtgtcattcccctttgcactgtaatgaggaaaaaatggtataaaaggttgccaaattgctgcatatttgtgccgtaattatgta

SEQ ID NO: 260224 - DNA, 120 bp, Artificial Sequence
  ENSG00000125266_39 (sequence is synthesized)
ccatgaatatttatttaaaatttcgttgtccaatttgtaagtaacacagtattatgcctgagttataaatatttttttctttctttgttttattttaatagcctgtcataggttttaaat

SEQ ID NO: 260225 - DNA, 120 bp, Artificial Sequence
  ENSG00000125266_40 (sequence is synthesized)
ctgctttagtttcacattgcagttagccccagaaaatgaaatccgtgaagtcacattccacatctgtttcaaactgaatttgttcttaaaaaaataaaatatttttttcctatggaaaaa

SEQ ID NO: 260226 - DNA, 120 bp, Artificial Sequence
  ENSG00000125285_0 (sequence is synthesized)
aaacactccagccgctgagagccccctttggcacttggcagcacgcggcggcgggctcctcggctcaacttcgaggagtctccgcgacgcaacttttggggacgctttgcatttaagaga

SEQ ID NO: 260227 - DNA, 120 bp, Artificial Sequence
  ENSG00000125285_1 (sequence is synthesized)
gaacgaccgaggaggaggagcgctctgcccggccgccgctacctgcggggagctcaccagcaaacgccactgcagacgaaggacccaaagaacgtaaagggcaaactgccgccgcgggga

SEQ ID NO: 260228 - DNA, 120 bp, Artificial Sequence
  ENSG00000125285_2 (sequence is synthesized)
gggggcaccgccgagaagttagagtgtcccagagacaacctgctcgagcgctcggccggagacactaaggcggcccggggcgcggcgtggccctgggctggtcccccagccccctcctcc

SEQ ID NO: 260229 - DNA, 120 bp, Artificial Sequence
  ENSG00000125285_3 (sequence is synthesized)
gacgagccccggccggccgagcgggtctccgcgggcagccaacattgatttcctccgggccgagggcgagggcccgggaggcggcgggctgcagccgcggcagggcgagagcatgtccaa

SEQ ID NO: 260230 - DNA, 120 bp, Artificial Sequence
  ENSG00000125285_4 (sequence is synthesized)
gcggcagggcgagagcatgtccaagccggtggaccacgtcaagcggcccatgaacgccttcatggtgtggtcgcgggctcagcggcgcaagatggcccaggagaaccccaagatgcacaa

SEQ ID NO: 260231 - DNA, 120 bp, Artificial Sequence
  ENSG00000125285_5 (sequence is synthesized)
ctcggagatcagcaagcgcttgggcgccgagtggaaactgctcacagagtcggagaagcggccgttcatcgacgaggccaagcgtctacgcgccatgcacatgaaggagcaccccgacta

SEQ ID NO: 260232 - DNA, 120 bp, Artificial Sequence
  ENSG00000125285_6 (sequence is synthesized)
caagtaccggccgcggcgcaagcccaagacgctgctcaagaaggacaagttcgccttcccggtgccctacggcctgggcggcgtggcggacgccgagcaccctgcgctcaaggcgggcgc

SEQ ID NO: 260233 - DNA, 80 bp, Artificial Sequence
  ENSG00000125285_7 (sequence is synthesized)
cgggctgcacgcgggggcgggcggcggcctggtgcctgagtcgctgctcgccaatcccgagaaggcggccgcggccgccg

SEQ ID NO: 260234 - DNA, 120 bp, Artificial Sequence
  ENSG00000125285_8 (sequence is synthesized)
tgccgccgccgctgccgccgccgccgccgccgcgggcagcccctactcgctgctcgacctgggctccaaaatggcagagatctcgtcgtcctcgtccggcctcccgtacgcgtcgtcgct

SEQ ID NO: 260235 - DNA, 80 bp, Artificial Sequence
  ENSG00000125285_9 (sequence is synthesized)
cggcggctgcagcggcggccgccgccgccggggggcacacgcactcgcaccccagcccgggcaacccgggctacatgatc

SEQ ID NO: 260236 - DNA, 120 bp, Artificial Sequence
  ENSG00000125285_10 (sequence is synthesized)
gatcccgtgcaactgcagcgcgtggcccagccccgggctgcagccgccgctcgcctacatcctgctgccgggcatgggcaagccccagctggacccctaccccgcggcctacgctgccgc

SEQ ID NO: 260237 - DNA, 120 bp, Artificial Sequence
  ENSG00000125285_11 (sequence is synthesized)
gctatgaccccgcggggccgcctcgcgaggaccggtgtgcacacgtgtacatatgtataggtacgagcgctgcggcctccccgtgcgccctcccgcgaccgggggcccggtttgtatgta

SEQ ID NO: 260238 - DNA, 120 bp, Artificial Sequence
  ENSG00000125285_12 (sequence is synthesized)
ggcaggagtggccaagcgcgcaagggcgcgggcgagcaggcctgtgaattcgcaggatcatttcagacccgcacttcggcagccaactcgaaagcaggcggttgtgtgcggcagcagttg

SEQ ID NO: 260239 - DNA, 120 bp, Artificial Sequence
  ENSG00000125285_13 (sequence is synthesized)
gcgtttgctttgcacttcggaacctgttgcgttttgacccacggaggtggaggagtaactttttgacatgttggcctttccagttttgttggaagtttcatggtcggttttgtttttgtt

SEQ ID NO: 260240 - DNA, 120 bp, Artificial Sequence
  ENSG00000125285_14 (sequence is synthesized)
tctcattcttcttcctcgcccctcagccccccaacccccaaccccctcccggtccgtgttgcatgcacgctgttcaaatgtgaggtctgaaatggctggcacacgggaaaagctgcttgt

SEQ ID NO: 260241 - DNA, 120 bp, Artificial Sequence
  ENSG00000125285_15 (sequence is synthesized)
gtcattcgtttctgggagtgggatggctctgagcagcctcgcctccctgtttgtactatttgaactttgcagatctctgttctctcaagcagaactcccaaccagatccattcttgacca

SEQ ID NO: 260242 - DNA, 120 bp, Artificial Sequence
  ENSG00000125285_16 (sequence is synthesized)
gtgaccggctcgaatctggccttttgtgtgagatgatcacggtttcttttgtttatcacgccatttgcaaatcagagcaagagctctttctcaagggcaagaaacgcaaacaagaaatat

SEQ ID NO: 260243 - DNA, 120 bp, Artificial Sequence
  ENSG00000125285_17 (sequence is synthesized)
ttgtgagatgaaagttgtcaattggattttcttcctaaacaaacaacaacaacaaactactagaagtctccctgagtccactcgcttggatttctgacacagtttacaaaaaaggaaaaa

SEQ ID NO: 260244 - DNA, 120 bp, Artificial Sequence
  ENSG00000125285_18 (sequence is synthesized)
ggcactgctcctattttcccttatggctgagttcaccttaagattgtaaatgtgtatatgtcagtgaaaacattgaggcttggaaaatgtgttattttcgttgccctaagtttgagtcga

SEQ ID NO: 260245 - DNA, 120 bp, Artificial Sequence
  ENSG00000125285_19 (sequence is synthesized)
ctttagactcaaaaacattttgagcgaatatcaaagttaacttttaaaaattgcgaaactatttcagaatcgcaattttatcgaagattaaatcagacttttttgtctggtaattatata

SEQ ID NO: 260246 - DNA, 120 bp, Artificial Sequence
  ENSG00000125285_20 (sequence is synthesized)
tttattatttagcaaaactgaagaaaaaaagcacagaattgtttcaacagatgtctctcattttcagctagcatttctctcccaagttgagctggtttaatgtgttttggatttccctcc

SEQ ID NO: 260247 - DNA, 120 bp, Artificial Sequence
  ENSG00000125285_21 (sequence is synthesized)
tcaattggcttattttttagatcacctgcaattcatttgcaaattgcaataaaacacattttagaaaaaaggaaccttcaattattagctttgtttctttttaaatgtatatattttgac

SEQ ID NO: 260248 - DNA, 120 bp, Artificial Sequence
  ENSG00000125285_22 (sequence is synthesized)
taatgtttgtgaatgaagttggctaacatgtatttagtttcattttggctttatgtaatataaagtttttaaaattttaaatatggttttaacctttatgtgtaaatgattttctagtgt

SEQ ID NO: 260249 - DNA, 120 bp, Artificial Sequence
  ENSG00000125285_23 (sequence is synthesized)
gaccttctaatttaatattagacgtctaaggtatatctgtaaattagaatccgactatcactctgttcattttttttgaacaaagagtttaaataaagcctgaaccagggaaaagaaaaa

SEQ ID NO: 260250 - DNA, 120 bp, Artificial Sequence
  ENSG00000125304_0 (sequence is synthesized)
agcgcaaccggaactagccttctgggggccggcttcctttatctctggcggccttgtagtcgtctccgagactccccacccctccttccctcttgaccccctaggtttgattgccctttc

SEQ ID NO: 260251 - DNA, 120 bp, Artificial Sequence
  ENSG00000125304_1 (sequence is synthesized)
cccgaaacaactatcatgagcgcgaggctgccggtgttgtctccacctcggtggccgcggctgttgctgctgtcgctgctcctgctgggggcggttcctggcccgcgccggagcggcgct

SEQ ID NO: 260252 - DNA, 120 bp, Artificial Sequence
  ENSG00000125304_2 (sequence is synthesized)
ttctacctgcccggcctggcgcccgtcaacttctgcgacgaagaaaaaaagagcgacgagtgcaaggccgaaatagaactatttgtgaacagacttgattcagtggaatcagttcttcct

SEQ ID NO: 260253 - DNA, 120 bp, Artificial Sequence
  ENSG00000125304_3 (sequence is synthesized)
tatgaatacacagcgtttgatttttgccaagcatcagaaggaaagcgcccatctgaaaatcttggtcaggtactattcggggaaagaattgaaccttcaccatataagtttacgtttaat

SEQ ID NO: 260254 - DNA, 120 bp, Artificial Sequence
  ENSG00000125304_4 (sequence is synthesized)
aagaaggagacctgtaagcttgtttgtacaaaaacataccatacagagaaagctgaagacaaacaaaagttagaattcttgaaaaaaagcatgttattgaattatcaacatcactggatt

SEQ ID NO: 260255 - DNA, 120 bp, Artificial Sequence
  ENSG00000125304_5 (sequence is synthesized)
gtggataatatgcctgtaacgtggtgttacgatgttgaagatggtcagaggttctgtaatcctggatttcctattggctgttacattacagataaaggccatgcaaaagatgcctgtgtt

SEQ ID NO: 260256 - DNA, 120 bp, Artificial Sequence
  ENSG00000125304_6 (sequence is synthesized)
attagttcagatttccatgaaagagatacattttacatcttcaaccatgttgacatcaaaatatactatcatgttgttgaaactgggtccatgggagcaagattagtggctgctaaactt

SEQ ID NO: 260257 - DNA, 120 bp, Artificial Sequence
  ENSG00000125304_7 (sequence is synthesized)
gaaccgaaaagcttcaaacatacccatatagataaaccagactgctcagggccccccatggacataagtaacaaggcttctggggagataaaaattgcctatacttactctgttagcttc

SEQ ID NO: 260258 - DNA, 120 bp, Artificial Sequence
  ENSG00000125304_8 (sequence is synthesized)
gaggaagatgataagatcagatgggcgtctagatgggactatattctggagtctatgcctcatacccacattcagtggtttagcattatgaattccctggtcattgttctcttcttatct

SEQ ID NO: 260259 - DNA, 120 bp, Artificial Sequence
  ENSG00000125304_9 (sequence is synthesized)
ggaatggtagctatgattatgttacggacactgcacaaagatattgctagatataatcagatggactctacggaagatgcccaggaagaatttggctggaaacttgttcatggtgatata

SEQ ID NO: 260260 - DNA, 120 bp, Artificial Sequence
  ENSG00000125304_10 (sequence is synthesized)
ttccgtcctccaagaaaagggatgctgctatcagtctttctaggatccgggacacagattttaattatgacctttgtgactctatttttcgcttgcctgggatttttgtcacctgccaac

SEQ ID NO: 260261 - DNA, 120 bp, Artificial Sequence
  ENSG00000125304_11 (sequence is synthesized)
cgaggagcgctgatgacgtgtgctgtggtcctgtgggtgctgctgggcacccctgcaggctatgttgctgccagattctataagtcctttggaggtgagaagtggaaaacaaatgtttta

SEQ ID NO: 260262 - DNA, 120 bp, Artificial Sequence
  ENSG00000125304_12 (sequence is synthesized)
ttaacatcatttctttgtcctgggattgtatttgctgacttctttataatgaatctgatcctctggggagaaggatcttcagcagctattccttttgggacactggttgccatattggcc

SEQ ID NO: 260263 - DNA, 120 bp, Artificial Sequence
  ENSG00000125304_13 (sequence is synthesized)
ctttggttctgcatatctgtgcctctgacgtttattggtgcatactttggttttaagaagaatgccattgaacacccagttcgaaccaatcagattccacgtcagattcctgaacagtcg

SEQ ID NO: 260264 - DNA, 120 bp, Artificial Sequence
  ENSG00000125304_14 (sequence is synthesized)
atctttatacaacttttcttcattctgaatagtatttggtcacaccagatgtattacatgtttggcttcctatttctggtgtttatcattttggttattacctgttctgaagcaactata

SEQ ID NO: 260265 - DNA, 120 bp, Artificial Sequence
  ENSG00000125304_15 (sequence is synthesized)
cttctttgctatttccacctatgtgcagaggattatcattggcaatggcgttcattccttacgagtggctttactgcagtttatttcttaatctatgcagtacactacttcttttcaaaa

SEQ ID NO: 260266 - DNA, 120 bp, Artificial Sequence
  ENSG00000125304_16 (sequence is synthesized)
ctgcagatcacgggaacagcaagcacaattctgtactttggttataccatgataatggttttgatcttctttctttttacaggaacaattggcttctttgcatgcttttggtttgttacc

SEQ ID NO: 260267 - DNA, 120 bp, Artificial Sequence
  ENSG00000125304_17 (sequence is synthesized)
aaaatatacagtgtggtgaaggttgactgaagaagtccagtgtgtccagttaaaacagaaataaattaaactcttcatcaacaaagacctgtttttgtgactgccttgagttttatcaga

SEQ ID NO: 260268 - DNA, 120 bp, Artificial Sequence
  ENSG00000125304_18 (sequence is synthesized)
attattggcctagtaatccttcagaaacaccgtaattctaaataaacctcttcccatacacctttcccccataagatgtgtcttcaacactataaagcatttgtattgtgatttgattaa

SEQ ID NO: 260269 - DNA, 120 bp, Artificial Sequence
  ENSG00000125304_19 (sequence is synthesized)
gtatatatttggttgttctcaatgaagagcaaatttaaatattatgtgcatttgtaaatacagtagctataaaattttccatacttctaatggcagaatagaggaggccatattaaataa

SEQ ID NO: 260270 - DNA, 120 bp, Artificial Sequence
  ENSG00000125304_20 (sequence is synthesized)
tactgatgaaaggcaggacactgcattgtaaataggattttctaggctcggtaggcagaaagaattatttttctttgaaggaaataactttttatcatggtaattttgaaggatgattcc

SEQ ID NO: 260271 - DNA, 120 bp, Artificial Sequence
  ENSG00000125304_21 (sequence is synthesized)
tatgatgtgttcaccaggggaatgtggcttttaaagaaaatcttctattggttgtaactgttcatatcttcttacttttctgtgttgacttcattattcccatggtattggccttttaaa

SEQ ID NO: 260272 - DNA, 120 bp, Artificial Sequence
  ENSG00000125304_22 (sequence is synthesized)
ctatgtgcctctgagtctttcaatttataaatttgttatcttaataaatattataaaaatgtcttcattgcatcattacctattatatattcaaggaggttctgtaaatacagatctatt

SEQ ID NO: 260273 - DNA, 120 bp, Artificial Sequence
  ENSG00000125304_23 (sequence is synthesized)
taccaaggtgttttgaaatgatttatactattttatcagattttactggattttgttaatgtaacactttctgagttttgatctgaatggaatttcactgtgtaaggcattgtctaaaat

SEQ ID NO: 260274 - DNA, 120 bp, Artificial Sequence
  ENSG00000125304_24 (sequence is synthesized)
gttcactgtgaggcagtagaggaggttgaagtcatgcatatctagacagatgaattatctgcaagtacttaaggtggagccttactacattgtcattaaggagtttctatttttgacttg

SEQ ID NO: 260275 - DNA, 120 bp, Artificial Sequence
  ENSG00000125304_25 (sequence is synthesized)
tttttcaaaatacagtgttttaagtcaggttttattacctggacattagcaatcactagcaagtcttcatctttatgatttcattgttttaatttagatttcacaaacagttttacttct

SEQ ID NO: 260276 - DNA, 120 bp, Artificial Sequence
  ENSG00000125304_26 (sequence is synthesized)
aagagttaagaaatgcactgtctttcacattcatctgactaattgaaatccatttatgtagaatataggaatggggggtgattctgaagtatcggtctgcttgtatctgtgagcatattc

SEQ ID NO: 260277 - DNA, 120 bp, Artificial Sequence
  ENSG00000125304_27 (sequence is synthesized)
atttgtattttagggtctctctgcttgctgcttaggagagcaaatcagatactgtcattaaacttacaactaaaattactagctgtcacttatatgatattgctgggttcttactgaata

SEQ ID NO: 260278 - DNA, 120 bp, Artificial Sequence
  ENSG00000125304_28 (sequence is synthesized)
agcctctcccctttcttaggcgcatccttggctgtaaaaggaggttaaaagcccctggaaaacctcaggtttatttcagctctgaaagtccggttccaaatttagatccagcactcttgt

SEQ ID NO: 260279 - DNA, 120 bp, Artificial Sequence
  ENSG00000125304_29 (sequence is synthesized)
ggcctggccagtgatggtcgtggagtgctttccccgcgcctgcggtctctaggctctgtggatgtagaggtgtgggatgtaggagcaggcccttacccgtggaattcacatataaatggg

SEQ ID NO: 260280 - DNA, 120 bp, Artificial Sequence
  ENSG00000125304_30 (sequence is synthesized)
ggaatgagacagcaaacaaacaaacgtgatccttcctgatagtggtaaatgtgggatgccgaggtttaagcagacgagtggtattaagggatttcaaggttttataaaattgattttgcc

SEQ ID NO: 260281 - DNA, 120 bp, Artificial Sequence
  ENSG00000125304_31 (sequence is synthesized)
aagagtggaagctgagaggctactgcagtaagaagtccaggggaactaagaatttggcttggaccagagtggtagctgtgggcatggaaagtactgaaaggatttagcccatagtttagc

SEQ ID NO: 260282 - DNA, 120 bp, Artificial Sequence
  ENSG00000125304_32 (sequence is synthesized)
agcccaaccaacgggacctgctgaaggactggagatcactaaaaagcttctccttgaaaaatactcagaagatgcaacacacacacacacacacgtgtgtgcacttacacacgcggacac

SEQ ID NO: 260283 - DNA, 120 bp, Artificial Sequence
  ENSG00000125304_33 (sequence is synthesized)
cgtctcacatcatcagtgggaaaagtgatagaatcttgctaaaggctgatcataccatattaatccgattcgccagaactactttcttcactgagctctcagcctgctcccaaccaggtg

SEQ ID NO: 260284 - DNA, 120 bp, Artificial Sequence
  ENSG00000125304_34 (sequence is synthesized)
tctccagaactttttctctccgccaccaactccgcctccagacagaccgcaggtgctttctgtcatagggactggcgtgccgcggacagtgtgacaaagaaactgtatgatggatatgag

SEQ ID NO: 260285 - DNA, 120 bp, Artificial Sequence
  ENSG00000125304_35 (sequence is synthesized)
aacttcgtaagacccagcagcaaacggggagcggctggcgagcgctccacagcccccaagcgtgggagctctagatcggaatttgtaatttggaattggaacgtgagcgccggaacagct

SEQ ID NO: 260286 - DNA, 120 bp, Artificial Sequence
  ENSG00000125304_36 (sequence is synthesized)
ctcccagcaaccacctctcccagcaaccacctcagctggcgcgcggaaaacccggaaagtggatttcgcccccgctccctcccggaaactcctcctggtgcctgcgaccgttctcactga

SEQ ID NO: 260287 - DNA, 120 bp, Artificial Sequence
  ENSG00000125304_37 (sequence is synthesized)
atcgccccaaattggctcctggaagacctcttctttcctttgcttccgctcttcctccctttgtccactttgagcttctatgcagctcccttgtacctttaaatacgttccactttgagc

SEQ ID NO: 260288 - DNA, 120 bp, Artificial Sequence
  ENSG00000125304_38 (sequence is synthesized)
gtacctttaaatacgttccactttgagcccccacctccacctggtggtcagtggatagaaaattgctgaaaggaaacatcggaggtaaaaagcctcaggtatgtctttatcagcagcatg

SEQ ID NO: 260289 - DNA, 120 bp, Artificial Sequence
  ENSG00000125304_39 (sequence is synthesized)
agaaagaaaagaagagaaagaaagaagaaagaaaagagaaaattaaattgtgtttataaagtcatcagtagacaatgtttacatctggagaaaaggggaaagaagcagacttctccagtg

SEQ ID NO: 260290 - DNA, 120 bp, Artificial Sequence
  ENSG00000125304_40 (sequence is synthesized)
gggcactcagtctggtgccagaaagcatatcaaatcagagcacagacctggctgaacatggggctacttcccaaggtgtcaattttctttgaagattttcagatcactaaaaagcttctc

SEQ ID NO: 260291 - DNA, 120 bp, Artificial Sequence
  ENSG00000125304_41 (sequence is synthesized)
gtgtgtaagtctacagttgtgtacagtagtgtcctaggccttcacattcattcaccgctcactcacccagagcagcttccagccttgcaagttctattcatggccgaaatagaactattt

SEQ ID NO: 260292 - DNA, 120 bp, Artificial Sequence
  ENSG00000125304_42 (sequence is synthesized)
gtgaacagacttgattcagtggaatcagttcttccttatgaatacacagccactcttcacagagggtctttttagccatgcttcacatattgggatgtgttggcaagtgtactgagatga

SEQ ID NO: 260293 - DNA, 120 bp, Artificial Sequence
  ENSG00000125304_43 (sequence is synthesized)
tttggttgcataatcttactctgatttcccctagactttagtaaatctgaaactctccaaatctcaggactaaccaaagttagataatttagaaattgcagttgttgactcaatggaagg

SEQ ID NO: 260294 - DNA, 120 bp, Artificial Sequence
  ENSG00000125319_0 (sequence is synthesized)
cctttaagaaggcggagacgccccagtggcggcgtcttcgaatgcggcctaaggcgcctgccgccagtctcctggcgactttccctatatcgcagagactcatccctctgaccccagccc

SEQ ID NO: 260295 - DNA, 120 bp, Artificial Sequence
  ENSG00000125319_1 (sequence is synthesized)
ggaagcactgtccctcggagtccgagacttccacctgggtcgtgtccaaggccccggcgactccccggactcggggtgccgggccaacctccccgccgaggcccacccgccgtcgctatg

SEQ ID NO: 260296 - DNA, 120 bp, Artificial Sequence
  ENSG00000125319_2 (sequence is synthesized)
gcgtgcagtttgcagaagctgtttgctgtggaagaggagtttgaagatgaggatttcttgtctgctgtggaggatgcagagaaccggtttactggctcactgcctgtgaatgctgggcgc

SEQ ID NO: 260297 - DNA, 120 bp, Artificial Sequence
  ENSG00000125319_3 (sequence is synthesized)
ctgagacctgtctcttctaggccacaggagactgtgcaggcacagtcctccaggctgctgctgttacaccccactgctccctcagaggctttgggcctgccagacttggacctctgcctc

SEQ ID NO: 260298 - DNA, 120 bp, Artificial Sequence
  ENSG00000125319_4 (sequence is synthesized)
cctgcctccagcacgcccagtgctgacagccgtccatcatgcataggagcagctcccctaaggcctgtctctacttccagcagctggattggcaatcagagaagagtgacagtgacagaa

SEQ ID NO: 260299 - DNA, 120 bp, Artificial Sequence
  ENSG00000125319_5 (sequence is synthesized)
gtgctcagagagacagcaagacctcagtcctcagccttacaccccctactcacctttgagagccaacagcagcaagttggtggctttgaggggcctgaacaagacgaatttgataaagtc

SEQ ID NO: 260300 - DNA, 120 bp, Artificial Sequence
  ENSG00000125319_6 (sequence is synthesized)
ctggcaagcatggagttggaggagcctggcatggagctggaatgtggagtcagcagtgaggccataccaatcctgcctgcccagcagcgggagggttcagtattggctaaaaaagcccgg

SEQ ID NO: 260301 - DNA, 120 bp, Artificial Sequence
  ENSG00000125319_7 (sequence is synthesized)
gtagttgatctgagtggatcttgccagaaggggcctgtgcctgccatccacaaagcgggtatcatgtccgcccaggatgagtctctagatcctgtcatccaatgtaggactccacgaccc

SEQ ID NO: 260302 - DNA, 120 bp, Artificial Sequence
  ENSG00000125319_8 (sequence is synthesized)
cccttgagacctggtgctgtgggtcaccttcctgttccaactgccttaacagttcccactcagcaactccactgggaagtctgtccgcaacgctcccctgttcaagcacttcagcctctc

SEQ ID NO: 260303 - DNA, 120 bp, Artificial Sequence
  ENSG00000125319_9 (sequence is synthesized)
caagctgctagagggaccattcagagcagccctcaaaatcgtttcccttgtcagccattccagtctccaagttcctggttaagtggcaaagctcatttacccagacctcgaactcccaac

SEQ ID NO: 260304 - DNA, 120 bp, Artificial Sequence
  ENSG00000125319_10 (sequence is synthesized)
tcaagctgttctactccctcaaggactagctctggattatttcctcggatacccttacaaccgcaagctccagtgtcttccattgggtctcctgttggtaccccaaaaggtccccaggga

SEQ ID NO: 260305 - DNA, 120 bp, Artificial Sequence
  ENSG00000125319_11 (sequence is synthesized)
ccacccgagccaaaactcgccgtttccctggcccagctgggatcctgcctcaccagcagagtgggagaagtctggaggacatcatggtttccgcgccccaaactccaacccatggtgctc

SEQ ID NO: 260306 - DNA, 120 bp, Artificial Sequence
  ENSG00000125319_12 (sequence is synthesized)
tggctaaattccagacagagattgttgctagttcccaggcatctgtggaggaggattttgggcgagggccctggctgaccatgaaatccacgctaggcctggatgagagagaccctagct

SEQ ID NO: 260307 - DNA, 120 bp, Artificial Sequence
  ENSG00000125319_13 (sequence is synthesized)
gcttcctctgtacctacagcattgtcatggtgctgcgcaagcaggcagccctgaagcagcttcctaggaacaaggtccccaacatggcggtgatgatcaagtccctgactcggagcacaa

SEQ ID NO: 260308 - DNA, 120 bp, Artificial Sequence
  ENSG00000125319_14 (sequence is synthesized)
tggacgccagtgtggttttcaaggaccccacgggagagatgcaggggacggtgcacaggttgctgctggagacgtgccagaatgagctgaagcctggctcagtgctgctgctgaagcaga

SEQ ID NO: 260309 - DNA, 120 bp, Artificial Sequence
  ENSG00000125319_15 (sequence is synthesized)
ttggagtgttttctccttcacttcgaaatcactacctcaacgtgacacccaacaacctggtccatatttacagcccggattctggggatgggagcttcctcaagccatctcagcccttcc

SEQ ID NO: 260310 - DNA, 120 bp, Artificial Sequence
  ENSG00000125319_16 (sequence is synthesized)
ccaaggattcagggagcttccagcatgatgtggctgcaaagcccgaggaaggcttcagaacagcacagaacctagaggcagaggcgtcccctgaggaagaactcccagaagcagatgacc

SEQ ID NO: 260311 - DNA, 120 bp, Artificial Sequence
  ENSG00000125319_17 (sequence is synthesized)
tggatggactcctgagtgagcttcctgaagacttcttctgtgggaccagtagttgagactgccccaacgcaggacaacccaccatgagcaggcagctctgggcatgtgtctggtcacatc

SEQ ID NO: 260312 - DNA, 120 bp, Artificial Sequence
  ENSG00000125319_18 (sequence is synthesized)
caagggggagaagaaggccagcatgattggagagtggacacagccggggggcttctgtggttgctcccaccctgggtgttttccctgagagccccctcatctctgcgctgccctcacttt

SEQ ID NO: 260313 - DNA, 120 bp, Artificial Sequence
  ENSG00000125319_19 (sequence is synthesized)
gggccttcctttgccgttggcaccagaatccggccggagactggctctccagccaacaagaaaggcctgtcaccctcgccttgggtgtccctctcctgcctcagcttaattttagaggat

SEQ ID NO: 260314 - DNA, 120 bp, Artificial Sequence
  ENSG00000125319_20 (sequence is synthesized)
attgggcctggttttcttgtcccttcataccctagtccctggacagctgaggagatgaaaggagccacaccacaacaatggcggcctgcccctccacacaggggagaagcacgctcaggc

SEQ ID NO: 260315 - DNA, 120 bp, Artificial Sequence
  ENSG00000125319_21 (sequence is synthesized)
ttcctctgctttgtctcttcagacctgtggttgctctgctcatccatgcccaaggttcccaggtgcaggacagaggtgtggcctattgtaccttgttctgaaataaagcatctcctgctt

SEQ ID NO: 260316 - DNA, 120 bp, Artificial Sequence
  ENSG00000125319_22 (sequence is synthesized)
aacatacacgccatgtgcctgaacagtaaaagcagaggggttcttgatttccagatgccaagacctaccatctctgcttccttgtaggatttcttgtctgctgtggaggatgcagagaac

SEQ ID NO: 260317 - DNA, 120 bp, Artificial Sequence
  ENSG00000125319_23 (sequence is synthesized)
gggagagaaatgaaggacctcccagctctaggtctgtcagagagagatggggtacctccttgtcctccacaaagaagatcatcactataactatactctgacccctcctaaccccggttg

SEQ ID NO: 260318 - DNA, 120 bp, Artificial Sequence
  ENSG00000125337_0 (sequence is synthesized)
ttgtttacaaaaacaggcggcaggctggggttggtggggcttgtgtttaattaacgcagcacacaaagtcttatgacgtcgttttactcttttctctcaggaaacaattctggtgaaatg

SEQ ID NO: 260319 - DNA, 120 bp, Artificial Sequence
  ENSG00000125337_1 (sequence is synthesized)
tgatcgtcctggccaccctctgattgataagacatatcattttgaaagatatactggccttcccagctgacatggacctcaggtcagcttcagcgtgagaagcaggccaggcctgggtct

SEQ ID NO: 260320 - DNA, 120 bp, Artificial Sequence
  ENSG00000125337_2 (sequence is synthesized)
ggagccgtcctggccttcccagatgacatggacctcaggtcagcttcagcgtgagaagcaggccaggcctgggtctggagccgtcctggccttcccagatgacaaggacctcagggttta

SEQ ID NO: 260321 - DNA, 120 bp, Artificial Sequence
  ENSG00000125337_3 (sequence is synthesized)
tggtccagcagagtctcagagcgcggtctttggagatgtgtgccccctactcacttctctcttggatgggtacaatgtttgtgttatggcgtatggacagacgggcagcggaaagagcta

SEQ ID NO: 260322 - DNA, 120 bp, Artificial Sequence
  ENSG00000125337_4 (sequence is synthesized)
taccatgctgggacgccattcggacgacggccctgttctgccgcttgacccacagagtgacttaggaattatccctagagtggctgaggagctcttcaggctcattttggaaaatacctc

SEQ ID NO: 260323 - DNA, 120 bp, Artificial Sequence
  ENSG00000125337_5 (sequence is synthesized)
aagaagcccaaaggttgaagtctccatagtggaagtttacaataatgacatttttgaccttctggccaaagacagcattgcagcagtgtcgggggtcaagcgtgaggtggtgacagccaa

SEQ ID NO: 260324 - DNA, 120 bp, Artificial Sequence
  ENSG00000125337_6 (sequence is synthesized)
gttcatggaggtctgcagctcagggcgaagcaccccaccctggtgcacgcggattcctccaggtctcacctgataattacggtgactctaaccacagcctcctgctctgacagcactgca

SEQ ID NO: 260325 - DNA, 120 bp, Artificial Sequence
  ENSG00000125337_7 (sequence is synthesized)
gaccaagcctgcagtgccaccctccccagggagcaaacagaggcaggaagggcaggaaggagccgcagagcttctcaaggggccttggctccacagctggttcctgggaaccccgcaggg

SEQ ID NO: 260326 - DNA, 120 bp, Artificial Sequence
  ENSG00000125337_8 (sequence is synthesized)
catgcggagcaggtgcaggctcgactacagctcgtggactcggccggcagcgagtgcgttggtgtgtctggagtgaccgggttggccctgagggagatggcgtgcatcagccgcagcctt

SEQ ID NO: 260327 - DNA, 120 bp, Artificial Sequence
  ENSG00000125337_9 (sequence is synthesized)
gcggccctggcaggcgtcctgggggctttgttggagcaccgtggccatgccccgtaccggaacagcaggctcacccacctccttcaggactgcctcggaggcgatgcgaagttactggtg

SEQ ID NO: 260328 - DNA, 120 bp, Artificial Sequence
  ENSG00000125337_10 (sequence is synthesized)
attctctgcatttctcccagccagaggcacctggcacagacgttgcagggcctgggtttcgggatccgagctcggcaagtccagcgaggccctgcccgaaagaagccgcccagctcccaa

SEQ ID NO: 260329 - DNA, 120 bp, Artificial Sequence
  ENSG00000125337_11 (sequence is synthesized)
acggaggggaagaggaggccggattgaatgcattaacaagtttttctcctaaaactgtgtttcttgtccttgctttataatgcatatgtgcttagaaataaacaggtttcacgtggactc

SEQ ID NO: 260330 - DNA, 120 bp, Artificial Sequence
  ENSG00000125337_12 (sequence is synthesized)
gggtctttcgaagtggagacaggtgctgcagatctcacggccgcgtctcaggagctggtgcccggtgcacgttcagtgggggatgctccgcagtgcaggctcgcgcccgggttgacacgc

SEQ ID NO: 260331 - DNA, 120 bp, Artificial Sequence
  ENSG00000125337_13 (sequence is synthesized)
agacctcttgatcattgcaggagctgaaacgaaatatcagagttcactgtcggattcgtcctttgttgccttttgatagtgaatccgacgatccagttttgcagagcaggaaacaattct

SEQ ID NO: 260332 - DNA, 120 bp, Artificial Sequence
  ENSG00000125337_14 (sequence is synthesized)
aaccttcctaagatggagtcaagtcccacaaggaagaattggttgtggaagtttctgagtgttccacctcaagcctggtctcctggtctagctgaggagcgtgcagtgcgcggcccatgg

SEQ ID NO: 260333 - DNA, 120 bp, Artificial Sequence
  ENSG00000125337_15 (sequence is synthesized)
agaatatgcaggcagaggctgatcccagcttctgtgggttcatagagaccagacggaggctgtaaatcattggcctatgacacccacttggttttcaaaatgtagaaggagctgctcagc

SEQ ID NO: 260334 - DNA, 120 bp, Artificial Sequence
  ENSG00000125337_16 (sequence is synthesized)
atgacagggtggataaacttgctgtggatccaagacaagatttcagaatggatttggcaagttctgagcacatacggagaagatgtgttgctcactggaaaccagtggagtttatgagaa

SEQ ID NO: 260335 - DNA, 120 bp, Artificial Sequence
  ENSG00000125337_17 (sequence is synthesized)
taaaaagcttctaatttccttccagtcattaaatcaaggaaatatgacagatactgaatttccaaaatcccctctaaaatgcctaaaatgtcgagcccaggatgccattcaaagggattt

SEQ ID NO: 260336 - DNA, 120 bp, Artificial Sequence
  ENSG00000125337_18 (sequence is synthesized)
attttccttggtacttattaccaagggatacccctttgccaagtgaacacatttgtgaagtatgaatccagaagtttaaaataactgttcatggccgggcacggtggctcatgcctataa

SEQ ID NO: 260337 - DNA, 120 bp, Artificial Sequence
  ENSG00000125337_19 (sequence is synthesized)
agatcagtggtccccaacctttttggcatcagggaccagcttcctggaagaccagctccatctctagagaagcggcccatgctgttgatgacctgagtctacaagtttcctcacaaattg

SEQ ID NO: 260338 - DNA, 82 bp, Artificial Sequence
  ENSG00000125337_20 (sequence is synthesized)
ggagaagacaccttcaggcatagcctcgggcaggtgagaaagacacctgaggcatggcctcgggcaggtgagaagacacctt

SEQ ID NO: 260339 - DNA, 120 bp, Artificial Sequence
  ENSG00000125337_21 (sequence is synthesized)
ggtgagaagacacctgaggcgtggccttgggcaggtgagaaagacaggcaagtttccatagtcccagaggcttctttctcctggatggtgcggctctgggctgtttggcttctcagagct

SEQ ID NO: 260340 - DNA, 120 bp, Artificial Sequence
  ENSG00000125337_22 (sequence is synthesized)
atggtgcggctctgggctgtttggcttctcagagcttcctaagaagctccataaacgtgtgtgtggactggcacattgtttgtgttcatcggcttttggttttgaaacatgttgcatttt

SEQ ID NO: 260341 - DNA, 120 bp, Artificial Sequence
  ENSG00000125337_23 (sequence is synthesized)
tttggcatcagggaccagcttcctggaagaccaggtttccacgaactggcgggccggggcagggatggtttcaggatgactcaactgcatttcatttattgtgcactttatttctattat

SEQ ID NO: 260342 - DNA, 120 bp, Artificial Sequence
  ENSG00000125337_24 (sequence is synthesized)
acaactcaccacaatgtaaaatcagtaggagccttgagcttattttcctgtaactagagggtcctatctagcagtgatggagacagtgacaggtcatcaggcatcagagtctcataagga

SEQ ID NO: 260343 - DNA, 120 bp, Artificial Sequence
  ENSG00000125337_25 (sequence is synthesized)
gtgtgcaacctgcatccctcacatgcacagctcacagtagggtttgtgctcccaagagaatctaatgctgctgctggtctgacaggaggtggagctcaggcagtgatgccagtgataggg

SEQ ID NO: 260344 - DNA, 120 bp, Artificial Sequence
  ENSG00000125337_26 (sequence is synthesized)
agcggctgtaattcagagaagctttgctcacttgcgcaccgctcacctcctgctgtgcagcctggtttctaacaggcctccatggccagggatttgggacccttgttctgtatcaccacc

SEQ ID NO: 260345 - DNA, 120 bp, Artificial Sequence
  ENSG00000125337_27 (sequence is synthesized)
gctctaaactgcgcatgaaggagatatttaagcgttcttactggagtatggatgactctcccatgcaatgcagacagggaagatgaaaacaagaaataaagaacaggggtattggagtaa

SEQ ID NO: 260346 - DNA, 120 bp, Artificial Sequence
  ENSG00000125337_28 (sequence is synthesized)
gaagacaaaagggggtggggaagagaagaaaataatacataaaaagtaaagagtaaaaaaaataaaaagcataaggtccaaaaggacgagtggagttttagaaaaggatggaagggtgga

SEQ ID NO: 260347 - DNA, 120 bp, Artificial Sequence
  ENSG00000125337_29 (sequence is synthesized)
tccatgcacacaggaagaggaggaagaggagccaagccagtgtcctgggagaccaggacagagacagagatgatggcagagaagcagaggggtgttttagagtgaccaggacagagacag

SEQ ID NO: 260348 - DNA, 120 bp, Artificial Sequence
  ENSG00000125337_30 (sequence is synthesized)
agatgatggcgaagaaacacaagggtgttttagaggctgaatgttaggaattcagaaagcaatttcttcatgatgtgtattttcaatgttgtttcattccctcagctccatctctagaga

SEQ ID NO: 260349 - DNA, 120 bp, Artificial Sequence
  ENSG00000125337_31 (sequence is synthesized)
atctctgctcttccaagtgagtggccccgggcaaggccgtactctccctacacctcaccttcgtcgtttgcagaaacgagaatcggagcagacacggaccgtgtcctccctcatcacatc

SEQ ID NO: 260350 - DNA, 120 bp, Artificial Sequence
  ENSG00000125337_32 (sequence is synthesized)
cacacacgacctggagaggggtgcactgggccagggctgggggtgagcttgggtgttcgtgactcaagttgcaaacggccctctgcccaaaatgatacaaaaccacaatgacatcagtgc

SEQ ID NO: 260351 - DNA, 120 bp, Artificial Sequence
  ENSG00000125337_33 (sequence is synthesized)
tgatatcagagatagtttacaggaaccctttaccctgaaaaggactactcttagattgctgaagtcaccagataagccatttcctgtcgttttaaagtaaataaaatgctactgcctgga

SEQ ID NO: 260352 - DNA, 120 bp, Artificial Sequence
  ENSG00000125337_34 (sequence is synthesized)
agcatctgtcacttcatttatgcttattacattttcatagcagaaagtactatctttactctttattaacctctgttatcttgaaaaataacacagattaatcttttgttgaagaatcct

SEQ ID NO: 260353 - DNA, 120 bp, Artificial Sequence
  ENSG00000125337_35 (sequence is synthesized)
gatggcgttggggggatgggaagtacacggggcgttgtgttcccaggtttctgagtctgcatgctagagccgctttctgctgcttctattaatacagcattttcactttgtctctcaggg

SEQ ID NO: 260354 - DNA, 120 bp, Artificial Sequence
  ENSG00000125337_36 (sequence is synthesized)
cttggctgccatgcagacgatggagcagcattcacgggctgatggcatttgaggctgatgacggacggggtgactgtggggccaggtcccccaggcgagctctcatgccagtcaaaggtg

SEQ ID NO: 260355 - DNA, 120 bp, Artificial Sequence
  ENSG00000125337_37 (sequence is synthesized)
gcgcacctggagcgggccttgcaggacgtcagtgcgcgtcaccagctggagaggcagagaaggaaggtcccgcacaacagcctggtgattcatgatggcttgcagatgcttgatttcctg

SEQ ID NO: 260356 - DNA, 120 bp, Artificial Sequence
  ENSG00000125337_38 (sequence is synthesized)
ggtggcgggaactgccctgcggaggaggcgggaactgagctgaggcagcactgggaagagctgttagctgcctaaaagtgttagggaagatccatcaggaagatggccaggcggctgcgc

SEQ ID NO: 260357 - DNA, 120 bp, Artificial Sequence
  ENSG00000125337_39 (sequence is synthesized)
ctctccagaaaccggataatcagcgttaccaatgggcccatcgcattactggcaagcgtttcagtcgcctcgtttctaaaatggtttttccgttttgctgttctgagtctcgggtgctgt

SEQ ID NO: 260358 - DNA, 120 bp, Artificial Sequence
  ENSG00000125337_40 (sequence is synthesized)
gtcatccttatcaacaggagtgtgtgatgtttctccacctgctacacactgtcagaggcacaagggatccaaaagtgcatgtgatcagttttctgcttttaaaaagtctagagtggaaac

SEQ ID NO: 260359 - DNA, 120 bp, Artificial Sequence
  ENSG00000125337_41 (sequence is synthesized)
gggctcattttggaaaatacctcaagaagcccaaaggttgaagtctccatagtggaagtttacaataatgacatttttgaccttctggccaaagacagcattgcagcagtgtcgggggtc

SEQ ID NO: 260360 - DNA, 120 bp, Artificial Sequence
  ENSG00000125347_0 (sequence is synthesized)
agagctcgccactccttagtcgaggcaagacgtgcgcccgagccccgccgaaccgaggccacccggagccgtgcccagtccacgccggccgtgcccggcggccttaagaacccggcaacc

SEQ ID NO: 260361 - DNA, 120 bp, Artificial Sequence
  ENSG00000125347_1 (sequence is synthesized)
tctgccttcttccctcttccactcggagtcgcgctccgcgcgccctcactgcagcccctgcgtcgccgggaccctcgcgcgcgaccgccgaatcgctcctgcagcagagccaacatgccc

SEQ ID NO: 260362 - DNA, 120 bp, Artificial Sequence
  ENSG00000125347_2 (sequence is synthesized)
atcactcggatgcgcatgagaccctggctagagatgcagattaattccaaccaaatcccggggctcatctggattaataaagaggagatgatcttccagatcccatggaagcatgctgcc

SEQ ID NO: 260363 - DNA, 120 bp, Artificial Sequence
  ENSG00000125347_3 (sequence is synthesized)
aagcatggctgggacatcaacaaggatgcctgtttgttccggagctgggccattcacacaggccgatacaaagcaggggaaaaggagccagatcccaagacgtggaaggccaactttcgc

SEQ ID NO: 260364 - DNA, 120 bp, Artificial Sequence
  ENSG00000125347_4 (sequence is synthesized)
tgtgccatgaactccctgccagatatcgaggaggtgaaagaccagagcaggaacaagggcagctcagctgtgcgagtgtaccggatgcttccacctctcaccaagaaccagagaaaagaa

SEQ ID NO: 260365 - DNA, 120 bp, Artificial Sequence
  ENSG00000125347_5 (sequence is synthesized)
agaaagtcgaagtccagccgagatgctaagagcaaggccaagaggaagtcatgtggggattccagccctgataccttctctgatggactcagcagctccactctgcctgatgaccacagc

SEQ ID NO: 260366 - DNA, 120 bp, Artificial Sequence
  ENSG00000125347_6 (sequence is synthesized)
agctacacagttccaggctacatgcaggacttggaggtggagcaggccctgactccagcactgtcgccatgtgctgtcagcagcactctccccgactggcacatcccagtggaagttgtg

SEQ ID NO: 260367 - DNA, 120 bp, Artificial Sequence
  ENSG00000125347_7 (sequence is synthesized)
ccggacagcaccagtgatctgtacaacttccaggtgtcacccatgccctccacctctgaagctacaacagatgaggatgaggaagggaaattacctgaggacatcatgaagctcttggag

SEQ ID NO: 260368 - DNA, 120 bp, Artificial Sequence
  ENSG00000125347_8 (sequence is synthesized)
cagtcggagtggcagccaacaaacgtggatgggaaggggtacctactcaatgaacctggagtccagcccacctctgtctatggagactttagctgtaaggaggagccagaaattgacagc

SEQ ID NO: 260369 - DNA, 120 bp, Artificial Sequence
  ENSG00000125347_9 (sequence is synthesized)
ccagggggggatattgggctgagtctacagcgtgtcttcacagatctgaagaacatggatgccacctggctggacagcctgctgaccccagtccggttgccctccatccaggccattccc

SEQ ID NO: 260370 - DNA, 120 bp, Artificial Sequence
  ENSG00000125347_10 (sequence is synthesized)
tgtgcaccgtagcagggcccctgggcccctcttattcctctaggcaagcaggacctggcatcatggtggatatggtgcagagaagctggacttctgtgggcccctcaacagccaagtgtg

SEQ ID NO: 260371 - DNA, 120 bp, Artificial Sequence
  ENSG00000125347_11 (sequence is synthesized)
accccactgccaagtggggatggggcctccctccttgggtcattgacctctcagggcctggcaggccagtgtctgggtttttcttgtggtgtaaagctggccctgcctcctgggaagatg

SEQ ID NO: 260372 - DNA, 120 bp, Artificial Sequence
  ENSG00000125347_12 (sequence is synthesized)
aggttctgagaccagtgtatcaggtcagggacttggacaggagtcagtgtctggctttttcctctgagcccagctgcctggagagggtctcgctgtcactggctggctcctaggggaaca

SEQ ID NO: 260373 - DNA, 120 bp, Artificial Sequence
  ENSG00000125347_13 (sequence is synthesized)
gaccagtgaccccagaaaagcataacaccaatcccagggctggctctgcactaagagaaaattgcactaaatgaatctcgttcccaaagaactacccccttttcagctgagccctgggga

SEQ ID NO: 260374 - DNA, 120 bp, Artificial Sequence
  ENSG00000125347_14 (sequence is synthesized)
ctaccctgctccctgctttggctgaggggcttgggaaaaaaacttggcactttttcgtgtggatcttgccacatttctgatcagaggtgtacactaacatttcccccgagctcttggcct

SEQ ID NO: 260375 - DNA, 120 bp, Artificial Sequence
  ENSG00000125347_15 (sequence is synthesized)
ttgcatttatttatacagtgccttgctcggcgcccaccaccccctcaagccccagcagccctcaacaggcccagggagggaagtgtgagcgccttggtatgacttaaaattggaaatgtc

SEQ ID NO: 260376 - DNA, 120 bp, Artificial Sequence
  ENSG00000125347_16 (sequence is synthesized)
atctaaccattaagtcatgtgtgaacacataaggacgtgtgtaaatatgtacatttgtctttttataaaaagtaaattgtttataaggggtgtggcctttttagagagaaatttaacttg

SEQ ID NO: 260377 - DNA, 120 bp, Artificial Sequence
  ENSG00000125347_17 (sequence is synthesized)
tagatgattttactttttatggaaacactgatggacttattattggcatcccgcctgaacttgactttggggtgaacagggacatgcatctattataaaatcctttcggccaggcgcggt

SEQ ID NO: 260378 - DNA, 67 bp, Artificial Sequence
  ENSG00000125347_18 (sequence is synthesized)
acatgccattgcactccagcccgggcaccaaaaaaaaaaaaaaaaaaaaaaacctttcatttggccg

SEQ ID NO: 260379 - DNA, 89 bp, Artificial Sequence
  ENSG00000125347_19 (sequence is synthesized)
cagtgagccgagaacatgccattgcactccagcccgggcaccaaaaaaaaaaaaaaaaaaaaaaacctttcattttggcactttgggag

SEQ ID NO: 260380 - DNA, 120 bp, Artificial Sequence
  ENSG00000125347_20 (sequence is synthesized)
gtgagactttgtctcaaaaaaaaaaaaatccttttgtttatgttcacatagacaatggcagaaggaggggacattcctgtcataggaacatgcttatataaacatagtcacctgtccttg

SEQ ID NO: 260381 - DNA, 120 bp, Artificial Sequence
  ENSG00000125347_21 (sequence is synthesized)
cttgactatcaccagggctgtcagttgattctgggctcctggggcccaaggagtgttaagttttgaggcatgtgccataggtgatgtgtcctgctaacacacagatgctgctccaaaaag

SEQ ID NO: 260382 - DNA, 120 bp, Artificial Sequence
  ENSG00000125347_22 (sequence is synthesized)
tcagttgatatgacacagtcacagacagaacagtcagcagcccaagaaaggtcctcacggctgctgtgctgggtagcacttgccatccagtttctagagtgatgaaatgctctgtctgta

SEQ ID NO: 260383 - DNA, 120 bp, Artificial Sequence
  ENSG00000125347_23 (sequence is synthesized)
ccgttcaatacagtaggcactggcactagccacatgtgccagctaagcacttgaaatgtggccagtgcaataaggaattgaacttttaattgcatttaataaactgtatgtaaatagtca

SEQ ID NO: 260384 - DNA, 120 bp, Artificial Sequence
  ENSG00000125347_24 (sequence is synthesized)
cccgctatgttcgtcccgcgcatccacacgccgtgccggggaccgagtgtcagcccacgcgtgggcgcccagtgctcccggctttcggcggtcccagctccgcgcccaggcgacaggttt

SEQ ID NO: 260385 - DNA, 120 bp, Artificial Sequence
  ENSG00000125347_25 (sequence is synthesized)
agagcagttttattccagcgcagctcccctccgcactgagtgtagtacctagcagctggctgaggtgaggggagggtaactaagtgacctcgggtggggcaggtcactgcccaggtactg

SEQ ID NO: 260386 - DNA, 120 bp, Artificial Sequence
  ENSG00000125347_26 (sequence is synthesized)
accaaagcttcagatgcagctcaaaaagggaagtgataacgggacaagcaggtgtttctcccagtgggtcctgcatgcagggagtgtgcacggcccagcctgggcctcacttgcatgact

SEQ ID NO: 260387 - DNA, 120 bp, Artificial Sequence
  ENSG00000125347_27 (sequence is synthesized)
agactttccagcatctgcagagctggagttctgctctcctctaagcgagacccttacaaacatacacagcactctgcagggctccaatcgaacaaatagaagactgagaagtggatgctg

SEQ ID NO: 260388 - DNA, 120 bp, Artificial Sequence
  ENSG00000125347_28 (sequence is synthesized)
ctgggcagaaacgtgcctggcttagcagaggacaaacgagttaatcttgcaccagtcactctggcccaagaagcctatagctggtgcacttggggcaacatagaccctatagacttagta

SEQ ID NO: 260389 - DNA, 120 bp, Artificial Sequence
  ENSG00000125347_29 (sequence is synthesized)
gcaatgatagtattcataataatagctaatgcttactgaacactccctgtgtgcctggcacctgctaagtatgttatttacattgtgtcatttaatcctcgcagtagtcctgtgggttag

SEQ ID NO: 260390 - DNA, 120 bp, Artificial Sequence
  ENSG00000125347_30 (sequence is synthesized)
atcttactaatgtcatcattttcagataagtaaacagaggcactgagaggtagatcataagatcacacaaaaagtgatgaagccaagatttgaacttgaacggtctgactcagaaatctt

SEQ ID NO: 260391 - DNA, 120 bp, Artificial Sequence
  ENSG00000125347_31 (sequence is synthesized)
ccaggctacatgcaggacttggaggtggagcaggccctgactccaggtgagctggtccaggtctggcaggagaccccacaggtcagtgggatgactctttctcttggaggcatggtgctg

SEQ ID NO: 260392 - DNA, 120 bp, Artificial Sequence
  ENSG00000125347_32 (sequence is synthesized)
gcacatggtggcccattagtgcaggctgcagggttggtcggagggcgctcgatgtcttgcaaactaagaaagcacacaaccttgacctgtggcttctgctgttccccagcactgtcgcca

SEQ ID NO: 260393 - DNA, 120 bp, Artificial Sequence
  ENSG00000125347_33 (sequence is synthesized)
tcctggggcctggcctgcctgcttgactgtctgggtcctgtgaagggcttcctgagagagaaaagatgatcagaactccacctggcactgaattgattgagttgggcattgcccagtctt

SEQ ID NO: 260394 - DNA, 120 bp, Artificial Sequence
  ENSG00000125347_34 (sequence is synthesized)
ttccgagaagagaaaactgaggggcaaagagatacagtgacaatgccagggttacacagtgttcaccatccaagtctagcccagagctccctcagtggtatgaccaggaccccctgtgta

SEQ ID NO: 260395 - DNA, 120 bp, Artificial Sequence
  ENSG00000125347_35 (sequence is synthesized)
agagcccatgctcccaggtgtcctgaggagtcctttctaatggaagaagttcttacttccatgtgggtgcttacaagccagagagaaacatcccagagcttcaaaaccagggctttgggg

SEQ ID NO: 260396 - DNA, 120 bp, Artificial Sequence
  ENSG00000125347_36 (sequence is synthesized)
gagggtgccctgtgtgggtcctagcacatgtgtaacaggcagagggaggtctttgtgagctaataatgctgcagctcatccaaactaggtgtccctcctgagagatccagagtggtctgt

SEQ ID NO: 260397 - DNA, 120 bp, Artificial Sequence
  ENSG00000125347_37 (sequence is synthesized)
ttaagccagcctcaagatgggtgtccaagccagatgtcaggggaaaaaaggggaagtcagccttttctcagacctgtctggctgggcaggcctgggtctcagactcagccccaaagtctg

SEQ ID NO: 260398 - DNA, 120 bp, Artificial Sequence
  ENSG00000125347_38 (sequence is synthesized)
ggagggagggtagaaggaggtcagctggggctggagagcctgcaccaaggctgacagcccgtctgccccacagaaagaaagtcgaagtccagccgagatgctaagagcaaggccaagagg

SEQ ID NO: 260399 - DNA, 120 bp, Artificial Sequence
  ENSG00000125347_39 (sequence is synthesized)
aaggtgagtgtggtcctaagcagccaggcctttggtcacctgtgggccagggtgagcagtggaagaaatgctaaggtgggcctgggcctaagctgctttctccctcgacagtcatgtggg

SEQ ID NO: 260400 - DNA, 120 bp, Artificial Sequence
  ENSG00000125347_40 (sequence is synthesized)
ttcagagtgggctgcagtacagtgggggctggtgagaggagggaagggggccaggggctgcattttggggtgctggttctccttcctcctctgtagcccagcatctgagggtgaggaagg

SEQ ID NO: 260401 - DNA, 120 bp, Artificial Sequence
  ENSG00000125347_41 (sequence is synthesized)
aagtagggtaggggtgggaagcggcgtggcttcagggtttgagaggctgagtcaccaggccagggtcctgttctggaatctctatggcagataggtccaccgggagggtgtgtgtgtgtg

SEQ ID NO: 260402 - DNA, 120 bp, Artificial Sequence
  ENSG00000125347_42 (sequence is synthesized)
tgtgtgtgtcagagagacagagagacagagaaagggcagggggatctggtgggctggaactggaactgcagggtgagtgtggctgactgccagccaacctctctgctttccccatccaca

SEQ ID NO: 260403 - DNA, 120 bp, Artificial Sequence
  ENSG00000125347_43 (sequence is synthesized)
agtgaagcttccaaatcagaggatgggtagctgctgttgtcacctggctgcttgcattgtcccacaagtgccacattcacgtggcttgactggtgggaaagccaccatgggaagggaagg

SEQ ID NO: 260404 - DNA, 120 bp, Artificial Sequence
  ENSG00000125347_44 (sequence is synthesized)
caggtgggaggcctggcctctgacaggccgtcctgaagcaagccttggggcatcagacagctctgtgagtcaggcactatcagcgatgggtccctggcctgcatcctctgccccaacatg

SEQ ID NO: 260405 - DNA, 120 bp, Artificial Sequence
  ENSG00000125347_45 (sequence is synthesized)
ccccagccctgctagttcgggaaatgcacatcaggcttcaataatcagcctttaggatccgttaatatgatgatggctttatagaaaaagttagcaaattatcctccaggtttttttttc

SEQ ID NO: 260406 - DNA, 73 bp, Artificial Sequence
  ENSG00000125347_46 (sequence is synthesized)
atagaaaaagttagcaaattatcctccaggtttttttttctgcttcagttttgaaagtgaatatagtttttgc

SEQ ID NO: 260407 - DNA, 77 bp, Artificial Sequence
  ENSG00000125347_47 (sequence is synthesized)
gtttttgcagtagttgtacgccagctgttccattagcccaaaaaattgagacatggatgtcgttccttatctctagc

SEQ ID NO: 260408 - DNA, 120 bp, Artificial Sequence
  ENSG00000125347_48 (sequence is synthesized)
ccaaaaaattgagacatggatgtcgttccttatctctagcttttctagtcatcttttcttgatttattatgctaacctttgttttaagccacattccctcttactatgtccttacacagt

SEQ ID NO: 260409 - DNA, 120 bp, Artificial Sequence
  ENSG00000125347_49 (sequence is synthesized)
tgagagggaagtcgtggagatgctataccagagagtgggtgtgagaggggtgggaaaatgaattgaggaccagtgccaacatgcatttctgcctcctccctcccgggcccttgtcctgac

SEQ ID NO: 260410 - DNA, 120 bp, Artificial Sequence
  ENSG00000125347_50 (sequence is synthesized)
tgcagtgcacttctgcatcctatctgagattgtgaaaatggccaagggtgtgatactggctgagaggagctggctcattgagggcagggccacagggtgagtctgcactggaagggagtt

SEQ ID NO: 260411 - DNA, 120 bp, Artificial Sequence
  ENSG00000125347_51 (sequence is synthesized)
ccagggagcagggcggtaaagcatctggggtactgacacattgtgaattagctacggctgccatgccttaaggtttgcctgaagctgagtggatgtttactgctgtgctgggaagagcag

SEQ ID NO: 260412 - DNA, 120 bp, Artificial Sequence
  ENSG00000125351_0 (sequence is synthesized)
gcttcccgggagccgtttgtgcccggggtaaccccgttccggccaagccgcttcagcgggggacgtagccatgaaggaagagaaggagcacaggcctaaggagaagcgagtaaccctgtt

SEQ ID NO: 260413 - DNA, 120 bp, Artificial Sequence
  ENSG00000125351_1 (sequence is synthesized)
aacccccgccggggccacaggcagcggtggtgggacctcgggggacagctccaagggggaagataagcaggatcgcaacaaggagaagaaagaagcgctgagcaaggtggtaattcgaag

SEQ ID NO: 260414 - DNA, 120 bp, Artificial Sequence
  ENSG00000125351_2 (sequence is synthesized)
attacctcccactttgaccaaggagcagcttcaggaacatcttcaacctatgcctgagcatgattattttgagtttttttctaatgatacgagtttgtatcctcatatgtatgccagagc

SEQ ID NO: 260415 - DNA, 120 bp, Artificial Sequence
  ENSG00000125351_3 (sequence is synthesized)
atacatcaactttaaaaaccaagaggacattattttgttcagggatcgctttgatggttatgtattccttgacaataaaggtcaggaatatcccgctatagtagaatttgcaccttttca

SEQ ID NO: 260416 - DNA, 120 bp, Artificial Sequence
  ENSG00000125351_4 (sequence is synthesized)
aaaagctgcaaaaaagaagactaagaaaagagataccaaagtcgggactatcgatgatgatccagaatatagaaagtttttggaaagttatgccacagataatgagaaaatgacatctac

SEQ ID NO: 260417 - DNA, 120 bp, Artificial Sequence
  ENSG00000125351_5 (sequence is synthesized)
tccagagacactgctagaggaaatagaagcaaaaaatagagaattaatagctaaaaagacaaccccacttttgagcttcctgaaaaacaagcagagaatgagagaagaaaagagagaaga

SEQ ID NO: 260418 - DNA, 120 bp, Artificial Sequence
  ENSG00000125351_6 (sequence is synthesized)
aaggaggaggagagaaatagaaagaaaaagacaaagagaagaagagaggaggaaatggaaagaagaagagaaacgaaaaaggaaagatatagaaaagctaaagaagatagacagaattcc

SEQ ID NO: 260419 - DNA, 120 bp, Artificial Sequence
  ENSG00000125351_7 (sequence is synthesized)
agaaagggacaaattaaaggatgaaccaaagattaaggtacacaggtttctgttacaagctgtgaatcagaaaaatctgctcaagaagccagaaaaaggagatgaaaaagaattggacaa

SEQ ID NO: 260420 - DNA, 120 bp, Artificial Sequence
  ENSG00000125351_8 (sequence is synthesized)
aagagaaaaagccaagaaattggacaaagagaatctcagtgatgaaagagccagtgggcaaagttgtacattgcccaagcgttctgatagcgaacttaaagatgaaaaaccaaagagacc

SEQ ID NO: 260421 - DNA, 120 bp, Artificial Sequence
  ENSG00000125351_9 (sequence is synthesized)
aagaagagcgccgtaggcagaaggagcgctatgagaaagagaagacttttaagagaaaagaagaagaaatgaaaaaagagaaagacacacttcgggataaaggaaagaaggctgaaagta

SEQ ID NO: 260422 - DNA, 120 bp, Artificial Sequence
  ENSG00000125351_10 (sequence is synthesized)
cagaatcaataggcagctcagaaaaaactgaaaagaaagaagaagtggtcaagagagatcgaataagaaacaaggatcgtccagcgatgcagctttaccaaccaggagctcgaagccgaa

SEQ ID NO: 260423 - DNA, 120 bp, Artificial Sequence
  ENSG00000125351_11 (sequence is synthesized)
atcgactctgtccccctgatgacagcaccaagtctggagattcagcagcagaaaggaagcaggaaagtggtattagccatagaaaagaaggaggagaggagtgataagtccagatggcct

SEQ ID NO: 260424 - DNA, 120 bp, Artificial Sequence
  ENSG00000125351_12 (sequence is synthesized)
taggtgtcctgactgtctaggcagccaaagagcacacgttaagcaatccagaggtgccttcagggcaaagaatagagagaaagggagccgctgtgctggtggggtacactgcagaggagt

SEQ ID NO: 260425 - DNA, 120 bp, Artificial Sequence
  ENSG00000125351_13 (sequence is synthesized)
aagtcttgtgtcaaagcaggaatctgatcagaggttcagaattggaagtacaatttcattgcttttgcaatttctacaaattaattttaaagtgtcagaaaaaggtgacggcaaggacat

SEQ ID NO: 260426 - DNA, 120 bp, Artificial Sequence
  ENSG00000125351_14 (sequence is synthesized)
gcattgcaatttgcagggggaattgtcaagtgaggacttcatcacatatgacacgagagaaaagtaagagctggttctaaaatcaaaagctgttgttcatcctgaattgaattttctgaa

SEQ ID NO: 260427 - DNA, 120 bp, Artificial Sequence
  ENSG00000125351_15 (sequence is synthesized)
tttgggtggagcagagtcgctttgaagccttgttccgatctaattctattgtattgttgatgataagtgttgacattgggtagtgtagaagcaacaagcatgtccttgtagtacaggtac

SEQ ID NO: 260428 - DNA, 120 bp, Artificial Sequence
  ENSG00000125351_16 (sequence is synthesized)
agtgaaggatagaacacactttcgttgatacaaaaatttaaatagttatgttacttctgtatccagtgtcctaaagttttaggattagttttagttttttgtttgcttatatgagcttag

SEQ ID NO: 260429 - DNA, 120 bp, Artificial Sequence
  ENSG00000125351_17 (sequence is synthesized)
cgtaaagaatatttttaaacttcgtgttttgtcatcagcatcttttctattaagaggtaaaatgtagtccttgtttgactcttgacaatccagtgtgtttgatcttaggtctcatgatct

SEQ ID NO: 260430 - DNA, 120 bp, Artificial Sequence
  ENSG00000125351_18 (sequence is synthesized)
gagtgcataccctctccaggaaggaaactgcaccagtgtctattcctgttaaatagcaacttttagtctcagcttgtttcgttttgatgtcaataaatagtaacagcattcaagtgtgaa

SEQ ID NO: 260431 - DNA, 120 bp, Artificial Sequence
  ENSG00000125351_19 (sequence is synthesized)
atgacagcaccaagtctggagattcagcagcagaaaggaagcagggtcgtccagggatgcagtcttaccatccaggagttcaaagccactatcaacactattttcctgatgacagcacca

SEQ ID NO: 260432 - DNA, 120 bp, Artificial Sequence
  ENSG00000125351_20 (sequence is synthesized)
cagcagtagaaagaaagcagaatcatccagggatgcagcgttaccatccaggagctcgaagccaaggtcgactctcgcaccctgatgacataaccaagtctggagattcagcagtagaaa

SEQ ID NO: 260433 - DNA, 120 bp, Artificial Sequence
  ENSG00000125351_21 (sequence is synthesized)
gaaagcaggatcatccagggatgaagctttaccatccaggagctcgaagcccaggtcgattctggtggcaagatggcagcaccaatctggagattcagcagtagaaagaaagcaggtctc

SEQ ID NO: 260434 - DNA, 120 bp, Artificial Sequence
  ENSG00000125351_22 (sequence is synthesized)
atgatctgagtgtgtaccctctccaggaaggaaactgcatcaatgtctgttcctgttaaatagcaacttttagtctcagcttgttttgttttgatgtcaataaatagtaacaacattcaa

SEQ ID NO: 260435 - DNA, 120 bp, Artificial Sequence
  ENSG00000125352_0 (sequence is synthesized)
agtcctcttccgtcagtgtcttttgcttcgactcccggcggagcgcgcaacgtggagtgacgtgcaggggccaagtgcaacccaggcagccacggctgtttcggagctcaggactctaaa

SEQ ID NO: 260436 - DNA, 120 bp, Artificial Sequence
  ENSG00000125352_1 (sequence is synthesized)
atggcagagcagctttctccaggaaaggcggtggatcaggtgtgcaccttccttttcaaaaagcctgggcggaaaggggctgctggacgcagaaagcgcccggcctgcgacccagagccc

SEQ ID NO: 260437 - DNA, 120 bp, Artificial Sequence
  ENSG00000125352_2 (sequence is synthesized)
ggagaaagcggcagcagtagcgacgaaggctgcactgtggttcgaccggaaaagaagcgggtgacccacaatccaatgatacagaagacccgtgacagtggtaaacagaaggcggcttac

SEQ ID NO: 260438 - DNA, 120 bp, Artificial Sequence
  ENSG00000125352_3 (sequence is synthesized)
ggcgacttgagcagcgaagaggaagaggaaaatgagcccgagagtctcggcgtggtttataaatccacccgttcggcgaaacccgtgggaccagaggatatgggagcgacagctgtctat

SEQ ID NO: 260439 - DNA, 120 bp, Artificial Sequence
  ENSG00000125352_4 (sequence is synthesized)
gagctggacacagagaaagagcgcgatgcacaagccatctttgagcgcagccagaagatccaggaggagctgaggggcaaggaggatgacaagatctatcggggaatcaacaattatcag

SEQ ID NO: 260440 - DNA, 120 bp, Artificial Sequence
  ENSG00000125352_5 (sequence is synthesized)
gggccccatccgagcgcccgagcatctacgtgccaccgtgcgctgggattaccagcccgacatctgtaaggactacaaagagactggcttctgcggcttcggagacagctgcaaattcct

SEQ ID NO: 260441 - DNA, 120 bp, Artificial Sequence
  ENSG00000125352_6 (sequence is synthesized)
ccatgaccgttcagattacaagcatgggtggcagatcgaacgtgagcttgatgagggtcgctatggtgtctatgaggatgaaaactatgaagtgggaagcgatgatgaggaaataccatt

SEQ ID NO: 260442 - DNA, 120 bp, Artificial Sequence
  ENSG00000125352_7 (sequence is synthesized)
caagtgtttcatctgtcgccagagcttccaaaacccagttgtcaccaagtgcaggcattatttctgcgagagctgtgcactgcagcatttccgcaccaccccgcgctgctatgtctgtga

SEQ ID NO: 260443 - DNA, 120 bp, Artificial Sequence
  ENSG00000125352_8 (sequence is synthesized)
ccagcagaccaatggcgtcttcaatccagcgaaagaattgattgctaaactagagaagcatcgagctacaggagagggtggtgcttccgacttgccagaagaccccgatgaggatgcaat

SEQ ID NO: 260444 - DNA, 120 bp, Artificial Sequence
  ENSG00000125352_9 (sequence is synthesized)
tcccattacttaggtttcccataattcttaaatttaaaaaataaacgttttgttcttttggaagtcttacttcgtgtccttcctttgtagagaaagtgacagagcaggcgggtggtgaag

SEQ ID NO: 260445 - DNA, 120 bp, Artificial Sequence
  ENSG00000125354_0 (sequence is synthesized)
gaagaactggaactggtctggccatagggggaagcggcgcgttaaatccgccccctctccataccctactttcaaggggtgggcggtagaggggaggttggggttggagcagcggcgagg

SEQ ID NO: 260446 - DNA, 120 bp, Artificial Sequence
  ENSG00000125354_1 (sequence is synthesized)
gggcccctcccttgcacctccccccaccggacttggtcgcgcccgaagtgtaacactttctctttgtcggaggagctcctctgtttcctgtgcagtagctcccgttgcggcggcacccgt

SEQ ID NO: 260447 - DNA, 120 bp, Artificial Sequence
  ENSG00000125354_2 (sequence is synthesized)
ggcagccctggcggacgcaggagcgatggcagcgaccgatatagctcgccaggtgggtgaaggttgccgaactgtccccctggctggacatgtggggtttgacagcttgcctgaccagct

SEQ ID NO: 260448 - DNA, 120 bp, Artificial Sequence
  ENSG00000125354_3 (sequence is synthesized)
ggtgaataagtccgtcagccagggcttctgcttcaacatcctgtgcgtgggagagacaggtttgggcaagtccaccctcatggacaccctgttcaacaccaaattcgaaggggagccagc

SEQ ID NO: 260449 - DNA, 120 bp, Artificial Sequence
  ENSG00000125354_4 (sequence is synthesized)
cacccacacacagccgggtgtccagctccagtctaatacctatgacctccaagagagcaacgtgaggctaaagctcacgatcgttagcacagttggctttggggaccagatcaacaaaga

SEQ ID NO: 260450 - DNA, 120 bp, Artificial Sequence
  ENSG00000125354_5 (sequence is synthesized)
ggacagctacaagcctatcgtggaattcatcgatgcacaattcgaggcctacctgcaggaagagctaaagatccgaagagtgctacacacctaccatgactcccgaatccatgtctgctt

SEQ ID NO: 260451 - DNA, 120 bp, Artificial Sequence
  ENSG00000125354_6 (sequence is synthesized)
gtatttcattgcccccacgggtcattccctgaagtctctggacctagtgactatgaagaagctggacagtaaggtgaacatcatccccatcattgccaaagcagatgccatttcgaagag

SEQ ID NO: 260452 - DNA, 120 bp, Artificial Sequence
  ENSG00000125354_7 (sequence is synthesized)
tgagctaacaaagttcaaaatcaaaatcaccagcgagcttgtcagcaacggagtccagatctatcagtttcctacagatgatgagtcggtggcagagatcaatggaaccatgaacgccca

SEQ ID NO: 260453 - DNA, 120 bp, Artificial Sequence
  ENSG00000125354_8 (sequence is synthesized)
cctgccgtttgctgtcattggcagcacagaagaactgaagataggcaacaagatgatgagggcgcggcagtatccttggggcactgtgcaggttgaaaacgaggcccactgcgactttgt

SEQ ID NO: 260454 - DNA, 120 bp, Artificial Sequence
  ENSG00000125354_9 (sequence is synthesized)
gaagctgcgggagatgctgattcgggtcaacatggaggatctgcgggagcagacccacacccggcactatgagctgtatcgccgctgtaagctggaggagatgggcttcaaggacaccga

SEQ ID NO: 260455 - DNA, 120 bp, Artificial Sequence
  ENSG00000125354_10 (sequence is synthesized)
ccctgacagcaaacccttcagtttacaggagacatatgaggccaaaaggaacgagttcctaggggaactccagaaaaaagaagaggagatgagacagatgttcgtccagcgagtcaaaga

SEQ ID NO: 260456 - DNA, 120 bp, Artificial Sequence
  ENSG00000125354_11 (sequence is synthesized)
gtctgaagaaactgcaccaggacgagaagaagaaactggaggataagaagaaatccctggatgatgaagtgaatgctttcaagcaaagaaagacggcggctgagctgctccagtcccagg

SEQ ID NO: 260457 - DNA, 120 bp, Artificial Sequence
  ENSG00000125354_12 (sequence is synthesized)
gctcccaggctggaggctcacagactctgaagagagacaaagagaagaaaaataatccatggctgtgtactgaatagtattccccgctacagctggactggactccatttagccttttaa

SEQ ID NO: 260458 - DNA, 120 bp, Artificial Sequence
  ENSG00000125354_13 (sequence is synthesized)
gccgaggttcctattttaactgacagctttcctttggggtgccaggcagcgaggccccccacccctatcctgccatgtacttcaagctcacttcttctttttgagttccgcaacttgctc

SEQ ID NO: 260459 - DNA, 120 bp, Artificial Sequence
  ENSG00000125354_14 (sequence is synthesized)
ctgcctcccagccccactggcactgaccatgaccacctacttctattttttttttagagtttctttttttgatcacttactttcaaagcacacagtcaaacaaggttatgccaaatttcc

SEQ ID NO: 260460 - DNA, 120 bp, Artificial Sequence
  ENSG00000125354_15 (sequence is synthesized)
aggcctttttgaagtattgagaaggggaaggggatttctcacttcaattatagatcataataggaagcaaaaagaaaaaaatgaaaagcaaacatatgcacgcacttttcttgttgacaa

SEQ ID NO: 260461 - DNA, 120 bp, Artificial Sequence
  ENSG00000125354_16 (sequence is synthesized)
agcaagaatataggtttgctgtgtaggtttggtgctctattgattggtgagtgaccagagcaagtatgaaggtgatgctgccaaagcacaagccagtttcttgggaaaattcaagttaca

SEQ ID NO: 260462 - DNA, 120 bp, Artificial Sequence
  ENSG00000125354_17 (sequence is synthesized)
gtggagtatttttttgaagaccatatgcttggaggtagaaacaaaccaacgaccaaaaaaaaaaaaaaaaaaatctgctcagatactcagccagtagctcagagagatgctgagttaggc

SEQ ID NO: 260463 - DNA, 120 bp, Artificial Sequence
  ENSG00000125354_18 (sequence is synthesized)
ctgtcaggtctccttgggaaaggcttcatatttgcaactttgatgattctatgtccagcttcagagctgctttcccagaaattcacgcttaaacaaccaaccggtaaccaccacttcccc

SEQ ID NO: 260464 - DNA, 120 bp, Artificial Sequence
  ENSG00000125354_19 (sequence is synthesized)
acaccgccgcccggtaattatttgcattacaaaccggaggcgccctcatttgcatttgtgtacagattaactagttaaggcttgagaagctctgaataattcaaaagtattagacccaca

SEQ ID NO: 260465 - DNA, 120 bp, Artificial Sequence
  ENSG00000125354_20 (sequence is synthesized)
cagccttggagagaccttcagaaactaaggaggagttttatattaagggagacattttagtcagtaagacgatataacctacttactccgtaaggggaaatgaaggcccagagaagggaa

SEQ ID NO: 260466 - DNA, 120 bp, Artificial Sequence
  ENSG00000125354_21 (sequence is synthesized)
gggacttgaccgaggtcccacttctgtttcgaggcagaagccagactaattttcatgcctcctgactcccaatcagtttcacaaagggattcaatctgtttatatacgttacattcctgg

SEQ ID NO: 260467 - DNA, 120 bp, Artificial Sequence
  ENSG00000125354_22 (sequence is synthesized)
gacacccttttcctgcgcaacagagctgggcctccctttctctaatttcccccttaacatgcctggggggcatacaatccaacccgcgccctctcctctcttcctgccaaggtttataga

SEQ ID NO: 260468 - DNA, 120 bp, Artificial Sequence
  ENSG00000125354_23 (sequence is synthesized)
aacctgagaatctgagggtgatgtctggccgctggtcaagaagccaacagtcatgtggctcgcagatgcatcctgcatcccagtccccctcccagcacccccagccatcccccctgtctt

SEQ ID NO: 260469 - DNA, 120 bp, Artificial Sequence
  ENSG00000125354_24 (sequence is synthesized)
cccccacatctttgccagaggtgtgacatggtcagggggcccatctgctactctttcccaccagctcccctgttccagttctggttgctgttagtttccctgaggtatttgcaaccacca

SEQ ID NO: 260470 - DNA, 120 bp, Artificial Sequence
  ENSG00000125354_25 (sequence is synthesized)
tggctgggtaaccaccgatcagcacagctgtccccttggtctcctgtatcccagtcactagtcctccctggtccaccccaccctcatcctcaggagccacagccatttcttagagggttt

SEQ ID NO: 260471 - DNA, 120 bp, Artificial Sequence
  ENSG00000125354_26 (sequence is synthesized)
caaaaggacagcctttggcgccttttccttctaacctttgagtccagccctttccagttttcattcactcgaagtaactgcactcaagctgtgctcaaaatcggcaacgcatttatttac

SEQ ID NO: 260472 - DNA, 120 bp, Artificial Sequence
  ENSG00000125354_27 (sequence is synthesized)
accaagcccttcccataaaacacaactgctgaagaaaatagcagacgtttcccctctctctaactctgggtatcccacagatgcaaaagggagaataaacctgaatattattaccagcct

SEQ ID NO: 260473 - DNA, 120 bp, Artificial Sequence
  ENSG00000125354_28 (sequence is synthesized)
taaggtgaggccagtagcaggaataataaatcccactttgtaggctggaaaactgagctgtcaaaagaatcaagtgtttgggggtttgctctgatgagtcttctagttcatttggtgaat

SEQ ID NO: 260474 - DNA, 120 bp, Artificial Sequence
  ENSG00000125354_29 (sequence is synthesized)
gtcatgatgatttttaacatgcattttgcatgcatcccccaataagaagagatgagactcggccggagagaagaaaaggcccttaactttctttccaatttaaggagttgagagtttaaa

SEQ ID NO: 260475 - DNA, 120 bp, Artificial Sequence
  ENSG00000125354_30 (sequence is synthesized)
aatattccagccctaagtttttatcatgggtcccatctgatagtggctttgggaacctctgtgaagtagagagccctcccttgtcagggttatgaggcacagtggcctttggtgtttggc

SEQ ID NO: 260476 - DNA, 120 bp, Artificial Sequence
  ENSG00000125354_31 (sequence is synthesized)
cagtgacagtgtgagagatggagttgacctggcaatgatctgtggctaacatgccgtctctctgcccttcctttgcagtaatccatggctgtgtactgaatagtattccccgctacagct

SEQ ID NO: 260477 - DNA, 120 bp, Artificial Sequence
  ENSG00000125354_32 (sequence is synthesized)
ggtgagggctggcaaaacgaaggcatgccgggccagctccttaacccaatgacccagtgatgctgcaaggctggaacggggtccaggagactgtgtgtaacaggtgccctaggtgaccct

SEQ ID NO: 260478 - DNA, 120 bp, Artificial Sequence
  ENSG00000125354_33 (sequence is synthesized)
tataatcagggaagtttggtgaacaaaaatcgaacccatgagtgaacataaattaaaaagttgatcaacctattaaaatgtgtatttcattgggtagcttttctcactgtagacagattt

SEQ ID NO: 260479 - DNA, 120 bp, Artificial Sequence
  ENSG00000125354_34 (sequence is synthesized)
tttccttcttcaatgaaaaggcttttaaattagtacaactgttactatttaaaaaaaaaataccctaagtactctgtttacttctggtgaaacaaaaccagtcattagaaatggtctgtg

SEQ ID NO: 260480 - DNA, 68 bp, Artificial Sequence
  ENSG00000125354_35 (sequence is synthesized)
cttctggtgaaacaaaaccagtcattagaaatggtctgtgcttttattttcccagactggagtggctt

SEQ ID NO: 260481 - DNA, 120 bp, Artificial Sequence
  ENSG00000125354_36 (sequence is synthesized)
tttgctttccctagctgcagtgtagatggctcttgtttttgtttttttgttttaatcatttggcattcacatgtggctgttaatatgtgcttgtttttaattaaaacaagaagctttaaa

SEQ ID NO: 260482 - DNA, 120 bp, Artificial Sequence
  ENSG00000125354_37 (sequence is synthesized)
acaaagagaagaaaaattaactctgctgtttgctgcatgctgcatgagacccagggtcctgctttttttaatcttgtcttcagcagctgcactaagtctaaaggagaagactgccattat

SEQ ID NO: 260483 - DNA, 120 bp, Artificial Sequence
  ENSG00000125354_38 (sequence is synthesized)
agaagagttagggttccatattgtctcaaatcagaaatcaaccaatttcctctcccctcaaactgcaagcacacacacatacaccacaccactcaacaagtgttcatgtgtccctgtgtc

SEQ ID NO: 260484 - DNA, 120 bp, Artificial Sequence
  ENSG00000125354_39 (sequence is synthesized)
caggcaagaagctctcttcctgactcacatggtattttaaatggaagtgtcttgtcctaactaacaaggcaggaaaagaaccatcagagctggaaaatggacgaaatgtaacctcagaga

SEQ ID NO: 260485 - DNA, 120 bp, Artificial Sequence
  ENSG00000125354_40 (sequence is synthesized)
aacaactacaggaccactcacccaagtgtaagtgactggggcaggacacctcagctgtgggtatgaaagtactgttctgttcacaaggttttgtttgagttttatgtttttcttttaaac

SEQ ID NO: 260486 - DNA, 120 bp, Artificial Sequence
  ENSG00000125354_41 (sequence is synthesized)
atttctctggttcgatgggttgactgtctacagccactgttaaacatttctgaatatgcaagagaaagtcaagtgacatttgtatcttcttcagcattcgcagaccttctatagattcca

SEQ ID NO: 260487 - DNA, 120 bp, Artificial Sequence
  ENSG00000125354_42 (sequence is synthesized)
gcaaagggggaaaatgtatccactatctaacacttaggtagagaagggagggggtttaagcttagtgagggcaaaattactccattccaccttccgagaccagttagggttttgagagag

SEQ ID NO: 260488 - DNA, 120 bp, Artificial Sequence
  ENSG00000125354_43 (sequence is synthesized)
gtttctgctcaacctgggatctggagggagagctttgatgttggtaaatctgccttgaattcattggtttaacttgcatcaaaataccatgtgagtgtgctcattctcatatatccccta

SEQ ID NO: 260489 - DNA, 120 bp, Artificial Sequence
  ENSG00000125354_44 (sequence is synthesized)
ccaccatcaccaccattctgctgttcagtgtctcttgagagagcctctttgcatgttttccagaatctgtgtgtgtttttcctttcttctcctttgttctttttgctcaaaggtgtgacc

SEQ ID NO: 260490 - DNA, 120 bp, Artificial Sequence
  ENSG00000125354_45 (sequence is synthesized)
agtcattgcccctctggggctttcattctccaggagaaacatcccagaaccagcactgtttagcctgatacctttctaatgtccatgtcaattttcaataaaattcaaagaaatgctaaa

SEQ ID NO: 260491 - DNA, 120 bp, Artificial Sequence
  ENSG00000125354_46 (sequence is synthesized)
agacccagggtcctgtaatccatggctgtgtactgaatagtattccccgctacagctggactggactccatttagccttttaagccgagctttttttaatcttgtcttcagcagctgcac

SEQ ID NO: 260492 - DNA, 120 bp, Artificial Sequence
  ENSG00000125354_47 (sequence is synthesized)
tggtcccagcatccctgtggcacctttggattccctgagcttggggagttgagagtagcagaggggtgtggtcccagaggcccagcccatctgtccagcttgctcaggaaagccctgcaa

SEQ ID NO: 260493 - DNA, 120 bp, Artificial Sequence
  ENSG00000125354_48 (sequence is synthesized)
actcaaggtccataggaaaggaagggaaaagaggaaaagcaaaggagagtgagagagcagaagggaagaaaaaaattagaggtgcagcaatataagagaggaacaaggccgggcacggtg

SEQ ID NO: 260494 - DNA, 120 bp, Artificial Sequence
  ENSG00000125355_0 (sequence is synthesized)
agtgtctctcagctctcggaaggaccgagagaggcaaccgcggagtaggatgctctgcggggcgcccagagccgggggcgcttgaagcagcttcggggactggggcaaccgggcagtttt

SEQ ID NO: 260495 - DNA, 120 bp, Artificial Sequence
  ENSG00000125355_1 (sequence is synthesized)
caccatgcatcagtccctgactcagcagcggtccagcgacatgtccctgcccgattccatgggagcattcaatcggaggaaacgaaactccatctatgtcaccgtgactttgcttattgt

SEQ ID NO: 260496 - DNA, 120 bp, Artificial Sequence
  ENSG00000125355_2 (sequence is synthesized)
gtccgtgttaattctcacagtgggccttgctgcaaccaccaggacccagaatgtgactgtaggaggttattaccccggagttattctcggctttggatcgttccttggaatcattggatc

SEQ ID NO: 260497 - DNA, 120 bp, Artificial Sequence
  ENSG00000125355_3 (sequence is synthesized)
aaaccttattgagaacaaaaggcagatgctggtggcttctatcgtgtttatcagctttggtgtgattgcggctttttgttgtgccatagttgacggggtctttgctgccagacacattga

SEQ ID NO: 260498 - DNA, 120 bp, Artificial Sequence
  ENSG00000125355_4 (sequence is synthesized)
tctgaaaccactctacgctaaccggtgccattatgttcccaagacatcacagaaggaagctgaggaggtcataagttcctcaaccaaaaattctccttccacgagggttatgaggaacct

SEQ ID NO: 260499 - DNA, 120 bp, Artificial Sequence
  ENSG00000125355_5 (sequence is synthesized)
tacccaggcagctagagaggttaactgccctcacctcagccgtgaattctgcacacctcgcatccggggcaacacctgcttctgctgtgacctctacaactgtggcaaccgggtggagat

SEQ ID NO: 260500 - DNA, 120 bp, Artificial Sequence
  ENSG00000125355_6 (sequence is synthesized)
cactggtgggtactacgaatacatcgatgtcagcagttgccaagatatcatccacctctaccacctgctctggtctgccaccatcctcaacattgttggcctgttcctgggcatcatcac

SEQ ID NO: 260501 - DNA, 120 bp, Artificial Sequence
  ENSG00000125355_7 (sequence is synthesized)
tgccgctgtccttggaggctttaaggacatgaacccaactctcccagcactgaactgttctgttgaaaatacccatccaacagtttcttactatgctcatccccaagtggcatcctacaa

SEQ ID NO: 260502 - DNA, 120 bp, Artificial Sequence
  ENSG00000125355_8 (sequence is synthesized)
tacctactaccatagccctcctcacctgccaccatattctgcttatgactttcagcattccggtgtctttccatcctcccctccctctggactttctgatgagccccagtctgcctctcc

SEQ ID NO: 260503 - DNA, 120 bp, Artificial Sequence
  ENSG00000125355_9 (sequence is synthesized)
ctcacccagctacatgtggtcctcaagtgcaccgccccgttactctccaccctactatccaccttttgaaaagccaccaccttacagtccctaaagaggaatgcctgctggctattgaga

SEQ ID NO: 260504 - DNA, 120 bp, Artificial Sequence
  ENSG00000125355_10 (sequence is synthesized)
ttattgtggcttttgtatttctgcttcagtggaagtgtgtagggtacaaaatttaaagtgtgactcttatgcataaagttttacaatggcctgccaggctagggaaagatagggacgaag

SEQ ID NO: 260505 - DNA, 120 bp, Artificial Sequence
  ENSG00000125355_11 (sequence is synthesized)
cttattcattattagtgcagagcaggggtggtcaggctgaacgcagcacagaagggcagctcacattctctaagcaagactggggagccagcccagcaagaagcttgtttggacttgcat

SEQ ID NO: 260506 - DNA, 120 bp, Artificial Sequence
  ENSG00000125355_12 (sequence is synthesized)
taccctatgctccacctctgtattcagcagaagtgtggttgccatctttttcactttatgtaaaggagtgttgccctcgggcccttggcagattgccaccccagcacctaggttgaagca

SEQ ID NO: 260507 - DNA, 120 bp, Artificial Sequence
  ENSG00000125355_13 (sequence is synthesized)
cctggtttataggccctatctttccctacccctaaagtcagtccctaaggacaatttcccagctgatggggctacacagtagttccaatacagagagttctggctaagattttgtttgct

SEQ ID NO: 260508 - DNA, 120 bp, Artificial Sequence
  ENSG00000125355_14 (sequence is synthesized)
cttactccttccttctctgtgagtattgtaaaaatggctgttgtgatcactcagctcagcttttgttattggtacctcctaaagggaaaagtgcaatattcttgcatcttcagtagtggg

SEQ ID NO: 260509 - DNA, 120 bp, Artificial Sequence
  ENSG00000125355_15 (sequence is synthesized)
gaacaggatgtattgttccggaaacactgaaatacacagcaacatgtgagatgttttaagtagatcacttaggagacagtggttctactacatgttgcattattacaaaatacatttgct

SEQ ID NO: 260510 - DNA, 120 bp, Artificial Sequence
  ENSG00000125355_16 (sequence is synthesized)
acaggagatataaatcttatggttgtaattcagagtttaaaaatgttataaattaggttcttgggtcgtgatatgaattgttactaatctttgtgactatttaatcttcaaatattgtgc

SEQ ID NO: 260511 - DNA, 120 bp, Artificial Sequence
  ENSG00000125355_17 (sequence is synthesized)
ttaaccccagcaatccgcacgtatcctgcaccccaccccaaaagagtcatctgtattttaatgccactggtcttatcggtccttttgtctgttgagaccagtcatgacagcattcaagat

SEQ ID NO: 260512 - DNA, 120 bp, Artificial Sequence
  ENSG00000125355_18 (sequence is synthesized)
tatgaaagtgttacaatgccgcttcaagtctgcaaaacctcaaacgtagccaacttgacaaatatttaagtgttacggcagatttaaaatccatctggcacaccgtggtaggtatttgta

SEQ ID NO: 260513 - DNA, 120 bp, Artificial Sequence
  ENSG00000125355_19 (sequence is synthesized)
cagttcttttaattacacatagctttaaaccatcaacctgatgagtttaaagcttttgcacccatgccttcacttcagaatgaacaccttcattgtgatcttatgttaacctgagaattg

SEQ ID NO: 260514 - DNA, 120 bp, Artificial Sequence
  ENSG00000125355_20 (sequence is synthesized)
atttaaaggaagattgataatcctatactttataacgtaaaaatacaggggctacaggagggtacctaattagacagttctccaaacacagaacacacactggaaaattttccggccaat

SEQ ID NO: 260515 - DNA, 120 bp, Artificial Sequence
  ENSG00000125355_21 (sequence is synthesized)
tttgctacctcccaacttgatggattagaggtagcgcaaatgctggtgctcccatctaccttgtagacacttagccatcaagaatcaaggcacaagaagtgcactctctcattaacagta

SEQ ID NO: 260516 - DNA, 120 bp, Artificial Sequence
  ENSG00000125355_22 (sequence is synthesized)
aatgtttgcaagatattcagtttaactttcagcatcatgaatgttcttatccagattttgaatccgaaaaactataatccttttatgttatacaaaattactatgattttttacagttct

SEQ ID NO: 260517 - DNA, 120 bp, Artificial Sequence
  ENSG00000125355_23 (sequence is synthesized)
gagcatattaaaattctactggatttcaaaaagagactaatacccaactgactaactaaacaaatatcaacttgtaatactcaatgaatttttttgccatttacatttgaccgttggctt

SEQ ID NO: 260518 - DNA, 120 bp, Artificial Sequence
  ENSG00000125355_24 (sequence is synthesized)
tagtgaatgtccatatttaattttttaaggcaccattacacagtttatcctacatttatcacatttcttaaagtgttaagattctatggctcatttctatgtatttttcttactttacaa

SEQ ID NO: 260519 - DNA, 120 bp, Artificial Sequence
  ENSG00000125355_25 (sequence is synthesized)
aataacctgaaacagtatagattttgtaacacttaatttgagcagcttttttattacattgaattatacaaagtgcatgttaccttagaaaaattaatatttgctgctttactcttttgc

SEQ ID NO: 260520 - DNA, 120 bp, Artificial Sequence
  ENSG00000125355_26 (sequence is synthesized)
aaaacatttgctgtaatgaatggatttgtatttccaatatgtatcttgactgcattttgtaatatttactgctttattcctaattctgctttaaagtactgaactgggcatgaaacatta

SEQ ID NO: 260521 - DNA, 120 bp, Artificial Sequence
  ENSG00000125355_27 (sequence is synthesized)
aaatattaatccagaaactgtataaactggatgttgcttaaaatctgtatcactgccatgttgaaaactcagactgcttttgtgatgtttcaaatgaataaaactatcctcccctcgtta

SEQ ID NO: 260522 - DNA, 120 bp, Artificial Sequence
  ENSG00000125355_28 (sequence is synthesized)
catttgctatgaatattctctataacaaagcaagacaaatttagcagcacttcattgcatctggatgggggagagagctggacaatttcttgctaacaagagatggttaactgccctcac

SEQ ID NO: 260523 - DNA, 120 bp, Artificial Sequence
  ENSG00000125355_29 (sequence is synthesized)
acgcggctgcacggaccgccaatgctgctgcctcccagagcagagggaggcagaagaggagggagggagaagagtggaagggagggggaggcggcacttgggctgcagctcgcaaccaga

SEQ ID NO: 260524 - DNA, 120 bp, Artificial Sequence
  ENSG00000125355_30 (sequence is synthesized)
atggttcctgccatcagtctgctcaggtcttctccgatgaatttgcgggaacatctcgagtggagggggcagggagaagatcgaaccccctatataatctccctactgcccgcagaagac

SEQ ID NO: 260525 - DNA, 120 bp, Artificial Sequence
  ENSG00000125355_31 (sequence is synthesized)
tcagtgtcaacaaaactcgttcaccggaggggccccagaaagtgttatctcctggatggtggaaagatccgtatcctcaatggttttgcatattcagtataagaatttgctttttcattt

SEQ ID NO: 260526 - DNA, 120 bp, Artificial Sequence
  ENSG00000125356_0 (sequence is synthesized)
gcttgctgggaagagaggcgaagccaggtcacctttcaaggacccagaagtagggttttggcctaggtaacggggcagagatgtggttcgagattctccccggactctccgtcatgggcg

SEQ ID NO: 260527 - DNA, 120 bp, Artificial Sequence
  ENSG00000125356_1 (sequence is synthesized)
ggaaaaaagggttgctcattttgggtatcactggagtctgatggaaagagataggcgcatctctggagttgatcgttactatgtgtcaaagggtttggagaacattgattaaggaagcat

SEQ ID NO: 260528 - DNA, 120 bp, Artificial Sequence
  ENSG00000125356_2 (sequence is synthesized)
tttcctgattgatgaaaaaaataactcagttatggccatctacccctgctagaaggttacagtgtattatgtagcatgcaatgtgttatgtagtgcttaataaaaataaaatgaaaaaaa

SEQ ID NO: 260529 - DNA, 120 bp, Artificial Sequence
  ENSG00000125363_0 (sequence is synthesized)
aaaggatcaagcatccctgagtttcaaacagaaacttgcactgaatacattcaaagaaccatcaagaaatggggacctggattttatttgcctgcctcctgggagcagcttttgccatgc

SEQ ID NO: 260530 - DNA, 120 bp, Artificial Sequence
  ENSG00000125363_1 (sequence is synthesized)
ctctaccacctcatcctgggcaccctggttatatcaacttcagctatgaggtgcttacccctttgaagtggtaccagagcataaggccaccgtacccttcctatggttacgagcccatgg

SEQ ID NO: 260531 - DNA, 120 bp, Artificial Sequence
  ENSG00000125363_2 (sequence is synthesized)
gtggatggctgcaccaccaaatcatccccgtgctgtcccaacagcaccccccgactcacaccctgcagcctcatcaccacatcccagtggtgccagctcagcagcccgtgatcccccagc

SEQ ID NO: 260532 - DNA, 120 bp, Artificial Sequence
  ENSG00000125363_3 (sequence is synthesized)
cgcccagcagccctaccagccccagcctgttcagccacagcctcaccagcccatgcagccccagccacctgtgcaccccatgcagcccctgccgccacagccacctctgcctccgatgtt

SEQ ID NO: 260533 - DNA, 120 bp, Artificial Sequence
  ENSG00000125363_4 (sequence is synthesized)
ccccatgcagcccctgcctcccatgcttcctgatctgactctggaagcttggccatcaacagacaagaccaagcgggaggaagtggattaaaagatcagaagatgagaggggaatgaata

SEQ ID NO: 260534 - DNA, 120 bp, Artificial Sequence
  ENSG00000125363_5 (sequence is synthesized)
cttcagatgctttcaggagtgacacaagaacacaatgatttttgcttataatcactttacttagcaaattctgtaactaaaaaagtaccattagcagacaataaaatgcattaaaaatca

SEQ ID NO: 260535 - DNA, 120 bp, Artificial Sequence
  ENSG00000125363_6 (sequence is synthesized)
ctctaccacctcatcctgggcaccctggttatatcaacttcagctatgagaactcacattctcaggctatcaatgttgacaggactgcattagtgcttacccctttgaagtggtaccaga

SEQ ID NO: 260536 - DNA, 120 bp, Artificial Sequence
  ENSG00000125375_0 (sequence is synthesized)
gggccggccagggtgccgcagacgcggggacgctggctcgctccctccctccctccctccgacgctgtgagtagagaagctaggccccgagccgggcgggactagggtggtggttgtgtt

SEQ ID NO: 260537 - DNA, 120 bp, Artificial Sequence
  ENSG00000125375_1 (sequence is synthesized)
ctgccctcgcccgtcgccaacgctgggctgactgaaaacctggccctttgggtcgcgcgtcttcgaccttcaccgccatgcggacatggggccgtgggagaaactctgggcgggattacg

SEQ ID NO: 260538 - DNA, 120 bp, Artificial Sequence
  ENSG00000125375_2 (sequence is synthesized)
gtgaaaattcttgtttgggcgggccctgcggcttctttcttccggctcgccctcggccccgcccccgccccgcccccgctccagctccagccgggtcctcgctcggccccgcacgcggcc

SEQ ID NO: 260539 - DNA, 120 bp, Artificial Sequence
  ENSG00000125375_3 (sequence is synthesized)
cgcggtagacggagggcctgggcacccaccgtctccatcccggccccagcccagtcgagcgtccactagaagggcgctccctgtccggccctaatcctcgctcctcacggaggctctttg

SEQ ID NO: 260540 - DNA, 120 bp, Artificial Sequence
  ENSG00000125375_4 (sequence is synthesized)
tcacagcgaagactgacagcccgcagtcttctggacttcttttatggggctcctggcggtgctattcattcagtcattgattcgtcttgtaaatatggagcgcctgctctgtactcgacc

SEQ ID NO: 260541 - DNA, 120 bp, Artificial Sequence
  ENSG00000125375_5 (sequence is synthesized)
cggcactgggtaccggaagaaccagacagctcggtttttgccaccatttataagtctgtgtccttttcttgagtactgaaccgagatacagttttaaatgtgctgtgcggtctctgagca

SEQ ID NO: 260542 - DNA, 120 bp, Artificial Sequence
  ENSG00000125375_6 (sequence is synthesized)
gcgactcacctgtgcagatcaaatgatgccgtttggaaaaatttcccagcagttgtgtggcgtaaagaaactcccatggtcatgtgactccagatacttctggggctggttgaatgcagt

SEQ ID NO: 260543 - DNA, 120 bp, Artificial Sequence
  ENSG00000125375_7 (sequence is synthesized)
gtttaataaggtggattatgatcgcatcagggatgttggccctgacagggcggcatccgagtggttgctgcgctgtggggccatggtgcgctaccatggccaggagaggtggcagaagga

SEQ ID NO: 260544 - DNA, 120 bp, Artificial Sequence
  ENSG00000125375_8 (sequence is synthesized)
ctacaaccaccttccaacaggccctctggacaaatacaagattcaggcgatcgacgccaccgactcttgtatcatgagcattggatttgatcacatggagggcctagagcatgttgaaaa

SEQ ID NO: 260545 - DNA, 120 bp, Artificial Sequence
  ENSG00000125375_9 (sequence is synthesized)
aataaggctgtgcaagtgtcattatatcgaggatgactgtttgctgagacttagtcaacttgaaaatttacaaaaaaccatattggaaatggaaataatatcctgtgggaatatcacaga

SEQ ID NO: 260546 - DNA, 120 bp, Artificial Sequence
  ENSG00000125375_10 (sequence is synthesized)
caaaggcatcattgctttgcgtcatttaagaaacctcaaatatttgttgttaagtgatcttcctggagtaagagaaaaagaaaatcttgtccaagcctttaagacagcactgccttctct

SEQ ID NO: 260547 - DNA, 120 bp, Artificial Sequence
  ENSG00000125375_11 (sequence is synthesized)
ggaactaaaattacaattgaagtaaaataatgtgtcttatttcagtataaaggatcatttgaaactgttgattccaaacatcaactaatattatatagtcatcagtagaattataaggat

SEQ ID NO: 260548 - DNA, 120 bp, Artificial Sequence
  ENSG00000125375_12 (sequence is synthesized)
gccatatcatgacattttagaagtggagagtgcatcatatgtagaaaataaatattcagacgtggctcattaatgttactaagttggaagtgagaatttatgaacattaattcattttaa

SEQ ID NO: 260549 - DNA, 120 bp, Artificial Sequence
  ENSG00000125375_13 (sequence is synthesized)
tctatagatatctcttgatgtagatatttagaatcctttaaagttatttgtacaacagatgtttttattataacagtaatttacatttaactttaaagttagtgaagcatactaccataa

SEQ ID NO: 260550 - DNA, 120 bp, Artificial Sequence
  ENSG00000125375_14 (sequence is synthesized)
agtgaagcatactaccataaatgcacaattatgaaaaattagaagctaaattacagattcattgatggagtcaattatgcaaagtggtcagtggttgttgaagcatgcattgcttcaaca

SEQ ID NO: 260551 - DNA, 120 bp, Artificial Sequence
  ENSG00000125375_15 (sequence is synthesized)
ggatttgcgtgcatttcccatgatcctgcattcttgtgttcttgatagcatacagacttactcagaatcaacagttgctgcttaatttgtctattttgtaagcttaggctactattttat

SEQ ID NO: 260552 - DNA, 120 bp, Artificial Sequence
  ENSG00000125375_16 (sequence is synthesized)
taaaactggacatagatacttggctgaatacaaatagttttgcagattgcaatataataaaggaaacagtaaaaactagtgggctatgcttaggtttttcttgaaacctaacattgcttt

SEQ ID NO: 260553 - DNA, 72 bp, Artificial Sequence
  ENSG00000125375_17 (sequence is synthesized)
atttgggcaacacagtgagaccccatctctaaaaaaattttaaaaattaggcaggcatggtggtgcatacct

SEQ ID NO: 260554 - DNA, 120 bp, Artificial Sequence
  ENSG00000125375_18 (sequence is synthesized)
aaaaattttaaaaattaggcaggcatggtggtgcatacctgtaatctcagatacttgggaggttgaggtggtaggattgcttgagctcaggagtttgaggctgcagtaagctatgatcac

SEQ ID NO: 260555 - DNA, 120 bp, Artificial Sequence
  ENSG00000125375_19 (sequence is synthesized)
ggccactgcacaccagcctggtagcctgggtgaaagggggagaccctgtctcttaaaaaaaagggctggcctgtaatcccagcacttttgaaggccaaggcaggcagatcatttgagccc

SEQ ID NO: 260556 - DNA, 86 bp, Artificial Sequence
  ENSG00000125375_20 (sequence is synthesized)
ggcaaaaccctgtctctaccaaaaaattaaaaaataaaaaatagctgggtgtatctgaggtaggaggatcagttgagcccgggaag

SEQ ID NO: 260557 - DNA, 88 bp, Artificial Sequence
  ENSG00000125375_21 (sequence is synthesized)
atgcctgtagtcccaactactcaggagtctgaggtaggaggatcagttgagcccgggaagtcgaggctgcagtgagccatgtttaaga

SEQ ID NO: 260558 - DNA, 120 bp, Artificial Sequence
  ENSG00000125375_22 (sequence is synthesized)
atagataaaacaggtcttcattgttacctgtgagaaatggccctgattctattactcttatatgccagtttgtttatagatttctgtgtgtttgatttgaactttttttttttttttttt

SEQ ID NO: 260559 - DNA, 120 bp, Artificial Sequence
  ENSG00000125375_23 (sequence is synthesized)
ctcccaaagtgctgggagccaccgcgcccagcctggtttgaacattattaagctgttgaatataaacttgaaaataattttctatgatacagctttcaggtagaaaaatgaattttcgtt

SEQ ID NO: 260560 - DNA, 120 bp, Artificial Sequence
  ENSG00000125375_24 (sequence is synthesized)
gtgtttaacaatgttgtgtttaacagcttatacaaataacacagtataaatggtaattgccactgtcattttaaaaatcagaaaatagtaaataaaaggatgtggaagagtctcatgtga

SEQ ID NO: 260561 - DNA, 120 bp, Artificial Sequence
  ENSG00000125375_25 (sequence is synthesized)
catgcatccactggttaggaaagctgttctacatcctcttgtgccaccaaccagacccacgccatggcctggagcaagtcacctaatcccaaatgcaaaaacagataatactagcaagga

SEQ ID NO: 260562 - DNA, 73 bp, Artificial Sequence
  ENSG00000125375_26 (sequence is synthesized)
gaggtcaggagttcaagaccttagctgaatgtggtggtgcacgcctttaatcccagctactctggaggctgag

SEQ ID NO: 260563 - DNA, 120 bp, Artificial Sequence
  ENSG00000125375_27 (sequence is synthesized)
ttttgttgcagttgactcacgattatagtcataggtatgtcctttttgcccatttcattatagtcaagtttgtttcttcctgtgtttgatatttattttcaaattaaattgaggttacag

SEQ ID NO: 260564 - DNA, 120 bp, Artificial Sequence
  ENSG00000125375_28 (sequence is synthesized)
catttaagaaacctcaaatatttgttgttaagtgatcttcctggagctggaaaccctggcccctgtgtggcatcaggaagcagcaggacaagggcacctttaggattcagggagaggggg

SEQ ID NO: 260565 - DNA, 120 bp, Artificial Sequence
  ENSG00000125375_29 (sequence is synthesized)
cttcaggagacagatgtccctggggccctggttgatagatcctatgacctgtctcctagtgctggaatgaggatgctggagctgaaagccacaactgccatcctcaagtctagattccaa

SEQ ID NO: 260566 - DNA, 120 bp, Artificial Sequence
  ENSG00000125375_30 (sequence is synthesized)
ctctctgtaccaggtggcagcctgctgtttaaacagtctcctgtggggcattcgtcaatctccttttggccgtataaggcgattttgcgccagtcacgtgctggagacaatcaggaataa

SEQ ID NO: 260567 - DNA, 120 bp, Artificial Sequence
  ENSG00000125375_31 (sequence is synthesized)
gaatttaattgactgtgaggggtggtgtctttttttagttctaaaaaagataattttaaaaaatgacctcactttcatctgtaatattttaaaacagctaaaatgatcaaccttaataca

SEQ ID NO: 260568 - DNA, 120 bp, Artificial Sequence
  ENSG00000125378_0 (sequence is synthesized)
ggaagatgcgagaaggcagaggaggagggagggagggaaggagcgcggagcccggcccggaagctaggtgagtgtggcatccgagctgagggacgcgagcctgagacgccgctgctgctc

SEQ ID NO: 260569 - DNA, 120 bp, Artificial Sequence
  ENSG00000125378_1 (sequence is synthesized)
cggctgagtatctagcttgtctccccgatgggattcccgtccaagctatctcgagcctgcagcgccacagtccccggccctcgcccaggttcactgcaaccgttcagaggtccccaggag

SEQ ID NO: 260570 - DNA, 120 bp, Artificial Sequence
  ENSG00000125378_2 (sequence is synthesized)
ctgctgctggcgagcccgctactgcagggacctatggagccattccgtagtgccatcccgagcaacgcactgctgcagcttccctgagcctttccagcaagtttgttcaagattggctgt

SEQ ID NO: 260571 - DNA, 120 bp, Artificial Sequence
  ENSG00000125378_3 (sequence is synthesized)
caagaatcatggactgttattatatgccttgttttctgtcaagacaccatgattcctggtaaccgaatgctgatggtcgttttattatgccaagtcctgctaggaggcgcgagccatgct

SEQ ID NO: 260572 - DNA, 120 bp, Artificial Sequence
  ENSG00000125378_4 (sequence is synthesized)
agtttgatacctgagacggggaagaaaaaagtcgccgagattcagggccacgcgggaggacgccgctcagggcagagccatgagctcctgcgggacttcgaggcgacacttctgcagatg

SEQ ID NO: 260573 - DNA, 120 bp, Artificial Sequence
  ENSG00000125378_5 (sequence is synthesized)
tttgggctgcgccgccgcccgcagcctagcaagagtgccgtcattccggactacatgcgggatctttaccggcttcagtctggggaggaggaggaagagcagatccacagcactggtctt

SEQ ID NO: 260574 - DNA, 120 bp, Artificial Sequence
  ENSG00000125378_6 (sequence is synthesized)
gagtatcctgagcgcccggccagccgggccaacaccgtgaggagcttccaccacgaagaacatctggagaacatcccagggaccagtgaaaactctgcttttcgtttcctctttaacctc

SEQ ID NO: 260575 - DNA, 120 bp, Artificial Sequence
  ENSG00000125378_7 (sequence is synthesized)
agcagcatccctgagaacgaggtgatctcctctgcagagcttcggctcttccgggagcaggtggaccagggccctgattgggaaaggggcttccaccgtataaacatttatgaggttatg

SEQ ID NO: 260576 - DNA, 120 bp, Artificial Sequence
  ENSG00000125378_8 (sequence is synthesized)
agaagtggtgcctgggcacctcatcacacgactactggacacgagactggtccaccacaatgtgacacggtgggaaacttttgatgtgagccctgcggtccttcgctggacccgggagaa

SEQ ID NO: 260577 - DNA, 120 bp, Artificial Sequence
  ENSG00000125378_9 (sequence is synthesized)
gcagccaaactatgggctagccattgaggtgactcacctccatcagactcggacccaccagggccagcatgtcaggattagccgatcgttacctcaagggagtgggaattgggcccagct

SEQ ID NO: 260578 - DNA, 120 bp, Artificial Sequence
  ENSG00000125378_10 (sequence is synthesized)
ccggcccctcctggtcacctttggccatgatggccggggccatgccttgacccgacgccggagggccaagcgtagccctaagcatcactcacagcgggccaggaagaagaataagaactg

SEQ ID NO: 260579 - DNA, 120 bp, Artificial Sequence
  ENSG00000125378_11 (sequence is synthesized)
ccggcgccactcgctctatgtggacttcagcgatgtgggctggaatgactggattgtggccccaccaggctaccaggccttctactgccatggggactgcccctttccactggctgacca

SEQ ID NO: 260580 - DNA, 120 bp, Artificial Sequence
  ENSG00000125378_12 (sequence is synthesized)
cctcaactcaaccaaccatgccattgtgcagaccctggtcaattctgtcaattccagtatccccaaagcctgttgtgtgcccactgaactgagtgccatctccatgctgtacctggatga

SEQ ID NO: 260581 - DNA, 120 bp, Artificial Sequence
  ENSG00000125378_13 (sequence is synthesized)
gtatgataaggtggtactgaaaaattatcaggagatggtagtagagggatgtgggtgccgctgagatcaggcagtccttgaggatagacagatatacacaccacacacacacaccacata

SEQ ID NO: 260582 - DNA, 120 bp, Artificial Sequence
  ENSG00000125378_14 (sequence is synthesized)
cacaccacacacacacaccacatacaccacacacacacgttcccatccactcacccacacactacacagactgcttccttatagctggacttttatttaaaaaaaaaaaaaaaaaaggaa

SEQ ID NO: 260583 - DNA, 120 bp, Artificial Sequence
  ENSG00000125378_15 (sequence is synthesized)
ttgaccttatttatgactttacgtgcaaatgttttgaccatattgatcatatattttgacaaaatatatttataactacgtattaaaagaaaaaaataaaatgagtcattattttaaagg

SEQ ID NO: 260584 - DNA, 120 bp, Artificial Sequence
  ENSG00000125378_16 (sequence is synthesized)
gaaggaagtggcgggggaaggagtgtggtggtggtttaaaaaataagggaagccgaggcgagagagacgcagacgcagaggtcgagcgcaggccgaaagctgttcaccgttttctcgact

SEQ ID NO: 260585 - DNA, 120 bp, Artificial Sequence
  ENSG00000125378_17 (sequence is synthesized)
aacaccgtgaggagcttccaccacgaaggtcagtctcttcccccagtctgcgtgggggagggctggtgggactggctagaggggcagtgaaagccctggggaagaagagttcgggttaca

SEQ ID NO: 260586 - DNA, 120 bp, Artificial Sequence
  ENSG00000125378_18 (sequence is synthesized)
tgttcaggggaaggggaatgacagcactcagacgtgggctagccccagcggtgtgtttttgctatatcaaagccttttctgctaggttttctgcccgtttttttcaaagcacctactgaa

SEQ ID NO: 260587 - DNA, 120 bp, Artificial Sequence
  ENSG00000125378_19 (sequence is synthesized)
tttaatattacagctgtgtgtttgtcgggtttattcaataggggccttgtaatccgatctgaatgtttcctagcggatgtttcttttccaaagtaaatctgagttattaatccaccagca

SEQ ID NO: 260588 - DNA, 120 bp, Artificial Sequence
  ENSG00000125378_20 (sequence is synthesized)
tgcagcgccacagtccccggccctcgcccaggttcactgcaaccgttcagaggtccccaggagctgctgctggcgagcccgctactgcagggacctatgttgcaggacgcgccttctcca

SEQ ID NO: 260589 - DNA, 120 bp, Artificial Sequence
  ENSG00000125378_21 (sequence is synthesized)
cgagctattttcgtcgacttgcggaacccaaggaacctcgcctctatcatttcacggtgtagggtccctagagacgacagccaagatcccaggggctcccaggacgcttgttcctgcggt

SEQ ID NO: 260590 - DNA, 120 bp, Artificial Sequence
  ENSG00000125378_22 (sequence is synthesized)
gtcctatggggagttcctggcgggacgaaaggcggacgcgcggctcttcctggccctccaggcccggaaccgacgggaaaggttcccgtgattcccgagtccctgcaggcttcttccagc

SEQ ID NO: 260591 - DNA, 120 bp, Artificial Sequence
  ENSG00000125378_23 (sequence is synthesized)
gggagttggtccgggggccttagaggcctccaagcactgctttggaggatggtttccaaggatcgcggtttgtgagttgaaggctttgtgagaggttaaacccccaaaagatacatactt

SEQ ID NO: 260592 - DNA, 120 bp, Artificial Sequence
  ENSG00000125378_24 (sequence is synthesized)
ggtaaactgaggctacctgtaaacacatttcggcattaggagaagattcgagtagggaagtgaaggacaaccaccccgagttacattcctttcccccaataaaaagctctggggatgaaa

SEQ ID NO: 260593 - DNA, 120 bp, Artificial Sequence
  ENSG00000125384_0 (sequence is synthesized)
gtaggcgcgggagcctcgagcgccgctcggatgcagcagccgagccgccactcggcgcgcggcgggagacccagggcaagccgccgtcggcgcgctgggtgcgggaagggggctctggat

SEQ ID NO: 260594 - DNA, 120 bp, Artificial Sequence
  ENSG00000125384_1 (sequence is synthesized)
ggatttcggtccctcccctttttcctctgagtctcggaacgctccggctctcagaccctcttcctcccaggtaaaggccgggagaggagggcgcatctcttttccaggcaccccaccatg

SEQ ID NO: 260595 - DNA, 120 bp, Artificial Sequence
  ENSG00000125384_2 (sequence is synthesized)
ggcaatgcctccaatgactcccagtctgaggactgcgagacgcgacagtggcttcccccaggcgaaagcccagccatcagctccgtcatgttctcggccggggtgctggggaacctcata

SEQ ID NO: 260596 - DNA, 120 bp, Artificial Sequence
  ENSG00000125384_3 (sequence is synthesized)
gcactggcgctgctggcgcgccgctggcggggggacgtggggtgcagcgccggccgcaggagctccctctccttgttccacgtgctggtgaccgagctggtgttcaccgacctgctcggg

SEQ ID NO: 260597 - DNA, 120 bp, Artificial Sequence
  ENSG00000125384_4 (sequence is synthesized)
acctgcctcatcagcccagtggtactggcttcgtacgcgcggaaccagaccctggtggcactggcgcccgagagccgcgcgtgcacctacttcgctttcgccatgaccttcttcagcctg

SEQ ID NO: 260598 - DNA, 120 bp, Artificial Sequence
  ENSG00000125384_5 (sequence is synthesized)
gccacgatgctcatgctcttcgccatggccctggagcgctacctctcgatcgggcacccctacttctaccagcgccgcgtctcgcgctccgggggcctggccgtgctgcctgtcatctat

SEQ ID NO: 260599 - DNA, 120 bp, Artificial Sequence
  ENSG00000125384_6 (sequence is synthesized)
gcagtctccctgctcttctgctcgctgccgctgctggactatgggcagtacgtccagtactgccccgggacctggtgcttcatccggcacgggcggaccgcttacctgcagctgtacgcc

SEQ ID NO: 260600 - DNA, 120 bp, Artificial Sequence
  ENSG00000125384_7 (sequence is synthesized)
accctgctgctgcttctcattgtctcggtgctcgcctgcaacttcagtgtcattctcaacctcatccgcatgcaccgccgaagccggagaagccgctgcggaccttccctgggcagtggc

SEQ ID NO: 260601 - DNA, 120 bp, Artificial Sequence
  ENSG00000125384_8 (sequence is synthesized)
cggggcggccccggggcccgcaggagaggggaaagggtgtccatggcggaggagacggaccacctcattctcctggctatcatgaccatcaccttcgccgtctgctccttgcctttcacg

SEQ ID NO: 260602 - DNA, 120 bp, Artificial Sequence
  ENSG00000125384_9 (sequence is synthesized)
atttttgcatatatgaatgaaacctcttcccgaaaggaaaaatgggacctccaagctcttaggtttttatcaattaattcaataattgacccttgggtctttgccatccttaggcctcct

SEQ ID NO: 260603 - DNA, 120 bp, Artificial Sequence
  ENSG00000125384_10 (sequence is synthesized)
caacacaaacttcctgttctacacagtcagatgccagtaaacaggctgacctttgaggtcagtagtttaaaagttcttagttatatagcatctggaagatcattttgaaattgttccttg

SEQ ID NO: 260604 - DNA, 120 bp, Artificial Sequence
  ENSG00000125384_11 (sequence is synthesized)
gagaaatgaaaacagtgtgtaaacaaaatgaagctgccctaataaaaaggagtatacaaacatttaagctgtggtcaaggctacagatgtgctgacaaggcacttcatgtaaagtgtcag

SEQ ID NO: 260605 - DNA, 120 bp, Artificial Sequence
  ENSG00000125384_12 (sequence is synthesized)
aaggagctacaaaacctaccctcagtgagcatggtacttggcctttggaggaacaatcggctgcattgaagatccagctgcctattgatttaagctttcctgttgaatgacaaagtatgt

SEQ ID NO: 260606 - DNA, 120 bp, Artificial Sequence
  ENSG00000125384_13 (sequence is synthesized)
ggttttgtaatttgtttgaaaccccaaacagtgactgtactttctattttaatcttgctactaccgttatacacatatagtgtacagccagaccagattaaacttcatatgtaatctcta

SEQ ID NO: 260607 - DNA, 120 bp, Artificial Sequence
  ENSG00000125384_14 (sequence is synthesized)
ggaagtcaatatgtggaagcaaccaagcctgctgtcttgtgatcacttagcgaaccctttatttgaacaatgaagttgaaaatcataggcaccttttactgtgatgtttgtgtatgtggg

SEQ ID NO: 260608 - DNA, 120 bp, Artificial Sequence
  ENSG00000125384_15 (sequence is synthesized)
agtactctcatcactacagtattactcttacaagagtggactcagtgggttaacatcagttttgtttactcatcctccaggaactgcaggtcaagttgtcaggttatttattttataatg

SEQ ID NO: 260609 - DNA, 120 bp, Artificial Sequence
  ENSG00000125384_16 (sequence is synthesized)
tccatatgctaatagtgatcaagaagactttaggaatggttctctcaacaagaaataatagaaatgtctcaaggcagttaattctcattaatactctttatttatcctatttctggggga

SEQ ID NO: 260610 - DNA, 120 bp, Artificial Sequence
  ENSG00000125384_17 (sequence is synthesized)
ggatgtacgtggccatgtatgaagccaaatattaggcttaaaaactgaaaaatctggttcattcttcagatatactggaacccttttaaagttgatattggggccatgagtaaaatagat

SEQ ID NO: 260611 - DNA, 120 bp, Artificial Sequence
  ENSG00000125384_18 (sequence is synthesized)
tttataagatgactgtgttgtaccaaaattcatctgtctatattttatttagggaacatggtttgactcatcttatatgggaaaccatgtagcagtgagtcatatcttaatatatttcta

SEQ ID NO: 260612 - DNA, 120 bp, Artificial Sequence
  ENSG00000125384_19 (sequence is synthesized)
aatgtttggcatgtaaatgtaaactcagcatcaaaatatttcagtgaatttgcactgtttaatcatagttactgtgtaaactcatctgaaatgttacaaaaataaactataaaacaaaaa

SEQ ID NO: 260613 - DNA, 120 bp, Artificial Sequence
  ENSG00000125386_0 (sequence is synthesized)
cacaatgacatgcagacctgcatattggagctggacggagaaactgggctaatgtgacagacagcaacaagagtaaggcagttgcttcgctattgagagaaagaaccatatgaagaaatt

SEQ ID NO: 260614 - DNA, 120 bp, Artificial Sequence
  ENSG00000125386_1 (sequence is synthesized)
tcggcagaggcggaccgggaacctcagcagctgcagaactactggtcagaagtgcgctacacggtgcgctgcatctaccgccaggcaggaaccccgctggcagatgaccaggaccagtct

SEQ ID NO: 260615 - DNA, 120 bp, Artificial Sequence
  ENSG00000125386_2 (sequence is synthesized)
ctggtgcctgacaaggagggagtgaaggagctcgtggataggctctgcgagagggacccctaccagctgtaccagcgtctggaacagcaagctcgagagtatgtgctggagatgaaggtc

SEQ ID NO: 260616 - DNA, 120 bp, Artificial Sequence
  ENSG00000125386_3 (sequence is synthesized)
cgcctgctccggcagctgtcggctgcggccaaggtgaaggcaccatctggcctgcagggcccgccgcaagcgcaccagttcatctccctcctgcttgaggagtacggcgccctctgccag

SEQ ID NO: 260617 - DNA, 120 bp, Artificial Sequence
  ENSG00000125386_4 (sequence is synthesized)
gccgcacgctccatcagcaccttccttggcactctggaaaatgaacacttgaaaaagttccaagtgacgtgggaactgcataataaacacctgtttgaaaatctggtcttttcggagcca

SEQ ID NO: 260618 - DNA, 120 bp, Artificial Sequence
  ENSG00000125386_5 (sequence is synthesized)
cttcttcagagcaacttgcccgcactggtgtcacagatcaggctaggaaccaccacacacgacacctgcagtgaggacacatacagtaccttgctgcagaggtaccagcgttccgaggag

SEQ ID NO: 260619 - DNA, 120 bp, Artificial Sequence
  ENSG00000125386_6 (sequence is synthesized)
gagctgcgcagagtcgccgaggagtggctggagtgccagaagaggatcgacgcctatgtcgacgagcagatgacaatgaaaaccaagcagcgcatgttaacagaagactgggagcttttt

SEQ ID NO: 260620 - DNA, 120 bp, Artificial Sequence
  ENSG00000125386_7 (sequence is synthesized)
aaacaaagaagattcattgaagaacagttaaccaataagaaagcagttactggcgagaacaacttcacagacaccatgaggcacatgttatcgtcccggctgagcatgcccgactgcccc

SEQ ID NO: 260621 - DNA, 120 bp, Artificial Sequence
  ENSG00000125386_8 (sequence is synthesized)
aactgcaactacaggagaagatgtgcttgcgatgactgcagtctctcacacatcctcacgtgtggtatcatggacccccccgtcactgatgacatccacattcaccagctcccacttcaa

SEQ ID NO: 260622 - DNA, 120 bp, Artificial Sequence
  ENSG00000125386_9 (sequence is synthesized)
gtggatcctgctcctgactatcttgctgagaggagcccgcccagtgtgtcatctgcaagctcggggtccggctccagctctcccatcacaattcagcagcaccccaggctcatcctcaca

SEQ ID NO: 260623 - DNA, 120 bp, Artificial Sequence
  ENSG00000125386_10 (sequence is synthesized)
gacagtggctcggcaccaactttttgtagtgatgatgaagatgttgcaccattgtcagccaaatttgctgatatttatccattgagtaattatgatgataccgaggtggtggccaacatg

SEQ ID NO: 260624 - DNA, 120 bp, Artificial Sequence
  ENSG00000125386_11 (sequence is synthesized)
aatggaatccacagcgaattgaatggtggcggggaaaacatggccctgaaggatgagtctcctcagataagcagtaccagcagtagttcctcagaagctgatgatgaagaagcggacggc

SEQ ID NO: 260625 - DNA, 120 bp, Artificial Sequence
  ENSG00000125386_12 (sequence is synthesized)
gagagtagtggggagcccccaggggccccgaaggaagatggagtgctgggaagcaggagccccaggacagaggagagcaaagcagacagtccacccccatcctacccaacacagcaggct

SEQ ID NO: 260626 - DNA, 120 bp, Artificial Sequence
  ENSG00000125386_13 (sequence is synthesized)
gaacaagctccaaacacttgtgaatgtcatgtttgtaagcaggaagcttctggactgacaccatctgcaatgacagccggagcccttcctcctggccatcagttcttgagcccagagaag

SEQ ID NO: 260627 - DNA, 120 bp, Artificial Sequence
  ENSG00000125386_14 (sequence is synthesized)
cccacacaccctgcactgcacctttaccctcacatccatggacatgtgcctttgcacactgttccacacctgccacgccctctcatccaccccaccttgtatgcaacgccccccttcaca

SEQ ID NO: 260628 - DNA, 120 bp, Artificial Sequence
  ENSG00000125386_15 (sequence is synthesized)
cacagtaaggctttaccgccagcacctgttcagaatcacacaaataagcatcaggtattcaatgcatctcttcaagaccatatttatccgagctgttttgggaatactccagagtggaat

SEQ ID NO: 260629 - DNA, 120 bp, Artificial Sequence
  ENSG00000125386_16 (sequence is synthesized)
agttctaaatttataagtctttggggatcagaagtgatgaatgataagaactggaatcctggcactttcttgccagatacaatttctgggagtgaaatattagggccaacactctcagaa

SEQ ID NO: 260630 - DNA, 120 bp, Artificial Sequence
  ENSG00000125386_17 (sequence is synthesized)
acaagaccggaagcccttccacctccatctagcaatgaaacacctgcagtctcggatagtaaagagaaaaagaatgctgcaaaaaagaaatgtttatacaatttccaagatgctttcatg

SEQ ID NO: 260631 - DNA, 120 bp, Artificial Sequence
  ENSG00000125386_18 (sequence is synthesized)
gaagcaaataaagttgtcatggccacgtcatcagccacgtcctctgtgtcctgcacagctaccacagtgcagtccagcaacagccagttcagagtgtcatccaagagacctccttcagta

SEQ ID NO: 260632 - DNA, 120 bp, Artificial Sequence
  ENSG00000125386_19 (sequence is synthesized)
gaccacagacactcggccccagccgccccgaggaatagccccacgggcttggcccccctcccagcgctctcgcctgctgcgctgtcacctgctgcgctctcacctgcctccacacctcac

SEQ ID NO: 260633 - DNA, 120 bp, Artificial Sequence
  ENSG00000125386_20 (sequence is synthesized)
cttgcaaatcttgcagccccatcattccccaaaacagcaaccacaactcctgggtttgtggacacacgcaagagtttctgtcctgcacccctacccccggccacagatggctccattagc

SEQ ID NO: 260634 - DNA, 120 bp, Artificial Sequence
  ENSG00000125386_21 (sequence is synthesized)
gcccctccaagtgtctgcagtgaccctgactgcgaagggcaccgctgcgagaatggtgtctacgacccacagcaggatgatggggacgagagtgcagatgaggacagctgctctgagcac

SEQ ID NO: 260635 - DNA, 120 bp, Artificial Sequence
  ENSG00000125386_22 (sequence is synthesized)
agctccagcacctcgacctccaccaaccagaaggagggcaagtactgcgactgctgctactgcgaattctttgggcacggcgggcctccagctgcaccaacaagtagaaattatgcagaa

SEQ ID NO: 260636 - DNA, 120 bp, Artificial Sequence
  ENSG00000125386_23 (sequence is synthesized)
atgagggaaaagcttcgcttacggctgaccaagaggaaagaggagcaacctaaaaaaatggaccagatctcagaaagggaaagcgtcgttgaccatcggagggtggaggatttgttgcag

SEQ ID NO: 260637 - DNA, 120 bp, Artificial Sequence
  ENSG00000125386_24 (sequence is synthesized)
tttataaatagctccgaaaccaaaccagtgagcagcacgcgtgcagcgaagcgagcaaggcataagcaaaggaagctggaggagaaagctcgcctagaagcagaggccagggcccgggag

SEQ ID NO: 260638 - DNA, 120 bp, Artificial Sequence
  ENSG00000125386_25 (sequence is synthesized)
cacctgcacctccaggaggagcagaggcggcgggaggaggaggaggatgaggaagaagaggaggatcgtttcaaggaggaatttcagcggcttcaggagcttcagaagctaagagctgta

SEQ ID NO: 260639 - DNA, 120 bp, Artificial Sequence
  ENSG00000125386_26 (sequence is synthesized)
aaaaagaagaagaaggagaggccaagtaaagactgccccaagttggacatgctcactagaaatttccaggcagcaacagagtctgttcctaactctggaaacatccacaatggctcacta

SEQ ID NO: 260640 - DNA, 120 bp, Artificial Sequence
  ENSG00000125386_27 (sequence is synthesized)
gagcaaactgaagaaccagaaacctcttctcactccccatccaggcatatgaaccactcagagcccaggccagggctaggggctgatggggatgctgcagaccccgtcgacaccagagac

SEQ ID NO: 260641 - DNA, 120 bp, Artificial Sequence
  ENSG00000125386_28 (sequence is synthesized)
tccaaatttctcctccccaaggaggtgaatgggaagcagcatgagccactctcttttttcttcgacatcatgcagcaccataaagaaggaaatggcaagcagaagctgaggcagaccagc

SEQ ID NO: 260642 - DNA, 120 bp, Artificial Sequence
  ENSG00000125386_29 (sequence is synthesized)
aaggccagcagcgagccagcgaggaggcccacagagccccccaaggccacagaggggcagtccaagccccgggcccagactgagtcaaaggctaaggtggtcgacctcatgtccatcaca

SEQ ID NO: 260643 - DNA, 120 bp, Artificial Sequence
  ENSG00000125386_30 (sequence is synthesized)
gagcagaaaagagaggagagaaaagtcaacagtaataacaataacaaaaagcagctgaaccacatcaaggacgaaaagtcaaacccaacccctatggagcccacctctcccggtgagcat

SEQ ID NO: 260644 - DNA, 120 bp, Artificial Sequence
  ENSG00000125386_31 (sequence is synthesized)
cagcagaacagcaagctggtgctggcagagtcccctcagccaaagggcaagaacaagaaaaataagaagaagaaaggagacagagtcaacaattcaattgatgatgtctttctacctaaa

SEQ ID NO: 260645 - DNA, 120 bp, Artificial Sequence
  ENSG00000125386_32 (sequence is synthesized)
gatattgacctagacagtgtggatatggatgagacagagagggaagtggaatatttcaaaaggttctgcttggattctgctagacagacccgacaaagactgtctatcaactggtccaat

SEQ ID NO: 260646 - DNA, 120 bp, Artificial Sequence
  ENSG00000125386_33 (sequence is synthesized)
tttagcttgaaaaaagccacctttgctgcccactgaatgaggactccctggagagggacacgcgagaggcaggccaggctgcaccaccccaagagccacgcccctcgctggcgccccaga

SEQ ID NO: 260647 - DNA, 120 bp, Artificial Sequence
  ENSG00000125386_34 (sequence is synthesized)
gccgtggtgcttgccaagggctgtgcggagctggtgctgcctgaaaccccagaccgagaagttgatgctcggcccacgccgttagctcgtgtgcgtgtagtctgtgcgtgagactccttc

SEQ ID NO: 260648 - DNA, 120 bp, Artificial Sequence
  ENSG00000125386_35 (sequence is synthesized)
gattgtagctctgtgctgtcggattggaacagtagttcccgccaagtcctcccaccaccgcggcctcggaggcctgggccgtggccagataggagtttgcatcatccacgtggctccgtt

SEQ ID NO: 260649 - DNA, 120 bp, Artificial Sequence
  ENSG00000125386_36 (sequence is synthesized)
gcctctgcattgcgccctgtcctgtcatgtgtcctcaccggggtatcggccgtcactcagctctcctgtgcccctgcgtctcaccctaggcgggctgggcggggcaggcctcctttgttc

SEQ ID NO: 260650 - DNA, 120 bp, Artificial Sequence
  ENSG00000125386_37 (sequence is synthesized)
tccacaatctactgtctccgagtgtacacgttgcgctgtttgtgtttgatccccctgacttgtagccagcttgtgtaagatcccttgcagaacgagaaagttaaaaacaagcccacccag

SEQ ID NO: 260651 - DNA, 120 bp, Artificial Sequence
  ENSG00000125386_38 (sequence is synthesized)
tactcacaccatcaagtctgttatagagtgtacgactgtattaacacggaggcctgcctggctacttttttaacatattgttaagtaatattaaaatcatgtctttctttttgaaagatg

SEQ ID NO: 260652 - DNA, 120 bp, Artificial Sequence
  ENSG00000125386_39 (sequence is synthesized)
gagtgccagaagaggatcgacgcctatgtcgacgagcaggaccttcagaccagtgtgaataagagcattgatactggcacccttgtccagtcctggcttcgaggggctgctatgacaatg

SEQ ID NO: 260653 - DNA, 120 bp, Artificial Sequence
  ENSG00000125386_40 (sequence is synthesized)
cccgacgtaaactgggatccctttccccttgtgtccgccatattggactctaactctggtcagccgcggcgccgggactgtggactcgcggttcctcccgcccagcggcctgccccgcag

SEQ ID NO: 260654 - DNA, 80 bp, Artificial Sequence
  ENSG00000125386_41 (sequence is synthesized)
ccgccatgagcccagccgacgccaagcgcggggccaagcgccggaagaacaagcggggcggcggcggcggctcgggcggg

SEQ ID NO: 260655 - DNA, 120 bp, Artificial Sequence
  ENSG00000125386_42 (sequence is synthesized)
aacgggcctctcggcgcgggcgcgagcgcgggcggcgccgcccccggaggctacttcgagactccttttagttttggcatgaatcataggacaccaccctaccctgctggggattattgt

SEQ ID NO: 260656 - DNA, 120 bp, Artificial Sequence
  ENSG00000125386_43 (sequence is synthesized)
cttctgtgcagaagtgaacggaaagactcatcattcttagagagtggaattaagactgcgagcaaattggccctttccatggctcccaagggcaacagcgtgctgcacctgccactgtgg

SEQ ID NO: 260657 - DNA, 120 bp, Artificial Sequence
  ENSG00000125386_44 (sequence is synthesized)
gtgtgcccggactgccgcaggaccgtggagaaggaggagaggcatggcggccttgaccagccagtgagccaagattttcttcttcactcctcgcttggtggctcccagccagaggccggc

SEQ ID NO: 260658 - DNA, 120 bp, Artificial Sequence
  ENSG00000125386_45 (sequence is synthesized)
aggctgaggcaggaggattacttgagcctggaagatggaggttccagtgagccgagatcatgcctgggtgacagaatgagacttcatataaaaaaaagaaaaaagtttttgatgaaatct

SEQ ID NO: 260659 - DNA, 84 bp, Artificial Sequence
  ENSG00000125386_46 (sequence is synthesized)
tctacctaaagatattgacctagacagtgtggatatggatgagacagagagggaagtggaatatttcaaaagagacggggtttc

SEQ ID NO: 260660 - DNA, 120 bp, Artificial Sequence
  ENSG00000125386_47 (sequence is synthesized)
tacaggttctgcttggattctgctagacagacccgacaaagactgtctatcaactggtccaattttagcttgaaaaaagccacctttgctgcccactgaatgaggactccctggagaggg

SEQ ID NO: 260661 - DNA, 120 bp, Artificial Sequence
  ENSG00000125386_48 (sequence is synthesized)
ataaaacagtttatttttggaggtgtggtctgaaatttattatattcaaaatttttaaaacttaagcataactttgttgtttttctcagcctccagctgcaccaacaagtagaaattatg

SEQ ID NO: 260662 - DNA, 120 bp, Artificial Sequence
  ENSG00000125386_49 (sequence is synthesized)
ggtttcaccgtgttgcccaggctggaagtttgaaatcaattatttttatgtttgctgtctgaaattcattctttctctgttgtttgacacatacataagcctgcaggtacccaaatttgt

SEQ ID NO: 260663 - DNA, 120 bp, Artificial Sequence
  ENSG00000125386_50 (sequence is synthesized)
tccaaaaaaaaaaaaatttccctgaggctgtgaggagagagtcaaggaagaggtttttattgatgttatttatcaaacaactcttacactgtacactaagattttataataactgcagac

SEQ ID NO: 260664 - DNA, 120 bp, Artificial Sequence
  ENSG00000125386_51 (sequence is synthesized)
atatacaatgaaaagggagaattggcaccaatattgaatcttcccatccaagaatatggtatgtcactcttttttaaggtttttaaaaatatattgtattatggttttatagtttgtaaa

SEQ ID NO: 260665 - DNA, 120 bp, Artificial Sequence
  ENSG00000125386_52 (sequence is synthesized)
tcttgacccattttgtgcctccatagtctgtagtttgaggggctgctatgaccggcatcttgagtggggaatgtgtgtttaaagcattcatgctggaaactgggaaaatggagatgccct

SEQ ID NO: 260666 - DNA, 120 bp, Artificial Sequence
  ENSG00000125386_53 (sequence is synthesized)
gtgaccagtcatctcgccagatgccggcattaactcttgtagtttttgagttgagtcttgaatctgggagtctaggaaatcacggtatcttctacaaataatgataggtttatctcatct

SEQ ID NO: 260667 - DNA, 120 bp, Artificial Sequence
  ENSG00000125386_54 (sequence is synthesized)
cggggaaaacatggccctgaaggatgaggtatggacatggcttcttcgtagcaacaataaatgacataaaatgatggtctgacattttaatattttatattactctgttttgaaaagtgc

SEQ ID NO: 260668 - DNA, 120 bp, Artificial Sequence
  ENSG00000125386_55 (sequence is synthesized)
aaattacaaaagattgtctttaaagtctcctcagataagcagtaccagcagtagttcctcagaagctgatgatgaagaagcggacggcgagagtagtggggagcccccaggggccccgaa

SEQ ID NO: 260669 - DNA, 120 bp, Artificial Sequence
  ENSG00000125388_0 (sequence is synthesized)
ccgcggcggcgaggggcgctccctcttcagctaagccgttagcgccgagcccgcccgggagcgggtcgccggccgcggcgggcgcccctgccagtgagcccctgtccgaagtgagccacg

SEQ ID NO: 260670 - DNA, 120 bp, Artificial Sequence
  ENSG00000125388_1 (sequence is synthesized)
aagtgagccacggcattgactcggggctgcccgggggcagggcactgaggagggagttgcgcgcgcgaggcgagggcgatggggccaagaagaaccggggcgatagcgcggcagcggtga

SEQ ID NO: 260671 - DNA, 120 bp, Artificial Sequence
  ENSG00000125388_2 (sequence is synthesized)
tcccctcgccccgaccgctcccctgctggtgagggcctgcggaggcggcggcggcggcgcccttggtggcagtggtggcggcggagcagcctcccgggatcgtgtccggagctcgaggag

SEQ ID NO: 260672 - DNA, 120 bp, Artificial Sequence
  ENSG00000125388_3 (sequence is synthesized)
gcctcccgggatcgtgtccggagctcgaggagagggtggtgcccggcgagctatgcacgggggcggcggcgtctcctcctgttccgcctcctcagtctcctcggtctcgcagaatccgcc

SEQ ID NO: 260673 - DNA, 120 bp, Artificial Sequence
  ENSG00000125388_4 (sequence is synthesized)
ggcggcggcggcgccaggacatggagctcgagaacatcgtggccaactcgctgctgctgaaagcgcgtcaaggaggatatggcaaaaaaagtggtcgtagtaaaaaatggaaggagatac

SEQ ID NO: 260674 - DNA, 120 bp, Artificial Sequence
  ENSG00000125388_5 (sequence is synthesized)
tgacactgcctcctgtcagccagtgcagtgagcttagacattccattgaaaaggattatagcagtctttgtgacaagcaaccgataggaagacgtctcttcaggcagttctgtgatacca

SEQ ID NO: 260675 - DNA, 120 bp, Artificial Sequence
  ENSG00000125388_6 (sequence is synthesized)
aacccactctaaagaggcacattgaattcttggatgcagtggcagaatatgaagttgccgatgatgaggaccgaagtgattgtggactgtcaatcttagatagattcttcaatgataagt

SEQ ID NO: 260676 - DNA, 120 bp, Artificial Sequence
  ENSG00000125388_7 (sequence is synthesized)
tggcagcccctttaccagaaatacctccagatgttgtgacagaatgtagattgggactgaaggaggagaacccttccaaaaaagcctttgaggaatgtactagagttgcccataactacc

SEQ ID NO: 260677 - DNA, 120 bp, Artificial Sequence
  ENSG00000125388_8 (sequence is synthesized)
taagaggggaaccatttgaagaataccaagaaagctcatatttttctcagtttttacaatggaaatggctggaaaggcaacccgtaacaaagaacacatttagacattacagagttctag

SEQ ID NO: 260678 - DNA, 120 bp, Artificial Sequence
  ENSG00000125388_9 (sequence is synthesized)
aagaggaaaggtgaagctatggctctaaatgagaaaagaattctggagaaagtgcaaagtagattcgtagttagtttagcctacgcttatgaaaccaaagatgccttgtgcttggtgctc

SEQ ID NO: 260679 - DNA, 120 bp, Artificial Sequence
  ENSG00000125388_10 (sequence is synthesized)
accattatgaatggaggggatttgaagtttcacatttacaacctgggcaatcccggctttgatgagcagagagccgttttctatgctgcagagctgtgttgcggcttggaagatttacag

SEQ ID NO: 260680 - DNA, 120 bp, Artificial Sequence
  ENSG00000125388_11 (sequence is synthesized)
agggaaagaattgtatacagagacttgaagcctgagaatattctccttgatgatcgtggacacatccggatttcagacctcggtttggccacagagatcccagaaggacagagggttcga

SEQ ID NO: 260681 - DNA, 120 bp, Artificial Sequence
  ENSG00000125388_12 (sequence is synthesized)
ggaagagttggaacagtcggctacatggcacctgaagttgtcaataatgaaaagtatacgtttagtcccgattggtggggacttggctgtctgatctatgaaatgattcagggacattct

SEQ ID NO: 260682 - DNA, 120 bp, Artificial Sequence
  ENSG00000125388_13 (sequence is synthesized)
ccattcaaaaaatacaaagagaaagtcaaatgggaggaggtcgatcaaagaatcaagaatgataccgaggagtattctgagaagttttcagaggatgccaaatctatctgcaggatgtta

SEQ ID NO: 260683 - DNA, 120 bp, Artificial Sequence
  ENSG00000125388_14 (sequence is synthesized)
ctcaccaagaatccaagcaagcggctgggctgcaggggcgagggagcggctggggtgaagcagcaccccgtgttcaaggacatcaacttcaggaggctggaggcaaacatgctggagccc

SEQ ID NO: 260684 - DNA, 120 bp, Artificial Sequence
  ENSG00000125388_15 (sequence is synthesized)
cctttctgtcctgatcctcatgccgtttactgtaaggacgtcctggatatcgagcagttctcggtggtgaaagggatctacctggacaccgcagatgaagacttctatgctcggtttgct

SEQ ID NO: 260685 - DNA, 120 bp, Artificial Sequence
  ENSG00000125388_16 (sequence is synthesized)
accgggtgtgtctccatcccctggcagaatgagatgatcgaatctgggtgtttcaaagacatcaacaaaagtgaaagtgaggaagctttgccattagatctagacaagaacatacatacc

SEQ ID NO: 260686 - DNA, 120 bp, Artificial Sequence
  ENSG00000125388_17 (sequence is synthesized)
ccggtttccagaccaaacagaggcttcttctatagactcttcagaagagggggctgcctgaccatggtccccagtgagaaggaagtggaacccaagcaatgctgagcaccccggtgcgga

SEQ ID NO: 260687 - DNA, 120 bp, Artificial Sequence
  ENSG00000125388_18 (sequence is synthesized)
ccacagagcagaccctggcgccaggaaggagcatgtgttagcgtctcgtcccacctggaattgtaataaatacatctaaataaaacatgccttgggagtgtacagacctttctgcactaa

SEQ ID NO: 260688 - DNA, 120 bp, Artificial Sequence
  ENSG00000125388_19 (sequence is synthesized)
cgcgtcaagtcctctgcatcccgccacaaaagcatcagttggtccagcccttcagcgggagacccccacaatcctctgtgcaatcctctgtctcggacctcatgtctcccttgcctgcgt

SEQ ID NO: 260689 - DNA, 120 bp, Artificial Sequence
  ENSG00000125388_20 (sequence is synthesized)
ctcaagagagctggcgacagagcctcggacctcaagtccctgtgctagccacggtagttcttcacaccccgtcactcttacggaattgctgatttcctctatttccttgcgtgatggagc

SEQ ID NO: 260690 - DNA, 120 bp, Artificial Sequence
  ENSG00000125388_21 (sequence is synthesized)
agctctgctcggactgtgctccaggacagtgtaaatgccgactgaagatgccacagcagccggcgatgcatatttaaaggacagtctggagccgaaggtggcggccacgcttgtagtccc

SEQ ID NO: 260691 - DNA, 120 bp, Artificial Sequence
  ENSG00000125388_22 (sequence is synthesized)
agctactctggaagctgaggtggaaggctcacttgggcccaggagagtccagcctgggcaaaacacagcaagaccatctctttaaaaaagtctaaaacaaagacttcatcttctcagtat

SEQ ID NO: 260692 - DNA, 120 bp, Artificial Sequence
  ENSG00000125388_23 (sequence is synthesized)
gagcagtatgcgttctcagcagccattttcagtggagcatttgactgtgcctcttatccctgactgtgaactccaaataggtcatggaaaataatcatccttagtggaagtcagattgaa

SEQ ID NO: 260693 - DNA, 120 bp, Artificial Sequence
  ENSG00000125388_24 (sequence is synthesized)
gctaagccagttttctttttacactaccttcctatctgcatgtaatttacaaaaaggaactataccaagccgccttccttataatgctgcagagattagataatgagataaatacaagtg

SEQ ID NO: 260694 - DNA, 120 bp, Artificial Sequence
  ENSG00000125388_25 (sequence is synthesized)
taaatacaagtgctctataaatgctaaataacataaaaccagattctgtcacaaaacctaagaccacagtgatagtttgaaaaatgaaagttttggccgggcacggtggctcacagctgt

SEQ ID NO: 260695 - DNA, 120 bp, Artificial Sequence
  ENSG00000125388_26 (sequence is synthesized)
tcgaaaaaaaaaaaaaagaaagttttaattttttccctgaaatatctcatattaactccacagtagtgtgattatgaggcctgtccccattgagtgagagtatttgctcctgtggtcaga

SEQ ID NO: 260696 - DNA, 120 bp, Artificial Sequence
  ENSG00000125388_27 (sequence is synthesized)
aagcatcattatgtatagcttgattaatggttagagaagttgaatatataatattagatatacatggatacatgctgagtattggttataatttagggctttttcccaagttgatgactg

SEQ ID NO: 260697 - DNA, 120 bp, Artificial Sequence
  ENSG00000125388_28 (sequence is synthesized)
tgtttgttactttaaagtatctcccaggaagtaccaggaggtgtcttcttggacacataacttcatggacagctccttgtttagcttcactggctcatatactagaaaattaacctttga

SEQ ID NO: 260698 - DNA, 120 bp, Artificial Sequence
  ENSG00000125388_29 (sequence is synthesized)
aatgaatgaacgtagcacaagagttatattctggtcctgagaagcgcaatgttgatttaatattattagtgagtccggtcatttcctggatttatttcaaatagaatcagtcagtctcaa

SEQ ID NO: 260699 - DNA, 86 bp, Artificial Sequence
  ENSG00000125388_30 (sequence is synthesized)
cactggatagaggagcgattgcagagaatcctcaaagttgcctttgaaattccctagctgaggaaattaaaagactgctctttcta

SEQ ID NO: 260700 - DNA, 120 bp, Artificial Sequence
  ENSG00000125388_31 (sequence is synthesized)
agccaccgcgcctggccaaaagaatgttcttgagctttatattttgacccaaattaggcaatagttaccttaaagaaaaatgatacagtcaaaatcattttggctttattaaagctcctc

SEQ ID NO: 260701 - DNA, 120 bp, Artificial Sequence
  ENSG00000125388_32 (sequence is synthesized)
aaaaaactctagaattagggctttcttaagttactttttagcagaaacatttacggtattttgtacatatgtgtgcaaagttgcttattaacatttatgtcatggtcataaagactaatt

SEQ ID NO: 260702 - DNA, 120 bp, Artificial Sequence
  ENSG00000125388_33 (sequence is synthesized)
ctgagagccacatggtgctaggtggaggccagccagaacaatgagaacaccctcgcagtgaggtttgttgctgggatgaagactgttctgatccaaaacaggactaccttccagcattta

SEQ ID NO: 260703 - DNA, 120 bp, Artificial Sequence
  ENSG00000125388_34 (sequence is synthesized)
caaacaggttcccgtgtcgctgacaaaatagtttacactgggctcagaaatcggcatcctgtggaaccttcgtcagatggcactcacagtgcatctctccctgctctggctcttagactc

SEQ ID NO: 260704 - DNA, 120 bp, Artificial Sequence
  ENSG00000125398_0 (sequence is synthesized)
ggagagccgaaagcggagctcgaaactgactggaaacttcagtggcgcggagactcgccagtttcaaccccggaaacttttctttgcaggaggagaagagaaggggtgcaagcgccccca

SEQ ID NO: 260705 - DNA, 120 bp, Artificial Sequence
  ENSG00000125398_1 (sequence is synthesized)
cttttgctctttttcctcccctcctcctcctctccaattcgcctccccccacttggagcgggcagctgtgaactggccaccccgcgccttcctaagtgctcgccgcggtagccggccgac

SEQ ID NO: 260706 - DNA, 120 bp, Artificial Sequence
  ENSG00000125398_2 (sequence is synthesized)
gcgccagcttccccgggagccgcttgctccgcatccgggcagccgaggggagaggagcccgcgcctcgagtccccgagccgccgcggcttctcgcctttcccggccaccagccccctgcc

SEQ ID NO: 260707 - DNA, 120 bp, Artificial Sequence
  ENSG00000125398_3 (sequence is synthesized)
ccgggcccgcgtatgaatctcctggaccccttcatgaagatgaccgacgagcaggagaagggcctgtccggcgcccccagccccaccatgtccgaggactccgcgggctcgccctgcccg

SEQ ID NO: 260708 - DNA, 120 bp, Artificial Sequence
  ENSG00000125398_4 (sequence is synthesized)
tcgggctccggctcggacaccgagaacacgcggccccaggagaacacgttccccaagggcgagcccgatctgaagaaggagagcgaggaggacaagttccccgtgtgcatccgcgaggcg

SEQ ID NO: 260709 - DNA, 120 bp, Artificial Sequence
  ENSG00000125398_5 (sequence is synthesized)
gtcagccaggtgctcaaaggctacgactggacgctggtgcccatgccggtgcgcgtcaacggctccagcaagaacaagccgcacgtcaagcggcccatgaacgccttcatggtgtgggcg

SEQ ID NO: 260710 - DNA, 120 bp, Artificial Sequence
  ENSG00000125398_6 (sequence is synthesized)
caggcggcgcgcaggaagctcgcggaccagtacccgcacttgcacaacgccgagctcagcaagacgctgggcaagctctggagacttctgaacgagagcgagaagcggcccttcgtggag

SEQ ID NO: 260711 - DNA, 120 bp, Artificial Sequence
  ENSG00000125398_7 (sequence is synthesized)
gaggcggagcggctgcgcgtgcagcacaagaaggaccacccggattacaagtaccagccgcggcggaggaagtcggtgaagaacgggcaggcggaggcagaggaggccacggagcagacg

SEQ ID NO: 260712 - DNA, 120 bp, Artificial Sequence
  ENSG00000125398_8 (sequence is synthesized)
cacatctcccccaacgccatcttcaaggcgctgcaggccgactcgccacactcctcctccggcatgagcgaggtgcactcccccggcgagcactcggggcaatcccagggcccaccgacc

SEQ ID NO: 260713 - DNA, 120 bp, Artificial Sequence
  ENSG00000125398_9 (sequence is synthesized)
ccacccaccacccccaaaaccgacgtgcagccgggcaaggctgacctgaagcgagaggggcgccccttgccagaggggggcagacagccccctatcgacttccgcgacgtggacatcggc

SEQ ID NO: 260714 - DNA, 120 bp, Artificial Sequence
  ENSG00000125398_10 (sequence is synthesized)
gagctgagcagcgacgtcatctccaacatcgagaccttcgatgtcaacgagtttgaccagtacctgccgcccaacggccacccgggggtgccggccacgcacggccaggtcacctacacg

SEQ ID NO: 260715 - DNA, 120 bp, Artificial Sequence
  ENSG00000125398_11 (sequence is synthesized)
cctacacgggcagctacggcatcagcagcaccgcggccaccccggcgagcgcgggccacgtgtggatgtccaagcagcaggcgccgccgccacccccgcagcagcccccacaggccccgc

SEQ ID NO: 260716 - DNA, 120 bp, Artificial Sequence
  ENSG00000125398_12 (sequence is synthesized)
cccgcagccgcaggcggcgcccccacagcagccggcggcacccccgcagcagccacaggcgcacacgctgaccacgctgagcagcgagccgggccagtcccagcgaacgcacatcaagac

SEQ ID NO: 260717 - DNA, 120 bp, Artificial Sequence
  ENSG00000125398_13 (sequence is synthesized)
atcaagacggagcagctgagccccagccactacagcgagcagcagcagcactcgccccaacagatcgcctacagccccttcaacctcccacactacagcccctcctacccgcccatcacc

SEQ ID NO: 260718 - DNA, 120 bp, Artificial Sequence
  ENSG00000125398_14 (sequence is synthesized)
cgctcacagtacgactacaccgaccaccagaactccagctcctactacagccacgcggcaggccagggcaccggcctctactccaccttcacctacatgaaccccgctcagcgccccatg

SEQ ID NO: 260719 - DNA, 120 bp, Artificial Sequence
  ENSG00000125398_15 (sequence is synthesized)
tacacccccatcgccgacacctctggggtcccttccatcccgcagacccacagcccccagcactgggaacaacccgtctacacacagctcactcgaccttgaggaggcctcccacgaagg

SEQ ID NO: 260720 - DNA, 120 bp, Artificial Sequence
  ENSG00000125398_16 (sequence is synthesized)
attttgttttgttttttcttcttcttcttcttccttaaagacatttaagctaaaggcaactcgtacccaaatttccaagacacaaacatgacctatccaagcgcattacccacttgtggc

SEQ ID NO: 260721 - DNA, 120 bp, Artificial Sequence
  ENSG00000125398_17 (sequence is synthesized)
caatcagtggccaggccaaccttggctaaatggagcagcgaaatcaacgagaaactggactttttaaaccctcttcagagcaagcgtggaggatgatggagaatcgtgtgatcagtgtgc

SEQ ID NO: 260722 - DNA, 120 bp, Artificial Sequence
  ENSG00000125398_18 (sequence is synthesized)
taaatctctctgcctgtttggactttgtaattatttttttagcagtaattaaagaaaaaagtcctctgtgaggaatattctctattttaaatatttttagtatgtactgtgtatgattca

SEQ ID NO: 260723 - DNA, 120 bp, Artificial Sequence
  ENSG00000125398_19 (sequence is synthesized)
ttaccattttgaggggatttatacatatttttagataaaattaaatgctcttatttttccaacagctaaactactcttagttgaacagtgtgccctagcttttcttgcaaccagagtatt

SEQ ID NO: 260724 - DNA, 120 bp, Artificial Sequence
  ENSG00000125398_20 (sequence is synthesized)
tttgtacagatttgctttctcttacaaaaagaaaaaaaaaatcctgttgtattaacatttaaaaacagaattgtgttatgtgatcagttttgggggttaactttgcttaattcctcaggc

SEQ ID NO: 260725 - DNA, 120 bp, Artificial Sequence
  ENSG00000125398_21 (sequence is synthesized)
tttgcgatttaaggaggagctgccttaaaaaaaaataaaggccttattttgcaattatgggagtaaacaatagtctagagaagcatttggtaagctttatcatatatatattttttaaag

SEQ ID NO: 260726 - DNA, 120 bp, Artificial Sequence
  ENSG00000125398_22 (sequence is synthesized)
aagagaaaaacaccttgagccttaaaacggtgctgctgggaaacatttgcactcttttagtgcatttcctcctgcctttgcttgttcactgcagtcttaagaaagaggtaaaaggcaagc

SEQ ID NO: 260727 - DNA, 120 bp, Artificial Sequence
  ENSG00000125398_23 (sequence is synthesized)
aaaggagatgaaatctgttctgggaatgtttcagcagccaataagtgcccgagcacactgcccccggttgcctgcctgggccccatgtggaaggcagatgcctgctcgctctgtcacctg

SEQ ID NO: 260728 - DNA, 120 bp, Artificial Sequence
  ENSG00000125398_24 (sequence is synthesized)
tgcctctcagaacaccagcagttaaccttcaagacattccacttgctaaaattatttattttgtaaggagaggttttaattaaaacaaaaaaaaattcttttttttttttttttccaatt

SEQ ID NO: 260729 - DNA, 120 bp, Artificial Sequence
  ENSG00000125398_25 (sequence is synthesized)
ttaccttctttaaaataggttgttggagctttcctcaaagggtatggtcatctgttgttaaattatgttcttaactgtaaccagtttttttttatttatctctttaatctttttttatta

SEQ ID NO: 260730 - DNA, 120 bp, Artificial Sequence
  ENSG00000125398_26 (sequence is synthesized)
ttaaaagcaagtttctttgtattcctcaccctagatttgtataaatgcctttttgtccatcccttttttctttgttgtttttgttgaaaacaaactggaaacttgtttctttttttgtat

SEQ ID NO: 260731 - DNA, 120 bp, Artificial Sequence
  ENSG00000125398_27 (sequence is synthesized)
aaatgagagattgcaaatgtagtgtatcactgagtcatttgcagtgttttctgccacagacctttgggctgccttatattgtgtgtgtgtgtgggtgtgtgtgtgttttgacacaaaaac

SEQ ID NO: 260732 - DNA, 120 bp, Artificial Sequence
  ENSG00000125398_28 (sequence is synthesized)
aatgcaagcatgtgtcatccatatttctctgcatcttctcttggagtgagggaggctacctggaggggatcagcccactgacagaccttaatcttaattactgctgtggctagagagttt

SEQ ID NO: 260733 - DNA, 120 bp, Artificial Sequence
  ENSG00000125398_29 (sequence is synthesized)
gaggattgctttttaaaaaagacagcaaacttttttttttatttaaaaaaagatatattaacagttttagaagtcagtagaataaaatcttaaagcactcataatatggcatccttcaat

SEQ ID NO: 260734 - DNA, 120 bp, Artificial Sequence
  ENSG00000125398_30 (sequence is synthesized)
ttctgtataaaagcagatctttttaaaaagatacttctgtaacttaagaaacctggcatttaaatcatattttgtctttaggtaaaagctttggtttgtgttcgtgttttgtttgtttca

SEQ ID NO: 260735 - DNA, 120 bp, Artificial Sequence
  ENSG00000125398_31 (sequence is synthesized)
cttgtttccctcccagccccaaaccttttgttctctccgtgaaacttacctttccctttttctttctcttttttttttttgtatattattgtttacaataaatatacattgcattaaaaa

SEQ ID NO: 260736 - DNA, 120 bp, Artificial Sequence
  ENSG00000125409_0 (sequence is synthesized)
taacaggagagatttacaaatagtgttttggcatcatggaacgtgtaggttgtactttaacgacaacttacgcccaccctagaccaacaccaaccaactttctaccagccatcagtacca

SEQ ID NO: 260737 - DNA, 120 bp, Artificial Sequence
  ENSG00000125409_1 (sequence is synthesized)
tggcctcaagctacagggaccgctttccccactccaatttgacccatagcctgagccttccttggagacccagcacatactacaaagtcgcctccaattccccaagcgtggccccgtact

SEQ ID NO: 260738 - DNA, 120 bp, Artificial Sequence
  ENSG00000125409_2 (sequence is synthesized)
gcaccagatcacagagggtgtccgagaataccatgcttccctttgtttccaacagaaccactttcttcacaagatacacaccggatgactggtacaggtccaatttaaccaactatcaag

SEQ ID NO: 260739 - DNA, 120 bp, Artificial Sequence
  ENSG00000125409_3 (sequence is synthesized)
agtccaacacttcccgacataattcggagaaactaagagtggatacatctcgcctgattcaagacaaatatcaacaaacaagaaaaactcaggcagacacaacccaaaatctgggagaac

SEQ ID NO: 260740 - DNA, 120 bp, Artificial Sequence
  ENSG00000125409_4 (sequence is synthesized)
gtgtcaatgacatagggttttggaaatctgaaatcattcatgagttggatgaaatgattggagagacaaatgcacttactgatgtgaagaaaagactggagcgggctttgatggagactg

SEQ ID NO: 260741 - DNA, 120 bp, Artificial Sequence
  ENSG00000125409_5 (sequence is synthesized)
aagcccctcttcaggtagcccgagaatgtctatttcatcgagaaaagagaatgggaatcgacctagttcacgatgaagttgaagcacaactgctgacggaagttgatactattctgtgtt

SEQ ID NO: 260742 - DNA, 120 bp, Artificial Sequence
  ENSG00000125409_6 (sequence is synthesized)
tgagctggaaaaggacctgagtgacaaacagacggcttaccggatcgacgacaaatgccaccacctgcgcaacacatcagacggtgtcggctacttccgcggagtggagagggtcgatgc

SEQ ID NO: 260743 - DNA, 120 bp, Artificial Sequence
  ENSG00000125409_7 (sequence is synthesized)
aactgtctcagtgcctgagtcctgggccaaatttacagatgacaatattctccgctcccagagtgaacgggcagcttccgctaagctaagagacgacattgaaaacctcttggttgtgac

SEQ ID NO: 260744 - DNA, 120 bp, Artificial Sequence
  ENSG00000125409_8 (sequence is synthesized)
tgccaatgagatgtggaatcaattcaacaaagtgaacttgtctttcaccaatcgcattgctgagactgcagatgctaagaataagattcagacgcacttagcaaagaccctgcaggagat

SEQ ID NO: 260745 - DNA, 120 bp, Artificial Sequence
  ENSG00000125409_9 (sequence is synthesized)
tttccagactgaaatgaccatagaatccatcaagaaggccatcaaggacaagactgccttcctgaaggtggctcagaccagactggatgagcgcacaagacggccgaacattgagttgtg

SEQ ID NO: 260746 - DNA, 120 bp, Artificial Sequence
  ENSG00000125409_10 (sequence is synthesized)
ccgagacatggctcagctacgccttgttaacgaggtacacgaggttgacgacaccatccagaccctgcagcagcgcctgagggatgcagaggacaccctgcagtcgctggtccacatcaa

SEQ ID NO: 260747 - DNA, 120 bp, Artificial Sequence
  ENSG00000125409_11 (sequence is synthesized)
agccacactcgagtatgacctggctgtcaaagccaattccctgtacatcgaccaggaaaaatgcatgagcatgcgcaagagctaccccaacaccctccggctggtcggcttctgctaggg

SEQ ID NO: 260748 - DNA, 120 bp, Artificial Sequence
  ENSG00000125409_12 (sequence is synthesized)
accccaccgggtgtggttttgatacccctaagttaaggctgagccagagcactgtctcagcatttgaaccgaatgctaatatagtcacttattaaaggattatgctgatggaaatgtacc

SEQ ID NO: 260749 - DNA, 120 bp, Artificial Sequence
  ENSG00000125409_13 (sequence is synthesized)
tcactcaggctgcatgtttttcaaagtgggttccatagaacccctcttcatgcacagctcattatttaggataagcagctctccactccagagactacatgggcccctagacagccaact

SEQ ID NO: 260750 - DNA, 120 bp, Artificial Sequence
  ENSG00000125409_14 (sequence is synthesized)
gaagcacaactgctgacggtaaatgtgggggaaatgcatcagtcacaggcagcttagttgtaaatgtatgttgaatatgtagaagcaaaaaaggatgttacataaaatgacttataagta

SEQ ID NO: 260751 - DNA, 120 bp, Artificial Sequence
  ENSG00000125409_15 (sequence is synthesized)
aagcattatcgtatcagatgctgatagcatttagcaaagacatgtttttcttggttataacatatattcaatgagaatatgaaaatgcaaacgagtaaataaagatgaaaatcacttgaa

SEQ ID NO: 260752 - DNA, 120 bp, Artificial Sequence
  ENSG00000125409_16 (sequence is synthesized)
tgaagaaagccttggagacagcaaatcagaggatgaattgaggtctgtaaagagtctggtgtgtggctggtgtagatggtttgtgtcctgggagaggaacatggaaaaaccctgcaggag

SEQ ID NO: 260753 - DNA, 84 bp, Artificial Sequence
  ENSG00000125409_17 (sequence is synthesized)
gagggctgcaggtggtaggctgcgaccccttcctcccacagccccttcccgcccctcgccgggcatccgccgagaacctccgcc

SEQ ID NO: 260754 - DNA, 120 bp, Artificial Sequence
  ENSG00000125414_0 (sequence is synthesized)
gtcctgctttaaaaagctccaagaactgtctcactcccaggctacatcttctcacttgctaacaaggacctctgagttcagcagccatgagttcagactcagaattggctgtttttgggg

SEQ ID NO: 260755 - DNA, 120 bp, Artificial Sequence
  ENSG00000125414_1 (sequence is synthesized)
aggctgctcctttcctccgaaagtctgaaagggagcgcattgaggcccagaataggccctttgatgccaaaacatctgtctttgtggcggagcccaaagaatcctttgtcaaagggacca

SEQ ID NO: 260756 - DNA, 120 bp, Artificial Sequence
  ENSG00000125414_2 (sequence is synthesized)
tccagagcagagaaggaggaaaagtgacggtgaagactgagggaggagcgactctgacagtgaaggatgatcaggtcttccccatgaaccctcccaaatatgacaagatcgaggatatgg

SEQ ID NO: 260757 - DNA, 120 bp, Artificial Sequence
  ENSG00000125414_3 (sequence is synthesized)
ccatgatgactcatctgcatgagcctgctgtgctgtacaacctcaaagaacgttatgcagcctggatgatctacacctattcaggtctcttctgtgtcactgtcaacccctacaagtggc

SEQ ID NO: 260758 - DNA, 120 bp, Artificial Sequence
  ENSG00000125414_4 (sequence is synthesized)
tgcctgtgtataagcccgaggtggtgacagcctaccgaggcaaaaagcgccaggaggccccgccccacatcttctccatctctgacaacgcctatcagttcatgctgactgaccgagaga

SEQ ID NO: 260759 - DNA, 120 bp, Artificial Sequence
  ENSG00000125414_5 (sequence is synthesized)
atcagtcaatcctgatcactggagaatctggtgcagggaagactgtgaacaccaagcgtgtcatccagtactttgcaacaattgcagttactggtgagaagaagaaggaagaaattactt

SEQ ID NO: 260760 - DNA, 120 bp, Artificial Sequence
  ENSG00000125414_6 (sequence is synthesized)
ctggcaaaatacaggggactctggaagatcaaatcatcagtgccaaccccctactggaggcctttggcaacgccaagaccgtgaggaatgacaactcctctcgctttggtaaattcatca

SEQ ID NO: 260761 - DNA, 120 bp, Artificial Sequence
  ENSG00000125414_7 (sequence is synthesized)
gaatccactttggcactactggaaaactggcatctgctgatattgaaacatatctgctagagaagtctagagttgttttccagcttaaggctgagagaagttatcatattttttaccaga

SEQ ID NO: 260762 - DNA, 120 bp, Artificial Sequence
  ENSG00000125414_8 (sequence is synthesized)
ttacatcgaataagaaaccagaacttattgaaatgcttctgattaccacgaacccatatgattacccatttgtcagtcaaggggagatcagtgtggccagcatcgatgatcaggaagaac

SEQ ID NO: 260763 - DNA, 120 bp, Artificial Sequence
  ENSG00000125414_9 (sequence is synthesized)
tgatggccacagatagtgctattgatattttgggctttactaatgaagaaaaggtctccatttacaagctcacgggggctgtgatgcattatgggaacctaaaatttaagcaaaagcagc

SEQ ID NO: 260764 - DNA, 120 bp, Artificial Sequence
  ENSG00000125414_10 (sequence is synthesized)
gtgaggagcaagcagagccagatggcacagaagttgctgacaaggcggcctacctccagagtctgaactctgcagatctgctcaaagctctctgctaccccagggtcaaggtcggcaatg

SEQ ID NO: 260765 - DNA, 120 bp, Artificial Sequence
  ENSG00000125414_11 (sequence is synthesized)
agtatgtcaccaaaggccagactgtagaacaggtgtccaacgcagtaggtgctctggccaaagccgtctacgagaagatgttcctgtggatggttgcccgcatcaaccagcagctggaca

SEQ ID NO: 260766 - DNA, 120 bp, Artificial Sequence
  ENSG00000125414_12 (sequence is synthesized)
ccaagcagcccaggcagtacttcatcggggtcttggacattgctggttttgagatttttgatttcaacagcctggagcagctgtgcatcaacttcaccaatgagaaactgcaacagtttt

SEQ ID NO: 260767 - DNA, 120 bp, Artificial Sequence
  ENSG00000125414_13 (sequence is synthesized)
tcaaccaccacatgttcgtgctggagcaggaggagtacaagaaggaaggcatcgagtggacgttcatcgacttcgggatggacctggctgcctgcatcgagctcatcgagaagcctatgg

SEQ ID NO: 260768 - DNA, 120 bp, Artificial Sequence
  ENSG00000125414_14 (sequence is synthesized)
gcatcttctccatcctggaagaggagtgcatgttccctaaggcaacagacacctccttcaagaacaagctgtatgaccagcacctgggcaagtctgccaacttccagaagcccaaggtgg

SEQ ID NO: 260769 - DNA, 120 bp, Artificial Sequence
  ENSG00000125414_15 (sequence is synthesized)
tcaaaggcaaggccgaggcccacttcgctctgattcactatgctggtgttgtggactacaacattactggctggctggagaagaacaaggaccccctgaatgagaccgtggttggactgt

SEQ ID NO: 260770 - DNA, 120 bp, Artificial Sequence
  ENSG00000125414_16 (sequence is synthesized)
accagaagtctgcaatgaaaactctagctcagctcttctctggggctcaaactgctgaaggagagggagctggtggaggggccaagaaaggtggtaagaagaagggctcttctttccaga

SEQ ID NO: 260771 - DNA, 120 bp, Artificial Sequence
  ENSG00000125414_17 (sequence is synthesized)
cagtgtctgcccttttcagagagaatttgaacaagctgatgaccaacctcaggagtacccatcctcactttgtgaggtgtatcatccccaatgagacaaaaactcctggtgccatggagc

SEQ ID NO: 260772 - DNA, 120 bp, Artificial Sequence
  ENSG00000125414_18 (sequence is synthesized)
atgagcttgtcctccaccagctgaggtgtaacggtgtgctggaaggcatccgcatctgtaggaaaggatttccaagcagaatcctttatgcagacttcaaacagagatacaaggtattaa

SEQ ID NO: 260773 - DNA, 120 bp, Artificial Sequence
  ENSG00000125414_19 (sequence is synthesized)
atgcaagtgcaatccctgaagggcaattcattgatagcaagaaggcctctgagaagctccttgcatccatcgacattgaccacacccagtataaatttgggcacaccaaggtctttttca

SEQ ID NO: 260774 - DNA, 120 bp, Artificial Sequence
  ENSG00000125414_20 (sequence is synthesized)
aagctggtcttctggggctcctagaggagatgcgagatgacaagctggcccagctgattacccgaacccaggccaggtgcagagggttcttggcaagagtggagtaccagaggatggtgg

SEQ ID NO: 260775 - DNA, 120 bp, Artificial Sequence
  ENSG00000125414_21 (sequence is synthesized)
agagaagggaggccatcttctgtatccagtacaatatcagatccttcatgaatgtcaagcactggccctggatgaaactcttcttcaagatcaagcctctgttgaagagtgcagaaactg

SEQ ID NO: 260776 - DNA, 120 bp, Artificial Sequence
  ENSG00000125414_22 (sequence is synthesized)
agaaggagatggccaccatgaaggaagaatttcagaaaattaaagacgaacttgccaagtcagaggcaaaaaggaaggaactggaagaaaagatggtgacgctgttgaaagaaaaaaatg

SEQ ID NO: 260777 - DNA, 120 bp, Artificial Sequence
  ENSG00000125414_23 (sequence is synthesized)
acttgcagctccaagttcaggctgaagccgaaggcttggctgatgcagaggaaaggtgtgaccagctaatcaaaaccaaaatccagctagaagccaaaatcaaagaggtgactgagagag

SEQ ID NO: 260778 - DNA, 120 bp, Artificial Sequence
  ENSG00000125414_24 (sequence is synthesized)
ctgaggatgaggaagagatcaatgctgagctgacagccaagaagaggaaactggaggatgaatgttcagaactcaagaaagacattgatgaccttgagctgacactggccaaggttgaga

SEQ ID NO: 260779 - DNA, 120 bp, Artificial Sequence
  ENSG00000125414_25 (sequence is synthesized)
gagatggcaggtctggatgaaaccattgctaagctgaccaaggagaagaaggctctccaggaggcccaccagcagaccctggatgacctgcaggcagaggaggacaaagtcaacaccctg

SEQ ID NO: 260780 - DNA, 120 bp, Artificial Sequence
  ENSG00000125414_26 (sequence is synthesized)
accaaagctaaaatcaaacttgaacaacaagtggatgatcttgaagggtccttggagcaagaaaagaaacttcgcatggacctagaaagggctaagaggaaacttgagggtgacttgaag

SEQ ID NO: 260781 - DNA, 120 bp, Artificial Sequence
  ENSG00000125414_27 (sequence is synthesized)
ttggcccaagaatccataatggacattgaaaatgagaaacagcaacttgatgaaaagctcaaaaagaaagagtttgaaatcagcaatctgcaaagcaagattgaagatgaacaggcactt

SEQ ID NO: 260782 - DNA, 120 bp, Artificial Sequence
  ENSG00000125414_28 (sequence is synthesized)
ggcattcaattgcagaagaaaattaaagaattgcaagcccgcattgaggagctggaggaggaaatcgaggcagagcgggcctcccgggccaaagcagagaagcagcgctctgacctctcc

SEQ ID NO: 260783 - DNA, 120 bp, Artificial Sequence
  ENSG00000125414_29 (sequence is synthesized)
cgggagctggaggagatcagcgagaggctggaagaagccggtggggccacttcagcccagattgagatgaacaagaagcgggaggctgagttccagaaaatgcgcagggacctggaggag

SEQ ID NO: 260784 - DNA, 120 bp, Artificial Sequence
  ENSG00000125414_30 (sequence is synthesized)
gccaccctacagcatgaagccacagcggccaccctgaggaagaagcatgcagatagtgtggccgagcttggggagcagattgacaacctgcagcgagtgaagcagaagctggagaaggag

SEQ ID NO: 260785 - DNA, 120 bp, Artificial Sequence
  ENSG00000125414_31 (sequence is synthesized)
aagagtgagatgaagatggagattgatgaccttgctagtaatgtagaaacggtctccaaagccaagggaaacctagagaaaatgtgccggactctagaggaccaactgagtgaactgaaa

SEQ ID NO: 260786 - DNA, 120 bp, Artificial Sequence
  ENSG00000125414_32 (sequence is synthesized)
tcaaaggaagaggagcagcagcggctgatcaatgacctgactgcgcagagggggcgcctgcagactgaatctggtgagttttcacgccagcttgatgaaaaggaagctctggtgtctcag

SEQ ID NO: 260787 - DNA, 120 bp, Artificial Sequence
  ENSG00000125414_33 (sequence is synthesized)
ttatcaagaggcaaacaagcctttactcaacagattgaagaattaaagaggcaacttgaagaggagataaaagccaagaacgccctggcgcatgccctgcagtcttcccgccacgactgt

SEQ ID NO: 260788 - DNA, 120 bp, Artificial Sequence
  ENSG00000125414_34 (sequence is synthesized)
gacctgctgcgggaacagtatgaggaggagcaggaatccaaggccgagctgcagagagcactgtccaaggccaacaccgaggttgcccaatggaggaccaaatacgagacggacgccatc

SEQ ID NO: 260789 - DNA, 120 bp, Artificial Sequence
  ENSG00000125414_35 (sequence is synthesized)
cagcgcacagaggagctggaggaggccaagaagaagctggcccagcggctgcaggcagctgaggaacatgtagaagctgtgaacgccaaatgtgcttccctcgaaaagacgaagcagcgg

SEQ ID NO: 260790 - DNA, 120 bp, Artificial Sequence
  ENSG00000125414_36 (sequence is synthesized)
ctgcagaatgaggtcgaggacctcatgcttgatgtggagaggacaaatgccgcctgtgccgcccttgacaaaaagcaaaggaacttcgataagatcctggcagaatggaaacagaaatgt

SEQ ID NO: 260791 - DNA, 120 bp, Artificial Sequence
  ENSG00000125414_37 (sequence is synthesized)
gaggaaacgcatgctgagcttgaggcctcccagaaggaggcccgttcccttggcactgagctgttcaagataaagaatgcctatgaggaatctttggatcagctagaaaccctgaagcga

SEQ ID NO: 260792 - DNA, 120 bp, Artificial Sequence
  ENSG00000125414_38 (sequence is synthesized)
gagaacaaaaacttacagcaggagatttctgacctcacggaacagattgcagaaggagggaaacgtatccatgaactggagaaaataaagaaacaagtggaacaagaaaagtgtgaactt

SEQ ID NO: 260793 - DNA, 120 bp, Artificial Sequence
  ENSG00000125414_39 (sequence is synthesized)
caggctgctttagaagaagcagaggcatctcttgaacatgaagagggaaagatcctgcgcatccagcttgagttgaaccaagtcaagtctgaggttgataggaaaattgctgaaaaagat

SEQ ID NO: 260794 - DNA, 120 bp, Artificial Sequence
  ENSG00000125414_40 (sequence is synthesized)
gaggaaattgaccagctgaagagaaaccacattagaatcgtggagtccatgcagagcacgctggatgctgagatcaggagtaggaatgatgccattaggctcaagaagaagatggaggga

SEQ ID NO: 260795 - DNA, 120 bp, Artificial Sequence
  ENSG00000125414_41 (sequence is synthesized)
gacctcaatgaaatggaaatccagctgaaccatgccaaccgcatggctgctgaggccctgaggaactacaggaacacccaaggcatcctcaaggatacccagatccacctggatgatgct

SEQ ID NO: 260796 - DNA, 120 bp, Artificial Sequence
  ENSG00000125414_42 (sequence is synthesized)
ctccggagccaggaggacctgaaggaacagctggccatggtggagcgcagagccaacctgctgcaggctgagatcgaggagctgcgggccactctggaacagacagagaggagcagaaaa

SEQ ID NO: 260797 - DNA, 120 bp, Artificial Sequence
  ENSG00000125414_43 (sequence is synthesized)
atcgcagaacaggagctcctggatgccagtgagcgtgttcagctactgcacacccagaacaccagcctgatcaacaccaagaagaagctggagacagatatttcccaaatgcaaggagag

SEQ ID NO: 260798 - DNA, 120 bp, Artificial Sequence
  ENSG00000125414_44 (sequence is synthesized)
atggaggacattctccaggaagcccgcaatgcagaagaaaaggccaagaaggccatcactgatgccgccatgatggctgaggagctgaagaaggagcaggacaccagcgcccacctggag

SEQ ID NO: 260799 - DNA, 120 bp, Artificial Sequence
  ENSG00000125414_45 (sequence is synthesized)
cggatgaagaagaacatggagcagaccgtgaaggatctgcagctccgtctggatgaggctgagcagctggccctgaagggtgggaagaagcagatccagaaactggaggccagggtacgg

SEQ ID NO: 260800 - DNA, 120 bp, Artificial Sequence
  ENSG00000125414_46 (sequence is synthesized)
gagctggaaggagaggttgagagtgagcaaaagcgtaatgctgaggctgtcaaaggtctgcgcaaacatgagaggcgagtgaaggaactcacttaccagacggaagaagatagaaagaat

SEQ ID NO: 260801 - DNA, 120 bp, Artificial Sequence
  ENSG00000125414_47 (sequence is synthesized)
attctcaggcttcaagatttggtagataaacttcaggcaaaagtgaaatcttataagagacaagctgaggaggctgaggaacaatccaacaccaatctagctaaattccgcaagctccag

SEQ ID NO: 260802 - DNA, 120 bp, Artificial Sequence
  ENSG00000125414_48 (sequence is synthesized)
catgagctggaggaggccgaggaacgggctgacattgctgagtcccaggtgaacaaactgcgggtgaagagccgggaggttcacacaaaagtcataagtgaagagtgatcatgtcctgat

SEQ ID NO: 260803 - DNA, 120 bp, Artificial Sequence
  ENSG00000125414_49 (sequence is synthesized)
gccatggaatgactgaagacaggcacaaaatgtgacatctttggtcatttccctctgtaattattgtgtattctaccctgttgcaaaggaaataaagcatagggtagtttgcaaacaata

SEQ ID NO: 260804 - DNA, 120 bp, Artificial Sequence
  ENSG00000125414_50 (sequence is synthesized)
aggacgggcctttcaagagggacactggtcacaccgcccagtgtcagcagcagctgctagttctggtactgctccttctggaactgcacgttttacctctatgaattttgttacttctgt

SEQ ID NO: 260805 - DNA, 120 bp, Artificial Sequence
  ENSG00000125414_51 (sequence is synthesized)
cacattttattgatttttgttgttgttgtttggtcactcaattaatgtaaacggttatctttcctgtttaccagactctgacagtgaaggatgatcaggtcttccccatgaaccctccca

SEQ ID NO: 260806 - DNA, 120 bp, Artificial Sequence
  ENSG00000125430_0 (sequence is synthesized)
gcagttcgcctctgcagcctctgcggggaagtgccggggctgctcgaggctcagttcttaggactgcaaggaggcagccccggcgtgcggcggtgcgcacagtctagagtggccagggcg

SEQ ID NO: 260807 - DNA, 120 bp, Artificial Sequence
  ENSG00000125430_1 (sequence is synthesized)
cgagagtgcaacgtcctcctggccccgagcgcgtcgtcgcgccccgggagcagaccctcgcccagcagttaccgccgtcccgactttccgttccagttgcagctcctgccgggcaacatg

SEQ ID NO: 260808 - DNA, 120 bp, Artificial Sequence
  ENSG00000125430_2 (sequence is synthesized)
tcaagagccgccgccgctacagctgccgccgccacctggggaagagcagcagcagcagcggcggccgcgggcacacgggggcaataaaccgagccacccgggcgtccagcgtgccgggga

SEQ ID NO: 260809 - DNA, 120 bp, Artificial Sequence
  ENSG00000125430_3 (sequence is synthesized)
accctctctgcgctcactgcccggcgggacccacgccatgtgctgagccatgtccctggccgcgcccgcgggcagcgcatggggcagcgcctgagtggcggcagatcttgcctcgatgtc

SEQ ID NO: 260810 - DNA, 120 bp, Artificial Sequence
  ENSG00000125430_4 (sequence is synthesized)
cccggccggctcctaccgcagccgccgccgcccccgccgccggtgaggaggaagctcgcgctgctcttcgccatgctctgcgtctggctctatatgttcctgtactcgtgcgccggctcc

SEQ ID NO: 260811 - DNA, 120 bp, Artificial Sequence
  ENSG00000125430_5 (sequence is synthesized)
ctcctgggctctgggtcccgcgccgcacacgacccgccagccctggccacagctccggacgggacgccccccaggctgccgttccgggcgccgccagccaccccactggcttcaggcaag

SEQ ID NO: 260812 - DNA, 120 bp, Artificial Sequence
  ENSG00000125430_6 (sequence is synthesized)
gccaccccactggcttcaggcaaggagatggccgagggcgctgcgagcccggaggagcagagtcccgaggtgccggactccccaagccccatctccagctttttcagtgggtctgggagc

SEQ ID NO: 260813 - DNA, 120 bp, Artificial Sequence
  ENSG00000125430_7 (sequence is synthesized)
aagcagctgccgcaggccatcatcatcggcgtgaagaagggcggcacgcgggcgctgctggagtttctgcgcgtgcaccccgacgtgcgcgccgtgggcgccgagccccatttcttcgat

SEQ ID NO: 260814 - DNA, 120 bp, Artificial Sequence
  ENSG00000125430_8 (sequence is synthesized)
cgcagctacgacaagggcctcgcttggtaccgggacctgatgcccagaaccctggacgggcagatcaccatggagaagacgcccagttacttcgtcacgcgggaggcccctgcgcgcatc

SEQ ID NO: 260815 - DNA, 120 bp, Artificial Sequence
  ENSG00000125430_9 (sequence is synthesized)
tcggccatgtccaaggacaccaagctcatcgtggtggtgcgggacccggtgaccagggccatctcggactacacgcagacgctgtccaagcggcccgacatccccaccttcgagagcttg

SEQ ID NO: 260816 - DNA, 120 bp, Artificial Sequence
  ENSG00000125430_10 (sequence is synthesized)
acgttcaaaaacaggacagcgggcctcatcgacacgtcgtggagcgccatccagatcggcatctacgccaagcacctggagcactggctgcgccacttccccatccgccagatgctcttc

SEQ ID NO: 260817 - DNA, 120 bp, Artificial Sequence
  ENSG00000125430_11 (sequence is synthesized)
gtgagcggcgagcggctcatcagcgacccggccggggagctgggccgcgtgcaagacttcctgggcctcaagaggatcatcacggacaagcacttctacttcaacaagaccaagggcttc

SEQ ID NO: 260818 - DNA, 120 bp, Artificial Sequence
  ENSG00000125430_12 (sequence is synthesized)
ccctgcctgaagaaggcggagggcagcagccggccccattgcctgggcaagaccaagggcaggacccatcctgagatcgaccgcgaggtggtgcgcaggctgcgcgagttctaccggcct

SEQ ID NO: 260819 - DNA, 120 bp, Artificial Sequence
  ENSG00000125430_13 (sequence is synthesized)
ttcaacctcaagttctaccagatgaccgggcacgactttggctgggattgagcagacccgggctatgtaccttacccacgtggcttatctattgacagagattatatgtatgtaaaatgt

SEQ ID NO: 260820 - DNA, 120 bp, Artificial Sequence
  ENSG00000125430_14 (sequence is synthesized)
acagaaatctattttataataatttatttttaattcataagcaattaattcactaagctgcctagccacactctttagagagttagcttcataatctgttaacattccaaagtgtttaac

SEQ ID NO: 260821 - DNA, 120 bp, Artificial Sequence
  ENSG00000125430_15 (sequence is synthesized)
tctagtatttcgttctcttcttcacaattgatggtgcttctattttttcttctcccctacctgttatatttaaaacaaagaaaagcacaacttgagatttttgttgttacgggtattcag

SEQ ID NO: 260822 - DNA, 120 bp, Artificial Sequence
  ENSG00000125430_16 (sequence is synthesized)
ccttcagtcaccgtctgagttctccagttgctgcctccttgtcttgtcttgggtctcccattccagcttccctgtctcttcctgcctgtgtacctcgtaggaacgctgagctgcctcaac

SEQ ID NO: 260823 - DNA, 120 bp, Artificial Sequence
  ENSG00000125430_17 (sequence is synthesized)
agggctgtattctgaagggcaggcctcatgcagcagcctccttgcagatgtggtgtcccgtccaatgatgtagcctgaaagccacagccctagggttctgtccctccctccattcagcac

SEQ ID NO: 260824 - DNA, 77 bp, Artificial Sequence
  ENSG00000125430_18 (sequence is synthesized)
gccacagccctagggttctgtccctccctccattcagcacatggggaaatttctcactccctttacagggacatcca

SEQ ID NO: 260825 - DNA, 70 bp, Artificial Sequence
  ENSG00000125430_19 (sequence is synthesized)
gagtcttgctcttgttgcccaggctggggcgtaatggtgtgatatatgcttaccacaacctctggctccc

SEQ ID NO: 260826 - DNA, 120 bp, Artificial Sequence
  ENSG00000125430_20 (sequence is synthesized)
tccttctagagtcagaatggtagggtctgttgacttcagcttttgattttgcaggatggccctgtgtcctcctctgccccattccctggttcattaaccagtttgaagtgtatgtagatt

SEQ ID NO: 260827 - DNA, 120 bp, Artificial Sequence
  ENSG00000125430_21 (sequence is synthesized)
caccatgctgcgttccccaggcagacagttctgctttgacacaccaaagaatcccgtaggctagcagagccaccagcacaaaccaagggcgctgggtgtcgagactcagaggggtcagct

SEQ ID NO: 260828 - DNA, 120 bp, Artificial Sequence
  ENSG00000125430_22 (sequence is synthesized)
gtgtccctcggcatcagcgtctaccaaggtgctgctaggtacagagccagccagtgttgggcagcaggctcacagcctcaatagggagaaaagacaaaggcctcaaaatgacaggcagcc

SEQ ID NO: 260829 - DNA, 120 bp, Artificial Sequence
  ENSG00000125430_23 (sequence is synthesized)
tgacagaggaaggagtctgacacctcagcttgatgcgtctttggaattcctagctcatctcagaattatatcttagagtgataatatgggtggtagccagtggccaaacagcaagaacta

SEQ ID NO: 260830 - DNA, 120 bp, Artificial Sequence
  ENSG00000125430_24 (sequence is synthesized)
agagtggcccttgcaaaaaaaggttgggaaagctgggcccatattgcctgtaaacccttgagcctgatgctcatacagctgtcccttgttttagccaggtcttgacagaagggttaccag

SEQ ID NO: 260831 - DNA, 120 bp, Artificial Sequence
  ENSG00000125430_25 (sequence is synthesized)
cactgtcactgctctacagaatgctctccccgtgcctctctgttgatttataacagttgggtaaccagatagcaatatagtggcaattgagtagccatatagtaatacaggggcagttgg

SEQ ID NO: 260832 - DNA, 120 bp, Artificial Sequence
  ENSG00000125430_26 (sequence is synthesized)
ttaaacatatagcaatatcacataatgatatgtttaatttaacctcagttttttaaaccagaatgcttctaccataaaagaattgtgatttcagttatacttccatcaaggaatatgtgg

SEQ ID NO: 260833 - DNA, 120 bp, Artificial Sequence
  ENSG00000125430_27 (sequence is synthesized)
gaagatatacatattgtcaaaatggttgggatgggatagttacaaaggacacttttgtatgttgtatgggatcacttgcctgatagtataaggaacattgtatgaaaagatgaaaagata

SEQ ID NO: 260834 - DNA, 120 bp, Artificial Sequence
  ENSG00000125430_28 (sequence is synthesized)
cttcatttttagaaactgatcagagatgtcactggtctttaagtgatgtcttgaaaatccagtatgtatttgcccaaaagttttagcctacatctagctagcttacacttagcagccaaa

SEQ ID NO: 260835 - DNA, 120 bp, Artificial Sequence
  ENSG00000125430_29 (sequence is synthesized)
ccatcattgtgtaggttctgttttggaggaagctcatgggggatctgtgtatttcttaggtttctccctgttctccaatgttttatccatttcgtagcttttttactgtctccagaaagt

SEQ ID NO: 260836 - DNA, 120 bp, Artificial Sequence
  ENSG00000125430_30 (sequence is synthesized)
agtgtgggacctgcacttaggggaataccagaatcatagcgtggttctgccttcttgatgagtgattgtgaaaaacacctgcataagggtgctaattggttgtgtattttttcatttatt

SEQ ID NO: 260837 - DNA, 120 bp, Artificial Sequence
  ENSG00000125430_31 (sequence is synthesized)
tgaaatcaaactgagaacacctcttttcggtttacagcataacatggcttgaagtaaaaggcagtatccaagtccttcacctggtcttgccctgtctactttctgatcattctgatggtc

SEQ ID NO: 260838 - DNA, 120 bp, Artificial Sequence
  ENSG00000125430_32 (sequence is synthesized)
tgatgtggctgttgatgtggaactgcagaagagttcagagaagagtatgcaacaaagccataggaaaacacacaggagcttttccctccccttcaggtccccgccctctttccaagctgg

SEQ ID NO: 260839 - DNA, 120 bp, Artificial Sequence
  ENSG00000125430_33 (sequence is synthesized)
acaattttttattaagttgtttattccctgccttaaaactgaaacaggaaattttctggtagaaggagggtcatttagtcacgaacactgaagtgggtcaaaattctattctgggtcaaa

SEQ ID NO: 260840 - DNA, 120 bp, Artificial Sequence
  ENSG00000125430_34 (sequence is synthesized)
tccttgaattcaaacagatgtccataatcagtactgatggaatagagcaagtttttctatgtaagacaaataaatcaaacatcatgtgcatctcctcataagggtctgcaagggtctgat

SEQ ID NO: 260841 - DNA, 120 bp, Artificial Sequence
  ENSG00000125430_35 (sequence is synthesized)
ggtttaaagttcctaacagatctggttgcagcatctgccggagcttgcaccccatcatcggacggtcatcttcctgctgcagaagttaggtaacataagacttagatttcttcctgttct

SEQ ID NO: 260842 - DNA, 120 bp, Artificial Sequence
  ENSG00000125430_36 (sequence is synthesized)
agcaatctgcaagaccaccaggcttaactttttagctgccagaagacaaacccccttttctgtttcggcaatttgtcctggcacgtgttttggacttcctccgatttacacgaaaagctc

SEQ ID NO: 260843 - DNA, 120 bp, Artificial Sequence
  ENSG00000125430_37 (sequence is synthesized)
tgatattcattggagtactttattttttttcctcagttttgtttcttttctcatgtaaaaacaaacaaaaaggtcaacaaaaaaaaattgaggtttttcttgtttctatctagttcatgc

SEQ ID NO: 260844 - DNA, 120 bp, Artificial Sequence
  ENSG00000125430_38 (sequence is synthesized)
tttctttgcggtgtttgaacagtagtctgttaacttagtaggtggtacctggaaaggtattttaagtatagtgactgtttaataaatacttaattggatgatggaggaggagaaattgtt

SEQ ID NO: 260845 - DNA, 120 bp, Artificial Sequence
  ENSG00000125430_39 (sequence is synthesized)
ttcttcccaggattctctttgggggtcattttgtgtgacagatatattttagacatttggagaaacagtttcagatcctgccaggatatttttgtaaaaaaggaaaatggaagattccaa

SEQ ID NO: 260846 - DNA, 120 bp, Artificial Sequence
  ENSG00000125430_40 (sequence is synthesized)
taaactagaaacagtacgtatctaagatgctgacacagaagctaatgtgacttttcagcttatcaagaggatggccaataaaacttaaaggtgtggttagatgttttctcacttttgtga

SEQ ID NO: 260847 - DNA, 120 bp, Artificial Sequence
  ENSG00000125430_41 (sequence is synthesized)
cattaatttatcactgagtctcattcaaccaagtaatctaaaatactgtgcaaattctagcagtatgtcttcgataacttggatgttaggatagccaatatgtacaaaaaattaaatcaa

SEQ ID NO: 260848 - DNA, 120 bp, Artificial Sequence
  ENSG00000125430_42 (sequence is synthesized)
gtattttgtcctatgtataacacaaattaattttacacagagaaagatgtttctaggcaagtgaaattctggtaattcatactatttctttgtatgaacaaataaaatatattttgccaa

SEQ ID NO: 260849 - DNA, 120 bp, Artificial Sequence
  ENSG00000125434_0 (sequence is synthesized)
agtggcaggagtgtggcggcccggcctccgcaggctacccggggttgaagctactgcgagctccggtggctgcctggggacgctcagggacgctcattcctggccagagtcctgacttct

SEQ ID NO: 260850 - DNA, 120 bp, Artificial Sequence
  ENSG00000125434_1 (sequence is synthesized)
ttctcggatcgagatctcgttgctggctcgaggaaatcaccggctcttctcccggatccttttcttctctcacttgctggctttcttcttcctgcctccctggcttccatctcccaaccc

SEQ ID NO: 260851 - DNA, 120 bp, Artificial Sequence
  ENSG00000125434_2 (sequence is synthesized)
cgcgattccctcctctactcccgtgctcccgtcgcccgccatcctgagccatcccacctgcaaccttctgtcttttgcccctccttgacctcagagggtcctgccttaagcttctcacca

SEQ ID NO: 260852 - DNA, 120 bp, Artificial Sequence
  ENSG00000125434_3 (sequence is synthesized)
gaatctcctagatttctatctcttccctgcttgccagctcttgactcccaaattccagctgacgtttgaccacttgacatttgaccctgacacccttgactgcaaatctaaattcttatc

SEQ ID NO: 260853 - DNA, 120 bp, Artificial Sequence
  ENSG00000125434_4 (sequence is synthesized)
ttctgcaacctgtactgctgaaacaggccttccccctgtcttccaaccccgctttctgacacccatttttactttcttactcttgggtcagttcctgctacagctatcccaccatggact

SEQ ID NO: 260854 - DNA, 120 bp, Artificial Sequence
  ENSG00000125434_5 (sequence is synthesized)
tcttgatgagtggcctggcagcctgcggggcctgtgtattcaccaatcccctggaggtggtgaagaccaggatgcagttgcaaggagaactgcaggcccctggcacataccagcggcact

SEQ ID NO: 260855 - DNA, 120 bp, Artificial Sequence
  ENSG00000125434_6 (sequence is synthesized)
accgaaatgtcttccatgccttcatcaccatcggcaaggtggatggccttgctgccctgcagaaaggcctggcccccgccctcttgtaccagttcctgatgaatggcatccgactgggca

SEQ ID NO: 260856 - DNA, 120 bp, Artificial Sequence
  ENSG00000125434_7 (sequence is synthesized)
cctatgggctggctgaggctgggggctacctgcacacagccgaaggcacccacagtcctgcccgcagcgcagcagctggggccatggctggggtcatgggagcctacttggggagcccca

SEQ ID NO: 260857 - DNA, 120 bp, Artificial Sequence
  ENSG00000125434_8 (sequence is synthesized)
ctgcaggcacaggcagcctcagaaattgctgtagggcaccagtataagcatcagggcatgtttcaggcgctaaccgagattggccagaaacatggtctggtggggttatggcgtggggct

SEQ ID NO: 260858 - DNA, 120 bp, Artificial Sequence
  ENSG00000125434_9 (sequence is synthesized)
ctgggcggcctgccccgagttatcgtcggttcctccacccagctgtgcaccttctcatccaccaaggacctcctgagccagtgggagatctttcctccccagagctggaagttggcgctg

SEQ ID NO: 260859 - DNA, 120 bp, Artificial Sequence
  ENSG00000125434_10 (sequence is synthesized)
gtggctgccatgatgagtggcattgcagttgtcttggccatggcaccctttgatgtggcctgcacaaggctctacaaccagcccacagatgcacagggcaagggcctcatgtaccggggg

SEQ ID NO: 260860 - DNA, 120 bp, Artificial Sequence
  ENSG00000125434_11 (sequence is synthesized)
atactggacgctctgctgcagacagctcggaccgagggcatttttggcatgtacaagggtataggtgcctcctacttccgcctcggcccccacaccatcctctccctcttcttctgggac

SEQ ID NO: 260861 - DNA, 120 bp, Artificial Sequence
  ENSG00000125434_12 (sequence is synthesized)
cagctgcgctccctctactacacagacactaaataacagccgctttcccagtctccaccaaatgagcactccttggccacttgtgcctccaccactatgtcctggtgactactgattagg

SEQ ID NO: 260862 - DNA, 120 bp, Artificial Sequence
  ENSG00000125434_13 (sequence is synthesized)
tgacctttcatccatccatgggggacagccaaccccactccccatctgttctcagggttgaatcactacaagagatgagtttcccttctttccttgggtgttgctttaaaccttccctac

SEQ ID NO: 260863 - DNA, 120 bp, Artificial Sequence
  ENSG00000125434_14 (sequence is synthesized)
ccattccctgggtaactcacacccctctctcagggctgaacgagtcatcccaaagtgtatttcctcccactcaccactgccacccttgagtccctcctgctcccatgcacagttttaaac

SEQ ID NO: 260864 - DNA, 120 bp, Artificial Sequence
  ENSG00000125434_15 (sequence is synthesized)
tcctccctccaaaaccaaagggaatcgagagacccaattcccaggcgtctgggacccaggtgtcctgttagattcaaaggcacagagattatattgattataaagcaagtttattctgaa

SEQ ID NO: 260865 - DNA, 120 bp, Artificial Sequence
  ENSG00000125434_16 (sequence is synthesized)
gttaggatcgtgaagggtcagactggtcaccagctgttcaaagtcacccaggctccagggtgcagcccgattctcctgggaacccagtcatgagatacccgcccgttccttcctccttac

SEQ ID NO: 260866 - DNA, 120 bp, Artificial Sequence
  ENSG00000125434_17 (sequence is synthesized)
gggggctgattgaaggtaagcaagagatcagtctggtactggggcagcctcagcaaggcctgatgaagtgtcacgtcctttgctacctaaggggatcagagtcaggatgcttacctggat

SEQ ID NO: 260867 - DNA, 120 bp, Artificial Sequence
  ENSG00000125434_18 (sequence is synthesized)
ctctgcgtccccgctaccgcccttccaggacattacacactctcgggccctcacctgctggttttccttagctatctgctgcttgccagagaggacccaggcttcttgacagcggcccct

SEQ ID NO: 260868 - DNA, 120 bp, Artificial Sequence
  ENSG00000125434_19 (sequence is synthesized)
cagggccaggttctccaaactgagaggctgaacagactccacatggacagccctagccccctgcacgccaccaacatcctcaaagtggtacctggagtagggaagcggggtcaggaaggg

SEQ ID NO: 260869 - DNA, 120 bp, Artificial Sequence
  ENSG00000125434_20 (sequence is synthesized)
catctttaagttgcaggcctggctcccggcccgtgcgtggtctcaccgcccggattaaccgtcggccgcgggccccgcccactggtccgaccccgcccctgccattggccagccgggggc

SEQ ID NO: 260870 - DNA, 120 bp, Artificial Sequence
  ENSG00000125434_21 (sequence is synthesized)
cattccctcaccgcgcagccgcttcgccccgtacgtgggcctgcagctcgagaagttccactatcaggctctggtccgtcacgggatggcagaaaacttcttgattgtccgggaccggtc

SEQ ID NO: 260871 - DNA, 120 bp, Artificial Sequence
  ENSG00000125434_22 (sequence is synthesized)
ggaggtcgctggagtgaggcgaggcagaccctggttgaccccggtctcttcccacaacccacccagtcagccgcccctgggcgccccggccttctcaccttacgtcaatggcccccatgg

SEQ ID NO: 260872 - DNA, 120 bp, Artificial Sequence
  ENSG00000125434_23 (sequence is synthesized)
ggaggatggcggaaaaggcgcccccgaacagcgggcagtctctcgtgggctccatgggtctgaggctgggttatgggcattagaaaggtttaaaagaagtccacattgggtcacgtggca

SEQ ID NO: 260873 - DNA, 120 bp, Artificial Sequence
  ENSG00000125434_24 (sequence is synthesized)
tcggctccctgggtttcgcagctgccaccgccacccgggtctggcttagctcccggatcctttaagatttggctccgccctgcgctctcgttggccaatcggcgccaagaccctgggggc

SEQ ID NO: 260874 - DNA, 120 bp, Artificial Sequence
  ENSG00000125434_25 (sequence is synthesized)
gggggtcagcggctttgctccggaagccgcgctcttaggagtgcgcctggcgggacggtggggtctgccttggggttggacttagggttagggtctatgtcgcccccggtggtcacgagc

SEQ ID NO: 260875 - DNA, 120 bp, Artificial Sequence
  ENSG00000125434_26 (sequence is synthesized)
atgctcccgccagcctcctcttgattgattgattgattgattgattgacaggtctcgctgtgtcgcccaggctgtaatgcagtggcgcgatcaccgctcactgcagtctccacctccagg

SEQ ID NO: 260876 - DNA, 120 bp, Artificial Sequence
  ENSG00000125434_27 (sequence is synthesized)
actcaagtgatactcctgcctcagcctcttgagtggctcctgctcccgccaccacgcccggctaaatttttaattacttgtagaaatggggcggggtggggagtgtctcccaatcttgcc

SEQ ID NO: 260877 - DNA, 120 bp, Artificial Sequence
  ENSG00000125434_28 (sequence is synthesized)
caggctggcctcaaactcctggactcaagcgatcctcccgcctcggctccctaagtgctggaattacaggcgagagccacagcgcctggcctcctcgtccttttcaagtggtcacacctt

SEQ ID NO: 260878 - DNA, 120 bp, Artificial Sequence
  ENSG00000125434_29 (sequence is synthesized)
ccaagaaggtcgcctgagaccctcctgaggggcaggtgctcgtcaaaggggcccacgtctaggtagggtctcttgagtcaggaaagcatagtttcacggtgttctgggcctctgaaagaa

SEQ ID NO: 260879 - DNA, 120 bp, Artificial Sequence
  ENSG00000125434_30 (sequence is synthesized)
gaatgggctgccacccagaccgctaattcatagatctgctgctgggaattaggggaacaatgcgtccaggttaggattcaggtctcacatcttcctgaaagtgagagccaacctgggtat

SEQ ID NO: 260880 - DNA, 120 bp, Artificial Sequence
  ENSG00000125434_31 (sequence is synthesized)
tagaaatctaattcctctcaaatatttgccttgggaatgctcccgggcaggtgcaaccccacccccagctccacacacctggacagaagcacagattaaaccctcttttgtttgtctttt

SEQ ID NO: 260881 - DNA, 120 bp, Artificial Sequence
  ENSG00000125434_32 (sequence is synthesized)
cgagaagttccactatcaggctctggtccgtcacgggatggcagaaaacttcttgattgtccgggaccggtcggaggtcgctggagtgaggtctcgctgtgtcgcccaggctgtaatgca

SEQ ID NO: 260882 - DNA, 120 bp, Artificial Sequence
  ENSG00000125445_0 (sequence is synthesized)
ggggtcctcgtggccagccaagatggctgcccccgcagtgaaggttgcccgaggatggtcgggcctggcgttgggcgtgcggcgggctgtcttgcagcttccagggctaactcaggtgag

SEQ ID NO: 260883 - DNA, 120 bp, Artificial Sequence
  ENSG00000125445_1 (sequence is synthesized)
atggagccgctatagtcctgaattcaaggatcccttgattgacaaggaatattatcgcaagccagtggaggagctaactgaggaggagaaatatgttcgggagctcaagaagactcagct

SEQ ID NO: 260884 - DNA, 120 bp, Artificial Sequence
  ENSG00000125445_2 (sequence is synthesized)
catcaaagctgctccagcagggaaaacaagttctgtgtttgaagacccagtcatcagtaaattcaccaacatgatgatgataggaggaaacaaagtactggccagatccctcatgattca

SEQ ID NO: 260885 - DNA, 120 bp, Artificial Sequence
  ENSG00000125445_3 (sequence is synthesized)
gactctggaagctgtgaaaaggaagcagtttgagaagtaccatgccgcttctgcagaggaacaggcaaccatcgaacgcaacccctacaccatcttccatcaagcactgaaaaactgtga

SEQ ID NO: 260886 - DNA, 120 bp, Artificial Sequence
  ENSG00000125445_4 (sequence is synthesized)
gcctatgattgggctggtacccatcctcaagggaggccgtttctaccaggtccctgtacccctacccgaccggcgtcgccgcttcctagccatgaagtggatgatcactgagtgccggga

SEQ ID NO: 260887 - DNA, 120 bp, Artificial Sequence
  ENSG00000125445_5 (sequence is synthesized)
aagcaccagcggacactgatgccggagaagctgtcacacaagctgctggaggctttccataaccagggccccgtgatcaagaggaagcatgacttgcacaagatggcagaggccaaccgt

SEQ ID NO: 260888 - DNA, 120 bp, Artificial Sequence
  ENSG00000125445_6 (sequence is synthesized)
gccctggcccactaccgctggtggtagagtctccaggaggagcccagggccctctgccgcaagaaacagtgtgagctactgccacgctgaaaactacctgtgggttaaggatgtagttcc

SEQ ID NO: 260889 - DNA, 120 bp, Artificial Sequence
  ENSG00000125445_7 (sequence is synthesized)
tttgtaagggtgggcaggcctcgtaagaaagatgtagcagcatattcactatccgttaatccttctttctttgaggctggaacttgctctctctgcccctatttccttgtaaagagggag

SEQ ID NO: 260890 - DNA, 120 bp, Artificial Sequence
  ENSG00000125445_8 (sequence is synthesized)
cacattgacttgggaatttcctccaggaaactcagggctgttttctcttcccttaggttggggcggacctttggatatataaaggaagcagttttagtatcagaaaagatttattagaaa

SEQ ID NO: 260891 - DNA, 120 bp, Artificial Sequence
  ENSG00000125445_9 (sequence is synthesized)
attctcacgctgaactggtgtagcatgtggtgcagcattcagtgaaactggctggaggaaataggcttgtttccagagttgtccttatacaaaatgtataaaaagcagtttctggtgtga

SEQ ID NO: 260892 - DNA, 120 bp, Artificial Sequence
  ENSG00000125445_10 (sequence is synthesized)
ggagtgagtgccgtcaccgagggccgcgccagactgcgacggatacagggagggcaagggtttccttttggcgctcccctttggaccccggagtgaaaaactctaacgtccagatcagtg

SEQ ID NO: 260893 - DNA, 120 bp, Artificial Sequence
  ENSG00000125445_11 (sequence is synthesized)
gccgtttctaccaggtgaatgaatggccagggcaagaaagcagggccctccacatgtgaaacaagataggtggtgcttgggagttgggtcaagattgatagctttctagctggtgcagtg

SEQ ID NO: 260894 - DNA, 120 bp, Artificial Sequence
  ENSG00000125445_12 (sequence is synthesized)
tcagcactttgggagcctaatgcaggatagcttgagctcaggagttaagagacagcagggcaacatagggagatcccgtctctacaaaaaaaacaaaaaaattagccaggtgtggtggtg

SEQ ID NO: 260895 - DNA, 120 bp, Artificial Sequence
  ENSG00000125445_13 (sequence is synthesized)
tgagtccaggaggtcaaggctgcagtgagttatgattacgcccctgcattccagcctgggcaagagagagaaaccttgtctcagaaaaaaaaaaaaaaaaaacggctgggcacggtggct

SEQ ID NO: 260896 - DNA, 75 bp, Artificial Sequence
  ENSG00000125445_14 (sequence is synthesized)
gaggtggggagttcgagatcaacaaggagaaaccctgtttctactaacaatacaaaattagccaggtgtggtggc

SEQ ID NO: 260897 - DNA, 120 bp, Artificial Sequence
  ENSG00000125445_15 (sequence is synthesized)
catctcaaaaaaaaaaaaaaaaaaagaattgagactgttacggtccactcatctgagtcctgtagcgtaaaaattataggcagaaggtggaagagagtgaagaagtatctaagtgacatc

SEQ ID NO: 260898 - DNA, 120 bp, Artificial Sequence
  ENSG00000125445_16 (sequence is synthesized)
aggtggaagagagtgaagaagtatctaagtgacatctgggagcccacctcccttcgccttcttctgtcaagcatcctgtgtgtcctaacctgtaaaattctcatggcgagggactattca

SEQ ID NO: 260899 - DNA, 120 bp, Artificial Sequence
  ENSG00000125445_17 (sequence is synthesized)
tatcctgtctttgtatgccagtgtttggcatagtgcttgaccgataactgatgcttcatcagtgtttgctgaacagtactaggtatctctttcatagcatttaattatattttattgtcc

SEQ ID NO: 260900 - DNA, 120 bp, Artificial Sequence
  ENSG00000125445_18 (sequence is synthesized)
gtttcggaagtaaacacacaattaaaaaaaaaggaacaaataaaaaataaaacaactgccattccccacctcaccccccaccccctccatgccacaaatctcaatccactctttctgtcc

SEQ ID NO: 260901 - DNA, 120 bp, Artificial Sequence
  ENSG00000125445_19 (sequence is synthesized)
tagtctagcaaagggggaggcacttaaaaactttgttttggatgtgctgtgagaggagctgcattgccagcgcagaaccagaggatgggagtaaagggcaaggtactagcttggctgggt

SEQ ID NO: 260902 - DNA, 120 bp, Artificial Sequence
  ENSG00000125445_20 (sequence is synthesized)
cgcagtgaaggttgcccgaggatggtcgggcctggcgttgggcgtgcggcgggctgtcttgcagcttccagggtgagagggtggcgagcagcggcgggggggcgctgcgaggaaggaagg

SEQ ID NO: 260903 - DNA, 120 bp, Artificial Sequence
  ENSG00000125445_21 (sequence is synthesized)
gggccacaggcaggccgcgtgggcccctagagagagcattgccctgggggccggagtatctggattcaagcttctaagttagctgcgtgaccctgcgccaatccgaaggtttagtgacta

SEQ ID NO: 260904 - DNA, 120 bp, Artificial Sequence
  ENSG00000125445_22 (sequence is synthesized)
cctctcgcctaaggagtctggctgatctagggttctaacgcggagctgaaagtgcggttcagctaaagagctcagatctgggatcgcctgtgaattgggatgggtgtgtaggcgccaagc

SEQ ID NO: 260905 - DNA, 120 bp, Artificial Sequence
  ENSG00000125445_23 (sequence is synthesized)
ccatccttaccgttagcacttgaccaggaggagactttacccgcctgcttggggaatgtcctcctacttgggacaagggcctgaattgttgtggctcaggtttagctcgcggtctccgcg

SEQ ID NO: 260906 - DNA, 120 bp, Artificial Sequence
  ENSG00000125445_24 (sequence is synthesized)
ccgctccccctcgtcggcgcgttggcagtcatgcctattgttaagtcaaacctactcgcttgtggagtcagcttttgcctgcctcctcctttccccccctcccaggctaactcaggtgag

SEQ ID NO: 260907 - DNA, 120 bp, Artificial Sequence
  ENSG00000125447_0 (sequence is synthesized)
gcgtttctctccactgatctggacgttagagtttttcactccggggtccaaaggggagcgccaaaaggaaacccttgccctccctgtatccgtcgcagtctggcgcggccctcggtgacg

SEQ ID NO: 260908 - DNA, 120 bp, Artificial Sequence
  ENSG00000125447_1 (sequence is synthesized)
gcactcactcctctcaggaccccatgcaggccccgccccgtctcagctcgtgcagactctcgcgagttttgaagccgcggggccgggcggctgcaatatggcggaggcggaaggggaaag

SEQ ID NO: 260909 - DNA, 120 bp, Artificial Sequence
  ENSG00000125447_2 (sequence is synthesized)
cctggagtcctggctcaataaagccaccaatccttccaaccgccaggaggactgggaatacataattggcttctgtgatcagatcaacaaggagctggaagggccacagatcgccgtccg

SEQ ID NO: 260910 - DNA, 120 bp, Artificial Sequence
  ENSG00000125447_3 (sequence is synthesized)
actgctggcccacaagatccagtccccacaggaatgggaggcgctccaggccctgacggtgctggaggcatgcatgaagaactgtgggaggagatttcataacgaagtggggaagttccg

SEQ ID NO: 260911 - DNA, 120 bp, Artificial Sequence
  ENSG00000125447_4 (sequence is synthesized)
ctttttgaatgagttaatcaaagtcgtctctccaaagtacctgggggacagggtgtctgagaaagtgaagaccaaggttattgagctgctgtacagctggaccatggccctgccagaaga

SEQ ID NO: 260912 - DNA, 120 bp, Artificial Sequence
  ENSG00000125447_5 (sequence is synthesized)
agcaaagatcaaagacgcctaccacatgctgaagagacagggcatagtgcagtctgacccaccaattcctgtggataggacgctgatcccctctccaccacctcgtcccaaaaaccctgt

SEQ ID NO: 260913 - DNA, 120 bp, Artificial Sequence
  ENSG00000125447_6 (sequence is synthesized)
ttttgatgatgaggagaagtccaagcttttagccaagctgctgaaaagcaaaaacccagatgacctgcaggaggccaacaagctcatcaagtccatggtgaaggaagacgaggcacggat

SEQ ID NO: 260914 - DNA, 120 bp, Artificial Sequence
  ENSG00000125447_7 (sequence is synthesized)
ccagaaggtgaccaagcgtctgcacacgttagaggaagttaacaacaacgtgagactgctcagtgagatgctgcttcattacagccaggaggactcttcggacggggacagagagctgat

SEQ ID NO: 260915 - DNA, 120 bp, Artificial Sequence
  ENSG00000125447_8 (sequence is synthesized)
gaaggagctgtttgatcagtgtgagaacaagaggcggactttatttaaactcgccagtgagactgaggacaatgataacagtttgggggacatcctgcaagccagtgacaacctctcccg

SEQ ID NO: 260916 - DNA, 120 bp, Artificial Sequence
  ENSG00000125447_9 (sequence is synthesized)
ggtcatcaactcttacaaaacaattattgaagggcaggtcatcaatggcgaggtggctaccttaaccctgcctgactcggaaggaaacagtcagtgcagtaaccaaggcacgctcatcga

SEQ ID NO: 260917 - DNA, 120 bp, Artificial Sequence
  ENSG00000125447_10 (sequence is synthesized)
ccttgcggagctggacacgaccaacagtttgtcctccgtgttggccccagcacctactccaccctcctcaggcatcccaatcctccctccaccaccccaggcctcaggacctccacggag

SEQ ID NO: 260918 - DNA, 120 bp, Artificial Sequence
  ENSG00000125447_11 (sequence is synthesized)
ccgctcctctagccaggccgaggccaccctggggcccagcagcacaagcaacgccctctcctggctggacgaggagctactctgcttgggcctcgccgacccagcccctaatgttcctcc

SEQ ID NO: 260919 - DNA, 120 bp, Artificial Sequence
  ENSG00000125447_12 (sequence is synthesized)
caaagagtcagctgggaacagccagtggcacctgctccagagggaacagtccgacctggacttcttcagccccaggccggggaccgctgcctgtggcgcctccgatgctcctctgctcca

SEQ ID NO: 260920 - DNA, 120 bp, Artificial Sequence
  ENSG00000125447_13 (sequence is synthesized)
gccctcagccccctcctcaagcagctcccaagctccactgccgcctcccttcccagctcctgtggtcccagccagtgttcctgcccccagtgcgggctcctccttgttttctactggagt

SEQ ID NO: 260921 - DNA, 120 bp, Artificial Sequence
  ENSG00000125447_14 (sequence is synthesized)
ggccccagccttggccccaaaagttgagcccgcagtccctgggcaccatggcttggcgttgggcaacagcgcgctgcaccacctggatgccctcgatcagcttctagaagaggccaaagt

SEQ ID NO: 260922 - DNA, 120 bp, Artificial Sequence
  ENSG00000125447_15 (sequence is synthesized)
gacctcgggcttggtgaaacccactacctcccctctcatccccaccaccaccccagccaggcccctcctgcccttctccacggggcccggcagcccgctcttccagccactgagtttcca

SEQ ID NO: 260923 - DNA, 120 bp, Artificial Sequence
  ENSG00000125447_16 (sequence is synthesized)
aacggcttccgcatcctcttccactttgccaaggagtgtcccccaggacgacctgacgtgctggtggtggtggtgtccatgctgaacacggctcccttacctgtcaagagcatcgtgctg

SEQ ID NO: 260924 - DNA, 120 bp, Artificial Sequence
  ENSG00000125447_17 (sequence is synthesized)
caggctgcagtgcccaagtcaatgaaagtgaagttgcagccaccttctgggacagaactctctccatttagccccatccagccacctgcagccatcacccaggtcatgttgctggccaat

SEQ ID NO: 260925 - DNA, 120 bp, Artificial Sequence
  ENSG00000125447_18 (sequence is synthesized)
ccactgaaggagaaggtgcggcttcggtataagctgaccttcgccctgggggagcagctgagcacagaggtgggcgaggtggaccagttccctcctgtggaacagtgggggaacctatga

SEQ ID NO: 260926 - DNA, 120 bp, Artificial Sequence
  ENSG00000125447_19 (sequence is synthesized)
ccccagaggacgctgtgatctccaccttgaagccaggcaggctgccctgagacgaggagggctctggtcccgtcactctccatgccctgacaacagtgcttgtagctttgatgtggaaca

SEQ ID NO: 260927 - DNA, 120 bp, Artificial Sequence
  ENSG00000125447_20 (sequence is synthesized)
ggggccctgggcatttctgctgagaaccaaactgctgctgtgataacctctcctttggcccctaaaaggacctgtttttatctacctgtgtgacttgaagtggccatatgctgtcagggg

SEQ ID NO: 260928 - DNA, 120 bp, Artificial Sequence
  ENSG00000125447_21 (sequence is synthesized)
tgcggagtggcccctgacttcactgctgtcccgggaacatggacccccaggcttggcgtaggtgtttgcttccttctactggcattcactgaagccactggggtggggggtggggggtgg

SEQ ID NO: 260929 - DNA, 120 bp, Artificial Sequence
  ENSG00000125447_22 (sequence is synthesized)
gagtctctaaagagagactgtcatgggtcattccccacaagagccacatcctcacacctgacagatgcacggcccaaggggctgcagccctgttgcaattccatgcttcccccgccaacc

SEQ ID NO: 260930 - DNA, 120 bp, Artificial Sequence
  ENSG00000125447_23 (sequence is synthesized)
agctcctgctgccatccccagggaggtggcccaggaaggtgcctggcccagaataaggaactggcatactgcaaagtccccagccctgcctctggtggacagcatcgtcctggaatggcc

SEQ ID NO: 260931 - DNA, 120 bp, Artificial Sequence
  ENSG00000125447_24 (sequence is synthesized)
acggagtgatgagttgtgtgcttgtccctggcagtggcaggctgtgtcctatggacatcttggcaggacatggaatttggcctcatgacaggcccaactagggataggaaggaaaatgaa

SEQ ID NO: 260932 - DNA, 120 bp, Artificial Sequence
  ENSG00000125447_25 (sequence is synthesized)
gagagccagtatttccccttctccagaagcaggtactcagctttctgggaaaagcgtgcctccagccgtggggacaggccatcctactgactacctcttgcttggcatgaaataaactgc

SEQ ID NO: 260933 - DNA, 120 bp, Artificial Sequence
  ENSG00000125447_26 (sequence is synthesized)
tatcctccccttggaatctaccgccactctacatcctactgctttggcctccctctcctctcaccagatggcatgtggtgtggcacctgtggctggacacaggaggcctcaggatcacaa

SEQ ID NO: 260934 - DNA, 120 bp, Artificial Sequence
  ENSG00000125447_27 (sequence is synthesized)
atgttacactagacatatgtcctaatgtgctgcccagaaacctcaactgttccccagctactgaggggcactgtcagcgagatgttgggtctggaggtgatgagatcgggccacacttga

SEQ ID NO: 260935 - DNA, 120 bp, Artificial Sequence
  ENSG00000125447_28 (sequence is synthesized)
gctgagtcaccagaccctattgcttcaacagtgcttggcccccgccagcttgtcccagccactctagctgctggatgtgatcctgggacatgtactccaagcctccgtcacaaaaaaaaa

SEQ ID NO: 260936 - DNA, 120 bp, Artificial Sequence
  ENSG00000125447_29 (sequence is synthesized)
atcaccagctgccatagacacgggggaagcttgcggagcccaggtgaacaagctcagcaatcggacatctctggggaaaggaaggtggcacagaccatgttccctggttcctccctgccc

SEQ ID NO: 260937 - DNA, 120 bp, Artificial Sequence
  ENSG00000125447_30 (sequence is synthesized)
cttgccaggcttccttattccttactatgggaagaggtcatatcccttccctgcccctcgctgtctttagcaagcaggtttcactgcttcattagaagaggacaagtcaaaagtgaatca

SEQ ID NO: 260938 - DNA, 120 bp, Artificial Sequence
  ENSG00000125447_31 (sequence is synthesized)
tttttcactacttaaggaataaatccaagagctttccagagactggctgctgcagccctgggaatgtctgtggaattactatgtggaaatggaactttgtgttatgctctagacattaca

SEQ ID NO: 260939 - DNA, 120 bp, Artificial Sequence
  ENSG00000125447_32 (sequence is synthesized)
gttatttgagtgttactcgttactgttgaggtcagtgcttcgtggcaaatggctgtactggatatcccagctctgctgcccttgttttgctgcatgttaaataaaaccattttcactgta

SEQ ID NO: 260940 - DNA, 120 bp, Artificial Sequence
  ENSG00000125447_33 (sequence is synthesized)
atgctgaagagacagggtcttgatcacagggacgtggcccttggtgtatgaggaggggtgacaaggcaaccacagcctgagtgcacgtgctgccatgtcccctttcaggcatagtgcagt

SEQ ID NO: 260941 - DNA, 120 bp, Artificial Sequence
  ENSG00000125447_34 (sequence is synthesized)
tttgaagccgcggggccgggcggctgcaatatggcggaggcggaaggggaaagcctggagtcctggctcaccacaacagaaacactgccggggaggccgagccccgacctgggaagcagg

SEQ ID NO: 260942 - DNA, 120 bp, Artificial Sequence
  ENSG00000125447_35 (sequence is synthesized)
gtgatacactgggtgccacgggccttccctctgcctggcagctgtcgctactcagatccctgcagccctgttgccagtgaaggagctggagtctctgttatgatgtgttcatccagctga

SEQ ID NO: 260943 - DNA, 120 bp, Artificial Sequence
  ENSG00000125447_36 (sequence is synthesized)
aattcaggcccttgtcccaagtaggaggacattccccaagcaggcgggtaaagtctcctcctggtcaagtgctaacgccacaacagaaacactgccggggaggccgagccccgacctggg

SEQ ID NO: 260944 - DNA, 120 bp, Artificial Sequence
  ENSG00000125447_37 (sequence is synthesized)
ggacgtcaggcccaccacctcccagctggaagtgttttgactgtaggattgacacatccctttgctgccttaggttaagtgtctgagcatggttgggggttgcggggaaaagggaccatt

SEQ ID NO: 260945 - DNA, 120 bp, Artificial Sequence
  ENSG00000125447_38 (sequence is synthesized)
cctctagcacagagagggtagcagaatagagggcgtcctgccaaggggccgcctgggctggatctcacttgctgccctctgtcacaggagaaggtgcggcttcggtataagctgaccttc

SEQ ID NO: 260946 - DNA, 120 bp, Artificial Sequence
  ENSG00000125447_39 (sequence is synthesized)
agccagcatttgctgagcacgtgccttgtcagagacacgggctgtgcacttggcagtgtattcatgaccttactcatctgcacagcagccacgtcagtagagggtggcgtccccatttgc

SEQ ID NO: 260947 - DNA, 120 bp, Artificial Sequence
  ENSG00000125447_40 (sequence is synthesized)
ctcctgggatcagctgacttgtccagggtgtaagggccagatggaaacctgagtctgactccagagaccacactctcggtgctcacccctgctctctccctttccttactaccttgggga

SEQ ID NO: 260948 - DNA, 120 bp, Artificial Sequence
  ENSG00000125447_41 (sequence is synthesized)
catcaagacagagaggcttccttgtaaccctgatgcccatgtggtgcaggccatggttgggtggatattttgagttctgaggaacatgccagcctggaaggcaggaggggactgacttcc

SEQ ID NO: 260949 - DNA, 120 bp, Artificial Sequence
  ENSG00000125447_42 (sequence is synthesized)
cctgacccatcctggtgactgctacctagacaaacatcctgggtgatgtggtgtggtggtggtggctggtggcaagaagacgtgcgctgtgatcccagctttgctggtaattgaccgtgg

SEQ ID NO: 260950 - DNA, 120 bp, Artificial Sequence
  ENSG00000125447_43 (sequence is synthesized)
gggtgtgtggaattaggagccctgagcggggccccagtgtgactgttggggtgggcaaagaaccctgagttggaggtactcagtgaagttcagcgaccctgagggccccagggccatcct

SEQ ID NO: 260951 - DNA, 120 bp, Artificial Sequence
  ENSG00000125447_44 (sequence is synthesized)
cccggtggactctgcctcctgccctgcaccccgccccacaggccccccgcttctgcatcatggactggagcgctccattcccctctggaggctgcctgcagaacagcttctcccggcgcc

SEQ ID NO: 260952 - DNA, 120 bp, Artificial Sequence
  ENSG00000125447_45 (sequence is synthesized)
ttcacccattgatgtcacttgtcacctgacccctcctcaggcaaggcggggctagggctgcctagctcagagcctcttctcatcctgttttcttctctattgtcaggcctcgccgaccca

SEQ ID NO: 260953 - DNA, 120 bp, Artificial Sequence
  ENSG00000125447_46 (sequence is synthesized)
gcccctaatgttcctcccaaagagtcagctgggaacagccagtggcacctgctccaggtaggggcacaggatcggtgacagcactactgtgccaaggacctccactttccagcgtcatgt

SEQ ID NO: 260954 - DNA, 120 bp, Artificial Sequence
  ENSG00000125447_47 (sequence is synthesized)
ctcctgggctgcagttagctgtccttccctccagagcgtgccagctgcagcggggaacaatgagtgcctccggggctgtcttccgtgcagtccttggagggctgcgccccgttccagcgg

SEQ ID NO: 260955 - DNA, 120 bp, Artificial Sequence
  ENSG00000125447_48 (sequence is synthesized)
tgagtgaaagagcgacggtcagggataagccaggcatttggatatgtgggtgggaactgtcacaacaggagtgagaagtctctctttcctgctccaggggacatcctgcaagccagtgac

SEQ ID NO: 260956 - DNA, 120 bp, Artificial Sequence
  ENSG00000125447_49 (sequence is synthesized)
agagctaactttgaaggggtgggggtgccttgtagtcccatcagtcaggctggaaggcaaggggtgggcctgggtaagagcatggtcaggggccttgggtgagagtcctgcagctctggc

SEQ ID NO: 260957 - DNA, 120 bp, Artificial Sequence
  ENSG00000125447_50 (sequence is synthesized)
gtgttggaggattgaggtgggtggggcggtggggcctatagccacggagctgtaggacatgcgacagggatggatccaggcactctttgcagggggtcccttaaagccaggcaggcctcc

SEQ ID NO: 260958 - DNA, 120 bp, Artificial Sequence
  ENSG00000125447_51 (sequence is synthesized)
ctgcctgcattctcagtcttaagctcctcactgagcgcctctcccagattccgttaggaagcactggactcatcatgaccacggagtagcccttttctcctcaccgccggggctctgttg

SEQ ID NO: 260959 - DNA, 120 bp, Artificial Sequence
  ENSG00000125449_0 (sequence is synthesized)
ggaaccgagcccaggagccggggacggtgcgccagtgccccctccgcgagccccaaccagtagacggttccctgtctcccgcgccccaatttcgattttcaaacgcaactcctacaggat

SEQ ID NO: 260960 - DNA, 120 bp, Artificial Sequence
  ENSG00000125449_1 (sequence is synthesized)
tctgagaccccgtcccatctcccatatcccatttccagctgcaaattactgcagaatctgaacccaggaaagaaacccatttgccgaccccctcttccctctccagacaggtggagagcg

SEQ ID NO: 260961 - DNA, 120 bp, Artificial Sequence
  ENSG00000125449_2 (sequence is synthesized)
ggtgagggtctcgctcggctttccccctgcacctttcccaccctcccgcccgtccctgggggtcctccgtcaccgcggccatggcccagaagccgaaggtggacccccacgtcgggcggc

SEQ ID NO: 260962 - DNA, 120 bp, Artificial Sequence
  ENSG00000125449_3 (sequence is synthesized)
tgggatacctgcaggcgctggtcacggaattccaggagacccaaagccaagacgccaaggagcaagtcctcgccaacctcgccaacttcgcttatgaccccagcaactacgagtatctgc

SEQ ID NO: 260963 - DNA, 120 bp, Artificial Sequence
  ENSG00000125449_4 (sequence is synthesized)
ggcagctgcaggtcctggatttatttctcgattcgctgtcggaggagaatgagaccctggtggagtttgctattggaggcctgtgcaacctgtgcccagacagggccaacaaggagcaca

SEQ ID NO: 260964 - DNA, 120 bp, Artificial Sequence
  ENSG00000125449_5 (sequence is synthesized)
tcctgcacgcaggaggtgtcccactcatcatcaactgcctatccagccccaatgaggagacggtgctgtctgccatcaccacgctcatgcacctgagcccgccgggccgcagctttctcc

SEQ ID NO: 260965 - DNA, 120 bp, Artificial Sequence
  ENSG00000125449_6 (sequence is synthesized)
cagagctgaccgccacgcccgtggtgcagtgcatgcttcgcttctccctctcggccagcgccaggctccggaacctggcacagatcttcctggaggacttctgctccccccgccaggtgg

SEQ ID NO: 260966 - DNA, 120 bp, Artificial Sequence
  ENSG00000125449_7 (sequence is synthesized)
ccgaggcccgcagccggcaggcgcactctgccctgggtatcccactgccgaggagcgtggccccacggcagcgctgatccatggagactgcgagaccgtggcacccctactgctggagac

SEQ ID NO: 260967 - DNA, 120 bp, Artificial Sequence
  ENSG00000125449_8 (sequence is synthesized)
aacgccactgggagtgaggaagccagactccagagacacggagaagatcaaactggagctgcgttcataggctggcactctcaatcctacatcaggtgccaccaccaccagactcaggcc

SEQ ID NO: 260968 - DNA, 120 bp, Artificial Sequence
  ENSG00000125449_9 (sequence is synthesized)
ctggtgtaagaagcggccaagtgcctggacccagaggctttgcaggacagtgttctcaggagctgggcctgaggcttaggagagctgccttcgctgcaggaaatcagggattatccctta

SEQ ID NO: 260969 - DNA, 120 bp, Artificial Sequence
  ENSG00000125449_10 (sequence is synthesized)
acagaagtgtctggagtagttttcaggtataggaatgagatgcctcgtggtgaaaggatctcaccctgggaagatgtggtgccccctccagggctctggaggatggatgcctcccccagg

SEQ ID NO: 260970 - DNA, 120 bp, Artificial Sequence
  ENSG00000125449_11 (sequence is synthesized)
ggctctccaagctgggcatttgggcctggtggatgccaacctggataacctgtggcccagcattgactgtccacccagccttgctgttaggcaccatgactccaagatgaagatgtggtc

SEQ ID NO: 260971 - DNA, 120 bp, Artificial Sequence
  ENSG00000125449_12 (sequence is synthesized)
cctgcccttgagtgacagcccagggacttaatgtggccatcgggcatcaagcacaaggccatgcaggtgatgatacgtcggaatagaggcaccagccctggtaactgcatcttctcccct

SEQ ID NO: 260972 - DNA, 120 bp, Artificial Sequence
  ENSG00000125449_13 (sequence is synthesized)
tgccaccccatggccccggctgaaagcttcggccctcctctgctgtcactcaatgatggggagccctaccccagaagtgtatcccacgagggcatcagggacgcagtgagtgttgctcaa

SEQ ID NO: 260973 - DNA, 120 bp, Artificial Sequence
  ENSG00000125449_14 (sequence is synthesized)
gggagtcaggaagagacggcaacgtaaaggatgtggctccatgtccatggtgccccctggtcaacataaggagcgtgggatccgatggaaaggtggagctcagggaaaatgggggtcctt

SEQ ID NO: 260974 - DNA, 120 bp, Artificial Sequence
  ENSG00000125449_15 (sequence is synthesized)
gcctctcgtgtaccccctcaaggctgaccccttagatggcccaggaatggcaggtgctacaaaaatggtacccacgtgggcatggaaatggggcagattaggggaccactggactcagag

SEQ ID NO: 260975 - DNA, 120 bp, Artificial Sequence
  ENSG00000125449_16 (sequence is synthesized)
gggagggaagggctcatcagcacccgctcagggagcctgtccctttatgttcccaaataaagggtcctagaagactagaaagccaaggtcttttattaaaggtcccgactggttttccca

SEQ ID NO: 260976 - DNA, 120 bp, Artificial Sequence
  ENSG00000125449_17 (sequence is synthesized)
cagggggcgatagagctcctccaaatcaagctgctgcccctggagaaaaattggcggaagtcacagagcagtccccaccaaaagtgtttaccaagtggagtctttcctgctggcgtttcc

SEQ ID NO: 260977 - DNA, 120 bp, Artificial Sequence
  ENSG00000125449_18 (sequence is synthesized)
tcagggtcaggaagcaactttcccaggacaggggcaccctgaggtccgggtccactgagctatgggggcggcgtgggcctgggctgggttcttgccatcctgggcagcttcccggcgtgg

SEQ ID NO: 260978 - DNA, 120 bp, Artificial Sequence
  ENSG00000125449_19 (sequence is synthesized)
gtgactgagcccgggtcctggagtccgcggtcccagcgtctccacttctcagctgattcctagaagctgagtcccgtcccttctccgagcgtggtttcctctcccgccttgcctgcgtcg

SEQ ID NO: 260979 - DNA, 120 bp, Artificial Sequence
  ENSG00000125449_20 (sequence is synthesized)
caagcagttgtgggagcagaagtgtgtctgtgcatctgtgtctctgtgcaggtattttagaattgttaggatcattatcaccagctttacttttcccaaccatttttttcctcctttttt

SEQ ID NO: 260980 - DNA, 120 bp, Artificial Sequence
  ENSG00000125449_21 (sequence is synthesized)
tctcttccttcttctgccacagcaagacccccccgccccaagcacagtagctttctcagcgtcgaatccctccgtgggaccatgttgcaatgaaatttcaacatgcaaatgaaatttctc

SEQ ID NO: 260981 - DNA, 120 bp, Artificial Sequence
  ENSG00000125449_22 (sequence is synthesized)
tggtggagtttgctattgcaagacccccccgccccaagcacagtagctttctcagcgtcgaatccctccgtgggaccatgttgcaatgaaatttcaacatgcaaatgaaatttctcgaaa

SEQ ID NO: 260982 - DNA, 120 bp, Artificial Sequence
  ENSG00000125450_0 (sequence is synthesized)
gtctcgcagccagctctgagcgggaggcctgagcgggaagcattggcgtccgagcgacttctaggagcctggggttcggcgctatggaggagctcgatggcgagccaacagtcactttga

SEQ ID NO: 260983 - DNA, 120 bp, Artificial Sequence
  ENSG00000125450_1 (sequence is synthesized)
ttccaggcgtgaattccaagaagaaccaaatgtattttgactggggtccaggggagatgctggtatgtgaaacctccttcaacaaaaaagaaaaatcagagatggtgccaagttgcccct

SEQ ID NO: 260984 - DNA, 120 bp, Artificial Sequence
  ENSG00000125450_2 (sequence is synthesized)
ttatctatatcatccgtaaggatgtagatgtttactctcaaatcttgagaaaactcttcaatgaatcccatggaatctttctgggcctccagagaattgacgaagagttgactggaaaat

SEQ ID NO: 260985 - DNA, 120 bp, Artificial Sequence
  ENSG00000125450_3 (sequence is synthesized)
ccagaaaatctcaattggttcgagtgagtaaaaactaccgatcagtcatcagagcatgtatggaggaaatgcaccaggttgcaattgctgctaaagatccagccaatggccgccagttca

SEQ ID NO: 260986 - DNA, 120 bp, Artificial Sequence
  ENSG00000125450_4 (sequence is synthesized)
gcagccaggtctccattttgtcagcaatggagctcatctggaacctgtgtgagattctttttattgaagtggccccagctggccctctcctcctccatctccttgactgggtccggctcc

SEQ ID NO: 260987 - DNA, 120 bp, Artificial Sequence
  ENSG00000125450_5 (sequence is synthesized)
atgtgtgcgaggtggacagtttgtcggcagatgttctgggcagtgagaatccaagcaaacatgacagcttctggaacttggtgaccatcttggtgctgcagggccggctggatgaggccc

SEQ ID NO: 260988 - DNA, 120 bp, Artificial Sequence
  ENSG00000125450_6 (sequence is synthesized)
gacagatgctctccaaggaagccgatgccagccccgcctctgcaggcatatgccgaatcatgggggacctgatgaggacaatgcccattcttagtcccgggaacacccagacactgacag

SEQ ID NO: 260989 - DNA, 120 bp, Artificial Sequence
  ENSG00000125450_7 (sequence is synthesized)
agctggagctgaagtggcagcactggcacgaggaatgtgagcggtacctccaggacagcacattcgccaccagccctcacctggagtctctcttgaagattatgctgggagacgaagctg

SEQ ID NO: 260990 - DNA, 120 bp, Artificial Sequence
  ENSG00000125450_8 (sequence is synthesized)
tgcactactatgcccagtccagcctggacctgtttctgggaggtgagagcagcccagaacccctggacaacatcttgttggcagcctttgagtttgacatccatcaagtaatcaaagagt

SEQ ID NO: 260991 - DNA, 120 bp, Artificial Sequence
  ENSG00000125450_9 (sequence is synthesized)
gcagcatcgccctgagcaactggtggtttgtggcccacctgacagacctgctggaccactgcaagctcctccagtcacacaacctctatttcggttccaacatgagagagttcctcctgc

SEQ ID NO: 260992 - DNA, 120 bp, Artificial Sequence
  ENSG00000125450_10 (sequence is synthesized)
tggagtacgcctcgggactgtttgctcatcccagcctgtggcagctgggggtcgattactttgattactgccccgagctgggccgagtctccctggagctgcacattgagcggatacctc

SEQ ID NO: 260993 - DNA, 120 bp, Artificial Sequence
  ENSG00000125450_11 (sequence is synthesized)
tgaacaccgagcagaaagccctgaaggtgctgcggatctgtgagcagcggcagatgactgaacaagttcgcagcatttgtaagatcttagccatgaaagccgtccgcaacaatcgcctgg

SEQ ID NO: 260994 - DNA, 120 bp, Artificial Sequence
  ENSG00000125450_12 (sequence is synthesized)
gttctgccctctcttggagcatccgtgctaaggatgccgcctttgccacgctcgtgtcagacaggttcctcagggattactgtgagcgaggctgcttttctgatttggatctcattgaca

SEQ ID NO: 260995 - DNA, 120 bp, Artificial Sequence
  ENSG00000125450_13 (sequence is synthesized)
acctggggccagccatgatgctcagtgaccgactgacattcctgggaaagtatcgcgagttccaccgtatgtacggggagaagcgttttgccgacgcagcttctctccttctgtccttga

SEQ ID NO: 260996 - DNA, 120 bp, Artificial Sequence
  ENSG00000125450_14 (sequence is synthesized)
tgacgtctcggattgcccctcggtctttctggatgactctgctgacagacgccttgccccttttggaacagaaacaggtgattttctcagcagaacagacttatgagttgatgcggtgtc

SEQ ID NO: 260997 - DNA, 120 bp, Artificial Sequence
  ENSG00000125450_15 (sequence is synthesized)
tggaggacttgacgtcaagaagacctgtgcatggagaatctgataccgagcagctccaggatgatgacatagagaccaccaaggtggaaatgctgagactttctctggcacgaaatcttg

SEQ ID NO: 260998 - DNA, 120 bp, Artificial Sequence
  ENSG00000125450_16 (sequence is synthesized)
ctcgggcaattataagagaaggctcactggaaggttcctgagaactgcttcaatgtggtatctttgtatggcaatgtatatagatttttttaaaagaataaatgttgttttgcaaatgta

SEQ ID NO: 260999 - DNA, 120 bp, Artificial Sequence
  ENSG00000125450_17 (sequence is synthesized)
ctgccttggcctcccaaagtactgggatcacgggcatgagctatcatcacgcccggccccatctctttgagggacaggacatgtggggtttcttgctcacccccactcttgtgggacgcg

SEQ ID NO: 261000 - DNA, 120 bp, Artificial Sequence
  ENSG00000125450_18 (sequence is synthesized)
caagttttgtgtcaatattttcacaggcctgtaaacattgtgagaagtccctgcatggaagaattagtgagaataacttaaaaacacacaaacacaccatcgtttggctttgttggtgtc

SEQ ID NO: 261001 - DNA, 120 bp, Artificial Sequence
  ENSG00000125450_19 (sequence is synthesized)
tctgcccatagttgagtattctaaatttcctgtgttataacagtgagtgagtttcaccagggcttcctaatttataagccctgtatctggatttttaggaataaaacagatttgagcaga

SEQ ID NO: 261002 - DNA, 120 bp, Artificial Sequence
  ENSG00000125450_20 (sequence is synthesized)
ggggtgaacaacatcactctcgtgccggacacagacaaggaatgattaggcttgcagtcccccagtctcagcctctctccactctcacaagcaggaagggatctgagctctcttcctctg

SEQ ID NO: 261003 - DNA, 120 bp, Artificial Sequence
  ENSG00000125450_21 (sequence is synthesized)
aagacgggccagttccttgctgtctggcaagaggaaacagctggggtgcacttcactgggagttgggcaagatgtcggcagtttcctggtgcccttcaagtcctccaaaagtatcgagct

SEQ ID NO: 261004 - DNA, 120 bp, Artificial Sequence
  ENSG00000125450_22 (sequence is synthesized)
gctggagctgaagtggcagcactggcacgaggaatgtgagcggtacctccaggacagcacattcgccaccagccctcacctggagtctctcttgaaggtctgggaagcagttcagattgc

SEQ ID NO: 261005 - DNA, 120 bp, Artificial Sequence
  ENSG00000125450_23 (sequence is synthesized)
atccatgttggcttcctatgggggctgtggcatccagtgcagcagtggcaggagcttggtcctccttggatagggctgtctgtcgctctgccgtgatggcgagagctttcagactagttg

SEQ ID NO: 261006 - DNA, 120 bp, Artificial Sequence
  ENSG00000125450_24 (sequence is synthesized)
aaatccggtgcccttagctgagagcaggagcattatggagaaggtacccctgagaggaggacagagttcagcacaaatgtctctcctcagattatgctgggagacgaagctgccttgtta

SEQ ID NO: 261007 - DNA, 120 bp, Artificial Sequence
  ENSG00000125450_25 (sequence is synthesized)
ggagcatccgtgctaaggatgccgcctttgccacgctcgtgtcagacaggtgggtgccgctagtgttggcttcccagggactgggtggttgaggtgggcctgagactgctgctctgatct

SEQ ID NO: 261008 - DNA, 120 bp, Artificial Sequence
  ENSG00000125450_26 (sequence is synthesized)
ggagtttgcatttctctgatcacgaggctacctcctatcctgttttgaaagaggaacagaaaagcagagcttgtcccaggaattgtgaaatgggctgcaatgtcttcagaggcagtagca

SEQ ID NO: 261009 - DNA, 120 bp, Artificial Sequence
  ENSG00000125450_27 (sequence is synthesized)
gttttaggaagtgtgccctcctggctctggggaaaggttgaattggggtcttgtgggcacttgttttctcatgggatgtatcagtcagacccatgcacagttctgggcggcagggaagtg

SEQ ID NO: 261010 - DNA, 120 bp, Artificial Sequence
  ENSG00000125450_28 (sequence is synthesized)
tgtctctttctggacttgagccagtgagctgttggcatgcctttttaaaggcattagaaaaaaggtttctttcttttttttcctttcctgttcacaccaccttcatatgaacatggagaa

SEQ ID NO: 261011 - DNA, 120 bp, Artificial Sequence
  ENSG00000125450_29 (sequence is synthesized)
gggaggtttctaagtgggcccctgatttactcctatgtcaataatcgtgccagaccctaaggggcagaaaaggcagccaggggatcctgactcagaggctgtagttcgtcagccctgcta

SEQ ID NO: 261012 - DNA, 120 bp, Artificial Sequence
  ENSG00000125450_30 (sequence is synthesized)
aagggccaggggtttgtctctcagtgcctgggtgggcatgcttgactgctaaccccttagctgaaaggagatggcaggagtcctccacagggtcccttcttccctcctggcttacagctt

SEQ ID NO: 261013 - DNA, 120 bp, Artificial Sequence
  ENSG00000125450_31 (sequence is synthesized)
aagagtctcactccagtgacgtgagctaccgaaccactgggcttcaggctgggtattattcagaatttccagccctctatccaaaagagggtgttctatgattgcactgaatctttagca

SEQ ID NO: 261014 - DNA, 120 bp, Artificial Sequence
  ENSG00000125450_32 (sequence is synthesized)
tgagctggccctgctcccagcctactgtctgtgggacgcaggagtcaggggatcctgaggtcacactttatgcctaccccagccatcctcctcctcacgagccacactggagacgtgggg

SEQ ID NO: 261015 - DNA, 120 bp, Artificial Sequence
  ENSG00000125450_33 (sequence is synthesized)
ctgtggacgccaagagttcgcagcatttgtaagatcttagccatgaaagccgtccgcaacaatcgcctgggttctgccctctcttggagcatccgtgctaaggatgccgcctttgccacg

SEQ ID NO: 261016 - DNA, 120 bp, Artificial Sequence
  ENSG00000125450_34 (sequence is synthesized)
gagcagaaggaacttctgagtaattggtatcatttcctagtgactcggctcttgtactccaatcccacagtaaaacccattgatctgcactactatgcccaggaagaccctttcctttgg

SEQ ID NO: 261017 - DNA, 120 bp, Artificial Sequence
  ENSG00000125450_35 (sequence is synthesized)
cccttagtgaaagaacaaggcaccttctctggggttcgttatacagcagccctgcctgccccgagtctctgcttccgtcctcaggattgagtgtctcatcacctttccacagtccagcct

SEQ ID NO: 261018 - DNA, 120 bp, Artificial Sequence
  ENSG00000125450_36 (sequence is synthesized)
agacgcccaggcggagtcttgtctcgcagccagctctgagcgggaggcctgagcgggaagcattggcgtccgagcgacttctaggagcctggggttcggcgctatggaggagctcgatgg

SEQ ID NO: 261019 - DNA, 120 bp, Artificial Sequence
  ENSG00000125450_37 (sequence is synthesized)
gtgagtgagctcggggtgggcaagggtgggggtaggagtcctgggggcgccctgatgggtcattctctttgaattcctccctgaggaacaggaagaccctttcctttggcccttagtgaa

SEQ ID NO: 261020 - DNA, 120 bp, Artificial Sequence
  ENSG00000125450_38 (sequence is synthesized)
gttgccgatgtgcgtgtttcctcctttgtcgttctgcctgtgcgcgtgtattccccttagcgccctctctgggattccagactcacacaggaaacaaacactgcttgatttgaaatgagg

SEQ ID NO: 261021 - DNA, 120 bp, Artificial Sequence
  ENSG00000125450_39 (sequence is synthesized)
tattcgtatacaaagcacactattgcgaagggtatgaaaggaagaacgtccgaacatgggcccctgccccaaccaatgcaggccagggctgggggcagccaagcaaggcaggctctcttc

SEQ ID NO: 261022 - DNA, 120 bp, Artificial Sequence
  ENSG00000125450_40 (sequence is synthesized)
gtccttgatgacgtctcggattgcccctcggtctttctggatgactctgctgacagacgccttgccccttttggaacagaaacaggtgaaggtgattttctcagcagaacagacttatga

SEQ ID NO: 261023 - DNA, 120 bp, Artificial Sequence
  ENSG00000125450_41 (sequence is synthesized)
ctgagcgggaagcattggcgtccgagcgacttctaggagcctggggttcggcgctatggaggagctcgatggcgagccaacagtcactggcgggcacggtggctcgcgcctgtagtccta

SEQ ID NO: 261024 - DNA, 82 bp, Artificial Sequence
  ENSG00000125450_42 (sequence is synthesized)
gcctttgaacccaggaggcggcgattggagcaagctgagattacaccactgtacaccagcctgttagattgattccaggcgt

SEQ ID NO: 261025 - DNA, 120 bp, Artificial Sequence
  ENSG00000125450_43 (sequence is synthesized)
acaccactgtacaccagcctgttagattgattccaggcgtgaattccaagaagaaccaaatgtattttgactggggtccaggggagatgctggtatgtgaaacctccttcaacaaaaaag

SEQ ID NO: 261026 - DNA, 120 bp, Artificial Sequence
  ENSG00000125454_0 (sequence is synthesized)
agtagagttttgctgttaagactgcgcgaggagctagagagagcggagagcgctgagccgggccgcacccgccgagccgtcccttctccctgtgatcagttaccaactacctgttgatga

SEQ ID NO: 261027 - DNA, 120 bp, Artificial Sequence
  ENSG00000125454_1 (sequence is synthesized)
aaaaagtacatctcctggaagggatgctttttagctgagctctggtggatgagaggagctagccttgaaaaacttgatactgatggacattgtgtgggccagaggcagggatggttggct

SEQ ID NO: 261028 - DNA, 120 bp, Artificial Sequence
  ENSG00000125454_2 (sequence is synthesized)
atgaccccaaaccagatggcaggaataacaccaagttccaggtggcagtggctgggtctgtgtctggacttgttactcgggcgctgatcagtcccttcgacgtcatcaagatccgtttcc

SEQ ID NO: 261029 - DNA, 120 bp, Artificial Sequence
  ENSG00000125454_3 (sequence is synthesized)
agcttcagcatgagcgcctgtctcgcagtgaccccagcgcaaagtaccatggcatcctccaggcctctaggcagattctgcaggaggagggtccgacagctttctggaaaggacacgtcc

SEQ ID NO: 261030 - DNA, 120 bp, Artificial Sequence
  ENSG00000125454_4 (sequence is synthesized)
cagctcagattctctccataggctatggagctgtccaattcttgtcatttgaaatgctgacggagctggtccacagaggcagcgtgtatgacgcccgggaattctcagtgcactttgtat

SEQ ID NO: 261031 - DNA, 120 bp, Artificial Sequence
  ENSG00000125454_5 (sequence is synthesized)
gtggtggcctggctgcctgtatggccaccctcactgtgcaccccgtggatgttctgcgcacccgctttgcagctcagggtgagcccaaggtctataatacgctgcgccacgccgtgggga

SEQ ID NO: 261032 - DNA, 120 bp, Artificial Sequence
  ENSG00000125454_6 (sequence is synthesized)
ttgctacagctccttgaagcacctgtacaagtgggccataccagccgaaggaaagaaaaatgagaacctccaaaacctgctttgtggcagtggagctggtgtcatcagcaagaccctgac

SEQ ID NO: 261033 - DNA, 120 bp, Artificial Sequence
  ENSG00000125454_7 (sequence is synthesized)
atatccgctggacctcttcaagaagcggctacaggttggagggtttgagcatgccagagctgcctttggccaggtacggagatacaagggcctcatggactgtgccaagcaggtgctgca

SEQ ID NO: 261034 - DNA, 120 bp, Artificial Sequence
  ENSG00000125454_8 (sequence is synthesized)
aaaggaaggcgccctgggcttcttcaagggcctgtcccccagcttgctgaaggctgccctctccacaggcttcatgttcttctcgtatgaattcttctgtaatgtcttccactgcatgaa

SEQ ID NO: 261035 - DNA, 120 bp, Artificial Sequence
  ENSG00000125454_9 (sequence is synthesized)
caggacagccagccagcgctgagtgcaggaaggaccccaggtcttccctggaggcagcctcctgaaggaaggaagattcagtctccactgagaggtgccgtctggcccttccctgcaggc

SEQ ID NO: 261036 - DNA, 120 bp, Artificial Sequence
  ENSG00000125454_10 (sequence is synthesized)
cagctgccccaagcggggtagcagccttgaacccacccagctgggacaccaccagaaggtccagggctctccccatgagagaatcagagggaatgcaggacgtggtctatggtgagccaa

SEQ ID NO: 261037 - DNA, 120 bp, Artificial Sequence
  ENSG00000125454_11 (sequence is synthesized)
cgacacagtgagaaggagcaggaagttgctgtttctcctctgaccagcccacactccaaaggaaacagacgccatcctacacctatcagccctgcctgccaggagaacagaacacactcc

SEQ ID NO: 261038 - DNA, 120 bp, Artificial Sequence
  ENSG00000125454_12 (sequence is synthesized)
tggtctggatggggctgctgcttgagtgcagagggctgcggtaggccctttgcaggagtcaggtccctacacttggcctgtttttccaacctatttaatagacattaaagctaaacacac

SEQ ID NO: 261039 - DNA, 120 bp, Artificial Sequence
  ENSG00000125454_13 (sequence is synthesized)
cacttgagtgggctcactcagtgagcaggagtttgctataaagttgccagatgtcttggaaaaccagttgatctctgggaccaacaattgcctatcaagcctgttcattcgattctcaaa

SEQ ID NO: 261040 - DNA, 120 bp, Artificial Sequence
  ENSG00000125454_14 (sequence is synthesized)
tattattaagcacttaccatgatgggctctattccaggaaccggaaatttacgagtgaacaaatgagaccaaggtcgtgtttccacgggcttacattctagtcagggagagagacaagaa

SEQ ID NO: 261041 - DNA, 120 bp, Artificial Sequence
  ENSG00000125454_15 (sequence is synthesized)
acattctagtcagggagagagacaagaaacaaatgtactgtataaataacccatggcgtgccgggcgctgtggctcatgcatgtaatctcagcaattcaggaggctgaggcaggagaatc

SEQ ID NO: 261042 - DNA, 120 bp, Artificial Sequence
  ENSG00000125454_16 (sequence is synthesized)
ccaggagttcgagaccagccagggcaacattgagaccttatctctacaaaaataaaaaacttagccaggcctgcacctgttaagtgacagctaattgggaggctgaggcaagagaatcac

SEQ ID NO: 261043 - DNA, 64 bp, Artificial Sequence
  ENSG00000125454_17 (sequence is synthesized)
ggtgagttatgtaaacaaatatgccatagtaataagtactgtaaagaggaataaaacaagtgct

SEQ ID NO: 261044 - DNA, 120 bp, Artificial Sequence
  ENSG00000125454_18 (sequence is synthesized)
catagtaataagtactgtaaagaggaataaaacaagtgctattttattttatttttaaatttttgtattttttgtagagttggggttttgcagtgttgcccaggctggtcttgaactcct

SEQ ID NO: 261045 - DNA, 120 bp, Artificial Sequence
  ENSG00000125454_19 (sequence is synthesized)
tgctgggatacaggcatgaaccgctgcgcccagtccaaaagtgagtgctattttagacagtctagtcagggagggctgctctgaggaggtgatatttgagcagagaccataagaaacttg

SEQ ID NO: 261046 - DNA, 120 bp, Artificial Sequence
  ENSG00000125454_20 (sequence is synthesized)
agtagagttttgctgttaagactgcgcgaggagctagagagagcggagagcgctgagccgggccgcacccgccgagccgtcccttctccctgtgatcagttaccaactacctgttgatgt

SEQ ID NO: 261047 - DNA, 120 bp, Artificial Sequence
  ENSG00000125454_21 (sequence is synthesized)
gcacaaccattggtccagcgtctggcggggagctgcacggtgattggcccaggagcccgccagtttcgtccgagctcagtagagttttgctgttaagactgcgcgaggagctagagagag

SEQ ID NO: 261048 - DNA, 120 bp, Artificial Sequence
  ENSG00000125454_22 (sequence is synthesized)
gccgcacccgccgagccgtgtgagtaacctctacctccgtccttctcgccgccctctcggggaccagcaccctcgctcctcagggtggtcgggagggagcacacgcacccgggcgctcac

SEQ ID NO: 261049 - DNA, 120 bp, Artificial Sequence
  ENSG00000125454_23 (sequence is synthesized)
gagagggcggggactgtgtacacacgtgtcacaccagaccagagaagcatctccagggacaccggcggccgagccccgcgcacgcccttgagcacctgagctccagggcgtcccctcgga

SEQ ID NO: 261050 - DNA, 120 bp, Artificial Sequence
  ENSG00000125454_24 (sequence is synthesized)
ctagcccttctccctgtgatcagttaccaactacctgttgatgtgtgtggttacagacttctttctatgctttgtacaactctacagaccgtatgtagcttgatactgatggacattgtg

SEQ ID NO: 261051 - DNA, 120 bp, Artificial Sequence
  ENSG00000125454_25 (sequence is synthesized)
cctaggtacccacacggggacctctgcagatttgctcagctgagcccttgggcacatgggcacccgaacaccaggaagagcctgcttgatactgatggacattgtgtgggccagaggcag

SEQ ID NO: 261052 - DNA, 120 bp, Artificial Sequence
  ENSG00000125454_26 (sequence is synthesized)
tttcagacgtagggaactggaggagtagaggcaaggcaattgataggagtgctccccgagttttccaggaactgggcagaagcagtcagaccactctggttaaatgagggaaggggaaga

SEQ ID NO: 261053 - DNA, 120 bp, Artificial Sequence
  ENSG00000125454_27 (sequence is synthesized)
gaccactctggttaaatgagggaaggggaagagtggtccagagtgaggctgaagaggtcagtaggtctgagtcaggggagcccaggagcgtcattttcttttttgttttgttttgttttt

SEQ ID NO: 261054 - DNA, 120 bp, Artificial Sequence
  ENSG00000125454_28 (sequence is synthesized)
agattctctccataggctatggagctgtccaagtctataatacgctgcgccacgccgtggggaccatgtataggagcgaaggcccccaggttttctacaaaggcttggctcccaccttga

SEQ ID NO: 261055 - DNA, 120 bp, Artificial Sequence
  ENSG00000125457_0 (sequence is synthesized)
cagcgccggacgctggttgcgcgctcccaggcgccgagcggccccgggcacgcgcgcgcgccaccggcccggcaggtgctgtccttattcccagcccagtcaagagctaccggggctggc

SEQ ID NO: 261056 - DNA, 120 bp, Artificial Sequence
  ENSG00000125457_1 (sequence is synthesized)
tagtcatgggggagcccagtagagaggagtataaaatccagtcctttgatgcagagacccagcagctgctgaagacagcactcaaagatccgggtgctgtggacttggagaaagtggcca

SEQ ID NO: 261057 - DNA, 120 bp, Artificial Sequence
  ENSG00000125457_2 (sequence is synthesized)
atgtgattgtggaccattctctgcaggactgtgtgttcagcaaggaagcaggacgcatgtgctacgccatcattcaggcagagagtaaacaagcaggccagagtgtcttccgacgtggac

SEQ ID NO: 261058 - DNA, 120 bp, Artificial Sequence
  ENSG00000125457_3 (sequence is synthesized)
tcctcaaccggctgcagcaggagtaccaggctcgggagcagctgcgagcacgctccctgcagggctgggtctgctatgtcacctttatctgcaacatctttgactacctgagggtgaaca

SEQ ID NO: 261059 - DNA, 120 bp, Artificial Sequence
  ENSG00000125457_4 (sequence is synthesized)
acatgcccatgatggccctggtgaaccctgtctatgactgcctcttccggctggcccagccagacagtttgagcaaggaggaggaggtggactgtttggtgctgcagctgcaccgggttg

SEQ ID NO: 261060 - DNA, 120 bp, Artificial Sequence
  ENSG00000125457_5 (sequence is synthesized)
gctgctggagatcattgagttccgggcggccggctggaagacaacgccagctgcccacaagtattactacagcgaagtctccgactaggcctccagatcagggcttcctcaccagcactg

SEQ ID NO: 261061 - DNA, 120 bp, Artificial Sequence
  ENSG00000125457_6 (sequence is synthesized)
gcctttcttctacccacctctaaagctggcagtggagtctctgcctcacccaaagacttttcccttccagactttgagtgtcttcccttctagactttcccatctcctggtgagatgttt

SEQ ID NO: 261062 - DNA, 120 bp, Artificial Sequence
  ENSG00000125457_7 (sequence is synthesized)
cccacttatgccgtggtcctgccctgagcccctttccccaccacaacccaccacggccaggcagagaagggcaactcccaagagccactgcactgtgtaaccattagtgcaactactacc

SEQ ID NO: 261063 - DNA, 120 bp, Artificial Sequence
  ENSG00000125457_8 (sequence is synthesized)
ttggtgcctcagtttacccatctgtaaaatgggtaagcatagccactggtgggatattttgggatgtcaaggggtggaggcagagcacaagtcacaccagaaactgctttttatacattt

SEQ ID NO: 261064 - DNA, 120 bp, Artificial Sequence
  ENSG00000125457_9 (sequence is synthesized)
tgtataaggacaactctggaaacaagcctatttcctccagccagtttcactgaatgctgcaccacatgctacaccagttcagcgtgagaattttctaataaatcttttctgatactaaaa

SEQ ID NO: 261065 - DNA, 80 bp, Artificial Sequence
  ENSG00000125457_10 (sequence is synthesized)
gggccgtgggctccgcagcccgccctgtgcctccgggaggggcgttccgggcgcggggggaacggccgagggctggagac

SEQ ID NO: 261066 - DNA, 120 bp, Artificial Sequence
  ENSG00000125457_11 (sequence is synthesized)
gccgagggctggagaccctaaaggcgcctcctacggccagaggggagcctccggcgggagccacctctccggggcgcatcatcctgccccccagtgctgtccttattcccagcccagtca

SEQ ID NO: 261067 - DNA, 120 bp, Artificial Sequence
  ENSG00000125457_12 (sequence is synthesized)
gcacagttgcctgctttgagacagaagatggagaatattccgtttgccagaggagctatagtaattgctctcgcctgatgccttcccgctgtaacacgcagtacagagatccgggtgctg

SEQ ID NO: 261068 - DNA, 120 bp, Artificial Sequence
  ENSG00000125457_13 (sequence is synthesized)
aagcacagaaggctgcaggatggacagtccagctcagccgtgtgtcagcccactgctcacggaggtggactgtttggtgctgcagctgcaccgggttggggagcagctggagaaaatgaa

SEQ ID NO: 261069 - DNA, 120 bp, Artificial Sequence
  ENSG00000125457_14 (sequence is synthesized)
cctcacccggcatcttcctgggccagcaacgtcaggccggtttatttaagcaactgtaacgtccgcccgcacacaccctgccccagtctactcctgcctcctgctgggactggagggtgg

SEQ ID NO: 261070 - DNA, 120 bp, Artificial Sequence
  ENSG00000125457_15 (sequence is synthesized)
gcgctttcctgcttcagcttctcgctcttgtgtaatcccacaagcgagggatttctaaactgagcagcaggtgcctggctgatgcccagtccccaccagaagccaagcctggtgggcctt

SEQ ID NO: 261071 - DNA, 120 bp, Artificial Sequence
  ENSG00000125457_16 (sequence is synthesized)
gccaaccaccgcacgccacggaccgcccaggagtccctgtcccgagcgcgccgtcagccccgtccagggcctgcaggacggaacccgccctgcgctccacacctgaggccgctcccttcg

SEQ ID NO: 261072 - DNA, 120 bp, Artificial Sequence
  ENSG00000125457_17 (sequence is synthesized)
gctgctttgaggaaggtgcttcaggagtgggcagaaggcctggcctgcaggacagagatgcacagggtctagctcaaagagagagagaggcataggatgggtggggttacaggggcaccg

SEQ ID NO: 261073 - DNA, 120 bp, Artificial Sequence
  ENSG00000125457_18 (sequence is synthesized)
caggatggacagtccagctcagccgtgtgtcagcccactgctcacggaggtctctgaggactgtgtcacttctggggcaggactgtgggggtgtttaaggcctgtcagttataggacaag

SEQ ID NO: 261074 - DNA, 120 bp, Artificial Sequence
  ENSG00000125457_19 (sequence is synthesized)
gagcagccaaaacctactggctcagtagcttccttctcagtcagaaagccaacgtatgatggcagctgtgcaagccatggctagctgtgggtacagacggccccaaagccaaaccagggt

SEQ ID NO: 261075 - DNA, 120 bp, Artificial Sequence
  ENSG00000125457_20 (sequence is synthesized)
caggcagtgtgtgggaggcaggagagtgggatgaagaagtggtttggagacaggcttgagtggagcctggccagatgagggacctcaggcaagtcccggaactcatttctttctgtgtaa

SEQ ID NO: 261076 - DNA, 120 bp, Artificial Sequence
  ENSG00000125457_21 (sequence is synthesized)
gatgtggaagtacccactggatggtaaggagggagcaagggaatgagtgtaaaggcaaagcacagcacctggcacttggcaaatgctgtgtgagaggctggcactgccccagttcacttg

SEQ ID NO: 261077 - DNA, 120 bp, Artificial Sequence
  ENSG00000125458_0 (sequence is synthesized)
agaccccgagagctcgcagctccggcccggcggcgatggcgcggagcgtgcgcgtgctggtggacatggacggcgtcctggccgacttcgaggccggcctcctgcggggcttccgccgcc

SEQ ID NO: 261078 - DNA, 120 bp, Artificial Sequence
  ENSG00000125458_1 (sequence is synthesized)
gcttccctgaggagccgcacgtgccgctggagcaacgccgcggcttcctggcccgcgagcagtaccgcgccctgcggcccgacctggcggataaagtggccagtgtgtacgaagccccgg

SEQ ID NO: 261079 - DNA, 120 bp, Artificial Sequence
  ENSG00000125458_2 (sequence is synthesized)
gctttttcctggacctggagcccatcccgggagccttggacgctgtgcgggagatgaacgacctaccggacacgcaggtcttcatctgcaccagccccctgctgaagtaccaccactgtg

SEQ ID NO: 261080 - DNA, 120 bp, Artificial Sequence
  ENSG00000125458_3 (sequence is synthesized)
cctgacaagggacaagacggtggtcttgggggacctgctcattgatgacaaggacacagttcgaggccaggaggagaccccaagctgggagcacatcttgttcacctgctgccacaatcg

SEQ ID NO: 261081 - DNA, 120 bp, Artificial Sequence
  ENSG00000125458_4 (sequence is synthesized)
gcacctggtcctgcccccgacaaggagacggctgctctcctggagtgacaactggagggagatcttagatagcaagcgcggagctgcgcagcgggaatgagcggggatgccgcgggcagc

SEQ ID NO: 261082 - DNA, 120 bp, Artificial Sequence
  ENSG00000125458_5 (sequence is synthesized)
agctggagctaaaggaagggcaggcccacaggggccaccgcagagccgagtcggggcggcatcgtgctggtgcctctggccccgtggagtggagcaggcagataccgttaagcgctgtgc

SEQ ID NO: 261083 - DNA, 120 bp, Artificial Sequence
  ENSG00000125458_6 (sequence is synthesized)
taccgggccccaggcccagccacccggtacctcccgagaggctgtccctggaccctggctggcatggaaatacagtgggaaaaccagtcgggacctttaataaaagaccttggctttcta

SEQ ID NO: 261084 - DNA, 120 bp, Artificial Sequence
  ENSG00000125458_7 (sequence is synthesized)
ctggaacccgcgggcagcgcaccctggggaggagcctttgggcgcgtgcccctgaccgacgccccctccgcccctctgagctcgggcccggagcccccaggagcctccctgcgggtcctc

SEQ ID NO: 261085 - DNA, 120 bp, Artificial Sequence
  ENSG00000125458_8 (sequence is synthesized)
taatacccatgacagatggcagcgcgctgtctttcactgtcctaggccaggaggagaccccaagctgggagcacatcttgttcacctgctgccacaatcggcacctggtcctgcccccga

SEQ ID NO: 261086 - DNA, 120 bp, Artificial Sequence
  ENSG00000125458_9 (sequence is synthesized)
cccgcccctactccgcacgtggagctgcctaaatcctgattttaaaaagaaaccaccagaaacccagaagtaccgctgggtggagcagcacctggggccccagttcgtagaacgaattat

SEQ ID NO: 261087 - DNA, 120 bp, Artificial Sequence
  ENSG00000125458_10 (sequence is synthesized)
ccggagtaaggagagaggggggcgggcggagtcctgggcgggctcctggctcccggcggtaaccgcgtccttctccgcagcacgcaggtcttcatctgcaccagccccctgctgaagtac

SEQ ID NO: 261088 - DNA, 120 bp, Artificial Sequence
  ENSG00000125458_11 (sequence is synthesized)
gaaggtgtggctgccccgcccctactccgcacgtggagctgcctaaatcctgattttaaaaagaaaccaccagaaacccagaaggtgggggtggggggctctcaagggcttagagccaag

SEQ ID NO: 261089 - DNA, 120 bp, Artificial Sequence
  ENSG00000125459_0 (sequence is synthesized)
ggcggccccgtggagcagcgcagtatggcgggcggggcccgggaggtgctcacactgcagttgggacattttgccggtttcgtgggcgcgcactggtggaaccagcaggatgctgcgctg

SEQ ID NO: 261090 - DNA, 120 bp, Artificial Sequence
  ENSG00000125459_1 (sequence is synthesized)
ggccgagcgaccgattccaaggagcccccgggagagctgtgccccgacgtcctgtatcgtacgggccggacgctgcacggccaggagacctacacgccgcgactcatcctcatggatctg

SEQ ID NO: 261091 - DNA, 120 bp, Artificial Sequence
  ENSG00000125459_2 (sequence is synthesized)
aagggtagtttgagctccctaaaagaggaaggtggactctacagggacaaacagttggatgctgcaatagcatggcaggggaagctcaccacacacaaagaggaactctatcccaagaac

SEQ ID NO: 261092 - DNA, 120 bp, Artificial Sequence
  ENSG00000125459_3 (sequence is synthesized)
ccttatctccaagactttctgagtgcagagggagtgctgagtagtgatggtgtctggagggtcaaatccattcccaatggcaaaggttcctcaccactccccaccgctacaactccaaaa

SEQ ID NO: 261093 - DNA, 120 bp, Artificial Sequence
  ENSG00000125459_4 (sequence is synthesized)
ccacttatccctacagaggccagcatcagggtctggtcagacttcctcagagtccatctccatccccggagcatctgtatgattcagaagtacaaccacgatggggaagcaggtcggctg

SEQ ID NO: 261094 - DNA, 120 bp, Artificial Sequence
  ENSG00000125459_5 (sequence is synthesized)
gaggcttttggccaaggggaaagtgtcctaaaggaacccaagtaccaggaagagctggaggacaggctgcatttctacgtggaggaatgtgactacttgcagggcttccagatcctgtgt

SEQ ID NO: 261095 - DNA, 120 bp, Artificial Sequence
  ENSG00000125459_6 (sequence is synthesized)
gacctgcacgatggcttctctggggtaggcgcgaaggcggcagagctgctacaagatgaatattcagggcggggaataataacctggggcctgctacctggtccctaccatcgtggggag

SEQ ID NO: 261096 - DNA, 120 bp, Artificial Sequence
  ENSG00000125459_7 (sequence is synthesized)
gcccagagaaacatctatcgtctattaaacacagcttttggtctcgtgcacctgactgctcacagctctcttgtctgccccttgtccttgggtgggagcctgggcctgcgacccgagcca

SEQ ID NO: 261097 - DNA, 120 bp, Artificial Sequence
  ENSG00000125459_8 (sequence is synthesized)
cctgtcagcttcccttacctgcattatgatgccactctgcccttccactgcagtgccatcctggctacagccctggacacagtcactgttccttatcgcctgtgttcctctccagtttcc

SEQ ID NO: 261098 - DNA, 120 bp, Artificial Sequence
  ENSG00000125459_9 (sequence is synthesized)
atggttcatctggctgacatgctgagcttctgtgggaaaaaggtggtgacagcaggagcaatcatccctttccccttggctccaggccagtcccttcctgattccctgatgcagtttgga

SEQ ID NO: 261099 - DNA, 120 bp, Artificial Sequence
  ENSG00000125459_10 (sequence is synthesized)
gtggggagccttctggaacacgttgctttgcccagtcagtggtgctgaggggtatagacagagcatgccacacaagccagctcaccccagggacacctccaccctctgcccttcatgcat

SEQ ID NO: 261100 - DNA, 120 bp, Artificial Sequence
  ENSG00000125459_11 (sequence is synthesized)
gtaccactggggaagaaatcttggctcagtatttacaacagcagcagcctggagtcatgagttcttcccatctgctgctgactccctgcagggtggctcctccttacccccacctcttct

SEQ ID NO: 261101 - DNA, 120 bp, Artificial Sequence
  ENSG00000125459_12 (sequence is synthesized)
caagctgcagtccaccgggtatggttctggatggttcccccaagggagcagcagtggagagcatcccagtgtttggggcactgtgttcctcttcgtccctgcaccagaccctggaagcct

SEQ ID NO: 261102 - DNA, 120 bp, Artificial Sequence
  ENSG00000125459_13 (sequence is synthesized)
tggccagagacctcaccaaactcgacttgcggcgctgggccagcttcatggatgctggagtggagcacgatgacgtagcagagctgctgcaggagctacaaagcctggcccagtgctacc

SEQ ID NO: 261103 - DNA, 120 bp, Artificial Sequence
  ENSG00000125459_14 (sequence is synthesized)
agggtggtgacagcctcgtggactaaagttcccagtgtgggagaaaggagctagtttgcaataaaaacagctggatgcaggagcccagtgtcttcatgcagaggagctcaatgtcgcggg

SEQ ID NO: 261104 - DNA, 120 bp, Artificial Sequence
  ENSG00000125459_15 (sequence is synthesized)
actagctacaccaacatatgcactttttacatttagaaacactgtgattagaccacagaacaataaatatgtgccatcagaccaaaaaaaagtagagaaaggagctgaactccactctcg

SEQ ID NO: 261105 - DNA, 120 bp, Artificial Sequence
  ENSG00000125459_16 (sequence is synthesized)
atgctacttacagaggacatctgtaaagtcttcataaaagaccttgaatgatgcctaggatggcagagcccctgggtcctactccatcctccagcctttgtccttgtcctggcctcctgc

SEQ ID NO: 261106 - DNA, 120 bp, Artificial Sequence
  ENSG00000125459_17 (sequence is synthesized)
tctccagatctgtaaactgggctcaaggactgtacaagcagagtacaactacccgcctccccggtgccagggcgcctgttgggtttggtcctgtgtagatgattcccagagtctcattca

SEQ ID NO: 261107 - DNA, 120 bp, Artificial Sequence
  ENSG00000125459_18 (sequence is synthesized)
tccagctcctcttcagacagaaggtccccatggtcagacagctggtctgcattgctggtactggttgcatcatcctcatcctcagagctggcttcacaggcagtgtggaagagctgcatg

SEQ ID NO: 261108 - DNA, 120 bp, Artificial Sequence
  ENSG00000125459_19 (sequence is synthesized)
agttctcgaaaatggtgggaaacctaagaaaggaggagggctgtattcactgatccttagtaacatgttaacatttatgaagcactatatattgatttgcaaaatcttttgtttattcca

SEQ ID NO: 261109 - DNA, 120 bp, Artificial Sequence
  ENSG00000125459_20 (sequence is synthesized)
gggcggggcccgggaggtgctcacactgcagttgggacattttgccggtttcgtgggcgcgcactggtggaaccagcagccggcctgcctcgtcctctctgcttccccaggatgctgcgc

SEQ ID NO: 261110 - DNA, 120 bp, Artificial Sequence
  ENSG00000125459_21 (sequence is synthesized)
gcacaacatgccaacactcgaggggcccacgacagttgctcaagagccatttcgggaataggctgctaggccctggagacagtgaggacttgaactgcagcactcctgtcagacccctgg

SEQ ID NO: 261111 - DNA, 120 bp, Artificial Sequence
  ENSG00000125459_22 (sequence is synthesized)
atgtggttccccccgcgtcccacagctaatgactaagctgggaaccgaaagatggaatctagattctcctaagccaaggtttttcccccaactagtgtatatcccagaaagcttggaaga

SEQ ID NO: 261112 - DNA, 120 bp, Artificial Sequence
  ENSG00000125459_23 (sequence is synthesized)
gcaggtaaacggggattttaatcattttaagtgtcttagaatgatattttgggaaaaagcactccttttcctaaggactgcgactcggtgaacagaaaggaggctatgcggtgtggccag

SEQ ID NO: 261113 - DNA, 120 bp, Artificial Sequence
  ENSG00000125459_24 (sequence is synthesized)
tttactatctccattcctggattaaaagtgctgaaaaagtccacagttaaacattcctttattcaccctatggctcccaagaaaagcattcttcctctggagtactggtgtactaagggg

SEQ ID NO: 261114 - DNA, 120 bp, Artificial Sequence
  ENSG00000125459_25 (sequence is synthesized)
acaatacaccaaatttgttgagtttacaatcaagtctactaaggttggacttccttatcagtttggcagagtcccagggcagaataatcatccatctacaggtctctgtttcctctccct

SEQ ID NO: 261115 - DNA, 120 bp, Artificial Sequence
  ENSG00000125459_26 (sequence is synthesized)
ggtgtgtaactgatgtatggataagggtggggatcgtgtatgtacgcagaacgctggataactctgatcagagtgcagtttctttgatcaatctccaaactctttcaggcaggggaagct

SEQ ID NO: 261116 - DNA, 120 bp, Artificial Sequence
  ENSG00000125459_27 (sequence is synthesized)
ctgcggcaggctacagggcctcctcatgctcccagtcagccgctgtctgttactggctctgttcttgaggcccgagcttgaactcagctgtgatgtggcctctcagatcacactgtccta

SEQ ID NO: 261117 - DNA, 120 bp, Artificial Sequence
  ENSG00000125459_28 (sequence is synthesized)
tgcttgtccagcctggggtcaaacatacccctgattcgtcccctgggtctctctggtgttaatattctgcctccacacattcttttccaggcctgaggccaagtgcccatcttggtgtct

SEQ ID NO: 261118 - DNA, 120 bp, Artificial Sequence
  ENSG00000125459_29 (sequence is synthesized)
ggagaaatcagaatcccagtgggagagctgcttaatacaaactactctttcttcaccaggaggcccagagaaacatctatcgtctattaaacacagcttttggtctcgtgcacctgactg

SEQ ID NO: 261119 - DNA, 120 bp, Artificial Sequence
  ENSG00000125459_30 (sequence is synthesized)
agcgcagtatggcgggcggggcccgggaggtgctcacactgcagttgggacattttgccggtttcgtgggcgcgcactggtggaaccagcaggtgaggtcagccggcagctgcccccgag

SEQ ID NO: 261120 - DNA, 120 bp, Artificial Sequence
  ENSG00000125459_31 (sequence is synthesized)
gtgcacctgactgctcacagctctcttgtctgccccttgtccttgggtgggagcctgggcctgcgacccgagccacctgtcagcttcccttacctgcattatgatgcctgaggccaagtg

SEQ ID NO: 261121 - DNA, 120 bp, Artificial Sequence
  ENSG00000125462_0 (sequence is synthesized)
agtccagccgcaggggccacccgaacagtctctcctcctcacagaagcctggagctgggcatccaagaagaagcagcctcatttgttttctggtgtcatcgtaggtggccacctatggct

SEQ ID NO: 261122 - DNA, 120 bp, Artificial Sequence
  ENSG00000125462_1 (sequence is synthesized)
tttgggaatgtaaaaagggcagctctctggcatgttcctgactgaggatctcataacatttaacttgaggaacttcctccttttccagctttgggagtcaagcttctcacctggggcggg

SEQ ID NO: 261123 - DNA, 120 bp, Artificial Sequence
  ENSG00000125462_2 (sequence is synthesized)
tgggttctgcaccaccctcccaccctccttcctccgtgtggacgatagagccacatccagcaccacggacagctcccgggcgccttcatctcctcgtcctccaggcagcacaagccattg

SEQ ID NO: 261124 - DNA, 120 bp, Artificial Sequence
  ENSG00000125462_3 (sequence is synthesized)
ctcagcatgatcaggagaaattccatgatcttgcttattcctgtcttgggaagtccttctccatgtctaaccaagatctatatggctatagcaccagctctttggctcttggcttggcat

SEQ ID NO: 261125 - DNA, 120 bp, Artificial Sequence
  ENSG00000125462_4 (sequence is synthesized)
ggctaagttgggagaccaaaaagaagaatgtacttcatctggttgggctggattccctctgataagccttcccagttgactgaaagatgaggctaggctctagcaagttgaagtcaaacc

SEQ ID NO: 261126 - DNA, 120 bp, Artificial Sequence
  ENSG00000125462_5 (sequence is synthesized)
agctccttcaagaagctttgagcagaatgaagtggggaggacccagcttccagcccaggaagcccactgtacctggagccatctgggataagactttgacccatgactcccatatccaca

SEQ ID NO: 261127 - DNA, 120 bp, Artificial Sequence
  ENSG00000125462_6 (sequence is synthesized)
gcctgtccatcctagcccatcccagtttatcctgtatcatttgagctgggattcccacatcctctgagttggaagtcccatctcaagtcttcaataaagactcttgaatattgaatcaca

SEQ ID NO: 261128 - DNA, 120 bp, Artificial Sequence
  ENSG00000125462_7 (sequence is synthesized)
cagaggcagaggagggagctaggaggtgagacccgctccaccctgctcgcctaggctcggcggaggctaagagcagggcagcctcctctgcccggcgcccgctgagccccggcatctgga

SEQ ID NO: 261129 - DNA, 120 bp, Artificial Sequence
  ENSG00000125462_8 (sequence is synthesized)
actcagggccctggcgctccaggggcgggaactggccgggaggaccgcgcgggagagcacggatgggcaccctgggctcgatcttctcacctggggcgggtgggttctgcaccaccctcc

SEQ ID NO: 261130 - DNA, 120 bp, Artificial Sequence
  ENSG00000125462_9 (sequence is synthesized)
tgagcaggttgcccagctggttagcggaaatgccaagatccaggctcctgaatttcagcctggccctttctatctgtctgatacctcctttacgagtctctctgcctgcgttgtgtggag

SEQ ID NO: 261131 - DNA, 120 bp, Artificial Sequence
  ENSG00000125462_10 (sequence is synthesized)
cgggcctgctgctggttgggggagtttgcaggttgcccctatgcaaaaaaggacaggatgcatgactggcatgtaaggtgttcaggaaaaccaggaaaaggtggaacagactgctacctc

SEQ ID NO: 261132 - DNA, 120 bp, Artificial Sequence
  ENSG00000125462_11 (sequence is synthesized)
tgtctgaagtggtttggagggaaggcctcagggacagggcatacctagcagtagctggcaagcccatgggagaaaaggcaagggggcaaccatctgccagggcacagaggccaggggatg

SEQ ID NO: 261133 - DNA, 120 bp, Artificial Sequence
  ENSG00000125462_12 (sequence is synthesized)
agggaagtgaggggttgagaactgacaccctacaacgccagcacctcagtggaaaggaggaatagagcccaggagggatgtggggcttctcacctggggcgggtgggttctgcaccaccc

SEQ ID NO: 261134 - DNA, 120 bp, Artificial Sequence
  ENSG00000125462_13 (sequence is synthesized)
taagaattttcagttctattctttagatactgctacatctactatttttactggaaaccaaattgtaagctggtttctttattcatttctctcctcagcccctcattttaataccctcct

SEQ ID NO: 261135 - DNA, 120 bp, Artificial Sequence
  ENSG00000125462_14 (sequence is synthesized)
attgaattctaggtccagaaagccaaaggcaattttctctcaaatatttgacccaagtgttgcattatcagccacaccctcactcttggacaaattctcctcccacccaattccaggcat

SEQ ID NO: 261136 - DNA, 120 bp, Artificial Sequence
  ENSG00000125462_15 (sequence is synthesized)
ggaaagggttttgttgataagttcttacagtcacaggaatcatcctagtcagcaagccgtgggagagacagaaatagaaacagcaaatttgaccaaaccaaggtccatgtttgggtgttt

SEQ ID NO: 261137 - DNA, 120 bp, Artificial Sequence
  ENSG00000125462_16 (sequence is synthesized)
tcatttatcaagcacacaaatctctgagcctcaattcagatatttgtataatcaggataagaaacccttaggattattgtgtgcagaaaatgaagaattctatataaaagatcgtatact

SEQ ID NO: 261138 - DNA, 120 bp, Artificial Sequence
  ENSG00000125462_17 (sequence is synthesized)
atgttatgacactcatggttaaacggtaattcttagattgcagaaaggttaaaggctacagtttggaaagactgatagcatatgatttgtttcagaatgtaaaaagggcagctctctggc

SEQ ID NO: 261139 - DNA, 120 bp, Artificial Sequence
  ENSG00000125462_18 (sequence is synthesized)
atgttcctgactgaggatctcataacatttaacttgaggaacttcctccttttccagctttgggagtcaaggtgagactcctggggacctaggtaggaagtatctgaagacttgggagag

SEQ ID NO: 261140 - DNA, 120 bp, Artificial Sequence
  ENSG00000125462_19 (sequence is synthesized)
gaggcacagtccttgggaagcctgataaagggaagaggttggagtccgcgtggcagaatggccgttgttttctttctccttaatggatattaagacttattggtaacagcacttaggatg

SEQ ID NO: 261141 - DNA, 120 bp, Artificial Sequence
  ENSG00000125462_20 (sequence is synthesized)
ggtaaactgacttacatagataaatacagaatgtgtaaatgataatttcaagtttatgccattaagctcctggattctaagtaactaaaaacacagtttattaaattaaaggacaagtta

SEQ ID NO: 261142 - DNA, 120 bp, Artificial Sequence
  ENSG00000125462_21 (sequence is synthesized)
ggtagtggctataattaacaaatcctatagagacctgcctatcagcatgtagacttgtcttcataattgagtgactttaagaagggatgtcttctctcccttcgcctcacaaaccaacat

SEQ ID NO: 261143 - DNA, 120 bp, Artificial Sequence
  ENSG00000125462_22 (sequence is synthesized)
ccccccagtccccagtgcgattcctaaggttggtaacccaccagagtcacacaggcccctatgtctgaaagtctttcttgaagtctgcatgttcaaggtttgaaagttggaatctggtta

SEQ ID NO: 261144 - DNA, 120 bp, Artificial Sequence
  ENSG00000125462_23 (sequence is synthesized)
tttattttttcaccttccttcactccaatgttctgggtatggattgaccttcccacctcccttcctttgctattgggacctcagaggtcttgaggggtgagtatgtctcatccagagaca

SEQ ID NO: 261145 - DNA, 120 bp, Artificial Sequence
  ENSG00000125462_24 (sequence is synthesized)
gggtgtgctgacttccctaggagatcatgagtttaggttaatgctttaaaatcactggagaagcagacaaaactataaaaacattcttggggctttgaggagaatgaggagcagagttat

SEQ ID NO: 261146 - DNA, 120 bp, Artificial Sequence
  ENSG00000125462_25 (sequence is synthesized)
ggaaggaagggtgggtgggtgcatatttagataggagagagaaggggaaagggggaaccccctccttgccacccaggctctcccagggccaaagtgacaccccctcctcctcctgcccta

SEQ ID NO: 261147 - DNA, 120 bp, Artificial Sequence
  ENSG00000125462_26 (sequence is synthesized)
ctctgagtttgttatgacaggggctgaaggctgctgaattgctgtttgctgtgtctgctaattggactgaagggttggagtctggacactgaaagggaccattgttgctgtttaccttct

SEQ ID NO: 261148 - DNA, 120 bp, Artificial Sequence
  ENSG00000125462_27 (sequence is synthesized)
acagccgcctccctggggaccctctgggtaaaggggagcagcagcacccccttagggtcattgcacccatttcctgcacaagggactgcggtggggagacagtttgtctcattgccttgg

SEQ ID NO: 261149 - DNA, 120 bp, Artificial Sequence
  ENSG00000125462_28 (sequence is synthesized)
ggtggtttgagcttctacagcacagaggagacaagccaacacctgagccagtctcttctccaggccaggcctaggggccatccaggagctcccaggaaagaggatttacatgcttgtctt

SEQ ID NO: 261150 - DNA, 120 bp, Artificial Sequence
  ENSG00000125462_29 (sequence is synthesized)
tctcctttttattcattcccttcttctttagggatctttgctttgcctcttcctccagctaatcaggcttcacccctgcaccttttctgacctgctttcttctaggtcagtgattctcaa

SEQ ID NO: 261151 - DNA, 120 bp, Artificial Sequence
  ENSG00000125462_30 (sequence is synthesized)
cttggttatgcactgaatcacctggggagcttttttaaaaatgttgatgtttgggcccagccccagatccatgaaatcagagtatgtggaaatgatgcctaggcatcattattatttaat

SEQ ID NO: 261152 - DNA, 120 bp, Artificial Sequence
  ENSG00000125462_31 (sequence is synthesized)
gtgcacctgaggttatgaaccactgatgtaggctcacctctccacctgggaaacacatacacacacgtatgcatgtacccacatgcctgtggatgtgtacacgtgcacacacaaacacac

SEQ ID NO: 261153 - DNA, 120 bp, Artificial Sequence
  ENSG00000125462_32 (sequence is synthesized)
cccggcctttccccgcctctcctcccaaactcctgatatctataatactatcagacaggttgtatgtcttctaaattattattactaaattccttgtaggagccttagcatttagaatgg

SEQ ID NO: 261154 - DNA, 120 bp, Artificial Sequence
  ENSG00000125462_33 (sequence is synthesized)
aatttagaggtctgtactttatctcccacctcaatctgagctcttccccaaggggagggactatgattccatctccctgtggatgtccaaataggatctagaggaagactgagctaaatt

SEQ ID NO: 261155 - DNA, 120 bp, Artificial Sequence
  ENSG00000125462_34 (sequence is synthesized)
atcagagattcaatgacttttgtgctcttccttcctcaaagtaatattggcaatttggaggtcttcagagaggagaaacattcttcaggtatcatctttcccttttcttactgtttccaa

SEQ ID NO: 261156 - DNA, 120 bp, Artificial Sequence
  ENSG00000125462_35 (sequence is synthesized)
gctgcctgaccaggtgtgcactgaaagcctaccctggttggtggacatggaacagactgaggccataagaaggacttcctggctgaccagaaatactgttgaatcttcctgttaatggaa

SEQ ID NO: 261157 - DNA, 120 bp, Artificial Sequence
  ENSG00000125462_36 (sequence is synthesized)
ctccttcctccgtgtggacgatagagccacatccagcaccacggacagctcccgggcgcactggaagctgagggttttgacagcggcaggccacataggcaaggaagctggtgcatgcag

SEQ ID NO: 261158 - DNA, 120 bp, Artificial Sequence
  ENSG00000125462_37 (sequence is synthesized)
catgcgcacccagaagatgtagccctagatggggaaaaaccgagccgagagagccaattttggctgggtcttgccaggtcttgccaggtcttcccggagagggtgcgcatgcgtaaatcg

SEQ ID NO: 261159 - DNA, 120 bp, Artificial Sequence
  ENSG00000125462_38 (sequence is synthesized)
aacacctcctctaaatctaacgccctgctcagttctagaggggacagcgccctctgtcctcctggccgttttcctgaactcctaacctcagtcaatactgcctcgggacctggcgctgcc

SEQ ID NO: 261160 - DNA, 120 bp, Artificial Sequence
  ENSG00000125462_39 (sequence is synthesized)
tgggagatccagaagaaaggaagcatcttggcccctgccttgggggcgacacgaccgtccccaaacacagcgagtcactggcctgggtctttgtgcagaggcccctctaggagcggggaa

SEQ ID NO: 261161 - DNA, 120 bp, Artificial Sequence
  ENSG00000125462_40 (sequence is synthesized)
cgttcagaaacgggaaagatcactttgtgctcctgtgatctgaaggctgcgtgaagaagatgaggcttggaaaataggacttaccacattacaggacagaccacagtgcatgtctgtctg

SEQ ID NO: 261162 - DNA, 120 bp, Artificial Sequence
  ENSG00000125462_41 (sequence is synthesized)
ctccaacagaagtggctttcttgagggaaggaattctgccttgttcaactttatattcccccacagtgccttgcagaaagttctgtcaggtgagctgttgtgctgtatgtctgacctgaa

SEQ ID NO: 261163 - DNA, 120 bp, Artificial Sequence
  ENSG00000125462_42 (sequence is synthesized)
ttgccttttaggagggaatcagtacttggaagctggaatacatcagggatacccctaaaacgagagactatttttttccattggattctgacataaataaattttgcctactttgacagt

SEQ ID NO: 261164 - DNA, 70 bp, Artificial Sequence
  ENSG00000125462_43 (sequence is synthesized)
agagacctttctcccatctccccaccaccaagcccttgttgagcacactgcacactggctttttattttt

SEQ ID NO: 261165 - DNA, 120 bp, Artificial Sequence
  ENSG00000125462_44 (sequence is synthesized)
tgcgctggcccttctagtgaatgtttgggttcagggtacacgaagcagcagaatgctggcggacaccacctcagcttgcaggctgctctgggtttgatagtcagtggggctttgtccaca

SEQ ID NO: 261166 - DNA, 120 bp, Artificial Sequence
  ENSG00000125462_45 (sequence is synthesized)
ggaaggacaggaaaagaaggagcttttggtttttgactctggaattggacaggctggtcaggatacaaattctggcttcccccacttactagctaggtgaccttaggcaagtcccttcat

SEQ ID NO: 261167 - DNA, 120 bp, Artificial Sequence
  ENSG00000125462_46 (sequence is synthesized)
gtctttggaccctaactgccttccttggttatcctgaagatcaaatggggtgatgggaatgaatgttttctaaggctgtatgcagatgtttagtgttaaatgctaagtgcagagggacac

SEQ ID NO: 261168 - DNA, 120 bp, Artificial Sequence
  ENSG00000125462_47 (sequence is synthesized)
agttatggggccattgaggtaggtgggggcaatcaaggaaggcctcctgggttgtgagggccatggatcaccgggtgcagtccataacggaggcctgactgagaaatggggctgggctcc

SEQ ID NO: 261169 - DNA, 120 bp, Artificial Sequence
  ENSG00000125462_48 (sequence is synthesized)
atggctggggcttttgtggtctgaaggaggtgagcatcttgctgaggctgtttcgagagggacccgttgttaacaattaggtggtgaactccacaacggcagcctcttttatccactggc

SEQ ID NO: 261170 - DNA, 120 bp, Artificial Sequence
  ENSG00000125462_49 (sequence is synthesized)
caggtgtgaatgccacccaacataccaggaggaggggacaggtagggtgcagctctgccacattgcccctaacctgccctgctccctccctgcagccttcatctcctcgtcctccaggca

SEQ ID NO: 261171 - DNA, 120 bp, Artificial Sequence
  ENSG00000125462_50 (sequence is synthesized)
tcagacctatttagatccgtcagcccacggaccagggggaccttgagcaggacagtcttttgtctccaagcagtcattccctgttatacaagcaagagtcaggaggaggaatggttttgg

SEQ ID NO: 261172 - DNA, 120 bp, Artificial Sequence
  ENSG00000125462_51 (sequence is synthesized)
catcatcccccacagacagcaatggggcctttaggcctggaaggaaggaccaggctgcggctggcatatggaggttgagccctgggcacggggcatcagcttcacccggctggggatgcc

SEQ ID NO: 261173 - DNA, 120 bp, Artificial Sequence
  ENSG00000125462_52 (sequence is synthesized)
ttctgctgggtttgtccatctggcaccagctggcttcccagcaccgcccccacaaccaaccagactcctccttctgctgttgccatggcaattggctgccatattgtacctcagagcact

SEQ ID NO: 261174 - DNA, 120 bp, Artificial Sequence
  ENSG00000125462_53 (sequence is synthesized)
agctcctatctggattttcccgcggggttcctagagggtgggagatgggtctccagggatttatccctttcccctgatatctatccaataaaaattcataataacatatgattttttaat

SEQ ID NO: 261175 - DNA, 120 bp, Artificial Sequence
  ENSG00000125462_54 (sequence is synthesized)
agcctaagtggaggattactatgtgtcaggctctgtgccagacactctctacatgttatttaatgtggctaagaaagaattaatgagatagaattcaagaggttcccatccagtttcctg

SEQ ID NO: 261176 - DNA, 120 bp, Artificial Sequence
  ENSG00000125462_55 (sequence is synthesized)
ctactacgacagacttttcctctctccaaccaggaaattccatgatcttgcttattcctgtcttgggaagtccttctccatgtctaaccaagatctatatggctatagcaccagctcttt

SEQ ID NO: 261177 - DNA, 120 bp, Artificial Sequence
  ENSG00000125462_56 (sequence is synthesized)
ggctcttggcttggcatggctaagttgggaggtaaggaaggaatgccacctagctttagttacttcataaaggttcctggactccagctattagaataggaaaactgagacttgtctagc

SEQ ID NO: 261178 - DNA, 120 bp, Artificial Sequence
  ENSG00000125462_57 (sequence is synthesized)
ttggtgagaggtctgagtgccccttaaagacttgggagcccccacccaaaccttttgtttacagaagaggagtaaatgccacagaatgctttgaaattccccttctgtgccccatcagca

SEQ ID NO: 261179 - DNA, 120 bp, Artificial Sequence
  ENSG00000125462_58 (sequence is synthesized)
ccccagaaagaggagccggagaccatggaatagcaatagtctctcaggccctctgggctccccctttggaagccagtctcccagctcctgccctggggggaacgttccaacagggtctca

SEQ ID NO: 261180 - DNA, 120 bp, Artificial Sequence
  ENSG00000125462_59 (sequence is synthesized)
cactaagcagaggccagatttgctgaggaaatcctgaatgaggagcaggtggagagaaaaaggaggccattctcaactgaggaagggtgggctgggagggaggggccagggataatttat

SEQ ID NO: 261181 - DNA, 120 bp, Artificial Sequence
  ENSG00000125462_60 (sequence is synthesized)
gatatcattgctcccccgccgcacttacttcccagccctctgctactgtaccgttgctaggagagcctggctctgtctggggctgggagggtgtaacaagcgggaggctgttccatctgc

SEQ ID NO: 261182 - DNA, 120 bp, Artificial Sequence
  ENSG00000125462_61 (sequence is synthesized)
actcctcctcccccacccaggggagggcaccgcatggagctgcatccaccaccccttcccaggccctgacagacaccagtctcttctgtcgttcccccaaatctagccactcaagggata

SEQ ID NO: 261183 - DNA, 120 bp, Artificial Sequence
  ENSG00000125462_62 (sequence is synthesized)
gcaggactcccagttgggctgaggatctagagcaaggaatgggcaagagagcatggaaggagacacactggcagacttagaggggcactgaggaacagacagcccaccttgagtcctggc

SEQ ID NO: 261184 - DNA, 120 bp, Artificial Sequence
  ENSG00000125462_63 (sequence is synthesized)
agccagcccgggtcaggaagagggccagagggggtcagggaaacaggcctggcagagatcaggtttggagaagacagggtcgttacatttgaggggctcctgatatgatgggcaaggcag

SEQ ID NO: 261185 - DNA, 120 bp, Artificial Sequence
  ENSG00000125462_64 (sequence is synthesized)
acttctcatccccactcctccatactgtcaagatccaggttggagagctggcaaaggtagggggaggaggagctggggaagggaggagggatgtgagctgggagaggctgcgaagagtct

SEQ ID NO: 261186 - DNA, 120 bp, Artificial Sequence
  ENSG00000125462_65 (sequence is synthesized)
aggaagaagaaaggccacactcgtctgagtggagctgggccatgcagggccgtggccgagatcccctcctctttctgaaactcttctcagatcttaaggctcttggagaagtcaagggag

SEQ ID NO: 261187 - DNA, 120 bp, Artificial Sequence
  ENSG00000125462_66 (sequence is synthesized)
gtgaactttgggggtttccaaagcggctggctcccaaccctggatgggacaggaaaggaaggctgtgcccacagctgtgcctgacacctgattcctgtgcagcccctactgggtttattt

SEQ ID NO: 261188 - DNA, 120 bp, Artificial Sequence
  ENSG00000125462_67 (sequence is synthesized)
gcctttcctggacatagcttccccagcccaggaaggaaggagctgaccctgatttgtgcccatttggttgtgtaagccctttcatagccattatctcagctaatcttcccaacagccctg

SEQ ID NO: 261189 - DNA, 120 bp, Artificial Sequence
  ENSG00000125462_68 (sequence is synthesized)
aaaaccgggtgatattgtccccactttatgaaggaggaatcaaagcctcaggaaggctaagacactttcccagagtcacaggactggtaaattgggctgggcttcaagtgggtcttcgta

SEQ ID NO: 261190 - DNA, 120 bp, Artificial Sequence
  ENSG00000125462_69 (sequence is synthesized)
gaccccaaagcatatgtccccttcctcccctgtgctgacttctgaaacacaaatggagggaccgagagaagagaggaccagataggcaggtggaattcttggcatgttctccagtgtagg

SEQ ID NO: 261191 - DNA, 120 bp, Artificial Sequence
  ENSG00000125462_70 (sequence is synthesized)
ggtaaagtctgagggatgataaacatcttgcaggttgaagacaggattggggaagaggccatgggagctgtggaagcgaccaaagtcttccaggctggtccttagcccaagtgcatcctg

SEQ ID NO: 261192 - DNA, 120 bp, Artificial Sequence
  ENSG00000125462_71 (sequence is synthesized)
caccctgccttcctgaagcaagtcccctgggctctctgcctaatctctcccgttcttgggatctgagtttacgccttaggcatttccctcaccccccattgccttggatggagcacctgg

SEQ ID NO: 261193 - DNA, 120 bp, Artificial Sequence
  ENSG00000125462_72 (sequence is synthesized)
aagaggtggaagaggtgcctagactcaagccactgtcatggtggatccctttgtgatgaccccttccctagctcctcaccttgcctgatggaagtgagctccttccaagatggctggaag

SEQ ID NO: 261194 - DNA, 90 bp, Artificial Sequence
  ENSG00000125462_73 (sequence is synthesized)
ttgcctgatggaagtgagctccttccaagatggctggaagtttgtcctctgcctcctcctaaagtctccatccgaagtgtattttttcca

SEQ ID NO: 261195 - DNA, 81 bp, Artificial Sequence
  ENSG00000125462_74 (sequence is synthesized)
cagcctggccaacatggcgaaaccccgtgtcttctaaaaatacaaaatttagccaggtgtgatacgagaattgcttgaacc

SEQ ID NO: 261196 - DNA, 64 bp, Artificial Sequence
  ENSG00000125462_75 (sequence is synthesized)
gaagtatttttctttacgcttgacaatttttcttttcagaccaaaaagaagaatgtacttcatc

SEQ ID NO: 261197 - DNA, 120 bp, Artificial Sequence
  ENSG00000125462_76 (sequence is synthesized)
ctgcgcagaggggcccggggaaagccggcctcacgggcgggagggagaggcttgagcgaggggctagagccgcgaggactgaccagcaccagaggatacaagaggaggagagagacctca

SEQ ID NO: 261198 - DNA, 120 bp, Artificial Sequence
  ENSG00000125462_77 (sequence is synthesized)
ctggttcgggcgacatttcacccccccagcaccccagtcggcacagcttctcacctggggcgggtgggttctgcaccaccctcccaccctccttcctccgtgtggacgatagagccacat

SEQ ID NO: 261199 - DNA, 120 bp, Artificial Sequence
  ENSG00000125462_78 (sequence is synthesized)
gggcagcaccccctttttgctgcctttccagggagagcagcaagagaaagaaagagagaggcaagcgaaattcctgaatggatagacagatgctacgtcatcggagctgcatcctccact

SEQ ID NO: 261200 - DNA, 120 bp, Artificial Sequence
  ENSG00000125462_79 (sequence is synthesized)
aacaaaggggccattctctctaggatttgatgctgccatctccggctggcagtgccaggtggtgggggcatcgggggtgtcaatccattatcccccccaactcctaggtcctctgaggct

SEQ ID NO: 261201 - DNA, 120 bp, Artificial Sequence
  ENSG00000125462_80 (sequence is synthesized)
ggatgttggggaggtgggtgttctatgctatgttgctatggcaaccgcccccccacccccaaagtacaaagagaggcagctttcacccctacccccaggaagaacctgggtctggctggg

SEQ ID NO: 261202 - DNA, 120 bp, Artificial Sequence
  ENSG00000125462_81 (sequence is synthesized)
aatcttcccttgagaatcctcctttctgatgcacaagccatggcatgcataagcgtcaccctcttttcagcactggaagctgagggttttgacagcggcaggccacataggcaaggaagc

SEQ ID NO: 261203 - DNA, 120 bp, Artificial Sequence
  ENSG00000125462_82 (sequence is synthesized)
tggtgcatgcagtgtctctgggcaaggttatgcaagtgagtaccagccccttatacttaaccccctctcttcccaagctcgcctgcccctcacctaccacagccaaggacatcccaggcc

SEQ ID NO: 261204 - DNA, 120 bp, Artificial Sequence
  ENSG00000125462_83 (sequence is synthesized)
ttctcagctgaagcgatggggccttgaccttctactctttcccagaagtgagggacacccggctacctccagcaaacctccaggctgtgggaacagagaagaggagggggccattcctgc

SEQ ID NO: 261205 - DNA, 120 bp, Artificial Sequence
  ENSG00000125462_84 (sequence is synthesized)
ctcgttaagcctgatttgcatgcatttgcataatacagttcatttacattccaggaggctcatggtagaagccaggaaaaaaggggaggggggctggagaagagaaaaagggggagagat

SEQ ID NO: 261206 - DNA, 120 bp, Artificial Sequence
  ENSG00000125462_85 (sequence is synthesized)
tttgttttcatcaaagtgttgggggagggactagggggaggtggcaggaagaggacagaaataaaaacttacactactttctttcttcctttctgccctccctccctgagctggactcaa

SEQ ID NO: 261207 - DNA, 120 bp, Artificial Sequence
  ENSG00000125462_86 (sequence is synthesized)
atgccaaagagagatgccaaggggccagcttttctgtccttttttgtcttgcttcctccggccttggctccccagcctggccccccaccttgttgggctgaggcttcagaaagaaagagg

SEQ ID NO: 261208 - DNA, 120 bp, Artificial Sequence
  ENSG00000125462_87 (sequence is synthesized)
gaccatgaatggcggcccccagaagagatgtaaggttgagcacaggagcaggggtggtagagaggcctcagcactgggcttagttcccagactacttagaggactgtgggtaataagaaa

SEQ ID NO: 261209 - DNA, 120 bp, Artificial Sequence
  ENSG00000125462_88 (sequence is synthesized)
agtactggaggaatcagaatgggggaatatcagcatgaggagagagagagtaagatgtggccaggcagtatcatctgctagtttgagggtctctctggggcctgtgaaaggtgactgtgt

SEQ ID NO: 261210 - DNA, 120 bp, Artificial Sequence
  ENSG00000125462_89 (sequence is synthesized)
acttgaggtgatgctccaccttctctcctcagcccagcactctggtgaaactgcatcctctcagaggccactcacagccccctcaacaaagaccactggcccttcccaagcccagtcctc

SEQ ID NO: 261211 - DNA, 120 bp, Artificial Sequence
  ENSG00000125462_90 (sequence is synthesized)
cttgacctgtatggaaaatgttatgccattttctcagtcttttcctttggccttctgttcttctgttacatccatgatcatctgttcttggttccattcattcagtcctccggatggacc

SEQ ID NO: 261212 - DNA, 120 bp, Artificial Sequence
  ENSG00000125462_91 (sequence is synthesized)
agttccttaactagaagtggtccccaggttctgctggtagcttgttttctcttccttctcactcttctcactccacttttatcactttaaccatcacctgaagttataaattctcctgtg

SEQ ID NO: 261213 - DNA, 84 bp, Artificial Sequence
  ENSG00000125462_92 (sequence is synthesized)
atcactttaaccatcacctgaagttataaattctcctgtgtttcatttttcttttcttttctcttctctttctttctctctctc

SEQ ID NO: 261214 - DNA, 120 bp, Artificial Sequence
  ENSG00000125462_93 (sequence is synthesized)
tgtcctgaatgttgggaagagggaagccgtgttctgggctttgaagtcatgcagatctgggttcaagtcctgcctccaccactttctgcttgtgtgattcagtgcccattgcttaacctc

SEQ ID NO: 261215 - DNA, 120 bp, Artificial Sequence
  ENSG00000125462_94 (sequence is synthesized)
tcatggagttgtgaggattaaataagatgcaagtaaaacacttagaaaggtgcctagtaaagattaagagcttaataataggaatagtaatcatgggaataaataaaatacattcaaact

SEQ ID NO: 261216 - DNA, 120 bp, Artificial Sequence
  ENSG00000125462_95 (sequence is synthesized)
ggacccggtctatagactctgaccttagccctcagaatccctcattcagagcttagggatcgccaggccagaaggtggctgggaaggcaccagggagaagacagcctcccgcccccagtt

SEQ ID NO: 261217 - DNA, 120 bp, Artificial Sequence
  ENSG00000125462_96 (sequence is synthesized)
gagggaggtggtgaagagaggggagactgaaagcagtgggggagggtgagagaggggagccagcagagactcaagtggcctccagacttccaagtgctggccttcatctccccgcaagat

SEQ ID NO: 261218 - DNA, 120 bp, Artificial Sequence
  ENSG00000125462_97 (sequence is synthesized)
taggccaccctgcttccagttctgtgatagagaggaaaggcattggggatacagggaactctttccccttctccaatgggctcctgagggcaaagttggaggccaattgaccttggggga

SEQ ID NO: 261219 - DNA, 120 bp, Artificial Sequence
  ENSG00000125462_98 (sequence is synthesized)
aagggaacagagatacttgtacctgggtgacagaggtgagaaagaagaggagcatggggtatggtaaatggggacccaaggagcttaaataactgtgagtgggtatgtatgccagggtat

SEQ ID NO: 261220 - DNA, 120 bp, Artificial Sequence
  ENSG00000125462_99 (sequence is synthesized)
acaactgcaagcactgggaggtggtactgctgggagtatcagtggatttgtcattgcattggtctgagttgataagtttgagtatgtgtgcatgtgtgtgtgtgtgcgcacgcgtgtatg

SEQ ID NO: 261221 - DNA, 120 bp, Artificial Sequence
  ENSG00000125462_100 (sequence is synthesized)
tgtgtgcgtgtgtgtatgtgtatgtgtgtgcatgtgtgtgtgtgcgtgtgtgtgtgtgtgatgcgcagcacccttgcatactcatgcttatgccccttaaggaggccatttgctgatggt

SEQ ID NO: 261222 - DNA, 120 bp, Artificial Sequence
  ENSG00000125462_101 (sequence is synthesized)
tgagggtcttgtagaaaggactcagtctggacgaaccagccaaccctctaccatctctgccaccttgttcttacctcccagacacataaggttctcaggcaagtgagcaatgtgtgggct

SEQ ID NO: 261223 - DNA, 120 bp, Artificial Sequence
  ENSG00000125462_102 (sequence is synthesized)
caagaatagaactgggagcaggcaaggaaggcagtacttacacaagcccaaggaattctcaagctggcccctcaataggaggaacataccactctctcgtggggaagaagtgtgacatcc

SEQ ID NO: 261224 - DNA, 120 bp, Artificial Sequence
  ENSG00000125462_103 (sequence is synthesized)
ttagggacgatatcctccagattatttctccatacctcctaccttttctgcccacatgaatagatattttgtatatatatatttttttcacacagcctcagtattttttattgctaattc

SEQ ID NO: 261225 - DNA, 120 bp, Artificial Sequence
  ENSG00000125462_104 (sequence is synthesized)
ttgcttttatttgtgactatcccatagacaatgcagatttctatagcaaaaaatgtatgatattgttcataatgatgcacttataagacaaataaatatctgaatccaccctttcccaaa

SEQ ID NO: 261226 - DNA, 120 bp, Artificial Sequence
  ENSG00000125462_105 (sequence is synthesized)
taggagcccagaaaatgtgtactgaattgctcagaattgtgtggtgaggtagaaagtattgcttaatctctccgagacctcaatttccttatttgtaaattaaactgctgattaatttct

SEQ ID NO: 261227 - DNA, 120 bp, Artificial Sequence
  ENSG00000125462_106 (sequence is synthesized)
aaagttcttttgagttacagaattctgttacccaacaaggtttcagagattgagaagattgaattatttgatttctaaattctttttcaacttcaatattaaatgattttataataccga

SEQ ID NO: 261228 - DNA, 120 bp, Artificial Sequence
  ENSG00000125462_107 (sequence is synthesized)
agatgaagagactcaagtaactgaaagttacttaaggccaatggggaccctgtgcagctatatatccagtgtcccaagcactgtgtctggcatgttagtaaacatgtttcataggactta

SEQ ID NO: 261229 - DNA, 120 bp, Artificial Sequence
  ENSG00000125462_108 (sequence is synthesized)
cgcaggggccacccgaacagtctctcctcctcacagaagcctggagctgggcatccaagaagaagcagcctcatttgttttctggtgtcatcgtaggtggccacctatggcttttggggt

SEQ ID NO: 261230 - DNA, 120 bp, Artificial Sequence
  ENSG00000125462_109 (sequence is synthesized)
atttattttcttatttattgtttctgatggtggagtgggtgggggaagaaaaggaaaactggccctgtctcacttatgttttctcctgttctctgtacccctctacccctctccctgtct

SEQ ID NO: 261231 - DNA, 120 bp, Artificial Sequence
  ENSG00000125462_110 (sequence is synthesized)
tgacagcggcaggccacataggcaaggaagctggtgcatgcagtgtctctgggcaaggttatgcaaccttcatctcctcgtcctccaggcagcacaagccattgtggaatctccaccagg

SEQ ID NO: 261232 - DNA, 120 bp, Artificial Sequence
  ENSG00000125482_0 (sequence is synthesized)
acttccgcttcctcaacagcagcacttccgggttgggagaaaggtggcggcgctttcggagggttagaacctgcaaatgaagaacacaatgtggaaacagctgaagattccgaaataaga

SEQ ID NO: 261233 - DNA, 120 bp, Artificial Sequence
  ENSG00000125482_1 (sequence is synthesized)
tacttatctgcagattcaggagatgccgatgattcagatgcggatttgggttctgccgtgaaacagcttcaggagttcattcctaacatcaaggacagggccaccagcacaatcaagcgg

SEQ ID NO: 261234 - DNA, 120 bp, Artificial Sequence
  ENSG00000125482_2 (sequence is synthesized)
atgtaccgggacgacttggaacggtttaaggaatttaaagcacaaggtgtcgctattaaatttggcaagttttctgtaaaggaaaataagcagttagagaaaaatgtggaagactttcta

SEQ ID NO: 261235 - DNA, 120 bp, Artificial Sequence
  ENSG00000125482_3 (sequence is synthesized)
gccctgacaggcattgagagtgcagacaagctgctgtacacggacagatatcctgaggaaaaatctgtgatcaccaacttaaaaaggagatactcgtttagattacacattggtaggaac

SEQ ID NO: 261236 - DNA, 120 bp, Artificial Sequence
  ENSG00000125482_4 (sequence is synthesized)
attgcccggccctggaaacttatatactatcgagcaaagaagatgttcgatgtcaacaattacaaaggcaggtatagcgaaggagatactgagaagttaaagatgtaccattctctcctt

SEQ ID NO: 261237 - DNA, 120 bp, Artificial Sequence
  ENSG00000125482_5 (sequence is synthesized)
gggaatgactggaagacgattggtgagatggtggcccgaagtagcctctccgtggccctcaagttctcacagatcagcagtcaaagaaatcgtggtgcttggagtaagtctgaaacccgg

SEQ ID NO: 261238 - DNA, 120 bp, Artificial Sequence
  ENSG00000125482_6 (sequence is synthesized)
aaactaatcaaggctgtcgaagaagtgattctgaagaagatgtctccccaggagttaaaagaggtggattccaaactccaagaaaatcctgaaagttgcctatcaattgttcgggaaaaa

SEQ ID NO: 261239 - DNA, 120 bp, Artificial Sequence
  ENSG00000125482_7 (sequence is synthesized)
tgactaatggtcggcgtatctactatggcatgaatgccctgcgggccaaggtcagccttattgaaaggttgtatgaaataaatgtggaagatactaatgaaatagactgggaagatcttg

SEQ ID NO: 261240 - DNA, 120 bp, Artificial Sequence
  ENSG00000125482_8 (sequence is synthesized)
ctagtgccataggtgatgttcctccatcttacgttcaaactaaattttctaggctgaaagctgtctatgttccattttggcagaaaaagacttttccagagatcatcgactacctttatg

SEQ ID NO: 261241 - DNA, 120 bp, Artificial Sequence
  ENSG00000125482_9 (sequence is synthesized)
agacgactctacctttgctgaaggaaaagttagaaaaaatgatggagaaaaaaggcactaaaatccagactcctgcagcacccaagcaagttttcccatttcgagacatcttttattatg

SEQ ID NO: 261242 - DNA, 120 bp, Artificial Sequence
  ENSG00000125482_10 (sequence is synthesized)
agcaagttttcccatttcgagacatcttttattatgaagacgatagtgaaggagaggacatagaaaaagaaagcgaaggccaggcgccatgcatggctcacgcctgtaattccagtactt

SEQ ID NO: 261243 - DNA, 86 bp, Artificial Sequence
  ENSG00000125482_11 (sequence is synthesized)
cgagaccggcctgaccaacatggtgaagacctgtcactattaaaaatgcaaaaattagccgggtgtggtagtgcacacctgtaatt

SEQ ID NO: 261244 - DNA, 120 bp, Artificial Sequence
  ENSG00000125482_12 (sequence is synthesized)
ttgcagtgagccaagatcgcaccaccgcatgagagagagagattactatttcttgtccctttttctcagtttgattatatttatatacatatgtcagtaaatctgttttcagtattgatg

SEQ ID NO: 261245 - DNA, 120 bp, Artificial Sequence
  ENSG00000125482_13 (sequence is synthesized)
gtaaatctgttttcagtattgatgtttaataaagaatgtacaatggccagagttctactctttcctctggagcattaaaatatattgccattcctattaaaacgtatttgaatgtgaaaa

SEQ ID NO: 261246 - DNA, 120 bp, Artificial Sequence
  ENSG00000125482_14 (sequence is synthesized)
ctcaacagcagcacttccgggttgggagaaaggtggcggcgctttcggagggaataaaatggaaggagaatcaagcagatttgaaatccacactccagtttctgacaagaaaaagaaaaa

SEQ ID NO: 261247 - DNA, 120 bp, Artificial Sequence
  ENSG00000125482_15 (sequence is synthesized)
gtgttctatacataaggaaagacctcagaaacattcccacgaaattttcagagactcctccctggtgaatgaacagtctcaaataactaggaggaaaaagaggaaaaaagatttccagca

SEQ ID NO: 261248 - DNA, 120 bp, Artificial Sequence
  ENSG00000125482_16 (sequence is synthesized)
tctcatttcttctcctttgaaaaaatccagaatctgtgatgagactgcaaatgccacttccacactcaaaaagagaaaaaagagaagatatagtgctttggaggtggacgaggaagcagg

SEQ ID NO: 261249 - DNA, 120 bp, Artificial Sequence
  ENSG00000125482_17 (sequence is synthesized)
tgttacagttgtccttgtggataaagaaaatattaacaacacaccaaagcattttagaaaggatgttgatgttgtttgtgttgatatgagcatagaacagaagttaccaagaaagcctaa

SEQ ID NO: 261250 - DNA, 120 bp, Artificial Sequence
  ENSG00000125482_18 (sequence is synthesized)
aacagacaaatttcaggtacttgctaagtcacatgcacataaatcagaagccctgcacagtaaagttagggagaaaaagaataaaaagcatcagaggaaagctgcatcctgggagagcca

SEQ ID NO: 261251 - DNA, 120 bp, Artificial Sequence
  ENSG00000125482_19 (sequence is synthesized)
gcgggcaagggacaccctgcctcagtcagaatcccaccaggaggagtcctggctttctgtgggtccagggggtgaaattacagaactaccagcatctgctcataaaaacaagtctaagaa

SEQ ID NO: 261252 - DNA, 120 bp, Artificial Sequence
  ENSG00000125482_20 (sequence is synthesized)
aaaaaagaaaaagtccagtaaccgggaatatgagacactggccatgcctgaaggatcgcaagcaggcagagaggccgggactgatatgcaggaatcccagcctactgtgggcttggatga

SEQ ID NO: 261253 - DNA, 120 bp, Artificial Sequence
  ENSG00000125482_21 (sequence is synthesized)
tgaaactccacaactactaggacctactcacaaaaaaaagtctaagaaaaaaaagaagaaaaagtccaatcaccaggaatttgaggcattggccatgcctgaaggatcacaagtgggcag

SEQ ID NO: 261254 - DNA, 120 bp, Artificial Sequence
  ENSG00000125482_22 (sequence is synthesized)
tgaggttggggctgatatgcaggaatcccggcctgctgtgggcctgcatggtgaaactgcaggaataccagcacctgcttataaaaacaagtctaagaaaaaaaagaaaaagtccaatca

SEQ ID NO: 261255 - DNA, 120 bp, Artificial Sequence
  ENSG00000125482_23 (sequence is synthesized)
ccaggaatttgaggcagtggccatgcctgagagcctcgagagtgcataccctgaaggatcacaggtgggcagtgaggttgggactgtggaaggcagtacagctcttaaagggttcaagga

SEQ ID NO: 261256 - DNA, 120 bp, Artificial Sequence
  ENSG00000125482_24 (sequence is synthesized)
atccaacagtacaaagaagaagtctaagaaaaggaagcttacgtctgtcaaaagggcacgagtgtctggtgatgatttttcagtgcccagtaagaactctgagagcacactctttgattc

SEQ ID NO: 261257 - DNA, 120 bp, Artificial Sequence
  ENSG00000125482_25 (sequence is synthesized)
agtagaaggtgatggcgccatgatggaagaaggtgtgaaatctaggccccgacaaaagaaaacccaggcctgtttggcaagcaagcacgtgcaagaggcgccaaggttagaacctgcaaa

SEQ ID NO: 261258 - DNA, 120 bp, Artificial Sequence
  ENSG00000125484_0 (sequence is synthesized)
cttggctcggcggcgctcggggcctgaggggagaaaaccgccgcggagggcgctgggggtggcggcggcggtccgggaggtggtcgcgcgactgcgtggagcgccagggcgtccgacctc

SEQ ID NO: 261259 - DNA, 120 bp, Artificial Sequence
  ENSG00000125484_1 (sequence is synthesized)
tgcacctgagagaagatgaacacggccgaccaggcccgggtggggcccgcggacgacgggcctgcgccgtctggggaggaggagggagaggggggcggcgaggcgggcgggaaggagcca

SEQ ID NO: 261260 - DNA, 120 bp, Artificial Sequence
  ENSG00000125484_2 (sequence is synthesized)
gcagcggacgcggccccggggcccagcgctgcattccgcctcatggtgactcggcgggagccggccgtgaagctgcagtatgcggtgagcggcctggaaccgctggcttggtccgaggac

SEQ ID NO: 261261 - DNA, 120 bp, Artificial Sequence
  ENSG00000125484_3 (sequence is synthesized)
caccgcgtgtctgtgtccacggcccgcagcatcgctgtgctggagctcatctgcgacgtgcacaacccgggccaggacctggttatccaccgcacctcggtgcccgcaccgctcaacagc

SEQ ID NO: 261262 - DNA, 120 bp, Artificial Sequence
  ENSG00000125484_4 (sequence is synthesized)
tgtctcctcaaagttggctcaaaaacagaagttgctgagtgcaaggagaaattcgccgcctccaaggaccccacggtcagtcagactttcatgttggatagggtgttcaaccctgagggg

SEQ ID NO: 261263 - DNA, 120 bp, Artificial Sequence
  ENSG00000125484_5 (sequence is synthesized)
aaggctttaccaccaatgagaggattcaagtacaccagctggtctcccatgggttgcgatgctaatggcaggtgcctcttggcagcactgaccatggacaatcgcctgaccatccaggca

SEQ ID NO: 261264 - DNA, 120 bp, Artificial Sequence
  ENSG00000125484_6 (sequence is synthesized)
aatctcaacagactgcagtgggtccagctggttgacctgactgagatctatggagaacgtctttatgagaccagttacaggctctctaaaaatgaggccccggaaggaaatctcggggat

SEQ ID NO: 261265 - DNA, 120 bp, Artificial Sequence
  ENSG00000125484_7 (sequence is synthesized)
tttgctgagtttcagaggagacacagcatgcagaccccagtcagaatggagtggtcgggcatctgtaccacccagcaggtcaagcataacaacgaatgccgggacgttggcagtgtgctc

SEQ ID NO: 261266 - DNA, 120 bp, Artificial Sequence
  ENSG00000125484_8 (sequence is synthesized)
ctggctgtcctctttgaaaacggtaatatcgccgtgtggcagtttcagctgccgtttgtaggaaaagaatccatctcttcatgcaacacaattgagtcaggaatcacctctcccagtgta

SEQ ID NO: 261267 - DNA, 120 bp, Artificial Sequence
  ENSG00000125484_9 (sequence is synthesized)
ttgttttggtgggaatatgagcacaataatcgaaaaatgagtggccttattgtggggagtgcttttggacccataaaaattcttcctgtcaatctcaaagcagtcaaaggctatttcact

SEQ ID NO: 261268 - DNA, 120 bp, Artificial Sequence
  ENSG00000125484_10 (sequence is synthesized)
ttaaggcagcctgttatcttgtggaaagaaatggaccagttacctgtgcacagtatcaaatgtgtgccactttatcatccttaccagaagtgtagttgcagcttagtagtggctgcaaga

SEQ ID NO: 261269 - DNA, 120 bp, Artificial Sequence
  ENSG00000125484_11 (sequence is synthesized)
ggctcttatgtattttggtgtcttcttctgatctccaaagcagggctgaatgttcacaattcccatgtcacaggccttcactcactgccaattgtctccatgactgcagacaaacagaat

SEQ ID NO: 261270 - DNA, 120 bp, Artificial Sequence
  ENSG00000125484_12 (sequence is synthesized)
ggaacagtctatacttgctccagtgacggaaaggtgaggcagctgattcccattttcacagatgttgcattgaagtttgaacaccagttgattaaactctcagatgtgtttggctcagtg

SEQ ID NO: 261271 - DNA, 120 bp, Artificial Sequence
  ENSG00000125484_13 (sequence is synthesized)
aggactcacgggatagcagtgagcccctgcggtgcatacctggccatcatcaccactgagggcatgatcaacggcctccaccctgttaacaaaaactaccaggtccaatttgttactctc

SEQ ID NO: 261272 - DNA, 120 bp, Artificial Sequence
  ENSG00000125484_14 (sequence is synthesized)
aaaacctttgaagaggcagctgctcagctcctggaatcttcagttcaaaacctttttaagcaggtagatttaatagacctagtacgctggaagattttaaaagataaacatatccctcaa

SEQ ID NO: 261273 - DNA, 120 bp, Artificial Sequence
  ENSG00000125484_15 (sequence is synthesized)
tttttacaagaagctttggaaaaaaagattgaaagcagtggagtcacctatttttggcgttttaagcttttcctcctgaggattttatatcagtcaatgcagaaaaccccttcagaagcc

SEQ ID NO: 261274 - DNA, 120 bp, Artificial Sequence
  ENSG00000125484_16 (sequence is synthesized)
ttgtggaaacccacccatgaggactcaaaaatcttactagtggattcgcctgggatgggcaatgctgacgatgaacagcaggaagaaggcacttcttccaaacaggtggtgaagcaaggc

SEQ ID NO: 261275 - DNA, 120 bp, Artificial Sequence
  ENSG00000125484_17 (sequence is synthesized)
ctgcaggagaggagcaaggaaggagatgtagaggagcccactgatgactcgctccccacgactggagatgctggaggccgtgagccaatggaagagaaactcctggaaatccaagggaaa

SEQ ID NO: 261276 - DNA, 120 bp, Artificial Sequence
  ENSG00000125484_18 (sequence is synthesized)
atcgaagctgtggagatgcacttgaccagggaacacatgaagcgagtcttaggagaagtgtatctgcacacctggatcacagaaaacactagcatccccacccgcggactctgtaacttt

SEQ ID NO: 261277 - DNA, 120 bp, Artificial Sequence
  ENSG00000125484_19 (sequence is synthesized)
ttaatgtctgatgaagagtatgatgacagaactgcacgggtgctgattggacatatctcaaagaagatgaacaaacagactttccctgagcactgtagtttgtgtaaagagatcttgcca

SEQ ID NO: 261278 - DNA, 120 bp, Artificial Sequence
  ENSG00000125484_20 (sequence is synthesized)
ttcacagatcgcaaacaggcagtctgttccaatggccacatttggctccggtgcttcttaacctaccagtcctgccagagtttgatatatagaaggtgtttgctccatgacagcattgcc

SEQ ID NO: 261279 - DNA, 120 bp, Artificial Sequence
  ENSG00000125484_21 (sequence is synthesized)
cggcatccagctccagaagatcccgactggattaagaggttactgcaaagcccctgccctttctgtgattctcctgtcttctaaataatcagtgacgggaagatggaagggcatgatgaa

SEQ ID NO: 261280 - DNA, 120 bp, Artificial Sequence
  ENSG00000125484_22 (sequence is synthesized)
ctctgccatagaaaacttcctccagcctgaagagaaggatgcactggaggaagccggaccctcacgagtggagagaagtccttggtgattgtaaagagggcccctggagctcatttctga

SEQ ID NO: 261281 - DNA, 120 bp, Artificial Sequence
  ENSG00000125484_23 (sequence is synthesized)
atcgcactctccatttccagagactaaaggatgtcctttgaaatggctggactcagagagttggagtcgttttgagatgagcattagccccagctttgtaaccaatgaggaacacttact

SEQ ID NO: 261282 - DNA, 120 bp, Artificial Sequence
  ENSG00000125484_24 (sequence is synthesized)
tatttttaagtatcttgacagaagcaatttgaacacagtgtcccgtcatttctagaaacagaatggtctcttctagagagcttggataaggaccttgctgggttgagttaggttttaatc

SEQ ID NO: 261283 - DNA, 120 bp, Artificial Sequence
  ENSG00000125484_25 (sequence is synthesized)
cttgctttggtttggaactgccttcgggctccagaacttaaattgcttggtccgtggcatctgatgtaccaacagagattaaaagtgtaaagcaacacatgggctgatgttttgttctca

SEQ ID NO: 261284 - DNA, 120 bp, Artificial Sequence
  ENSG00000125484_26 (sequence is synthesized)
gaaaatagctgctggtctgcatccctccattcttgttttttatgcatatggaaaacattttcctaaaactctatattcttaagttgaagccaagactaaaatttaatgtgtcaaatgatc

SEQ ID NO: 261285 - DNA, 120 bp, Artificial Sequence
  ENSG00000125484_27 (sequence is synthesized)
tggtgactattataatgaataattgtgacttatttttcattctctcctgggtcatcaggtttcctgacccaactccttaatccgtataaagatgtcaaatactgtagttcacccacgcca

SEQ ID NO: 261286 - DNA, 120 bp, Artificial Sequence
  ENSG00000125484_28 (sequence is synthesized)
cagccctgcttcagacttaactgtggtagcctagatgagctatttgtacacagaggaaaaaaagatattttcctcttttagtaataagactttcagtatttttaatgttgacatttccag

SEQ ID NO: 261287 - DNA, 120 bp, Artificial Sequence
  ENSG00000125484_29 (sequence is synthesized)
atgtttcatttagtatccaggggtctgtctggagacttctagagagggacagctcagaagtgagacccttgagctctggtgctgtaagcttgtgcaattaagttgaacagagcctgggaa

SEQ ID NO: 261288 - DNA, 120 bp, Artificial Sequence
  ENSG00000125484_30 (sequence is synthesized)
tttctttcctctgcacagtcccttgatatttggaatccaggttctgcccccaacccctacccacccagtggtctgttaagatgtctcagatggggctgggcttggtggctcatgcctgta

SEQ ID NO: 261289 - DNA, 89 bp, Artificial Sequence
  ENSG00000125484_31 (sequence is synthesized)
atgtctcagatggggctgggcttggtggctcatgcctgtactctcaacactttgggaagcagcctaaccaacatggtgaaaccgtgtct

SEQ ID NO: 261290 - DNA, 76 bp, Artificial Sequence
  ENSG00000125484_32 (sequence is synthesized)
gggaggccgaggcagacgggagactccgtctctactacaaatacaaaagttagcctggcatggtggcgcatgcctg

SEQ ID NO: 261291 - DNA, 120 bp, Artificial Sequence
  ENSG00000125484_33 (sequence is synthesized)
ctcaggaggctgaggcaggagcatcacttcaacccaggaggcagaagctgcagtcagccgaggtggcaccactgcacttcagcctgggcaagactggagactgcctcaaaaaaaaaagaa

SEQ ID NO: 261292 - DNA, 120 bp, Artificial Sequence
  ENSG00000125484_34 (sequence is synthesized)
caagactggagactgcctcaaaaaaaaaagaaaaaaaatgttggtacttagatgataccatgacggcaacctccccacccccaccccgcattgataggtagtgcagaccagcccttggag

SEQ ID NO: 261293 - DNA, 120 bp, Artificial Sequence
  ENSG00000125484_35 (sequence is synthesized)
cttatttttctcatttggtggtaatttcaagaagagcgtttatccactattgattttcaagaaagaaaccaagcagcattgaaatcatgagtaacagaattcagaacattgtatggtgga

SEQ ID NO: 261294 - DNA, 120 bp, Artificial Sequence
  ENSG00000125484_36 (sequence is synthesized)
agtcatttgtgtctgcagctgttttttcactttacaataaataagagtaaaaattgagatcatgtcaaaaaattattgcagttttaatcattatggcatagtttcacttcccctcccccc

SEQ ID NO: 261295 - DNA, 120 bp, Artificial Sequence
  ENSG00000125484_37 (sequence is synthesized)
attagaatcagtggagatttgttcttactagggaattttggactgctgccatttaaaacttaggtttttatttaaagcagttgtgcatttttgagaaaatgtattgggagtaactagaga

SEQ ID NO: 261296 - DNA, 120 bp, Artificial Sequence
  ENSG00000125484_38 (sequence is synthesized)
ggatctcccaaatttttttgtatgtctctctaggagtaaacatggcaacagtttttctagaacgtggactcactgcagggactggacccaatggcattgttaagaccctaaaatctagcc

SEQ ID NO: 261297 - DNA, 120 bp, Artificial Sequence
  ENSG00000125484_39 (sequence is synthesized)
accacctgcctcccccaggtttccacacacccagttggaaggcctttccctgcccttgtccctgtctcacacccatggaggttaagctacagagctggggaaacaggagattttgagtta

SEQ ID NO: 261298 - DNA, 120 bp, Artificial Sequence
  ENSG00000125484_40 (sequence is synthesized)
atggcagcctcacaaatagtgcttctgaatttctctgagggtcagcatacctcatgggagtgtgttgctcagtgcaaccttggaaaagtgggaatggcaccagacgtttttcaggtgcct

SEQ ID NO: 261299 - DNA, 120 bp, Artificial Sequence
  ENSG00000125484_41 (sequence is synthesized)
cttgcaattcaaacttacatcctctataccgtcctaaaatttgcctgatcttatttggtagatttcaagttgctttcagctgtgaccgtaataactgtttcaggaactggagaaatagtg

SEQ ID NO: 261300 - DNA, 120 bp, Artificial Sequence
  ENSG00000125484_42 (sequence is synthesized)
gaagtgctattgccgcgctgcatgtaaagcacaggagcaaagattcgatacaattagaccctttaagctacaacgtggttgcatttggggagtctgatacccacataggtatcacatttt

SEQ ID NO: 261301 - DNA, 120 bp, Artificial Sequence
  ENSG00000125484_43 (sequence is synthesized)
ctctgcctggggttaatttgttcttattattctaggtaagaaattgatagcttgttatgcttggtactcattctgaaatccctgtgtgtccaccaggcagacttcaagcaatctctacct

SEQ ID NO: 261302 - DNA, 120 bp, Artificial Sequence
  ENSG00000125484_44 (sequence is synthesized)
actattatatctgccaaaactaccaattatttttcaatgtcagaagttattagagccactggcaaagctcatggttgaatatgacatttttctgcttttccctctaagaagtttttgaga

SEQ ID NO: 261303 - DNA, 120 bp, Artificial Sequence
  ENSG00000125484_45 (sequence is synthesized)
atgttaatgttgaagtatgcaggctggacctaccagcaagtttaacacgttaattaggttaaaaagaatattaaaaggcaataattaaatatttcaattattttgtaattataatggtat

SEQ ID NO: 261304 - DNA, 120 bp, Artificial Sequence
  ENSG00000125484_46 (sequence is synthesized)
caaataagatgcaaaagaagttgatgcttattggtgcttaagagaattacaatactggttttatgagcatcttttctctgcaacagttaaactgcctcagagtttgtgaattgctgcaat

SEQ ID NO: 261305 - DNA, 120 bp, Artificial Sequence
  ENSG00000125484_47 (sequence is synthesized)
tcctggaatggaaacaggaattagggtcactggttgattggcacaggatctttccatcgtttctgctcctgacctctctctcttgcctttccttcccccagacaccctcttggtttccat

SEQ ID NO: 261306 - DNA, 120 bp, Artificial Sequence
  ENSG00000125484_48 (sequence is synthesized)
tcctttagttccctctgctttagaacacagattacatgttggaaagaaaaatggattaatggtaaaatttctaaaagctaaattgtacagtggggtctcacttcctagaagaaactattg

SEQ ID NO: 261307 - DNA, 120 bp, Artificial Sequence
  ENSG00000125484_49 (sequence is synthesized)
gtaatatttctttctaaaggtaatagtattaattgtatctggttttcttcaaaacttaactataatttccttgtcagggtgctcagtagctcttggtttgactttgggctaagggatgtg

SEQ ID NO: 261308 - DNA, 120 bp, Artificial Sequence
  ENSG00000125484_50 (sequence is synthesized)
aaattttagctccttcccaccacctgtttcccctcactcccacccccagccaatattcttcataagcaaaaattatggttaagctaagctgaatgggttatattcaaagtaagtacagac

SEQ ID NO: 261309 - DNA, 120 bp, Artificial Sequence
  ENSG00000125484_51 (sequence is synthesized)
ggcaaataggcagacaaatacaggaatgtctttacaattagcccaccatggactgttttgagtctctgcatggtttccataattcattatgatgtatctttatgctctttcactgctctt

SEQ ID NO: 261310 - DNA, 120 bp, Artificial Sequence
  ENSG00000125484_52 (sequence is synthesized)
ctgtgcgttggagtttagcaattcagtgagactggggagtgtctcaagaatggaacctttgccttcaaggttgggtcatcaaaaatccctctaaaggatctaactgtaatgaactgtttt

SEQ ID NO: 261311 - DNA, 120 bp, Artificial Sequence
  ENSG00000125484_53 (sequence is synthesized)
tatttttgccattagtgcaagtatcaactggcagcctcaaacagctttagactatgtctcaggtctctcatagttatacttagaactgctctttcttgaagctaaaagaggtttttggag

SEQ ID NO: 261312 - DNA, 120 bp, Artificial Sequence
  ENSG00000125484_54 (sequence is synthesized)
taaagatctgcttcatgtctgctagcatggtatctgctgttcaacctagtatagagcatgtgaaatgcaactgtcctttaatggaattcagccaaactccaaaaatactgagttgcttct

SEQ ID NO: 261313 - DNA, 120 bp, Artificial Sequence
  ENSG00000125484_55 (sequence is synthesized)
agttatctaaagtagtacagaatcactatcccgatgaagaagtggggtttttcagaagattgtaaactcatttccatggcacagatacaaatcatcgtcaggacttgttagccagtccat

SEQ ID NO: 261314 - DNA, 120 bp, Artificial Sequence
  ENSG00000125484_56 (sequence is synthesized)
gtctcattgataggatgtagcctgccatctgcatagatggtttaacatggtgctgtttttgaaaacttgctgtggaaataaatttgacagacgagtagttatttgtaaagctgtcctaga

SEQ ID NO: 261315 - DNA, 120 bp, Artificial Sequence
  ENSG00000125484_57 (sequence is synthesized)
aagaggttaattcttttggtatatgaatatttctcctccaatccttttaattaggtggttcagcttatcttgtattttctgagtcataactatactctagggccaagacctactataaaa

SEQ ID NO: 261316 - DNA, 120 bp, Artificial Sequence
  ENSG00000125484_58 (sequence is synthesized)
tctggggtcctaaccagagagttgtttagatcaatatgatatgctttgccaacatgatctaagaaggtattcattctttctgggtttgagaagagttgacgaaagtgtaagattatactc

SEQ ID NO: 261317 - DNA, 120 bp, Artificial Sequence
  ENSG00000125484_59 (sequence is synthesized)
tcatgctaaaataaggtataggctaagtgaaatactgtaaatgggttggttagaattaaagtttagaactctaaatcttatgcttatttttaaagtaaaaagttgcctcactgtcatgaa

SEQ ID NO: 261318 - DNA, 120 bp, Artificial Sequence
  ENSG00000125484_60 (sequence is synthesized)
atcctgttactttcattaaaaaaaaaaatcctgtaaaatggtcaaattggataatgtaagagataatgatggctttgaggcatttcatactttaccagtttacatttggctagcagactg

SEQ ID NO: 261319 - DNA, 120 bp, Artificial Sequence
  ENSG00000125484_61 (sequence is synthesized)
gtaaggtttagggttctctccactaatggaaaattaaatgctaaacgtcctaagaattatgttgttttcaaggctttgactcagatttgtactttgatgtatgaaagtgaatatcaaact

SEQ ID NO: 261320 - DNA, 120 bp, Artificial Sequence
  ENSG00000125484_62 (sequence is synthesized)
tgtttatagaaaagactatatagaaaaataagtctgtgttgtgtatagtgatacatgttttatgtttacccaatgcctgtactaaatcttgtgcttggctttgaattatatatgtgttta

SEQ ID NO: 261321 - DNA, 120 bp, Artificial Sequence
  ENSG00000125484_63 (sequence is synthesized)
cctatgacttttttttgaaataaacagaacagtcatctaaaaacataaggttttggaaaggagatgctttttcaattcttaccatctgattaggtggaatgttttatagacttttggtgt

SEQ ID NO: 261322 - DNA, 120 bp, Artificial Sequence
  ENSG00000125484_64 (sequence is synthesized)
tgaaaaaaaaaagtttgataacaatgcattttgcttggaataccccccaatccagaaaagttggtgacttctctccattgtatatatgtacatagttttcattactagattgtaagctcc

SEQ ID NO: 261323 - DNA, 120 bp, Artificial Sequence
  ENSG00000125484_65 (sequence is synthesized)
tcaagggcaggaattgttttatctttgttgttcctgcagcacctaatgtaaagtgccttgcacagggtaggtgctcatgacgtgtagaatgagtgagtaacttcctgcctcatcaggatg

SEQ ID NO: 261324 - DNA, 120 bp, Artificial Sequence
  ENSG00000125484_66 (sequence is synthesized)
aaatgtggttcacttcccctgtgttcaacactacaaagctactcctgccagaagagggcagagttctttcttgggtttgaactggcttttttgggttgaaccagatcatcccacatcctt

SEQ ID NO: 261325 - DNA, 120 bp, Artificial Sequence
  ENSG00000125484_67 (sequence is synthesized)
agcactacttaaccttcttttcctgaagattacatatcagtgtcctgcgtttttatctaatattagagctgaggttcctaggaaaattttgaagtggggaagattatggagaaaatgaaa

SEQ ID NO: 261326 - DNA, 120 bp, Artificial Sequence
  ENSG00000125484_68 (sequence is synthesized)
tggaaatttggggagggtggtttgtcagtataaggccctgtggggtaatcatattttagttattacttgttaaaagggtaacagaacctctgtttctttaccaagtcgctggttggccat

SEQ ID NO: 261327 - DNA, 120 bp, Artificial Sequence
  ENSG00000125484_69 (sequence is synthesized)
ttctccaattgatgaactaccattggttttagctctttctcatttgggattcccctcaattgcttacatgattctggtacttagagtctaatagagttgctgtgaatatgtagtgctgta

SEQ ID NO: 261328 - DNA, 120 bp, Artificial Sequence
  ENSG00000125484_70 (sequence is synthesized)
cataatggcagttttgtaaatgtgagataaccttgaatatgttgtggtttgtatacagagccattagtattgttattttggccacttttttattcaaaataaataacataattatttgta

SEQ ID NO: 261329 - DNA, 120 bp, Artificial Sequence
  ENSG00000125484_71 (sequence is synthesized)
cttccgggtccggaacggctccagctgtacggactcgtcccgaggggagccggggacggcggcaccgggcgggtagggacaagactaccgcgcgtgcccccgcctggtggcagcccctct

SEQ ID NO: 261330 - DNA, 120 bp, Artificial Sequence
  ENSG00000125484_72 (sequence is synthesized)
ctgcgtccctcgcggcctggcaaaattacattcggccgagagttcacgctggggaagctctctgaatgcctctgagaagcgagatccggcgccatctcaccgacgagcctcccctttacc

SEQ ID NO: 261331 - DNA, 120 bp, Artificial Sequence
  ENSG00000125484_73 (sequence is synthesized)
gccccgtgcgtttcctcagcactttaggaactaaagcctgtctgggtagctccctaacaggctctggagctcaatccctgggcagggaaaagggggtcctcggggctccccgctcgctgt

SEQ ID NO: 261332 - DNA, 120 bp, Artificial Sequence
  ENSG00000125485_0 (sequence is synthesized)
aaaaaggacagcgagcggggagccccgaggacccccttttccctgcccagggattgagctccagagcctgttagggagctacccagacaggctttagttcctaaagtgctgaggaaacgc

SEQ ID NO: 261333 - DNA, 120 bp, Artificial Sequence
  ENSG00000125485_1 (sequence is synthesized)
acggggcggtaaaggggaggctcgtcggtgagatggcgccggatctcgcttctcagaggcattcagagagcttccccagcgtgaactctcggccgaatgtaattttgccaggccgcgagg

SEQ ID NO: 261334 - DNA, 120 bp, Artificial Sequence
  ENSG00000125485_2 (sequence is synthesized)
gacgcagagaggggctgccaccaggcgggggcacgcgcggtagtcttgtccctacccgcccggtgccgccgtccccggctcccctcgggacgagtccgtacagctggagccgttccggac

SEQ ID NO: 261335 - DNA, 120 bp, Artificial Sequence
  ENSG00000125485_3 (sequence is synthesized)
ccggaaggggcggtggcgcagggtcctcgcgcgtcccacgtggggtcccgggcccagcagtctgcgcaccgggctcgctgctgcaccacgcgtcacccacgcagaccatggcagccgccg

SEQ ID NO: 261336 - DNA, 120 bp, Artificial Sequence
  ENSG00000125485_4 (sequence is synthesized)
acggttcgctcttcgacaaccccaggacgttctccagacgtcccccagcccaggcgagtcggcaagcaaaggctacgaaaagaaaataccaagcgtccagtgaggctcccccagcgaaac

SEQ ID NO: 261337 - DNA, 120 bp, Artificial Sequence
  ENSG00000125485_5 (sequence is synthesized)
ggaggaacgaaacttcatttctcccagccaagaaaactagtgttaaagaaactcagaggacttttaaggggaacgcacaaaaaatgttttctccaaagaagcattcggttagcacaagtg

SEQ ID NO: 261338 - DNA, 120 bp, Artificial Sequence
  ENSG00000125485_6 (sequence is synthesized)
atagaaaccaggaggagagacagtgcattaagacttcatcactgtttaaaaacaaccctgacattccagaactccacagacctgtggtaaagcaggtgcaagaaaaagtgtttacttcag

SEQ ID NO: 261339 - DNA, 120 bp, Artificial Sequence
  ENSG00000125485_7 (sequence is synthesized)
ctgcttttcatgagctgggcctccacccacatttaatttccacaataaatacggtcttaaaaatgtctagtatgaccagtgttcagaagcaaagtattcctgtgttgctggaaggcagag

SEQ ID NO: 261340 - DNA, 120 bp, Artificial Sequence
  ENSG00000125485_8 (sequence is synthesized)
atgctctcgtgagatcccagacgggctcaggtaaaactcttgcctattgcatccctgtggtccagtcccttcaagcaatggagtcaaaaatacagcgcagtgatggcccctatgccctgg

SEQ ID NO: 261341 - DNA, 120 bp, Artificial Sequence
  ENSG00000125485_9 (sequence is synthesized)
tgctcgtgccaacgagagagctagctctacaaagctttgacactgtccagaaactgcttaagcctttcacctggattgtgcctggagtgttaatgggaggagagaagagaaaatcagaaa

SEQ ID NO: 261342 - DNA, 120 bp, Artificial Sequence
  ENSG00000125485_10 (sequence is synthesized)
aggccagactccgcaaaggaataaatatccttatctcaactcctggacgcctggtggatcatataaaatccacaaagaacattcattttagtcggctgcggtggttggtgtttgatgaag

SEQ ID NO: 261343 - DNA, 120 bp, Artificial Sequence
  ENSG00000125485_11 (sequence is synthesized)
cagacagaatcttggatttgggttttgaaaaggacatcacagtgatacttaatgctgtaaatgctgaatgccaaaaacgacagaatgtcttgctatcagcgacactcacagaaggtgtaa

SEQ ID NO: 261344 - DNA, 120 bp, Artificial Sequence
  ENSG00000125485_12 (sequence is synthesized)
cgcggctagctgatatcagtttgcatgatccagtcagtatttctgtcctggacaagagccatgaccagttgaacccaaaggacaaagcggtccaggaggtctgtcctccaccagctggcg

SEQ ID NO: 261345 - DNA, 120 bp, Artificial Sequence
  ENSG00000125485_13 (sequence is synthesized)
tgactgtggttcccagcaaactgaggcttgtctgcctagcggccttcatccttcagaaatgcaagtttgaggaagaccagaagatggttgtctttttctcaagttgcgagctggtggagt

SEQ ID NO: 261346 - DNA, 120 bp, Artificial Sequence
  ENSG00000125485_14 (sequence is synthesized)
tccactacagcctcttcctacagaccctgctgagcagctcaggggcgccggcatcagggcagttgccatctgcctccatgcgattaaaattcctacggctgcatggcggcatggagcagg

SEQ ID NO: 261347 - DNA, 120 bp, Artificial Sequence
  ENSG00000125485_15 (sequence is synthesized)
aggaaagaacagcagtgtttcaggaattttcacattccagaagaggcgtccttctttgcacggatgttgcagctcggggcttagatctccctcaagtcacgtggattgttcagtacaacg

SEQ ID NO: 261348 - DNA, 120 bp, Artificial Sequence
  ENSG00000125485_16 (sequence is synthesized)
ctccatcttcacctgcagaatacatccaccggattggaagaaccgcccggattggctgccatgggagcagcctgctcattttggctccttcggaggcagaatatgtcaactcgttggctt

SEQ ID NO: 261349 - DNA, 120 bp, Artificial Sequence
  ENSG00000125485_17 (sequence is synthesized)
ctcacaaaatcaacgtttctgagattaagatggaagatattttgtgtgttctgacaagagatgattgttttaaagggaaacgatggggagcccagaaatcccatgctgttggcccccagg

SEQ ID NO: 261350 - DNA, 120 bp, Artificial Sequence
  ENSG00000125485_18 (sequence is synthesized)
aaatccgagagcgagccacagtcttgcagacggtatttgaagattacgtgcactccagtgagaggagggtctcctgggcaaagaaagctctgcagtccttcatccaagcctacgccacct

SEQ ID NO: 261351 - DNA, 120 bp, Artificial Sequence
  ENSG00000125485_19 (sequence is synthesized)
accccagggagctgaagcacatcttccacgtccgatccctccaccttgggcatgtggcgaagagcttcggactaagagatgcccccaggaatcttagtgccttgactagaaagaagagga

SEQ ID NO: 261352 - DNA, 120 bp, Artificial Sequence
  ENSG00000125485_20 (sequence is synthesized)
aagcacacgtgaaaaggcctgaccttcataagaagacccagagtaaacacagcctcgctgaaatcctacgttcggaatactcaagcggcatggaggccgacatcgccaaggtcaaaaagc

SEQ ID NO: 261353 - DNA, 120 bp, Artificial Sequence
  ENSG00000125485_21 (sequence is synthesized)
aaaacgcacctggagagcctggtggccggcccctgcagcacagtctgcagccgacaccctgctttggccgtgggaaaacattaaaatggagaaaaacccaaaaaggtgtacagcgggaca

SEQ ID NO: 261354 - DNA, 120 bp, Artificial Sequence
  ENSG00000125485_22 (sequence is synthesized)
gcaagacttcccagaaagtttaaaatctctctgggtcttcgagtggaacctggaagccccgggtggcagtggattgatgtccagttcttgtcagaggaggcttgtgaaaaataactgcgc

SEQ ID NO: 261355 - DNA, 120 bp, Artificial Sequence
  ENSG00000125485_23 (sequence is synthesized)
ctttgcctgaataccacgtccccaagaatcagaggggccacagcccttctcctccatgggaggccctggagcctgatagaaatcagtggtgtggggcactgtagagactagccagctccc

SEQ ID NO: 261356 - DNA, 120 bp, Artificial Sequence
  ENSG00000125485_24 (sequence is synthesized)
gacggaaggggtctgtgtcttgtattgatcccatcagtgcccggcactcccttcacccaggtgctgacgtgccggggttgagctggcaccccgggatgtgatgtaagaacgccctgcgcg

SEQ ID NO: 261357 - DNA, 120 bp, Artificial Sequence
  ENSG00000125485_25 (sequence is synthesized)
tcagcctggaacgggcttgattgctgcccttaactgtgttctgaagtttcacagcttggcttcagcctatcagcgcatacattggcatgaattttgtgaattagggtgttaaaaactgga

SEQ ID NO: 261358 - DNA, 120 bp, Artificial Sequence
  ENSG00000125485_26 (sequence is synthesized)
attgaatttgtacaaaaagagaatatatttatcactaattattttcttaatgtaggaatgtaccgttaaaaaggaccaaaagtttttggtctgggtcaaaaaatacgaatgtgttctcag

SEQ ID NO: 261359 - DNA, 120 bp, Artificial Sequence
  ENSG00000125485_27 (sequence is synthesized)
agggctaattgatttactgttggctttttattatttgcctttgaagtcaaaaggcaccagtatcccaagctttttttccctatcgaatcctgtcttgtcttcaagaaaggtctgggggtc

SEQ ID NO: 261360 - DNA, 120 bp, Artificial Sequence
  ENSG00000125485_28 (sequence is synthesized)
tttgtattgtgacccaggccacagctgcccgccccccgcccccgacccaccccgccctgcccctgcattgtgttttctgggaggtttgaaagaggccccctggagcatattgatttccca

SEQ ID NO: 261361 - DNA, 120 bp, Artificial Sequence
  ENSG00000125485_29 (sequence is synthesized)
ataaatgtaagatttgggcacttgcagaggggtccagaagagaaagggttggaggcctccacacctgtgggcaccgctcctgtcctctccactgtgtcttgccttctcagtttccttctc

SEQ ID NO: 261362 - DNA, 120 bp, Artificial Sequence
  ENSG00000125485_30 (sequence is synthesized)
ctctgcagtgactgtgccgccctctgtggtctccccaggaccagtgttgaggcaccacttcagtagatccccccagatccttggaaggtctgagtggccacgagagggtggtgagagttg

SEQ ID NO: 261363 - DNA, 120 bp, Artificial Sequence
  ENSG00000125485_31 (sequence is synthesized)
gcaaggtgggccttcctgcagggaccacggggggtcagcatccttgcctccgttctagacacaggtgaatgtcagtgggcacccacactggcggagactccagtgtgagggcaaggagga

SEQ ID NO: 261364 - DNA, 120 bp, Artificial Sequence
  ENSG00000125485_32 (sequence is synthesized)
gcctagtgagactggatcctctgcaggtggaaaaataggaccttctcagagttggctgtcacatacaaattaacagggactgtgggtgacgtttctaacaataataattaaaaaacaaca

SEQ ID NO: 261365 - DNA, 120 bp, Artificial Sequence
  ENSG00000125485_33 (sequence is synthesized)
accctgcagcacatgtcagcctggcgttgggcaagtctgccacctttcttttatttcgatgtgtaatggttcacatgatttggatgagaaaaggagggatcaaactttatagacaaaacc

SEQ ID NO: 261366 - DNA, 120 bp, Artificial Sequence
  ENSG00000125485_34 (sequence is synthesized)
cagctgtgtgaaaaacaggattaatgccagtgattggggatgatcaaagagaaaccttactttttctcccccagtactcattccactaaagggcgaattggcagagttcggcatccctgg

SEQ ID NO: 261367 - DNA, 120 bp, Artificial Sequence
  ENSG00000125485_35 (sequence is synthesized)
ggggaaagagaagtgctagaatcatgcaacgtgtgagtgacgataattccaagatcaaaacttacacacttaatctgctaactcttatggtgagggtttcttgccatagatgctatgtgg

SEQ ID NO: 261368 - DNA, 120 bp, Artificial Sequence
  ENSG00000125485_36 (sequence is synthesized)
gtctgtttctaagtagaatcactatattaccccagttaataaagaaacatggatttagcagatttaaggttaatattgtttaaatttaaataaccttaaaataaatctctttctcttcta

SEQ ID NO: 261369 - DNA, 120 bp, Artificial Sequence
  ENSG00000125485_37 (sequence is synthesized)
gcttaggaaagttaaataaccaaggccatgcagcaagtaatggaggaactggatttctacctcagttctgtttggctgcagagaccaagctccttactcttgtgtgaagacttacagtga

SEQ ID NO: 261370 - DNA, 120 bp, Artificial Sequence
  ENSG00000125485_38 (sequence is synthesized)
aggttaattcctggctcctgtgctatgtaggggccatgcatctgtgtcttccacagtacctaacgtgggaccttttacagaatggtcactcaataaaggtgatttggttttgcagctatc

SEQ ID NO: 261371 - DNA, 120 bp, Artificial Sequence
  ENSG00000125485_39 (sequence is synthesized)
gaggaaaggaaccttgcttttaataccatcattatgttgacgagttgataagaagtaccaccgaatggccggaaaatggagtttctaagccacctgattttaaggctgacattaggtttt

SEQ ID NO: 261372 - DNA, 120 bp, Artificial Sequence
  ENSG00000125485_40 (sequence is synthesized)
ctgttggtctccggtggctgtccttgattgtccctggatggagtgcagtcacctttttcccagaaaggaaagatacctgcagcccgccctgggcgccaactgtcccttggcatcctcctt

SEQ ID NO: 261373 - DNA, 120 bp, Artificial Sequence
  ENSG00000125485_41 (sequence is synthesized)
ggctgtccggcgcgtgcatttctttttcagaagatgcacctaaatcacctgtgctgctttcctccaccttctccgtatttttttccgcttgaagcatactgttctgtctgtgcagttctt

SEQ ID NO: 261374 - DNA, 120 bp, Artificial Sequence
  ENSG00000125485_42 (sequence is synthesized)
aatttcctctcctcctggggaatttccaccgtgccaggaggctaggagacaaaggagatacggctgtgaagagtcacaatgtcagttctgtgtcccaaataaatgtagactttcgtgctt

SEQ ID NO: 261375 - DNA, 120 bp, Artificial Sequence
  ENSG00000125485_43 (sequence is synthesized)
ggctcctcttgatttcttaggcattacgtgggtataaccggacgaaacctgtgtgtgcaaggcagagcaaatttgtgtcttggcgttggaacacagtgccaggttatcgaccataaaggg

SEQ ID NO: 261376 - DNA, 120 bp, Artificial Sequence
  ENSG00000125492_0 (sequence is synthesized)
cttttggatctaatgcgcagaggaggttggcccagagctcccgggctcccccaaggctgaactccgtccaaggtgcccgcaggctccctgcccgccttccccatgccagcccgcagctag

SEQ ID NO: 261377 - DNA, 120 bp, Artificial Sequence
  ENSG00000125492_1 (sequence is synthesized)
gggcaggggcagcggcggctggggttgggggtgggtggggagcttttggggaggacaggtcgcagcttggctatggaaggctccaatggctttgggatcgactccattctctcccaccgc

SEQ ID NO: 261378 - DNA, 120 bp, Artificial Sequence
  ENSG00000125492_2 (sequence is synthesized)
gcgggcagccccgcccttcccaagggggaccccttgctcggggactgccgttcgcccctggagctgagtccacgctcagagagcagcagcgactgctcttcgccagcctctccaggaagg

SEQ ID NO: 261379 - DNA, 120 bp, Artificial Sequence
  ENSG00000125492_3 (sequence is synthesized)
gactgtttggagacggggaccccacggcctggcggggcatccggcccaggtttggactcccacctgcagcccgggcagctctcagccccggcccagtcgcgcaccgtcacctcctccttt

SEQ ID NO: 261380 - DNA, 120 bp, Artificial Sequence
  ENSG00000125492_4 (sequence is synthesized)
ctgatcagggacatccttgccgactgcaaaccactcgcggcctgtgcaccctactctagcagcgggcagccggcagcccctgagcctgggggccgccttgcggccaaggccgcggaggac

SEQ ID NO: 261381 - DNA, 120 bp, Artificial Sequence
  ENSG00000125492_5 (sequence is synthesized)
tttagagacaagctggacaaaagtggcagcaacgcctcatcggactctgagtataaagtgaaggaggagggcgaccgcgagatctccagctccagggacagtcccccggtgcgcctgaaa

SEQ ID NO: 261382 - DNA, 120 bp, Artificial Sequence
  ENSG00000125492_6 (sequence is synthesized)
aagccacgcaaggcgcgcacggccttcaccgaccatcagctggcgcagctggagcgcagcttcgagcggcagaagtacctgagcgtgcaggaccgcatggagctcgccgcctcgctcaac

SEQ ID NO: 261383 - DNA, 120 bp, Artificial Sequence
  ENSG00000125492_7 (sequence is synthesized)
cgctccagcggatgttcccgtcgccttatttctacccgcagagtctggtttccaacctggaccccggcgcggcgctctacctgtaccgcggccccagcgcgccgccgcctgctctccaga

SEQ ID NO: 261384 - DNA, 120 bp, Artificial Sequence
  ENSG00000125492_8 (sequence is synthesized)
tctccagagacctctggtgccccgcatcctcatccacggactccagggcgccagcgagccgcccccgccgctgccccccctggccggcgtcctcccacgcgccgcgcagcctcggtgagg

SEQ ID NO: 261385 - DNA, 120 bp, Artificial Sequence
  ENSG00000125492_9 (sequence is synthesized)
ctcggcgtggccccttccgcccgcctttctgagggcgcaggttcgacgccctttcccgggagggggccctgcccggccctccctggcgccccagcccagtgccccccgaagggccaaatg

SEQ ID NO: 261386 - DNA, 120 bp, Artificial Sequence
  ENSG00000125492_10 (sequence is synthesized)
cagtgccccccgaagggccaaatgccaagtccactgaggcccggaccccggactgcgtctccccagcccccctcggcgtcctctctcgcggccgctctgtccgggagccatccccacccg

SEQ ID NO: 261387 - DNA, 120 bp, Artificial Sequence
  ENSG00000125492_11 (sequence is synthesized)
ccgggtgtacatacgcgtctctgccactccccacccccagcctctgccggctcccctaggcaacccctttctccccaggagcgggtgcggctgattcccaggcttcgctctctcccacgc

SEQ ID NO: 261388 - DNA, 120 bp, Artificial Sequence
  ENSG00000125492_12 (sequence is synthesized)
cccttctacgctccaggtggagaacagcccctctccccgcgcccccgccagggagagaaggggagtgcggagccccgtctccctacccctcgagcacctgggccagcggctgagctgtac

SEQ ID NO: 261389 - DNA, 120 bp, Artificial Sequence
  ENSG00000125492_13 (sequence is synthesized)
ataccgtgtgcaaagtgtatatgaagttatttattcgtgacccatgagcccgtgaccgtgtccgtggattagtgagtctgtggcctgtgccctccccactcccaggcggggcaggaaggg

SEQ ID NO: 261390 - DNA, 120 bp, Artificial Sequence
  ENSG00000125492_14 (sequence is synthesized)
gccaagggggcttgcccacccaccccgaccccagcccccagcctcagccccggtccgggggcagccaggcctctcgggttctctcttttttaaatgtcgaaataaacttcttacaaatga

SEQ ID NO: 261391 - DNA, 120 bp, Artificial Sequence
  ENSG00000125498_0 (sequence is synthesized)
atcctgtgcgctgctgagctgagctcggtcgcggctgcctgtctgctccggcagcaccatgtcgctcttggtcgtcagcatggcgtgtgttgggttcttcttgctgcagggggcctggcc

SEQ ID NO: 261392 - DNA, 120 bp, Artificial Sequence
  ENSG00000125498_1 (sequence is synthesized)
acatgagggagtccacagaaaaccttccctcctggcccacccaggtcgcctggtgaaatcagaagagacagtcatcctgcagtgttggtcagatgtcatgtttgaacacttccttctgca

SEQ ID NO: 261393 - DNA, 120 bp, Artificial Sequence
  ENSG00000125498_2 (sequence is synthesized)
cagagaggggatgtttaacgacactttgcgcctcattggagaacaccatgatggggtctccaaggccaacttctccatcagtcgcatgacgcaagacctggcagggacctacagatgcta

SEQ ID NO: 261394 - DNA, 120 bp, Artificial Sequence
  ENSG00000125498_3 (sequence is synthesized)
cggttctgttactcactccccctatcaggtgtcagctcccagtgaccctctggacatcgtgatcataggtctatatgagaaaccttctctctcagcccagctgggccccacggttctggc

SEQ ID NO: 261395 - DNA, 120 bp, Artificial Sequence
  ENSG00000125498_4 (sequence is synthesized)
aggagagaatgtgaccttgtcctgcagctcccggagctcctatgacatgtaccatctatccagggaaggggaggcccatgaacgtaggctccctgcagggcccaaggtcaacggaacatt

SEQ ID NO: 261396 - DNA, 120 bp, Artificial Sequence
  ENSG00000125498_5 (sequence is synthesized)
ccaggctgactttcctctgggccctgccacccacggagggacctacagatgcttcggctctttccatgactctccatacgagtggtcaaagtcaagtgacccactgcttgtttctgtcac

SEQ ID NO: 261397 - DNA, 120 bp, Artificial Sequence
  ENSG00000125498_6 (sequence is synthesized)
taacccccgacacctgcacattctgattgggacctcagtggtcatcatcctcttcatcctcctcttctttctccttcatcgctggtgctccaacaaaaaaaatgctgcggtaatggacca

SEQ ID NO: 261398 - DNA, 120 bp, Artificial Sequence
  ENSG00000125498_7 (sequence is synthesized)
agagtctgcaggaaacagaacagcgaatagcgaggactctgatgaacaagaccctcaggaggtgacatacacacagttgaatcactgcgttttcacacagagaaaaatcactcgcccttc

SEQ ID NO: 261399 - DNA, 120 bp, Artificial Sequence
  ENSG00000125498_8 (sequence is synthesized)
tcagaggcccaagacacccccaacagatatcatcgtgtacacggaacttccaaatgctgagtccagatccaaagttgtctcctgcccatgagcaccacagtcaggccttgagggcgtctt

SEQ ID NO: 261400 - DNA, 120 bp, Artificial Sequence
  ENSG00000125498_9 (sequence is synthesized)
ctagggagacaacagccctgtctcaaaaccgggttgccagctcccatgtaccagcagctggaatctgaaggcgtgagtctgcatcttagggcatcgatcttcctcacaccacaaatctga

SEQ ID NO: 261401 - DNA, 120 bp, Artificial Sequence
  ENSG00000125498_10 (sequence is synthesized)
atgtgcctctctcttgcttacaaatgtctaaggtccccactgcctgctggagaaaaaacacactcctttgcttaacccacagttctccatttcacttgacccctgcccacctctccaacc

SEQ ID NO: 261402 - DNA, 120 bp, Artificial Sequence
  ENSG00000125498_11 (sequence is synthesized)
taactggcttacttcctagtctacttgaggctgcaatcacactgaggaactcacaattccaaacatacaagaggctccctcttaacgcagcacttagacacgtgttgttccaccttccct

SEQ ID NO: 261403 - DNA, 120 bp, Artificial Sequence
  ENSG00000125498_12 (sequence is synthesized)
catgctgttccacctcccctcagactagctttcagtcttctgtcagcagtaaaacttatatattttttaaaataacttcaatgtagttttccatccttcaaataaacatgtctgccccca

SEQ ID NO: 261404 - DNA, 80 bp, Artificial Sequence
  ENSG00000125503_0 (sequence is synthesized)
tggcggcggttggggctcggcgctcgctcgctcgctgggcgggcgggcggtgcgatgtccggagaggatggcccggcggc

SEQ ID NO: 261405 - DNA, 80 bp, Artificial Sequence
  ENSG00000125503_1 (sequence is synthesized)
gggcgccgagcctggccccggagagcgccgcgcccgcaccgtccgcttcgagcgcgccgccgagttcctggcggcctgtg

SEQ ID NO: 261406 - DNA, 80 bp, Artificial Sequence
  ENSG00000125503_2 (sequence is synthesized)
cgagcgcgccgccgagttcctggcggcctgtgcgggcggcgacctggacgaggcgcgtctgatgctgcgcgccgccgacc

SEQ ID NO: 261407 - DNA, 120 bp, Artificial Sequence
  ENSG00000125503_3 (sequence is synthesized)
cgcccgcgccgtgctggactccaccaacgccgacggtatcagcgccctgcaccaggcctgcattgatgagaacctggaggtggtgcgcttcttggtggagcagggcgccactgtgaacca

SEQ ID NO: 261408 - DNA, 120 bp, Artificial Sequence
  ENSG00000125503_4 (sequence is synthesized)
ggcagacaacgagggctggacgccactgcacgtggccgcctcctgtggctacctagatatcgccaggtacctcctgagccacggggccaacatcgccgccgtcaacagtgacggggacct

SEQ ID NO: 261409 - DNA, 120 bp, Artificial Sequence
  ENSG00000125503_5 (sequence is synthesized)
gcccctggacctggccgagtcggacgccatggaggggctgctgaaggcggagatcgcccgccgaggtgtggatgtggaagcagccaagcgggcagaagaggaattgctccttcatgacac

SEQ ID NO: 261410 - DNA, 120 bp, Artificial Sequence
  ENSG00000125503_6 (sequence is synthesized)
gaggtgctggctgaatgggggcgccatgccagaggcccggcacccccgcacaggcgcctctgccctgcacgtggctgctgccaagggctacattgaggtgatgaggttgctccttcaggc

SEQ ID NO: 261411 - DNA, 120 bp, Artificial Sequence
  ENSG00000125503_7 (sequence is synthesized)
tggctacgacccagagctccgggacggggacggctggactcccctgcacgcagcggcacactggggcgtggaggatgcctgccgcctgctggccgagcatggcgggggcatggactcact

SEQ ID NO: 261412 - DNA, 120 bp, Artificial Sequence
  ENSG00000125503_8 (sequence is synthesized)
gacccatgcggggcagcgtccctgtgacctggccgatgaggaagtactgagcctgttggaggaactggcccggaaacaggaggaccttcggaaccaaaaagaagcttcccagagccgggg

SEQ ID NO: 261413 - DNA, 120 bp, Artificial Sequence
  ENSG00000125503_9 (sequence is synthesized)
ccaggagccccaagcgccctctagcagcaaacacagaaggagctctgtgtgtcgtctgagcagtcgcgagaagatttccctccaggacttgtccaaggagcgccggcctggtggggctgg

SEQ ID NO: 261414 - DNA, 120 bp, Artificial Sequence
  ENSG00000125503_10 (sequence is synthesized)
ggggccccccatccaggacgaggatgagggggaagaaggtcccaccgaaccaccccctgcagaacccagaaccctcaatggcgtctcctccccgccgcaccccagccctaagagtcccgt

SEQ ID NO: 261415 - DNA, 120 bp, Artificial Sequence
  ENSG00000125503_11 (sequence is synthesized)
gcagcttgaagaggcccccttctccaggcgctttggcctcctgaagacagggagttctggtgccctgggtccccctgaaaggcggacagcggagggagcccctggggctgggctgcagcg

SEQ ID NO: 261416 - DNA, 120 bp, Artificial Sequence
  ENSG00000125503_12 (sequence is synthesized)
caccaagcctcctccttgcttggagaactcctcgcctccctccaggattccggagcctgaatccccagcgaagccaaacgtccccacagcctccacggcgcccccagcggactcccggga

SEQ ID NO: 261417 - DNA, 120 bp, Artificial Sequence
  ENSG00000125503_13 (sequence is synthesized)
ccgacggaggtcctaccagatgcctgtgcgggatgaggagtcggaatcccagagaaaagctcgctcccgtctcatgcgccagtctcggaggtccacacagggtgtgactcttacagacct

SEQ ID NO: 261418 - DNA, 120 bp, Artificial Sequence
  ENSG00000125503_14 (sequence is synthesized)
gaaggaggcagagaaggctgcagggaaggccccagagtcagagaagccggcgcagagcctggacccttcccgaaggccccgcgtccctggagtggagaactctgacagccctgcccagag

SEQ ID NO: 261419 - DNA, 120 bp, Artificial Sequence
  ENSG00000125503_15 (sequence is synthesized)
agcagaggcgcccgacgggcagggtccgggaccgcaggcggccagggagcaccgcaaggtcggaaaggagtggagggggcctgcggagggggaggaggcggagccggctgaccgcagcca

SEQ ID NO: 261420 - DNA, 120 bp, Artificial Sequence
  ENSG00000125503_16 (sequence is synthesized)
ggagtccagcaccctggagggcggcccctcggcccgcaggcagcggtggcagcgggacctcaacccagaacctgagccagaatcggaagagccagacggaggctttaggacgctgtatgc

SEQ ID NO: 261421 - DNA, 120 bp, Artificial Sequence
  ENSG00000125503_17 (sequence is synthesized)
agagctgcgcagggagaacgagcggcttcgcgaggccctgaccgagaccacgctgcggctggcgcagctcaaggtggagctggagcgggccacgcagaggcaagaacgcttcgctgagag

SEQ ID NO: 261422 - DNA, 120 bp, Artificial Sequence
  ENSG00000125503_18 (sequence is synthesized)
gccagccctcctggaactggagagattcgagcgcagggccctggaacgcaaggccgcagagctggaggaggagctgaaggccctgtctgacctccgcgctgacaaccagcgcctcaagga

SEQ ID NO: 261423 - DNA, 120 bp, Artificial Sequence
  ENSG00000125503_19 (sequence is synthesized)
tgagaatgcagcgttgatccgcgtcatcagcaaactctccaagtgacccggagggactttcccgcacccgtatttatacagctgcttctgccacacgcaccccttcccccgtgtgaacac

SEQ ID NO: 261424 - DNA, 120 bp, Artificial Sequence
  ENSG00000125503_20 (sequence is synthesized)
gagtgacagggctccgggggaagtctcagagaagccatagcccccctgggacctccggactgggaggggagcagagtccccaggagccgagggggccacccgaggccaggatggaggtgg

SEQ ID NO: 261425 - DNA, 120 bp, Artificial Sequence
  ENSG00000125503_21 (sequence is synthesized)
gaggccgagccaagcagggggacgttgccagaggggaccagggccagagacgggaccaggaaggaactgaggaccaagaagtgcaaggatcagtagccaggaccagagtggccgcctgga

SEQ ID NO: 261426 - DNA, 120 bp, Artificial Sequence
  ENSG00000125503_22 (sequence is synthesized)
ggtccccatctcacgtgtgatgccaccccgtcacccctcccctcctgagcagggatccaagaatgtgccaagagtcccgccagcctcagccaggtgggcctgtatatagggtccatgtgc

SEQ ID NO: 261427 - DNA, 120 bp, Artificial Sequence
  ENSG00000125503_23 (sequence is synthesized)
aatagggagggacgtcttctattttttgctgccccctccccgcccactgtctggggcagggggagaaggtattttcgagataaagcacaggcaccacaaataaaagtcgtgaagttgcca

SEQ ID NO: 261428 - DNA, 120 bp, Artificial Sequence
  ENSG00000125503_24 (sequence is synthesized)
actccttcctcagctccagttcaggtcccggagcccacccagtgtccacaaggcctggggcaagtccctcctccgaccccctggacttcggcttttgtccccccaagttttggaccccta

SEQ ID NO: 261429 - DNA, 120 bp, Artificial Sequence
  ENSG00000125503_25 (sequence is synthesized)
agggaagaatgagaaacggtggcccgtgtcagcccctggctgcagggccccgtgcagagggggcctcagtgaactggagtgtgacagcctggggcccaggcacacaggcctgcattgatg

SEQ ID NO: 261430 - DNA, 120 bp, Artificial Sequence
  ENSG00000125503_26 (sequence is synthesized)
cttcccagagccggggccaggagccccaagcgccctctagcagcaaacacagaaggtatagggagggaggagtccagggctggcggggtggctggaggccccgggcttgtaccccagcac

SEQ ID NO: 261431 - DNA, 120 bp, Artificial Sequence
  ENSG00000125503_27 (sequence is synthesized)
cctctccttccccaacaggagctctgtgtgtcgtctgagcagtcgcgagaagatttccctccaggacttgtccaaggagcgccggcctggtggggctggggggccccccatccaggacga

SEQ ID NO: 261432 - DNA, 120 bp, Artificial Sequence
  ENSG00000125503_28 (sequence is synthesized)
gttctcagtggccaccctgcgctaccctctcccagaacctgagctgctctgacgcggccgtctggtgcgtttcactgatcctggtgctgcagcttccttacacttcccaagaggagaagc

SEQ ID NO: 261433 - DNA, 120 bp, Artificial Sequence
  ENSG00000125503_29 (sequence is synthesized)
agtttggaaaaacaaaatcagaataagttggtcctgagttctaactttggctcttcacctttctagtccccaatttatattgttcctccgtgcgtcagttttacctgtgagataaggcca

SEQ ID NO: 261434 - DNA, 120 bp, Artificial Sequence
  ENSG00000125503_30 (sequence is synthesized)
gtagccagccccgtcctggcagggctgtggtgaggaggggggtgtccgtgtggaaaactccctttgtgagaatggtgcgtcctaggtgttcaccaggtcgtggccgcctctactcccttt

SEQ ID NO: 261435 - DNA, 120 bp, Artificial Sequence
  ENSG00000125503_31 (sequence is synthesized)
ctctttctccatccttctttccttaaagagtccccagtgctatctgggacatattcctccgcccagagcagggtcccgcttccctaaggccctgctctgggcttctgggtttgagtcctt

SEQ ID NO: 261436 - DNA, 120 bp, Artificial Sequence
  ENSG00000125503_32 (sequence is synthesized)
ggcaagcccaggagaggcgctcaggcttccctgtcccccttcctcgtccaccatctcatgcccctggctctcctgccccttccctacaggggttcctggctctgctcttcagactgagcc

SEQ ID NO: 261437 - DNA, 120 bp, Artificial Sequence
  ENSG00000125503_33 (sequence is synthesized)
ccgttcccctgcatccccgttcccctgcatcccccttcccctgcatcccccagaggccccaggccacctacttggcctggaccccacgagaggccaccccagccctgtctaccaggctgc

SEQ ID NO: 261438 - DNA, 120 bp, Artificial Sequence
  ENSG00000125503_34 (sequence is synthesized)
cttttgggtggattctcctccaactgtggggtgactgcttggcaaactcactcttcggggtatcccaggaggcctggagcattggggtgggctggggttcagagaggagggattcccttc

SEQ ID NO: 261439 - DNA, 120 bp, Artificial Sequence
  ENSG00000125503_35 (sequence is synthesized)
tcaggttacgtggccaagaagcaggggagctgggtttgggtcaggtctgggtgtggggtgaccagcttatgctgtttgcccaggacagcctagttttagcactgaaaccctcagtcctag

SEQ ID NO: 261440 - DNA, 120 bp, Artificial Sequence
  ENSG00000125503_36 (sequence is synthesized)
gaaaacagggatggttggtcactgtctctgggtgactcttgattcccggccagtttctccacctggggctgtgtttctcgtcctgcatccttctccaggcaggtccccaagcatcgcccc

SEQ ID NO: 261441 - DNA, 120 bp, Artificial Sequence
  ENSG00000125503_37 (sequence is synthesized)
cctgctgtggctgttcccaagttcttagggtaccccacgtgggtttatcaaccacttggtgaggctggtaccctgcccccattcctgcaccccaattgccttagtggctagggggttggg

SEQ ID NO: 261442 - DNA, 120 bp, Artificial Sequence
  ENSG00000125503_38 (sequence is synthesized)
tagggggttgggggctagagtaggaggggctggagccaggattcttagggctgaacagagaagagctgggggcctgggctcctgggtttgagagaggaggggctggggcctggactcctg

SEQ ID NO: 261443 - DNA, 89 bp, Artificial Sequence
  ENSG00000125503_39 (sequence is synthesized)
ggagggactgggggcctggactcctgggtccgagggaggaggggctggggcctggactcgtgggtctgagggaggaggggctgggggcc

SEQ ID NO: 261444 - DNA, 120 bp, Artificial Sequence
  ENSG00000125503_40 (sequence is synthesized)
ggcctggacttctgggtcttagggaggcggggctgggcctggacccctgggtctgaatggggagaggctgggggcctggactccttcatctgagggcggaagggctggggcctggcctcc

SEQ ID NO: 261445 - DNA, 120 bp, Artificial Sequence
  ENSG00000125503_41 (sequence is synthesized)
tgggttgaatggggaggggttgggcctggactctggagtccctggtgcccaggcctcaggcatctttcacagggatgcctgtactgggcaggtccttgaaagggaaaggcccattgctct

SEQ ID NO: 261446 - DNA, 120 bp, Artificial Sequence
  ENSG00000125503_42 (sequence is synthesized)
ccttgcccccctcccctatcgccatgacaactgggtggaaataaacgagccgagttcatcccgttcccagggcacgtgcggccccttcacagcccgagtttccatgacctcatgctcttg

SEQ ID NO: 261447 - DNA, 120 bp, Artificial Sequence
  ENSG00000125503_43 (sequence is synthesized)
cacggcttcgttcctgcagagtatctgctggggtggtttccgagcttgacccttggaaggacctggctgggtttaaggcaggaggggctgggggccaggactcctggctctgaaggagga

SEQ ID NO: 261448 - DNA, 120 bp, Artificial Sequence
  ENSG00000125503_44 (sequence is synthesized)
ggggctggaacctcttccctagtctgagcactggaagcgccacctgtgggtggtgacgggggttttgccgtgtctaacaggtaccatgtggggttcccgcacccagatgagaagccccct

SEQ ID NO: 261449 - DNA, 120 bp, Artificial Sequence
  ENSG00000125503_45 (sequence is synthesized)
cccttccccgttcacttcctgtttgcagatagccaggagtcctttcgtggtttccactgagcactgaaggcctggccggcctgaccactgggcaaccaggcgtatcttaaacagccagtg

SEQ ID NO: 261450 - DNA, 120 bp, Artificial Sequence
  ENSG00000125503_46 (sequence is synthesized)
gccagaggctgttgggtcattttccccactgtcctagcaccgtgtccctggatctgttttcgtggctccctctggagtcccgacttgctgggacaccgtggctggggtaggtgcggctga

SEQ ID NO: 261451 - DNA, 120 bp, Artificial Sequence
  ENSG00000125503_47 (sequence is synthesized)
ccgcctcctgtggctacctagatatcgccaggtgaggcaagggagggccgggcaggacctggtcggggtgggggcctggaccctcagccctgaccagcccccacccccaggtacctcctg

SEQ ID NO: 261452 - DNA, 120 bp, Artificial Sequence
  ENSG00000125503_48 (sequence is synthesized)
tgtgctgtgtgtggggtgggggacacctcctcacccgtggtctccaggctgagagctttagaggcggcctgggcaccgaggctgaccctgcttcctaggattgtctttctttgtgcctca

SEQ ID NO: 261453 - DNA, 120 bp, Artificial Sequence
  ENSG00000125503_49 (sequence is synthesized)
gtttcctcacctgtgaaatgggggtgtaggggcctgcctccaggattgcttggagcccagcacacgcacaggatgagaactcaaacccctaccaactgggactgtcaatccccctgagta

SEQ ID NO: 261454 - DNA, 120 bp, Artificial Sequence
  ENSG00000125503_50 (sequence is synthesized)
actgaggggattggaatgccggggcggggtgggtgggtggagggactcacccaggagtgcgttaggtaggattgctggaaccctgccgcaggtctttctgggaggggatgcgtttacttg

SEQ ID NO: 261455 - DNA, 120 bp, Artificial Sequence
  ENSG00000125503_51 (sequence is synthesized)
ggggggagtaggggcatgcaggggttgccagggactggtctccctgtcctctgagactcatcgtaccccaggagccttcatatggggtccaggagcccctgaaactgtgtctggccaggt

SEQ ID NO: 261456 - DNA, 120 bp, Artificial Sequence
  ENSG00000125503_52 (sequence is synthesized)
tcatttttctagggaaggggtgttgcttctagcaggtgtgtgatggccacacaggatccctgggtccccagcatgtcttctaaagtcctgggcttgcctcccagctctgcctgtgactgg

SEQ ID NO: 261457 - DNA, 120 bp, Artificial Sequence
  ENSG00000125503_53 (sequence is synthesized)
tgactccaggcacgtccctgaagcttgcttccctgatttcctaaaacaggaccactggtgccgcttcatggggtggttgtcagggtctggctgggttggagtggaagggtgtgagcatgg

SEQ ID NO: 261458 - DNA, 120 bp, Artificial Sequence
  ENSG00000125503_54 (sequence is synthesized)
ttcccggcagactccaggggaccgtgtggaaggaaagggagactgacgaggaaatgagataccggcagcctccgagacttctgacgcggctgtcctgacggggccgctggccaggctgaa

SEQ ID NO: 261459 - DNA, 120 bp, Artificial Sequence
  ENSG00000125503_55 (sequence is synthesized)
aggataggattccgcgtgggttcaggggtccacgagagccatgcgggaggactagctagtgggacacgtgacggcggagatctgaggttcgggagcccctctttggttgaaatggggagt

SEQ ID NO: 261460 - DNA, 120 bp, Artificial Sequence
  ENSG00000125503_56 (sequence is synthesized)
gggtcaaatcagccctggacctggattctgtctccttcctcctccaactttttattttgggaaagcttcagatttacagaaaagttgaagcaatagcatgtgactacccatatgactttc

SEQ ID NO: 261461 - DNA, 120 bp, Artificial Sequence
  ENSG00000125503_57 (sequence is synthesized)
tgtgttcctcttgggggctctctccctccctcaggtctgtgttgaaacgtcaccttctcccctatcttccccccaccccgaggtgcacactgaccaccctgctgccaccacggcgccgtc

SEQ ID NO: 261462 - DNA, 120 bp, Artificial Sequence
  ENSG00000125503_58 (sequence is synthesized)
cgcacacgcacaccctcccgctctcagttctcgcactgctgcttctgtccagagtcctttatccttctgaccggttgcgtagtgtgctggtcttttcatggcttttgtgggttttgtgta

SEQ ID NO: 261463 - DNA, 120 bp, Artificial Sequence
  ENSG00000125503_59 (sequence is synthesized)
tttctgctcagctctgactctgttgtggcccagataatttgtttctttcactcacggctgcatctccagtgccggcacacaatgcacctgggtaatgtttgtggaatgaatgaattgatg

SEQ ID NO: 261464 - DNA, 120 bp, Artificial Sequence
  ENSG00000125503_60 (sequence is synthesized)
gagtcagagaagccggcgcagagcctggtgagaggggtcagcgagggcgagtggggtggtgcgggatgtcctgcttccctgactcgcctccccctcccgacaggacccttcccgaaggcc

SEQ ID NO: 261465 - DNA, 120 bp, Artificial Sequence
  ENSG00000125503_61 (sequence is synthesized)
gggccgggccggcccctgacgcgcgctcctcccctgccccagcaccctggagggcggcccctcggcccgcaggcagcggtggcagcgggacctcaacccagaacctgagccagaatcgga

SEQ ID NO: 261466 - DNA, 120 bp, Artificial Sequence
  ENSG00000125503_62 (sequence is synthesized)
gccagaatcggaagagccagacggaggctttaggacggtgcgatcccacccctccgtcggggctttgcctgctgggtgcccagcttcctggcttccccgcccccccagcatcgccccatc

SEQ ID NO: 261467 - DNA, 120 bp, Artificial Sequence
  ENSG00000125505_0 (sequence is synthesized)
agtgtggacctggactcgaatcccgttgccgactcgcgctctcggcttctgctccggggcttcttccctgcccgcccggggccctgaccgtggcttcttccccggcctgatctgcgcagc

SEQ ID NO: 261468 - DNA, 120 bp, Artificial Sequence
  ENSG00000125505_1 (sequence is synthesized)
gcggcgcgggggcgcgctgggcgggggaggcgtggccggagctgcggcggcaagcgggctgggactgctcggccgcctcctgcccggcgagcagctcagaccatgtcgcctgaagaatgg

SEQ ID NO: 261469 - DNA, 120 bp, Artificial Sequence
  ENSG00000125505_2 (sequence is synthesized)
cagaccatgtcgcctgaagaatggacgtatctagtggttcttcttatctccatccccatcggcttcctctttaagaaagccggtcctgggctgaagagatggggagcagccgctgtgggc

SEQ ID NO: 261470 - DNA, 120 bp, Artificial Sequence
  ENSG00000125505_3 (sequence is synthesized)
ctggggctcaccctgttcacctgtggcccccacactttgcattctctggtcaccatcctcgggacctgggccctcattcaggcccagccctgctcctgccacgccctggctctggcctgg

SEQ ID NO: 261471 - DNA, 120 bp, Artificial Sequence
  ENSG00000125505_4 (sequence is synthesized)
actttctcctatctcctgttcttccgagccctcagcctcctgggcctgcccactcccacgcccttcaccaatgccgtccagctgctgctgacgctgaagctggtgagcctggccagtgaa

SEQ ID NO: 261472 - DNA, 120 bp, Artificial Sequence
  ENSG00000125505_5 (sequence is synthesized)
gtccaggacctgcatctggcccagaggaaggaaatggcctcaggcttcagcaaggggcccaccctggggctgctgcccgacgtgccctccctgatggagacactcagctacagctactgc

SEQ ID NO: 261473 - DNA, 120 bp, Artificial Sequence
  ENSG00000125505_6 (sequence is synthesized)
tacgtgggaatcatgacaggcccgttcttccgctaccgcacctacctggactggctggagcagcccttccccggggcagtgcccagcctgcggcccctgctgcgccgcgcctggccggcc

SEQ ID NO: 261474 - DNA, 120 bp, Artificial Sequence
  ENSG00000125505_7 (sequence is synthesized)
ccgctcttcggcctgctgttcctgctctcctctcacctcttcccgctggaggccgtgcgcgaggacgccttctacgcccgcccgctgcccgcccgcctcttctacatgatccccgtcttc

SEQ ID NO: 261475 - DNA, 120 bp, Artificial Sequence
  ENSG00000125505_8 (sequence is synthesized)
ttcgccttccgcatgcgcttctacgtggcctggattgccgccgagtgcggctgcattgccgccggctttggggcctaccccgtggccgccaaagcccgggccggaggcggccccaccctc

SEQ ID NO: 261476 - DNA, 120 bp, Artificial Sequence
  ENSG00000125505_9 (sequence is synthesized)
cagcagtccggagaaggcggcttccttggagtatgactatgagaccatccgcaacatcgactgctacagcacagatttctgcgtgcgggtgcgcgatggcatgcggtactggaacatgac

SEQ ID NO: 261477 - DNA, 120 bp, Artificial Sequence
  ENSG00000125505_10 (sequence is synthesized)
ggtgcagtggtggctggcgcagtatatctacaagagcgcacctgcccgttcctatgtcctgcggagcgcctggaccatgctgctgagcgcctactggcacggcctccacccgggctacta

SEQ ID NO: 261478 - DNA, 120 bp, Artificial Sequence
  ENSG00000125505_11 (sequence is synthesized)
cctgagcttcctgaccatcccgctgtgcctggctgccgagggccggctggagtcagccctgcgggggcggctgagcccagggggccagaaggcctgggactgggtgcactggttcctgaa

SEQ ID NO: 261479 - DNA, 120 bp, Artificial Sequence
  ENSG00000125505_12 (sequence is synthesized)
gatgcgcgcctatgactacatgtgcatgggcttcgtgctgctctccttggccgacacccttcggtactgggcctccatctacttctgtatccacttcctggccctggcagccctggggct

SEQ ID NO: 261480 - DNA, 120 bp, Artificial Sequence
  ENSG00000125505_13 (sequence is synthesized)
ggggctggctttaggtgggggcagccccagccggcggaaggcagcatcccagcccaccagccttgccccggagaagctccgggaggagtaagctgtcacgacgctccctctgccagctgg

SEQ ID NO: 261481 - DNA, 120 bp, Artificial Sequence
  ENSG00000125505_14 (sequence is synthesized)
tcccgggaattctgtgaaccaggctgctgtctcctccccagaaagagtccttaccttggagagggtcctggagagaatttcctcttccccagctaaataccctgcctgcaactgaagcag

SEQ ID NO: 261482 - DNA, 120 bp, Artificial Sequence
  ENSG00000125505_15 (sequence is synthesized)
acccgggggtgtcctccctgccctctgcccagaggccacctccactcctacaaaatcaaagtattgtccagacaagagtcactggcccctgctccagcttctgggtatccagagagcact

SEQ ID NO: 261483 - DNA, 120 bp, Artificial Sequence
  ENSG00000125505_16 (sequence is synthesized)
gcacttccccaaaacggaaggggcccctgggcagtgggttttgggcaaattccctttctttgcatccacaatgtggggtcggagcttgggggcaggtcctgggagtgggaagcctcttcc

SEQ ID NO: 261484 - DNA, 120 bp, Artificial Sequence
  ENSG00000125505_17 (sequence is synthesized)
ttgtgtctttcgctccacttttagctcatcgcaccaatattgcagacttggaaggaagcataagcttcccatttcacaaaggggaaactgaggtgcgggtgcgcgggcctggggacggcc

SEQ ID NO: 261485 - DNA, 120 bp, Artificial Sequence
  ENSG00000125505_18 (sequence is synthesized)
gtcccatggcttccatctgagccacctcgggaccccagcactcctggcgccctcttctcatcgcttggcctatgacaggtcaccgtgtgtaaatctttcccaataaagtgttgcacaaag

SEQ ID NO: 261486 - DNA, 120 bp, Artificial Sequence
  ENSG00000125505_19 (sequence is synthesized)
taaggactcgactacctccgaagaaagccgaaacatgtggctccgcccacagtggcctcagctctccgttctcgactattgccgaagtgagccgaagtttgtggccccgcttccggagaa

SEQ ID NO: 261487 - DNA, 120 bp, Artificial Sequence
  ENSG00000125505_20 (sequence is synthesized)
ctcaagctcccgattgtgcccgaaggaacccgaagggagaccccgcctcattcctcacgccgagctccagaccccgcctcctttccagagcccgtctgttccccttcgggtccaaagctt

SEQ ID NO: 261488 - DNA, 120 bp, Artificial Sequence
  ENSG00000125505_21 (sequence is synthesized)
atgcccaccccccagcaggtcaggcggcgcgagggaggcttcccaagacccagcagcccccacctccaagggctggctctgcccctagccgggaggagagcggggagcaaggggccaggg

SEQ ID NO: 261489 - DNA, 120 bp, Artificial Sequence
  ENSG00000125505_22 (sequence is synthesized)
ccaccacctttttgagcagagtgtcgccccctcggcaaccatggcctgccagcccctgtcggtagggaaaagatccctggtactgacagatgccccttgttgctagcgcttgtcaccccg

SEQ ID NO: 261490 - DNA, 120 bp, Artificial Sequence
  ENSG00000125505_23 (sequence is synthesized)
cagtgtggtgaactgccccctgtcgctaggaaaaggtggtaacttagcaaccctgtgccacccctctgttgccacagaagtgtcaccccccagaaccagattgttcctgcttgctgggga

SEQ ID NO: 261491 - DNA, 120 bp, Artificial Sequence
  ENSG00000125505_24 (sequence is synthesized)
tgccatcctttgctagtggtgggtcaccctctgttgctagggaaacggttccctagcaacagaacgccactatttgctagggaagcaggatccctagcaacagtagctcacctccttttt

SEQ ID NO: 261492 - DNA, 120 bp, Artificial Sequence
  ENSG00000125505_25 (sequence is synthesized)
accagaagttttgctctgttgctgcagatacggcactccctgcactgcccctttgttgctaggagctagcactgctccaccccgtgggatgtcctcacatagcagccctcagcagccctc

SEQ ID NO: 261493 - DNA, 120 bp, Artificial Sequence
  ENSG00000125505_26 (sequence is synthesized)
tgcaaggaaatagcaatttccaatccctgaccagtgctgttccccagcagagggcacgccattcctaccaactacagttacactgttgctaaggaagccaaacctccccctggaaactat

SEQ ID NO: 261494 - DNA, 120 bp, Artificial Sequence
  ENSG00000125505_27 (sequence is synthesized)
gggttgacccttgttgccagagaggctccaccccccggcacctgcattgctaggcaagtcgcacggccatagctgtggactctcttgtggctgaggaagtattgcccccgtgttgctagg

SEQ ID NO: 261495 - DNA, 120 bp, Artificial Sequence
  ENSG00000125505_28 (sequence is synthesized)
gagatggcacccccggcaaccaggagtagactgcccttgtgttcctgacagctgcagtcagccttcccccaggggcttggactgcggctgggggaacagcctgttgatgtaaatgatgaa

SEQ ID NO: 261496 - DNA, 120 bp, Artificial Sequence
  ENSG00000125505_29 (sequence is synthesized)
ctactactccctgctagggttgtcccctagtcgtcacaaactgccattctgttgtgggggtagtgacacccccacgggaatttgttaccactgccctaataaccgtgccctgacctccag

SEQ ID NO: 261497 - DNA, 120 bp, Artificial Sequence
  ENSG00000125505_30 (sequence is synthesized)
ctgctagagagaggatgtccccctagtaaagccaagcaggaattgaaggtttttctaaatctgctcggtcctcactcctaaaggatggctcccctcctgtcatcagaggccaccaaggct

SEQ ID NO: 261498 - DNA, 120 bp, Artificial Sequence
  ENSG00000125505_31 (sequence is synthesized)
tcatatgggccagtgtttcccactgctggggctgtcgacatgagtgatgagggagccactgtattgctagaggtgacacttctccaataatcactgcgaccaggaaaaaagccccttcct

SEQ ID NO: 261499 - DNA, 120 bp, Artificial Sequence
  ENSG00000125505_32 (sequence is synthesized)
aaaagcctttctaaacatcctaggcattgttgctaaggaatgccttttccttagcaacaaagatcatggggaccccactggcgcctggaacatctccctagcaaccgtgaagcaccttgt

SEQ ID NO: 261500 - DNA, 120 bp, Artificial Sequence
  ENSG00000125505_33 (sequence is synthesized)
tgtccgacaatttagaagggaccatccttggcggcttctctgaatatactgagcttggttgctaaaggactcatagcttagcaaccatagcccttcaaggcttttcatggctgtggcggg

SEQ ID NO: 261501 - DNA, 120 bp, Artificial Sequence
  ENSG00000125505_34 (sequence is synthesized)
ccccattaggtaccaaaagaagaagaaccccattgtcagtggactgtaccacccagcccacccaccttcctaccctacaggcaccctctgggccaccctcccttgctgccctagcaagtc

SEQ ID NO: 261502 - DNA, 120 bp, Artificial Sequence
  ENSG00000125505_35 (sequence is synthesized)
tgacagccagagggccattgcctggccaggatcccttccttagcatccggggctgggacactagcaggcgtcgggagggggcctggctgagctgcatgtctgtcccccaccctcatcctc

SEQ ID NO: 261503 - DNA, 120 bp, Artificial Sequence
  ENSG00000125505_36 (sequence is synthesized)
gggattttacctccaacacaccctgggggtgggacgtcacctcacttgctgccctgggcacagcattccccattcacatgcccttgggcaggtcttcacctcccagctcctcctggggtg

SEQ ID NO: 261504 - DNA, 120 bp, Artificial Sequence
  ENSG00000125505_37 (sequence is synthesized)
ggctggcgcagtatatctacaagagcgcacctgcccgttcctatgtcctgcggtgagtgagcccgcccagtctcaggtgacactgcagaactacatctcccagcaggccccagggtagcc

SEQ ID NO: 261505 - DNA, 120 bp, Artificial Sequence
  ENSG00000125505_38 (sequence is synthesized)
tgcagcgtccctggctgggcccctgcccccggaggctcatgggaattgtagtttgtttagcctggttttgccctgcctctaattatagtggcagcatgccggtgtaaaatcgttccccct

SEQ ID NO: 261506 - DNA, 120 bp, Artificial Sequence
  ENSG00000125505_39 (sequence is synthesized)
ctcggggcctcagttgctacttctgtaaagtcagcctcactcagcagaagcaatgtactgagtcctgtggactcaatagccagccttcctggaatcttggccgtccaggttatggagaaa

SEQ ID NO: 261507 - DNA, 120 bp, Artificial Sequence
  ENSG00000125505_40 (sequence is synthesized)
ccttgaggagttagttgacctcttagttgcctcaagtgttgaatggagtgaatgctatttattactggtttcataggtagatagaaggactaaatgtgataaaatgtgaaatgtatttaa

SEQ ID NO: 261508 - DNA, 120 bp, Artificial Sequence
  ENSG00000125508_0 (sequence is synthesized)
ggctcccatggccctcgggcccagcgtggtgaccccgggggatggagccgttcctcaggaggcggctggccttcctgtccttcttctgggacaagatctggccggcgggcggcgagccgg

SEQ ID NO: 261509 - DNA, 120 bp, Artificial Sequence
  ENSG00000125508_1 (sequence is synthesized)
accatggcacccccgggtccctggaccccaacactgacccagtgcccacgctccccgccgagccttgcagccccttccctcagctcttccttgcgctctatgacttcacggcgcggtgtg

SEQ ID NO: 261510 - DNA, 120 bp, Artificial Sequence
  ENSG00000125508_2 (sequence is synthesized)
gcggggagctgagtgtccgccgcggggacaggctctgtgccctcgaagaggggggcggctacatcttcgcacgcaggctttcgggccagcccagcgccgggctcgtgcccatcacccacg

SEQ ID NO: 261511 - DNA, 120 bp, Artificial Sequence
  ENSG00000125508_3 (sequence is synthesized)
tggccaaggcttctcctgagacgctctcagaccaaccctggtactttagcggggtcagtcggacccaggcacagcagctgctcctctccccacccaacgaaccaggggccttcctcatcc

SEQ ID NO: 261512 - DNA, 120 bp, Artificial Sequence
  ENSG00000125508_4 (sequence is synthesized)
ggcccagcgagagcagcctcgggggctactcactgtcagtccgggcccaggccaaggtctgccactaccgggtctccatggcagctgatggcagcctctacctgcagaagggacggctct

SEQ ID NO: 261513 - DNA, 120 bp, Artificial Sequence
  ENSG00000125508_5 (sequence is synthesized)
ttcccggcctggaggagctgctcacctactacaaggccaactggaagctgatccagaaccccctgctgcagccctgcatgccccagaaggccccgaggcaggacgtgtgggagcggccac

SEQ ID NO: 261514 - DNA, 120 bp, Artificial Sequence
  ENSG00000125508_6 (sequence is synthesized)
cctgcccgtggcgatcaaggtcatcaagtcagccaacatgaagctcactgacctcgccaaggagatccagacactgaagggcctgcggcacgagcggctcatccggctgcacgcagtgtg

SEQ ID NO: 261515 - DNA, 120 bp, Artificial Sequence
  ENSG00000125508_7 (sequence is synthesized)
ctcgggcggggagcctgtgtacatcgtcacggaactcatgcgcaaggggaacctgcaggccttcctgggcacccccgagggccgggccctgcgtctgccgccactcctgggctttgcctg

SEQ ID NO: 261516 - DNA, 120 bp, Artificial Sequence
  ENSG00000125508_8 (sequence is synthesized)
ccaggtggctgagggcatgagctacctggaggagcagcgcgttgtgcaccgggacttggccgcccggaacgtgctcgtggacgacggcctggcctgcaaggtggctgacttcggcctggc

SEQ ID NO: 261517 - DNA, 120 bp, Artificial Sequence
  ENSG00000125508_9 (sequence is synthesized)
ccggctgctcaaggacgacatctactccccgagcagcagctccaagatcccggtcaagtggacagcgcctgaggcggccaattatcgtgtcttctcccagaagtcagacgtctggtcctt

SEQ ID NO: 261518 - DNA, 120 bp, Artificial Sequence
  ENSG00000125508_10 (sequence is synthesized)
cggcgtcctgctgcacgaggttttcacctatggccagtgtccctatgaagggatgaccaaccacgagacgctgcagcagatcatgcgagggtaccggctgccgcgcccggctgcctgccc

SEQ ID NO: 261519 - DNA, 120 bp, Artificial Sequence
  ENSG00000125508_11 (sequence is synthesized)
ggcggaggtctacgtgctcatgctggagtgctggaggagcagccccgaggaacggccctccttcgccacgctgcgggagaagctgcacgccatccacagatgccacccctgagtcctcac

SEQ ID NO: 261520 - DNA, 120 bp, Artificial Sequence
  ENSG00000125510_0 (sequence is synthesized)
acccgccccgcccgcgcgtcggcccccacagtcgcctgggggtggcccggagagtcgaggtgctcatagtggagccctggctcccgggcggacggagccgcacggtagtagatgggggtg

SEQ ID NO: 261521 - DNA, 120 bp, Artificial Sequence
  ENSG00000125510_1 (sequence is synthesized)
tggccgtggcccccgactctgctcggcggggccgttcctgctttgccatccgtgtgggacttccacgacagtggaggcacgagagctgggccccatatgctgcttgcccagcttgggaaa

SEQ ID NO: 261522 - DNA, 120 bp, Artificial Sequence
  ENSG00000125510_2 (sequence is synthesized)
gaggaggctgctgcaaaggaccgatcggcggcttcgggctgccggctcactcggctgctgcgtctggtctggcgtctgctgagaagatcctcttctaccctgctctgcacctgtgctcga

SEQ ID NO: 261523 - DNA, 120 bp, Artificial Sequence
  ENSG00000125510_3 (sequence is synthesized)
ctgccagccggctgagggcgggggtctccacggtggtcccagctcccaaggaggttgcagaagtaccgtacagagtggatttgcagggcagtggcatggagcccctcttccccgcgccgt

SEQ ID NO: 261524 - DNA, 120 bp, Artificial Sequence
  ENSG00000125510_4 (sequence is synthesized)
tctgggaggttatctacggcagccaccttcagggcaacctgtccctcctgagccccaaccacagtctgctgcccccgcatctgctgctcaatgccagccacggcgccttcctgcccctcg

SEQ ID NO: 261525 - DNA, 120 bp, Artificial Sequence
  ENSG00000125510_5 (sequence is synthesized)
ggctcaaggtcaccatcgtggggctctacctggccgtgtgtgtcggagggctcctggggaactgccttgtcatgtacgtcatcctcaggcacaccaaaatgaagacagccaccaatattt

SEQ ID NO: 261526 - DNA, 120 bp, Artificial Sequence
  ENSG00000125510_6 (sequence is synthesized)
acatctttaacctggccctggccgacactctggtcctgctgacgctgcccttccagggcacggacatcctcctgggcttctggccgtttgggaatgcgctgtgcaagacagtcattgcca

SEQ ID NO: 261527 - DNA, 120 bp, Artificial Sequence
  ENSG00000125510_7 (sequence is synthesized)
ttgactactacaacatgttcaccagcaccttcaccctaactgccatgagtgtggatcgctatgtagccatctgccaccccatccgtgccctcgacgtccgcacgtccagcaaagcccagg

SEQ ID NO: 261528 - DNA, 120 bp, Artificial Sequence
  ENSG00000125510_8 (sequence is synthesized)
ctgtcaatgtggccatctgggccctggcctctgttgtcggtgttcccgttgccatcatgggctcggcacaggtcgaggatgaagagatcgagtgcctggtggagatccctacccctcagg

SEQ ID NO: 261529 - DNA, 120 bp, Artificial Sequence
  ENSG00000125510_9 (sequence is synthesized)
attactggggcccggtgtttgccatctgcatcttcctcttctccttcatcgtccccgtgctcgtcatctctgtctgctacagcctcatgatccggcggctccgtggagtccgcctgctct

SEQ ID NO: 261530 - DNA, 120 bp, Artificial Sequence
  ENSG00000125510_10 (sequence is synthesized)
cgggctcccgagagaaggaccggaacctgcggcgcatcactcggctggtgctggtggtagtggctgtgttcgtgggctgctggacgcctgtccaggtcttcgtgctggcccaagggctgg

SEQ ID NO: 261531 - DNA, 120 bp, Artificial Sequence
  ENSG00000125510_11 (sequence is synthesized)
gggttcagccgagcagcgagactgccgtggccattctgcgcttctgcacggccctgggctacgtcaacagctgcctcaaccccatcctctacgccttcctggatgagaacttcaaggcct

SEQ ID NO: 261532 - DNA, 120 bp, Artificial Sequence
  ENSG00000125510_12 (sequence is synthesized)
gcttccgcaagttctgctgtgcatctgccctgcgccgggacgtgcaggtgtctgaccgcgtgcgcagcattgccaaggacgtggccctggcctgcaagacctctgagacggtaccgcggc

SEQ ID NO: 261533 - DNA, 120 bp, Artificial Sequence
  ENSG00000125510_13 (sequence is synthesized)
ccgcatgactaggcgtggacctgcccatggtgcctgtcagcccgcagagcccatctacgcccaacacagagctcacacaggtcactgctctctaggcggacacaccctgggccctgagca

SEQ ID NO: 261534 - DNA, 120 bp, Artificial Sequence
  ENSG00000125510_14 (sequence is synthesized)
tcggtcccagaggaggacctagtgacatcatgggacaggtcaaagcattagggccacctccatggccccagacagactaaagctgccctcctggtgcagggccgaggggacacaaggacc

SEQ ID NO: 261535 - DNA, 120 bp, Artificial Sequence
  ENSG00000125510_15 (sequence is synthesized)
tacctggaagcagctgacatgctggtggacggccgtgactggagcccgtgcccctccctccccgtgcttcatgtgactcttggcctctctgctgctgcgttggcagaaccctgggtgggc

SEQ ID NO: 261536 - DNA, 120 bp, Artificial Sequence
  ENSG00000125510_16 (sequence is synthesized)
aggcacccggaggaggagcagcagctgtgtcatcctgtgccccccatgtgctgtgtgctgtttgcatggcagggctccagctgccttcagccctgtgacgtctcctcagggcagctggac

SEQ ID NO: 261537 - DNA, 120 bp, Artificial Sequence
  ENSG00000125510_17 (sequence is synthesized)
aggcttggcactgcccgggaagtgcagcaggcagcttttctttggggtgggacttgccctgagcttggagctgccacctggaggacttgcctgttccgactccacctgtgcagccggggc

SEQ ID NO: 261538 - DNA, 120 bp, Artificial Sequence
  ENSG00000125510_18 (sequence is synthesized)
caccccaggagaaagtgtccaggtgggggctggcagtccctggctgcagaccccgagctggccctgggccagccgcacctctgaaggttttctgtgtgctgcacggtgcaggcctcatcc

SEQ ID NO: 261539 - DNA, 120 bp, Artificial Sequence
  ENSG00000125510_19 (sequence is synthesized)
ctgactgcagcttgactctgggcccaacccccatttcccttcaggagaccagcgagaggccctggcccattccctccagcggtgcaatgaactatcatgctgtggaccgtcaacccagcc

SEQ ID NO: 261540 - DNA, 120 bp, Artificial Sequence
  ENSG00000125510_20 (sequence is synthesized)
ctgcttctcagtgtggggcaggtgtctcaggacgaaggcgccgcgtgaccacatgggcagctctgttcacaaagtggaggcctcgttttcctggtcttgactgctctgtttgggtgggag

SEQ ID NO: 261541 - DNA, 120 bp, Artificial Sequence
  ENSG00000125510_21 (sequence is synthesized)
aagattctctgggggtccccacatcctcccaaggctcccctcacagcctctcctttgcttgaagccagaggtcagtggccgtgctgtgttgcgggggaagctgtgtggaaggagaagctg

SEQ ID NO: 261542 - DNA, 120 bp, Artificial Sequence
  ENSG00000125510_22 (sequence is synthesized)
gtggccacagcagagtcctgctctggggacgcctgcttcatttacaagcctcaagatggctctgtgtagggcctgagcttgctgcccaacgggaggatggcttcacagcagagccagcat

SEQ ID NO: 261543 - DNA, 120 bp, Artificial Sequence
  ENSG00000125510_23 (sequence is synthesized)
gaggggtggggcctggcagggcttgcttgagccaaactgcaaaggctgtggtggctgtgaggacactgcgggggttggggggggggcgtctgtacctcaggggatgccccgctgtggtca

SEQ ID NO: 261544 - DNA, 120 bp, Artificial Sequence
  ENSG00000125510_24 (sequence is synthesized)
cccagagaatcacccttcctggtctacagatggaagctgcaggttggtgactttgcaaatgcacttcctacagatgaactattaaaagacctgcaacattgaaaaaactcattttttcca

SEQ ID NO: 261545 - DNA, 120 bp, Artificial Sequence
  ENSG00000125510_25 (sequence is synthesized)
ccaaaaccttggccaggtaacctaccttaggcacctgcaaagaacaggaagtgatggctgtctcgcaacagagcctgggctgctcctcctgctctggggagtctaggccgtggggactgt

SEQ ID NO: 261546 - DNA, 120 bp, Artificial Sequence
  ENSG00000125510_26 (sequence is synthesized)
tctggggaggctcatgctgtctccatgacgtctgtggcaggagtccctgaggacgggagctgcctagctacagttttcttgccaaggcgaggtgttttgtgaatctgtgctgatgtaatg

SEQ ID NO: 261547 - DNA, 120 bp, Artificial Sequence
  ENSG00000125510_27 (sequence is synthesized)
tgcaccttcacgtatttatgcatgtggcaagcgttacttcctgtgcacgtagccagccctgggtctgtctctggggtaatgaaaaaggaccctaataaacacctgctcactggctgggta

SEQ ID NO: 261548 - DNA, 120 bp, Artificial Sequence
  ENSG00000125510_28 (sequence is synthesized)
cgaccaggtggggcgggtcgtggcggggggcagggtcccctccggagggccctgggttagagtctgggcgtggacgcgcccctcataggggtcattggggcatagaggcatagagccggc

SEQ ID NO: 261549 - DNA, 120 bp, Artificial Sequence
  ENSG00000125510_29 (sequence is synthesized)
ttctccagcttgggattcacgtgtttttcaagggctaacggaaatgctgagatctaaaagcatgtttattgctgccaaggcctgacgatgaaacttcaagtcaaattacttcgggctgcc

SEQ ID NO: 261550 - DNA, 80 bp, Artificial Sequence
  ENSG00000125520_0 (sequence is synthesized)
tgacggtgcccacgccgccgcagggctcttccgtgggcggcggcttcgcgggcttggagttcgcgcggccgcaggagtcg

SEQ ID NO: 261551 - DNA, 120 bp, Artificial Sequence
  ENSG00000125520_1 (sequence is synthesized)
cgggggcggcggcggggccccggactccgtcggcgcacatccccgtcccagcgcagagagccaccccaggaaaagcccggctggacgaggtcatggctgccgctgcccttacaagcctgt

SEQ ID NO: 261552 - DNA, 120 bp, Artificial Sequence
  ENSG00000125520_2 (sequence is synthesized)
ccaccagccctctccttctgggggccccggttgcagccttcagcccagagcctggcctggagccctggaaggaggccctggtgcggcccccaggcagctacagcagcagcagcaacagtg

SEQ ID NO: 261553 - DNA, 120 bp, Artificial Sequence
  ENSG00000125520_3 (sequence is synthesized)
gagactggggatgggacctggccagtgaccagtcctctccgtccaccccgtcacccccactgccccccgaggcagcccactttctgtttggggagcccaccctgagaaaaaggaagagcc

SEQ ID NO: 261554 - DNA, 120 bp, Artificial Sequence
  ENSG00000125520_4 (sequence is synthesized)
cggcccaggtcatgttccagtgtctgtggaagagctgcgggaaggtgctgagcacggcgtcggcgatgcagagacacatccgcctggtgcacctggggaggcaggcagagcctgagcaga

SEQ ID NO: 261555 - DNA, 120 bp, Artificial Sequence
  ENSG00000125520_5 (sequence is synthesized)
gtgatggtgaggaggacttctactacacagagctggatgttggtgtggacacgctgaccgacgggctgtccagcctgactccagtgtcccccacggcctccatgccgcctgccttccccc

SEQ ID NO: 261556 - DNA, 120 bp, Artificial Sequence
  ENSG00000125520_6 (sequence is synthesized)
gcctggagctgccagagctgctggagcccccagccctgcctagtcccctgcggccgcctgccccgcccctgcccccgccccctgtcctgagcaccgttgctaacccccagtcctgtcaca

SEQ ID NO: 261557 - DNA, 120 bp, Artificial Sequence
  ENSG00000125520_7 (sequence is synthesized)
tgtcctccaggatcggagtcaccctgaggaagccccgcggcgacgcgaagaagtgccggaaggtgtatggcatggagcgccgggacctctggtgcacagcctgccgctggaagaaagcct

SEQ ID NO: 261558 - DNA, 120 bp, Artificial Sequence
  ENSG00000125520_8 (sequence is synthesized)
gccagcggttcctggactaagtccggctcgttcaagaacataagctaccaccttctccctccccaccccctccaggcccggggctgaaacagcccgaggacagccccaggggctggcttt

SEQ ID NO: 261559 - DNA, 120 bp, Artificial Sequence
  ENSG00000125520_9 (sequence is synthesized)
caccagctgcagggtctgcttttacttggggtgggggggcggggctgaccctgaaccctcccccccgccaggtcggggaggggtcccaccactcaaagtgcctctaaagaaaccagcttt

SEQ ID NO: 261560 - DNA, 120 bp, Artificial Sequence
  ENSG00000125520_10 (sequence is synthesized)
ttgcactaaagccaaaccacaccgctgtccccttagccccaagggccctgggggcagccaccctcccgcctgtcggcccgtagatttatcaagggtgttatgggcccagctttggggggc

SEQ ID NO: 261561 - DNA, 120 bp, Artificial Sequence
  ENSG00000125520_11 (sequence is synthesized)
cagtcccgatgcactttgaggggtgttggagaggggactcccccactcgcacttaactcaacggctctcgggccctggggctgtttttaccatgtttgtttttgaagctcaggtgtctca

SEQ ID NO: 261562 - DNA, 120 bp, Artificial Sequence
  ENSG00000125520_12 (sequence is synthesized)
cgtctgggctgcaccaggcgaagagagaaattaaagatttgaggtttttccagaagctttgtctgcctctcgggaggaaggccgtggggctgggaccctgtggtgggcaagtgggtggag

SEQ ID NO: 261563 - DNA, 120 bp, Artificial Sequence
  ENSG00000125520_13 (sequence is synthesized)
tctggcagctgcccacagagggccgagggtcacccgtcggccgccgccaccccaggcgaggccggaggaaggatcatctgagacgcaggaggcatctgctggagcagcaatttcccaatt

SEQ ID NO: 261564 - DNA, 120 bp, Artificial Sequence
  ENSG00000125520_14 (sequence is synthesized)
tattgaaagtgatcgctttgcaaggatgtctaagctaatcccgtcacagaaaggaaacgcacaggcgcctaggcagaaacttggagactcaccgcagaggccacgtgaacccacggccac

SEQ ID NO: 261565 - DNA, 120 bp, Artificial Sequence
  ENSG00000125520_15 (sequence is synthesized)
agagaggcaggacggcagagccatgatttcccaccgagcgattacgagaacctcttcccccaatagtagacacatctccaatacaaacacaggtttataataagtaataggaagtcaata

SEQ ID NO: 261566 - DNA, 120 bp, Artificial Sequence
  ENSG00000125520_16 (sequence is synthesized)
taatatagattatccccagaaaaaaatcaacaatcttcaaacactgccctttttttgtgtgttttgtttttgttgacaggttgaaagcatgttgaaaaaaataaatatttaagaaaagca

SEQ ID NO: 261567 - DNA, 120 bp, Artificial Sequence
  ENSG00000125520_17 (sequence is synthesized)
cagggctgggagtggggagcctggtgtgcacgcgtgcccaggcctgcacgtggaccgaccaggggaggggcccagagctctggctgggtcacccgcaccccgcccccatctcctccagag

SEQ ID NO: 261568 - DNA, 120 bp, Artificial Sequence
  ENSG00000125520_18 (sequence is synthesized)
gcggccgcctgccccgcccctgcccccgccccctgtcctgagcaccgttgctaacccccagtcctgtcacagtgaccgtgtctaccaggtgggtgaggccacgggtggcagctggggcgg

SEQ ID NO: 261569 - DNA, 120 bp, Artificial Sequence
  ENSG00000125520_19 (sequence is synthesized)
gccgtccacaccggccgcagccggttttcgaggcgggcgccgagcggatccgcggcggaggttgagggacccccctcccccggccaccgcctccgctgagtctgccccctccccatccgc

SEQ ID NO: 261570 - DNA, 120 bp, Artificial Sequence
  ENSG00000125522_0 (sequence is synthesized)
ggcagggacggatccacatctcttcccaggagggtggccagcagctgctctctgcgggaggagggaactgatctgctgaagtctcaccaggaagaggcgggaggaggcccccacacaccc

SEQ ID NO: 261571 - DNA, 120 bp, Artificial Sequence
  ENSG00000125522_1 (sequence is synthesized)
caccaggctccctctggccccatgtccttgacctggcaaagtggccgcagtctctgccagagaacctggagtggctgtgccctaacagacggccggatctcaaagtctctggttgttttt

SEQ ID NO: 261572 - DNA, 120 bp, Artificial Sequence
  ENSG00000125522_2 (sequence is synthesized)
ctttcctagaatccagcccaaggaggcccccaaccagatacccaactccaaggcacctcccacctgcccagggcgcaaatcgtcaacggtcccagctacaatgcaggccgctgggcaccc

SEQ ID NO: 261573 - DNA, 120 bp, Artificial Sequence
  ENSG00000125522_3 (sequence is synthesized)
agagccccttgacagcaggggctccttctccctccccacgatgggtgccaacgtctctcaggacaatggcactggccacaatgccaccttctccgagccactgccgttcctctatgtgct

SEQ ID NO: 261574 - DNA, 120 bp, Artificial Sequence
  ENSG00000125522_4 (sequence is synthesized)
cctgcccgccgtgtactccgggatctgtgctgtggggctgactggcaacacggccgtcatccttgtaatcctaagggcgcccaagatgaagacggtgaccaacgtgttcatcctgaacct

SEQ ID NO: 261575 - DNA, 120 bp, Artificial Sequence
  ENSG00000125522_5 (sequence is synthesized)
tgcccgtcaacatcgcggagcacctgctgcagtactggcccttcggggagctgctctgcaagctggtgctggccgtcgaccactacaacatcttctccagcatctacttcctagccgtga

SEQ ID NO: 261576 - DNA, 120 bp, Artificial Sequence
  ENSG00000125522_6 (sequence is synthesized)
tgagcgtggaccgatacctggtggtgctggccaccgtgaggtcccgccacatgccctggcgcacctaccggggggcgaaggtcgccagcctgtgtgtctggctgggcgtcacggtcctgg

SEQ ID NO: 261577 - DNA, 120 bp, Artificial Sequence
  ENSG00000125522_7 (sequence is synthesized)
ttctgcccttcttctctttcgctggcgtctacagcaacgagctgcaggtcccaagctgtgggctgagcttcccgtggcccgagcaggtctggttcaaggccagccgtgtctacacgttgg

SEQ ID NO: 261578 - DNA, 120 bp, Artificial Sequence
  ENSG00000125522_8 (sequence is synthesized)
tcctgggcttcgtgctgcccgtgtgcaccatctgtgtgctctacacagacctcctgcgcaggctgcgggccgtgcggctccgctctggagccaaggctctaggcaaggccaggcggaagg

SEQ ID NO: 261579 - DNA, 120 bp, Artificial Sequence
  ENSG00000125522_9 (sequence is synthesized)
tgaccgtcctggtcctcgtcgtgctggccgtgtgcctcctctgctggacgcccttccacctggcctctgtcgtggccctgaccacggacctgccccagaccccactggtcatcagtatgt

SEQ ID NO: 261580 - DNA, 120 bp, Artificial Sequence
  ENSG00000125522_10 (sequence is synthesized)
cctacgtcatcaccagcctcagctacgccaactcgtgcctgaaccccttcctctacgcctttctagatgacaacttccggaagaacttccgcagcatattgcggtgctgaagggcctggg

SEQ ID NO: 261581 - DNA, 120 bp, Artificial Sequence
  ENSG00000125531_0 (sequence is synthesized)
gaggctgggctctgggaagtccgcgcgcggctccgcttcagaggcaggctcccggataatgagcacccatgtggcaggcctgggcctggacaagatgaagctgggcaatccccagtcctt

SEQ ID NO: 261582 - DNA, 120 bp, Artificial Sequence
  ENSG00000125531_1 (sequence is synthesized)
cctggaccaggaggaggcagatgaccagcagctgctggaaccagaggcgtggaagacctacaccgagcgccgcaatgccctgcgtgagttcctgacctcggacctgagtccgcacctgct

SEQ ID NO: 261583 - DNA, 120 bp, Artificial Sequence
  ENSG00000125531_2 (sequence is synthesized)
caagcgccaccacgcccgcatgcagctgctgcgtaagtgctcctactacatcgaggtcctgcccaagcacctggccctgggcgaccagaacccgctggtgctgcctagcgccttgttcca

SEQ ID NO: 261584 - DNA, 120 bp, Artificial Sequence
  ENSG00000125531_3 (sequence is synthesized)
gctcatcgacccctggaagttccagcgcatgaagaaggtgggcacagctcagaccaagatccagctcctgctgctcggggacctgttggaacagctcgaccatggccgtgctgagctgga

SEQ ID NO: 261585 - DNA, 120 bp, Artificial Sequence
  ENSG00000125531_4 (sequence is synthesized)
cggtcgccagacccacggcccttcctggccgactgggcgctggtggagcggcggctggcggacgtgtcggccgtcatggacagcttcctgaccatgatggtgccggggcggctacacgtc

SEQ ID NO: 261586 - DNA, 120 bp, Artificial Sequence
  ENSG00000125531_5 (sequence is synthesized)
aagcaccgcctggtgtctgatgtcagtgccaccaagatcccgcacatctggctcatgctgagcaccaagatgcctgtcgtgtttgaccgaaaggcgtcggcggctcaccaggactgggcc

SEQ ID NO: 261587 - DNA, 120 bp, Artificial Sequence
  ENSG00000125531_6 (sequence is synthesized)
cggctgcgctggttcgtcaccatccagccagccacatcggagcagtatgagttgcgcttcaggctgctggacccgcggacacagcaggagtgcgcccagtgtggcgtcatccccgtggct

SEQ ID NO: 261588 - DNA, 120 bp, Artificial Sequence
  ENSG00000125531_7 (sequence is synthesized)
gcctgcaccttcgacgtccgaaacctgctgcccaaccgatcctataagttcaccatcaagagggccgagacctccacgctggtgtacgagccctggagggacagcctcaccctgcacacc

SEQ ID NO: 261589 - DNA, 120 bp, Artificial Sequence
  ENSG00000125531_8 (sequence is synthesized)
aagccggagcccctggaggggcccgccctcagccactctgtctgagagatgattttctaatatttatccactaataaagaagagtgtaaatgcacatatggaattaaagaagcaaaccta

SEQ ID NO: 261590 - DNA, 120 bp, Artificial Sequence
  ENSG00000125531_9 (sequence is synthesized)
ggaagaggccccagcactgacctccgtgggggtggagatgaggaggatggaaagggtgtcttcctccagcatcttcctgaagctcccggataatgagcacccatgtggcaggcctgggcc

SEQ ID NO: 261591 - DNA, 120 bp, Artificial Sequence
  ENSG00000125531_10 (sequence is synthesized)
agagcccgcggcgggggaagccgcccctctcctctgtccaggcgctgggtggtccatccgcctggtcaccggccactgcctctctcccaaattcctccgagggattcccgaggagtgcgc

SEQ ID NO: 261592 - DNA, 120 bp, Artificial Sequence
  ENSG00000125531_11 (sequence is synthesized)
tcggactggggggttgagcaggaactccctcccagtcacccgaggctcctgcgccccgcccgaagccgggggtgcgtggggagtggtgcgcccgcggaagggctccgggacgggaacccc

SEQ ID NO: 261593 - DNA, 120 bp, Artificial Sequence
  ENSG00000125531_12 (sequence is synthesized)
ccttggagcctggctcttggaccagccacccgccgtggcccctcagtcggggacgcgggcccccagaagtctggggctctccaggaagcgaagcggatggaagattactcggctcggggt

SEQ ID NO: 261594 - DNA, 120 bp, Artificial Sequence
  ENSG00000125531_13 (sequence is synthesized)
cccacccccgccccgcccccgggccgcagcgtcacaaaggccgctggtccccagggcaacccgcggagtgcggagggaggctgggctctgggaagtccgcgcgcggctccgcttcagagg

SEQ ID NO: 261595 - DNA, 120 bp, Artificial Sequence
  ENSG00000125531_14 (sequence is synthesized)
ttcagaggcagggcaagtgggcgcggtcctggggcggcggcgggggccgggagaggagggctgggggtctcgagaaggtaaggggcaggcagagcggccggggaggtgggcccgggccag

SEQ ID NO: 261596 - DNA, 120 bp, Artificial Sequence
  ENSG00000125531_15 (sequence is synthesized)
gggagccaaggggagtgtggtggagggggtagagtgcgggcacctggtggtctcagggaagcgggcctgggaccggggcgtgtaggaagcagcgaggggctcagaaccacctttccgggt

SEQ ID NO: 261597 - DNA, 120 bp, Artificial Sequence
  ENSG00000125531_16 (sequence is synthesized)
tcacgaccagcctctctgggtgttccacctgggcagctgctggagactagaaaacatccctcacacgtcacagaggcacggtttccctccagcggtgaaatccgccccagcctccagcaa

SEQ ID NO: 261598 - DNA, 120 bp, Artificial Sequence
  ENSG00000125531_17 (sequence is synthesized)
gagcagggcttaggcctggggtcctggggtcctgctctcagctggcacctcaccccagacacactccctgctgcccccaggggcctgttctcgagggattcccgaggagtgcgctcgtga

SEQ ID NO: 261599 - DNA, 120 bp, Artificial Sequence
  ENSG00000125531_18 (sequence is synthesized)
agtcatatctgcctcacgcccaaaagggcaacccttcccgggcagatatgacttcaccacgtacctgtgtggccctggggaactcagcaactgcttagctctcatttgtgggtcgtccaa

SEQ ID NO: 261600 - DNA, 120 bp, Artificial Sequence
  ENSG00000125531_19 (sequence is synthesized)
ggcccaagtggctgtgacaacctgagatctccagggttgctgggagccggggcagcaaccaggggtgcggcttgctctccagggagctgcggcagagcctggggccacagctgcactcag

SEQ ID NO: 261601 - DNA, 120 bp, Artificial Sequence
  ENSG00000125531_20 (sequence is synthesized)
ccggtgcacccacggacagagggtcagactcggctcagcactgggctcaagccctggatgagaacaagaaccaagcttcttagcctcaggctccatctgggaaatggagtgtcacttgtg

SEQ ID NO: 261602 - DNA, 120 bp, Artificial Sequence
  ENSG00000125531_21 (sequence is synthesized)
gagtccatgagctcaccagggacaggatcccgggtccacagcgagggcccacagcgtgggaggagggctgctcctccgggcccaggcctgggcgccctcctcccatgctgaccagccagc

SEQ ID NO: 261603 - DNA, 120 bp, Artificial Sequence
  ENSG00000125531_22 (sequence is synthesized)
cggagcgggaggatggcccgcgaatgtccccgagggggatcctgtgctgcttaggaccacgccgtcccctctccacggccccgaggggtgccagcaacccctttcagcagcagggttagg

SEQ ID NO: 261604 - DNA, 120 bp, Artificial Sequence
  ENSG00000125531_23 (sequence is synthesized)
aactggggcccttgcaaggccacaggtcaggcggttctggccagaagtccgcagtcctagttcttccctgtcctgtcccacaggccactggttgtcagtagaggtttttgcccctcagta

SEQ ID NO: 261605 - DNA, 120 bp, Artificial Sequence
  ENSG00000125531_24 (sequence is synthesized)
taaactgtgtccagatctgtaggctgcccatccagccctccaggcagcctcttcccatcgagttgtgcccccgaagaaggacagaggtccagcatggggtcagtgggctgaatccatccc

SEQ ID NO: 261606 - DNA, 120 bp, Artificial Sequence
  ENSG00000125531_25 (sequence is synthesized)
tgcccagtcaggcctggcccatgcccaagggcaccacagtccaacagccgcccgtgcccacggagaagtgggggttccacggagaagcgctgctgttcagcacctgcagtggttgccaag

SEQ ID NO: 261607 - DNA, 120 bp, Artificial Sequence
  ENSG00000125531_26 (sequence is synthesized)
cctgagctgcactcaggtgaaaaattgcctgcttatttaagtgttggccagatattttaacatcattaaccctgcaccaggtgccgagcctccggcctctgcagtaaattctgaggacag

SEQ ID NO: 261608 - DNA, 120 bp, Artificial Sequence
  ENSG00000125531_27 (sequence is synthesized)
gcgagtgagggggctctcagcaccccggctttcatgcagtaaaacgagatgctgattgcagggagctcggccgcaggccaggcacccagatgccccatgctgcccgatgaccggcttctg

SEQ ID NO: 261609 - DNA, 120 bp, Artificial Sequence
  ENSG00000125531_28 (sequence is synthesized)
gcacacggagaaggggcggcgggtgagtccctggctggggacctcccaccctctccctggacagcgccaagcccccgcatgctgaagcaaactctgcccgctcagctcccggataatgag

SEQ ID NO: 261610 - DNA, 120 bp, Artificial Sequence
  ENSG00000125533_0 (sequence is synthesized)
agagcccgccccctgcgcgtcgcggctgggagggagaggaggtgggagagaaggaagaggcggaggaggcagcgggcgccgaggctctgggacccgcaggcaagccagaccgacgcgcag

SEQ ID NO: 261611 - DNA, 120 bp, Artificial Sequence
  ENSG00000125533_1 (sequence is synthesized)
caagccagaccgacgcgcagagccgggagcctcatcgcagcggcagcggcagcggcgggctcgggccggcctcgggggctgctcacccacatgagcatccgcccacccggcgagcccccg

SEQ ID NO: 261612 - DNA, 120 bp, Artificial Sequence
  ENSG00000125533_2 (sequence is synthesized)
ggccgagctcaagtcgctgtcgggggacgcgtacctggcactaagccacggctacgcggcggcggctgcgggtctcgcctacggggcggcgcgagaacccgaagcggcccgcggctacgg

SEQ ID NO: 261613 - DNA, 120 bp, Artificial Sequence
  ENSG00000125533_3 (sequence is synthesized)
ggctacggcactccgggcccgggcggcgacctccccgcggcgcctgcacctcgcgccccagctcaggcggcggagagcagcggcgaacagagcggggacgaggacgacgccttcgagcag

SEQ ID NO: 261614 - DNA, 120 bp, Artificial Sequence
  ENSG00000125533_4 (sequence is synthesized)
gcgcgagcggcggcgcatgcacgacctaaacgacgcgctggacgggctgcgagccgtcatcccctacgcgcacagcccgtcggtgcgcaagctctccaagatcgccacgctgctgctcgc

SEQ ID NO: 261615 - DNA, 120 bp, Artificial Sequence
  ENSG00000125533_5 (sequence is synthesized)
caagaactatatcctcatgcaggcgcaggccctggacgagatgcggcgcctggtggccttcctcaaccagggccagggcctggccgcgcccgtaaacgccgcgcccttgacgcccttcgg

SEQ ID NO: 261616 - DNA, 120 bp, Artificial Sequence
  ENSG00000125533_6 (sequence is synthesized)
ccaggccactgtgtgccccttctccgcaggcgccgccctggggccctgccctgacaagtgcgccgccttctccgggacgccctccgcgctttgcaaacactgtcacgagaagccgtgacc

SEQ ID NO: 261617 - DNA, 120 bp, Artificial Sequence
  ENSG00000125533_7 (sequence is synthesized)
gcgcgggcccccggccctcccgcacgcgtcctccgatcgcccctgtgactgtctctctgcccggacaggaaaggcctggagggaccctgcagaccaggaggagggggcccgacttcgctt

SEQ ID NO: 261618 - DNA, 120 bp, Artificial Sequence
  ENSG00000125534_0 (sequence is synthesized)
accccgcgcgcgcctctctgtcgtggcgcggcttcccgcggtcttctctgcaaatgggctccgtggcctagcgcccccgtccccgccacccgtgatcgtgcgccgaggcccgcgaggggt

SEQ ID NO: 261619 - DNA, 120 bp, Artificial Sequence
  ENSG00000125534_1 (sequence is synthesized)
cgccgcccagatcccaccagccagcaagctaaagcatggcggccatcccctccagcggctcgctcgtggccacccacgactactaccggcgccgcctgggttccacttccagcaacagct

SEQ ID NO: 261620 - DNA, 120 bp, Artificial Sequence
  ENSG00000125534_2 (sequence is synthesized)
cctgcagcagtaccgagtgccccggggaagccattccccaccccccaggtctccccaaggctgacccgggtcattggtgggccagcttctttttcgggaagtccaccctcccgttcatgg

SEQ ID NO: 261621 - DNA, 120 bp, Artificial Sequence
  ENSG00000125534_3 (sequence is synthesized)
tccagcacagccagcgctgggcccccgtcctgacctgagcggttaccaccagccccaggcctgcggaggcgctagtccaccagagcccctccccgcccctctccccactccgcatccctc

SEQ ID NO: 261622 - DNA, 120 bp, Artificial Sequence
  ENSG00000125534_4 (sequence is synthesized)
gcccccctccccacctcccaccccccaccctgtaaactaggcggctgcagcaagcagaccttcgcatcaacacagcagacaccaaaaaccagtgagagccccgctctctaccgcccggcc

SEQ ID NO: 261623 - DNA, 120 bp, Artificial Sequence
  ENSG00000125534_5 (sequence is synthesized)
ccagcactcgctagctttcctgacacctggaactgtgcacctggcaccaagcggaaaataaactccaagcagccagtagccccgatggtgtgtgcctgagctgtgtggcccgaggttcca

SEQ ID NO: 261624 - DNA, 120 bp, Artificial Sequence
  ENSG00000125534_6 (sequence is synthesized)
ccaccccccaggtgagtgcaggatcgcccctttctccccccgctcctccaggagctggcagcatcaagaccccacttcgcttctctcaggtctccccaaggctgacccgggtcattggtg

SEQ ID NO: 261625 - DNA, 120 bp, Artificial Sequence
  ENSG00000125534_7 (sequence is synthesized)
gccagtgccggccccgtgcaggctgcggaaccagcgctcggcctgaaggccggtgggctggggggctccgcgccccgcgttgctgacgggacctctcctctccaggccgcctgggttcca

SEQ ID NO: 261626 - DNA, 120 bp, Artificial Sequence
  ENSG00000125534_8 (sequence is synthesized)
cctctctgtcgtggcgcggcttcccgcggtcttctctgcaaatgggctccgtggcctagcgcccccgtccccgccacccgtgatcgtgcgccgaggcccgcgaggggtcgccgcccaggc

SEQ ID NO: 261627 - DNA, 120 bp, Artificial Sequence
  ENSG00000125538_0 (sequence is synthesized)
accaaacctcttcgaggcacaaggcacaacaggctgctctgggattctcttcagccaatcttcattgctcaagtgtctgaagcagccatggcagaagtacctgagctcgccagtgaaatg

SEQ ID NO: 261628 - DNA, 120 bp, Artificial Sequence
  ENSG00000125538_1 (sequence is synthesized)
atggcttattacagtggcaatgaggatgacttgttctttgaagctgatggccctaaacagatgaagtgctccttccaggacctggacctctgccctctggatggcggcatccagctacga

SEQ ID NO: 261629 - DNA, 120 bp, Artificial Sequence
  ENSG00000125538_2 (sequence is synthesized)
atctccgaccaccactacagcaagggcttcaggcaggccgcgtcagttgttgtggccatggacaagctgaggaagatgctggttccctgcccacagaccttccaggagaatgacctgagc

SEQ ID NO: 261630 - DNA, 120 bp, Artificial Sequence
  ENSG00000125538_3 (sequence is synthesized)
accttctttcccttcatctttgaagaagaacctatcttcttcgacacatgggataacgaggcttatgtgcacgatgcacctgtacgatcactgaactgcacgctccgggactcacagcaa

SEQ ID NO: 261631 - DNA, 120 bp, Artificial Sequence
  ENSG00000125538_4 (sequence is synthesized)
aaaagcttggtgatgtctggtccatatgaactgaaagctctccacctccagggacaggatatggagcaacaagtggtgttctccatgtcctttgtacaaggagaagaaagtaatgacaaa

SEQ ID NO: 261632 - DNA, 120 bp, Artificial Sequence
  ENSG00000125538_5 (sequence is synthesized)
atacctgtggccttgggcctcaaggaaaagaatctgtacctgtcctgcgtgttgaaagatgataagcccactctacagctggagagtgtagatcccaaaaattacccaaagaagaagatg

SEQ ID NO: 261633 - DNA, 120 bp, Artificial Sequence
  ENSG00000125538_6 (sequence is synthesized)
ccaactggtacatcagcacctctcaagcagaaaacatgcccgtcttcctgggagggaccaaaggcggccaggatataactgacttcaccatgcaatttgtgtcttcctaaagagagctgt

SEQ ID NO: 261634 - DNA, 120 bp, Artificial Sequence
  ENSG00000125538_7 (sequence is synthesized)
acccagagagtcctgtgctgaatgtggactcaatccctagggctggcagaaagggaacagaaaggtttttgagtacggctatagcctggactttcctgttgtctacaccaatgcccaact

SEQ ID NO: 261635 - DNA, 120 bp, Artificial Sequence
  ENSG00000125538_8 (sequence is synthesized)
gcctgccttagggtagtgctaagaggatctcctgtccatcagccaggacagtcagctctctcctttcagggccaatccccagcccttttgttgagccaggcctctctcacctctcctact

SEQ ID NO: 261636 - DNA, 120 bp, Artificial Sequence
  ENSG00000125538_9 (sequence is synthesized)
cacttaaagcccgcctgacagaaaccacggccacatttggttctaagaaaccctctgtcattcgctcccacattctgatgagcaaccgcttccctatttatttatttatttgtttgtttg

SEQ ID NO: 261637 - DNA, 120 bp, Artificial Sequence
  ENSG00000125538_10 (sequence is synthesized)
ttttattcattggtctaatttattcaaagggggcaagaagtagcagtgtctgtaaaagagcctagtttttaatagctatggaatcaattcaatttggactggtgtgctctctttaaatca

SEQ ID NO: 261638 - DNA, 120 bp, Artificial Sequence
  ENSG00000125538_11 (sequence is synthesized)
agtcctttaattaagactgaaaatatataagctcagattatttaaatgggaatatttataaatgagcaaatatcatactgttcaatggttctgaaataaacttcactgaagaaaaaaaaa

SEQ ID NO: 261639 - DNA, 120 bp, Artificial Sequence
  ENSG00000125538_12 (sequence is synthesized)
tcctgctaccacttattcccagacaaccaccttctccccgcccccatccctaggaaaagctgggaacaggtctatttgacaattttgcattaatgtaaataaatttaacataatttttaa

SEQ ID NO: 261640 - DNA, 120 bp, Artificial Sequence
  ENSG00000125538_13 (sequence is synthesized)
actttaatcttccttacaactaggtgctaagggagtctctctgtctctctgcctctttgtgtgtatgcatattctctctctctctctctttctttctctgtctctccctctccttccctc

SEQ ID NO: 261641 - DNA, 120 bp, Artificial Sequence
  ENSG00000125538_14 (sequence is synthesized)
tctgcctccctctctcagctttttgcaaaaatgccaggtgtaatataatgcttatgactcgggaaatattctgggaatggatactgcttatctaacagctgacaccctaaaggtgtctga

SEQ ID NO: 261642 - DNA, 120 bp, Artificial Sequence
  ENSG00000125538_15 (sequence is synthesized)
aatacattgctagttggggtttggtttagcaaatgcttttctctagacccaaaggacttctctttcacacattcattcatttactcagagatcatttctttgcatgactgccatgcactg

SEQ ID NO: 261643 - DNA, 120 bp, Artificial Sequence
  ENSG00000125538_16 (sequence is synthesized)
gaagtcatcaagccccagccaactcaattcccccagagccaaagccctttaaaggtagaaggcccagcggggagacaaaacaaagaaggctggaaaccaaagcaatcatctctttagtgg

SEQ ID NO: 261644 - DNA, 120 bp, Artificial Sequence
  ENSG00000125538_17 (sequence is synthesized)
cttgctgacctggccacttggtcatcatatcaccacagtcactcactaacgttggtggtggtggccacacttggtggtgacaggggaggagtagtgataatgtttcccatttcatagtag

SEQ ID NO: 261645 - DNA, 120 bp, Artificial Sequence
  ENSG00000125538_18 (sequence is synthesized)
gaagacaaccaagtcttcaacataaatttgattatccttttaagagatggattcagcctatgccaatcacttgagttaaactctgaaaccaagagatgatcttgagaactaacatatgtc

SEQ ID NO: 261646 - DNA, 120 bp, Artificial Sequence
  ENSG00000125538_19 (sequence is synthesized)
gaaagccataaaaacagcgagggagaaactggcagataccaaacctcttcgaggcacaaggcacaacaggctgctctgggattctcttcagccaatcttcattgctcaagtatgacttta

SEQ ID NO: 261647 - DNA, 120 bp, Artificial Sequence
  ENSG00000125538_20 (sequence is synthesized)
tttctcaggggcctttcacttacattgtcaccagaggttcgtaacctccctgtgggctagtgttatgaccatcaccattttacctaagtagctctgttgctcggccacagtgagcagtaa

SEQ ID NO: 261648 - DNA, 120 bp, Artificial Sequence
  ENSG00000125538_21 (sequence is synthesized)
tagacctgaagctggaacccatgtctaatagtgtcaggtccagtgttcttagccaccccactcccagcttcatccctactggtgttgtcatcagactttgaccgtatatgctcaggtgtc

SEQ ID NO: 261649 - DNA, 120 bp, Artificial Sequence
  ENSG00000125551_0 (sequence is synthesized)
tctcatgtaagtcaacaacatcctgggattgggacacactttctgggcactgctggccagtcccaaaatggaacataaggaagtggttcttctacttcttttatttctgaaatcaggtca

SEQ ID NO: 261650 - DNA, 120 bp, Artificial Sequence
  ENSG00000125551_1 (sequence is synthesized)
aggagagcccctggatgactatgtgaatacccaggggccttcactgttcagtgtcactaagaagcagctgggggcaggaagcagagaagaatgtgcagcaaaatgtgaagaggacaaaga

SEQ ID NO: 261651 - DNA, 120 bp, Artificial Sequence
  ENSG00000125551_2 (sequence is synthesized)
attcacctgcagggcattccaatatcacagtaaagagcaacaatgtgtgataatggctgaaaacaggaagtcctccataatcattaggatgagagatgcagttttatttgaaaagtaaat

SEQ ID NO: 261652 - DNA, 120 bp, Artificial Sequence
  ENSG00000125551_3 (sequence is synthesized)
gtatctttcagagtgcaagactgggaatggaaagaactacagagggacgatgtccaaaacaaaaaatggcatcacctgtcaaaaatggagttccacttctccccgcagacctaggtcaga

SEQ ID NO: 261653 - DNA, 120 bp, Artificial Sequence
  ENSG00000125551_4 (sequence is synthesized)
cttttcctttcatctttgtgttcatctactgtaaagtgtccgtctgtgtctgtgagggattggttccaggacccctgtggctaccaaaatccatgcttctcaagtcccttatgtaaaatg

SEQ ID NO: 261654 - DNA, 120 bp, Artificial Sequence
  ENSG00000125551_5 (sequence is synthesized)
gtgcagtatttgcatataacctacataccttctcttgtgcaatccctaatataatgtaaatgctatgtaatcgttgttatactgtattgtttttatttgtattatgttttattgtcatat

SEQ ID NO: 261655 - DNA, 120 bp, Artificial Sequence
  ENSG00000125551_6 (sequence is synthesized)
tgttattttctctcatctttttcaagtcttttccatccacagttggttgaatttgtggatgtggaacccatggatacagagggccaactgtatttaggataatttcatcacttttaattc

SEQ ID NO: 261656 - DNA, 120 bp, Artificial Sequence
  ENSG00000125551_7 (sequence is synthesized)
aaaccagaatatgtgaataagcagacagaaagaatctttttgatgtcgatgttcaactatttttggcaccatagtagaacatggttgctttctattttttcttgggtatggaggtttctt

SEQ ID NO: 261657 - DNA, 120 bp, Artificial Sequence
  ENSG00000125551_8 (sequence is synthesized)
gaagacctagaacatagaagaatgcctagttaaaaaaaaaaatcaatgaaactacgagttttaggccaaatctgagaaaagaccaaagatgactatgtttgggactgaagtaaacatatc

SEQ ID NO: 261658 - DNA, 120 bp, Artificial Sequence
  ENSG00000125551_9 (sequence is synthesized)
aagttagaactctcatcacatgtttgactcaaattgtggagcaaaatagtaaataaaatataaaaatgaaaatgaagatacgtgaaattcaaatgtcacaacttgcctattatttatttt

SEQ ID NO: 261659 - DNA, 120 bp, Artificial Sequence
  ENSG00000125551_10 (sequence is synthesized)
agtgcatttttttgtgcttttcccagtttggtgttaggtggccttaagttctcagtaatgacacttatcaaataggaacttagtgttactcacctttatccattcccccaacactcaaca

SEQ ID NO: 261660 - DNA, 120 bp, Artificial Sequence
  ENSG00000125551_11 (sequence is synthesized)
aattgcctttgctatatccctatgagatgagcagatcaaatattccccgtgagttaatgaaaactgattcaaccaaatggcgaagtcagagactatcgggggccatggagacactctggg

SEQ ID NO: 261661 - DNA, 120 bp, Artificial Sequence
  ENSG00000125551_12 (sequence is synthesized)
gtctaggctcatcttcatgagggaactgaggtcttggggggtgggggttacccaaataggttcacagaagaaccagaaataaaacctgcctttctagactgtaagtcttgtgattgtcat

SEQ ID NO: 261662 - DNA, 120 bp, Artificial Sequence
  ENSG00000125551_13 (sequence is synthesized)
ctaaatggttgtctctatacagcaactcatctctagaactgaaaataagtttaaatccctcctccatccccaataattcaagctgcatttcagagaaaaccaggactttggaatcagaca

SEQ ID NO: 261663 - DNA, 120 bp, Artificial Sequence
  ENSG00000125551_14 (sequence is synthesized)
gatcaactttgaattcttgatctgcttcttcatagctatttatgcttaggcaagttttgttttgttttgttttacgttgccactcagtcttctcatctgtaaaacagggataataacacc

SEQ ID NO: 261664 - DNA, 120 bp, Artificial Sequence
  ENSG00000125551_15 (sequence is synthesized)
ttcctcaaatggttttttttattaggactaaaagagagaatgtgtggaaagatgttagtggaattcctggcacatagttcacatggacaaaatggtgttaactacgaaaatttttacaga

SEQ ID NO: 261665 - DNA, 120 bp, Artificial Sequence
  ENSG00000125551_16 (sequence is synthesized)
gaaaagggcaactgacaaaagcaggtgtttggaatgaattaagaccatggcaggcttttgaggcctttatatttctcctgactgtgcaataaaaatattttggctctctgtctaagactt

SEQ ID NO: 261666 - DNA, 120 bp, Artificial Sequence
  ENSG00000125551_17 (sequence is synthesized)
ggctgtcacagtagcaatggtaatattagctactgtgccagaagcagcctatcaatagagaaattgaaaatctgaccacacaaatgctgcagcacccagctgaaatgcatttggatgaca

SEQ ID NO: 261667 - DNA, 120 bp, Artificial Sequence
  ENSG00000125551_18 (sequence is synthesized)
atctcagatgggaatcgagagcatctccttctgccttgctaatagcaagctgatttttagaatatagtctaagtgcttctcttccatcctccccagattctcacctgctacacacccctc

SEQ ID NO: 261668 - DNA, 120 bp, Artificial Sequence
  ENSG00000125551_19 (sequence is synthesized)
agagggactggaggaatccagacaacgatgcgcaggggccctggtgctatactactgatccagaacagagatatgactactgcgacattcctgagtgtgaagggcaggagtggctctaga

SEQ ID NO: 261669 - DNA, 120 bp, Artificial Sequence
  ENSG00000125551_20 (sequence is synthesized)
aaatgttttcatttctgcccttcacctgtaaaataatttgttgtaaagccccttcccacagggatattattaataattgcgtaacgtgttcacctctcggaaaggagcaaaactttgctc

SEQ ID NO: 261670 - DNA, 120 bp, Artificial Sequence
  ENSG00000125551_21 (sequence is synthesized)
cgtgttcacctctcggaaaggagcaaaactttgctcagatcccagaattaacctgatttttttttttttttctgagacagaattttgctctcattgcccaggctagagtgcaatggtgcg

SEQ ID NO: 261671 - DNA, 68 bp, Artificial Sequence
  ENSG00000125551_22 (sequence is synthesized)
cacaacctccgcctgcatgtgccaccatgcctggctaattttacatttttagtagagacagggtttct

SEQ ID NO: 261672 - DNA, 120 bp, Artificial Sequence
  ENSG00000125551_23 (sequence is synthesized)
aatataaaactacatctaaactctaagtacagacttcttatgcttaaaactcttacacagtgttaaccccaagacagatttgcaattaagtagttaaaataagacaacaaagtcaataaa

SEQ ID NO: 261673 - DNA, 120 bp, Artificial Sequence
  ENSG00000125551_24 (sequence is synthesized)
cagatttgatctcaaagaaaaaccaagaccagtatttgtcccaggttctgcttttttacaatttcctccgaaatccagatacctgtcaacaccttggaaaaactgatttctccccagtta

SEQ ID NO: 261674 - DNA, 120 bp, Artificial Sequence
  ENSG00000125551_25 (sequence is synthesized)
gtagtgttgtgtgactgtcatcagcccagtacaaaaatggccttctttgttggggagcttcttaccctccagtgttttgcccaatttttgtccaagttggcaacataatttagttcagtt

SEQ ID NO: 261675 - DNA, 120 bp, Artificial Sequence
  ENSG00000125551_26 (sequence is synthesized)
cttgtttatttccaccatcatctatgcaccaaaatttatgtgtctcaaggagggaccattcagaggatgcttcccaccagttcaagtgacagtgtcagaaccaaagcgcatattgtagga

SEQ ID NO: 261676 - DNA, 120 bp, Artificial Sequence
  ENSG00000125551_27 (sequence is synthesized)
aatcaaacaatggcctccaagttccatttctacccagggatgaacaaatcaacatcaatcttggtaacacaactgccactgatggtgccttactcttctctcatgacatggcacaattga

SEQ ID NO: 261677 - DNA, 120 bp, Artificial Sequence
  ENSG00000125551_28 (sequence is synthesized)
tagcaaacataaaatttgttcttgtttaaggatttatatccactaatatggtaacatagtagtggttccatagttctaacctgtttatcaatccagttaatcttttactatcttgcaatc

SEQ ID NO: 261678 - DNA, 120 bp, Artificial Sequence
  ENSG00000125551_29 (sequence is synthesized)
tgttaatgaaactgtttttctttgttttataatttcaacttttagagtcaggggtacatgtgcaggtttgttacatcactaaattgcgtgacactgagctttggggtacaaatgattccc

SEQ ID NO: 261679 - DNA, 120 bp, Artificial Sequence
  ENSG00000125551_30 (sequence is synthesized)
atcacccaggtagtgagctaaatacctactaaataggtagtttttcagcccttgcctcgctccctctctcccttctctggtagtccccagtgtctttagttgccatctttatttatgtcc

SEQ ID NO: 261680 - DNA, 120 bp, Artificial Sequence
  ENSG00000125551_31 (sequence is synthesized)
acatgcccaactgtgtgttcttaactaaacattttgattcatagctacccattctacttccagtaaacagcaagttttatttggttaatgctaaccaaatagattaaaaggaagtcatga

SEQ ID NO: 261681 - DNA, 120 bp, Artificial Sequence
  ENSG00000125571_0 (sequence is synthesized)
cttcattccattttctgttgagtaataaactcaacgttgaaaatgtcctttgtgggggagaactcaggagtgaaaatgggctctgaggactgggaaaaagatgaaccccagtgctgctta

SEQ ID NO: 261682 - DNA, 120 bp, Artificial Sequence
  ENSG00000125571_1 (sequence is synthesized)
gaagacccggctggaagccccctggaaccaggcccaagcctccccaccatgaattttgttcacacaagtccaaaggtgaagaacttaaacccgaagaaattcagcattcatgaccaggat

SEQ ID NO: 261683 - DNA, 120 bp, Artificial Sequence
  ENSG00000125571_2 (sequence is synthesized)
cacaaagtactggtcctggactctgggaatctcatagcagttccagataaaaactacatacgcccagagatcttctttgcattagcctcatccttgagctcagcctctgcggagaaagga

SEQ ID NO: 261684 - DNA, 120 bp, Artificial Sequence
  ENSG00000125571_3 (sequence is synthesized)
aggataaaggacaaagtcatccatcccttcagctgaagaaggagaaactgatgaagctggctgcccaaaaggaatcagcacgccggcccttcatcttttatagggctcaggtgggctcct

SEQ ID NO: 261685 - DNA, 120 bp, Artificial Sequence
  ENSG00000125571_4 (sequence is synthesized)
ggaacatgctggagtcggcggctcaccccggatggttcatctgcacctcctgcaattgtaatgagcctgttggggtgacagataaatttgagaacaggaaacacattgaattttcatttc

SEQ ID NO: 261686 - DNA, 120 bp, Artificial Sequence
  ENSG00000125571_5 (sequence is synthesized)
aaccagtttgcaaagctgaaatgagccccagtgaggtcagcgattaggaaactgccccattgaacgccttcctcgctaatttgaactaattgtataaaaacaccaaacctgctcactaaa

SEQ ID NO: 261687 - DNA, 120 bp, Artificial Sequence
  ENSG00000125571_6 (sequence is synthesized)
atgtcaggctgtgataggagggaaacagaaaccaaaggaaagaacagctttaagaagcgcttaagaggtccaaaggtgaagaacttaaacccgaagaaattcagcattcatgaccaggat

SEQ ID NO: 261688 - DNA, 120 bp, Artificial Sequence
  ENSG00000125611_0 (sequence is synthesized)
gtggctactcagggcgccgccatgacgagccgggccggaagaagaggtagggcgccgccgtgacagattagtcctaaagggaacggggttgttagttcaattggctaccggaaaaaacca

SEQ ID NO: 261689 - DNA, 120 bp, Artificial Sequence
  ENSG00000125611_1 (sequence is synthesized)
ggctgggctgggcgccgccatgacaaccgataccggaaaaggcgggtcgttccccccggacagccctacgccggcaaaggtctcgagatgcaggcggccctagaggtcaccgctcgctac

SEQ ID NO: 261690 - DNA, 120 bp, Artificial Sequence
  ENSG00000125611_2 (sequence is synthesized)
cccagtgcacatcctcccacccaatcatccgccagatccgccaggcctgtgctcagccttttgaggccttcgaggagtgtcttcgacagaacgaggcagctgtgggcaactgtgcagagc

SEQ ID NO: 261691 - DNA, 120 bp, Artificial Sequence
  ENSG00000125611_3 (sequence is synthesized)
atatgcgccgcttcctgcagtgcgctgagcaggtgcagccgccacgctcacctgcaactgtggaggcacagccacttcctgcctcctgaggactcctctgacggcaggaaaactggacat

SEQ ID NO: 261692 - DNA, 120 bp, Artificial Sequence
  ENSG00000125611_4 (sequence is synthesized)
gaatgactgcccccacgcccctcccctgcagagtggccagatggagtcctgagccctggacatgggcccggctttcctggatatcaggacttccaataaataaagactctgtatactggg

SEQ ID NO: 261693 - DNA, 120 bp, Artificial Sequence
  ENSG00000125611_5 (sequence is synthesized)
gcttcccaccagctacagtcggagatttggagcgcttgtgtctgaggctcaatcccgtcaggtgccgcgcaactcagcggcgcattctctttggacccgaggcaccaccatactttccat

SEQ ID NO: 261694 - DNA, 120 bp, Artificial Sequence
  ENSG00000125611_6 (sequence is synthesized)
tgcttacttccgttaaaccccgagcgctgccatggcaagccggaaatagggatgaagcaatttagccagaagagggcggaagtggctactcagggcgccgccatgacgagccgggccgga

SEQ ID NO: 261695 - DNA, 120 bp, Artificial Sequence
  ENSG00000125611_7 (sequence is synthesized)
agtgtgtggcggccaagccggaatcctggcagcgggactgtcactaccttaagatgagcattgcccagtgcacatcctcccagtgagtgcgggcaagtatgagacagtgtggggggtggg

SEQ ID NO: 261696 - DNA, 120 bp, Artificial Sequence
  ENSG00000125611_8 (sequence is synthesized)
aggtaagaggggctcacctcagttcatctcttttctccataacatccccttcatccttctggttgttcagggtaaagactttggagtcatcctcagccccaccccatcaccacacaggcc

SEQ ID NO: 261697 - DNA, 120 bp, Artificial Sequence
  ENSG00000125611_9 (sequence is synthesized)
tttgccatgcatccagaatccagaacatcatcacttcttgccccatatagcccctgctttaatccaccaccaccctcaccctccacctccaggatacctgccccagccttctccctggtc

SEQ ID NO: 261698 - DNA, 120 bp, Artificial Sequence
  ENSG00000125611_10 (sequence is synthesized)
tcccttcctccctcttttcttgcctccataaagcggcctgggtgagcatgtaaggactgaaatctggtctcatcacacctatgcttaaagctctccagtggctttgtgtcacattgagaa

SEQ ID NO: 261699 - DNA, 120 bp, Artificial Sequence
  ENSG00000125611_11 (sequence is synthesized)
caaaagtccaggtccttgctgggttctctgtgttcttccctaggctgacttcatctgcctcctgcctcaccctctctcttctttctcactactcctcatctgcaactgcagaggggctgg

SEQ ID NO: 261700 - DNA, 120 bp, Artificial Sequence
  ENSG00000125611_12 (sequence is synthesized)
gctggggtggccaaaaaaaggtcactcttttaaatgtatctaatatgtaaaccagatatacagtatatctgtgatatgtaagtttcatggttgggcaattagaacaaaagtctaaaatga

SEQ ID NO: 261701 - DNA, 120 bp, Artificial Sequence
  ENSG00000125611_13 (sequence is synthesized)
ctccttgaggagaggcagtaacggaaaaaggttgaaaaatgctcttttagatgtttactaccctcctcactggactgtgagctccaaaggtgaaagtcacatctttccccagcccctgtg

SEQ ID NO: 261702 - DNA, 120 bp, Artificial Sequence
  ENSG00000125611_14 (sequence is synthesized)
agtaccctctcctggggccctctctctgcccctgcagccctggcttctctcttgggccacctggccatccttctcctgggccccatgctccatcttgactttccagtcattcttggtgat

SEQ ID NO: 261703 - DNA, 120 bp, Artificial Sequence
  ENSG00000125611_15 (sequence is synthesized)
catcctagactgatctcagaggaaatctgaccatgttctgcttctacttacaaacctttccatggttctcaattccaccagcccaagtcttaatgccagcacagcccacagggccctgtg

SEQ ID NO: 261704 - DNA, 120 bp, Artificial Sequence
  ENSG00000125611_16 (sequence is synthesized)
ggatgcagtccctgcgacccgtggtcccacctctcctctctttcccccttaagctctatgttccagccccagtgaacatgcagttactcaagtgcacgtctccgctgcttttgtccagct

SEQ ID NO: 261705 - DNA, 120 bp, Artificial Sequence
  ENSG00000125611_17 (sequence is synthesized)
gtttccctctgctgggactgcccttcctaatccatctcctggctaattcctattccagcttagacggcacgtctctcagaaaacctccctgatgtcccacccacttcccgcccctgtctt

SEQ ID NO: 261706 - DNA, 120 bp, Artificial Sequence
  ENSG00000125611_18 (sequence is synthesized)
aggctcacatcctatgcctgtgtcaagggagctcttggctgaagattggggtgatgcccttcttaccaggccctataggcattaattgtttctgtaaggcaaggataagtgaatagttca

SEQ ID NO: 261707 - DNA, 120 bp, Artificial Sequence
  ENSG00000125611_19 (sequence is synthesized)
gacccctagggcagaaactacgacccctgagagccggaaggaacttaattctcctcaggaaacgttacctaacgatcacatactgttctcagtcagctgctggggacatttctgtctttc

SEQ ID NO: 261708 - DNA, 120 bp, Artificial Sequence
  ENSG00000125611_20 (sequence is synthesized)
aagttttttgggcatctgaacagtaaagaccccatcctcctatcttagagccatttgctgcttccctccctggaccagcaaccagcctctctctggtctccttgtggccacccctgccct

SEQ ID NO: 261709 - DNA, 120 bp, Artificial Sequence
  ENSG00000125611_21 (sequence is synthesized)
gcctctctctggtctccttgtggccacccctgccctgacagtcttctcttccctggcagccaaagaagcttttaaaaatgggaattagggccgggtgcggtggcacatgcctgtaatccc

SEQ ID NO: 261710 - DNA, 86 bp, Artificial Sequence
  ENSG00000125611_22 (sequence is synthesized)
atagagcgagactctgtcttccaaaaaaaaaaaaaaaagggaattaggtcacatctcctcatcatcccctccttcctggggatggc

SEQ ID NO: 261711 - DNA, 120 bp, Artificial Sequence
  ENSG00000125611_23 (sequence is synthesized)
ggtcacatctcctcatcatcccctccttcctggggatggcatcccagttacagtttttccttcctagctaggggcagtgagatttgttgtctggtctacacaatagcgaacacaaacatt

SEQ ID NO: 261712 - DNA, 120 bp, Artificial Sequence
  ENSG00000125611_24 (sequence is synthesized)
ctcatctcctgcagcatggcatacagactttacagaatgtcctgtgtttttgtggctgacaatcaaagtggtacatgtccctcccattccgcacacacctctgctctttaccctgattaa

SEQ ID NO: 261713 - DNA, 120 bp, Artificial Sequence
  ENSG00000125611_25 (sequence is synthesized)
attttcttcatcgaatttcttggatgttgacatatttattgtccgtctctccctgcttgagtcagagagttttgcctgctgggtacacggcaggtgctcagtaaatatagcagaatggcg

SEQ ID NO: 261714 - DNA, 120 bp, Artificial Sequence
  ENSG00000125611_26 (sequence is synthesized)
cgttccctgcctcccatgacacttcaccacagctgactttttcacatggctcagggccaaggtcattgcccaacacccttctccctccagactgtgggctctgcagggtctccctctgtg

SEQ ID NO: 261715 - DNA, 120 bp, Artificial Sequence
  ENSG00000125611_27 (sequence is synthesized)
gtgtctacataggctccccaggctgggcacagaggaggtgctactagatgttgatgtactttctccacaggcacagccacttcctgcctcctgaggactcctctgacggcaggaaaactg

SEQ ID NO: 261716 - DNA, 120 bp, Artificial Sequence
  ENSG00000125611_28 (sequence is synthesized)
tgcagctgtgccccagggttgagactaccctgcctcccttgtgaactctgccacacagccatttcctgacttctgctgcatgtgcctggggtaaagaccctcaatcccttccactctagc

SEQ ID NO: 261717 - DNA, 120 bp, Artificial Sequence
  ENSG00000125618_0 (sequence is synthesized)
gggaacaaacttcagaaggaggagagacaccgggcccagggcaccctcgcgggcggacccaagcagtgagggcctgcagccggccggccagacgatgcaggtgtaaaggatgaggcctgg

SEQ ID NO: 261718 - DNA, 120 bp, Artificial Sequence
  ENSG00000125618_1 (sequence is synthesized)
ggagggggcctgaggatgcaggcatcgaatctcatcgcatctcatgcccttctcctgggtttgtgcagggcagcggcaggcgcggcccggacctacgggaggaagccccgagccctcggc

SEQ ID NO: 261719 - DNA, 120 bp, Artificial Sequence
  ENSG00000125618_2 (sequence is synthesized)
gggctgcgagcgactccccggcgatgcctcacaactccatcagatctggccatggagggctgaaccagctgggaggggcctttgtgaatggcagacctctgccggaagtggtccgccagc

SEQ ID NO: 261720 - DNA, 120 bp, Artificial Sequence
  ENSG00000125618_3 (sequence is synthesized)
gcatcgtagacctggcccaccagggtgtaaggccctgcgacatctctcgccagctccgcgtcagccatggctgcgtcagcaagatccttggcaggtactacgagactggcagcatccggc

SEQ ID NO: 261721 - DNA, 120 bp, Artificial Sequence
  ENSG00000125618_4 (sequence is synthesized)
ctggagtgatagggggctccaagcccaaggtggccacccccaaggtggtggagaagattggggactacaaacgccagaaccctaccatgtttgcctgggagatccgagaccggctcctgg

SEQ ID NO: 261722 - DNA, 120 bp, Artificial Sequence
  ENSG00000125618_5 (sequence is synthesized)
ctgagggcgtctgtgacaatgacactgtgcccagtgtcagctccattaatagaatcatccggaccaaagtgcagcaaccattcaacctccctatggacagctgcgtggccaccaagtccc

SEQ ID NO: 261723 - DNA, 120 bp, Artificial Sequence
  ENSG00000125618_6 (sequence is synthesized)
tgagtcccggacacacgctgatccccagctcagctgtaactcccccggagtcaccccagtcggattccctgggctccacctactccatcaatgggctcctgggcatcgctcagcctggca

SEQ ID NO: 261724 - DNA, 120 bp, Artificial Sequence
  ENSG00000125618_7 (sequence is synthesized)
gcgacaagaggaaaatggatgacagtgatcaggatagctgccgactaagcattgactcacagagcagcagcagcggaccccgaaagcaccttcgcacggatgccttcagccagcaccacc

SEQ ID NO: 261725 - DNA, 120 bp, Artificial Sequence
  ENSG00000125618_8 (sequence is synthesized)
tcgagccgctcgagtgcccatttgagcggcagcactacccagaggcctatgcctcccccagccacaccaaaggcgagcagggcctctacccgctgcccttgctcaacagcaccctggacg

SEQ ID NO: 261726 - DNA, 120 bp, Artificial Sequence
  ENSG00000125618_9 (sequence is synthesized)
acgggaaggccaccctgaccccttccaacacgccactggggcgcaacctctcgactcaccagacctaccccgtggtggcagatcctcactcacccttcgccataaagcaggaaacccccg

SEQ ID NO: 261727 - DNA, 120 bp, Artificial Sequence
  ENSG00000125618_10 (sequence is synthesized)
aggtgtccagttctagctccaccccttcctctttatctagctccgcctttttggatctgcagcaagtcggctccggggtcccgcccttcaatgcctttccccatgctgcctccgtgtacg

SEQ ID NO: 261728 - DNA, 120 bp, Artificial Sequence
  ENSG00000125618_11 (sequence is synthesized)
ggcagttcacgggccaggccctcctctcagggcgagagatggtggggcccacgctgcccggatacccaccccacatccccaccagcggacagggcagctatgcctcctctgccatcgcag

SEQ ID NO: 261729 - DNA, 120 bp, Artificial Sequence
  ENSG00000125618_12 (sequence is synthesized)
gcatggtggcaggaagtgaatactctggcaatgcctatggccacaccccctactcctcctacagcgaggcctggcgcttccccaactccagcttgctgagttccccatattattacagtt

SEQ ID NO: 261730 - DNA, 120 bp, Artificial Sequence
  ENSG00000125618_13 (sequence is synthesized)
ccacatcaaggccgagtgcaccgcccaccactgccacggcctttgaccatctgtagttgccatggggacagtgggagcgactgagcaacaggaggactcagcctgggacaggccccagag

SEQ ID NO: 261731 - DNA, 120 bp, Artificial Sequence
  ENSG00000125618_14 (sequence is synthesized)
agtcacacaaaggaatctttatttattacatgaaaaataaccacaagtccagcattgcggcacactccctgtgtggttaatttaatgaaccatgaaagacaggatgaccttggacaaggc

SEQ ID NO: 261732 - DNA, 120 bp, Artificial Sequence
  ENSG00000125618_15 (sequence is synthesized)
caaactgtcctccaagactccttaatgaggggcaggagtcccagggaaagagaaccatgccatgctgaaaaagacaaaattgaagaagaaatgtagcccccagccggtacccaccaaagg

SEQ ID NO: 261733 - DNA, 120 bp, Artificial Sequence
  ENSG00000125618_16 (sequence is synthesized)
agagaagaagcaatagccgaggaacttggggggatggcgaatggttcctgcccgggcccaaggggtgcacagggcacctccatggctccattattaacacaactctagcaattatggacc

SEQ ID NO: 261734 - DNA, 120 bp, Artificial Sequence
  ENSG00000125618_17 (sequence is synthesized)
acctccctcagcctcccgcctgccccacacggaggctctggctgtcctctttctccactccatttgcttggctctttctacacctccctcttgggcatgggctgagggctggagcgagtc

SEQ ID NO: 261735 - DNA, 120 bp, Artificial Sequence
  ENSG00000125618_18 (sequence is synthesized)
cctcagaaattccaccaggctgtcagctgacctcttttgcctgctgctgtgaaggtatagcaccaccccaggtcctcctgcagtgcggcatccccttggcagctgccgtcagccaggcca

SEQ ID NO: 261736 - DNA, 120 bp, Artificial Sequence
  ENSG00000125618_19 (sequence is synthesized)
gccccagggagcttaaaacagacattccacagggcctgggcccctgggaggtgaggtgtggtgtgcggcttcacccagggcagaacaaggcagaatcgcaggaaacccgcttccccttcc

SEQ ID NO: 261737 - DNA, 120 bp, Artificial Sequence
  ENSG00000125618_20 (sequence is synthesized)
tgacagctcctgccaagccaaatgtgcttcctgcagctcacgcccaccagctactgaagggacccaaggcaccccctgaagccagcgatagagggtccctctctgctccccagcagctcc

SEQ ID NO: 261738 - DNA, 120 bp, Artificial Sequence
  ENSG00000125618_21 (sequence is synthesized)
tgcccccaaggcctgactgtatatactgtaaatgaaactttgtttgggtcaagcttccttctttctaacccccagactttggcctctgagtgaaatgtctctctttgccctgtggggctt

SEQ ID NO: 261739 - DNA, 120 bp, Artificial Sequence
  ENSG00000125618_22 (sequence is synthesized)
ctctccttgatgcttctttctttttttaaagacaacctgccattaccacatgactcaataaaccattgctcttcatctcaggctttggggttggctggggaaggaggcatcccggggctg

SEQ ID NO: 261740 - DNA, 120 bp, Artificial Sequence
  ENSG00000125618_23 (sequence is synthesized)
ggctttctcccaagaacatcagagctgagtagccgacaaactcactttggggccgtgggctggaagggaccatctgatgccccagagctctggcttggccttctccctctgcctttaatt

SEQ ID NO: 261741 - DNA, 120 bp, Artificial Sequence
  ENSG00000125618_24 (sequence is synthesized)
cacgttgaacgctgggtacctcactcatcccaagttcttcaacactgagcaaatgcaaggatagcacagtactgagccaaccatagactccccacaaggagttgctgttgttattaacag

SEQ ID NO: 261742 - DNA, 120 bp, Artificial Sequence
  ENSG00000125618_25 (sequence is synthesized)
gaagccagagaatcagcagggtgggttagtgagggatccgggaatagctgtgactggagcctgcataaacagctctgaagggagagagaagactgggctctcttgtgtgccaggcacagt

SEQ ID NO: 261743 - DNA, 120 bp, Artificial Sequence
  ENSG00000125618_26 (sequence is synthesized)
atggaaggcttcatataagttaagctgaaattagccctgttttacatacagcttcattttacatatgaggaaactgaggctttgaaaaaaatgagatgtcttgtccaagatgaaaagtag

SEQ ID NO: 261744 - DNA, 120 bp, Artificial Sequence
  ENSG00000125618_27 (sequence is synthesized)
tagattcaaccaagtcctcttactctaagcccaacgcttttacccaaaaccccagagtcctcatcagggatgccaaatggttctagacccagtggaggttctggagctgccactggggat

SEQ ID NO: 261745 - DNA, 120 bp, Artificial Sequence
  ENSG00000125618_28 (sequence is synthesized)
ttaatttcttttgatttgctaaagatttgacctgactgaatggagaggtagagtgtagtgtggccaggacaaggtgagggaggctgtagagacttagcactttaggccaaccacctccag

SEQ ID NO: 261746 - DNA, 120 bp, Artificial Sequence
  ENSG00000125618_29 (sequence is synthesized)
gaaatctgggaaatgcaatgtgacagctcgggctctgcactccagggggctgtctggtgtccacatggaccttctccatgtgggacacagctggaacaagggggcaggggcctgcagctg

SEQ ID NO: 261747 - DNA, 120 bp, Artificial Sequence
  ENSG00000125618_30 (sequence is synthesized)
ggatgcccaggtgaatatgggcagctggacaaacaacactgggattgagtcagatagaaggggcccaaggactccagggctgggaggacagaggctgggagagagggctcttacctcctt

SEQ ID NO: 261748 - DNA, 120 bp, Artificial Sequence
  ENSG00000125618_31 (sequence is synthesized)
aggcctcccaaagagcggttagggatgctgccatggatggcatggcagggggaaccctcctggaagaaaatccatctcttctgaagggatctgagatgcggctggtttttcaatggcaga

SEQ ID NO: 261749 - DNA, 120 bp, Artificial Sequence
  ENSG00000125618_32 (sequence is synthesized)
acttccctctgcagcgcgactccgaatccatgacatctgagagtcttcctgaccacaaacctctgggatcccgagggctccctacccaagaatcactttgagcacagcatcccaaggagc

SEQ ID NO: 261750 - DNA, 120 bp, Artificial Sequence
  ENSG00000125618_33 (sequence is synthesized)
ccatagagcgatcccttgcattcacagccacagcccctctggggacactctgtacccccggcagaccctttccaactcacaaccaataaaggggcttgggctgtgctttgactaaggtga

SEQ ID NO: 261751 - DNA, 120 bp, Artificial Sequence
  ENSG00000125618_34 (sequence is synthesized)
gggaacaaacttcagaaggaggagagacaccgggcccagggcaccctcgcgggcggacccaagcagtgagggcctgcagccggccggccagggcagcggcaggcgcggcccggacctacg

SEQ ID NO: 261752 - DNA, 120 bp, Artificial Sequence
  ENSG00000125618_35 (sequence is synthesized)
gcacacttctatttgtttggatgtggagagagaaaagaagaaatccacgtggtgggtaaagcacctgggtccacagccgaaaaatcccgggtttagtctgtttcactatacaaaattggg

SEQ ID NO: 261753 - DNA, 120 bp, Artificial Sequence
  ENSG00000125618_36 (sequence is synthesized)
ccatttacctgagttccaggctccacatataaaacacagacataatattactcacccatgtcactgggctgctgggggactctactaggacaacagaggcaaagctctgatataagctct

SEQ ID NO: 261754 - DNA, 120 bp, Artificial Sequence
  ENSG00000125618_37 (sequence is synthesized)
ttgcaaatgtaagaagtggtccttatgtcacccagtttagggcagtggttgagagcagacacattctgatccctcgaatctgaatcctatctttggcccatctggaagtgggacaagttt

SEQ ID NO: 261755 - DNA, 120 bp, Artificial Sequence
  ENSG00000125618_38 (sequence is synthesized)
cttaaacctttgtgcctgggtttcctatctggggaagaataaattaacagatgcaaggaccctgaacagtccggttggagactgctccagtccttggcaccgtcctgcattctgtgggtc

SEQ ID NO: 261756 - DNA, 120 bp, Artificial Sequence
  ENSG00000125618_39 (sequence is synthesized)
ccaacagtgtggtgaaaccaggaagccgaccagccatccaaccagggtgtggtcctctggctgagactctctatcccacgtctgggcacccatgctaccagctggccttgaattccaggg

SEQ ID NO: 261757 - DNA, 120 bp, Artificial Sequence
  ENSG00000125618_40 (sequence is synthesized)
atgcgggaggacaatgagcatgaacgaaacgtgccgagtggagttgagaacgtaaaggaagaagggggcgatgaggacctctcctggggagatgagggctgccaagtcctaagacacagg

SEQ ID NO: 261758 - DNA, 120 bp, Artificial Sequence
  ENSG00000125618_41 (sequence is synthesized)
taaggagagggccggcaggaaggggagcactgcaaagaggaagtattggagcaaggtgggacacaaggagcaagaggcatactgtgccctattcatagacttcccaaagggcattgaagg

SEQ ID NO: 261759 - DNA, 120 bp, Artificial Sequence
  ENSG00000125618_42 (sequence is synthesized)
cctccatgatgaaaagggaggggctgagacaggtctgtgttcaaatccaagctccaccacttcttccagtgaatcagtgagcataaatggagagcactctaagggccccaaaacactgtg

SEQ ID NO: 261760 - DNA, 120 bp, Artificial Sequence
  ENSG00000125618_43 (sequence is synthesized)
agtggaagatgaaccctaccctcaagcagtgctggtctcccagtgatttaactctgatgaatcccagtttacccgttctgtaaaatctgaatctgaagggtattgatgatgatgatgatg

SEQ ID NO: 261761 - DNA, 120 bp, Artificial Sequence
  ENSG00000125618_44 (sequence is synthesized)
atgatgacgatgacgatgatgatgatgaaatatatgcttcacatctctctctcaagcctgcatggataggacccgggttctaggtactctaagagtactatagaggatgaaatgagcctg

SEQ ID NO: 261762 - DNA, 120 bp, Artificial Sequence
  ENSG00000125618_45 (sequence is synthesized)
gagtagctctccatcctcatttggactgttctggaacctgcctgccagtcatttgggtttctttgtctgccagtcatcatccaatgatgattcaagatgacaaggtctggacaaatgaag

SEQ ID NO: 261763 - DNA, 120 bp, Artificial Sequence
  ENSG00000125618_46 (sequence is synthesized)
ataatgggagtttccttgggcaagtctcaattttttaggagccatgtagggaagactttgggatggatgagacataattgagccattgtcactggtcaaaaaggcctgggacctggagtt

SEQ ID NO: 261764 - DNA, 120 bp, Artificial Sequence
  ENSG00000125618_47 (sequence is synthesized)
tctggaaagagctctgaacacaaggcatctgtgacccccatgccagccctaggccagcctctctggctgtgaccccagagacttggcgtatttacctaggcctgcttcccttccttgccg

SEQ ID NO: 261765 - DNA, 120 bp, Artificial Sequence
  ENSG00000125618_48 (sequence is synthesized)
gcaggagttaatctttgccagccacccactctgggcaccctatgcagaggcaggtgggctgggatctcctgggcagagggaagggagggagagaaagagggagggagaaatgctctgtgc

SEQ ID NO: 261766 - DNA, 120 bp, Artificial Sequence
  ENSG00000125618_49 (sequence is synthesized)
tccctgggaacctgctgagctggcacttgttgctgcctggttaccgtggcgatgtgcttaatgcagcgttgaaaatacagaatactgactcctctgtccctcctggccccggactccctc

SEQ ID NO: 261767 - DNA, 120 bp, Artificial Sequence
  ENSG00000125618_50 (sequence is synthesized)
cctccctcccttcctcttctggagcgtgaaatgagattggtcaagataaaaaaggaaaagattcggttatttttttaagagtgtggataatggggcctctcaatcaaaatcccagtctcc

SEQ ID NO: 261768 - DNA, 120 bp, Artificial Sequence
  ENSG00000125618_51 (sequence is synthesized)
agtcggttccccccattccccttccaacccctccaccttcccctgccgcctgcttagaggaggaggaagaaacataaagcacaaggcttttctcttaattatgaatcattccctgagggc

SEQ ID NO: 261769 - DNA, 120 bp, Artificial Sequence
  ENSG00000125618_52 (sequence is synthesized)
aggcccagggcaaggggttcctggggcccagagtctgacctgtgaggtagctagaaggcttgagcctctcatcaaagtcccccaggttgtttccagaaagaatcctgagtgggttctgtg

SEQ ID NO: 261770 - DNA, 120 bp, Artificial Sequence
  ENSG00000125618_53 (sequence is synthesized)
cgagcaggtgagaagctgggccctgggaggtgaacagggtgggcaagggccagagaaggtctattctccaaatgagcctgtgctccatcaaagcagctggaagttgcatcaatgggctca

SEQ ID NO: 261771 - DNA, 120 bp, Artificial Sequence
  ENSG00000125618_54 (sequence is synthesized)
gggcacctgccttatgcaactccaagcctgacacatgctttattttaccagatgccctggcatcttcctccctttctaaccctcctggcttccttcacccaaaacctttgagcctgggcc

SEQ ID NO: 261772 - DNA, 120 bp, Artificial Sequence
  ENSG00000125618_55 (sequence is synthesized)
tttcagggatggcagcacaacctgatgatgctatcccttgccatcagcgtctttcccagattgcaacatcacgttccacaactctgaagcagtagcacaaagccttcacataatgacctc

SEQ ID NO: 261773 - DNA, 120 bp, Artificial Sequence
  ENSG00000125618_56 (sequence is synthesized)
agccactatttcctagccccacctttggccactcatcctgcacaccccatgctcttgcattactcatggccccgagctcaccaccctcgctcacacctctctgcccttgcacactgtgtg

SEQ ID NO: 261774 - DNA, 120 bp, Artificial Sequence
  ENSG00000125618_57 (sequence is synthesized)
ctggaaaatgggggtagttataacatctaccttctgggcctcctgggagggctgtagtatgtcaagccagtgcctccagtacctacggaaaaggacactgccccaaattttccagatcga

SEQ ID NO: 261775 - DNA, 120 bp, Artificial Sequence
  ENSG00000125618_58 (sequence is synthesized)
tgggttccaaaagggatgacagagggaccttctgagctccattgtccctgccgtggctccaactgtctccccaaccattcctgagcttgcccattgccagccctgcagaccttcccacac

SEQ ID NO: 261776 - DNA, 120 bp, Artificial Sequence
  ENSG00000125629_0 (sequence is synthesized)
gttgtgggagtggaggaggaagaggcggtagggggtacgggggctggtcccagaagatggcggaggcgggggatttctggtaggtcctactttaggacaagatgtggtaccgttgaagcg

SEQ ID NO: 261777 - DNA, 120 bp, Artificial Sequence
  ENSG00000125629_1 (sequence is synthesized)
tcagtctttgattcacagacagttgagcttttcagctgggaagcctttccatttttttttttttaacggctttctgaacctatgaaaccatggcagaaggagagacagagtcacctgggc

SEQ ID NO: 261778 - DNA, 120 bp, Artificial Sequence
  ENSG00000125629_2 (sequence is synthesized)
ccaaaaagtgtggcccatatatttcatctgtcactagccagagtgtgaacttgatgattcgaggagtagtgctattttttattggagtatttcttgcattagtgttaaatttacttcaga

SEQ ID NO: 261779 - DNA, 120 bp, Artificial Sequence
  ENSG00000125629_3 (sequence is synthesized)
ttcagagaaatgtgacgctctttccacctgatgtgattgcaagcatcttttcttctgcatggtgggtacccccatgctgtggcacggcttcagctgtgattgggttattatacccctgca

SEQ ID NO: 261780 - DNA, 120 bp, Artificial Sequence
  ENSG00000125629_4 (sequence is synthesized)
ttgacagacatctaggagaaccacataaatttaaaagagagtggtccagtgtaatgcggtgtgtagcagtctttgttggtataaatcatgccagtgctaaagtggatttcgataacaaca

SEQ ID NO: 261781 - DNA, 120 bp, Artificial Sequence
  ENSG00000125629_5 (sequence is synthesized)
tacagttgtctctcacactggctgcactatccattggactgtggtggacttttgatagatctagaagtggttttggccttggagtaggaattgccttcttggcaactgtggtcactcaac

SEQ ID NO: 261782 - DNA, 120 bp, Artificial Sequence
  ENSG00000125629_6 (sequence is synthesized)
tgctagtatataatggtgtttaccaatatacatctccagatttcctctatgttcgttcttggttaccatgtatattttttgctggaggcataacaatgggaaacattggtcgacaactgg

SEQ ID NO: 261783 - DNA, 120 bp, Artificial Sequence
  ENSG00000125629_7 (sequence is synthesized)
caatgtacgaatgtaaagttatcgcagaaaaatctcatcaggaatgaagaaggcaaaaaatatcttttgtacagaaaagcaagatgaaaaggatgtgaaatggtagatataccaacaaaa

SEQ ID NO: 261784 - DNA, 120 bp, Artificial Sequence
  ENSG00000125629_8 (sequence is synthesized)
cttcagactgtaaaattgccaggatgcagttttccccttgattggcgtgtgtgtatatatggataaatatatatatacacacacacatattactgcaatctgtgattgcttcatctgtaa

SEQ ID NO: 261785 - DNA, 120 bp, Artificial Sequence
  ENSG00000125629_9 (sequence is synthesized)
tgtgattgcttcatctgtaaatcagttgtaaacctttacatatttgacttaaataactgtaagatatatatgtactacattaaaaagtgttgattaatagatgaaatttttaaattaatt

SEQ ID NO: 261786 - DNA, 120 bp, Artificial Sequence
  ENSG00000125629_10 (sequence is synthesized)
tgtatcacaatgttaatgtgccaagatattgttcctgtcatgcagagtataagaatgctttgaacaatttgtagacttagtgaaataaaataagaggaaagccaaaaacaaacaaacaaa

SEQ ID NO: 261787 - DNA, 120 bp, Artificial Sequence
  ENSG00000125629_11 (sequence is synthesized)
aagcatatggggagctggtattttctctttagcttactgttgtgcctttttatttttctaatcacagcagtatgagttatgagtgccctaatttgtggttagtttctaatttaatgttgt

SEQ ID NO: 261788 - DNA, 120 bp, Artificial Sequence
  ENSG00000125629_12 (sequence is synthesized)
ttcatagagtttggagtgttttgatacagggtgaaaatgaacttctggtttcaaacctgcgttactggagacagcccaaagagtaattttctgttttgacaggttttactggaagtatat

SEQ ID NO: 261789 - DNA, 120 bp, Artificial Sequence
  ENSG00000125629_13 (sequence is synthesized)
gtgatgagcagaagaggttatcagcattaaattgttttggttctaaatttggaacagtatatataattaaaagtaaggaacattagaggatttaattagaataaatacatgttttggaaa

SEQ ID NO: 261790 - DNA, 120 bp, Artificial Sequence
  ENSG00000125629_14 (sequence is synthesized)
atggagcatataggaaactccaaacagatcacaatgaggtttctaaatctgttgggttctgtcttctattgggttctgtgaagcaaaccactgtagctttagctgggttcagtcatatga

SEQ ID NO: 261791 - DNA, 120 bp, Artificial Sequence
  ENSG00000125629_15 (sequence is synthesized)
ctcgttggtggaatgcctaggtttttcatcttacatgcagtcttgggggtggatgaatacataatttctcatgtattcgtgtatccattagtgaatagttcaagtctgtttaagagtgta

SEQ ID NO: 261792 - DNA, 120 bp, Artificial Sequence
  ENSG00000125629_16 (sequence is synthesized)
ttgagatggcattctctgcatgttaaagatcttaatggcaaccagcacctcttaagtatggtttaaacatattcttagctaattttttccattagtttttgaaattggtggcagttgtct

SEQ ID NO: 261793 - DNA, 120 bp, Artificial Sequence
  ENSG00000125629_17 (sequence is synthesized)
gatccacaagggcaagatcttctgagtactctggggtgtgagtatgtgtgcacacgtgtgtgttggagtgagtgagagaatgtgtctgtgcatgtggccatgctttcctagaatgtcaag

SEQ ID NO: 261794 - DNA, 120 bp, Artificial Sequence
  ENSG00000125629_18 (sequence is synthesized)
tagatatttttacactttgagttttaaagcaattactatcagactgagatcttgtatgccaaactttaatctgcttttatgttttcaggctgaaggtgtgaaaatcctaagaggatttca

SEQ ID NO: 261795 - DNA, 120 bp, Artificial Sequence
  ENSG00000125629_19 (sequence is synthesized)
gaatatgtgtacacaatcttaactatcgtggtggaaaacatactactataatttattattatatcttccagataatgttattcatttagaacaaataaggtatattttttagaatcaact

SEQ ID NO: 261796 - DNA, 120 bp, Artificial Sequence
  ENSG00000125629_20 (sequence is synthesized)
aactttgtaagcactataaaatctttaataagttataaggtctatgatgtgtttactttaaaaattgctgttaaaagcaacacgtattaaatatgtaattatcatctgggttaagagtct

SEQ ID NO: 261797 - DNA, 120 bp, Artificial Sequence
  ENSG00000125629_21 (sequence is synthesized)
gtttttcttctttgtggtaagtcttagaatatggtactgtggattaatctaatgaaattaacatatgtggttgaagttaccaagaaacgatgaaaagaaactaaatatagttgacccttg

SEQ ID NO: 261798 - DNA, 120 bp, Artificial Sequence
  ENSG00000125629_22 (sequence is synthesized)
aacaacaggagttaggggcaccactccccaacatagttgaaaatccatgtataacttttgactcctccaaaacttaactactaatagcctactcttgatgggaagccttaccaataagaa

SEQ ID NO: 261799 - DNA, 120 bp, Artificial Sequence
  ENSG00000125629_23 (sequence is synthesized)
acagttgatgaacacatattgtgtatggtatatgtattatatactgttttcttacaatagtgtaagctaaggaaaagaaaatgtgtttactcttcattcagtggaagtggaccatcctaa

SEQ ID NO: 261800 - DNA, 120 bp, Artificial Sequence
  ENSG00000125629_24 (sequence is synthesized)
aagtcttcactcatgctatcttcatgctgagtagtaggctgaggaggaggaggaggaggggttggtcttgctgttgcgggggtggaagaagatgtgcattattagtgggcccacacagct

SEQ ID NO: 261801 - DNA, 120 bp, Artificial Sequence
  ENSG00000125629_25 (sequence is synthesized)
gaaaaccatgctgttcaagggtcaactgtgtgtggtatcggtgagactgaatgattatcgttggtgttcttaaattattttcaggtcctctagaaaataagataattatagcaaaaaata

SEQ ID NO: 261802 - DNA, 120 bp, Artificial Sequence
  ENSG00000125629_26 (sequence is synthesized)
aaattgttttgaaattttgataaatatataaatgtatagaacctatttttttcaatgaaagaaaatgggaaacattttttaacattgctagattggcagtgctttcttttattatttcaa

SEQ ID NO: 261803 - DNA, 120 bp, Artificial Sequence
  ENSG00000125629_27 (sequence is synthesized)
gttatggaaatttgcacagttgaaaactggggataaattctacaaaagtgcaagaaaacaattcaaattagccagagccctgctaaaacttttaatgtaaaatttatttatttgcactga

SEQ ID NO: 261804 - DNA, 120 bp, Artificial Sequence
  ENSG00000125629_28 (sequence is synthesized)
gctgttttaccttctttaaggccattgggacctctcaatgatgcatatgtttcatacatcttgtattttccaggtagaagtcagacttggttaataccaataaatacttctgtaatccta

SEQ ID NO: 261805 - DNA, 120 bp, Artificial Sequence
  ENSG00000125629_29 (sequence is synthesized)
ggggtctcccggcgaagcgcgggtgacgtggtgctgaggaaagcggcctgaggaggagggtggcccttgggaagaagaactacttgtgtttttgcagcctgggaaccctggtggcaggat

SEQ ID NO: 261806 - DNA, 120 bp, Artificial Sequence
  ENSG00000125629_30 (sequence is synthesized)
gtagatttctgttgtgagttttcctgctttgacaatatgacctacagcctcattaaagggctagagtggaaaggagtgtcagtaaaaggtgctacatgctgaagactaaaacgggaagct

SEQ ID NO: 261807 - DNA, 120 bp, Artificial Sequence
  ENSG00000125630_0 (sequence is synthesized)
agatgcgacgaggttagcggggcccgaccactccttggcttcccaggggtgagcctcgcgagttaggagttgggtagagagtcagcccggggcccggcatccgctttttcgttgaagcaa

SEQ ID NO: 261808 - DNA, 120 bp, Artificial Sequence
  ENSG00000125630_1 (sequence is synthesized)
cgactttggccggatgactccccagggtcggcatcagcgtgggactgggaacaggtgaagggaaacagaagagagcctgagaagaccgctctcctccgatcctaattgactgagccaatg

SEQ ID NO: 261809 - DNA, 120 bp, Artificial Sequence
  ENSG00000125630_2 (sequence is synthesized)
agagccaaagaggtcacatgctcaactgggcggggagcgggtttccacctgcggcatctttcgcgagcggggagatgagtggggcggaatatgggagaaagggagggcccgccacgctct

SEQ ID NO: 261810 - DNA, 120 bp, Artificial Sequence
  ENSG00000125630_3 (sequence is synthesized)
ggctggacacggccttaatcggcccgttcactcgacgtttttggttctacgttgaccccgagaaaccgaaaccgcagggcctagggcgggtggaacgagagggaactacatttcccagca

SEQ ID NO: 261811 - DNA, 120 bp, Artificial Sequence
  ENSG00000125630_4 (sequence is synthesized)
ggctgcggaaacgggactgcggccactacttccggcgtgtaccgagagactggcgtccggcgtgtaccgagagactggcgtccggtgtgcaggtggccacatggatcctggcagccggtg

SEQ ID NO: 261812 - DNA, 120 bp, Artificial Sequence
  ENSG00000125630_5 (sequence is synthesized)
gcggaacctgcccagcgggcctagcctaaagcacttgactgacccctcttatggaatcccgcgggaacagcaaaaggcagcgttgcaggagctgacgcgggcgcacgtggagtccttcaa

SEQ ID NO: 261813 - DNA, 120 bp, Artificial Sequence
  ENSG00000125630_6 (sequence is synthesized)
ctacgctgtgcacgagggtctcggcctcgcggtgcaggctatacctccctttgaatttgctttcaaagatgagcgtatctcttttactattctggatgctgttatcagtccacctacagt

SEQ ID NO: 261814 - DNA, 120 bp, Artificial Sequence
  ENSG00000125630_7 (sequence is synthesized)
tccaaaagggaccatctgcaaagaggccaatgtttatccagcagaatgccggggccgaaggagtacctaccgtgggaagttgacagctgatatcaactgggcagtgaatggaatctcaaa

SEQ ID NO: 261815 - DNA, 120 bp, Artificial Sequence
  ENSG00000125630_8 (sequence is synthesized)
aggaatcattaagcagtttcttggctatgttcccatcatggtgaaatccaagctttgcaacttacgtaaccttcccccacaagccctcattgagcaccatgaggaggcagaggaaatggg

SEQ ID NO: 261816 - DNA, 120 bp, Artificial Sequence
  ENSG00000125630_9 (sequence is synthesized)
gggctattttataatcaatggcattgaaaaagtcatccgaatgttgattatgcctcggagaaattttcccattgcaatgataagaccaaaatggaaaaccagagggcctggttatactca

SEQ ID NO: 261817 - DNA, 120 bp, Artificial Sequence
  ENSG00000125630_10 (sequence is synthesized)
gtatggagtttcaatgcactgtgtgagggaagaacattccgctgtcaatatgaacctccactacttggaaaatggcactgttatgttgaactttatttaccgaaaagaactgttctttct

SEQ ID NO: 261818 - DNA, 120 bp, Artificial Sequence
  ENSG00000125630_11 (sequence is synthesized)
tcctttgggatttgcacttaaggcacttgtcagcttttctgattatcagatctttcaggagctcatcaaaggaaaagaggatgattctttccttaggaactctgtttctcagatgttaag

SEQ ID NO: 261819 - DNA, 120 bp, Artificial Sequence
  ENSG00000125630_12 (sequence is synthesized)
gattgtaatggaagagggttgttcgacacaaaaacaggtccttaactacctaggtgaatgcttcagagtaaaactcaatgttcctgactggtacccaaatgagcaagctgcggagttcct

SEQ ID NO: 261820 - DNA, 120 bp, Artificial Sequence
  ENSG00000125630_13 (sequence is synthesized)
gtttaaccagtgcatctgtatccacttgaaatccaatactgaaaagttttatatgctttgtctcatgacgcgaaagctctttgctttagccaaaggagagtgcatggaggacaatcctga

SEQ ID NO: 261821 - DNA, 120 bp, Artificial Sequence
  ENSG00000125630_14 (sequence is synthesized)
tagtttggtgaaccaggaagtcctcacaccgggtcagctcttccttatgttcctgaaggaaaaactggaaggttggttagtgtctattaaaatagcttttgataagaaggctcagaagac

SEQ ID NO: 261822 - DNA, 120 bp, Artificial Sequence
  ENSG00000125630_15 (sequence is synthesized)
cagtgtttccatgaacactgacaatttgatgaggatttttacaatgggcatagaccttacaaaaccatttgaatacctttttgctactgggaatctgcgttctaaaacaggtcttggcct

SEQ ID NO: 261823 - DNA, 120 bp, Artificial Sequence
  ENSG00000125630_16 (sequence is synthesized)
cctacaagattctggactttgtgttgtggctgacaagctgaacttcatacgctacctctcccatttccgctgcgtgcacagaggggctgattttgccaagatgaggaccaccacagtacg

SEQ ID NO: 261824 - DNA, 120 bp, Artificial Sequence
  ENSG00000125630_17 (sequence is synthesized)
caggctgctgccagagtcctggggcttcctttgtcccgtgcataccccagacggggagccctgtggcctgatgaaccacctaactgccgtatgtgaggttgtcacacagtttgtgtatac

SEQ ID NO: 261825 - DNA, 120 bp, Artificial Sequence
  ENSG00000125630_18 (sequence is synthesized)
gataaggatcttgctccaggcatcgcagattctcttcgtcattttaaggtgttgagagagaaaagaattcctccctggatggaagtggtccttatacccatgacaggaaaaccaagtctg

SEQ ID NO: 261826 - DNA, 120 bp, Artificial Sequence
  ENSG00000125630_19 (sequence is synthesized)
tacccaggattgttcctttttaccactccttgtagactggtacggcctgtgcagaacttagcattgggcaaagaagagctaattggaactatggaacagatcttcatgaatgtcgctatc

SEQ ID NO: 261827 - DNA, 120 bp, Artificial Sequence
  ENSG00000125630_20 (sequence is synthesized)
tttgaggatgaagtttttgctggagttaccacacaccaggaactctttccacacagcctgctgagtgtgattgccaacttcatccctttctctgatcacaaccagagtccacggaacatg

SEQ ID NO: 261828 - DNA, 120 bp, Artificial Sequence
  ENSG00000125630_21 (sequence is synthesized)
taccaatgccagatgggtaagcaaactatgggctttccacttctcacttatcaagaccgatcggataacaaactgtatcgtcttcagactcctcagagtcccttggtgagaccctccatg

SEQ ID NO: 261829 - DNA, 120 bp, Artificial Sequence
  ENSG00000125630_22 (sequence is synthesized)
tatgattattatgacatggataactatccaattgggaccaatgccatcgttgctgtgatttcttacactggctatgatatggaagatgccatgattgtgaataaggcctcttgggaacga

SEQ ID NO: 261830 - DNA, 120 bp, Artificial Sequence
  ENSG00000125630_23 (sequence is synthesized)
ggctttgcccatggaagtgtctacaagtctgagttcatagacctctctgaaaaaattaaacaaggagatagtagcctggtgtttggcatcaaacctggtgacccacgcgttctgcagaag

SEQ ID NO: 261831 - DNA, 120 bp, Artificial Sequence
  ENSG00000125630_24 (sequence is synthesized)
ttagatgacgatggattgccgtttataggagcaaaactgcagtacggagatccgtattacagctacctcaacctcaacaccggggaaagttttgtgatgtactataagagtaaagaaaat

SEQ ID NO: 261832 - DNA, 120 bp, Artificial Sequence
  ENSG00000125630_25 (sequence is synthesized)
tgtgttgtggataacatcaaagtgtgcagtaatgacactgggagtggaaaattcaagtgtgtttgcatcactatgagagtgcctcggaacccaactatcggagataaatttgccagtcgc

SEQ ID NO: 261833 - DNA, 120 bp, Artificial Sequence
  ENSG00000125630_26 (sequence is synthesized)
catgggcagaagggcattttaagcagattgtggccggctgaggacatgccttttactgagagtgggatggtcccagacattctgttcaatccccatggttttccatcccgcatgaccatt
